United States Patent Application Publication US 2005/0228172 A9 - sequence listing, part 28

SEQ ID NO: 89323 - DNA, 791 bp, Homo sapiens
ccattttctcttctcctttatattgagttatctattcaaagcaaagccatctcctggaactgcccggatgggatcctgtctcccatcaaagctgcagagtctttctctggcccagctagttgtgtctgttaaaactttaactgccacagcctttgggggtggctcagcctggtggttagggatgtggtttgctgattacagcgaggcctgagctggctgcacagactacctgtaacacagacagcctcggtgagtaaaatgagcatgggctctggagtcacactgcttcagttcaccatctggctacactgttgactggcagtgggacagcagcgggcaagttaacctctctgagactcagtgtccccatctgtaaaatggggatatggattgtagcatcytcttcatagggctattaaggggattaaaaaatattaagaggcatgtgaagcacttagcacgtggacatattcaaggaagttccctgtcatagcaaccagtaaaattccaccagattctcgggaagctgagatcatggaaacatagaagtttccagagatgccacaggaagcaaagggaaggggaaggatcccctaactttgcacttccttctgtccaccagtctttcattagcgcccttcagtggccaaacccatctggaagccagaaagagagcctgatctttttttttttaagttctgggatacaggtgtagaacgtgcaggtctgctacacgtgccatggtggtttactgcacctatcaacctgtcatctaggttttaagccccaca

SEQ ID NO: 89324 - DNA, 1009 bp, Homo sapiens
tgttaaacaacaaaggcattgaggctgtatcttgttactagtaaaaagcatgtccaatgctcaattgcaaagattctctgaaatatctacacatcttctactgtgtaaaacacccaggtatggccaaccatgatgttggtttgtggcttatttggagcagatcttgaagaatatttttaacagtctatttaaaaccagctgccccatctgaccctggctataaaggcatcttccatcaaattgtgggttctggagggacactgtccatgggcaggactgggttctgttctatgcggtgggcactcaggtgggaggggcaggaaagggagtcagttgctattcccctgtggtttcagcccacacagttctctatttaccatgagcccatcttatctacagcgcatgtatagatctggagatgcagaatccctgcacagatacaccctgatccccgaccatcccgatttcacccgagctcgcctcaatgcgctgcatctgagtgacgtaagtgaactggtggttcatggaacgtgtgcccacttttgtaaaatgatctgtgcccaatgtggatttcgtttttttwaaaaaaaaagttctaggaaggaggacttggaacagaaaggacactgaactgagaaactgtttgtgtgactttcagtcactttcctcagtggtcctcgtttttgttttttttatctgcaaaatggtaatgggctgagctaaactgagattctttccagctctagaattctgacttgggtatggctccaaagatctcagtgatgtgctgggtaaccatgaggggagtggtcccctggccctagtgggtgtagacacctgctctttttgtttcctggacccctctctgtagtcattcagagtagtgtcactggagatagagtggctctatctcaccccacagtttggaaagatgctgcaatggtagcccatcccgtccaaatgcagctcgctcctttgtgcatgggactgtggcctccaacactttcgt

SEQ ID NO: 89325 - DNA, 519 bp, Homo sapiens
gctttggagtaatagtcccatcaatggacagtggtcatttcccagcctttaattatttctgttcatttgcttatggctatggctctgcattgatttttctttcttctttttgagacagtcttttatttttatttttattttttgagacagagtctctgtcacccaggctggagtgcagtggcacaatctcagctcactgcaacctccgcctcccgggttcaagtgattctcctgcctcagcctcctgagtagctggggttacaggygtgcaccaccatgcctggctaatttttgtatttgtagtagagacagggtttcaccattttggccaggctggtcttgaactcctgacctcaagtgatctgcccgccttggcctcccaaagtgctgagattacaggcatgaaccaccgcacccagcctgcactgatttttacaaaaatcaatttgcccatgtgagaattggcatccctgccttgccttgacattttaagcagcacacaattagaagaaaaagcac

SEQ ID NO: 89326 - DNA, 737 bp, Homo sapiens
aaatgattaggaactctgtgtcaggaaattacaagggtcttagaagctctgtgccaggaactgagagcagaaaatgtgtgtgtgtgtgtgtgtgtgtgtgtgtgtgtgtgtgtgtgtgtgtacctatattattatttattcttttttgtaaacctgagatcttgctatgtggctcaggctggacttctgggctcaagcgatcctccctctcagcctcatgagtagctgggactacaagcatgtgccaccatgcctggatcaaatacatrtatttttattatgtacactgcctcttccatttgcctcatggtagacagagtgatcttttaaaaatgcagccagttcttgtggcttcttctccttagaataaaaccctaattccttgctacataatctggccctgcctcactcctggatctcatctctcactagccccactcctgccttttccccacactctagtcccaagctccttcctgctttagggtttctgtattctctggtccttcctttgcctggaatactctgcccatgcatccccccactaccaccctcagctctttgcaaggctagcttcttcccccactctggtcttgatccagataccaccttttccaatttcctgaccaccttgtcccctttctctccacaactcgctctcggccactagccaacccattggcagattttgttttcttcatagcactcatcactatctgaaattgtctttgttcatt

SEQ ID NO: 89327 - DNA, 462 bp, Homo sapiens
gcaacctccgcctcccaggttcaagcgattctcctgcctcagcctcgagcagctgggactacaggtgtgggccaccatgcctggctamttttttttgtatttctagtagagaccgggtttcaccatgctggcaggctggtctcaaactcctgacctcagttgaaccactcaccttggcctcccaaagtgttagaattacaggtgtgagccaccacacctggccctcctctcactttagagagtagccattcagctttgaagtgtaacttgtggtgagctgtcttctgcctcccctttttgcgttgggaactactgtatggccacaaaaatgagtgcagaggtgaggatgcttgtccagccgtgccatctttggaaagggttgaacattcagttgctaaactgcagccaactgaatcagataatcttttgttgagctctttcaaatgtaacatttcaaacttg

SEQ ID NO: 89328 - DNA, 599 bp, Homo sapiens
aaggaaattagccactcacagcaccaacaccaaaacctgtaaggaaataaggtactgtgtgtgagaatcagcagctccagagagctgaaacaagtcctcagaaagaacttgaaaatatgagctagaaaatagatttcacataatgaccatgaagatatttaaaaaccaaatagaactgctaagatttaaaaagcaataaagaaaaatgaaaactcagtggatggattaaccagcagattagataaggctagagagaaatttaatgaacttgaagataggccaaaaatatttttcagaatgcagtttagaaagataaaggaaaacaaaacatgaaagatggaatagaaaacagaggctaaaatgatargctatagcacagtactttcttaacaaaaagtaccagcaggagacagggagaatgggtcatattttaaaagattctaagaatttttttagaattgtggaaggacaccggttttcaggtccaaggaactaaacgagttccaaaatgagcatatgaaaggcttgttatgtaagaaagaaagataagcaaagaaattggtgaatatgtacacctataatacaaagcaatattaata

SEQ ID NO: 89329 - DNA, 1715 bp, Homo sapiens
aagatgggcagctgctagcaggccctgggactgtccacccaggcctgagaagaacttggaggtggctgagggcatcagcagtctgctaccgttccccactccaggctccaggacattgcgtcaagtcacttcacaatcttttcttctgggtccagacagcttcagaatcctcactgtggggccctgggtagctacccatcatcgggtcaccattcaaaatgaaattcatttgctattgtagtgaagatccatggacccatgggtcagacccaaaatccccaccttccagcactgggggaaaggctggaatggtgctttatacactgggaagtgctgggcacttgtcagaggctgtcatcaaactgacccctgaacaaagcccaggctctctattcacaggggctgaccttcgggcagctgggtcccaccacagaggggtctttattcatgcagtacattcctgcaggaaatagacaaagcagatggtggggctgcccaagggagacaggctgggtttatcaaagagcagcaacacctgaccatgccgacattgctccaaacacagtctgagcagaggaattccatccagatggcactggaaagaggcctccagaactggagttgccgggcgggggtttcggcagattctgcccaggccagctgttacctcccctggccggggctaaggggcctttgagtggaactgctggctgccaggcatggcggcaacagcctgtggcctcaagaacaatgctttggaagtggagacttctgacaatcaattaaaatgatcaggcatccaaaagaccagagaggaagcaggtctactgagagagccatcacctgaataagtagctgcaacctcccgaagtggggaagaagctcaaacagccaatgggaggagcagcctggcagccccaccccacacccttgttgttgctcctgctggtcagctggatgcttcaggctgaggagtttttggatttcttccctcgcctgtcttaagattcctgaaaagccaacactgagacaacartgtgagtgctaatagctgattttgcagatgattccagtggggggatgcggagagagagggagagagagagagaatccaagagtcctcaagtgaagaacccataggactcagggtgcaaactagagtgaccagtgctcaggagatatgggcagggcaccaacgatgcccgccacatcactttctccatctcctcttccctttctcctttttttctctcttgttttcttcctttccccctctagattcttactgtgcctcatgtttctcaccttttccttgtggagcctgggatccagtgtttcttaaagtgaggtcccctgactagccaggagtcttggtataaatgtagaccccagggccctgctccagccctagtaaatcagaatctttggttgtggtccatttagataaaattccccagtgcttctgatgcatgtggatgttgctagtctaacccccctgcatcatggacacagcagggatttgcaggttctggaatcccaggttctgcccttgcccccacctgtccacctgcctccttgggcttggatgctaccagctgaccaccttgcttccctgaagtcttcttcttcttcttcttcttcttcttttttctttggagacagagtctcacactgtcacccaggctggagtgcagtggcgccatctcggctcactg

SEQ ID NO: 89330 - DNA, 1715 bp, Homo sapiens
aagatgggcagctgctagcaggccctgggactgtccacccaggcctgagaagaacttggaggtggctgagggcatcagcagtctgctaccgttccccactccaggctccaggacattgcgtcaagtcacttcacaatcttttcttctgggtccagacagcttcagaatcctcactgtggggccctgggtagctacccatcatcgggtcaccattcaaaatgaaattcatttgctattgtagtgaagatccatggacccatgggtcagacccaaaatccccaccttccagcactgggggaaaggctggaatggtgctttatacactgggaagtgctgggcacttgtcagaggctgtcatcaaactgacccctgaacaaagcccaggctctctattcacaggggctgaccttcgggcagctgggtcccaccacagaggggtctttattcatgcagtacattcctgcaggaaatagacaaagcagatggtggggctgcccaagggagacaggctgggtttatcaaagagcagcaacacctgaccatgccgacattgctccaaacacagtctgagcagaggaattccatccagatggcactggaaagaggcctccagaactggagttgccgggcgggggtttcggcagattctgcccaggccagctgttacctcccctggccggggctaaggggcctttgagtggaactgctggctgccaggcatggcggcaacagcctgtggcctcaagaacaatgctttggaagtggagacttctgacaatcaattaaaatgatcaggcatccaaaagaccagagaggaagcaggtctactgagagagccatcacctgaataagtagctgcaacctcccgaagtggggaagaagctcaaacagccaatgggaggagcagcctggcagccccaccccacacccttgttgttgctcctgctggtcagctggatgcttcaggctgaggagtttttggatttcttccctcgcctgtcttaagattcctgaaaagccaacactgagacaacaatgtgagtgctaatagctgattttgcagatgattccagtggggggatgcggagagagagggagagaragagagaatccaagagtcctcaagtgaagaacccataggactcagggtgcaaactagagtgaccagtgctcaggagatatgggcagggcaccaacgatgcccgccacatcactttctccatctcctcttccctttctcctttttttctctcttgttttcttcctttccccctctagattcttactgtgcctcatgtttctcaccttttccttgtggagcctgggatccagtgtttcttaaagtgaggtcccctgactagccaggagtcttggtataaatgtagaccccagggccctgctccagccctagtaaatcagaatctttggttgtggtccatttagataaaattccccagtgcttctgatgcatgtggatgttgctagtctaacccccctgcatcatggacacagcagggatttgcaggttctggaatcccaggttctgcccttgcccccacctgtccacctgcctccttgggcttggatgctaccagctgaccaccttgcttccctgaagtcttcttcttcttcttcttcttcttcttttttctttggagacagagtctcacactgtcacccaggctggagtgcagtggcgccatctcggctcactg

SEQ ID NO: 89331 - DNA, 1095 bp, Homo sapiens
tttatctctacctggcaacttcagataagtcttggaatttactcttacgaaataaaattgggtcccaggagatgtaattgcattatttggtggatcttaggccatgtatctatcagtgaatccattgggtgaaaaagtttaatgttccattaaatgtaacttttgtcacatgcttcatccttgggctgcccgttggagccccaacctaacacctggaccagaggagcaagatgcttgtttcytcaaagcaaagccactattaatgtagaaaaggaaaatggatgttgaggtggcaggaacaacctattagcctacaaactgatgcttttgaaatcaaatgttggcttatgctgctgaaaaaaaattctcattattgtaagcaatcagatacgaatgtagatgtgaagatctggaacataactctgtgtgcacatccattttcattgctataaaagaatacctaagcctgggtaactcataataaaaagaggtttatttggcttatggttctgcaggctgtacaggaagcatggggctggaatctgcttcttgtaagggcctcaggaagcttccaatcatggtggatgttgaagggtagccagtgtgtcacacggagtgagagagaaatgtaacctttgtcacatgattcatccttgggctgccgttggagccccaccctaacacctggaccagaggagcaagagagagaggggagatgcacgctctttttaaacaaccaaataacacacgaactcagagtgagaactcattcattactgtgagaaaggcaccaaatcactcatgagggatccacctctatgacccaaacaccttccactaggcccaccttcaacattagaggtcatattttaacataagattttgagaggacaaaacatctaagtcatattgttctgtccctggcccctcaaatgtcatgttctcctcacattgaaaaatacagctattccttcccgatagttccccaatgtcttaactcattccagcatcattcagaagtccaaagtctcatgtgagactcaaggtaaattccttccacctatgagcctgtaaaatcaaaaataagtgatttag

SEQ ID NO: 89332 - DNA, 824 bp, Homo sapiens
cacctattccaaaactgaccacatagttggaagtaaagctctcctcagcaaatgtaaaagaacagaaattataacaaactgtctctcagaccacagtgcaatcaaactagaactcaggattaagaaactcactcaaaaccgctcagctacatggaaactgaacaacctgctcctaaatgactactgggtacataacgaaatgaaggcagaaataaggatgttctttgaaaccaatgagaacaaagacacaacataccagaatctctgggacacattcaaagcagtgtgtagagcgaaatttatagcactaaatgcccacaagagaaagcaggaaagatccaaaattgacaccctaacatcacaattaaaagaactagaaaagcaagagcaaacacattcaaaagctagcagaaggcaakaaataactaagatcagagcagaactgaaggaaatagagacacaaaaattttgttttcatttcatttgagttttctttttattctttttcatgttatttacatactttattttaaataatatttaaatattgctaggatgagtagaaattgagaagcagaaagttattactgttgtatgcaatttgtttccagtatttcaacagtgaaatctgtaaaacacattcattaactcactgctaatgtacaaaatggaaagttttctatttatacaatgaaagtcttttaggatattttcctcaagtaaggagagaggagatctttttatagtaatttgtcactatcatttcctttctctaaatactttaaaaaataaccagtcaccagttgagagtaaatgctcaccaa

SEQ ID NO: 89333 - DNA, 824 bp, Homo sapiens
cacctattccaaaactgaccacatagttggaagtaaagctctcctcagcaaatgtaaaagaacagaaattataacaaactgtctctcagaccacagtgcaatcaaactagaactcaggattaagaaactcactcaaaaccgctcagctacatggaaactgaacaacctgctcctaaatgactactgggtacataacgaaatgaaggcagaaataaggatgttctttgaaaccaatgagaacaaagacacaacataccagaatctctgggacacattcaaagcagtgtgtagagcgaaatttatagcactaaatgcccacaagagaaagcaggaaagatccaaaattgacaccctaacatcacaattaaaagaactagaaaagcaagagcaaacacattcaaaagctagcagaaggcaataaataactaagatcagagcagaactgaaggaaatagagacacaaaaattttgttttcatttcatttgagttttctttttattctttttcatgttatttacatactttattttaaataatatttaaatattgctaggatgagtagaaattgagaagcagaaagttattactgttgtatgcaatttgtttccagtatttcaacagtgaaatctgtaaaacacattcattaactcactgctaatgtacaaaatggaaarttttctatttatacaatgaaagtcttttaggatattttcctcaagtaaggagagaggagatctttttatagtaatttgtcactatcatttcctttctctaaatactttaaaaaataaccagtcaccagttgagagtaaatgctcaccaa

SEQ ID NO: 89334 - DNA, 547 bp, Homo sapiens
atttacacaaaggaatactattttgtccacacaaaagaatgaaaccatggtatgcaacaatatggggttttcagagaactagaagtcattgtgttaagtgaaataagctagacatagaaagacaaatatcacatgtagttattcatatacgggagctaaaaatgtagatttcgtggaggttgagagtatgatgatagttaccacaagccaggaagaatgtggatatgtggaggggggataaagagaggttggttaatgggtacaaacacacagttagatagaatgaatatgttctagtgtttcatagtagagtagggtgactatagctaacaacaatacattgmacatttcaaaatagctggaagtgaggacttgaaatgttcgcaatgcatagaaatgataaatgctcatggcgattgatatcatgacttgacttgatcatcacacattgtatacatgtcacaaaatgtcaaatgtaccccatgtgtatgtactattacgtatcaataaaatattttttaaattacagatttttagatgttaatat

SEQ ID NO: 89335 - DNA, 750 bp, Homo sapiens
acccaccttggcctcccaaattgctgggattacaggtgtgagccactgcacctagcctgaaacttgtctttttatagataaatgaatacttagtgtcgtgagaagacctgtttcatgtgtaaatagctaagtatgcacatgaggcactacttccactttattgcaggggtcagtgctagtttttgcttttcttcttaaagcactaggatttttaattgaatgtaccttagctctgagtttgatttgcagaagcgtataaaccatatatatatatatatatatatatatatatatatatatatatatatatatatatagcaaatagtctygtgattcagcctggatgttataatgtactacgtaaattataaaagccatgtacagaagagagtgaggcagtattggtttgttccgttcattactgagctgagttaggtcttgctggttttctttttccgaatctgtttcatcattcataaaatgaatgagtggatgtctgatcagcttctaatgtcagtatctgtgtctctcattttgtgaaagagacccattccatttttttacattagacatctaagaaatattaagttagaaaatactaaataatgtttaacattccagtgacattaaatgtattttaaaacttctttcaaaattcaaaaaagggggtacaataggcaacaggaatctaataactgaggtttactgaattatgaaaaattattctctgtaaaaattcacaagttgaac

SEQ ID NO: 89336 - DNA, 673 bp, Homo sapiens
agggaatatcagagcaacatcagggcctaggtcatatagagccctgtggttctggtaaggattttggatttgctctgagtaagatgagaagcctttggagggttaggagcaagaaatggcatgatctgatttatattttaaaatgatcacactggctagtatggagagaaaagactataggtgataagggtggaagcagaggtgctactgcaataatttagggctgtagtagtgtgggtggggaggtgatgaaagattgcttgattgtggatctattttaaagtcacaagaacctaagagtagggatttgatctgctttattctcttctgtatctgaagcttccagaacagtaccaggamcacagtgggggctaataattatttttaaaatactaagtgaagacaatggctggcagattagatatagggagtaacagaaaaaatggagtcaaggagagtttcaattggcctgcacgacacaaaagtggagataacacttgttgagataatgaaaattgaggaggaacaggttttggggtaggaacggagtttggttttggccatggtaagcagggaggtaggtctcaaattcaggggtcaggtcagattagagataaacatttggaggtcttcaaaatgcaaatatattcatataaaactgtaagactggatg

SEQ ID NO: 89337 - DNA, 615 bp, Homo sapiens
catgaactttcttattttcagcaaactccctcatagccactcagtgtcagaatgcggattgtgtgtttatctttcctaaagaagtaagaggtagtcgccttgctcttcccctccatcccccgacatcacctctgctccacttgctatccattttcttaaatagaagattcagggggaatccctggagtaggttataataggttgtcagaagaaatgcttctattttaaaagaaaaagcagtgagaaaaagaaattttcgttagctctatcatattccttctgagaagctgctgctttgaaggcaaatctactcctcctactgccttcacatgtttctaggagatagttgtgtgagaaaaccctctgtactaagaatttttctattctggagatatttttcatgaggagtggtcaacccaaccccctgtagagtaaatgagacaaggggcctgtaccagaacactcttatgagaygtggcatttaagatccagtaaaataggagataatataggagatacagaagccctcctggtcatacaccataaatgatgatgagattttgaattgtctgtgttctcacctgccttgcagctgcagtattagaagcccaggat

SEQ ID NO: 89338 - DNA, 1267 bp, Homo sapiens
tgcatcttaaatgtgtccaagagggaggtttactgatttacatgtgggataaagacaggaacattaacggttaaaatttcgcatccagcaaagaacttttggcttaacaggtggtaccttaagctttatatgtttcacagtgttcaagaatgttcacgtattttatctcatttgaccctcactgtggatttggaaggttggcagagcaagtgttatttccattatacacatgaagaaattgagctcttgcataagtaaattgtagcactaagattataactatgggcaagttatcctcgctcttcactgtgtgatgagccaacctggacaactgatgtgtgtgtgtgtgtatgtgcatgtgtgtgkgtgtgtgttgaggtggggggtgttccatctgtcgggcatgtcaatctgtttattttatcctcttatctttctttatcacccttagagaaagataaatgaaagccactgtcttcctagagcaggcatgtttggtagctggaagccgttcgtgttcttggggatgcctggaaaagcccaggaagcagtaagatgggtgaggaagcaacgcagccagaggtgtgattggtggcgtgggctcttcgcctcctcctctgttttgcctgcagattgaacagttttgtgagtctgggtggtgtttgggtctgtgtggagcctggttcctatgaccgtaaggggacccttggctaacaagagcttttgttaccactgggggggtggttaatagatatgtgggttttttttaaaaggataattctaccgtgcaattgtgtagcctctttattacacattagggaagaataatccctgaattttttttttttttttttttttgagacagagtcttgctctgttacctgggctgcagtgcaatgacacgatctctgctcaatataatctccacctcctggattcaagtgatactcgtgcctttgcctcccaaacagctaggattacaggcgcctgccaccacacccagctaatttttgtatttttagtagagatggggtttcatcatgttggccaggctggtctcgaactcctgacctcaagtgatccacccgcctctgcctcccaaagtgctgggattacaggcatgagccaccgcacgggcccctgaatttcttaaatcaaagttttactataatatatttaagggcagtgactggaccctatttatctttgtatgttgcagagtatttccatatcctaggttataattatttgctgaacaaatgagatg

SEQ ID NO: 89339 - DNA, 1174 bp, Homo sapiens
gcttaccaaatacgtgactgcaatgtgaattaccgctttacttataattgcctaaaactagaaacaactcaaatgaccatcaataaaataggcaaattaactgtggtatattcacacaatggatatctaaataatacaaaaacagaattaagaatgaataagctcaactgtatgcaagcaacagtagtataaatcttacaaaattaacattgagtaaaaaaagtcaggcacaaggagcacagtatttatcattctattcatattaaagtataaaaataagcaaaaataaactctgttagatgtccaggtagtggttactcccacagggcaactaacgggaaggtgatttttctgggtgctaatgatgttctgtttccaaatttaggtaatgattttataggtatgttcagtttgtgaaaaaaactttaaaaatatgtatatgagtatactgcttagtgctttatatatatagaaacacataaaacaagtatactgcttagtgcttttctatatatatctatatacacattatgcttcaacaaaagattttaaaattttaattatagaaaccacaaaacatcatcacttacatcttctaatgaataagtactataaaatctaaaattgcccattttaatcccaatttttggccaatcaaatggaaactgaaagactaaaaaaggatgtatgagtagaaaagaacatgtaaagaaaaataagagaaaacaaacaagaaaagaagaagacagaaatcaacaaggcaaagagaaaagttgagaaaggaaagaagtggtattaggctgacgaattgggaggataccatgttggacaggatgcagccttaacatcagaaatgtttattggctgctgaccatttatagctttcaacaactgagtcctaaccatttagaggatgtaaactcaatggtttaaagaagaaatcctctatgacccaatagcaactacaaagtcagtatcattttagagttgaatttaaagtatgwcaagaatcagagaaggtcaggcatggtggctcatgcctgtaaccccagcattttgggaggctgaggcaggtggatcacttgaggtcatgagttcgagaccagcttggccaacatggtgaaaccccgtctctactaacaatacaaaaattagccgggtatggtggcatgca

SEQ ID NO: 89340 - DNA, 837 bp, Homo sapiens
tccaggctggtcttgaactcctgaccttgtgatccaccctcctycgcttcccaaagtgtgggatcactgtgcctggccaaagtctgcactcttaaccatttgctattctgccttaagtcatagtgctccattcacactggcggtcaaatgtgtattttagagctggtggtcaggaagtcgaaagggaggggcctctggtctacagactttcttgtcacaaatgcacataaaggtcagcccctggttgacagcaaggagagtggtgtggagctttactttcttgtcctgcaggcaagctgcatggataaaaatctccaaagacagcatgggattgggggctttggggttgtatttaattttttggtttgtttaaaccttgcctcattccaaaaggacttctaaaaatacacatgatctgagagagaggaaaaagtaaagataaagcatggtcatctagaggaagggaagaatagtaagatgaaacaagaggaaaagctagcttacagacagacctgcatgtgtagtaaggtcactgtagatttggctctcagctgcaagcagagagaaaaatctcaagattcatagtgctcataaaattaaaatgtgtcacttactctgaaaagtagttattttaatggcattgagatctgagacagattttcctgtgggttctcttaaagtattggagtggcctggatatctctagcagaaatacaagacagaacatcctagccatgtttcttacagcttctttcagagcaagatttgggcaaaacagcatggctcaattcagtagacaatactaaaaggaaaggagctaggtgagtaaggacaaag

SEQ ID NO: 89341 - DNA, 827 bp, Homo sapiens
gtccacatttgtctaactaaataagggctaagcttctttcagagaagtcaaggaaatttggtatgtgcacagagaactgtgaaccagataattttctctgaataaagggaaggccgtttacccagtgtaacagtttgtgaaaaatggtattgctccacacagaaagcaagaatttaaatgcacacgtcagccctcttcacagattgcttatctgtttctcagtgttaacagttgctgtaggtgtttagtttagggcaacgagttgaagagatttagcaactgcaaatcaattaaacaagttaytggtgtgactgctgtggcccccctttttttttttttgagatggagtcttgctctgtcgcccaggctggagtgcagtggcgcgatttcggctcactgcaacctccgcctcccgggttcacgccattctcctgcctcagcctcctgagtggctgggactgcaggcgcccgccaccacgcctggctaatttttggtatttttagtagagtcagggtttcaccgtgttagccaggatggtctcgatctcctgacctccgtgatccacccgcctcggcctcccaaagtgctgggattacaggcgtgagccaccgcgcctggacatgccccctcctttttattcttccagtcatttaccactttatgtctgtgcatctgtaggatttttagaaagccacaaggcaaatttctcagcttacatttgggattagagttgggggatggttttatatttgtgcattttgattggcatggaatttaaaagtctttagcatcccttataattggataagctattttggttttatat

SEQ ID NO: 89342 - DNA, 827 bp, Homo sapiens
gtccacatttgtctaactaaataagggctaagcttctttcagagaagtcaaggaaatttggtatgtgcacagagaactgtgaaccagataattttctctgaataaagggaaggccgtttacccagtgtaacagtttgtgaaaaatggtattgctccacacagaaagcaagaatttaaatgcacacgtcagccctcttcacagattgcttatctgtttctcagtgttaacagttgctgtaggtgtttagtttagggcaacgagttgaagagatttagcaactgcaaatcaattaaacaagttattggtgtgactgctgtggccccccyttttttttttttgagatggagtcttgctctgtcgcccaggctggagtgcagtggcgcgatttcggctcactgcaacctccgcctcccgggttcacgccattctcctgcctcagcctcctgagtggctgggactgcaggcgcccgccaccacgcctggctaatttttggtatttttagtagagtcagggtttcaccgtgttagccaggatggtctcgatctcctgacctccgtgatccacccgcctcggcctcccaaagtgctgggattacaggcgtgagccaccgcgcctggacatgccccctcctttttattcttccagtcatttaccactttatgtctgtgcatctgtaggatttttagaaagccacaaggcaaatttctcagcttacatttgggattagagttgggggatggttttatatttgtgcattttgattggcatggaatttaaaagtctttagcatcccttataattggataagctattttggttttatat

SEQ ID NO: 89343 - DNA, 827 bp, Homo sapiens
gtccacatttgtctaactaaataagggctaagcttctttcagagaagtcaaggaaatttggtatgtgcacagagaactgtgaaccagataattttctctgaataaagggaaggccgtttacccagtgtaacagtttgtgaaaaatggtattgctccacacagaaagcaagaatttaaatgcacacgtcagccctcttcacagattgcttatctgtttctcagtgttaacagttgctgtaggtgtttagtttagggcaacgagttgaagagatttagcaactgcaaatcaattaaacaagttattggtgtgactgctgtggcccccctttttttttttttgagatggagtcttgctctgtcgcccaggctggagtgcagtggcgcgatttcggctcactgcaacctccgcctcccgggttcacgccattctcctgcctcagcctcctgagtggctgggactgcaggcgcccgccaccacgcctggctaatttttggtwtttttagtagagtcagggtttcaccgtgttagccaggatggtctcgatctcctgacctccgtgatccacccgcctcggcctcccaaagtgctgggattacaggcgtgagccaccgcgcctggacatgccccctcctttttattcttccagtcatttaccactttatgtctgtgcatctgtaggatttttagaaagccacaaggcaaatttctcagcttacatttgggattagagttgggggatggttttatatttgtgcattttgattggcatggaatttaaaagtctttagcatcccttataattggataagctattttggttttatat

SEQ ID NO: 89344 - DNA, 710 bp, Homo sapiens
ggatccaaagtagcaatatggattcaacataaagtagaggggccaactggagyatacacaccctgcctctctggtcccagcagactgccgtgtaggcatggaggctctgtgttgccagatcctccaatgctcaagagataccacaaaccagattttactttgacagaattactgtgagatcttctggtatttttaaatttctgagagtaaattaaaataaaataaacacataaacacacacacacaaaccacaaaagccctttgtagcctaacactatgtaagctgaatatcacactcctgtggcccatagcctgctaatgcacagcctctgatatagatgataagtgctataagattcagaggcagggccaggcgtggtggctcacacctgtaatcccagcacattgggaggccgaggcgggcagatcgcctgaggtcaggagttcaagaccagcctgaccaacatgatgaaacctcttctctactaaaaatacaaaaattagctgggcatggggcaggcgcctataatcccagctacttgggaggctgaggcaggagaatggcttgagcccgggaggtggaggttgcagtgagtcgagattgcgccactgcactccagcctgggcaactgagtgggaatctgtttcaaaaaaaaaaaaagattcagaggtgggagaaattctgtccagccactatgtccactaaaagc

SEQ ID NO: 89345 - DNA, 601 bp, Homo sapiens
aggaaaaaaaaaaaaaccaaccacaggtagacgtaagggcaagtctgacactaataacataagaaagcagtaggaagaaaaaaagcaccttgcttttttggatgtagaggatggactctgcctttggtcatataagttttggaacagccagtcagtgtactgctgtttcatcaattattcatggagcacatataccacttacgttgttatctgggaaaaaacttgatgaataaaaagaaactgttgggcaactgggaaaatatctgaaatcttttttttttttttaagatggagtcttgctctgtcgcccaggctggagtgcagtggcgtgatctctgctcactgcaagctccacctcccrggttcacaccattctcctacctcagcctcccgagtagctgggattacaggcgtgagccatcgtgcctggctgaaatcttaaaaaatattcccaaattaaattttctaattctaccattactacaactgttgctgcatctaccttgagaacactgtgataacgcatttcaaatcctcctgctgtatcaagggaaaacttaatttctcatcaacacatttctcataaacacccagatccaaa

SEQ ID NO: 89346 - DNA, 712 bp, Homo sapiens
tatttttattttctttctgagaccaggtcttgccctgtcacccaggttggagtacagtggcaccattgaggctcactgaggccttgacctcctgggctccagcgatcctcccacctcagcctcccaagtagctggaattataggcacaggccaccacacccagctattttttagattttttgtagagactgagtcttgctatgttgcttaggctggtcttgaacttctgggctcaagcgatcctcccacctctgcctccacctccaaaagtgctggaattacaagcgtgagccaccatgcccaacctcatgacttatcttttttatgaaaagggtaaataactgtttatctctgcttccagcccagaagaatttacagagactgaattatgctcccacttaaaacaactgaaaaaaataatcttaagaaatttgacatcagtcatcagagaacagtaatgtctgagacatggaaacaagtgaggtgatttccccagcttactaccttaaaaatttccaggctgcagctcagggtaaggggatgccgtcagagctatgcaaactcccaamttaaagaggtggagtgcagagtccagagagaccaaggcagctaaagttcatagaacagattaacagaaagcagagagctacagagagagagagatctacagacatctgtagagggtcccccttgagtattcgcagagtagtga

SEQ ID NO: 89347 - DNA, 801 bp, Homo sapiens
tctatattcttcgtattttcatgcttacttatagctgcatagtatttctctttatcaattatctagtttattcaaccactcttttattgatgacattgtatgtttccagtcttttgtaattactaatattgctgcaaataacagttttgacatttgacttttaaaatttttgccactgtaccttcaggataaattcctagaagtaggtaaatgcctatgtaatactattttacaccctctcagcaatgtgtaggagggctgtttccccacagccttgccaacaaagtacactgttaaattctgatttttttccaaatgtaaatggtgagaaacgatatctcagtttagttttaatttgcatctcttattttgatcaaaattgagcctctttttcacatggataggagccatttgcttgtgtttctctgtgaatgctgtgctcacatctctagtccatctctcctgaattgttggcctatttcttccctacttaagcacccctttatatgttagaaaaatcaactctttatctgtattttaaggtgcaagaatttygccctcagcttgtcacccgtatttatctactttatggtgattttttggccatacaacatttttaacataatcaaacgtatcgatcttattccttattgcatctaaattttgagtgttttagaaagtttcctctattcccatggtacagagctattagcccattttttcttctagtatatgtagagttttcattttttacaatcaatctctgaattgaacctggtatatgaaaaaggaatggatccc

SEQ ID NO: 89348 - DNA, 801 bp, Homo sapiens
tctatattcttcgtattttcatgcttacttatagctgcatagtatttctctttatcaattatctagtttattcaaccactcttttattgatgacattgtatgtttccagtcttttgtaattactaatattgctgcaaataacagttttgacatttgacttttaaaatttttgccactgtaccttcaggataaattcctagaagtaggtaaatgcctatgtaatactattttacaccctctcagcaatgtgtaggagggctgtttccccacagccttgccaacaaagtacactgttaaattctgatttttttccaaatgtaaatggtgagaaacgatatctcagtttagttttaatttgcatctcttattttgatcaaaattgagcctctttttcacatggataggagccatttgcttgtgtttctctgtgaatgctgtgctcacatctctagtccatctctcctgaattgttggcctatttcttccctacttaagcacccctttatatgttagaaaaatcaactctttatctgtattttaaggtgcaagaatttcgccctcagcttgtyacccgtatttatctactttatggtgattttttggccatacaacatttttaacataatcaaacgtatcgatcttattccttattgcatctaaattttgagtgttttagaaagtttcctctattcccatggtacagagctattagcccattttttcttctagtatatgtagagttttcattttttacaatcaatctctgaattgaacctggtatatgaaaaaggaatggatccc

SEQ ID NO: 89349 - DNA, 1000 bp, Homo sapiens
gcattgctctaacctaaatagtcctttaacccagcctggcttgtgctctttattctttctgcctttatgattcctaattgggaaatatgcttcaatcttctcactcacattctcaaaagcatttgggtcagcctcttcccttcctctcaaggtttctcattaaatactcttgtgatttgtggcctatgagtccaacttcaattttaaccaagggtaaattttaaaaaaatatttttagttctcattaccagttgtgataattgctaggaaagaaagaaggctgagagaaatggcagcagatgtgataggagcagtgggtgcttagcatgatgagaacacctttctgwaaatgtgactttcaaactttgaaataaaaaacgaaaagaacccaaatatacaaagggccaggatggggttatgggcgtagaacagcatttcaagcaaaaggaacagcacatcaaaaggcctgagaacaagtgtctcagcagagttgattttacaaagtcagccatattgtgaatgtgaaggacaactatacataatcaggatcacacacacacacacacacacacacacacagacacacacacaaagtccagcacaaagtatcctaacactttttttggatggtactagaatgtaagctccacaaaactagtaacctctctttacaactgcttgtaaaaaatatcttgatgttatttttatttggtaattttgactccatttattttcaaaagtaaaagaaatcattttgcatttttttcacttttcattattctgtttatgttattattattttttttttttttttttgcataatcttatgaggtaaaaattatcctagcttccaggagagaaaactaaggttcaggcaggttccaataaatcttctaaggtcacaaactcgtaaatggggacatctgacctggttgattgaactccctcgccagcctagtcctcataaaacaggggttaaaatggtgggaagcaattaaca

SEQ ID NO: 89350 - DNA, 1000 bp, Homo sapiens
gcattgctctaacctaaatagtcctttaacccagcctggcttgtgctctttattctttctgcctttatgattcctaattgggaaatatgcttcaatcttctcactcacattctcaaaagcatttgggtcagcctcttcccttcctctcaaggtttctcattaaatactcttgtgatttgtggcctatgagtccaacttcaattttaaccaagggtaaattttaaaaaaatatttttagttctcattaccagttgtgataattgctaggaaagaaagaaggctgagagaaatggcagcagatgtgataggagcagtgggtgcttagcatgatgagaacacctttctgtaaatgtgactttcaaactttgaaataaaaaacgaaaagaacccaaatatacaaagggccaggatggggttatgggcgtagaacagcatttcaagcaaaaggaacagcacatcaaaaggcctgagaacaagtgtctcagcagagttgattttacaaagtcagccatattgtgaatgtgaaggacaactatacataatcaggatcacacacacacacacacacacacacacacagacacacacacaaagtccagcacaaagtatcctaacactttttttggatggtactagaatgtaagctccacaaaactagtaacctctctttacaactgcttgtaaaaaatatcttgatgttatttttatttggtaattttgactccatttattttcaaaagtaaaagaaatcattttgcatttttttcacttttcattattctgtttatgttattattattwtttttttttttttttgcataatcttatgaggtaaaaattatcctagcttccaggagagaaaactaaggttcaggcaggttccaataaatcttctaaggtcacaaactcgtaaatggggacatctgacctggttgattgaactccctcgccagcctagtcctcataaaacaggggttaaaatggtgggaagcaattaaca

SEQ ID NO: 89351 - DNA, 1146 bp, Homo sapiens
tacttgtacactgttttaaagtctattaaaattgtcatttgacttttttctgttaacttacattgtttaaggtatataatttttaagtcttacagaatttgtacagcttcgaatgctatagtattagatgctttctttctcatactacatttcttcatttggtttattacattagtctcaccagaccagtacttgcaaaaccctgatggtgctgatcgtagcaggtgatgcatcaccaccaagcatttcaaaaactatttcagccattctaggctagaggcctgagcaagtaaaacatggagaaaaggcagggcagggcctaagaaggatgtgacatgtcctatgataaaggaccaggagtttgggatttgagagagaacaggaagtggtggatagtgaaaatccatctgatgcaaaggctgggttaactgaaaatctgttctgggatgctaggtctttcaagtctgaagactgcagaccacatttggtatcaaytttctgaggctgacctgagaacctacttaagccattaaaggttttgagggcgaaagtattactgaagaggccagcagtgtaccccttaaaatgtatgtgtaacttggtcgggtgcagtggctcacgcctgtaatcccagcactctgggaggcctacacgggcggaccacctgaggtcaggagttcaagaccagcctggccaacatggcgaaaccccgtttttactaaaaatacaaaaattagtcgggtgtggtggcggcacctgtagtcccagctatttgggaggctgaggctggagaatcgcttcaacccaggaggtggaggctgcagtgagccaagatcgcgccactgcactccagcctggtgacagagcaagactccgtctcaaagaacaaaaaagtatatgtaatgaataaagctttagcaatttcctgttcccagttctgcctccctccccagcaaactttctaggtagacctgtcctgtatattgttagcactagagaaattacctgtaagatgatatcctcaaaatattacaaaattaaggaacattctatatatgcacaaattgaagaagtcaggtagttgatacttttaaaggtacatagtcaatttaagtggtcaaaaggtatttggcaaaacctaattta

SEQ ID NO: 89352 - DNA, 661 bp, Homo sapiens
atccttgtctgtttcctgttctaatctcaggggtactcactacatgatgagtaacacaagaggatgagatgaatcactgcaccaacgtagtttaatttttagtttaatttttgtggtcagtgctttactggcttgggattgggagagcaaagaaataatgaaatttgaggttagagaagctctggcttcccattgaaggtatgagaggaaaagaaacctaagaaagaaagaagctgggcaaacayggctccatgtaccctgggttttctcttacactggtcctgctttgaggatgaacacacacaagggtaaggcatgggagagggcatggagcaactgtctaagttatgatcgaataaaaatgcagcattgcttattcaggatcgacaagtaaatacagtgggatcaggattacttctcgctgccagcattttgatgaagaaaggtattcaaaaatctgcttctatggaggtacaatttcacacagacttacattgccaactttcacttgacggaaactttgtagacacaatgcagaacctcttctccggaagcagattatgtcagcaggactttagtgtgttgatttagggaaaggcaaaaggtgatggtgttgtaattaaaaaaaaagggggggcccacacagaaagtcccaaactaa

SEQ ID NO: 89353 - DNA, 1534 bp, Homo sapiens
acaggaatttccacttatacttaggttacaaaaccatgctgatgcacacatttgaattttgttgatctactttttctggttccctttccctagagtgttctctttttttttctctgtagctgaagtcaacctattaattttaaagtatttgattaaacagaatcttctttatgaagcccgtcctgggccttctatgtggaattggccattctattgttcatgttcctatggtacaaagcacatctttcatctgatcctacagcattttagtgaacttctttgactccaattactagataataagctcatttgatgctagaggttatgcttaatcatctttttatcccaagtccccagaaaacatagtaaatgcctaataatttgttgaaggaatgtgcaagtgaatggaaatgtatgcaacttgtaactgcgtaatgcaattttcaatcatgacttaatatttgtcatagtttacagtaaaaacacattattttaaatggagagtctaatatcatttaaatattccacagaaataaagacagttttaggtctctggttaaattttttagtaaattagggatgaaataacagatttcaaagactcactttttaagtagtatttttctgtcactcgatgtctattttccttctttctacttttaaaatggcagctgcacttttaaatttatattatttccatyataaataacaaatgagtaagttcttactcattttcttgcatctcctgaataagagttattaagttaaacacaaatatcaaattataaaaacctacaaccaactaattatgtttttttttccttttgttttaaagaaagtactcaaattcaactttaatttgtggcattaatttattatagtggtgtggctgaggtaatgtaaacaggagaacttttctgcctttctttccttatttttccaattctcgttacacatttctggaggcaaatcttcatttaaaaggtgctgcaaactcaagcttccctcatgaatggcatgtgttaaatgtgagatactccgaaagagttctcacacatcactgctgtacagagcaaagtacactatcacgaatgcattgatttaataaaagggcagaaagtgaacgaatgaatcggtcaactcgggaacctggaagagcaaagccgcagcaggcgctgctctcacccatcctgccctcagcttcagcctgcaacgtgtgcattttccgccctgtgctctgctgctgaagggccttcgtcagaggatcgcctcctccaggagggctgttctcctgcttccctcctaggactgagctcttgactccaggagcagctaaccacacagtgtgacttgctgtcctggtctccctgcaagctcaggctgagtctgtggttgcgcttgaacctcctgctgttgagtgtcctcacttcctggccagttggtttctcctggaagaatttatttcacaaacacttgcacccaaaccctcgcctcaaattttgcttctgggagaactcgacctaagatggaaatg

SEQ ID NO: 89354 - DNA, 2317 bp, Homo sapiens
caagcatggggtccctgggattgggggcactgcctccagcctgggctgcatgttttatattttctctgtttattcccttgatgagacttattactatctgtaattatgcatcctttgtttatgtgaatattggtttcctccagtaagtcacactctctatggaaacagcagcttcatttgcacccttcactgccacaccttggctgccatgatggcacgcagagaaggcaggtgctgctggatgctggggacatgagaaccttgctctcgaagaggaagatcctgcctctcttcaccaaattcttacatccccatttccataagctgcgtcattgtctctgctgaccctcagcttctcggcctatccttgttgccctggctcctggggccagcagggctggtggctgcaggaatttatgagggcatgtacctgtgaagagcgaacagtggtagtgcctgatggccaatttttgagatgcctaaaagctttctcagggcgcctgggcatgaccattaggaaaggagcatgcattatgaagagtgtggtccttttctagctcagcgagatttacttccccaggtggagctggtaaaagcacaagcaccctcgataaaccctgaggagctcaggtggttgcccagggagtggagcctggtgaggacatttccctggagatcaggcaccggaatgtctgcttcctagcttttctgggagtaggggatgcagaaagcagaagtgaatggaacaagttccttatgacctttcaccatttggcaaatgtgtgtgatagaatatgcagaagaatggaccaggcaaggtggttcatgcctgtaatcccagcactttgggaggccaagccaggaagatcgcttgagcccaagaattcaagaccagtttgggcagcaaagttagaccccaactctacatatataagaaattaggtgtgtaatcccagcactttgggaggccgaggcaggtggatcccctgaggtcgggagtttgagactagcctgaccaacatggagaaaccccgtctctactaaaaaatacaaaattagccaggtgtggtggtgcatgcctgtaatcccagctactcaggaggctgaagcaggagaatggcttgaacccgggaggcggaggttgcggtgagctgagatcacgccattgcactccagcctgggcgacaagaatgaaactttgtctcaaaaaaaaaaaaaaaaaaaaaagaaattaggtggatgtggtgatgagctcctgtagtcccagctactctggaggttgaggcaagatgattacttgagcctgaaatgtcaaggctgcaatgagctgtgatcataccaccgtactccagcctgggtgacaargcacaaccctgtctcaaaaaacaaacacagaggatgcagaagaatggatgtcacatttaattttttaaaaaaatatatatcctgtgagacatttaactcaatgatttattaattcaagaaatctttatttagcactttgtatgtgctaggccctggtctagacattgggagcacagaagtgaccaaacgcagacatattttgccttcctgtttgatattctagttggctgagagaaacaataaatgaacactcggaaggttgatgggttggcaaaagtgagagagactggacttggtggggaagcttggtggtggtggcaataagcttttaagcaaagatttaaataaagcaaggaagcagtccatgcaagcaccttcaggaagtgtgtttcaggcagagacacggtgggtgaatgctctgaggctgtaacaagctgagggggaacaagaaacactaaaattctgtgaattccagcggcatcagttgaatgttaattatggcacatcaggtactttcccttagcagccaacagagtaaaagggagtcggtctatgtacatagatgattgcttttgaggtggcacttaacacctgtgtttccatcatatcccagtggtagactagaaaatggcaacaaataatagaatttgtgttattctcataggatctttttaataagttatagattcatctgagggagtaccagactattgggttttagagattgacagcaaagaagaacttaggcatgaatcttcttaataacagctaatatagaaatagaggaaaaaatcattctcacaatacagatagattagaaagtaatcatttatattcaacaagtatttattgcataactaaaagattctatgtgagagtactacacgtaatgattttctgtgaagcagttaagatacaatttgttcctctaagaaggaaaacaggatgtatg

SEQ ID NO: 89355 - DNA, 1113 bp, Homo sapiens
ccttgtccagctccatggctgatggtagttgtctttgacttcgaagggcttgcctactgcactgtggtcttaactacctgagcttcagtggatgcttgcatctgataacacgtatttttaaaatatgtgtgctgtggtaaggttgcagtgacgaagtgggttgaatcgtgtccgcaaaaagatatgttgaaatcctacctgcacctgtgaatctgacctttttggaaactgatcattgtagatgtaatcaaattaagaggaggtcatacaggaagtaggatgggcttataatcaatccagtataactgatatccttctaaaaggagaagagacacagaaatacagagaagtaggcagaggtaaaggttggaacgatgcggctgtaagccaaagaatgccagattgccagcaaaccaccagcatctaggagatgggtcaggaacagttcaaccttctgagcaatcgagaaggagccaaccctgtacaaatcttgatttaggactcttggcttccagaactgtgagataatatttttctgttgttttaagacactcagtttatggtatcttgctatggcagccctacaaaatggatatatgtgggaatgaatggctatttttctttctatttgaagttaaaagacgaagcaatcggagttttaaagagagaaacaattcctgggatagcattaggatcattggataactgtgtcttgctctttgcttctgacgggcgtcctcattttgtacgtgtgcacacccattttactaatgagtttcgagttgatcttcagcgtggggctccacagacaatgtgacatatctcccaagccaggtaaaataacatggagcaaacataaacagataaaactaaaacacagaatgtaaaggtagattcaaagttgtagctcacacttgcatgtctctctgtccctttctccctgtcttctttgtgctrttttgctttcgaacaaccatggaatgggatgcccaattttgagtcattgtatacaatgaattctaaatcagttcctaaaatctgttttatttttatggaaaattgttgtgtctgtgactgccaacaaaaaggtttatttgcatatttcaaaagaat

SEQ ID NO: 89356 - DNA, 574 bp, Homo sapiens
aatttgataaaacacattagggtggctgaaaggaaatatcccaaattaacaatggtcctgtgtgaacataggctaatgcacagctctgtgctgggatgggaggctggtggtggtgatggtgcttagagagtccagtcaggagaatgggtaaattctgcattgagcacagaatggttcagggcaaggcacatgggctaatgcttagagcaggcggtgactattgctatgctccaagcctggcaaggggtgttgccaaggtgagcaggcagcattcccgtctgttcacacccactcttctctcccagtcgtggtcctcaggttggcttgacagcgatggcctttattcaaagaaagcagccrccagagcaagactaaagcctgtcctaacccttgacaaaatgtcacactcatgccttttttcctactaccggagactaagggttgtgatggaaacaagggagctgcgatggggctgtgaccaagtgaaaatgagagagtaaggaatttactgctttgcttgttgtgaagaatggtggcaaacattcaaacattggtttgggtttttttttcccca

SEQ ID NO: 89357 - DNA, 773 bp, Homo sapiens
aggctagccaggcccttcttaccatggtcgctggtgagcccagtgggtgcatggtagagttggtactcagtacagtgtcctcaatgtagcaactccawtggcagccttggtttagctgctctcaccgcatctgacccagaaaacgctcagaaaatgactgcagtgaaacgcatcttcaaggtgaagctttcagtccaggtgggggagggatgcggagttgatcccaagggttcaatacttctaaatatgctgggagtgagctttgtttatgctctgacccagaggaagtcactttacatctcaccctgcttctaccagcgtagagtgccttctgcttgttttgcataagctgtgtgcctcctctgcagaagaggcacagaatgaattgggagctataaaactcctggcagtcgtaattctttgtgagcagcagagtctggtgagcagtgtattttgttggcaagtgatcattacagtctatacttggtttctctgtctgtaagacggtgggaatgctttctcactgaaatgtgaagggggtcaaaatgaaatcgtgtatacattgtcctttctctaagacctgatgcttaaagcatcaagactcatcaaagagagatgttatatagataaaatctactccaagcatcttgcaaacattatctaatggaaattgtccctgaagagcatcttgttcagctcccttattttaccaataaaggagatccagaggggagttattggcatgagcttgcatagtcagtgcaggactcttg

SEQ ID NO: 89358 - DNA, 773 bp, Homo sapiens
aggctagccaggcccttcttaccatggtcgctggtgagcccagtgggtgcatggtagagttggtactcagtacagtgtcctcaatgtagcaactccaatggcagccttggtttagctgctctcaccgcatctgacccagaaaacgctcagaaaatgactgcagtgaaacgcatcttcaaggtgaagctttcagtccaggtgggggagggatgmggagttgatcccaagggttcaatacttctaaatatgctgggagtgagctttgtttatgctctgacccagaggaagtcactttacatctcaccctgcttctaccagcgtagagtgccttctgcttgttttgcataagctgtgtgcctcctctgcagaagaggcacagaatgaattgggagctataaaactcctggcagtcgtaattctttgtgagcagcagagtctggtgagcagtgtattttgttggcaagtgatcattacagtctatacttggtttctctgtctgtaagacggtgggaatgctttctcactgaaatgtgaagggggtcaaaatgaaatcgtgtatacattgtcctttctctaagacctgatgcttaaagcatcaagactcatcaaagagagatgttatatagataaaatctactccaagcatcttgcaaacattatctaatggaaattgtccctgaagagcatcttgttcagctcccttattttaccaataaaggagatccagaggggagttattggcatgagcttgcatagtcagtgcaggactcttg

SEQ ID NO: 89359 - DNA, 563 bp, Homo sapiens
gcttgttaggtcactgaaggcctgtattcattttgatataaaaaacagactcgaagactatgtctcctttagcaaaatatttttttaaatctgcactactataattaacaagatttttaaaagttgttttcatgctttaatcataggccatcttgaaagctcttccatacagagagatataaaataatataaaagttaactgatcatagtaaataatgatccacaatagggagaaattgttttctattttattaacaatataatagatacctttatttctagctgtttcaaaccttttaagaaaaaaggtgaaggtataatttgataatttttcaaaactcaacacttatgaaagttctttctttcaaagtataaggtagtctgtggtttataaagctttgtataatatttctatgttttcaatggatcacataagtcaaacataagttgaaatgtacagttactagtgagtatgttctcatttacatagctcttggatgaagttcttcttgaggtgagttagggttctcttcttccagtggcaggtctycatcaccccatgg

SEQ ID NO: 89360 - DNA, 723 bp, Homo sapiens
gtgtctttagaaatctagaatctacatttgtgaattctggctcatactacwggtaaagatagttacacttctgcaaaccgttcatagattacagtttgaacaggtttatgtgcaccaaccatcagaaccttaataaaatattggggctgacatttttcactcccatatatcccatagctgatatatttgaacatttgaaggcctcttagcacttcaaacagaaaatgcacttgggtgaatagtaatcatgaagcctaattttccaacaccatggaaagtgccttagggaaaggaggctggtgtttagttagggggaaatgccccctcacacttttaaataacattttcagccagttactaaaggtttagggtgagagacattcaggatgtagccctgggagagggaggataaaaataaggacttcagatgagataagtcatgttcagagtggtaaaggagtagattttaggtactcttgccacacacaataaaagggtaactatatgagatgatggatatgttaatttgcttaactatctataatgaccatttcactatgtgtatatcaaaacatcatgtggtacactttagacatatacaataaaaagtcttcagaagacttcaggtcaaaagtaagaagctctccatcctgtggcaaaaatcgtgaaatgtttagtgtcacatgagtctaggtcttagataagcaacataggtatgaagtt

SEQ ID NO: 89361 - DNA, 723 bp, Homo sapiens
gtgtctttagaaatctagaatctacatttgtgaattctggctcatactacaggtaaagatagttacacttctgcaaaccgttcatagattacagtttgaacaggtttatgtgcaccaaccatcagaaccttaataaaatattggggctgacatttttcactcccatatatcccatagctgatatatttgaayatttgaaggcctcttagcacttcaaacagaaaatgcacttgggtgaatagtaatcatgaagcctaattttccaacaccatggaaagtgccttagggaaaggaggctggtgtttagttagggggaaatgccccctcacacttttaaataacattttcagccagttactaaaggtttagggtgagagacattcaggatgtagccctgggagagggaggataaaaataaggacttcagatgagataagtcatgttcagagtggtaaaggagtagattttaggtactcttgccacacacaataaaagggtaactatatgagatgatggatatgttaatttgcttaactatctataatgaccatttcactatgtgtatatcaaaacatcatgtggtacactttagacatatacaataaaaagtcttcagaagacttcaggtcaaaagtaagaagctctccatcctgtggcaaaaatcgtgaaatgtttagtgtcacatgagtctaggtcttagataagcaacataggtatgaagtt

SEQ ID NO: 89362 - DNA, 723 bp, Homo sapiens
gtgtctttagaaatctagaatctacatttgtgaattctggctcatactacaggtaaagatagttacacttctgcaaaccgttcatagattacagtttgaacaggtttatgtgcaccaaccatcagaaccttaataaaatattggggctgacatttttcactcccatatatcccatagctgatatatttgaacayttgaaggcctcttagcacttcaaacagaaaatgcacttgggtgaatagtaatcatgaagcctaattttccaacaccatggaaagtgccttagggaaaggaggctggtgtttagttagggggaaatgccccctcacacttttaaataacattttcagccagttactaaaggtttagggtgagagacattcaggatgtagccctgggagagggaggataaaaataaggacttcagatgagataagtcatgttcagagtggtaaaggagtagattttaggtactcttgccacacacaataaaagggtaactatatgagatgatggatatgttaatttgcttaactatctataatgaccatttcactatgtgtatatcaaaacatcatgtggtacactttagacatatacaataaaaagtcttcagaagacttcaggtcaaaagtaagaagctctccatcctgtggcaaaaatcgtgaaatgtttagtgtcacatgagtctaggtcttagataagcaacataggtatgaagtt

SEQ ID NO: 89363 - DNA, 723 bp, Homo sapiens
gtgtctttagaaatctagaatctacatttgtgaattctggctcatactacaggtaaagatagttacacttctgcaaaccgttcatagattacagtttgaacaggtttatgtgcaccaaccatcagaaccttaataaaatattggggctgacatttttcactcccatatatcccatagctgatatatttgaacatttgaaggcctcttagcacttcaaacagaaaatgcacttgggtgaatagtaatcatgaagcctaattttccaacaccatggaaagtgccttagggaaaggaggctggtgtttagttagggggaaatgccccctcacacttttaaataacattttcagccagttactaaaggtttagggtgagagacattcaggatgtagccctgggagagggaggataaaaataaggacttcagatgagataagtcatgttcagagtggtaaargagtagattttaggtactcttgccacacacaataaaagggtaactatatgagatgatggatatgttaatttgcttaactatctataatgaccatttcactatgtgtatatcaaaacatcatgtggtacactttagacatatacaataaaaagtcttcagaagacttcaggtcaaaagtaagaagctctccatcctgtggcaaaaatcgtgaaatgtttagtgtcacatgagtctaggtcttagataagcaacataggtatgaagtt

SEQ ID NO: 89364 - DNA, 631 bp, Homo sapiens
aagagagttatattcttgacagagaaaagtgttgttggcattgttgttgatgttttaattctaaaatcttggcactacatgtcattagccaagctagagggcaatacacagggagttcatgatgcaaggaagaggagaggaaggamtaataatgtgatttagttttccctccatgccctctttctactgaggggagtagctgggaggggcgaatgatagtttagatgtaaagatggggcttggctccttggcctatttgggaggttaaatcaccagaagatatgacggaagcctcagatgggtttgggaatccctaaacagagaagacttgtggccttgcttcctgcggagaattctgggagggagcagctacagcacagcagaaatggtttcagggcagaccttgcagagagcacacctaagagaggccgcttccatctccctcaacagccaaggggtgtggaggaagtctgcaaggttctcacatcagctggagaggggcacagaaggtaactgcggattgagagcagggggactaccaatgagtccaaaacctagagccagcggaccccataacagacacttggggagtgaacataagccagtggctgggtggggaaggccactcact

SEQ ID NO: 89365 - DNA, 631 bp, Homo sapiens
aagagagttatattcttgacagagaaaagtgttgttggcattgttgttgatgttttaattctaaaatcttggcactacatgtcattagccaagctagagggcaatacacagggagttcatgatgcaaggaagaggagaggaaggactaataatgtgatttagttttccctccatgccctctttctactgaggggagtagctgggagggrcgaatgatagtttagatgtaaagatggggcttggctccttggcctatttgggaggttaaatcaccagaagatatgacggaagcctcagatgggtttgggaatccctaaacagagaagacttgtggccttgcttcctgcggagaattctgggagggagcagctacagcacagcagaaatggtttcagggcagaccttgcagagagcacacctaagagaggccgcttccatctccctcaacagccaaggggtgtggaggaagtctgcaaggttctcacatcagctggagaggggcacagaaggtaactgcggattgagagcagggggactaccaatgagtccaaaacctagagccagcggaccccataacagacacttggggagtgaacataagccagtggctgggtggggaaggccactcact

SEQ ID NO: 89366 - DNA, 631 bp, Homo sapiens
aagagagttatattcttgacagagaaaagtgttgttggcattgttgttgatgttttaattctaaaatcttggcactacatgtcattagccaagctagagggcaatacacagggagttcatgatgcaaggaagaggagaggaaggactaataatgtgatttagttttccctccatgccctctttctactgaggggagtagctgggaggggcgaatgatagtttagatgtaaagatggggcttggctccttggcctatttgggaggttaaatcaccagaagatatgacggaagcctcagatgggtttgggaatccctaaacagagaagacttgtggccttgcttcctgcggagaattctgggagggagcagctacagcacagcagaaatggtttcagggcagaccttgcagagagcacacctaagagaggccgcttccatctccctcaacagccaaggggtgtggaggaagtctgcaaggttctcacatcagctggagaggggcacagaaggtaacygcggattgagagcagggggactaccaatgagtccaaaacctagagccagcggaccccataacagacacttggggagtgaacataagccagtggctgggtggggaaggccactcact

SEQ ID NO: 89367 - DNA, 772 bp, Homo sapiens
gaccaagttttctctgaagtattttaaggaagtatgaaactgttaagtgcctcagaacccatcttgggttcttagcttatctttcttcaaaatcaccttagtggataaagttggtgctaccttcaagtcaagtcaaatgtttatcagcagtaaattaatggtgtgggaatggtgggaaragaaggaaaaagtcactcgtatttctcaaagtctgatcaaattattttaacattatcctgacagcctttcacaggtctcccttatcacacttcaatatctaccactatctctaacccattgactttcacatacattcaatggccatttacttccttactattttttgaaaccttcaccaagctacagtcctagatttctgatccttcctacaacatggactctgttctcccaacaccaaatggcatgcttaaactaactccaggtcagggtctacctccacctcaagtgcagagaagaaaacacccatggaatgctgctgaccacagatggagtccttcgagaaaaaaaataaactaactaaggctaacactccatcactgaatccttgacacttgtggaccgagaaattttgaggcagaaatgttatccaaacctcagacttagtgatgccactgagttcttatcagtgggatacagtttccagttgcttttattcagtggtaatgatgaatttgtgctgccccagccacacttcggtcatttgagtaaccagaggaacaagttaacacagcaaaataaactggcctgtgag

SEQ ID NO: 89368 - DNA, 1262 bp, Homo sapiens
cttgttttagggcaggcctaattattgggtgtagttaaggagtcttctattgtgagaggcaaggaaatgggacatcctggtatttttccccagttatcttctgagtctcagtggcaagggaaggaatatcttatgcccatccataattggaagagacagctgatgtttggtgaggcctgcagacttgggctgggcttagggacttggagtaaagcccctcaaaagacctcagaggtgagcatcactatcaccagcaatgaattgaagggccagcaattcccattagaaccctatgcggatgttatattttgtgctgtattcttacactgtatgcagtattttatactgtatttttactgtatccttytatgtttagacacacaaatacctaccattgtgtttcaattgcctacaatattcagtacagtaatgtactgtacaggtttgtagcctacaagcaataagttacaccatacagcttaggtgtgtagtgggctacccaacctaggtttgtgaattacgctctatcatgtccacagaatgatgaaatcgcctaatgatgcatttctgagaatgtattcctgtagcaagcatgcatgacggtgaaagtgtagtagaaagaggaaagtaggataggcggtgttaagtcaagttaagcttgtttaaaaaaggaagaagtatcaaatgctgaagagaggtcaattaaggtgatgtctgaatgtcctttggatctaagaaggtagaggttaattatggtagtgatagggtgataatttcagaagtcaggaaataaaggtggattatacttgtggtcttcaaacatttttgcttatatgcaacctaaatgaaataatgtcaaccctgtgtacctccattttacagtcggcatctaaatgtttatcataagtttaaatatatataatatatatcataagtttatatatatcatcgtaagtttaagtatatattttaatatataattttattaaaagtctagcattttaacatgaaattatttcattcttcttttaaatatattcaatggaatacaaataccatcatcatttgaaacctaccatcatccatttaaaaatatacaaaccgtactctcctttagtcagaaattttacatgattcttttttttctctaaaatcatacttccaatttaatttccccacaaaatttaatcctgtctcaattacccttttgttgcctctcatctccaaagtcatacttcattggttttgtgaaaatggatctg

SEQ ID NO: 89369 - DNA, 1262 bp, Homo sapiens
cttgttttagggcaggcctaattattgggtgtagttaaggagtcttctattgtgagaggcaaggaaatgggacatcctggtatttttccccagttatcttctgagtctcagtggcaagggaaggaatatcttatgcccatccataattggaagagacagctgatgtttggtgaggcctgcagacttgggctgggcttagggacttggagtaaagcccctcaaaagacctcagaggtgagcatcactatcaccagcaatgaattgaagggccagcaattcccattagaaccctatgcggatgttatattttgtgctgtattcttacactgtatgcagtattttatactgtatttttactgtatccttctatgtttagacacacaaatacctaccattgtgtttcaattgcctacaatattcagtacagtaatgtactgtacaggtttgtagcctacaagcaataagttacaccatacagcttaggtgtgtagtgggctacccaacctaggtttgtgaattacgctctatcatgtccacagaatgatgaaatcgcctaatgatgcatttctgagaatgtattcctgtagcaagcatgcatgacggtgaaagtgtagtagaaagaggaaagtaggataggcggtgttaagtcaagttaagcttgtttaaaaaaggaagaagtatcaaatgctgaagagaggtcaattaaggtgatgtctgaatgtcctttggatctaagaaggtagaggttaattatggtagtgatagggtgataatttcagaagtcaggaaataaaggtggattatacttgtggtcttcaaacatttttgcttatatgcaacctaaatgaaataatgtcaaccctgtgtacctccattttacagtcggcatctaaatgtttatcataagtttaaatatatataatatatatcataagtttatatatatcatcgtaagtttaagtatatattttaatatataattttattaaaagtctagcattttaacatgaaattatttcattcttcttttaaatatattcaatggaatacaaataccatcatcatttgaaacctaccatcatccatttaaaaatatacaaaccgtactctcctttagtcagaaattttacatgattcttttttttctctaaaatcakacttccaatttaatttccccacaaaatttaatcctgtctcaattacccttttgttgcctctcatctccaaagtcatacttcattggttttgtgaaaatggatctg

SEQ ID NO: 89370 - DNA, 574 bp, Homo sapiens
agcatatgtagcattaaacctggaggaaatcattgcttgcctctgagctatcctaacagtggaatatgttagaatttctggggctctgtggcagggcagaattccatctgattaaaatggaacggacaaggccagctgacatctcaaagtcctgtctgagcagctgagcttccaaagactaattgctaaaaagactagatcgagttactgtatccaaaatatttggctattcctaatcggactgtggttaagaaaaggcctcctgcagctttgctcagttggcaggcagacaatttcccatgattccagcttagcaccarttagaaaattatagggggaaaaaaaagtccctaacaataagattgccaagtaaatctggagtttccttcttggtaatgattttgatttttcacaacctgagagggaatctacaagttgccctttgtcagccccttcctttctagcccccccatctccatacagttgtgtggtggttaaccagtggggctataaggtttcattcccattagtcaagctcatcatagaataaataaccattgatttatggttgcct

SEQ ID NO: 89371 - DNA, 1136 bp, Homo sapiens
agaaattgaaaggatagctagtaattttttttcttcctagttcaaaatcttccacaagttttccttgcatcttctccaaacttgctgttttttttcctgtattcattatcttagtgagtaacattgtctacgtagtaactctaattaaaaactttggtatcatgttcaacatctcctttgattcttgtgtacccctttacttaccaagtcctattctttttcttagctrctaaaatctgtttctccctcattcgactttttgcaatactgccagaattgtctttcagaaatatatacttctacataatgctattgttctcatacttggaaacatttttgtttttgaatagcacagttgataacatcctaactctttggtgcagcatacaagatcctcaacagtccttatccaaacttgccttcctagctatatttactactcgtttcttcctaaatttccccaatgctcaagcttccctgaatccatgatattttttgatacttttatacccttaacacttgctgtttcctttgcctgaaacaagtttcattataccttacttgtttccgagatccagcccccatttcccttctgttgtgaatcccattgctagtgtttttagacagtcagccccttgttccttagcacactcagttgtgcttttcttgcttgctagattcttcttctagatggagggttcttgaggccacggacctgtcttgtcttttattctctttttgtgctcaatacaaggcctaatgccctgcatcatcatttttgaaatgaaaacaactaaagtttttaaaagctcaagtgactaagtagatgctgatagtattaactgatacacagagggatagattggtttttgagcatgttgagtttgagatatttatgttgcatttagaaaatgttcaggacatagttgagaataggaggaggcaagaaaaacagttacaagcattactagtatgtaggtaatattccaaatcatggaagtttttgagactatgtgcagaatgagaagagaagatagagaagaagataagttgcactagtgactagtgggcaggaaacaagaaaaaaatgaaatgggtagcagttaattttctccctcttttataggatataatgg

SEQ ID NO: 89372 - DNA, 1136 bp, Homo sapiens
agaaattgaaaggatagctagtaattttttttcttcctagttcaaaatcttccacaagttttccttgcatcttctccaaacttgctgttttttttcctgtattcattatcttagtgagtaacattgtctacgtagtaactctaattaaaaactttggtatcatgttcaacatctcctttgattcttgtgtacccctttacttaccaagtcctattctttttcttagctgctaaaatctgtttctccctcattcgactttttgcaatactgccagaattgtctttcagaaatatatacttctacataatgctattgttctcatacttggaaacatttttgtttttgaatagcacagttgataacatcctaactctttggtgcagcatacaagatcctcaacagtycttatccaaacttgccttcctagctatatttactactcgtttcttcctaaatttccccaatgctcaagcttccctgaatccatgatattttttgatacttttatacccttaacacttgctgtttcctttgcctgaaacaagtttcattataccttacttgtttccgagatccagcccccatttcccttctgttgtgaatcccattgctagtgtttttagacagtcagccccttgttccttagcacactcagttgtgcttttcttgcttgctagattcttcttctagatggagggttcttgaggccacggacctgtcttgtcttttattctctttttgtgctcaatacaaggcctaatgccctgcatcatcatttttgaaatgaaaacaactaaagtttttaaaagctcaagtgactaagtagatgctgatagtattaactgatacacagagggatagattggtttttgagcatgttgagtttgagatatttatgttgcatttagaaaatgttcaggacatagttgagaataggaggaggcaagaaaaacagttacaagcattactagtatgtaggtaatattccaaatcatggaagtttttgagactatgtgcagaatgagaagagaagatagagaagaagataagttgcactagtgactagtgggcaggaaacaagaaaaaaatgaaatgggtagcagttaattttctccctcttttataggatataatgg

SEQ ID NO: 89373 - DNA, 744 bp, Homo sapiens
cttcttcccagccctgcagggcgcccagaccaaaatgagtgccagcgaccccaactcctccatcttcctcaccgacacggccaagcagatcaaaaccaaggtgagcagtggcccaggcagagggcagccagcgggatcagaaacatgccctggggggcacacgcacacacacaccactgcgcagtgctttgggcctcagccacccagccaccgtagcaatgctgaactccaggattgccaactttgctccctgcagaactcaaggcagcctgtccttcccacatgaatcaggtgaatttgttttgtgtcctttcatttaggtaawattttgaattttttttctttttttccttttctgcttttcttatcagcactgttctgcaggcaaagtcatggcaatttccttaaagttataattagtgtggatgttattaaataatggaaaagatttgtgtatatttctcatcatcagctgtgttccagcggctggacccggtgccttatttatgttttctcatgtttcattctcactgggaggtggtggtgctattccctttaaagatgagatgatgaggcttagagaagcccagccacttgaccaagtttccaccaccaggaatcagcagcactgctctcctggccctgagcagccattaccaagcaggggttatgagctggtcttctcccagagagcgttctcactgagagacatagaacggagaaacgtccatccacgggacagtc

SEQ ID NO: 89374 - DNA, 744 bp, Homo sapiens
cttcttcccagccctgcagggcgcccagaccaaaatgagtgccagcgaccccaactcctccatcttcctcaccgacacggccaagcagatcaaaaccaaggtgagcagtggcccaggcagagggcagccagcgggatcagaaacatgccctggggggcacacgcacacacacaccactgcgcagtgctttgggcctcagccacccagccaccgtagcaatgctgaactccaggattgccaactttgctccctgcagaactcaaggcagcctgtccttcccacatgaatcaggtgaatttgttttgtgtcctttcatttaggtaaaattttgaattttttttctttttttccttttctgcttttcttatcagcactgttctgcaggcaaagtcatggcaatttccttaaagttataattagtgtggatgttattaaataatggaaaagatttgtgtatatttctcatcatcagctgtgttccagcggctggacccggtgccttatttatgttttctcatgtttcattctcactgggaggtggtggtgctattccctttaaagatgagatgatgaggcttagagaagcccagccacttgaccaagtttccaccaccaggaatcagcagcactgctctcctggccctgagcagccattaccaagcaggggttatgagctggtyttctcccagagagcgttctcactgagagacatagaacggagaaacgtccatccacgggacagtc

SEQ ID NO: 89375 - DNA, 849 bp, Homo sapiens
aaggcacagggaggttggactgaggaaagggaggccctctccagagcagggcctggggcctatcatatcagctcatgtgggcaaaggaagggattgacttctgtctgttattccttcattcattcactcgtgtgcaccttctcatgccaggccccacgctgggcaggggagccagagatgccaccctcgcccacctgtggccccagcctggctggagagtgtgtaatctattactgcataacaaattgccccaaaatttagctgctttaaacatcagacattggcagggcgtggtggctcacgcctgtaatcccagcactttggaaggccaaggcaggcggatcacgaggtcaggagatcgagaccatcctggctaacatggtgaaaccccgtgtctactaaaaatacaaaaaaattagccaggtgtggtggcgggcgcctgtagtcccagctactcgggaggctgaggcaggagaatggcatgaacccgggaggtggagcttgcagtgagccsagaccgcaacactacactccagcctgggcgacagagcgagactcctaaaaaacaaaacaaaacaaacaaacaaacaaaaacaaaacaacaaaaatcgacatttatgatctcataactcctgagggtccagaagccatgaataaactggctgggtggctctggatgaggggctctcatgaggctgcagtcatctggagactaggctaggttgggaggacccctgccgaagtgacccactcacacggctgtgggctggaggcttcagctcctcaccacactgccgacctccccacagcactgcttgggcaccctcacaacatggcaccaatgtcccc

SEQ ID NO: 89376 - DNA, 748 bp, Homo sapiens
acttctgcctttgcgcagagcccagtaataacttgatatacaagtaaaaagcatgtctatcattcattcactcaacaagtctccactgatcgactactatggccaatattcctatactrttatgctaaggcacaaaaaattggcttctgaataactcaggacacagtcccttcttctacagtttacagtctggggatatctaagttataaataataagcattagaaatacttgtttattcaagaagtatattcttttgccttctctatgcccctcttaccttttttcaatgttatgttctagaaatgaaaatttacttctaactaatattaaccatagctttgtggaaaggtttcctattttatcatctctattttcccacaaaaaaattcataataaaaacagtactatgtactatctgggaagaaagcaaatactgatgctatcaagaatgaattccggtcaggtgcagtggcttatgccagtaatcccagcactttgggaggccgaggcgggtggatcacctgaggtcaggagttcgagaccagcctggccaacatggtgaaaacccatctctacaaaaatacaaaaattagctgggcatgctggcaggcacctgtaatcccagctactcgggaggctgaggcagggagaattgcttgagcccgggaggtggaggttgcagtgagctgagatcgtgccactgcattctagcctgggtgacagaccaagactctccgtctccaaaa

SEQ ID NO: 89377 - DNA, 885 bp, Homo sapiens
ctttattcatgttaataatgttagtggttcctaaggaaacccactataccaccaatgttttggcaaaaagtttttttttttttttagacgyagtcttgctctgtcgcccaggctggagtgcagtggtgcgatctgagctgactgcaaccactgcctcccaggttcacgccattctcccacctcagcctcccaagtagctgggactacaggcacccgccaccatgcctggctaattttttatatttttagtagaggcggggtttcactgtgttagccaggatgatctcgatctcctgacctcatgatccacccgcctcggcctcccaaagtgctaggattacaggcatgagccactgcgcccagccatttggcaataacttttaactacctatggggccttccctatactgtaccctgcccccaccccactgccacctaaggtaagtgttcctcagttttctatttatcgttttcttgctgccctgtcccccccccttttttttttgggagaccggatctagctctgttgcccgggctggagtgcagtggcacgacagctcactgcagcctcaacctcctgggttcaagcgatcctcccacctcagcctctagagtagttgggactacaggcgcacaccaccacacccagctaatttttgtattttttgtagagacagtgttttgccatgttacccaggctggtcttgcactcctgggctcaagtgatcctcctgccctggcctcccaaagtgctgggattacaggcatgagccaccacacctggcctattcccttgctttttaaaaagtagatatagcgttttgaagtttgtaagtgtcatgctgtgtgtagtctttcagggcttattgtttttgactcaagtaa

SEQ ID NO: 89378 - DNA, 804 bp, Homo sapiens
ctctatggaggttttttcagatgtacttttctagggaaaaaaatcttattcctatatttttcaaccttacctttacctttgaccttgccctagactgtcttcttgaaaaaaaatatagtcttgacagcagcaattacttaattgccacctcatttcctgtttttcctgtaactctgatctcagaaagatgtctccacctgtaccactggcatcctatttcttagttcacggatagcttccaccttctaaagtctagactttcaagtacctcatagcactgaactaattaccactatgctgtctatcaccatatatcacttcaatttctgagtttgttttagaagactaaatattcttttctcacaatttgccattcttcctgtctcactcttttattgttttaacagagcctgcattctctaattcatattgtaaaaattgtcccaacttactattaactcatttaccttagtaactgggatttgtgcataaatgaaaaaaaaatggctttaggaatttataagtacacataatactacagaagtttagagctgtacataatcttgcaggtcatctattgagactctcattattattattgagacatctcttagtggaacgctaaggcaagaaaactcaagtgaccttgatcctactgatgacaaatgacaacactaggactaaagtttaggtcttcttagtacttcattgtgtctgctgtggttatttattatcasataataaatatgtgcaagtggcataggatgtcactagagaaggagattcagaccagactaaaaaatg

SEQ ID NO: 89379 - DNA, 1196 bp, Homo sapiens
gggaatcatacacatattgggtgttctttcagatttttttcgttttcccttactttctcttctgtcatcttatctctcatcatgcttggtaacccacgtgaattacttggtgcatatctttttatgttttcctctatccccaggtaaccatatgtgaacatataaacataaggggttgagaatatttattaacttttattaaatggtatattaaacacacttttctgtatcttagttttttcattaaacaaaacttcgtagaagcatctccaactcaactggccatagctcacattcattcttttatggctacatactgttccrtggtatggacctcttattatttattcaactgtcaccttttgttttcttttttgccattaggaatagtggtataataaacgtatttgtacattctttttgtactggtatttttactttaaaaagtgttacagtgggatctcattaaaatgtacctttagcaatagctattgccagattgcttctaaaatttttttaacagttgccattagcaatttgtgagaatgcccctttcttgacatctctgttagcaataagtgctaatctttatgatttttgcatctggatggaaatgttgagtttgagcagctttctatacacttggtctttttgttcttgactttgctgggaatttcctattcattttttttttttttgcacatttttctactgagttgcttttctatcaactaagagctctaggctgggcgcagtgtctcatgcctgtaatccctgcactttgggaggccgaggtgggtggatcgcctgaggtcagtagtttgagaccagcccggccaacatggtaaaaccccatctctactaaaaatacaaaaattagccgggcatggtggtgtgcacctgtaatcccagctacttgggagactgagaatggagaatctcttgaaatctggacgtggaggttgcagtgagccgagaccaggccattgcactccagcctgggcaacaagagtgaaactctgtctcaaaagctctattgatatcagcattttatttaaaaatgtttattgcaaatatttttaggccttttatttgtctttcaactttgcttgtgatatcttttgcttttgcaaaattttaaaatttccatatagccaaatatgtatctttagtattatgtttatatgttttgtggg

SEQ ID NO: 89380 - DNA, 771 bp, Homo sapiens
ataataattgtacctatgtcgtggtgttactatgagaatataatgaatgaacacaagtaaagttcttagaacagagcctagcacatagtaagtatctcttaagtgttggctattactattattcacttgtaggcacttgggcattttaagtgaaacctaggcttttggttttcaaacattttaaaaacagcaaactcttttttaaaattcaaactttcatgggaaattcaacatgtgaaatraacaaacatggttcttctccacttgatacaggagatggggataccccaaaccctgcccactcatccctctgtaaaacttcacagaattcaaaggccatgaagagcgcagcttgaaaattataaataagaattgttcagaccctccttgctagtgggaaatgtgctgtcatctattggactattattagctctagaaatggaagctacaatgcctgggttagtcttagactcttggtgatggacctaggacagaatggaactcaagtgacatgtggctatactcaactcatattgtagttgtgtaccacaaataaccacccactacataattcctttcaaaatatggcaaagtacttttgccaaaagttagtataggagggaggattgaccttgattttcaggagagtacagacacacacacgcacacacacacactgtggcttattgatgagattggcatgtgaacagcatatccatgctgagaacatgggtaagatatttccccatgaacacatacatctctaatgca

SEQ ID NO: 89381 - DNA, 590 bp, Homo sapiens
aaatatacacgaaaatatagaagggcacaaagaaagaattacagacaatgtggggtttgggcctacatatccaaatcaatttccctcatgagtttgtttttatagagaaaaatctaggctctggctatggtttggatatggttggcttgtctgtgccaactcttatgttgaaatgtgatctccaatgttggaggtggggtctagtgggaggtgtgtgggccatgggggcagatgcctcatgaatggcttggtgccctccttttggtaatgagcaagttcttgctctattagttcccatgasagctggtccttaaagagaggcctggcacctcctccactcccctcttgctcatctctcaccacgtgatcaatgcacacgtggttccccttcttcttcccccttgagtggaagcagcctgaggcctcaccataggcagatgctggtgccatgcttcctctccagcctgcagaaccatgagccaaataaacctcttttccttataatttacccagcctcaggtattctttcatagcaacacaaatggactgacaggtctcttcatggaacctctgcagtgattccctgcctt

SEQ ID NO: 89382 - DNA, 854 bp, Homo sapiens
ctgctctacacagcaggcaagttcttacatcctgtgtctgttaacacctctccatgaatcaccatcaccctcaagaccactgtcatccagatgtgtactggacacctccatatggatcyccataggccccaacagctcccaactaagcctgccatctatgcccgctcccaaggcccattctccttcctgcccccatcctcccaaccacccaagcctgggccatcctagatgctgcttcagacccaaataacttctcacactcttaaaggaaactttggaagccatcatctcctatgttccgtttctataaatgaagaaaaaccaagtaaggtcaagagaggtccattcatcagagctcgagagaaagagattgagatttattttaaagaattagctcgcacaattatgaaagctggcaagtccaaaagctgcagggtgggccatcgggctggaaaccagggaagagctaatgctgcagttggagtccaaaggctgtctgtaggcagacttccctcttgctcaggagagggctatccaggcctaaaactgattggatgaggcccacccacatcatggaggatcaatctgctttacccaaaatccttcaatttaaatgttaatctcatccaaaaataccctcacagaaatatccagaataatctttgaccacatatccgggcatcgtggcctaggcaagctgacacataaaattaaccatcacagaggtgaagtgacttaaacaacggcactgaattaaaaccagagaaaaaccaaagataaagctttttaaaaaaaaaaaaaaaagaataccatttcttcgattgctaaaatattttaaaatataaggaacaaat

SEQ ID NO: 89383 - DNA, 854 bp, Homo sapiens
ctgctctacacagcaggcaagttcttacatcctgtgtctgttaacacctctccatgaatcaccatcaccctcaagaccactgtcatccagatgtgtactggacacctccatatggatctccataggccccaacagctcccaactaagcctgccatctatgcccgctcccaaggcccattctccttcctgcccccatcctcccaaccacccaagcctgggccatcctagatgctgcttcagacccaaataacttctcacactcttaaaggaaactttggaagccatcatctcctatgttccgtttctataaatgaagaaaaaccaagtaaggtcaagagaggtccattcatcagagytcgagagaaagagattgagatttattttaaagaattagctcgcacaattatgaaagctggcaagtccaaaagctgcagggtgggccatcgggctggaaaccagggaagagctaatgctgcagttggagtccaaaggctgtctgtaggcagacttccctcttgctcaggagagggctatccaggcctaaaactgattggatgaggcccacccacatcatggaggatcaatctgctttacccaaaatccttcaatttaaatgttaatctcatccaaaaataccctcacagaaatatccagaataatctttgaccacatatccgggcatcgtggcctaggcaagctgacacataaaattaaccatcacagaggtgaagtgacttaaacaacggcactgaattaaaaccagagaaaaaccaaagataaagctttttaaaaaaaaaaaaaaaagaataccatttcttcgattgctaaaatattttaaaatataaggaacaaat

SEQ ID NO: 89384 - DNA, 947 bp, Homo sapiens
tcattcttaattgttcttttattttacaattttatcatagtgatatcaaaggatgtgatttaaactatttgctgtaggatgttcctttctttttcttttcttttctttttcttttcttttcttttttttctttttttttagacagagtctcctctgtttctcaggctggagtgcagtggcgcagtttcaggtcactgcaacctccacttcccgggctcaagggatcctcccacctcagcctcccaggtagctgggactataggcttgcgccacaacacccagctaattttttacatttttggtagagctgaggtttcgtcatgttgcccacgtgggtcttgaattcctgagctcaagagatccaccctcctcagcctcccaaagtattgagattacaagcatgagccactgcacctggcccaggatgctcctttttgacattaagtcagctgaatggcttgggaagcaggccatgttctttcaagtgtgtaccctttcttaaccaatgcagtctagaggcttgcttgaaaatgtgatcccaagaccaccagcactgacctggccagggagcttgttagagatgtagaatttcaggtcccaccccagacttacagtcacarcctacatatttagcaagatctactagtgatccatgtgtacattaaaattctggagaatttcatactttaaatcataacatttaatttgattgtgaatgtcttccacatcacatgttatttcttaatgttgcacttttaaaataaatgaaatccatctttcattataatctagcaaaaagcaagtttttaaagttaagacactgaataccagtgtaaaattgccaccacttttctgaggacctaattacagctgggactggctcctaaccacattctgatttcatcctttcttccatataccctcccttctactgcttactaactttt

SEQ ID NO: 89385 - DNA, 630 bp, Homo sapiens
cctgttatgcccaaggagtagttcttggtctggggacttctgagaaggctacaaaagctcagaatcctttcttgcaactttgccgtgatctctttgtggccataggaggaccatcagtctatattggcctctttaataagccacaaataataagagtggtttagattcgagtcaatccaggacacagaatgtatgttttcagaggctgcacatagaatgcacaggggatgaggaaactggcctcttgcacagtcactgactctgacatctaagctcagacatgcctctttctccagcactctgggacgacagaggttcaatgtgcggcttctctgtcacaatctactactcagctgctcacagcagaagtacaagcagaatctttctccccttccccattagamcttggtcccttcacgcagtggacttcctccctcccaccagattcccagaagcaacatggagtctgagtctctctcctccatgtgggatgcttccttcccataggcagcaggacctgggagtttcctggggcagatcctctctgtccctgggtagatgacttttaaaataccattattgctttccaatccccttctactctgttgtgtagttccatattgctggatc

SEQ ID NO: 89386 - DNA, 538 bp, Homo sapiens
tgttgagctgctccatctgcagggtgtagcgggcctccatctccctcaggctgttctccaagatggccttcagatttctcatggagtccagtcaatctccaaggactgtactgtatgtctcagctccataagcatatctcagcagctccaacctcggcaagctgcgtggtgaccactgtggtgctcttctgaatctgctgagaccagtacttgtccagctcctctcggttcttccgagccagcttgccatattgggcccagttttctgccatgatcttggygaggtcctgagatttgggggcatctacctccacagtcaacccagagctggcaatctgggcttgtacgccttttacttcctcttcatggttcttcttcatgaagagcagctcctccttgaggcctcaatctctatctccagctgcagctgagtgacattggtgtaatcaatgaccttgcggagctcacggatgtcgctctccacagactggcacatggccagctctgtctcatacttgactctcaagtcatcagcagc

SEQ ID NO: 89387 - DNA, 1551 bp, Homo sapiens
ggatccccatatttactccaaagcagcagcctatagcagcttatcattataagtcttatgtgttcactcttaatataaaatatataagcagaatagacatattatatgtaacatgtaatatgtatatatacacatatgcaatagaggagtaagagtgccaagaaataaagataaataaygaaacatgagaagaatatgtgtctctataattttgtggctcaaatttctgattttaattacagattcatatttgaaggtctttgagaattggcattttaccaattactgaaaggcacattatctaatttctaaagaagaatagcatctgaaaattttaaagcactctattctacttctttttattcttttagacacagggacttactctgttgcccaggctggattcaaactcttgagctcacacaatcctcccccatgaacccagctgttctgtttctaaagaaatggtgtgccataggcaaaacttttaccttgctatatctctgttgtattttcacagtccgtagattctaagttttattatttcatttagagtgtgatgacaaatacttgacgttccactaaattagataatatcagtagaacaatgttccgaaacaagatacttactggaaagacattggctaatattttcagtgttaattcctatatttataagtttaaatctcttactttagtaaatattaaaataccatgcattttatgcctttgagggtgagggtagaaagttttcattgtctattaacctatataataacacatttaattcactgtccactattgacacagcactgtactagatactctataaattatagattttatagattattatagatttttcacataccagaagttctataaaacacagttatttttataatttatgtttattgagcacttacaaatgccagattttgcataagggttcacatgaattatatcattcaatcccacattaacccaaaaaagtattattttttcctcattttctagatgaggaaatgaggctgagagaagctgagcaacttttcctctcacagttagcaagtagcagagaagagatccttctgcccccggagcctatgcactaatactctgctgtagatccagtccctcttctcaaagatacttaaatcttctttctttttttctttttcttttttttttttttttttttgagatggagtctcagtctgtagcacaggctggagtgcagtggtgagatctcagcgctctgcctccctggttcaagcaattctcctgcctcagcctccctagtacctgagattacaggcatgcaccaccatgccttgctaatttttgtatttttagtggagacaggattttaccatgttgaccaggctggtcttgaactcctggcctcaagagatctgcccgtcttagcctaccaaagtgccgggattataggcgtgagccaccatgcctggtctcaaagatacttaaatctaatgaggggattagtataaggatcaagagaaaatttaataaatactgcataagcctgga

SEQ ID NO: 89388 - DNA, 1551 bp, Homo sapiens
ggatccccatatttactccaaagcagcagcctatagcagcttatcattataagtcttatgtgttcactcttaatataaaatatataagcagaatagacatattatatgtaacatgtaatatgtatatatacacatatgcaatagaggagtaagagtgccaagaaataaagataaataatgaaacatgagaagaatatgtgtctctataattttgtggctcaaatttctgattttaattacagattcatatttgaaggtctttgagaattggcattttaccaattactgaaaggcacattatctaatttctaaagaagaatagcatctgaaaattttaaagcactctattctacttmtttttattcttttagacacagggacttactctgttgcccaggctggattcaaactcttgagctcacacaatcctcccccatgaacccagctgttctgtttctaaagaaatggtgtgccataggcaaaacttttaccttgctatatctctgttgtattttcacagtccgtagattctaagttttattatttcatttagagtgtgatgacaaatacttgacgttccactaaattagataatatcagtagaacaatgttccgaaacaagatacttactggaaagacattggctaatattttcagtgttaattcctatatttataagtttaaatctcttactttagtaaatattaaaataccatgcattttatgcctttgagggtgagggtagaaagttttcattgtctattaacctatataataacacatttaattcactgtccactattgacacagcactgtactagatactctataaattatagattttatagattattatagatttttcacataccagaagttctataaaacacagttatttttataatttatgtttattgagcacttacaaatgccagattttgcataagggttcacatgaattatatcattcaatcccacattaacccaaaaaagtattattttttcctcattttctagatgaggaaatgaggctgagagaagctgagcaacttttcctctcacagttagcaagtagcagagaagagatccttctgcccccggagcctatgcactaatactctgctgtagatccagtccctcttctcaaagatacttaaatcttctttctttttttctttttcttttttttttttttttttttgagatggagtctcagtctgtagcacaggctggagtgcagtggtgagatctcagcgctctgcctccctggttcaagcaattctcctgcctcagcctccctagtacctgagattacaggcatgcaccaccatgccttgctaatttttgtatttttagtggagacaggattttaccatgttgaccaggctggtcttgaactcctggcctcaagagatctgcccgtcttagcctaccaaagtgccgggattataggcgtgagccaccatgcctggtctcaaagatacttaaatctaatgaggggattagtataaggatcaagagaaaatttaataaatactgcataagcctgga

SEQ ID NO: 89389 - DNA, 1551 bp, Homo sapiens
ggatccccatatttactccaaagcagcagcctatagcagcttatcattataagtcttatgtgttcactcttaatataaaatatataagcagaatagacatattatatgtaacatgtaatatgtatatatacacatatgcaatagaggagtaagagtgccaagaaataaagataaataatgaaacatgagaagaatatgtgtctctataattttgtggctcaaatttctgattttaattacagattcatatttgaaggtctttgagaattggcattttaccaattactgaaaggcacattatctaatttctaaagaagaatagcatctgaaaattttaaagcactctattctacttctttttattcttttagacacagggacttactctgttgcccaggctggattcaaactcttgagctcacacaatcctccccmatgaacccagctgttctgtttctaaagaaatggtgtgccataggcaaaacttttaccttgctatatctctgttgtattttcacagtccgtagattctaagttttattatttcatttagagtgtgatgacaaatacttgacgttccactaaattagataatatcagtagaacaatgttccgaaacaagatacttactggaaagacattggctaatattttcagtgttaattcctatatttataagtttaaatctcttactttagtaaatattaaaataccatgcattttatgcctttgagggtgagggtagaaagttttcattgtctattaacctatataataacacatttaattcactgtccactattgacacagcactgtactagatactctataaattatagattttatagattattatagatttttcacataccagaagttctataaaacacagttatttttataatttatgtttattgagcacttacaaatgccagattttgcataagggttcacatgaattatatcattcaatcccacattaacccaaaaaagtattattttttcctcattttctagatgaggaaatgaggctgagagaagctgagcaacttttcctctcacagttagcaagtagcagagaagagatccttctgcccccggagcctatgcactaatactctgctgtagatccagtccctcttctcaaagatacttaaatcttctttctttttttctttttcttttttttttttttttttttgagatggagtctcagtctgtagcacaggctggagtgcagtggtgagatctcagcgctctgcctccctggttcaagcaattctcctgcctcagcctccctagtacctgagattacaggcatgcaccaccatgccttgctaatttttgtatttttagtggagacaggattttaccatgttgaccaggctggtcttgaactcctggcctcaagagatctgcccgtcttagcctaccaaagtgccgggattataggcgtgagccaccatgcctggtctcaaagatacttaaatctaatgaggggattagtataaggatcaagagaaaatttaataaatactgcataagcctgga

SEQ ID NO: 89390 - DNA, 1551 bp, Homo sapiens
ggatccccatatttactccaaagcagcagcctatagcagcttatcattataagtcttatgtgttcactcttaatataaaatatataagcagaatagacatattatatgtaacatgtaatatgtatatatacacatatgcaatagaggagtaagagtgccaagaaataaagataaataatgaaacatgagaagaatatgtgtctctataattttgtggctcaaatttctgattttaattacagattcatatttgaaggtctttgagaattggcattttaccaattactgaaaggcacattatctaatttctaaagaagaatagcatctgaaaattttaaagcactctattctacttctttttattcttttagacacagggacttactctgttgcccaggctggattcaaactcttgagctcacacaatcctcccccatgaacccagctgttctgtttctaaagaaatggtgtgccataggcaaaacttttaccttgctatatctctgttgtattttcacagtccgtagattctaagttttattatttcatttagagtgtgatgacaaatacttgacgttccactaaattagataatatcagtagaacaatgttccgaaacaagatacttactggaaagacattggctaatattttcagtgttaattcckatatttataagtttaaatctcttactttagtaaatattaaaataccatgcattttatgcctttgagggtgagggtagaaagttttcattgtctattaacctatataataacacatttaattcactgtccactattgacacagcactgtactagatactctataaattatagattttatagattattatagatttttcacataccagaagttctataaaacacagttatttttataatttatgtttattgagcacttacaaatgccagattttgcataagggttcacatgaattatatcattcaatcccacattaacccaaaaaagtattattttttcctcattttctagatgaggaaatgaggctgagagaagctgagcaacttttcctctcacagttagcaagtagcagagaagagatccttctgcccccggagcctatgcactaatactctgctgtagatccagtccctcttctcaaagatacttaaatcttctttctttttttctttttcttttttttttttttttttttgagatggagtctcagtctgtagcacaggctggagtgcagtggtgagatctcagcgctctgcctccctggttcaagcaattctcctgcctcagcctccctagtacctgagattacaggcatgcaccaccatgccttgctaatttttgtatttttagtggagacaggattttaccatgttgaccaggctggtcttgaactcctggcctcaagagatctgcccgtcttagcctaccaaagtgccgggattataggcgtgagccaccatgcctggtctcaaagatacttaaatctaatgaggggattagtataaggatcaagagaaaatttaataaatactgcataagcctgga

SEQ ID NO: 89391 - DNA, 795 bp, Homo sapiens
atgggatttcacatgttggccaggctggtctcgaactccttacctcaggtgatctgcccgccttggcctcgcaaagtgctgggattacaggcgtgagccacagtgtccagccctcttgtgttaatttataaggctatttaactcatattgttctgtagcattttccatgtatattagtcccttcctcagctagattttsaccttactgatggcagactatattttctattttaagagtttgccatagccactaggacaatgacacacacataataagtgctttataaatatttgtggagtgcatgaatgacggaattataggcaattaagacaaggttgcatatagctgtgtggcatcgctatacacaagggagtggcaataacttaagtgagatagcaaaggcctggataagataaaaaagaaatagattcaggaagtgggttataaaataggcaacagttataaagtgtttattatttgaagtaactttagaggtatttgctcctttttttttttttttgagacagtgcagtggtgcaattatagattactataaccttgaacttctgagctcagccatcctcccatctcagcctcccaaagtgctgagattacaagcatgagtcaccatgcccagcctactctttacaacaacaatcctatgaggtaggtactactatcatccctactttatagatgaaatgcaaatagataaataatttaacatcacccagccaggaagtggttgtgtcaaaagctcatgcagttttgttctgcccttgcctgtataggat

SEQ ID NO: 89392 - DNA, 795 bp, Homo sapiens
atgggatttcacatgttggccaggctggtctcgaactccttacctcaggtgatctgcccgccttggcctcgcaaagtgctgggattacaggcgtgagccacagtgtccagccctcttgtgttaatttataaggctatttaactcatattgttctgtagcattttccatgtatattagtcccttcctcagctagattttgaccttactgatggcagactatattttctattttaagagtttgccatagccactaggacaatgacacacacawaataagtgctttataaatatttgtggagtgcatgaatgacggaattataggcaattaagacaaggttgcatatagctgtgtggcatcgctatacacaagggagtggcaataacttaagtgagatagcaaaggcctggataagataaaaaagaaatagattcaggaagtgggttataaaataggcaacagttataaagtgtttattatttgaagtaactttagaggtatttgctcctttttttttttttttgagacagtgcagtggtgcaattatagattactataaccttgaacttctgagctcagccatcctcccatctcagcctcccaaagtgctgagattacaagcatgagtcaccatgcccagcctactctttacaacaacaatcctatgaggtaggtactactatcatccctactttatagatgaaatgcaaatagataaataatttaacatcacccagccaggaagtggttgtgtcaaaagctcatgcagttttgttctgcccttgcctgtataggat

SEQ ID NO: 89393 - DNA, 795 bp, Homo sapiens
atgggatttcacatgttggccaggctggtctcgaactccttacctcaggtgatctgcccgccttggcctcgcaaagtgctgggattacaggcgtgagccacagtgtccagccctcttgtgttaatttataaggctatttaactcatattgttctgtagcattttccatgtatattagtcccttcctcagctagattttgaccttactgatggcagactatattttctattttaagagtttgccatagccactaggacaatgacacacacataataagtgctttataaatatttgtggagtgcatgaatgacggaattataggcaattaagacaaggttgcatatagctgtgtggcwtcgctatacacaagggagtggcaataacttaagtgagatagcaaaggcctggataagataaaaaagaaatagattcaggaagtgggttataaaataggcaacagttataaagtgtttattatttgaagtaactttagaggtatttgctcctttttttttttttttgagacagtgcagtggtgcaattatagattactataaccttgaacttctgagctcagccatcctcccatctcagcctcccaaagtgctgagattacaagcatgagtcaccatgcccagcctactctttacaacaacaatcctatgaggtaggtactactatcatccctactttatagatgaaatgcaaatagataaataatttaacatcacccagccaggaagtggttgtgtcaaaagctcatgcagttttgttctgcccttgcctgtataggat

SEQ ID NO: 89394 - DNA, 1081 bp, Homo sapiens
tggtggtgtgcgcctgtcatcccagctactcaggaggctgaagtgggaggattacctgagcacgggggaggtcaaggctgcagtgagccaagattgcaccactgtactccagcctgggsgacagagtgagaccctgtctcaaaaaaaagcaaggtttaatatcaactttggtggcaccctccacagagtatttatactatagaatatgttttataaaaatatttgggaggccgaggccggtggattacctgaggtcaggagttcaagaccagcctgactaacatggtgaaaccccatctctgctaaaaatacaaaaattagctgggcgtggtggcacatgcctgtaatcccagctacttgggaggctgaggcaagagaatcacttgaatctgggaggcagaggttacagtgagccgagattgcaccactgcactccagcctgggcaacaagagcgaaactccatctcaaaatatatatatgtgtgtatatatatatatgtatatatatgtgtgtgtatatatatatgtatatatatgtgtgtatatatatatatgtatatatatgtgtgtatatatatatatgtatatatatttgctaataactttacagaactttcatataatttagacaggtgtctaggttctctggagtctcagaaaaataatacctagtctttctctacataacatttgatacataaaatggtcttattgcaagacaaatatcagaacaaagatcaaactgcttaatttcctacatcaattcaagcagaaacttttcaattcaatctcaaacttttaggcaaaataattgtccagattactttgcttctctcactcctgctcctcctccttcacccctcccttgcctctcttgtctctttttctaacaacctagccttccttttctacctctctcgcttttaattctcacccctttctttccttttgtagaggaggggcttaaacttttaagaaattgctttgtttgctgtactctctcaaaagcttggtttgagcagccaaccctgtttgcataaaatgaaagttagaaaactaaaagttttgtgaaccaagggtg

SEQ ID NO: 89395 - DNA, 1081 bp, Homo sapiens
tggtggtgtgcgcctgtcatcccagctactcaggaggctgaagtgggaggattacctgagcacgggggaggtcaaggctgcagtgagccaagattgcaccactgtactccagcctgggggacagagtgagaccctgtctcaaaaaaaagcaaggtttaatatcaactttggtggcaccctccacagagtatttatactatagaatatgttttataaaaatatttgggaggccgaggccggtggattacctgaggtcaggagttcaagaccagcctgactaacatggtgaaaccccatctctgctaaaaatacaaaaattagctgggcgtggtggcacatgcctgtaatcccagctacttgggaggctgaggcaagagaatcacttgaatctgggaggcagaggttacagtgagccgagattgcaccactgcactccagcctgggcaacaagagcgaaactccatctcaaaatatatatatgtgtgtatatatatatatgtatatatatgtgtgtgtatatatatatgtatatatatgtgtgtrtatatatatatgtatatatatgtgtgtatatatatatatgtatatatatttgctaataactttacagaactttcatataatttagacaggtgtctaggttctctggagtctcagaaaaataatacctagtctttctctacataacatttgatacataaaatggtcttattgcaagacaaatatcagaacaaagatcaaactgcttaatttcctacatcaattcaagcagaaacttttcaattcaatctcaaacttttaggcaaaataattgtccagattactttgcttctctcactcctgctcctcctccttcacccctcccttgcctctcttgtctctttttctaacaacctagccttccttttctacctctctcgcttttaattctcacccctttctttccttttgtagaggaggggcttaaacttttaagaaattgctttgtttgctgtactctctcaaaagcttggtttgagcagccaaccctgtttgcataaaatgaaagttagaaaactaaaagttttgtgaaccaagggtg

SEQ ID NO: 89396 - DNA, 551 bp, Homo sapiens
tttttcaacaaaaagcatttgacttttattattatttgaggcaaaaactaaactgaaaccaaataaaatgttgaatttcagaaaagtgttcttaaaagcagatattaagccctcaatttttattaattttaaaatgagtaagcaaactgtaagatgttaagattattaaattatctctcattaagcatgtatctttcccattttaaaaattcagttactattgatttattaaaaaacaatagaaaagttacatctatttttagagtgactctcaagaaaatttaataagggaaacacagatctataaaaaactgtttgtaaacctaacaaaggaaaaaaaaagttggtgtctttaaaaaaccctttgagattagctgtgtattcagatatcagttggttctctcctttctgaatcgctaaacaactggagcttgtttcagaaagcagcattgtctacgtatgttccttttaaaaattttttttttaattctrtctaaaaaaaacagacggggtcacactatgttgcccaggctgctcttgaattcctgggc

SEQ ID NO: 89397 - DNA, 831 bp, Homo sapiens
aaaattctggcatcagagctggcttgagccctaagatggccagttatttttatttttcaacagctttctgtgttgtaaattaaaagtaatgttcacttttagtcagtaggtttttctttagcctaaattacagtcttttaattaaaagtattagcatgccttccttaaaattattactagttagtgacttcagttataagaaattttatgtaattatttctatgacacactagtcttgtggatggcctcattttacaaaagaaatacaaaaggcaaaagcggtacctcagtggccaggatgtacagaaacagacatgcccagcctctcgatgcaaattctttcctctaggtggcactggggtacgattgtattctaggagctatatctcatatttttagtaatggggttcatgagcacttgttattaaactgaacaatcacaytcatttacaagtgataaggaccagaactgatatcaactgattaaatattgtgcttaccctaaaaaccattccaggaaaacgatatgaagtgatttgagactcgttggttccagttttatatgccataatactctcaattcacttccactataattgagctcacatattcaaataaagaagaaagaacaactgggcatggtggctcacacctgtaatcccagcactttgggaggccgaggtgggcggatcacttgaggtcaggagttcgagaccagcctggccaacatggtgaaacctcatctctgctaaatatatgaaaattagctgggtgtggtagtgcgcgcctgtaatcccagctactcaggaggctgaggcagaagaatcgctt

SEQ ID NO: 89398 - DNA, 667 bp, Homo sapiens
agattttttttttttaagttcttatgctgtgaagcatcttttcttgtcactttgtgcctactttctgttttcagtctcctgtttcccttctgatgtagtttggactctgcccagggctctatttgtgtgtttgtgtatgtgtgggtgaggatgtgkgtgtgtctgagtatgagtataaatatgactttcatagcataatataaatcttcagggcaatcatattgccttcaggaagctacagatttactaagggattctttactaagttaaagaaaatgaatgtgagctatatgactgaggactagcgtctcttttaaaaacttgactttaaaacatttgctcttctccctagttagatatttgctttagttctggacaagattgcaatttgttcagacctgtcatgctgattaagcatgattaaatttttagaactcttaaaactaaatatagttatttaccatgatagaaaccataactacaagaaaaaaaatgactgatagtggccattaattagtaaatatttcaaaggacactgacatttttattagccctctatattaagtgaataatgctttgtgttcaatgattagaaaagatgaaaactgcaggggagtttaaaacagctatgataaatctatatgctaagattaagagggtttttctt

SEQ ID NO: 89399 - DNA, 667 bp, Homo sapiens
agattttttttttttaagttcttatgctgtgaagcatcttttcttgtcactttgtgcctactttctgttttcagtctcctgtttcccttctgatgtagtttggactctgcccagggctctatttgtgtgtttgtgtatgtgtgggtgaggatgtgggtgtgtctgagtatgagtataaatatgactttcatagcataatataaatcttcagggcaatcatattgccttcaggaagctacagatttactaagggattctttactaagttaaagaaaatgaatgtgagctatatgactgaggactagcgtctcttttaaaaacttgactttaaaacatttgctcttctccctagttagatatttgctttagttctggacaagattgcaatttgttcagacctgtcatgctgattaagcatgattaaatttttagaactcttaaaactaaatatagttatttaccatgatagaaaccataactayaagaaaaaaaatgactgatagtggccattaattagtaaatatttcaaaggacactgacatttttattagccctctatattaagtgaataatgctttgtgttcaatgattagaaaagatgaaaactgcaggggagtttaaaacagctatgataaatctatatgctaagattaagagggtttttctt

SEQ ID NO: 89400 - DNA, 1548 bp, Homo sapiens
gaacatacctggatgaatttcattaaattatatagacgtgtaaagcatattcatatacattctccctacatatataattataatttgcccaattctctgtgcctgaatatttgaaaaggatatttgatcatctaattggactatgagggagctggtgataggtcctaccgttcaccaacactgggctccctaaattataaggggatgcagtgcggcatagcagttaagagttccgttactctagagtcagacagaccagattgcaatctcaactgcaccacttactaaatgtgtgaccttggccaatatttacattatccaatttacagctactctaactgttgtcaaaacaaaaccagttatgataatgctccctatctgctaaaaccactgtgaaggttaaatcaaataatccctgaccgatgacagactgataataatccctgaccgctctcagacaaagagagaaggagcgaaagagagagagaaagaatgctatgtgaaacaaaatctgcaatactagcaaaagaaaaaaaaaccttttatattgggaaaaaaagaaagaataagaatttcagaaaaatactgcttatttttcttaataagagtctcatagtttggattttctagaagtagaatttaagacagtgattcatatgcatacatttgattgggcatacttctgtcagacaaggccaattctttggagtgagctgacatcacttggcagctggagattgctcactgacccagtaaagaatatctaggtagggcactgtccaacccttgcaagcctcagatgaatatggctctcacattaagttcaccatatccatggttacaaaacgctgcccactcatagctcaatgtgggcaactgtgcaattggcattatgcttcagagtcaaactttatgaaatacgttttatgtagccaaagcttccactaggagctttaaaaaaaacataaaaataaaaaggtttaagaggaaattttaatacactaacaggccacttagagaatatttcagtgttcaaatgcaaattcttagcatggtatggtttttcaattgttaaaaaaattgaattcaaaaactgtatatataaaatgttacatttttctctaaattaagagtctcaaactccagtgaaattaattttaaaattcttaatatcaaatacrtatattagcagtttttttaagattaaacatagtctatttatttatgaagctgtttggacattttactatttttcaggtgaactatctggattctgcttacctagacaatgtccattggacttttgacaggaattattacactctttatctttcatggtgaaatagttcttattacattagactactggtttaaattttaaaaatattgtaaatgtatgaaacaacaacatatatggagagttctataaattatatacaatgacaaagcttgggagataattattgacaatgttactgatgctatacattagttgaattgctaattaaaaataaatgtcatggtcagtgaggtttcccacttaaacca

SEQ ID NO: 89401 - DNA, 1548 bp, Homo sapiens
gaacatacctggatgaatttcattaaattatatagacgtgtaaagcatattcatatacattctccctacatatataattataatttgcccaattctctgtgcctgaatatttgaaaaggatatttgatcatctaattggactatgagggagctggtgataggtcctaccgttcaccaacactgggctccctaaattataaggggatgcagtgcggcatagcagttaagagttccgttactctagagtcagacagaccagattgcaatctcaactgcaccacttactaaatgtgtgaccttggccaatatttacattatccaatttacagctactctaactgttgtcaaaacaaaaccagttatgataatgctccctatctgctaaaaccactgtgaaggttaaatcaaataatccctgaccgatgacagactgataataatccctgaccgctctcagacaaagagagaaggagcgaaagagagagagaaagaatgctatgtgaaacaaaatctgcaatactagcaaaagaaaaaaaaaccttttatattgggaaaaaaagaaagaataagaatttcagaaaaatactgcttatttttcttaataagagtctcatagtttggattttctagaagtagaatttaagacagtgattcatatgcatacatttgattgggcatacttctgtcagacaaggccaattctttggagtgagctgacatcacttggcagctggagattgctcactgacccagtaaagaatatctaggtagggcactgtccaacccttgcaagcctcagatgaatatggctctcacattaagttcaccatatccatggttacaaaacgctgcccactcatagctcaatgtgggcaactgtgcaattggcattatgcttcagagtcaaactttatgaaatacgttttatgtagccaaagcttccactaggagctttaaaaaaaacataaaaataaaaaggtttaagaggaaattttaatacactaacaggccacttagagaatatttcagtgttcaaatgcaaattcttagcatggtatggtttttcaattgttaaaaaaattgaattcaaaaactgtatatataaaatgttacatttttctctaaattaagagtctcaaactccagtgaaattaattttaaaattcttaatatcaaatacgtatattagcagtttttttaagattaaacatagtctatttatttatgaagctgtttggacattttactatttttcaggtgaactatctggattctgcttacctagacaatgtccattggacttttgacasgaattattacactctttatctttcatggtgaaatagttcttattacattagactactggtttaaattttaaaaatattgtaaatgtatgaaacaacaacatatatggagagttctataaattatatacaatgacaaagcttgggagataattattgacaatgttactgatgctatacattagttgaattgctaattaaaaataaatgtcatggtcagtgaggtttcccacttaaacca

SEQ ID NO: 89402 - DNA, 1548 bp, Homo sapiens
gaacatacctggatgaatttcattaaattatatagacgtgtaaagcatattcatatacattctccctacatatataattataatttgcccaattctctgtgcctgaatatttgaaaaggatatttgatcatctaattggactatgagggagctggtgataggtcctaccgttcaccaacactgggctccctaaattataaggggatgcagtgcggcatagcagttaagagttccgttactctagagtcagacagaccagattgcaatctcaactgcaccacttactaaatgtgtgaccttggccaatatttacattatccaatttacagctactctaactgttgtcaaaacaaaaccagttatgataatgctccctatctgctaaaaccactgtgaaggttaaatcaaataatccctgaccgatgacagactgataataatccctgaccgctctcagacaaagagagaaggagcgaaagagagagagaaagaatgctatgtgaaacaaaatctgcaatactagcaaaagaaaaaaaaaccttttatattgggaaaaaaagaaagaataagaatttcagaaaaatactgcttatttttcttaataagagtctcatagtttggattttctagaagtagaatttaagacagtgattcatatgcatacatttgattgggcatacttctgtcagacaaggccaattctttggagtgagctgacatcacttggcagctggagattgctcactgacccagtaaagaatatctaggtagggcactgtccaacccttgcaagcctcagatgaatatggctctcacattaagttcaccatatccatggttacaaaacgctgcccactcatagctcaatgtgggcaactgtgcaattggcattatgcttcagagtcaaactttatgaaatacgttttatgtagccaaagcttccactaggagctttaaaaaaaacataaaaataaaaaggtttaagaggaaattttaatacactaacaggccacttagagaatatttcagtgttcaaatgcaaattcttagcatggtatggtttttcaattgttaaaaaaattgaattcaaaaactgtatatataaaatgttacatttttctctaaattaagagtctcaaactccagtgaaattaattttaaaattcttaatatcaaatacgtatattagcagtttttttaagattaaacatagtctatttatttatgaagctgtttggacattttactatttttcaggtgaactatctggattctgcttacctagacaatgtccattggacttttgacaggaattattacactctttatcttycatggtgaaatagttcttattacattagactactggtttaaattttaaaaatattgtaaatgtatgaaacaacaacatatatggagagttctataaattatatacaatgacaaagcttgggagataattattgacaatgttactgatgctatacattagttgaattgctaattaaaaataaatgtcatggtcagtgaggtttcccacttaaacca

SEQ ID NO: 89403 - DNA, 1548 bp, Homo sapiens
gaacatacctggatgaatttcattaaattatatagacgtgtaaagcatattcatatacattctccctacatatataattataatttgcccaattctctgtgcctgaatatttgaaaaggatatttgatcatctaattggactatgagggagctggtgataggtcctaccgttcaccaacactgggctccctaaattataaggggatgcagtgcggcatagcagttaagagttccgttactctagagtcagacagaccagattgcaatctcaactgcaccacttactaaatgtgtgaccttggccaatatttacattatccaatttacagctactctaactgttgtcaaaacaaaaccagttatgataatgctccctatctgctaaaaccactgtgaaggttaaatcaaataatccctgaccgatgacagactgataataatccctgaccgctctcagacaaagagagaaggagcgaaagagagagagaaagaatgctatgtgaaacaaaatctgcaatactagcaaaagaaaaaaaaaccttttatattgggaaaaaaagaaagaataagaatttcagaaaaatactgcttatttttcttaataagagtctcatagtttggattttctagaagtagaatttaagacagtgattcatatgcatacatttgattgggcatacttctgtcagacaaggccaattctttggagtgagctgacatcacttggcagctggagattgctcactgacccagtaaagaatatctaggtagggcactgtccaacccttgcaagcctcagatgaatatggctctcacattaagttcaccatatccatggttacaaaacgctgcccactcatagctcaatgtgggcaactgtgcaattggcattatgcttcagagtcaaactttatgaaatacgttttatgtagccaaagcttccactaggagctttaaaaaaaacataaaaataaaaaggtttaagaggaaattttaatacactaacaggccacttagagaatatttcagtgttcaaatgcaaattcttagcatggtatggtttttcaattgttaaaaaaattgaattcaaaaactgtatatataaaatgttacatttttctctaaattaagagtctcaaactccagtgaaattaattttaaaattcttaatatcaaatacgtatattagcagtttttttaagattaaacatagtctatttatttatgaagctgtttggacattttactatttttcaggtgaactatctggattctgcttacctagacaatgtccattggacttttgacaggaattattacactctttatctttcayggtgaaatagttcttattacattagactactggtttaaattttaaaaatattgtaaatgtatgaaacaacaacatatatggagagttctataaattatatacaatgacaaagcttgggagataattattgacaatgttactgatgctatacattagttgaattgctaattaaaaataaatgtcatggtcagtgaggtttcccacttaaacca

SEQ ID NO: 89404 - DNA, 630 bp, Homo sapiens
actctaaatataatgttaaatggaatatttcattatattttagaagtagggactactagtttgacatttatgtttttgagtatatgtggttgcattcttatatctaataaaatattcagttgtcttaaacttaacattcttaaggcctagggcaagaataataatcaaaacctatatagtgtatgtttgcatatttaaaagttataaatcaagttaacaaactgttaaataaagtatgctgtgttctctcactttgacacatataccttctcaatgaaattcaggtttggaactagaattcttgggccgtcaacatccagcayagaatatgacgacatagagagagccggtgccctgatctggtctcacaccatgagaggccttctgtgtatacattttgggtacctctgttgatatgttgaaactcagtctaccactgtagctctagcaaaaagcttcccattggcccacagggcctctagttgtgcactctgtatacgtggttcaccatgaaagacagaactggtggagaggaccatggacgctggaagcagtctcaaaaccctttgaagacagaattctaagtctttatgttctacagcatgatctaaaaggtggtaggtcagggtg

SEQ ID NO: 89405 - DNA, 630 bp, Homo sapiens
actctaaatataatgttaaatggaatatttcattatattttagaagtagggactactagtttgacatttatgtttttgagtatatgtggttgcattcttatatctaataaaatattcagttgtcttaaacttaacattcttaaggcctagggcaagaataataatcaaaacctatatagtgtatgtttgcatatttaaaagttataaatcaagttaacaaactgttaaataaagtatgctgtgttctctcactttgacacatataccttctcaatgaaattcaggtttggaactagaattcttgggccgtcaacatccagcacagaatatgacgacatagagagagccggtgccctgayctggtctcacaccatgagaggccttctgtgtatacattttgggtacctctgttgatatgttgaaactcagtctaccactgtagctctagcaaaaagcttcccattggcccacagggcctctagttgtgcactctgtatacgtggttcaccatgaaagacagaactggtggagaggaccatggacgctggaagcagtctcaaaaccctttgaagacagaattctaagtctttatgttctacagcatgatctaaaaggtggtaggtcagggtg

SEQ ID NO: 89406 - DNA, 630 bp, Homo sapiens
actctaaatataatgttaaatggaatatttcattatattttagaagtagggactactagtttgacatttatgtttttgagtatatgtggttgcattcttatatctaataaaatattcagttgtcttaaacttaacattcttaaggcctagggcaagaataataatcaaaacctatatagtgtatgtttgcatatttaaaagttataaatcaagttaacaaactgttaaataaagtatgctgtgttctctcactttgacacatataccttctcaatgaaattcaggtttggaactagaattcttgggccgtcaacatccagcacagaatatgacgacatagagagagccggtgccctgatctggtctcayaccatgagaggccttctgtgtatacattttgggtacctctgttgatatgttgaaactcagtctaccactgtagctctagcaaaaagcttcccattggcccacagggcctctagttgtgcactctgtatacgtggttcaccatgaaagacagaactggtggagaggaccatggacgctggaagcagtctcaaaaccctttgaagacagaattctaagtctttatgttctacagcatgatctaaaaggtggtaggtcagggtg

SEQ ID NO: 89407 - DNA, 630 bp, Homo sapiens
actctaaatataatgttaaatggaatatttcattatattttagaagtagggactactagtttgacatttatgtttttgagtatatgtggttgcattcttatatctaataaaatattcagttgtcttaaacttaacattcttaaggcctagggcaagaataataatcaaaacctatatagtgtatgtttgcatatttaaaagttataaatcaagttaacaaactgttaaataaagtatgctgtgttctctcactttgacacatataccttctcaatgaaattcaggtttggaactagaattcttgggccgtcaacatccagcacagaatatgacgacatagagagagccggtgccctgatctggtctcacaccatgagaggccttctgtgtatacrttttgggtacctctgttgatatgttgaaactcagtctaccactgtagctctagcaaaaagcttcccattggcccacagggcctctagttgtgcactctgtatacgtggttcaccatgaaagacagaactggtggagaggaccatggacgctggaagcagtctcaaaaccctttgaagacagaattctaagtctttatgttctacagcatgatctaaaaggtggtaggtcagggtg

SEQ ID NO: 89408 - DNA, 1254 bp, Homo sapiens
tgcattgaataaactccattcaggcgtgagtgctgtagtgccattggctgtgagttcaatgttaatgaatgaacaatgtatattatttatttattcttcatttaattaattattattatttttttttgagatagagtctcactctgttgctcaggctggagtgcagtggtgcagtcttggctcactgcaacctctgcctcctgggttcaagcgattcccctgccttagcctcccaagtagctaagactacaggcatgcgccaccatgcctggctaatatatatatatatwttttgtagttttagtagagacggggtttcaccacgttggccaggctggtctcgaactccagacctcaaatgatctgcccgccttggcttcccaaagtgctgggattacaggcattagccactgtgcctggccaacaatatatattaaataagcacacatacaacaaaagtaggtgttggtaagcttacaaaaatgtgaccagtagcttgctgaaacctaactttttatttgttcatggaactttctagaccgtaactacactgaataatgagaatctgctgtaatctttttaggtgctgtagatgagccattggattaaattattacagtatgtttcagactgctctatgttgaaccctagtgaaatgcctctcaaaccctcctaaggatcacaatctcatgtcttttttttgttattaaatgcccagtatgtgttagtgatttaaacaaaattcaaattttttttttttttttttttttgagacagagtctcgctctgtcacctaagctggagagtgcagtggcatgatcgcggctcactacaacctctgcctcccgggttcaagcgattctcctgcctcagcatcctgagtagctgggattacaggcgcccgccaccacgctgggctaatttttgtatttttagtagagacggggtttcgccaggttgtgcaggctggtctggaactcctgacctcatgcgatctgcctgccttggcctcctgaagtgctgggattataggcgtgagccaccatgcccggcgttgactttttaataataaccattctgactggtgtgagatggtatgccattgcggttttgatttgcatttctctaatgatcagcgatattgggcttttcttcatatgcttgttggccgcatgtgtgtcttcttttgaagtgtctgtctatgccctttgcccactttctaacgagattcttttttcttgcaaatttgtctaa

SEQ ID NO: 89409 - DNA, 1912 bp, Homo sapiens
gtgatgggatgatctgtgcagcaaaccaccatggcacatgtttacctctgtaacaaacctgcgcatcttgcacgtgtaccccggaacttaaaaacataaaataagataaaataataaaatcagtattattgttcagggtcttgagacctctctcagcttctgctgaactaagcaagtacattaaattttttttctagattaaaaaaaagtctaatttaaaactcctgtggtgtctttgtttttgcaacttaatgattttgcaaacaaagtctattcattattttaaaaaaytggtaattgatagaatctttctggaagtcagtttagtaatatgtatcaaaagcttttcaagtgtgcatttgttttgacatatgtgcatttattctaaagatataatgcaaaagtgtatgaaactcattgctcaaaatattttcatcaccaccttgtttttgcagaaattcagaaataagttaaatgcacaataatgaggtcctggcttctacataagtcacagagtttagaaggctatctaatggcatgaaaagcatatatactctgttaggcataaaaagtagttatggagaaagagaatgtgcagcattctgaaacagaaacttgagtaatacacatcaaagtgttaattatagttttctttgagttgtggaattatacatggtttaaattgcttccttttgcttttctgtattttccaaaatttttataatgtccacacacatttcataatttaaaaacccccataaaacaataaatactattcgtttaaaggactaactccttagcaacttttaaaagtctatgcatggcaatcaagttaacattttatgctacctggggaaagcacattagctagtttgcgtagagttgagctgtacccatctgcttaagttagtacccaatatagtctaccatgcaacaagtggatgagatggaatggatgcattttgatgaacaaggcaagaataggtgagagatgccttccttccttacatgttggccaagccttacaaggcacttcaatggaaggaaatgggtagataagggactgtaccacgccctgggacactagggatcatttgtatgtatcctgcttatcctagacaggtcctgtgctctgtattgctctcctacagccattaaaaagctattgggggaaatcatctcatcacaataagaagagtcaagtacaattcaatcatatagaaaatggttttggaagatgtccagggacagtcattccttctcaagattgaacaaccataaagtcatagatagcaaattataaatcaggtaagggcccaagctcatgtgaaggcgcaagtccataatgtgctaataagagaaaaagaaagggtacaggagacataaagattctctattgaggtgtggtaaaggagggaagggggccttcacctggccttcctgcccacctctcttggctcagccagccttggatgagttgtctccactgacatagaaggtctcctggtcaccagggagcaaacattaggaaaactacaacagaaagtcaacgaagagactgctattcctaagaatgtctccaaaaaggttaaaagtgtatacactactgaagttatacaaaaatatagaagtgggcacaaatagagaatcaaaataacctatatatcccatagcttgattctgtactatgagttcctagaaagagaactatggtaaatgagaaagaaaaatcagacaattccactgaccttcctgtcttattgtaataaaagataatgtaataaactttggtaaattgcattcatcaagttgctaaaaataagtcctgcttcaatttgcatggaggtgaagaattcaaaagaaaattgacaaccaactaccaaaaatctgcttctgctttctaattttcttt

SEQ ID NO: 89410 - DNA, 980 bp, Homo sapiens
tatgttcatcacagcattaatagcaaagacctgggttctcaaatttaagggagaaagtccacataattgaatgatgctccagtcctgtggaaatagcctgagaccacccaaatgatagcaagcaaaggctatttatttagagcttgctacagcatgctgtcagctgccagcatttgtgtttgacaaaagaytgacaggcaggcaggggagtgggaaagctgtatagtaaagggaaggccccaggtgcactctgattggagtttgttaacatgtgaagccaagacactaactagaataaggacatctcatgtgattgattagggagcgtaccggacttcctctgattgggcctgagttggaaggagggagttggagacagagagatagaaactgtcagttattgaccaagtcttgacctttctggaccagttgctgtggagggtgtgggtttagcttgctgggcttcttatgtggattggagtttattgtcatatatggcctggcattgtccatctgagtattcagtctctcaattggtatgaaggaaatactgacatgtcattaagtgtagagctgtgctgttcagtgcagcagccaccttgcgtggctattgagcaactgaaatgtagctgatcagaaatgaaatgtgctgtgaccgggcgcggtggctcaagcctgtaatcccagcactttgggaggccgaggtgggcggatcacgaggtcaggagatcgagaccatcctggctaacatggtgaaaccccatctgtactaaaaatacaaaaaaaaagaaaaccaaaaattagccaggtgtggtggtgggcgcctgtagtcccagctactcaggaggctgaggcaggagaatggcgtgattcccggatgtggagcttgcagtgagcagagatggcaccactgcactccagcctggggtgacagagcgagactctgtatcaaaaaaaaaagaattgagatatgctgtaag

SEQ ID NO: 89411 - DNA, 586 bp, Homo sapiens
cacagcctggaggactcttaaccttaagtactttctcgatttttttttgttgttgttggtttattttctttgtggcccccaccccaaccctaccacaaacacacattactcccayggcagctgtaggataagggtaaaagcgttcctttttcagccttgcagaggtttgctgggcaccaatttcatgcccacttttgtttctcttacttgtactggccaatcctttcactcataaactagtcagacagcaagcagaagaattcagacagcagcaaaaatcataaaacctttttcttttcattagaaaagagaaatattggttgattcagttcagaccgaagttgagtgcttgagccattccaataagttggaaagcactcttttccaaccttcaccattttcaaaccacttataaagggttgtctaggcaaaatattggaggaatgtttactccccaccaggagattataatttattgagtattcaaaaagagtaacaatgacattcagaaattctagtcatctatataaatatgtttaattttcttcaatagaaatctaaggaaagtagcaggaactgctagtga

SEQ ID NO: 89412 - DNA, 651 bp, Homo sapiens
tgcatttatcatctatcaccctcagcaatgttcagtataatctctgcatcatttaagaaatgtggagtatttggcaaaatttcaaaaagacctctggaaatgagaaaatgatgctataatattacctattaaaacaaatgaaagacaatctcttccttctttcttttttctttttttttctaaagagaaagagccagaacaactgaggttgaatwccagttctcatatagctgcatggccttgccatctgtgaatatcaacttcctcatgtctgaaatgagatgagatgctttgaccgtccaatacgacaatgtatgtgaaagtcctctataaacaactgaagcactacaaaaatgtttattgctgttaactgaaggtgctttgctaaaagaaattcttacgttttcccatcttcttccaggacagagaaattactctaaatagtaagagaataatttcatctttaaaaaagaatcaactttctgatagtaaaacttgttagatattgtaggcagggggcaataaaggtactttacccttttaattcatatttttaaatatttttttagagacggggtcttgctatgttgaccaggctgatcttgaactcccggcctcaagaaattctcctgcctcacctcagcctcccaa

SEQ ID NO: 89413 - DNA, 651 bp, Homo sapiens
tgcatttatcatctatcaccctcagcaatgttcagtataatctctgcatcatttaagaaatgtggagtatttggcaaaatttcaaaaagacctctggaaatgagaaaatgatgctataatattacctattaaaacaaatgaaagacaatctcttccttctttcttttttctttttttttctaaagagaaagagccagaacaactgaggttgaataccagttctcatatagctgcatggccttgccatctgtgaatatcaacttcctcatgtctraaatgagatgagatgctttgaccgtccaatacgacaatgtatgtgaaagtcctctataaacaactgaagcactacaaaaatgtttattgctgttaactgaaggtgctttgctaaaagaaattcttacgttttcccatcttcttccaggacagagaaattactctaaatagtaagagaataatttcatctttaaaaaagaatcaactttctgatagtaaaacttgttagatattgtaggcagggggcaataaaggtactttacccttttaattcatatttttaaatatttttttagagacggggtcttgctatgttgaccaggctgatcttgaactcccggcctcaagaaattctcctgcctcacctcagcctcccaa

SEQ ID NO: 89414 - DNA, 662 bp, Homo sapiens
aaataatgtttcatcagccatgtgggcaacccttagcccagtaaaactgacacatgaaattactcatcacagggaggtctgggacaattcacgtctttgttaatttaaatagacacatgaagaaattatttttcctctatcttttttccttcttctttctctttytttctttctctctttctctttctttttgtttttaactaaaggacattttgtaagcacatgaaaccagggaattgcagtagccatatggctactatgagatgagaaaaaggaacgtttttgcatcctgcagatctgccccatctatggtctttgtgttaactgagacgacaaatacgttactgtctaagcttcctttagtaacgtcttccactacctttatgttaaaacattttaaaagataaaattaaaaatataaaatgttgtccttttagagtggaataaagttggcttccataagctccgatgtgaattttacactgattctggccaaatttttcagacaattttagaaaattgcctaaaaatactctgtaaatctagtgttaattattagacattatttttttcaaatgttattaatattatagtgttagatgaagaaagtataatcactagggatgagtttaatttccttaagacagacagatatcaggatc

SEQ ID NO: 89415 - DNA, 662 bp, Homo sapiens
aaataatgtttcatcagccatgtgggcaacccttagcccagtaaaactgacacatgaaattactcatcacagggaggtctgggacaattcacgtctttgttaatttaaatagacacatgaagaaattatttttcctctatcttttttccttcttctttctctttctttctttctctctttctctttctttttgtttttaactaaaggacattttgtaagcacatgaaaccagggaattgcagtagccatatggctactatgagrtgagaaaaaggaacgtttttgcatcctgcagatctgccccatctatggtctttgtgttaactgagacgacaaatacgttactgtctaagcttcctttagtaacgtcttccactacctttatgttaaaacattttaaaagataaaattaaaaatataaaatgttgtccttttagagtggaataaagttggcttccataagctccgatgtgaattttacactgattctggccaaatttttcagacaattttagaaaattgcctaaaaatactctgtaaatctagtgttaattattagacattatttttttcaaatgttattaatattatagtgttagatgaagaaagtataatcactagggatgagtttaatttccttaagacagacagatatcaggatc

SEQ ID NO: 89416 - DNA, 663 bp, Homo sapiens
cgacagccctcagtgcacagcaagccccggggactggcgggatgctctgctccttgtctatacatctgtctcctttccaagcctagaatgtgatctctttagggcaggacccacaggccacccccacactctccttgcctgcccctccacaggtctctgtgtccgaggcaatttcagaatcccctcaagacaggactttgctgctgctcttgcccgagccctgtcggggctggatttgtgggcttctctctgggttccctttgcggactttttgggtatctctctcaaatgcagtcacttttttctttcctcagcatcagcagggaaagaatctggacttttctctgaatcaggttcttttggagaacactactaagtatatgcttgtgattttcktgtgatgacctcgcgtcatttcaaaaggacaaaggggttcaggctgggaacctgtaactcaggacagtttagggactctgcctgggacccatcaggccaccagcagagggtccggtgcacagatggatggtggggatctcctaggggatctcaaatggaaatgacattgttgttccgccagcttctacactgttcttgtttcttgttcttgggcttcctgggaagtcagctggtggaagcacaggattcttgcagaagtccctgaag

SEQ ID NO: 89417 - DNA, 663 bp, Homo sapiens
cgacagccctcagtgcacagcaagccccggggactggcgggatgctctgctccttgtctatacatctgtctcctttccaagcctagaatgtgatctctttagggcaggacccacaggccacccccacactctccttgcctgcccctccacaggtctctgtgtccgaggcaatttcagaatcccctcaagacaggactttgctgctgctcttgcccgagccctgtcggggctggatttgtgggcttctctctgggttccctttgcggactttttgggtatctctctcaaatgcagtcacttttttctttcctcagcatcagcagggaaagaatctggacttttctctgaatcaggttcttttggagaacactactaagtatatgcttgtgattttcttgtgatgacctcgcgtcatttcaaaaggacaraggggttcaggctgggaacctgtaactcaggacagtttagggactctgcctgggacccatcaggccaccagcagagggtccggtgcacagatggatggtggggatctcctaggggatctcaaatggaaatgacattgttgttccgccagcttctacactgttcttgtttcttgttcttgggcttcctgggaagtcagctggtggaagcacaggattcttgcagaagtccctgaag

SEQ ID NO: 89418 - DNA, 970 bp, Homo sapiens
ttctagaatgaactctgcccttctgtgcacatcaggattatgagagagcccttctggggtcacggttactattttggaaatttacctatagatatctagtcctaaatttcctatcatggggtaagacagccagcatgggtctcccagccaagatcactttattgggcctgattttgttctttattttaaaaaaaaaatctagattgaaagcatactcaggccaggtgcagtgccacatgcctgtaatcccaaaacttagggaaggtgaggcaagaggatcacttaaggccaggagttcaagaccacactgggcaacatagtaagactccatctccaccaaaaagcaaaacaaaacaaaaatcataattgaagtcatgctaaagagctatgaacatttcacccaggtatagctgcttctcaagccaaggagaagagggtgtttgttccttaatttccttgcatgaattctcactgagaaagggaggtactcactgaggtactcacacaggtacttagaaaaaaagaagcaatgagggcaaagcatgaaaactggagatcctggaaatgtatcggatccaagtccctaggcttaaaagccgtcaacaatattatcaaaataattttggtatccccgagagtaggcttttaggtagcgcaaacacacacacacacacacacacacacacacacacacacacacacacacacacacgycaatctgtaattactttggatattttcattaatatttgattttctgaataataattttaaaatctaatacttcttttgttattttcttaaatattttaattcttttaatttttttcttttttttttttcagagacagaatctcactctgtcacccaggctgaagtgcagtggtgcgattatagctcactgcagcctcgaactctcgggctcaagcaatccttccgtgtcagcctcccaagtagctaagactacaca

SEQ ID NO: 89419 - DNA, 970 bp, Homo sapiens
ttctagaatgaactctgcccttctgtgcacatcaggattatgagagagcccttctggggtcacggttactattttggaaatttacctatagatatctagtcctaaatttcctatcatggggtaagacagccagcatgggtctcccagccaagatcactttattgggcctgattttgttctttattttaaaaaaaaaatctagattgaaagcatactcaggccaggtgcagtgccacatgcctgtaatcccaaaacttagggaaggtgaggcaagaggatcacttaaggccaggagttcaagaccacactgggcaacatagtaagactccatctccaccaaaaagcaaaacaaaacaaaaatcataattgaagtcatgctaaagagctatgaacatttcacccaggtatagctgcttctcaagccaaggagaagagggtgtttgttccttaatttccttgcatgaattctcactgagaaagggaggtactcactgaggtactcacacaggtacttagaaaaaaagaagcaatgagggcaaagcatgaaaactggagatcctggaaatgtatcggatccaagtccctaggcttaaaagccgtcaacaatattatcaaaataattttggtatccccgagagtaggcttttaggtagcgcaaacacacacacacacacacacacacacacacacacacacacacacacacacacacgtcaatctgtaattactttrgatattttcattaatatttgattttctgaataataattttaaaatctaatacttcttttgttattttcttaaatattttaattcttttaatttttttcttttttttttttcagagacagaatctcactctgtcacccaggctgaagtgcagtggtgcgattatagctcactgcagcctcgaactctcgggctcaagcaatccttccgtgtcagcctcccaagtagctaagactacaca

SEQ ID NO: 89420 - DNA, 1065 bp, Homo sapiens
gagtatttggagcaagacacaggtgtgtgccattctgcacttacttggtaattaagtgaaaaaaatctaaaactgaaaatttaagagtagattttcaagtattgtttcaaaagttcaaacaatattaacaaactcagtgtctcaccccacctattggctttgcttttcgttttattgacccattttccagtaagctgtctacttaaagagactggtagcttgagacttaagtaatcagaacagataataatcctacaaaaaaaaaaaagagttttattctaatagttccagcaagtcttgagattgcatctcattgagctggcttcagtcacatcacattcctgaactaaggccctggtagtacaaagctcaatcctatcatcttgactgtcctcttcagagaagagattttcttctcttctctgcacctccgtctaacctgtactaaagttatcattagtttttccttaaattagagaatccaaacacatcaaactcatgcaaaataatgatgccagttcccttccttacattacacacacaaaaaattaactcaaaatggattatatacctaaatgtgagagtcaaaactataaaactcttacaaggaaacataggggtaaatctttgtgcccttgagttaggcaaagccttcttagaaatgacactaaaagcgtaagcaacaaaagaaaatagataaatttgacttcatcaaagtttaaaagttttataatacaagtaatactattaagacaaatgatcgcacagagaatrggagaaaatatttggaaatcatataacacatgtgacaagagacatgtatccagaatatatagagaactcctacaattgaataataaaggataattaatccaatatttaaatgggcaaagaatcagagtagacatttctctaaggaaggcatatgaataaccaataagctcaagagaagatgcttacaatgatcattcattaaggaaatgctaactaaaaccacaagataccacttcacaaagccactatagagtggctaataacaagaatcgtagaggatgtggagaaatt

SEQ ID NO: 89421 - DNA, 587 bp, Homo sapiens
acaatgaacatattaactctttgagagcagggtcctctttgctagcccagtgccatacacaasctgacattctataaacattagttgctttgttgaaacgacatcatttcaattacgaattctaatcattcttaggtaaattggagactctcaatgtcaatatgttgacactttataaattttaattagcatattggcaattatactccacagctgttttcatagggcacttcacaattattcatcagtttttgtcaagatattctcaggaggtgagtgataaagatcattccctgccattcttttgttctaaatttagaaaagcatagtacagtgattttatgaaatatattgagaagattcaggataaaaattgacataaaaaagtaaaattctttcttagccccctgtgccagtgaaaatccttctctagcatttgttcctacagaaaagcaaataatgtcttatttgattttgttgaactgcctgtagtccttgaagattgggtgagtctctagtcttctattcaaactgaaatgttttactttaataactcaagaaaagataattttagtgtatcttggctg

SEQ ID NO: 89422 - DNA, 587 bp, Homo sapiens
acaatgaacatattaactctttgagagcagggtcctctttgctagcccagtgccatacacaacctgacattctataaacattagttgctttgttgaaacgacatcatttcaattacgaattctaatcattcttaggtaaattggagactctcaatgtcaatatgttgacactttataaattttaattagcatattggcaattatactccacagctgttttcatagggcacttcacaattattcatcagtttttgtcaagatattctcaggaggtgagtgataaagatcattccctgccattcttttgttctaaatttagaaaagcatagtacagtgattttatgaaatatattgagaagattcaggataaaaattgacataaaaaagtaaaattctttcttagccccctgtgccagtgaaaatccttctctagcatttgttcctacagaaaagcaaataatgtcttatttgattttgttgaactgcytgtagtccttgaagattgggtgagtctctagtcttctattcaaactgaaatgttttactttaataactcaagaaaagataattttagtgtatcttggctg

SEQ ID NO: 89423 - DNA, 2006 bp, Homo sapiens
aatgctggtggtttttcttcttggttttataagccacagcctctcagtgaagtggcttttttacttccttctcacactcaatatctggggatttaatgtcagaagtgggttaacattttattaattacatttgatctcatggccatgaacttgggtatttgctcacctctaacaaggaaaatgtggtcgttgccttagaacatgagatcctttctgaataaattgcgaaagtcttttcaacagcctacttgttctttttacataggagcttagctttggaattacgtgaaagccacgctaaccagctacctgctttgtgtactgtcctaacaatttggcctttgattttatgcttctttcaaaagcatacaagcaataggcaaacattattcatcaaactggtttgatgacattcttttgaatttagctttttttattctcctatggcacagtcacatctattctcaaggctatgatgacccacgtgtgctgaggcctctgggcagaagtgccacattagagctttcattggacagatcaagagctccagagttcctgctggctgcctaaagaaagatatttagcattttctctgcgattgcctccttcccttgccacagttttctcagagttgtcttagaggaagtattcatctatatctctgttaagagctttgatgcataaggaccccgcttgcaggggctgtgaggctgcatctggcagatgtgttgatgtataactagcaaaatgatttaagttcaatctgatcaatactgtggttagtattagcctcacactcctcctgtgcatccttcaccaagcccacagtttctgcccagccatggtccttgaatctatactgcctgatgtggacacttgtgttaagaatagctaccctcaaaggtactcgcactgtcacattttgaacttctctgccctttcttcctttcctccctccccactcaatccccaacttcacatacccagaaatcctagaagcttcctcccagtaatctccttggaagaagctgaccaggctcaggggaaataaagtagtrgagaagtccatattggcctcttcctgtggtttcagctctaaaagggaaacaaaagccctagttggagactgaccagctgtttacccacttcacacacatggtaaatgttctctgctgataattcttgtttccatttgactaagtgagaatccttatgtctagggataaagtgactgactccaatgggaggtcactttcagaagaaacagaaatagatggattccacagcactaaccaatgctaatattgggtgtgttaaaaataaacatgtgttttccctcagtgaaatacaacttccccaaccatttcttttttcctttctctttctcaatatttcattaatgcaaacttttcctaactcaaaaggtattcctgcatacagattggtttccactaagagaagtatgttttgataaaatttacgcaaagtgagcaccataaacatagcagcataacatcacctatggtcatgctgagattgtaaccagtgaggtaaatctgagccaaagacagctttatatcttttagtggctttattccctttcaattcagtggcttgctgaaatagctgtaataattaaacagagaacttctaagctatctagattatataaagataggtgctaaaagtcacactagagtgggaaaagttttgtgtggcaatatggctaggttactaaactgccttatacagaacctaatgcaattagtacttctgaccatagactttccactcctttttaaaacagtaatactagcaaagaagcaatagaaaacaaagagatcacaatggtaaactcagaggttcagatatttgctctgtcgcttacagtttatatgaacttggacaggtaattgaacatttctgtgttactttattcatctataaacatgaatattagtaatacttttctctcaggcctgctttgaggatatgagaacacacac

SEQ ID NO: 89424 - DNA, 999 bp, Homo sapiens
ggacaaagacctgggaagatcttttttttttcacatttttctgtcattctcacatgcttataaccaaaaccactcttaaacgaatatgtgtttttccttgctagtaagggagaaagtgaagaggcattcctgctttgcatgtactttctgtgtcctcctcagtattttccatcctcttgttgaacagaatagattgcctccagataacatttgtttcattctgtgattttaatagcaatgaagcaacttgttttgcaggccctgaatccaaaattgagacatagcaatctggacaaataccaaagcttaattaagtctgctatcctggtgataaatatggactaaaaaattattctaggagatagagtacatataacattacattcttctctgtcaggtgcctcatcagcacagaccacagtgagatacaacctcatacacatacagttttagtaccttaatcatattcataaaattatagatatggatggtttctcccaaggttaccatttcataagaaataatttgaccycaaggtaatttggattacctttcaagaattttttgttgctggtgttgcgtttattgaaacaactcgtttgtgagaaaatattaaagttcatgtaaaataataaaaatgaagcatcacaggttaatgctactagacccttttctgtcccttgaaaatatagtctttggtttttcagacctctgagggaggctttattgtctgacccattaaattaattcttgggactcatttattttcttctttgctattaagctctcgcttggtaaagtagatgttattaattataaaagttccttgaggtgttatgacatatttagttagaactaatctactggtttaagttctgttaaattgaaactatttctttacttgtacttgagccaactttcacaattagaataaatatattgtttctattacatgtctaactgaatgtacttaaaaaataaacctctttgataatcaat

SEQ ID NO: 89425 - DNA, 645 bp, Homo sapiens
ctaatctcttgccagggcttccactggctgaacctaacaggaagccagctggcaagtaagtctgagaaagagcaaaagtttctttgagattcagagcagactagggggacaggagcggaagggacatgagagcaaatggcaaatgactgamagagtagatgagaaatcagaggagacacggatctgaatattgaaacaataaaactcatttagaaattttaagtgacacaggtggctaaatattccatcttaatccaagagatgacaatggaagtagggtgtttgccttaaagaggcataattgcaaaggaagcagctcagaaatttccacagagaacttcatgcaagcattattttgtgtgctccagtaaagatagtaataacagctacattagttgagtgtctagtgtacaatatatgttttacagggcactttggatgaactagtctaaatcatacttcaggatagcattgtaaccacacttaacagctgccaaccaaaactaaagtgcagaaaacttgagtgaactgcccaaggtaagacaaccaataaaaaggaaaaatagtatctaaagtccaatcttacaccaaatcctccgttcatggcattaaaccaccatgtctcagtgaactataattgtcaca

SEQ ID NO: 89426 - DNA, 674 bp, Homo sapiens
agataatatgacctgcatgccccaccttgatgacagtttgaaatgcacttaggaaaaatgaaaaccttttaacagcagtactgattattagtgaaagcatatagatagtgtctgttttgagtggtgcaacattttctttttgttttctggatcaagcacaagtagtttcatgttactgctacaagttgttttcagcaagagaggaaaaagcttccatggaataggagtcagcaagacgattctcttccccattctaccacttactattacatartatctcctctacttttcttttttttttttccttttattgctctgaagaagtagcaagatgctaattccaacagcacaaggaaaacgacctataatcttaaaaattaaataccaggaagtaatgactaacgattatctttacagagaagaatctggagcccagaaaggtgaagcgattagacacaagatcacatggccagtgagctgcaagctttcctgaccttaaatcaagtgatctatcccctcctctgtggattttttaattaatctgcattacaacccaagtagaatgagtcaagcggataatatgtaatgcctttttggaccagaaaaaaattggggcaatttggtaattggaccacagatggctttggtgataaattagcaaaagattccaggca

SEQ ID NO: 89427 - DNA, 532 bp, Homo sapiens
tgacaaaggtgccatttttttattaacccactttataaaaaccctgaatatttgttccctttcttagtctccactcagtggtttaagaattaattacaaatcttttaccaggcctcatagcagaaaaatagtaagaagtcctctgtgcaggtaagcctactagaaacatagttggctccaaatgcagtttccatagtgggcctccttctgaatgtctgtgctgatctcatggcctcataccaccagaagtttgtaaaaaaggacaactaatcacttgctacaacttgtcttcaagcaaygatagaaggaactagatcatcaataacaagaattcaagaatcacacacaccccactccttgggaggatacaggatgggtatataaatatgcaaataatgaaagtgaaccacacaggtgagcatgggcacctggagtttaaatgtagaccccacctgtggaagccaagagataggattgtttgatggagtagtagatacgagagacaggggaattctcagtttagagaaaaagg

SEQ ID NO: 89428 - DNA, 532 bp, Homo sapiens
tgacaaaggtgccatttttttattaacccactttataaaaaccctgaatatttgttccctttcttagtctccactcagtggtttaagaattaattacaaatcttttaccaggcctcatagcagaaaaatagtaagaagtcctctgtgcaggtaagcctactagaaacatagttggctccaaatgcagtttccatagtgggcctccttctgaatgtctgtgctgatctcatggcctcataccaccagaagtttgtaaaaaaggacaactaatcacttgctacaacttgtcttcaagcaatgatagaaggaactagatcatcaataacaagaattcaagaatcacacacaccccactccttgggaggatacaggatgggtatataaatatgcaaataatgaaagtgaaccacacaggtgagcatgggcacctggagtttaaatgtagaccccacctgtggaagccaagagataggattgtttgatggagtagtagatacgagagacaggggrattctcagtttagagaaaaagg

SEQ ID NO: 89429 - DNA, 679 bp, Homo sapiens
gtttgactagcaatggagattaattttcattaaaccatctgcaacagaccaaattatttgtgtctctccaaaattcatacgttggaattctaatcccattgtgatggtatttgaaggtggggtcttcgagaggtaattaggtcatgaggttggattcctcatgaatgttagtagtgacctagtaagaagggagcagagagctagctcactctttttctrccctgtgagatacaagaagacagcagtctgccacccagagaagggtctttacaagaacctgatcctactggtaccctgatctagacttccagtctctaaaactgaaaataaatttctgttgtttataagtctatggtactttcttatagcagtctcaactaagacactacctgaattttcctccctgatcccagttgtgaccagccatacacatttgtaaatgtgttcatggtagagactgcggccttaagcctataggtgtagatttcatgaacttggtctacctcaactttgctatttttgcagagaagagttgggccgctctatctatttctgtacccatcaccaatctttctatctcccatgtgattcaaaaatcattagtgtctggcagattgtattttccaaacatgactgtgcttatatctcccattttatgtgatcttcttacactgtaatt

SEQ ID NO: 89430 - DNA, 726 bp, Homo sapiens
cagcctgggcaacagagcgagcctccatctcaaaaaaacagaaaagtgtatttctcacagttctggaggctgggaatttcaagagcatggtgcctgcatcaggtgggggtcatcccatgtcagaagggcacaaggtagaaatgagtacatgagacaaagggaccatgggccaaacttgctttataacagccctctctcatgataacctgctgtgtgatagtgacattaatccactcatgagggctctgtccttgtgactcagtcacctcgtattaagccccatcttcaacactgttgcattgggagtcaaatttccaatgtgaacttttgggggacacattcaaaccacagcatttctgattcttccaggcctagatctcacatgatgttgctgttctcctggttaccacccccatcccttcccccatcttatcctagtttgctttctggacckggggaaaagggaaggaggatgcactatttttaggtagaagctgctggctatgacccagcacccctacagttattgatttggcttctaatgtatcttgagaagtgcagtgggtaccgtttttgttagtcatcctgaggccatgaactgggtcttctcatggctggcttggctccttcagactattataaatatccacaggccttgcctccctgccttcctctgcttggtttccttatgtttccatccctagctaccttggccttcctacactc

SEQ ID NO: 89431 - DNA, 2914 bp, Homo sapiens
atttattacagtcctgcaaccccgactgcccaccccttggggattcttgcctctgtcccagagatggtcaggcccagaggaaggttagtctcatgcctgctgttagaggcgcttcattgttctctttatccagggcaggaagtgtgagaccttgatgtagactcctggaggtgtcccttttttgtttccataggagagaataccttgggctacgtccttacacacgaggggccccccggagtccccctgtgaacagagagaggaaagactgagctagtgttccctgggatgggtggtctctgttatggattttgtgtgacatcagtgccaggcaggccttgtcactcacctccctcagtcctgggtctccagcatggccctggctgtgctttctggctctccccagaccaagcctttctctgcaattctcacggacactttggtgataagtgactgtcggatgacagatccttcccctccagccaccccagtccacccaaggagtggactaaagactagattccagggggacacaggctgcccaagctctgggctgagagcataaagatctggccactgtcataccccagaactccctcaagttcctctctccctgtggtctttctgggtagaggctggaaacccaaccttgaaaccggtctgtgtcttctttggatcccccacacaaatctcagtggctctgctgtaattgccatggaagagacgttcacactggcagtccttctgcactgtcagcaacacttcctgcagtgtggttgctaaagtgctcattgagacataaccccagccagccacactgcacagctgccctggcttcacctgggccttgctgctaggtagcctgagaggccgcacagctgtggtccacttggcctttctctccagctggtggggaagaagcaagaaagtccaggtcaggcaatggccttctgggccccgacacagtgatggggctgcacaatcttccctctcctctaaggcacaggaactgaccaagaggtcaggatggaaaggaggaaagggccggcatcccagtgggagtggaaccaactggaccaagaagagcaagagtggcaggagtgtgcctcacctgcagtagcatgatgtcgttggagaagttcttaggattataggctggatgggggatgggtcttttcacagggataaactgctgggtcygctcctgttccttgatattgtgggcccccaaggtgacatttatggagctgcacagagagcagagtgaggatgggggtggagtcacaggggatagagcccaggagcagtgaagagcagatgacagctgtggcagggtagggctgcagctgaggggaagttgaagggacaggagggctccagggctgagtgactgtgccctctacttcacaaagacatgaagagtagggcttctgggggctctctcttgccttcaggaaatatcatgaaattgctcgagtttgcattttgatccttaatgcatggattcaacctttactactgccttattgggccagtgtgtgaaaccatgccacttgctctgacctctgaccctctgaccctctgaccctgtcctatttctcagcctttcatcatcttagtcctattcccaggtggctgctccgatgagctttcatgggcttgtgttaccaggaactctggaagctcccctgggctgcagtccccaggagaaaacaagggtccctgtagggggaactcaggaggtgagctggtgctgctccttaccttccctggcagtgagcagctgtcagcacaaagtcctttctcactaggatgccgccacacctcttccgactcttctcttgcagaaactgaacaaaggccatgtaggggcgggagtggggcttggcctcatggcccccgatgatctcctctgaaaggaaagactggaagataaagtagctggggatggctgcagtcaggagagaaggcttaggacgacagtgattgagggtgaagtgttttgtgtgctgcagacagtgagggaggggtcctcctgagctctgcaggcagtactccttgcaggcagagcaagcttttctgaactttaagtctcagaaccttctctcagaaagaatggacagtgcttgacttctgcatcctactgcagaaacacacatggaggaagaaagatctattttcacagtggtagagccccagaggatcctggacaggacttcccaggctcctcctttttagtgagtctctctgattcctctgagcctctgctgtcctcctgattggtgccattttctaatgatctacccatgagcttctggagttggattttctaaaattctcatgtgccagggctgaacacattctaggttctcagtaagtgttgtttggtgcataaatgaatagcctccaattagcctttggctgaggtttagtgggggtagtgctggtgggattcaggacctcagggatgttagagggggttatcaccaggtcagtggagtagctgagggcctgcaaaggcagaaggaagtggagaaatcaactaaaaatgaatcgcaaagcccaggtggagccaaggtaatgggagagctatggacacagtcatcttgccatctctgagatcagttgcaccatgggcttccctcctggcaggggtgactgggtgggggcactgaataagtggttcttaagctgagtccagtaacaactcctatgactgcaacttggtgtctgagctcctctttcctgggttggagtgtagagtaataattacttatcttttttagcttcacattccctaccaaatgcctttctaagaacaatccacactccaggtcataaaggagaggtctagggagaggctaacacccattaaaccttttagggaacacccttcatttttcgatctttgctg

SEQ ID NO: 89432 - DNA, 730 bp, Homo sapiens
taaccctttgtctgtaactcccaaccctggttgcaaaatgcaatgacctaggctgactytttttttttaatcctatatctagaagtttctcattctgatttaattggtctgggatgactacattgggatacagactacattgggatatttataaagtttctcaggtgatttttaacatgtacaaagttgagaaacaatgccctacaccagtgattagtggcacatggccttggtagtacattacagtcacctgggggagctttaaaaaatactgattcccagggcataccccagatttattaaataataagaataagaggggagaaccacagtcatcaatatttttaaaactccccagcataggctacctgggttgagagacactgcctgtgctctgccagtgatataatgattatgatgtacattagacatcagatgattcattatcccgcctatatctcaactcactgcagctgggactcatattagacacctcatctttgtttcacatatagaattaacaaaattaatttcaggttctatcatacctttactaagatgaacattgtgtcagtgatcagagaattgcctctagtgtttctgacatatttgctttcacaatattttgagaactaatagtctactctgagcaaatattaatatcattccatgtgagtaaatttcgtcctggaattgactgtgggcaattcatgatttcacgagcactggg

SEQ ID NO: 89433 - DNA, 595 bp, Homo sapiens
cagaatcacagacttttctgaacactagtcatttacgtgtgtttagtagcatatacccagcaagagaaaggcaggctgccgttgcctttgtatagagtctgggtaggttttgatttcactcagagtcaagaacaaagcaacctctgacttttcctcaaactcagcccgtatggaatgacttttaatgacttcacgaactgctagccttcagatgactggagtgttttttgcttcttaagtttttccttctatgacgttttatgattataccttatggtgcagttctatttttgttctcatgtgtttctgagtgcttaaagtctagaggaaaaattttttaactcatttggctcccatgaaatgtgcttttcagtttggggataacgtggagagaagctttaagtactgtgccaataccaaacatggcattccctattaatgagccaattccatcccctgagtctgaataatttagagaagacgtgatgtcattgtctccttagagataaatggaaaggagtctgggtgtagaatttttgagtggtctttataataatagtaattaaaaaacattacytcatatatttaaactttg

SEQ ID NO: 89434 - DNA, 599 bp, Homo sapiens
aaaccccgtctgtactaaaaacatacaaaaattagctgagcatagtggcacgtgcctgtggtcccagctactccagggctgagacacgagagttgcttgaacttgggaggtggaggttgcagtaagctgagattgtgccactgcactccagcctgggtgacagagtgagactctgtctcaaaaaaaatctttgactaggtgcttttttatatataattacagtaaaaggcaggcaggctcagggcacaggggcccgtgtgggagaaaatatagatgactgaacctggtgccacagggggatgcttctcagggtgaatgacgggagagggcagtgatgcccagcagggtgaccctgggaacattctacagatctrcacatggctagagagagaacgggagggtgaatgttttgttcagttttagtcttgtgaaaaatacattaaaaaattgtagtctgggaaaatggaacatgagtcagctgaaaactcagaattattgaggggtggtggtcctttcctgtgccacctagtgacaaaatgaaagaaggcgtagttgaacatcagactgatttaattgtactcatgaaatgctgaccttta

SEQ ID NO: 89435 - DNA, 933 bp, Homo sapiens
attctttggctgggccttcactacccaagcttcctatattttctcttattgattccctatttcttgctcatcaggattctaaggtttccattttcctcaaataccatctacattatcaggtaaacgtaccctccttctagccatctagagggtgacaaaatcatagaagagctgtccacacctgttgggatctgagaccctggaggagacattacttctggaaaaaaagccacctgggcagatgacaaaccacgaatgggagaagtgccctggcctcttccccctctctcccttctgcctgccttctgccagtgcctcccactggccatgctggcctggaatccagctggcaaggaagctgagacacatggctggccagagaaggacagagcttctcctttccctgccccagctatagctctccatgagggtttagatacatttgtcttatattttccagtttaaaaattcaagaaagttacytgaaggttattccaaaaaattatctacagataacctagcccaaatttgtggggaaattttgggttatctgccaaggcagcccttacttacaccatgttctggaaacttccttgttccctttctcctctctccaccctgatctgcatgttttattatcttgttcttgtcctgtcttccagtacaggacgcatgaccaaaaggtcaattttgggccaagagaacttcagtttctttccatgtcactagagatatcacctgcatactcagcattctgagtagaagtgacctttgcaaaaactgtgaaataaatcacacataccaaaggatgtatgtgatgagtgtgtacattttaaagaacaatacttattttataaaagccaaatatctgcgctggaacctttggaatctgtcatgtacctccctcaggtgtacctccccacctcctgccat

SEQ ID NO: 89436 - DNA, 760 bp, Homo sapiens
tccatgagtttgtcatggcctgggtgtgactctttcctgatggaacctattctactttcctctcatttagagaaaaaggaaatgggttgtactgacttttgccattaaaagctgcctcaaggtctaacgcacattgcaggaatttttctgtgcttgtctttgacagcttggccccctgaagtttcccagtggacctgttgtcctgcagtttcccttgggctcctccttatgtagtgtagctggtttgagaagcagctgatgactgtttcaatttcaactgaagttccttacaaaactagccaatctgggaggtcatttgtctctgatccagatgtagtggtttgattattcttggcttatactaaagttggaagggaactgaagcatcaggtraaaaccacctacaccttcacagtgtgaaaaagaacaaatcacagctatgcacaccacaatggacagacatcacaaaaacgaagatgggcaaaaggagcctccctttatctgaggttcaaggacaggcaacaatgatctagggtacagggttgggaagaggcactatctctggggaattattgcctggtgaggggctggcacagggagactttcagggagagcaggaaatgttccatgtcttggtctggaacctgtgaggatgtatacgtatatacagagtcattgagttaatgcttaagctgtgtgcgttttgcctcatgtatgttatacttcaacacattttcttttttttttttttttcttctga

SEQ ID NO: 89437 - DNA, 760 bp, Homo sapiens
tccatgagtttgtcatggcctgggtgtgactctttcctgatggaacctattctactttcctctcatttagagaaaaaggaaatgggttgtactgacttttgccattaaaagctgcctcaaggtctaacgcacattgcaggaatttttctgtgcttgtctttgacagcttggccccctgaagtttcccagtggacctgttgtcctgcagtttcccttgggctcctccttatgtagtgtagctggtttgagaagcagctgatgactgtttcaatttcaactgaagttccttacaaaactagccaatctgggaggtcatttgtctctgatccagatgtagtggtttgattattcttggcttatactaaagttggaagggaactgaagcatcaggtgaaaaccacctacaccttcacagtgtgaaaaagaacaaatcacagctatgcacaccacaatggacagacatcacaaaaacgaagatgggcaaaagsagcctccctttatctgaggttcaaggacaggcaacaatgatctagggtacagggttgggaagaggcactatctctggggaattattgcctggtgaggggctggcacagggagactttcagggagagcaggaaatgttccatgtcttggtctggaacctgtgaggatgtatacgtatatacagagtcattgagttaatgcttaagctgtgtgcgttttgcctcatgtatgttatacttcaacacattttcttttttttttttttttcttctga

SEQ ID NO: 89438 - DNA, 2329 bp, Homo sapiens
aaccttcagttggtttcatggtttaaattcttttcaactttacagaaagtactccttttaacaggggaaaaataactttcttcttagctttttttttcatttagcttttgtaataataatgctgtgtaaaaaacaactaaaaagtctcagtggcatacaagagcrtgcaggtgggctgggtggcttggagggactcagctgggctcactctcaggtctggggttggctggggtttggctgatctagactggatatggctgggtggctcagcttcttgctccatgtgtgcaggttggctgagatggggtggcatcagattgcgatgctggagtatctgttccacattattctcatactccttataccagtgggctagccaggcatgttcttctcatagtaatagtggagatgcagcaaggcaaaaggaaatatgtgaggtctcctaaggcatgggctcatttccacctcattctgttggctaaagcaagtcacatggacaagcccaaagtcaaaggggcagggaaatgattgcctctttactgtgagagattgcaaagtcatgtagtaaaagacatgagcacagagagggggaaagaattggggtcaataatgcaatcttctacatcatggccttaggtccaccttctagaaatccactctagctaaacacgagaagcaatcactatcttaaagatgacttctacttctgttttgggttgctcagctggacttggggatctcactgtggctttctcccctctggacctcacttttctcaaatggggtgcatggcaggggccatctgtctttggaaggtcccagaaagctggagttggtaccttaatgatgtgctctattcatgagctccctggaggcaaggctctgtatcattccaagttgcactctgcaaattgctaagttccagggaagccaatattaatggcaatgcattaggaatgaggttatcttgaatttgtgtacttgttcccaaaactaccctgagaaactgtttgcattaggctaattttgttcattccttttgtaggaacatgttctggtaatagattcgacaagctatgatatttcctttaaagccttgctagagtaagattgatttcctccatgtgaagtacaacgcatcccgtctattaaacaaattaaactacttaggtcgacaaggctacaagaaggagcagtggtgagctgataaatgtttaacaaccaactctctggaagaaaatgtcttgatttgtagtatttgacaatttccatggtataagcactcctacatggcagactttaagctgccaatgtgatgatgtcccaaatgaagattcagaagaagtgcacctgtatgagcctgctctaccaccctgctgcccatgctgctgtgctgttgagatggattctcttgctgggtgttcttaggggagaggacatggcacttatgtgctatgtagagtttcttagaagttcaagtcagcaccggatcaatcagggtgaatccaaagtgcttatggaaaggactttctctgggatggcactgtttaaaagtaataataacactagctactttcccctctccccccatggtaactccacaccaggtacttttttcagtatttaacatgcattaacgtaattacttcttaccaaaactctatgagataggctctattggcatgaagagttaaatagtgagctttggactactctagttaaatagtgagactgagatttgaacccagctgttttggctgagagtccatgacttcaaagtcatgaagctatcctgatacccactcagaaccaggggagtttaaaattgggtccgatatccctactcactcccatatgaacagctccgccgaacactttgctcttatccacattctccatttggcaaataaatcctctgcaagatgcagcaacaagcatccccatccccacagctgagtgtgtcccacctacctgtgtgatgatgcatacctgaggccccagtcagaggctccacccagtggtgggcaagcccggcttttactggttaaaaggtgtttaaaaacatcttcaggaattttgcaagccattagtaaaaattaagttataagaacttaaaactaaatctatcatattaaaaaataaaggacataaatacccatcactcactacttcctaattattctactgtaatctgtgctcttggggttatttatgtcgatggcatctgtacagtggaaatatctatgtgatgatggtcactgagcttctcttcccgactccatcacatcagaagtttgaaatcatccatggtgggactatttatatcacg

SEQ ID NO: 89439 - DNA, 748 bp, Homo sapiens
ctcatctctcctgggaatatgaactgtgaatgaaagttgctggagtgcaagtagaagctgaaaggatcctatgaggtaattgatggcctctgggctcctggtgagtcaaaatcacagggaagagaaaattatgggccaagtggaagtcaagaggggaaaaagaatgtcactagaagacatttgatacaaggcagacattagcagatatacagaggtaattgagctactccaatggtggatatgggcatgaaaatatgactacctgttcctcctcaggttgcagcaaaatataacacccagactacttgtggcctctgtgcatattgtacttctggtttactttgaagaatttctctcccctagcactagagaaacaaggagaagatctcaaggctgccctggattcttcatgaaatatgctcttgttttcatgatgtttggatgttgtaccaaacctaagtccctattcctgtgtacccttaaaataactttgttatgtcatcaccactgtatattgatatattgataaagttctggctttttaaaaaattatatgtctytgatgctcaaacatacccagctgaattattcataacattcatcaaatgtggcttatcggttcaattcttctcagaaaaaaaagaagaataaaatattctccaccaatatgcatctaacatatttttcagctttgttgtgaaattcttgtctcataaatattttaccacagctataagatagagctctt

SEQ ID NO: 89440 - DNA, 702 bp, Homo sapiens
gagaagaataaatatctattcttttcaggttctgtattattttgctgaagatggaaatctcatggagagagcttaggattaaacttagttttgtttaaggatgccatctcctcatttgcaggtgggacattgagcttttctgccaagactgccttaaaatgtgagcaaatcagatcatcaaagcaaaatcagggtgctattagcagaaatgggaactgacgttggacaggcaaacacaacggaactcactagacataaaaactccttagagtcatggacttatttaattacttagcaagcattctcagaactggaactgtgctcaacaaacgctgcaaatcaacagctactggatgaggctgccctaatttgtacagccaggcattctcattactgcactctgccttactcctattgcctactatgattgcactcctttatataatgatcaaagactgtttccttaaattattaagcagtattcaactaagactttaactgttttctatttatctttaggatagtgacagaataaatgatgtggtaaaatagctagctcattcagcaaaattccagtaataagagtatttgtggaaaggtcaatctaaattagggatggctgtattatggactattttaactcyaaatattttgtgttattataattagaaggattaccggtaaggaactcttgccaaatag

SEQ ID NO: 89441 - DNA, 567 bp, Homo sapiens
ctttccactgctcctatcaaaagaatggaaaccctcaacttgctgctttgcagattcaggttttgtgcttcwttctggcctctcggggtggggccgggttagcagcaaggctgagctgcccctctttcttctgaagccttcatgggggcgaggagcacagggagagctcagtgcagggcctcccagtggccttctcagagtgggtggaaacccagcctggcactggcagcgtggcaccagaagtatgaagtgtaggtgtaaaggtgatgtaaaaggctagtaggttttttggtttttcattgtttgagttttgggcatagatgactgtgaagggcgaacactgccgatggatctgaatttgtagtatgtgcaccacttccaacttacgggatacccagctttgacggctttggacaaacacactgaggccaagatgtgctgagcttatcaggatcaggatcaccaagcagctgtaaaaaccctagcaagtgccttaagctgctgaaatttcatattaattgtctggtttgttcatggtcctagagtttgaggcagaaaagtcagtca

SEQ ID NO: 89442 - DNA, 620 bp, Homo sapiens
tttctttyttttttttttttagagacagagtcctgccctgttgcccaggctggagtggtgtggtactatctcgcctcactgcaacctccaccttctgggttcaagcgattctcctgcctcagcctcctgagtagctgggattacaggtgtgtgccaccatgcctggctaattttttgtatctttagtagagaaggggtttcaccatgttggccaggctggtcttgaactcctgacctcgtgatccacctgcctcagcctcccaaagtgttgggattacaggtgtgagccactgtgcctggccacatttagttttttaaaaccatctggaattattttaatgtatcccacaaaatcagaattttatttaatcttttttttctatatggataatccattgactcagaactacatataaagcagcccttcattttcccattgatttttcctccaatatcctaatgtgaaaaatatcaaacatacagcaaagttaaagtaattttctggtgaactcttgtatctacaccacctggattctgtcattaacatttgctatacttgctttatcaaatatctattcatcagttcatccttctatccatttaccaattttccctgtttt

SEQ ID NO: 89443 - DNA, 723 bp, Homo sapiens
ctggtgaaagccaaagagaaaccttgacagcagccaaagaaaaatgactggttacatatcaaaaacaacaatactgttaatggttgacctatcagaaaaaatggagatactgaaacaacatcttctatatccaatgatattatccttcaaaaatgaggtgaaaaaaagttattttcagaaaacaaaaattgggtttgtggccagcagataaacaacaagagttttaaaaggggaaggaaagtagtaacaacactaaatcaaaaacatgacatcagaggctcagagccctcatcagaacctgaccatgttggcactctgatcycagacttccaatctccagaactgtgagaaataaatttctgttgtttgtaagccacccagtctatagtacttgttacagtagcccaaactaagacacagacacataaatactgcacacattctttccaaagacacacaaaacatttataaaacctggcaatacatatattaaaaggtactcagtcacatttggaatcagggaaatgcaaaataaaaatcactacgagataaccctacataccctctagaataacagaaaatatttgccaactatatacttaacaaaagactcatatctaaaataatttaaaactcccaaaactcaacagtaggatataagcaaaaatttcaaaataagaaccttcgaaaatcatctcctccataaacccagcaagatcactg

SEQ ID NO: 89444 - DNA, 548 bp, Homo sapiens
ttctgctacttcatcttggaagcagaagtttgagatatgaagggtttcagataagctagtccttttttatactcagggaaaccactggratgttctgtgaaaatcagcatcatgtcagcccagcagttattctgtttattagatatccctttcaaattattgcttttgtgtgctttaccacaggtgtgaaatcactggacatttaactgtcatatagcatttgttatcatacacattgtagattttttctctcttttaaagaaaatatctgaagcaggtgtataaagtaatcttcactgtaaaataattagtgattgtttgaactggtatttttttttacagttaaaaagaactgaaaatactgtagtagcatttctttgtttctctttattttcttcagagactgcaaataggacatttcaagaaaaaggcatcctggtaggagagagcagaagttttaaacctcatttgaccttcatgaagttgtcaaaatcaccgtggctccgtaagaatgtgagtgcatgttcttattgcaagcctgttttacc

SEQ ID NO: 89445 - DNA, 951 bp, Homo sapiens
tctattgagggtaccaagtaccaagcattaygatgtgtatttaagatcaaagatggtaggcaaacacagccgtgctctcagagtttactttgtagtgggaagtcatgcaaacaaacaattacaatttaaagtggtaatgactgtaatgaagttaatgggaaccaagtgaaggtgcttttaatgctgccagggattgtcaggacaggctgcacagaagaggaaagttttgaactgaaaatgagaatgttcagtgtggagggaggcaaatgaaagagagattttccaggccgagaaagcagcataagcgacccagtgaagtctgtgcagggacgtgtaagtaattcactctgcacatgaattacttatctttaagtagttcagatcttttttttttttcacttttaaatatttttatttgctttttatatgtacgcttttatttctatatgttaaccattttcttctctctcctgtccatttttattttatatgcaagctattagaagttaactttacaattcagtcttttttttttaatgatacaactagtaatttattaagaccataaattccattacagtgaccctggtaggcaactctgtaaagttttgggctacttgtcatgtggttttgatttatatttgtctaatgatcagtgatttttttattttatttttttattattatttcttttttttattatactttacgttttagggtacatgtgcacaacgtgcaggtttgttacatatgtacacatgtacaatgctggtgtgctgcacccattaactcttcatttaacattaggtatatctcctaatgctatccctcccccactcctcccaccccacaacaggccctggtgtgtgatgttccccttcctgtgtctatgtgttctcattgttcaattcccacctatgaatgagaacctgcggtgtttggttttttgtc

SEQ ID NO: 89446 - DNA, 1113 bp, Homo sapiens
tagggagaatgtacaaaccagttgaccattgtatgctaagcttttgttgaaggaacctattagtatgacttccccttaagcaaatcttctttttccattaacttttcttagagaaaaaaacacttgcaatttaagaggaataagaaataagttctgaatgcaatttataagcaaactgaaagatatattcatctttaagggacaaaaatgataatttcctattatgtaaagaaagggagctattttgccccaaatcataatcatatgggaataagccaccaaatttaagccgcgtattcacaaaatatgtagaagcattaatttttcaaggtgaaaatagtaacacatttccatcgacttttataatttcatcacgctcccatgtatcacagtgaggaagcaaatttcaatggtactaaagatgcttcttcactaagttttcaaatacaatgatttcaaatggttttaatttacccttgtttatgatgaaaataaatgttattttgattgattggcaaacgtctactagcagcaataagagcaattatgtttgacatggagacattataaaatctataacccaaacctttaaagcctgatttaaaatgtcaaatttgacttatgagaacccgttataatcctgcttcatgcaaaaagcattaggttaatgctggagcaaagtactcttgccaagcatggactggcataattaatcagggatatttcagaaacgaatcatctycaaggggttattgatttactgtcatgacatgtttttcttatgggctgagatggtgctctggagctgggatgcactggcatgtatttttcagtgactaagccttgatctgtcctcctggattactgccatctctgcactgacatctgcaaacactcacatttgacggcctcatgcctgagtgtggtggcttccaagttgattagaattagttcagaggggttttggactagtctgagtgtaatcgaaagcagagaaccatgagtctcaagagactggcaagcaccctgcaaatggcattatattaacagagaatgtgcctgtgcatatgcacacacacatgcaaacatacgcaagcacacgacatgcaagcc

SEQ ID NO: 89447 - DNA, 1113 bp, Homo sapiens
tagggagaatgtacaaaccagttgaccattgtatgctaagcttttgttgaaggaacctattagtatgacttccccttaagcaaatcttctttttccattaacttttcttagagaaaaaaacacttgcaatttaagaggaataagaaataagttctgaatgcaatttataagcaaactgaaagatatattcatctttaagggacaaaaatgataatttcctattatgtaaagaaagggagctattttgccccaaatcataatcatatgggaataagccaccaaatttaagccgcgtattcacaaaatatgtagaagcattaatttttcaaggtgaaaatagtaacacatttccatcgacttttataatttcatcacgctcccatgtatcacagtgaggaagcaaatttcaatggtactaaagatgcttcttcactaagttttcaaatacaatgatttcaaatggttttaatttacccttgtttatgatgaaaataaatgttattttgattgattggcaaacgtctactagcagcaataagagcaattatgtttgacatggagacattataaaatctataacccaaacctttaaagcctgatttaaaatgtcaaatttgacttatgagaacccgttataatcctgcttcatgcaaaaagcattaggttaatgctggagcaaagtactcttgccaagcatggactggcataattaatcagggatatttcagaaacgaatcatctccaaggggttattgatttactgtcatgacaygtttttcttatgggctgagatggtgctctggagctgggatgcactggcatgtatttttcagtgactaagccttgatctgtcctcctggattactgccatctctgcactgacatctgcaaacactcacatttgacggcctcatgcctgagtgtggtggcttccaagttgattagaattagttcagaggggttttggactagtctgagtgtaatcgaaagcagagaaccatgagtctcaagagactggcaagcaccctgcaaatggcattatattaacagagaatgtgcctgtgcatatgcacacacacatgcaaacatacgcaagcacacgacatgcaagcc

SEQ ID NO: 89448 - DNA, 676 bp, Homo sapiens
agtaggaaggtactgaggaaccaaaagcagattcttctggttatttgggggagactggtgggagactgcctgaagaaaagaggagccatctttgttttctgcttttgatggagtttccagaagcttctgggttcccactcaggaaactgcagcagcacagctcctgatggagctctgattttggctgtggtaatgacaatggtaggtgactttggattcctgttttcatttattccttttctaatgctcttyctttctttctttggatctgactttctgacctatatcatttttcttttttctgaaaattttctttgaatatttcttgtaaggcaggtccatttgtgacaaatttcctcaatttttgtttgtctgaggaagtctttgcttctccttcactttggaaggataatttcactggatacagaattctatgttggtggatttatcctcggatattttaaatatttcaatctactctcttcttgtttgcataatttctgaagacagaagtccaatgtaattattgtccttattccttggcaagttaggtgtttttcccttctggcttctttcaggatttttctttgtctttggttgttctgcactttgaatgtaatatgcagaggtatagatttttgggtatttatcctgcttggtgtcttttgagcttcct

SEQ ID NO: 89449 - DNA, 556 bp, Homo sapiens
aagcaaatatgcaccaggcgcagtggctcatgtctgtaatcccagcatttttggaggcccaggggggtggatcacctgaagtcaggagtttgagaccagcctagccaacatggtggaaccccttctctactaaaactacaaaaattagccaggtgtggtggtgagcacctacccagctactcgggaggctgaggcaggagaattgcctccgggaggcggaggtggcagtgagccgagattgcaccattgcacatcagcctgggcgacaagagagaaactcaaaaaaaaaaaaaaaagaaaagaaaagmaaagcaaatatgatttctgatcattgccagacagaaacattttattttattttacatgtttttcttttattaatcagctttctcaggttgaaggaaacattttcatgaatttgtttccatcgatctgaccaccagcttttttttttttttttttttttgagatggaatttcaccttgtcacccaggctggagtgcagtgatgagatctaggatcactgcaacctccaccttctgggttcaggcaattc

SEQ ID NO: 89450 - DNA, 673 bp, Homo sapiens
tggaacagaagaaaggacattaggtaaaaaccaagaaaacctgacttagtgtggactttaattaattataatgtacaaatattggcttatgaattgtgccaaatgtgccatactaatgttagatacgaatcatacgrgcactgggtgcagagcacataggaactctttgtgctatctttgcaatttttctgtaaatctaaaactgttctaaaatttaaacttttttttttaaacctacacaaatgtaattttttttttttttttgagacagagtctcgctctgtcactcaggcaggagtgcagtgacgtgatttcagctcaccgcaacctccacctcctgggttcaagtgattctccccacctcagcctccccagtagctgggattacaggctcccacaacaacacccggctaatctttgtatttttagtagagatggggttttgtcatgtcggccaggttggtctcaaactcctgacctcaggagatccgcccacctcagcctcccaaagcgctgggattataagcgtaaaccactgcacctggccacaaatgtaaaattgtctatcattcagctctgcaggcacataccaaaggctctctctaggcagacatgggttacaggatctgaaaacacaatagggttcctgccgttagtaaacatacagcctgct

SEQ ID NO: 89451 - DNA, 673 bp, Homo sapiens
tggaacagaagaaaggacattaggtaaaaaccaagaaaacctgacttagtgtggactttaattaattataatgtacaaatattggcttatgaattgtgccaaatgtgccatactaatgttagatacgaatcatacgggcactgggtgcagagcacataggaactctttgtgctatctttgcaatttttctgtaaatctaaaactgttctaaaatttaaacttttttttttaaacctacacaaatgtaattttttttttttttttgagacagagtctcrctctgtcactcaggcaggagtgcagtgacgtgatttcagctcaccgcaacctccacctcctgggttcaagtgattctccccacctcagcctccccagtagctgggattacaggctcccacaacaacacccggctaatctttgtatttttagtagagatggggttttgtcatgtcggccaggttggtctcaaactcctgacctcaggagatccgcccacctcagcctcccaaagcgctgggattataagcgtaaaccactgcacctggccacaaatgtaaaattgtctatcattcagctctgcaggcacataccaaaggctctctctaggcagacatgggttacaggatctgaaaacacaatagggttcctgccgttagtaaacatacagcctgct

SEQ ID NO: 89452 - DNA, 626 bp, Homo sapiens
agtatactaagctataaccacctctcccaggaaatcatgtgtttgctgggagtgaatttttcagaaggcaccttggcctcatgacagggagggtctgattccaactctgccaatgaagaactgacagaccctggacaagctgtcttgcctctctgatcaattgctgtacctaaaatagtgtgcactgtgttgggggaagcaactaaaatttttgaaaaaaatttaattttttatttagtattttttatagggatggggtctcactatggtgcccaagttggttcaaactcctggactcaagcgatctttccttgacggmctcccatagtgctggaattataggcatgagttaccactccacaccgaaaataaaaaaaaatttttttgagtgggaaaatagaactatcaacttcacaggattattttaagctttaaatgagatagtgtatgcaaattacttactatattacatgaagtaagaactaatcctcataaagccatgtgtaatgctccataaagtaagcttaaaaacaaacaaacaaacccctgaaatttacattcagaattgctaaaatgttttcctgtaaaccatattggaaggaaatcgttccaagacatctcccatc

SEQ ID NO: 89453 - DNA, 1066 bp, Homo sapiens
gaaggctaagcttcgagatgtggggagaaggaggagccttgatggtagcacagcagaaaaggaaattagagaaaagctgcttctgttgggtgtgccctataaatctctactccactgttttggggaagcctcagtcaattacacrtggctcgtgaacacttttggtgttcatggattgttctgggggacttgaagaagggttgagatctatattaagaatgatgcctaatgaaaacagaggcccagctggaaatagctgcacttctgggatacataagaatttgagactatatgcaataaatggtagatgctattattactatatgcaataaatgacagatgctattattactatattatcagaattatcttagctcctgactggtaggcagaaaggaggtggaaactagatgctcatgggtggggatgtacctggggcagaccctgtagttgtcctcgagaagaagcttgtgaccaaggctctatgaagacagcaagggactgagcagcaattggcagtagccccagcggatgagcagcagcagagctgctgtgactctacagatggggccaaaggctggatccctgttagcagaacgaaggtctgaaatcagagcaggctcaacagaagtctgacttactgttttggaacgtggcttcctgaattctccctgactagaaaagaactggtcctatatctcaggttgggactgaccttcaaccttccacacagaaatgaagttgccttaagaacgttatacaccagccgggtgcagtggctcatgcctgtaatcccagcactttgggaggccgaggcaggtggacctgaggtcaggagttcgagaccagcctggccaacatagtaaaaccccgtctctactaaaaatacagaaaattagctgtgcgtggtcatgggcgcctgtaagcccagctacttggaaggctgaggcaggagaatcacttgaacccgagaggtggaggttgcagtgagctgagatcatgccattgcactccagcctgggcaacaagagcgaaactccatctcaaaaaaaaaaaaaaaagtcat

SEQ ID NO: 89454 - DNA, 1066 bp, Homo sapiens
gaaggctaagcttcgagatgtggggagaaggaggagccttgatggtagcacagcagaaaaggaaattagagaaaagctgcttctgttgggtgtgccctataaatctctactccactgttttggggaagcctcagtcaattacacatggctcgtgaacacttttggtgttcatggattgttctgggggacttgaagaagggttgagatctatattaagaatgatgcctaatgaaaacagaggcccagctggaaatagctgcacttctgggatacataagaatttgagactatatgcaataaatggtagatgctattattactatatgcaataaatgacagatgctattattactatattatcagaattatcttagctcctgactggtaggcagaaaggaggtggaaactagatgctcatgggtggggatgtacctggggcagaccctgtagttgtcctcgagaagaagcttgtgaccaaggctctatgaagacagcaagggactgagcagcaattggcagtagccccagcggatgagcagcagcagagctgctgtgactctacagatggggccaaaggctggatccctgttagcagaacgaaggtctgaaatcagagcaggctcaacagaagtctgacttactgttttggaacgtggcttcctgaattctccctgactagaaaagaactggtcctatatctcaggttgggactgaccttcaaccttccacacagaaatgaagttgccttaagaacgttatacaccagccgggtgcrgtggctcatgcctgtaatcccagcactttgggaggccgaggcaggtggacctgaggtcaggagttcgagaccagcctggccaacatagtaaaaccccgtctctactaaaaatacagaaaattagctgtgcgtggtcatgggcgcctgtaagcccagctacttggaaggctgaggcaggagaatcacttgaacccgagaggtggaggttgcagtgagctgagatcatgccattgcactccagcctgggcaacaagagcgaaactccatctcaaaaaaaaaaaaaaaagtcat

SEQ ID NO: 89455 - DNA, 1310 bp, Homo sapiens
tccagatggcattcatgtcttactcagaaagggcactgccattgtccccaaggcttctgtctactaattctattggtcttgtgttttgcttgcttggcaaaaaaaaaaaaaaaaaaaaaaaaaaaaaaaatggagctattttctgtctatataaatctacttatatgaataaccattaaagtgattttgtatatgcattgttgtagtgtcagcagtttaaagaaacagctactttgtttctttgacaaggtcttaacaaggactaccctgaagaggccccctctgaaaggttttatttatacaaacattgtcaggaaaaggaggtcaggacactatctctaccaagaagcaggaaagtataaaaacttttaaaaaatctccatgccttatcccccatacacatatcccccatacacacaccctaatacctacttgtgagtagaacaaattgcttccccacaaaatgctatgaagttgatttctctgaagatttcaatgtaattaaataaatattcctagtttcatagatgatagtgtaaaagatttcaacatttttaattcattggctacaattttataaatgtaaaaattatgaattatactatgatttaactatagcaggtactacaatgtacgtgttgtgaaatgtggcatctattaaccaactaattatgtagccttcaaagttagattaaaagagctgtgtaaaaggtgattctctaggcactgctgaagctgcaactgcagcttcaggctatagtactatcataatcactaagaaaacagcatttctatggctagaggctccactggtcgaattatggttgtcactcttgcccaaacccttttwttttcaccagcaggggccccaggcagtttgaaaatccttctgttgttactgttactagtttaaccactcttcagttattaatttagcaagaatttattgagcacctattggtgaaaggtaccaccttggctctggagacaccacagtgtggaaaaacacactctgtgggcagagagtctgccgtctgctaaatgaggaccagtatcttttccttgggccatgagggtccctctccccggatcgtggttccaatcacagcctgagggccaggaggctgggacctggtttgggccagaacttcttcataaggattaagccctctctcccctttacctccagaggttggaaacatcttcccctgtagcaaggcagtcaccttaaagctgcctctacttcccgttactcctgctacttctccgacccttctcactaccctctagttgttttaactcagtcatgg

SEQ ID NO: 89456 - DNA, 1342 bp, Homo sapiens
taaaatgtttaatttcacagaagccccactacagatgcttccttgttaaatgttatattaatattggagtccagaatgttctgagcattttccaactctgttccaaccttcctaatcctctcccttgtgagctgatgtgtataagcagatttaaatccttccctttctgtactaaagggagaaagaaaaggaagagatcaccctcagtgcttctttgctgctccttttctttagacatttaaccccttttagttcagaaaatgtaaactagcactagcatggtcttttaaggattttgttcatatcagtcatatatctgttattattwtgtatttaaagattgtgtttattcccacgatttgaagaagcctagccaaaaaaaaaaaaaaaaagattgtgtttatattattgctagaagatatgtgttgatgggaccaaaaaaagactggttaataaataaaaattttttctacactaattatatataaaccatattcacatgtacctttattaatatatatataccactatgtaaagaacttcattgctcttttaatttagcttctctttcactgactaatattttggatcaaagtgagctcttcttttttggcacaaacttataatcctattatttaattctttccagctgctgacatatagtacataatttcagatgttttagtatgtttgatgaatatttctttttttttcaatttaccccatctgaaattacttcatagtctttccagctagtctttccatcgttgatacataattgccaaagtagccaagttgaactccctacttttaggattcttgagtcactactttggattcttcaaaggtccttcgattctatgcaatctgggatgatacagacagcatgtatggtgaatgtcggacctacatcattcattactatcttatggatgatacggtggaaattcgagaggtccacgaacggaatgatgggagagatcctttcccactcctaatgaaccgccagcgtgtgcccaaagttttggtggaaaatgcaagtatgtttgattcagtttattctctgttacttgggatgtttttaggttcttaaaggagttacttaatcagtatgcaaaattcgtttatacttggaagcctctagctatttttgcttagatgctcagaaaatggcttcccacagctttcctcctttacttgcccctcggtccaggcgtgcccccaagacagtctggtacccaggtcaaggaaacaaaaccaaaacaacagtgggagatttatttaaagtgcagcagagcaaggtttctgaactgaaacaatttaatattagatttttaatgca

SEQ ID NO: 89457 - DNA, 736 bp, Homo sapiens
tgccattcctagcttttctttcccaacatgccaagctggaaggcaatcaatcaacccagggctccaaccagggtttggacaaagtgtcattatccctcaccagccaattcccarccactatgctctgtgaacctatctcaaaagggactttagaaaataaacacagataggaatatcatgcaagttatagttcatcagaaggcataggtggtggtgctggagacaggtataaaagaccataagaaaagacctataaattacttattaacttgaccactgtgactccctgatatatccaggtattaactcttttccttctcctaccctccatcagacatactcacgacttgctagtatctggtgtttatggattttacaaagtactatattcccaggagctgaagcccatggtccaaaatactgttttagtacaatactatttcctatttttcattgcaatgtatactgtgttgtcctctgcagctgtattattcatgaccctgccaattgttcttatcaactaagaaacgatgttttgaaatactacccctttgtgagctggagctgtccataaaatattactcagaggatagtgaagactcctattagagcaaccattaagctttcattccttagaattaataatttcaggttctttaacctactatggtctgaatgtttgtgtcccccccacctcccctcagctcccccagaatttgtatgttgaaacttaacc

SEQ ID NO: 89458 - DNA, 635 bp, Homo sapiens
tccctggtccctgctcagttccaacactgtgtttcctgggaaagtggtacactgccacccaaaccagcctcctccagtgtggcccagatatcacggcaggctgtgagggagaagtagtctgtttgcctgtgggaggcaccttggtcattacatggacagtctagatctcaggccggggtgcagtggaaatggtaggctctggaaacccaagggtattgcagaaaactagctgccttctgccaaagcagcagtccagattcttgctcggtttccactcccctcctccaaatctgaagagattatttggtggtcactgagtcacagaagttgccctggaattgatcttcaagatggtctaaatcccctcagactctgaggcccagagaggtgaagtcatccaccaaacggcagcccagtgtgccatggcctatctggtgctggaactcagactccctgattcccagccagtcacctttctacctagccccatgctgtccttgtgggggcaggtgtggtggctggcaaaggggactgccrttcttagattgccccagcatcaggaaatgtggttgcttcattcactggatggaaacagcatggtttttcatgaccttaatgacagtggcatgaagtag

SEQ ID NO: 89459 - DNA, 825 bp, Homo sapiens
ttaatcagtgccttttgggtgctctgtgtcagaaaatgcagtgtcccatgggggttaactgtcatcctgccctcaaggtgcttggggactacaccaaggtggcaacacaagacccactgctaaggtggggatggccagagctgagaagctcacagcaaaggaaggatgcctgggggatggaatagctagagagggcttcccggagtgggtggggccgggcccagaagggtgggcgagacccagacaagtggagaggaagggtacgctgcccagcagtctacctgctacaggtgtgatggcagctcccatacctgatcagtgagactcacttcctcttgccttgagcattctcccttggtagtgtcacccatctccttagccccargcctcatctctgtgccgacattgctacatctgggtctccagccaggacctcacccctgaactgcagacactggttttgatgcctcctgagcatttttgcctgggaaattcacacctcacacttagcatgtgcaaaccaagccttccacttcccaccaacagcatctccttccacatccagatctcagatgacacacccagcccttcacactcagaaccttaacattgtcttggacgccttctccccctttccagttagaccccaatcctggtgtctgcatgaagtagtcagtgactcagtgtggtctctttactccctctgccactgctctggccaccctatctctagaactccaatgttggtgccactgagcatcactaaacatgattctgcctgtgtcatgcttttctccagagccgtctgtggctgcctcacctaca

SEQ ID NO: 89460 - DNA, 997 bp, Homo sapiens
tggcctctgtttctgtcctggggaatcaggctgggctcccaggaggaagctggcttctctctgtctctctcctgtgggtaaagcagcttcttagagaacagaggcatatgtgctcgcttgccctctctctctstctctgtgtgtgtgtgtgtgtgtgtgtgtctttcagtttttatcaaagttacacatgtctggagtttaaagagtcaaatatttccatagattttgttgtgggaaacagcagtactctttctctttgccccacattttctctctgcccaacccccacccacccaccggtcaccactcccagaagcagtacctttcatctcttttggcagattgtcttggtttgccatatctctacataatgtgcttgggttgcccatgacttggcttctcagcttcagcattatctgcaggctccaaagcctttgccattcgcattccacctccggccacctccctatcctctcattagtgttgtatcataaataattcacagccaagccataaagtaaaccatgattactttcctttcctgttttcactgtgtataatcattgtatgtatgtgtgcttaactgcactttgttttctatacatttgttactaattcaaccccagattcacgcctcacccaaatttcccctcaagacattggagatgttcagcagcacctgacgctctgtgcatcttgtcttgctgaggcaggggctccgctgagttgtctggtggctcctgactgccccggggctcccctctccatggtggtgcactctcatccagcgagctccctccacccactcccggaggtcctctctgcctcctgtgttgggtcttctctttccagaaccttgggtcttccttttccttggttttcatcctcatcttacagagaccatccttcagtgtggtcttcttcagagaagatgcatgagagggaaatactttgatccttcacatatctgaaaatgctggaaatgtctttattctat

SEQ ID NO: 89461 - DNA, 997 bp, Homo sapiens
tggcctctgtttctgtcctggggaatcaggctgggctcccaggaggaagctggcttctctctgtctctctcctgtgggtaaagcagcttcttagagaacagaggcatatgtgctcgcttgccctctctctctctstctgtgtgtgtgtgtgtgtgtgtgtgtctttcagtttttatcaaagttacacatgtctggagtttaaagagtcaaatatttccatagattttgttgtgggaaacagcagtactctttctctttgccccacattttctctctgcccaacccccacccacccaccggtcaccactcccagaagcagtacctttcatctcttttggcagattgtcttggtttgccatatctctacataatgtgcttgggttgcccatgacttggcttctcagcttcagcattatctgcaggctccaaagcctttgccattcgcattccacctccggccacctccctatcctctcattagtgttgtatcataaataattcacagccaagccataaagtaaaccatgattactttcctttcctgttttcactgtgtataatcattgtatgtatgtgtgcttaactgcactttgttttctatacatttgttactaattcaaccccagattcacgcctcacccaaatttcccctcaagacattggagatgttcagcagcacctgacgctctgtgcatcttgtcttgctgaggcaggggctccgctgagttgtctggtggctcctgactgccccggggctcccctctccatggtggtgcactctcatccagcgagctccctccacccactcccggaggtcctctctgcctcctgtgttgggtcttctctttccagaaccttgggtcttccttttccttggttttcatcctcatcttacagagaccatccttcagtgtggtcttcttcagagaagatgcatgagagggaaatactttgatccttcacatatctgaaaatgctggaaatgtctttattctat

SEQ ID NO: 89462 - DNA, 997 bp, Homo sapiens
tggcctctgtttctgtcctggggaatcaggctgggctcccaggaggaagctggcttctctctgtctctctcctgtgggtaaagcagcttcttagagaacagaggcatatgtgctcgcttgccctctctctctctctstgtgtgtgtgtgtgtgtgtgtgtgtctttcagtttttatcaaagttacacatgtctggagtttaaagagtcaaatatttccatagattttgttgtgggaaacagcagtactctttctctttgccccacattttctctctgcccaacccccacccacccaccggtcaccactcccagaagcagtacctttcatctcttttggcagattgtcttggtttgccatatctctacataatgtgcttgggttgcccatgacttggcttctcagcttcagcattatctgcaggctccaaagcctttgccattcgcattccacctccggccacctccctatcctctcattagtgttgtatcataaataattcacagccaagccataaagtaaaccatgattactttcctttcctgttttcactgtgtataatcattgtatgtatgtgtgcttaactgcactttgttttctatacatttgttactaattcaaccccagattcacgcctcacccaaatttcccctcaagacattggagatgttcagcagcacctgacgctctgtgcatcttgtcttgctgaggcaggggctccgctgagttgtctggtggctcctgactgccccggggctcccctctccatggtggtgcactctcatccagcgagctccctccacccactcccggaggtcctctctgcctcctgtgttgggtcttctctttccagaaccttgggtcttccttttccttggttttcatcctcatcttacagagaccatccttcagtgtggtcttcttcagagaagatgcatgagagggaaatactttgatccttcacatatctgaaaatgctggaaatgtctttattctat

SEQ ID NO: 89463 - DNA, 997 bp, Homo sapiens
tggcctctgtttctgtcctggggaatcaggctgggctcccaggaggaagctggcttctctctgtctctctcctgtgggtaaagcagcttcttagagaacagaggcatatgtgctcgcttgccctctctctctctctctgtgtgtgtgtgtgtgtgtgtgtgtctttcagtttttatcaaagttacacatgtctggagtttaaagagtcaaatatttccatagattttgttgtgggaaacagcagtactctttctctttgccccacattttctctctgcccaacccccacccacccrccggtcaccactcccagaagcagtacctttcatctcttttggcagattgtcttggtttgccatatctctacataatgtgcttgggttgcccatgacttggcttctcagcttcagcattatctgcaggctccaaagcctttgccattcgcattccacctccggccacctccctatcctctcattagtgttgtatcataaataattcacagccaagccataaagtaaaccatgattactttcctttcctgttttcactgtgtataatcattgtatgtatgtgtgcttaactgcactttgttttctatacatttgttactaattcaaccccagattcacgcctcacccaaatttcccctcaagacattggagatgttcagcagcacctgacgctctgtgcatcttgtcttgctgaggcaggggctccgctgagttgtctggtggctcctgactgccccggggctcccctctccatggtggtgcactctcatccagcgagctccctccacccactcccggaggtcctctctgcctcctgtgttgggtcttctctttccagaaccttgggtcttccttttccttggttttcatcctcatcttacagagaccatccttcagtgtggtcttcttcagagaagatgcatgagagggaaatactttgatccttcacatatctgaaaatgctggaaatgtctttattctat

SEQ ID NO: 89464 - DNA, 921 bp, Homo sapiens
cccttcattgcggcgggctgcgggccaggcttcactgagcgtccgcagagcccgggcccgagccgcgtgtggargggctgaggctcgcctgtccccgccccccggggcgggccgggggcggggtcccggcggggcggagccatgcgccccccccttttttttttaaaagtcggctggtagcggggaggatcgcggaggcttggggcagccgggtagctcggaggtcgtggcgctgggggctagcaccagcgctctgtcgggaggcgcagcggttaggtggaccggtcagcggactcaccggccagggcgctcggtgctggaatttgatattcattgatccgggttttatccctcttcttttttcttaaacatttttttttaaaactgtattgtttctcgttttaatttatttttgcttgccattccccacttgaatcgggccgacggcttggggagattgctctacttccccaaatcactgtggattttggaaaccagcagaaagaggaaagaggtagcaagagctccagagagaagtcgaggaagagagagacggggtcagagagagcgcgcgggcgtgcgagcagcgaaagcgacaggggcaaagtgagtgacctgcttttgggggtgaccgccggagcgcggcgtgagccctcccccttgggatcccgcagctgaccagtcgcgctgacggacagacagacagacaccgcccccagccccagctaccacctcctccccggccggcggcggacagtggacgcggcggcgagccgcgggcaggggccggagcccgcgcccggaggcggggtggagggggtcggggctcgcggcgtcgcactgaaacttttcgtccaacttctgggctgttctcgcttcggaggagccgtggtccgcgcgggggaagccgagccgagcgga

SEQ ID NO: 89465 - DNA, 1224 bp, Homo sapiens
ggaaaagaaaaaacaataataacctactatgtatcttagctgtgaatagcaagttcataactgaaacaatgtaagcattaaatattaacctatatttttgtttttattgaatgagttaaaaagtatatctagtctactgcactgcatgagatagatgcctttaaaagtcttgttaaaataaatctacactattgtgatataatttgtatgtaataaaatgtagccatttaagtgtcgagtttagtaattttgacaaatatagtcacccctgtaaccaccactacaatgaagaacatttcagcaccccaaaagtttccttgtgcccccttgcagttagacgccctctctacactcagccccaggcaatcactgacctgctctctgtcattgattagatttccctataaaggaatttcatgtagatggaagcatgcagaaccattgttgtttccatttgcatcctcaccagcaatgtctgcaagcgtcagttgcttcacattagccccagttagtcctgccagtcttctaaattttaactaatctaagtgagtgcatagaggtaactatttgcagttttgttttgttttagggacatagaatgtgcttttgttttcaagatgtttcctgtcacacagactttcaactatttcccttcctggaatggacgaggagacaggtgtcagccgactatacatttcagggtattttcaggtatggaagttgctgtgtacattaagttactatsgttaggtttaaatgaaaatcagatttcacaggagcttctgagcttgttcaaatataagattaaagatgatcaaagcatggttctcatggtaaagatcctgtgaatctttatgagcctgtactgctccctagactgcacctatcactctatgcagtaaccattttcctcccattatattctttatttcaagtaaggcttattgagatataatttccaatagtgtaattcactcttcttaggtgtacattcaataaagtttgacaaatgtatatagtcctataatcactaccacaataaaaatataaactatttttatcaccccgaaagttccccttgtggccctttgtagtcaatcccctccctccacctccagctcctggcagctatagatctgatttgccctttccagaagtttcacatcattggaaccacaccatattatagcttttccagattggtttctctcatttagcaatatg

SEQ ID NO: 89466 - DNA, 1224 bp, Homo sapiens
ggaaaagaaaaaacaataataacctactatgtatcttagctgtgaatagcaagttcataactgaaacaatgtaagcattaaatattaacctatatttttgtttttattgaatgagttaaaaagtatatctagtctactgcactgcatgagatagatgcctttaaaagtcttgttaaaataaatctacactattgtgatataatttgtatgtaataaaatgtagccatttaagtgtcgagtttagtaattttgacaaatatagtcacccctgtaaccaccactacaatgaagaacatttcagcaccccaaaagtttccttgtgcccccttgcagttagacgccctctctacactcagccccaggcaatcactgacctgctctctgtcattgattagatttccctataaaggaatttcatgtagatggaagcatgcagaaccattgttgtttccatttgcatcctcaccagcaatgtctgcaagcgtcagttgcttcacattagccccagttagtcctgccagtcttctaaattttaactaatctaagtgagtgcatagaggtaactatttgcagttttgttttgttttagggacatagaatgtgcttttgttttcaagatgtttcctgtcacacagactttcaactatttcccttcctggaatggacgaggagacaggtgtcagccgactatacatttcagggtattttcaggtatggaagttgctgtgtacattaagttactatggttaggtttaaatgaaaatcagatttcacaggagcttctgagcttgttcaaatataagattaaagatgatcaaagcatggttctcatggtaaagatcctgtgaatctttatgagcctgtactgctccctagactgcacctatcactctatgcagtaaccattttcctcccattatattctttatttcaagtaaggyttattgagatataatttccaatagtgtaattcactcttcttaggtgtacattcaataaagtttgacaaatgtatatagtcctataatcactaccacaataaaaatataaactatttttatcaccccgaaagttccccttgtggccctttgtagtcaatcccctccctccacctccagctcctggcagctatagatctgatttgccctttccagaagtttcacatcattggaaccacaccatattatagcttttccagattggtttctctcatttagcaatatg

SEQ ID NO: 89467 - DNA, 1224 bp, Homo sapiens
ggaaaagaaaaaacaataataacctactatgtatcttagctgtgaatagcaagttcataactgaaacaatgtaagcattaaatattaacctatatttttgtttttattgaatgagttaaaaagtatatctagtctactgcactgcatgagatagatgcctttaaaagtcttgttaaaataaatctacactattgtgatataatttgtatgtaataaaatgtagccatttaagtgtcgagtttagtaattttgacaaatatagtcacccctgtaaccaccactacaatgaagaacatttcagcaccccaaaagtttccttgtgcccccttgcagttagacgccctctctacactcagccccaggcaatcactgacctgctctctgtcattgattagatttccctataaaggaatttcatgtagatggaagcatgcagaaccattgttgtttccatttgcatcctcaccagcaatgtctgcaagcgtcagttgcttcacattagccccagttagtcctgccagtcttctaaattttaactaatctaagtgagtgcatagaggtaactatttgcagttttgttttgttttagggacatagaatgtgcttttgttttcaagatgtttcctgtcacacagactttcaactatttcccttcctggaatggacgaggagacaggtgtcagccgactatacatttcagggtattttcaggtatggaagttgctgtgtacattaagttactatggttaggtttaaatgaaaatcagatttcacaggagcttctgagcttgttcaaatataagattaaagatgatcaaagcatggttctcatggtaaagatcctgtgaatctttatgagcctgtactgctccctagactgcacctatcactctatgcagtaaccattttcctcccattatattctttatttcaagtaaggcttattgagatataatttccaatagtgtaattcactcttcttaggtgtacattcaataaagtttgacaaatgtatatagtcctataatcactaccacaataaaaatataaactatttttatcaccccgaaagttccccttgtggccctttgtagtcaatcccctccctccacctccagctcctggcagctatagatctgatttgcccyttccagaagtttcacatcattggaaccacaccatattatagcttttccagattggtttctctcatttagcaatatg

SEQ ID NO: 89468 - DNA, 770 bp, Homo sapiens
tttatctttttaacttctgacctatttgtgtttttatgtgtaaaatgagtttcttgtaagcagcatatagttgtctttcttttttatccaatttgacaatctcttttaatcaaaatgtttgaaccatttacatttaatatggtgttgatccttatgaaattttcatgagctcttcttccatgaacttccccacactccccagtactctgccctacatgttgtagccaatttagcctcctcataattcagtctgtgtctcctcaagtaaaatgaatctctctccaagattcatgatccagaaacaccctcaagcagatagctgggttcacttcatttgtctctcttctcccaggaatcacatccctgcattgcctgttgcctaatatcccaaagccgtttccttattattttgccaattttctagtagtttatgatgggagggtaaatccagctctaattattcaatcatggctgaaatggatgtctccttcaaaatctttttaaattaataaattagctgaagaaatcatgacatatacagtgtcaaagactagctataaaatgatataaatttgtatatatatacatgtatrtgtgtgtgtgtgtgtgtgtatatatatatatatatatatagttggttggtgcaaatgtaatcacatatttttgccattaaaagtaatggtaaaaaccatgattatgtttgcaccaacctaatatacaaatttaatataaaataatataaatgtggcagtatagtatctacttcacta

SEQ ID NO: 89469 - DNA, 770 bp, Homo sapiens
tttatctttttaacttctgacctatttgtgtttttatgtgtaaaatgagtttcttgtaagcagcatatagttgtctttcttttttatccaatttgacaatctcttttaatcaaaatgtttgaaccatttacatttaatatggtgttgatccttatgaaattttcatgagctcttcttccatgaacttccccacactccccagtactctgccctacatgttgtagccaatttagcctcctcataattcagtctgtgtctcctcaagtaaaatgaatctctctccaagattcatgatccagaaacaccctcaagcagatagctgggttcacttcatttgtctctcttctcccaggaatcacatccctgcattgcctgttgcctaatatcccaaagccgtttccttattattttgccaattttctagtagtttatgatgggagggtaaatccagctctaattattcaatcatggctgaaatggatgtctccttcaaaatctttttaaattaataaattagctgaagaaatcatgacatatacagtgtcaaagactagctataaaatgatataaatttgtatatatatacatgtatatgtgtrtgtgtgtgtgtgtatatatatatatatatatatagttggttggtgcaaatgtaatcacatatttttgccattaaaagtaatggtaaaaaccatgattatgtttgcaccaacctaatatacaaatttaatataaaataatataaatgtggcagtatagtatctacttcacta

SEQ ID NO: 89470 - DNA, 770 bp, Homo sapiens
tttatctttttaacttctgacctatttgtgtttttatgtgtaaaatgagtttcttgtaagcagcatatagttgtctttcttttttatccaatttgacaatctcttttaatcaaaatgtttgaaccatttacatttaatatggtgttgatccttatgaaattttcatgagctcttcttccatgaacttccccacactccccagtactctgccctacatgttgtagccaatttagcctcctcataattcagtctgtgtctcctcaagtaaaatgaatctctctccaagattcatgatccagaaacaccctcaagcagatagctgggttcacttcatttgtctctcttctcccaggaatcacatccctgcattgcctgttgcctaatatcccaaagccgtttccttattattttgccaattttctagtagtttatgatgggagggtaaatccagctctaattattcaatcatggctgaaatggatgtctccttcaaaatctttttaaattaataaattagctgaagaaatcatgacatatacagtgtcaaagactagctataaaatgatataaatttgtatatatatacatgtatatgtgtgtgtgtgtgtgtgtrtatatatatatatatatatagttggttggtgcaaatgtaatcacatatttttgccattaaaagtaatggtaaaaaccatgattatgtttgcaccaacctaatatacaaatttaatataaaataatataaatgtggcagtatagtatctacttcacta

SEQ ID NO: 89471 - DNA, 770 bp, Homo sapiens
tttatctttttaacttctgacctatttgtgtttttatgtgtaaaatgagtttcttgtaagcagcatatagttgtctttcttttttatccaatttgacaatctcttttaatcaaaatgtttgaaccatttacatttaatatggtgttgatccttatgaaattttcatgagctcttcttccatgaacttccccacactccccagtactctgccctacatgttgtagccaatttagcctcctcataattcagtctgtgtctcctcaagtaaaatgaatctctctccaagattcatgatccagaaacaccctcaagcagatagctgggttcacttcatttgtctctcttctcccaggaatcacatccctgcattgcctgttgcctaatatcccaaagccgtttccttattattttgccaattttctagtagtttatgatgggagggtaaatccagctctaattattcaatcatggctgaaatggatgtctccttcaaaatctttttaaattaataaattagctgaagaaatcatgacatatacagtgtcaaagactagctataaaatgatataaatttgtatatatatacatgtatatgtgtgtgtgtgtgtgtgtatrtatatatatatatatatagttggttggtgcaaatgtaatcacatatttttgccattaaaagtaatggtaaaaaccatgattatgtttgcaccaacctaatatacaaatttaatataaaataatataaatgtggcagtatagtatctacttcacta

SEQ ID NO: 89472 - DNA, 872 bp, Homo sapiens
agaactcacaaaacagatttctaaggaattccatggtatgaaagcaaaactagaaaactgacagctagcattcctgttctcaggagaaataggcatcttaaacatttttgtgatttttatatcgataggaatcaggctgatttaaatggtctttatcaaattactaagaatgcagataaacttgttaccagggaataattttatccatgaacagacatcaaattcactgactttggtcacattcttgatcaattctacattaaatggtggtacaataattttgtggtattcatattacagagacatagggcagcagagagtccaacttttcaactaaagaaaacctatgtttttttaaaattgacacatacactgttgcaacaattaagcaccaggaaattaaaaaacaatcacaaccttaaagccagtgtgagaatcatctgagctgaagaaaaaagctaattctgattgtagagctcaagttctcctttttatctccccttttctctctttcactttgtataccttatgctcaatcccgaaaccccacctcaaaatcacactggctataaagctaatcatgtcattcatctctctcgaaagcagtgcagagtccccatgaacaacacacactatgtgactgccacgtgcaagacccccagtgatsaggcaggatggagatgccacagcagccacacagggggcctcataactttctgctggttaatcacgccctgcaacccttccatcctcgatggcggctactcaaaatatttctgaagttcactctacttagcactttcacagtttacactgtacaaatttccactggcattctggtggaagaatcatcttaaatcaccagtaatttg

SEQ ID NO: 89473 - DNA, 842 bp, Homo sapiens
tgcatgtaatagttaagttaccgaagatggactgagttaggcggaaaagcggcctgaagaaatctctagctgataggattgactaaacatttggaaatgaaacctgaaagaattccacagttattagcaactatgtgtagagcattatgatgtttgcaactttctaattatggggaaatttaaaattttattgtattactactcagcatatttatttatataaaatcctgatacatctctaaatttttcaaatttctatactagaaagatgaaactactataacctctgaactatctgaaagagacacttagactcattctgatggcagtgaccagtaaaaggacaatatgttataaagaccaaaatagtctccttaggaaatagtccaaaatctttcaggcaagtgtggttcagtggctaaagggaagaaatggcttgtgacaacctgcaagtgtccaaagatagttttcaataaaaccagaaaatggaataacattcaaaatgttcatttacccactggagaaggagcaaaaattggccaagagatagctgagagagtcacttatccacttgtagaagtctgatcttttttgagaacaaatcttatgtatctcccttgccaaaacaggaccctggcagtattttgtttcatgatctagacacatgggtattcacttcataaaaattcattgagctgtacatttatatttgttcacttttatatttgtatgctttactcaaattactataaaaactttaaaatacatttgctcctttatttaaatgctttgcttctaaaatattgataagggctccrgatttacgatggcagactgaatac

SEQ ID NO: 89474 - DNA, 623 bp, Homo sapiens
ttgactccaagacttgctccagtggtcccccaggttcacaggcctttggccccaaactgagagttacaccatcagcttccctggttctgaggcttttgaacttgaaccaagcatactaccaacatccctggatttccagcttgcagacagtccactgtgggacttcgcagcctccataatcatgtaggccaattctcttaataaatcctctctttatctatctatctatctatctatctatctatctatctatctatctayctatctcattttggttgtgtctctctggagaagcctgactaatacagaaatcaaaataatatattctttttttaaaaaaaactcttattttaataagttatctccttatttccatttgcttttcagaaatcgtatgaatcttgttatatctaaaagtaagataaatgtacttaaatgccatataattctgtgacattcctagaaaataacctctagaaatcagaaataaccttattcagacatcttacccaacactttaatgatgactaacctattttcagagtttctttttaaaaataatttggagaataataaaaagaattttcgacaagtcttccatagctagcaaaagacagcttgcc

SEQ ID NO: 89475 - DNA, 623 bp, Homo sapiens
ttgactccaagacttgctccagtggtcccccaggttcacaggcctttggccccaaactgagagttacaccatcagcttccctggttctgaggcttttgaacttgaaccaagcatactaccaacatccctggatttccagcttgcagacagtccactgtgggacttcgcagcctccataatcatgtaggccaattctcttaataaatcctctctttatctatctatctatctatctatctatctatctatctatctatctatctatctcattttggttgtgtctctctggagaagcctgactaatacagaaatcaaaataatatattctttttttaaaaaaaactcttattttaataagttatctccttatttccatttgcttttcagaaatcgtatgaatcttgttatatctaaaagtaagataaatgtacttaaatgccatataattctgtgacattcctagaaaataacctctagaaatcagaaataaccttattcagacatcttacccaacactttaatgaygactaacctattttcagagtttctttttaaaaataatttggagaataataaaaagaattttcgacaagtcttccatagctagcaaaagacagcttgcc

SEQ ID NO: 89476 - DNA, 1351 bp, Homo sapiens
aaagcatgtagtggatgctactatgagacaatcctatatacacaaggtagctcttcctagctgcattttacagatgtgaacaatgaagtacagagaggtaaattaactcactcagggttgcatagctaagaaatagcatagcgagaattaaaatccakatctgtcttacttgaaggtcatcatttttggctactctactatatagatcattaaagagatcagtttggactatgtcagaccagtactaaattcttgagaatttatataaatgtactaaggagaaacaagacaaaagctaacaaatagcgcacacctccctatatgtataaaaaataatattgaggaaagcaacacactaagagacaagagacacaggttctaatctcaacagtaccatgtaaactttctacttactgtgaattggggaaattgctttaggtctcataggcttgggactcattaaataaacttcaattctcctctaaacttaaaattatagctaacagtataattactatgatagcattctgttaacaaaaaagatgccacctaaaattcattgtatgcgaacattacattagactcttctcagatatcctttagattctccatttcctaaatttacttataacgtcatttccatgtttgttcttagaactctcttctgaacagcatgttctgagtcactatcactactccaaactacactggaaattttgtcttatatgcactttgctttcagagataatttgtaacttccttcccaaaagggtaccactttttctctcaagcaatgcaaccttggaacaaaaagatatggtatatatggttctgtcatctccaagtatttaagtactccctgcagtcaggtatcattattcattatcaccagttttgacttaacccattactgggtattcagtgaccatacaagttggagaaggggccctctgagggcatgacagtaggctgttctcattctaaccttgccatggcaatctagaagtctccagggacctccaaaatcagactattcctaagttccttttcagtaaagaagtagaagaaaactggggaaacggcaggggaaaaggatgaagaagcaagctggagaccgatcaggaaaacaacaggaaggataaatatttttcacgctgagaagaaggtaaaagataagctgacagagatgtctaatggccatagatagtgggttattataaaagtaataaaaatccttccctaaagatgatagaaaattgtaaagaaggtgaagagtcaaggagaggagtaaagacattacaggcagttctcaattctaaagctcttccaatatcttagcatgaaaacaact

SEQ ID NO: 89477 - DNA, 746 bp, Homo sapiens
tccttttctgttccaatgatttggttgtttaaaacaagcaagcttaattcagtcaggcatatattgcaaataaaaacatgtttccaagtaggctggaataaaaatgctaaataagaactgggccaaaagatcatagataatgtgcttcttctcttggtaatatgtraatacatttacccatggggtagaagtatttcacctgccccatgaagaacctgatggcttgtggtgtctgtgctgtgtcaatactaacagatgtgaggagacagactatggaatggacgctgtgactatctgtgagatagtggaaggggttatacacactggccacaggaagttgcaaaaattagatggactctgtgtagctagccactcttgagtgtcaggtctgcatatgtgagttttaaagaaggtgcaagatagcaataaattcccttagagagcaggatatgtcctggtagctctatagttccatgatcaaggacctggccagtttccctcaggtaatgggggtagtagcaccaaagtgaatattaagagtcagaaaggcctctacttgcaactggcggatcaaaccattcccctattttggtgaacaatcatagtctgatacgcctttgtaaatctttgctgcaaatatggtttttacaactctaaaaacatcttttggaaaacctcatgactgaaccactcacaaatgcagaagattgaacagccccagggaggcaattgctctccttttattg

SEQ ID NO: 89478 - DNA, 2161 bp, Homo sapiens
acaagattttaaaagataataagaaatattacttgaaaggttttcttttaagagaatgatgggacacagacctgttctagattctatgtcccgtgattcctctgagtctaagtctctacaatccaaagcaacattacaaatagcctgaattgtgcaatcctttgcctccaatatagagatagtgacttgattattgaccagtggagtttacccatgaatttagtagagtactaatgtgtggagtcagcttcttgtgtccttccctaatgcctagtcaggagctaggtaacccaggatgtgctcaggaaataacaatgggtaattgatgagaagttaaaaagtgtccccgtgctgtaatgattacagatttataacctcaccattcatagtacctacgattctctgaatttaaaagtaggttttactaagtaacagccatgtatttgcacttttcttggcatatgtgggaagtaaaatttgactgcttcctgtctatctctaattcctccccagcccctgatttatttatattatctctctttgcgtttcatgaattaacaagagtgtttagctttccaaaactgcctgttggaaaggrcttctttcacttaaatgcccttgaaaagcattaacagagctaccacagtatttattagactttataataacctctttgtcttaaatgaactatttgatcccttccctttaaagaaaaccttaggaaaagaaacattaccattatcactgcctgcccattagaactgggatccaattttcagaaactgtaaagctacagaggtttgcctgcttaaaatccaagagtactagttgcttctctatgaccagaagaaaagccacatgttgcctaccctggatttattaattctctgtaaattcattctgcccagcttgggtgtagcagtgagctcatttatttacttgcatagcaacaatataatgaaaactgagtctggccttaaaaatacaccctcgtaagccatgtccaaggttaactcttccaaatgcttctctggtgctcatgaagttttttccccatgtatttttgaaggtgaattactttctttcaaagtcgttctgatgcctgattttatgccagaactaaaccttttgctagccacatctaaatcacagccagcttctttccccagtgaggaaaaagtcacaagtggaagctcagaagtggagcagtggtgctcctgggtcactttcatttgacacagcgttgggcagcaaacccgctcaatggaaacagtgcccctattgttaagcccctagcatgtcccccctgctgctttcaggaagctctttgtgtagccagtgctaaagcaatatttagttatagagtgaccaagcaccagcgagcagctagaagcatttaacatgaaagaacacgacgggaaatgacgtctgggtttcacgagtggttgaggtctttctcagaacaatgccaaatacaagcctgtgacaagttggatacagcaaagccattttttttctgtctcatggactgaaatgttctttgaaagaaaactataaaaaagcacaagtattgtggctcttttgatgtccaaataaattcaacaggactctgagcgctacatctagattgggaaatggattttagagagatgcccacagactgccctaaggggaaagggactgtgaagaggaggtgagagatgagaattttgggacccaaatgccgattggtatcatttcttcctaaagaggagaacgctcaggtttagttggaagaagggatgcagtggctgatggggcaaaccactcacaaggcagaactcggtgccagctctgaaggtggttgtcgtgtccagagacaacaggcctaaaacgtctgcaaaatccaagaggattacataggggaaaatgggcagaaaacaatgagttccaggatgaagtgctttcttagctcttggtaacaaaacagggatgagagtgctccttaatggggaactctggaagtttttttgggtacaggacccaggtctgtcaaacactgattctcactggctcagcacactccagtccctgcctccttgtgtccctgcctgctcctgctgtcttttggcatagctctgtcttccaaagggcactgtggttctggatgggatggtgggct

SEQ ID NO: 89479 - DNA, 2161 bp, Homo sapiens
acaagattttaaaagataataagaaatattacttgaaaggttttcttttaagagaatgatgggacacagacctgttctagattctatgtcccgtgattcctctgagtctaagtctctacaatccaaagcaacattacaaatagcctgaattgtgcaatcctttgcctccaatatagagatagtgacttgattattgaccagtggagtttacccatgaatttagtagagtactaatgtgtggagtcagcttcttgtgtccttccctaatgcctagtcaggagctaggtaacccaggatgtgctcaggaaataacaatgggtaattgatgagaagttaaaaagtgtccccgtgctgtaatgattacagatttataacctcaccattcatagtacctacgattctctgaatttaaaagtaggttttactaagtaacagccatgtatttgcacttttcttggcatatgtgggaagtaaaatttgactgcttcctgtctatctctaattcctccccagcccctgatttatttatattatctctctttgcgtttcatgaattaacaagagtgtttagctttccaaaactgcctgttggaaagggcttctttcacttaaatgcccttgaaaagcattaacagagctaccacagtatttattagactttataataacctctttgtcttaaatgaactatttgatcccttccctttaaagaaaaccttaggaaaagaaacattaccattatcactgcctgcccattagaactgggatccaattttcagaaactgtaaagctacagaggtttgcctgcttaaaatccaagagtactagttgcttctctatgaccagaagaaaagccacatgttgcctaccctggatttattaattctctgtaaattcattctgcccagcttgggtgtagcagtgagctcatttatttacttgcatagcaacaatataatgaaaactgagtctggccttaaaaatacaccctcgtaagccatgtccaaggttaactcttccaaatgcttctctggtgctcatgaagttttttccccatgtatttttgaaggtgaattactttctttcaaagtcgttctgatgcctgattttatgccagaactaaaccttttgctagccacatctaaatcacagccagcttctttccccagtgaggaaaaagtcacaagtggaagctcagaagtggagcagtggtgctcctgggtcactttcatttgacacagcgttgggcagcaaacccgctcaatggaaacagtgcccctattgttaagcccctagcatgtcccccctgctgctttcaggaagctctttgtgtagccagtgctaaagcaatatttagttatagagtgaccaagcaccagcgagcagctagaagcatttaacatgaaagaacacgacgggaaatgacgtctgggtttcacgagtggttgaggtctttctcagaacaatgccaaatacaagcctgtgacaagttggatacagcaaagccattttttttctgtctcatggactgaaatgttctttgaaagaaaactataaaaaagcacaagtattgtggctcttttgatgtccaaataaattcaacaggactctgagcgctacatctagattgggaaatggattttagagagatgcccacagactgccctaaggggaaagggactgtgaagaggaggtgagagatgagaattttgggacccaaatgccgattggtatcatttcttcctaaagaggagaacgctcaggtttagttggaagaagggatgcagtggctgatggggcaaaccactcacaaggcagaactcggtgccagctctgaaggtggttgtcgtgtccagagacaacaggcctaaaacgtctgcaaaatccaagaggattacataggggaaaatgggcagaaaacaatgagttccaggatgaagtgctktcttagctcttggtaacaaaacagggatgagagtgctccttaatggggaactctggaagtttttttgggtacaggacccaggtctgtcaaacactgattctcactggctcagcacactccagtccctgcctccttgtgtccctgcctgctcctgctgtcttttggcatagctctgtcttccaaagggcactgtggttctggatgggatggtgggct

SEQ ID NO: 89480 - DNA, 1620 bp, Homo sapiens
aagtgaaatgcgtgagtagcttaagctcgcccacgtttccaaccctgcttgatcaactgtacttgattctgcttggtcacccaacaattaacacacacttcatgctcgatctatgaaaacgttgacttaacattattttagtcagtcagcagatcccaagaggaaattcttagatttggaaaatttttgtgtgcttcttttgttttcaatttcagaatggtggcaatatatttgttaaacatttatatgaagctgactatgtgccagaccctgttctcaatgctttgtaaagtttaatttgtaattttcagtcttctaacaagtctgtgatacagcgactatgattatgcccattttattggtgaggagatcaagatctgcagagagtgaagtagctcattgaagagccagagatgagatttaaacccaggttctattactgaggccaaactcttctagatgagattgaactgctgttgttgttgttttgacttttcatttggaaataattccaaattttcagaaaagctttgagactaacaatagcacacaccctttactgagatccacttactgttaacacagataaaattgcttttctaaaacacgcatgcctatatagtcacctttaccctagaatacttgagtgcatctttgctaagaataggaatattctcttacagaaccaccgagtatttatccacttgagtaaatttaacattgatttaatttattcaatggtagtctgtatttccatgatgacagttgacccaataatgccctttcttatttcctctgggatgggatccagtctagggcccgacatttggatctagttgtcatgtctgtctggcctcctttaatcagaaacattcccacagccttcctttatctttcataacaatgacaggcagcagaataagtttccctgtgccttttaaagacagaacaaatgttcttcattgtgtttgtctgatgtttcctcacgatgaggcgagaaaatgaaatactgcgtaagtgatcctgcatccgtctcaaaaaaggtctcatttctggagacactgatgtccttctcacctcattggcggtgttgattttgatcattcctcccctccagggcgttgactgatttccccatggtgtaaattactagttttcctttgcatctaataagcagcctgtggggagcctgaaatatgtttcttgccaggtggaggcacggtcataaggagcagtgtgtgtgtgtgaggatggagagaagcccttcccttctaggggaacgtgaggagastggagggtgcacttcctccacctgcagctggaaagtctgtgcgcctttcagtgatgaagcttacagatggatgttgcagggctttgggtagggcctggaccaggctccaggtagagtatttcgggcttggatgttttcaggcaccaataagtcaagcttgcattgatgatattacaaagtggcagaggtgcctcctgaatgaaaaagaaatggaatcctaaccctgacttctgtctttgagggtcaaacatataaaaacatgtctgatgccggatttctgggaagggcattggtttctggaggggagattgataatggcagagatggaa

SEQ ID NO: 89481 - DNA, 1620 bp, Homo sapiens
aagtgaaatgcgtgagtagcttaagctcgcccacgtttccaaccctgcttgatcaactgtacttgattctgcttggtcacccaacaattaacacacacttcatgctcgatctatgaaaacgttgacttaacattattttagtcagtcagcagatcccaagaggaaattcttagatttggaaaatttttgtgtgcttcttttgttttcaatttcagaatggtggcaatatatttgttaaacatttatatgaagctgactatgtgccagaccctgttctcaatgctttgtaaagtttaatttgtaattttcagtcttctaacaagtctgtgatacagcgactatgattatgcccattttattggtgaggagatcaagatctgcagagagtgaagtagctcattgaagagccagagatgagatttaaacccaggttctattactgaggccaaactcttctagatgagattgaactgctgttgttgttgttttgacttttcatttggaaataattccaaattttcagaaaagctttgagactaacaatagcacacaccctttactgagatccacttactgttaacacagataaaattgcttttctaaaacacgcatgcctatatagtcacctttaccctagaatacttgagtgcatctttgctaagaataggaatattctcttacagaaccaccgagtatttatccacttgagtaaatttaacattgatttaatttattcaatggtagtctgtatttccatgatgacagttgacccaataatgccctttcttatttcctctgggatgggatccagtctagggcccgacatttggatctagttgtcatgtctgtctggcctcctttaatcagaaacattcccacagccttcctttatctttcataacaatgacaggcagcagaataagtttccctgtgccttttaaagacagaacaaatgttcttcattgtgtttgtctgatgtttcctcacgatgaggcgagaaaatgaaatactgcgtaagtgatcctgcatccgtctcaaaaaaggtctcatttctggagacactgatgtccttctcacctcattggcggtgttgattttgatcattcctcccctccagggcgttgactgatttccccatggtgtaaattactagttttcctttgcatctaataagcagcctgtggggagcctgaaatatgtttcttgccaggtggaggcacggtcataaggagcagtgtgtgtgtgtgaggatggagagaagcccttcccttctaggggaacgtgaggagagtggwgggtgcacttcctccacctgcagctggaaagtctgtgcgcctttcagtgatgaagcttacagatggatgttgcagggctttgggtagggcctggaccaggctccaggtagagtatttcgggcttggatgttttcaggcaccaataagtcaagcttgcattgatgatattacaaagtggcagaggtgcctcctgaatgaaaaagaaatggaatcctaaccctgacttctgtctttgagggtcaaacatataaaaacatgtctgatgccggatttctgggaagggcattggtttctggaggggagattgataatggcagagatggaa

SEQ ID NO: 89482 - DNA, 841 bp, Homo sapiens
aaaaaaaaaaaaaaaagatagtagctaaaaaagagaggatgaggaataattttgaggaataatttaggtagaaaagatggtatggagagaaaatgtaaaacccagatggacccataagttactagttactgatattgggcatcaaatttgtctctgacctttacagtaaaggaaaacatgatcagttaattgcaaaaatcttgtttccatgagaaaaagcatatcarttactcaggacaaatgaaatatcccctgatgcttaaatatgaatacgtttgcctataatttgctcattgatcataaaacttttcttttgtttcgccttctgtccattttctctataattgttgttttgcttgctggtgcaatggttgaaaggcctatagatgctgtaagtgctgaagatctgaggatgaggatctgaggatgaggatgggatgtactgaaagtgttgggtcatgttgacagagagcatggggtgattaacgtcacagtcatcccaaaccatggattctaaatctagggacaggttttggcctggttacagcaactttgcaaaggagtatattgcagctgagatcacccggggaactatgaaacaagcaataaaacaaaagatcttcaaggaacactgagaaggggacttgtagggatctgctgtgcagcgcaaatccaacctcaggagcttacagcagagaaatcacatagacattcaacgagaacaaccaaagttactaaagtaattgtggaaaaaggttatataaaggggaaacaatacaacagtaactcatgggcactacatcctgccttttgaaggaattttatttttagttattgttaa

SEQ ID NO: 89483 - DNA, 841 bp, Homo sapiens
aaaaaaaaaaaaaaaagatagtagctaaaaaagagaggatgaggaataattttgaggaataatttaggtagaaaagatggtatggagagaaaatgtaaaacccagatggacccataagttactagttactgatattgggcatcaaatttgtctctgacctttacagtaaaggaaaacatgatcagttaattgcaaaaatcttgtttccatgagaaaaagcatatcaattactcaggacaaatgaaatatcccctgatgcttaaatatgaatacgtttgcctataatttgctcattgatcataaaacttttcttttgtttcrccttctgtccattttctctataattgttgttttgcttgctggtgcaatggttgaaaggcctatagatgctgtaagtgctgaagatctgaggatgaggatctgaggatgaggatgggatgtactgaaagtgttgggtcatgttgacagagagcatggggtgattaacgtcacagtcatcccaaaccatggattctaaatctagggacaggttttggcctggttacagcaactttgcaaaggagtatattgcagctgagatcacccggggaactatgaaacaagcaataaaacaaaagatcttcaaggaacactgagaaggggacttgtagggatctgctgtgcagcgcaaatccaacctcaggagcttacagcagagaaatcacatagacattcaacgagaacaaccaaagttactaaagtaattgtggaaaaaggttatataaaggggaaacaatacaacagtaactcatgggcactacatcctgccttttgaaggaattttatttttagttattgttaa

SEQ ID NO: 89484 - DNA, 1871 bp, Homo sapiens
catttagtacccaactatggattgatgattgattgcaaaaaagacttcacccttgggggaaaaacttcttaaaaaaaaaaaaaatcccggacgattactgtctaaaggccaaaaatatttttcatataccaccacagtaatattaatataataaatactgtcaaataaaatgttcttaaaagagaacacaaaacattacagtaagcaacatatgctgtttctactgtatgcccaaaacacatacacccatccattcttccaacaaatattttattgagcacttactatgccaaatactattctagaaactgagggcctagcaggtaaaagaagacacaacttctctattctcatggagctcacatactagtaggtctttacagtacagagctatraagaaatatcagaaagattaattcaaaatttatttacattcccatgaggaaaaccaataggtctctgtatatgaacattttaaagtgtcttgataccttctagcaggaatgataataaaactatttaacaatccattatcaatagactccctgtccaatcagaagaggccagcagtaccaagcatcctggctaaaaatccagcctcgactactgcccaggtctttactagaaaaggtgaaccaattacacactcaccaacagtatacaaggatccctaacttgctgaaccctgactaggactgaatactaccatttgcaaaacaaaaaaactaccttatttggtaggcaaattgctttttttgcatttatttcttttgttttgttttgttttggagatagggtctcactctgttgcctggactggaatgcattggcacaatttcggctcgctgtaacctcaacctcctgggctcaggtgatcctcccacctcagcctcctgagtagctgggactacaggcgcaagccaccatgcctggctaatttttgtatcttttgtagagatggggttttgccatattgcccaggctggtcttgaactcctgggctcaagcaatgcacctgcctcggtctcccaaagtgcatttatttaattattcatgaaattaatgttttagacattttcatttggaatttggaattccttttgtaactgttctcttcttaatctttgttcattcatctattagaaattttgtatttattgttttgcataaacttcttatatattaaggtaactgtcttattttgaataaatgtttatctagtttgatttaaaattttatatattattgttacagactgaatgtttatgcctccctttcccaattcatatgttgaaacctaatccccagtgcagtggtacctggaggtgggccctttgggaggtgattaggtcatgagggtgggccccttgtgaatgggattagtgcccttttaatactccttttgtgaaactccacttaccaggaggtgctcttggcattgttcaggtagttctaacatgagtttcttcttcacaatacctgattcatcacatcccccactatcagtcaagacatactgcactaccaatctagatgtcctttgaaaatatttgctgaggccgggcatgggggctcacacctgtaatcccagcactttgggaggccgaggctggcggatcacctgaggctgggagttcaacaccagcctgaccaacatggagaaaccctgtctctactaaaaacacaaaattagctgggcgtggtggtgcacgcctgtaattagagctactcaggaggctgaggcaggagaatcgcttgaacctgggaggaggaggttgcggtgagccaagatctcgccattgcactctagcctggacaacaagagcaaaactctgtctcaaaaaaagaaaagaaaagaaaatatttgctta

SEQ ID NO: 89485 - DNA, 1871 bp, Homo sapiens
catttagtacccaactatggattgatgattgattgcaaaaaagacttcacccttgggggaaaaacttcttaaaaaaaaaaaaaatcccggacgattactgtctaaaggccaaaaatatttttcatataccaccacagtaatattaatataataaatactgtcaaataaaatgttcttaaaagagaacacaaaacattacagtaagcaacatatgctgtttctactgtatgcccaaaacacatacacccatccattcttccaacaaatattttattgagcacttactatgccaaatactattctagaaactgagggcctagcaggtaaaagaagacacaacttctctattctcatggagctcacatactagtaggtctttacagtacagagctatgaagaaatatcagaaagattaattcaaaatttatttacattcccatgaggaaaaccaataggtctctgtatatgaacattttaaagtgtcttgatacctkctagcaggaatgataataaaactatttaacaatccattatcaatagactccctgtccaatcagaagaggccagcagtaccaagcatcctggctaaaaatccagcctcgactactgcccaggtctttactagaaaaggtgaaccaattacacactcaccaacagtatacaaggatccctaacttgctgaaccctgactaggactgaatactaccatttgcaaaacaaaaaaactaccttatttggtaggcaaattgctttttttgcatttatttcttttgttttgttttgttttggagatagggtctcactctgttgcctggactggaatgcattggcacaatttcggctcgctgtaacctcaacctcctgggctcaggtgatcctcccacctcagcctcctgagtagctgggactacaggcgcaagccaccatgcctggctaatttttgtatcttttgtagagatggggttttgccatattgcccaggctggtcttgaactcctgggctcaagcaatgcacctgcctcggtctcccaaagtgcatttatttaattattcatgaaattaatgttttagacattttcatttggaatttggaattccttttgtaactgttctcttcttaatctttgttcattcatctattagaaattttgtatttattgttttgcataaacttcttatatattaaggtaactgtcttattttgaataaatgtttatctagtttgatttaaaattttatatattattgttacagactgaatgtttatgcctccctttcccaattcatatgttgaaacctaatccccagtgcagtggtacctggaggtgggccctttgggaggtgattaggtcatgagggtgggccccttgtgaatgggattagtgcccttttaatactccttttgtgaaactccacttaccaggaggtgctcttggcattgttcaggtagttctaacatgagtttcttcttcacaatacctgattcatcacatcccccactatcagtcaagacatactgcactaccaatctagatgtcctttgaaaatatttgctgaggccgggcatgggggctcacacctgtaatcccagcactttgggaggccgaggctggcggatcacctgaggctgggagttcaacaccagcctgaccaacatggagaaaccctgtctctactaaaaacacaaaattagctgggcgtggtggtgcacgcctgtaattagagctactcaggaggctgaggcaggagaatcgcttgaacctgggaggaggaggttgcggtgagccaagatctcgccattgcactctagcctggacaacaagagcaaaactctgtctcaaaaaaagaaaagaaaagaaaatatttgctta

SEQ ID NO: 89486 - DNA, 1871 bp, Homo sapiens
catttagtacccaactatggattgatgattgattgcaaaaaagacttcacccttgggggaaaaacttcttaaaaaaaaaaaaaatcccggacgattactgtctaaaggccaaaaatatttttcatataccaccacagtaatattaatataataaatactgtcaaataaaatgttcttaaaagagaacacaaaacattacagtaagcaacatatgctgtttctactgtatgcccaaaacacatacacccatccattcttccaacaaatattttattgagcacttactatgccaaatactattctagaaactgagggcctagcaggtaaaagaagacacaacttctctattctcatggagctcacatactagtaggtctttacagtacagagctatgaagaaatatcagaaagattaattcaaaatttatttacattcccatgaggaaaaccaataggtctctgtatatgaacattttaaagtgtcttgataccttctagcaggaatgataataaaactatttaacaatccattatcaatagactccctgtccaatyagaagaggccagcagtaccaagcatcctggctaaaaatccagcctcgactactgcccaggtctttactagaaaaggtgaaccaattacacactcaccaacagtatacaaggatccctaacttgctgaaccctgactaggactgaatactaccatttgcaaaacaaaaaaactaccttatttggtaggcaaattgctttttttgcatttatttcttttgttttgttttgttttggagatagggtctcactctgttgcctggactggaatgcattggcacaatttcggctcgctgtaacctcaacctcctgggctcaggtgatcctcccacctcagcctcctgagtagctgggactacaggcgcaagccaccatgcctggctaatttttgtatcttttgtagagatggggttttgccatattgcccaggctggtcttgaactcctgggctcaagcaatgcacctgcctcggtctcccaaagtgcatttatttaattattcatgaaattaatgttttagacattttcatttggaatttggaattccttttgtaactgttctcttcttaatctttgttcattcatctattagaaattttgtatttattgttttgcataaacttcttatatattaaggtaactgtcttattttgaataaatgtttatctagtttgatttaaaattttatatattattgttacagactgaatgtttatgcctccctttcccaattcatatgttgaaacctaatccccagtgcagtggtacctggaggtgggccctttgggaggtgattaggtcatgagggtgggccccttgtgaatgggattagtgcccttttaatactccttttgtgaaactccacttaccaggaggtgctcttggcattgttcaggtagttctaacatgagtttcttcttcacaatacctgattcatcacatcccccactatcagtcaagacatactgcactaccaatctagatgtcctttgaaaatatttgctgaggccgggcatgggggctcacacctgtaatcccagcactttgggaggccgaggctggcggatcacctgaggctgggagttcaacaccagcctgaccaacatggagaaaccctgtctctactaaaaacacaaaattagctgggcgtggtggtgcacgcctgtaattagagctactcaggaggctgaggcaggagaatcgcttgaacctgggaggaggaggttgcggtgagccaagatctcgccattgcactctagcctggacaacaagagcaaaactctgtctcaaaaaaagaaaagaaaagaaaatatttgctta

SEQ ID NO: 89487 - DNA, 1114 bp, Homo sapiens
tttgtattcacattatgaagcaaaatgttcattctgaagtggtacttaatgcaactgtcgcagccactttcttcttgtctttaaggtgattaagcgacatgtataaaatatttatattttgaatattaggcatttgttttttccttatggtgaaaacttaccagtatctctattctcaacagagaataggagttgcaactttaatatttcaatatttgtataactaaaaagccatatgtgtatgatgtaaattatcgatttattatgaatgaaaagacagctggctaagcttagtaataatttctattatgagtagatttttaatggcttcaagttttcatttcaaatgtttgaggatgcacatggtattgttatagatcaaacagttttattatgtaagaaatgttgaggacagtttttcctcgtaattaatctcagaaagttcactggttctgtggcttctcctttgactttctatttaygggaagatggaagcattgaaaataaggttagattaattaaagtaatgggctaagactgagttgctgtaacagctggtagaatttggactttgattctagcagtacaatgcacataaacactaacaacaaagggtcatatgtatccagcatccttcaaatccactttatttccaatactcatctgtcagctcagtgttctaaaggagattgttctaagccaagatacatatattaaaagacattaaaaaaataaattttgaggcaaagataattgtgggtactcctctaaactaattattaaatgattagaagtttacacgaacttgaaaaattatttaaatctttaccttaaatgatttaattagtttattgaatttcgctcatattgacatatgtgatatagaactggataactttgaaaaaataactaaagaaaattaaaaagttaaatatatacaatgaagctagaaatgaggctatcattaaaacagataccataaatcctatacgtttgtcatgactgggccagaattttgacattaatcagtgaacatgagaagagaaacctagttatttacaaaatctataaaattcttaagatagaaacagaacagttattttaaaaaaaaaca

SEQ ID NO: 89488 - DNA, 2208 bp, Homo sapiens
  misc_feature (1)...(2208): n = A,T,C or G
agagtcggagagtgggacctggcattagattgaagtggcagcctctctcagacgggtgggaggctgacttcaagacaggggagcaaggatagaaactggtgcttctcctagataatgttttcctagttatgctgttgttttcctttggactgtgggaatagtcttacttagtactcaatgtaaaatattttctctcatcttataaatcctgtcagctacccccagtcctctaacctagtctgttatatgcatatcatcttgtggggaattaagagacaggacaagaaagacatgtgactttttgcacttccctcttccaccaagtttattacaatagcagcagcagcagcagctttccattgaggagaagggtggctggattcagactggagcaggaaagtaggtcccagtggggattttgagctgtgcaggggatgctcagctgggagcaactgcagttacaagggcagtggccgagaggtaagacccctgtcctctgcaaatacgtaagcacaatatatgtgatccttcctctgccagtttccccgctgatcatcagcatcacctgaagtccttgttaaaaatatccagaaatactctggctccactcctgaaggtctggggtgtggcgtgggatcctctatattgtcgaagcacccagatcgttcttctcatctgggaaatgtgggactcactgtcgcagaaggaggtgatccttgcagggctggggagaggctgacatttgggtcacacattactgaccctgcttcagacagaacgtacagaaaaggagtgatatatttatatgtaaatatatgtctatacgtctctgtgtgtgtgtggtgtatgcttaaaactcttaggaaaagcttcttctctagaagagattataaatcacctcactggaaaagaatcaaagaaccaggctttcaatggactccacttctttatttataaacccatcttccaacctttctgaacttcttaaacaacatgaattcatctcaagttgtacaatctgttaccttggcaagcttctaatgacaaatcttattttccatctttgaatgtggctcttaatttctctactaaacattgagagcaagaaccattgcggcaggggaggaatgggagtgtgcttgtggatttgatttgatttgatttttaaagtagttttgctgtcagaattctttatatctctttcacatggaaaggatataaagataccctgaggacagatcatactcagattgttctgttgtgtggcaaatttgtccttttatttaaaaaaaaatcacttcatccatgtccttgtttctctctataacaaaaacagcataggattagtcaaagagcaaaagtgataatatagatgcctctgtaatcctgtgtagctttcacacgacttttaattgggagtatgtgagtttatatatatatatatatatatatatttatgtgtgtgtgtgtgtgngcgtatatatatgtatatatacatatattcagagaatgctaataatgctctaaaatagcagtttatttagtccagtttttatactacataatgacacccaacccmctgccatgctttaaatggaagcagaggtaaatttttcactaattatacattttagggcagcaactctgtgctggtcttatggtgtttggggacgtttttgatatataaatagttaaatgtgttctgatttaagtgaggcttatgaattaaaagaagaagaagacttctgattttcattcccagacctccactcactcagcattttagtatgataaagataaaccctgtacaaatagtggattctttcccccattctaatcactggagagtgctgactgcacaatctaaccaaacggtgtgttgaagccccactgcttaagatgattaaatgttttgaacaaggaatgattcagttgccatgggaagaccgtggcgtgttgatgcagtggcctcctgtaggttgaataagttcagtgtttaccctgtgggccatttattttcaaaattaaattaaaattcttactcttaaggagctgcagtttgattgttttgtttttaggggcagcttgagttcctccacattccatgtctgagctcacatgtgtgcctaatttcacagacagcccctgccacccgcccgccgagttcagacatactctgctgcctgcagcacggcagctcctaggatc

SEQ ID NO: 89489 - DNA, 1216 bp, Homo sapiens
aaatgggagcttaagacatgtaaataccttgcccctggtctcagagttagtgggtagtggagttggaatttaaattcagtgagtctgactccagtgtttgctgttatatgtacagtatattgtctccctaacaattcataggcccaaactaaaagaaaaaaacaataaatccaagatcacaaagaatcacatttccactcagtgacaacatttacctcagtaagtaaaattccaggcatccaacagaagaaaactaatggatgcttgtcaaacctaaaattgacactttgggtaagatcttttaatgtagcctctgttccagtaatttgtaactttgtttagtttttcatagatttcaaggaaaggaaacaaattacattgctatatacctttccatcggtgaagtatcgacaattcatttttaaaaatttcaccacacctggctcatcttcttcagaagtagacgataagactctttcaatgggtttcaaggcctttcgtgctaagtcagcatccttgtgaaagcaaaaaatttcaaaatcaaataaaagcacttttcaaacaaattatgtgtataaatcaagccccataaattccctgtgagtatactatttctatttaagtggaacattaaaaaggcaaatatcctctgtccttcaaaaatatcacaaatgtaataacagatacccaaatcaaactgttttttttttcttttaaaaaaagcaaaggcatatgtatgaacccataaaacttactcatgaaatgtctttagaaactaacctaaatgggctgggtgtggtggctcacgcctgtaatcccagcactttgggaggccggggtgggcagatcacctgaggtcaggagttcgggacctgcctgactaatatggtgaaaccctgtctccagtaaaaatacaaaaattagctgggcatagtggccggtgcctgtaatcccagctacttaggaggctgaggcaggagaatcgcttgaaactaggaggcggaggttgcagtaagcgaagatcgtgccattgcactacagcagtctgggtgacggagaaagactctgtctcacacacacaaacaacaacaacaaaataaacactaacctagtaacctaaatgaaaaaattcatattagactcatgactcaatttgttttttttttttaaaaaaaggaggaatacaaataaactatccatgtcaytggaaatttaa

SEQ ID NO: 89490 - DNA, 518 bp, Homo sapiens
cagaacatgtgctacctcaacatggaagtgagcctggatcatgggcaggggtgaaagtttcctattgccttcagaaaataattttgggtttgctcccaacacatatgccaatcaggatttgaggtcttaaagttcttaaccatacagcaatgctgtcatttcagcctggaaaaaaattttaagcatgtrtagccaaggtatcctgtgaatatgaaaatatcgtaaagttgagctgggtgcagtggctcatgtctgtaatcccagctacttgggaggctgaggtgggaggattgcttgagcccaggggattgaggctgcagtgagccatgatggtgtcactgcactccagcctgggcaacagagcaagaccctgtctcaaaaaataaataaataaaaataaaggagagaaaatattgaaccaaagcacattatcatttatcataatcctgtgacaaacaatagtgaggcactgaaaacggcaataaaagataaatgcagaatttctagagttatatcca

SEQ ID NO: 89491 - DNA, 518 bp, Homo sapiens
cagaacatgtgctacctcaacatggaagtgagcctggatcatgggcaggggtgaaagtttcctattgccttcagaaaataattttgggtttgctcccaacacatatgccaatcaggatttgaggtcttaaagttcttaaccatacagcaatgctgtcatttcagcctggaaaaaaattttaagcatgtgtagccaaggtatcctgtgaatatgaaaatatcgtaaagttgagctgggtgcagtggctcatgtctgtaatcccagctacttgggaggctgaggtgggaggattgcttgagcccaggggattgaggctgcagtgagccatgatggtgtcactgyactccagcctgggcaacagagcaagaccctgtctcaaaaaataaataaataaaaataaaggagagaaaatattgaaccaaagcacattatcatttatcataatcctgtgacaaacaatagtgaggcactgaaaacggcaataaaagataaatgcagaatttctagagttatatcca

SEQ ID NO: 89492 - DNA, 2086 bp, Homo sapiens
atatccatctataatttctccattctatccatatatacatattatctcataatcctaygtgaattggtatcattgccttcctttgtaaaatagacgtaatactaacttatttacagaattgattaaagattatagcaatcccagtggaatgagttgaagtcataacttgcattttgacctactactagagacatttggtgagtctaagcattaggtcacagtgaagttagtagtgagtgttacattttatgcttcaggataggattctcttgaccatttctgttacttccccagttggtggttggtgcagtggagatgccatttccagtgttgaacgatatgatccacagaccaatgaatggagaatggtggcttcaatgagcaaaaggagatgcggagttggggtcagtgttcttgatgatctgttatatgcagtaggaggccatgatggatcctcttatctcaatagtgttgaaaggtgagtaaggtcaatctgtaattttctctctactattcatatagttttatttgagatgttaattaggaaacaaattgatttaatgctttagtattgcatctgtggcactagttggcaacctaaacaagttagtatgatacacaaattctttatgatctggtctccgcctatttttctagtctgtctcccatgacacactaccactccctaagcatgctactacagacacatcaaattgcctgcagttccttggacatgctgcatgtccattccaagtcatacctctctccttacatatatgcatgctgttcttttttccctgggatacttctgccactttaagacttacatttcctttggccaggtgcagtggctcatgcctgtaatcccagctactcgggaggctgaggcaggagaatggccagaacctgggaggcagagcttgcagtgagccgagatcacgccactgcactccagcctaggcaaaagagcgagactccttctcaaaaaaaaaaaaaaaagaaaaaaaagacttacattttcttcaagacacaaatgttacttaatacatacaactttctatgataccatacagatgagttagttactagttacttgttcctttgcccttccataagtattttgaacatgtttgtacatatccatcacattgtactatacgtgttgaaatgtgtttcaccataatatctatcgcagtgactgggcacattgggaatctctagtaactgatgtttcaatagcttcttgctctcaagaagctgtgttgattaacagtgactctttgtttccataacacatctatgaaacgctgccgcatatcaagttctaaagatatagattgtgcagctggggaaaaatcttaaaaagcagagggatcagtcccatagaagtaaaacaactgcaacatggagaaacctcatctctacaaaaaatacaaaaatttactagttgtagtggtgcacgcctgtgagtcccagctactcaggagactgaggcaggaggcccgcttgagcctgggaggtaaaggttgccatgagatgagattgcgccattgcactctagtctgggtgacagagcaagactctctcaaaaaaaaaaagaaaaagaaaacaacacacacacttaaaaataaattgatgacatcacagaagggaaaaaataaattgatggcatcacagaagggatcatggcagacgggaggcaggactagactgaagctccagaccgggcaacatgcggaggcttgattgcaaatgttagctccagactgactgcaagaaaaaatcagcaatctcaagaggacccacagaccctctgaagaaagcggactgctcctgcagcacccgggagaaaccccaaatattgggagtgccccaactgcagaaatgggaaagggagaccctcctctcccaaacacacacccccactggagaagctgaaggtctgtttgcaggagaagtttccaactttacctggagctgagtcaagttagagaggcaagcgaaataacaggggtagaggaagcagcagaaaggccctgggagtttgctgggtccccaagcaggccattcctgcctggcaccacag

SEQ ID NO: 89493 - DNA, 654 bp, Homo sapiens
agtaaatgagaatgaatgaatccttgatttgatataaataacgtacaagcagtatgagataaagtgttctcgccacattctttactcagagactgtgttatctgaaggtcatgctttctagatctctgagtggcctcatctaatagcatggccttaaatagcacctatccgctgacaactcccactccaactgggcctctttcctgaacttgcagacttatatatctaactacccactcaaacacttctacttaagtgtgtgtatawgtgtgtgcacttgtatgtgcacatttgtgtatacacttaatgtatccaaaactgaactcttggtttctaattatccccctcagcccatctctcttctgtcttattcacatcagcaaatgataactgcacatcacagacaaaaatcttggtgtcaaccatgactcctctctccttccctcacatcctatatccaacttagcagcaaattttgttgctcagtcctaaactatatccagaatccaacagcttcttcccactccagctaatcactaatcctttaacacacacagcatttattgaagcaattatcttctggtttggaccattgcaagggctgccagatgttcatctgacttccactttcccaacccccatcccacatgacag

SEQ ID NO: 89494 - DNA, 697 bp, Homo sapiens
tcctttattttgtcattcttatttttcctcagaacctcaaatcctccatcttttcatatacagggcaatttcttcacagccttttgttagtcaggaagtccttttcatcataattggtttattttagcttcgaaatctttcctctaaatatgcacaaggctttctctgaaagggactttgttttatttttccatcttgttacaatttcctccatcacagtacataattctgtagttgaggatagttgtgaataacaattcagaaagcaggaattgaagcctatttctccaaactcattgatattattatcctgtaactaaactctaagaattttaagaaatgtatctctatggggtcacctatagmagtaaaacatcaatcatcaataacttttatgtaggctttgcttaatacattgtaaactttgatctcatattattttctaggtataagggttaaaaataagtgccagtctagattttgctgaaaataacttctgttttaatatcctgtgattttcaccacaatcattcccttcattgccaaacaatgaattggcaaggattcttgttcaattgaggtttaatggaaactggttgccttaagaagaaattgacttatgtgcatgatgtgttcatttgcaggcagcttcaaagatcaccaactgtaagaaacaggaagagactttgaagtagat

SEQ ID NO: 89495 - DNA, 1577 bp, Homo sapiens
aacgatagcattatgatgataattatcctcattaataccaatccagtcctaggaatgaatcccaaggagatggtttttaggaaagatatgcactaagaggtttatcacaaaccatggtacttctcaaggcaaaaagaaagaagaggcttatcacattattgacttttatttaggtatggtaatggcatagtagatacatttcctaaaagagttcctgtcctttagagatacagaaatacctacaaatgaaatgaaatcgatgatatcgygcctgggatttggtgtcattgaagatggggagtaggtgcagcaggtgatttatacatgtggtttcatagaaaggtgactcttgggctgagttttgaagcatgaagaggagattgccaagcagatgtgaggtcagcaggaatttctgacagggcacagcttagacagaaacacagagaaactaaaagggcacgtcaagtctagagagcagcaggcatttatgcagcacctgctggtgccatgtacagtgctgcaatggggagtcagagagccagaggccctgccctgtgagcccctgtccggagtccacattcacactgtgctatagatgctggtagagctaagagggtgtcagagaagacctctctgaggaggcggttctggaaatgagtaggtttcatgagggagatgggatatgggatccagcagaagaaaccacgtgtgtgaaagtctgaggggatgagaatgtatgaaagacagtggaatgatcgactgaactgggcctggaggatgggaggggcacaggccaggtctgtgagatcagaggttagaatttcacgctttctttgtcccaagatctttagaagccatccagagacacagggaatggtgagctcgtgggagaggagggattggtttggatttgtgttcctgcccaaatctcatattgaattgtaatcaccactgctgggggagggcccgggtgggaagcgaccggatcatgggggcagatttcccccttgctgtgctcatggtagtgagtgagttctcatgagatctggttgtttaaaagtatgtagcacctcccccttctctctcttccctgctcccgtcatgtgaagacgtgcctgcttttttccccttaccttctgccatgattaaaagtttcctgaggcctccacagccaagctacttgtacagcctgcagaactgtgagccaattaaactttccttctttataaattacccagtgtcaggtatttctttatagcagtgaaagaatggacccatacaagacgtataggtggatgctgagtcccggagcattggcatttgtggagtggacgagagcagggggaggccacgccctgggctgtgcagagatggtctcctgaggcgaaactggtgagcccttgcgtgcgcagcacagacgtgtcggagatcccgggtgcagtggacaccagacaggatcaagctgaagagtggagggtatgacggaccaggaagggcatgcagaagtcagggaaagcaccgcgcatgggagagtcacacacagcctgcccctgagaggcatccggaaaacacgagca

SEQ ID NO: 89496 - DNA, 1061 bp, Homo sapiens
  misc_feature (1)...(1061): n = A,T,C or G
tgcatcacaacttatcccttcacctactgaaggacatctggttgtttccaagttttggtgatgatgactaaagctgctataaacatttctgtgcaggtttttatgtggacttaagtttttaactcctttgagggtgcaccttttatagtgggcaaaagtgagaaggtctatcagttctttctcccgaaggtaaccactactgccctttttgtttgtggtcacagcctttttctgtggtgtgagtgtatgtaaactttttttttagtgggatcactaagccaggcacagtgacatgcacccatagtctcagctactcgggagggtcgcttgatcccgggagtttgaggccagcctgagcaatgcagtgagaccccaaactctacaaaagaaaaaacacctgggatcactgtacatatggcacctgtcagggccttcctgtagccagttttcgttgctgatcgcagtcttctcctggccaggacttgttgcaggagcacagtgccggttgtgtagacccaccagggctggcagtgccctcggccacaggcactaacattcctccactgcccctcctgaaaataagattacgttcaacaccctggcacagacatttctgtgcacttgttagattgtttctttagtgtgattcttgctctggagctgctgggtaaaataatgtgtacttgtcttagtttgctcttttccaagttgaagtctggcagatttcaccagagcacagtgtctgcccccacctccacctgtccttcgctcaccctgttctgagcagcccaaagatagtttgttgcagttttcattttgatttctgattctttacrgcatctttctaccactcagtagtttatacaaattatataatctttctaatgctcagtttctcatatttaaaatagacatactactacctcaagttgtgagaattaaatgaatcgtttagaaagctctttgccacacacctgtaagcacttcatacatgttgatgctgctctttttatgcttagccattggnatttttctttttctaattgcttttcaagtcatat

SEQ ID NO: 89497 - DNA, 654 bp, Homo sapiens
ccctaaccgtacactcatcagcacgatccattgcctctcattggttaaccctaaccgtacacccatcagcatgatcagttgcctctcctgtcattaatggaccaacaggaaatgctgctgaggtaagtgtgcacgagcacggtaaagaagtgaaaatcaaggaccccagtgacgagtgacagacaggagcttcaagctcaggtccgcctggtgccaaagcccacattctgagtagcctcaacagagctcagctctgatgcaaccccagggagaatggaaggctcgagggaggaagacccctggcaacctgtcctccccccaggtccagtgctagaaattctgatcaccacaacaatagtctcttccgatatgggacaatttgctgattcttgggaaaagaaaacaatcacggatagggagagatttgctaaaggatacaaaattacagaagaaacaagttccagcgttctacagcactggacagggactacagtactggacrgggactacagtttcaaatagctagagggaggatgcagaatgaccccaataccaagaaatgatgtttgatttgacagaagtgttaattaccttgatctcatcactacacgttatatggatccaaacatcactacgtactccataaacgtgcaa

SEQ ID NO: 89498 - DNA, 584 bp, Homo sapiens
agaagatattcactttgtgggatttaactagtctgcaataaaaatgaattataagcttccatctccagaaagttatcagacacaacacgtagatcaacattttcaggagatcagttagaattcagtagagtatatataagacttaaattacactgaataaagttttatgttcyagaatagtgaagaaagctttaccttcatgaaaatcaaatctcttttctgacaaaaattcagaatttagggtgaatgtcttgatccaattttgtattttaaacttaattaaaattttgatagccttctgttgaaaaatatgtaaatttatgtttctcagaaaagacgaattcagaattttaagaaatcctatgcttttggctatcttgttacatgaattttgagttaaaatactgagtttatgagtttgaatctttctgaagtgttaacacaataagcccactgtactgcataaagataaaacgttgagggttactttgtcttaggggactggaaattattaaaagggcaaattccccatacattgtgatctgtcatatttagccctgacttgtcttgtggtaacaactgtg

SEQ ID NO: 89499 - DNA, 898 bp, Homo sapiens
accctctatctctaggttcatttttggtacttttcatagtgtgtgtgtgtgtgtgtgtgtgtgtgtgtgtgtgtgatgaaaggacacatacaatttgaaatgtgagcaatactttattatccattgctaatgaagaaaaaatcagaaagtctaaaggaagcaaatacataactaaatggatcactgggataaaacctttacccatatgaaacgtccaacagctaccctgaagggtaaaaataaaaatgatagcttggcttattcagtcattctcccacktgaccgaacaatctctcagcatagagaagatgcacgcaattatctcaccctgtaggatttggccaaggtctatgtagtagaactttctttcctcccctatttctatctcagatgtaaaaaggacatttcagatcatttacccaatgccttcattttacaaggaataaactgaggcacagagaaaggctgttggagtggcccacgatcaaaaaatcagctaacaacagattcaggtcttctggtcccacatagagtggcagctgtccttgcccttacccagactttgcctgttctccagtcctttaacaggatgctcctagccagctgagagccttcacaggcctcgctgcccgtagcccagcacctgaaaagtgaggttgttaaacagaggcactcacagtctttcctagtgagtccgcttttcaatttataaaagataaaacgttttggtaagttgtcaaagtagcaaaatgagcttcttcctctactcacatgtgttgctatgtgatgttcacctattcttgggattttgttttcttacaccttctaattgtctcattgactttacccttttaaaggtgtgtgtgtgtgtgtgtgtgtgtgtgtgtgtaaacatata

SEQ ID NO: 89500 - DNA, 406 bp, Homo sapiens
ccgagatcacaccactgcacttcagcctaggcaacagagtgagactctgtctcaaaaaagaaaagaaattacttgtccccattttcacagcctccctggccccagagaacagaaaagtcagagaggtggaagactcgacgctcccagctgtgcctcagctgtgggccaagtctccaccggggccaaaggggamactcttgtgggaggagcagaggggcccacatctcccctctcggctcccccatgcacactgccttatctctccccctctagccaggaatcggttgtgtgtttcctctgccaatttactgtgattgtgtatgtgctgctaccaccgcagctgccacggtggggcagggaggaggccaacatggtgaaaccctgtctatactaaaaatacaaaaat

SEQ ID NO: 89501 - DNA, 743 bp, Homo sapiens
tgtttccattatcatttatctgaagaaattttaagttgtgttgcttaatttcttcactgacccattggtcattcaggagcatgtgatttaatttccatgtatttgtgtagtttcctaagttcttcttgttattgatttctagttctattgcattgtggtcagaagataattgatatgatttcaatttttgaacatttattgagacttgttttttgacctaccgtgtggtgtagcctggagaatgttccaggtgtgattgaaaagaatgttccttgtgctgtgtcttccgcagctgtttggtgaaatgttctgtagaggtcagctaggctgatttgctctagggtgcagtttcaattccrttgtttctgtttgtttttgtgttggatgatatgttattgccgaaagtgaggtgttatagtttcctaatactattggattagagtctattatctttctttaggtctattagtatttgctttgtatgtttaagtgctttgatgtcaggtgcatagataaaagactaacttcatatgtgaaccgagcaatctccacactacagcacaatgtgagtttgtaaggatttctcaacaacccctggcaagacagggaggctgcagttggagcaactctggcaggtcctctcaagaagaaaatacagggaagaatgcccttttggcatccttcttggccacattttggctgccagacacgtcaacatactgcacacaagcttcaggatggga

SEQ ID NO: 89502 - DNA, 743 bp, Homo sapiens
tgtttccattatcatttatctgaagaaattttaagttgtgttgcttaatttcttcactgacccattggtcattcaggagcatgtgatttaatttccatgtatttgtgtagtttcctaagttcttcttgttattgatttctagttctattgcattgtggtcagaagataattgatatgatttcaatttttgaacatttattgagacttgttttttgacctaccgtgtggtgtagcctggagaatgttccaggtgtgattgaaaagaatgttccttgtgctgtgtcttccgcagctgtttggtgaaatgttctgtagaggtcagctaggctgatttgctctagggtgcagtttcaattccattgtttctgtttgtttttgtgttggatgatatgttattgccgaaagtgaggtgttatagtttcctaatactattggattagagtctattatctttctttaggtctattagtatttgctttgtatgtttaagtgctttgatgtcaggtgcatagataaaagactaacttcatatgtgaaccgagcratctccacactacagcacaatgtgagtttgtaaggatttctcaacaacccctggcaagacagggaggctgcagttggagcaactctggcaggtcctctcaagaagaaaatacagggaagaatgcccttttggcatccttcttggccacattttggctgccagacacgtcaacatactgcacacaagcttcaggatggga

SEQ ID NO: 89503 - DNA, 1010 bp, Homo sapiens
ataaggatagatttttcctataagatactgacattttatataaagctaaaatattgaaaacatgggattctgtgatgttataataaaataaacatcaaatttactaaaaattaaaataatgttcaatcctttttcctggacttcagaaggaaaaaatgctttttcaggagttactgcagccatccatatcaagtgtgaaaagttaccttctagaatgattctgtccatggtacacaacaggaaacaccagggtacmaaccattaggagtatctcctacattttacataccaaaatatgcaggtcacatgacaaaaagagaaatgtatttgcaacatgacaaatggataatatcattgacttatttgtgtttatgtatataactaatacacaaagattactcacaaatcaataagaagaacttccttttaaaaaagagaatggtcatttcatcctcacaataataacaagtggttaaaaagttcatttttactagtaatgtaaaataaagtatgtttacaatttcttttcactatttgaaacatgaatgttcagtattagcagttatgggggaaatagacacctgcttttgtacactgctgataggagcacatgttttatatataatacgtatatataatccttaaaatattcatattttttaaattaataaattctctctaagagttattgaaaggaaagaataagaaaagccaaaatgtttttatcttttttaaaaaaatgtatttattgaatgtcttcaaattatactaatacatttctgttgtaatacattaaatgatacaatatgaaaaagtataaaaacaaagttaattatctctccctgccttccttctacctatgcttcgcattcctcagtggaaaccaattttagtggtctggtatgtaccttcatacctatctccttgttgaaatgaatatatatagcatattatctaaaggggtttggttggttgattgttagtgctgaaatgaactttaaatacatgca

SEQ ID NO: 89504 - DNA, 832 bp, Homo sapiens
tttttcttggtctaacacagttttttctaaggtccacagtttattaataatccctttcgtaaatgtaatgcaattacctctaacacctccaaaaacattcagaaatgctctctttgctccagttaaaaaaatgccatgggagttccaagaataggaaacatcaaccagggtatttagcactagattgacagaacttggctcagacctgcattacaaaagcaagtgttccgactgcggttttgcattgtgctgaagtgctttcggataatttttttaaaaatgaaatttaccaaataatgctgtaagaactctgttctttataagaactctyaggttatcttcagacaacaaaagccaatgagaaagtcaagatcaccttttcaaatctcatgctctcctgaatcataatggggaacgcagagggaaagctgttggtctccaggtactgattcatgaggtagaccccgaggtacacatcttgtttgccaggcaggaacactcctgggcaagaaatcttaaaaagaaagaaaacaacaaacaagggagagaaaacagactttgctttgttttgttacacggggctctatttctcttaagctcctacagacactgacattttccccatcacctcactccctcacctgtacctcccaacgccaacatcctcccctctgctctcctcacattggaaattccaactccctcccacgtctccaccaggtgtcacaatcgcgctctcgccggctcctctccccgcccctccgggatggtagtgcggaagcggaagaggctgcagggccgggaagcctctgtttggtccggccaggtcccg

SEQ ID NO: 89505 - DNA, 547 bp, Homo sapiens
taatcaaaataattaaaataaaatggaagtcaaggagataatttagaccttgtacaaagaaggtccaggaaggatttcatcacattgcatcacattgagggcacaacagggtttgtacacctctgcattcagtacctcatttcttcactgctagtgcagagaatgtctaggtgcttggcttcccagtgggatgatggacaagactgaagggaagaagggaggtccatggaggcagggaggctcaaaggcagcmctgaagcttgttaaatgaggcagcaagaaggtcctaggaagacttaggcatccagatttgatcatgtgtgtgaaccattgagggctgaagggtgaaatgacagaaggaagtttggaaagctaagctggtgtcatatgcaggaagaaggaagctgaaggctgtggcctgggttggaactagtttgctggaagtgagtgtacaaaaaagtaggtgacaagtggccttgtggtgaaggaaaaacttccagtttcgtagtaaaatgaacatgggggaaagaagagtgtcagccaattt

SEQ ID NO: 89506 - DNA, 547 bp, Homo sapiens
taatcaaaataattaaaataaaatggaagtcaaggagataatttagaccttgtacaaagaaggtccaggaaggatttcatcacattgcatcacattgagggcacaacagggtttgtacacctctgcattcagtacctcatttcttcactgctagtgcagagaatgtctaggtgcttggcttcccagtgggatgatggacaagactgaagggaagaagggaggtccatggaggcagggaggctcaaaggcagccctgaagcttgtyaaatgaggcagcaagaaggtcctaggaagacttaggcatccagatttgatcatgtgtgtgaaccattgagggctgaagggtgaaatgacagaaggaagtttggaaagctaagctggtgtcatatgcaggaagaaggaagctgaaggctgtggcctgggttggaactagtttgctggaagtgagtgtacaaaaaagtaggtgacaagtggccttgtggtgaaggaaaaacttccagtttcgtagtaaaatgaacatgggggaaagaagagtgtcagccaattt

SEQ ID NO: 89507 - DNA, 547 bp, Homo sapiens
taatcaaaataattaaaataaaatggaagtcaaggagataatttagaccttgtacaaagaaggtccaggaaggatttcatcacattgcatcacattgagggcacaacagggtttgtacacctctgcattcagtacctcatttcttcactgctagtgcagagaatgtctaggtgcttggcttcccagtgggatgatggacaagactgaagggaagaagggaggtccatggaggcagggaggctcaaaggcagccctgaagcttgttaaatgaggcagcaagaaggtcctaggaagacttaggcatccagatttgatcatgtgtgtgaaccattgagggctgaagggtgaaatgacagaaggaagtytggaaagctaagctggtgtcatatgcaggaagaaggaagctgaaggctgtggcctgggttggaactagtttgctggaagtgagtgtacaaaaaagtaggtgacaagtggccttgtggtgaaggaaaaacttccagtttcgtagtaaaatgaacatgggggaaagaagagtgtcagccaattt

SEQ ID NO: 89508 - DNA, 1313 bp, Homo sapiens
ctggtaagtgttttctagaattatactactttcatatgttttctctttggytcttttgttaataatgttgtactatgaagtaacagtcatcataggcttttaaaaagtattccaaaacataatttaaaattgttatctttttatcacagagtgttcaagcaagcagacttttaactgataaattgtcatataaaagcagtgtcattactttacatcaacatagcagaacaaatttttgggtatgtacaatttttgttcttaattaggattgtttactctatctgcctacagtccagatattaattatggtaattccagaaattatttcttggggccaggcatggtggctcatgtctgtaatcccggcattttgggagtctgaggtgggcagatcacttgaggccaggagttacagaccagcctgcccaatatggtgaaaccccatctctagtaaaaaaacaaaaaaattagctggatgtggtggcacgtgcctgtatctcagctacttagggggctgaggtgggaggatggtttgagcccaggagatcgagggcaacagtgggagactgtctcaaaaaaaatttttttttttcttagtacttcttcattttggaaaatggctcagaccattcagtgctatccttgctgaagatacatttctactttctcaaatatgctgtttttatgactgttagaagatgttattcactaatcaatagcaggatatttgttgtgagtttttctaacatttctagttttttcactcattcttgtgtaggtcttcaatatcaaaggaacatgtttatgagtctttgactaaatggagaaactgtggccatgaagcagagtaagactgattgctttaaacggtgatcagatgcataatcatgacttttggtataactaactacagtgtatccaatgacctgaactttatggggtacaattaggacatggttttatttttctctcactagtgcctaatatagtcttttctttttgagacaaaatctcactccatctaccaggctggagtacagtggtaaaatcatggcttactgcagcctggacctcccgggctcaagtgattctcccacctcagcctcttgagtatctgggactacaagtgtgcactactatacacagctagtttattttttatttttttagaaatggggtctcactatgttgcccagactggtctcaaaactcctaggcttaagtgatcctcctgcctcagcctcccaaactgttgggattgcaggtgtaagccactggatctggtctagatgtttctttattgctgtttgcat

SEQ ID NO: 89509 - DNA, 1313 bp, Homo sapiens
ctggtaagtgttttctagaattatactactttcatatgttttctctttggttcttttgttaataatgttgtactatgaagtaacagtcatcataggcttttaaaaagtattccaaaacataatttaaaattgttatctttttatcacagagtgttcaagcaagcagacttttaactgataaattgtcatataaaagcagtgtcattactttacatcaacatagcagaacaaatttttgggtatgtacaatttttgttcttaattaggattgtttactctatctgcctacagtccagatattaattatggtaattccagaaattatttcttggggccaggcatggtggctcatgtctgtaatcccggcattttgggagtctgaggtgggcagatcacttgaggccaggagttacagaccagcctgcccaatatggtgaaaccccatctctagtaaaaaaacaaaaaaattagctggatgtrgtggcacgtgcctgtatctcagctacttagggggctgaggtgggaggatggtttgagcccaggagatcgagggcaacagtgggagactgtctcaaaaaaaatttttttttttcttagtacttcttcattttggaaaatggctcagaccattcagtgctatccttgctgaagatacatttctactttctcaaatatgctgtttttatgactgttagaagatgttattcactaatcaatagcaggatatttgttgtgagtttttctaacatttctagttttttcactcattcttgtgtaggtcttcaatatcaaaggaacatgtttatgagtctttgactaaatggagaaactgtggccatgaagcagagtaagactgattgctttaaacggtgatcagatgcataatcatgacttttggtataactaactacagtgtatccaatgacctgaactttatggggtacaattaggacatggttttatttttctctcactagtgcctaatatagtcttttctttttgagacaaaatctcactccatctaccaggctggagtacagtggtaaaatcatggcttactgcagcctggacctcccgggctcaagtgattctcccacctcagcctcttgagtatctgggactacaagtgtgcactactatacacagctagtttattttttatttttttagaaatggggtctcactatgttgcccagactggtctcaaaactcctaggcttaagtgatcctcctgcctcagcctcccaaactgttgggattgcaggtgtaagccactggatctggtctagatgtttctttattgctgtttgcat

SEQ ID NO: 89510 - DNA, 1313 bp, Homo sapiens
ctggtaagtgttttctagaattatactactttcatatgttttctctttggttcttttgttaataatgttgtactatgaagtaacagtcatcataggcttttaaaaagtattccaaaacataatttaaaattgttatctttttatcacagagtgttcaagcaagcagacttttaactgataaattgtcatataaaagcagtgtcattactttacatcaacatagcagaacaaatttttgggtatgtacaatttttgttcttaattaggattgtttactctatctgcctacagtccagatattaattatggtaattccagaaattatttcttggggccaggcatggtggctcatgtctgtaatcccggcattttgggagtctgaggtgggcagatcacttgaggccaggagttacagaccagcctgcccaatatggtgaaaccccatctctagtaaaaaaacaaaaaaattagctggatgtggtggcacgtgcctgtrtctcagctacttagggggctgaggtgggaggatggtttgagcccaggagatcgagggcaacagtgggagactgtctcaaaaaaaatttttttttttcttagtacttcttcattttggaaaatggctcagaccattcagtgctatccttgctgaagatacatttctactttctcaaatatgctgtttttatgactgttagaagatgttattcactaatcaatagcaggatatttgttgtgagtttttctaacatttctagttttttcactcattcttgtgtaggtcttcaatatcaaaggaacatgtttatgagtctttgactaaatggagaaactgtggccatgaagcagagtaagactgattgctttaaacggtgatcagatgcataatcatgacttttggtataactaactacagtgtatccaatgacctgaactttatggggtacaattaggacatggttttatttttctctcactagtgcctaatatagtcttttctttttgagacaaaatctcactccatctaccaggctggagtacagtggtaaaatcatggcttactgcagcctggacctcccgggctcaagtgattctcccacctcagcctcttgagtatctgggactacaagtgtgcactactatacacagctagtttattttttatttttttagaaatggggtctcactatgttgcccagactggtctcaaaactcctaggcttaagtgatcctcctgcctcagcctcccaaactgttgggattgcaggtgtaagccactggatctggtctagatgtttctttattgctgtttgcat

SEQ ID NO: 89511 - DNA, 1313 bp, Homo sapiens
ctggtaagtgttttctagaattatactactttcatatgttttctctttggttcttttgttaataatgttgtactatgaagtaacagtcatcataggcttttaaaaagtattccaaaacataatttaaaattgttatctttttatcacagagtgttcaagcaagcagacttttaactgataaattgtcatataaaagcagtgtcattactttacatcaacatagcagaacaaatttttgggtatgtacaatttttgttcttaattaggattgtttactctatctgcctacagtccagatattaattatggtaattccagaaattatttcttggggccaggcatggtggctcatgtctgtaatcccggcattttgggagtctgaggtgggcagatcacttgaggccaggagttacagaccagcctgcccaatatggtgaaaccccatctctagtaaaaaaacaaaaaaattagctggatgtggtggcacgtgcctgtatctcagctacttagggggctgaggtgggaggatggtttgagcccaggagatcgagggcaacagtgggagactgtctcaaaaaaaatttttttttttcttagtacttcytcattttggaaaatggctcagaccattcagtgctatccttgctgaagatacatttctactttctcaaatatgctgtttttatgactgttagaagatgttattcactaatcaatagcaggatatttgttgtgagtttttctaacatttctagttttttcactcattcttgtgtaggtcttcaatatcaaaggaacatgtttatgagtctttgactaaatggagaaactgtggccatgaagcagagtaagactgattgctttaaacggtgatcagatgcataatcatgacttttggtataactaactacagtgtatccaatgacctgaactttatggggtacaattaggacatggttttatttttctctcactagtgcctaatatagtcttttctttttgagacaaaatctcactccatctaccaggctggagtacagtggtaaaatcatggcttactgcagcctggacctcccgggctcaagtgattctcccacctcagcctcttgagtatctgggactacaagtgtgcactactatacacagctagtttattttttatttttttagaaatggggtctcactatgttgcccagactggtctcaaaactcctaggcttaagtgatcctcctgcctcagcctcccaaactgttgggattgcaggtgtaagccactggatctggtctagatgtttctttattgctgtttgcat

SEQ ID NO: 89512 - DNA, 1313 bp, Homo sapiens
ctggtaagtgttttctagaattatactactttcatatgttttctctttggttcttttgttaataatgttgtactatgaagtaacagtcatcataggcttttaaaaagtattccaaaacataatttaaaattgttatctttttatcacagagtgttcaagcaagcagacttttaactgataaattgtcatataaaagcagtgtcattactttacatcaacatagcagaacaaatttttgggtatgtacaatttttgttcttaattaggattgtttactctatctgcctacagtccagatattaattatggtaattccagaaattatttcttggggccaggcatggtggctcatgtctgtaatcccggcattttgggagtctgaggtgggcagatcacttgaggccaggagttacagaccagcctgcccaatatggtgaaaccccatctctagtaaaaaaacaaaaaaattagctggatgtggtggcacgtgcctgtatctcagctacttagggggctgaggtgggaggatggtttgagcccaggagatcgagggcaacagtgggagactgtctcaaaaaaaatttttttttttcttagtacttcttcattttggaaaatggctcagaccattcagtgctatccttgctgaagatacatttcyactttctcaaatatgctgtttttatgactgttagaagatgttattcactaatcaatagcaggatatttgttgtgagtttttctaacatttctagttttttcactcattcttgtgtaggtcttcaatatcaaaggaacatgtttatgagtctttgactaaatggagaaactgtggccatgaagcagagtaagactgattgctttaaacggtgatcagatgcataatcatgacttttggtataactaactacagtgtatccaatgacctgaactttatggggtacaattaggacatggttttatttttctctcactagtgcctaatatagtcttttctttttgagacaaaatctcactccatctaccaggctggagtacagtggtaaaatcatggcttactgcagcctggacctcccgggctcaagtgattctcccacctcagcctcttgagtatctgggactacaagtgtgcactactatacacagctagtttattttttatttttttagaaatggggtctcactatgttgcccagactggtctcaaaactcctaggcttaagtgatcctcctgcctcagcctcccaaactgttgggattgcaggtgtaagccactggatctggtctagatgtttctttattgctgtttgcat

SEQ ID NO: 89513 - DNA, 1313 bp, Homo sapiens
ctggtaagtgttttctagaattatactactttcatatgttttctctttggttcttttgttaataatgttgtactatgaagtaacagtcatcataggcttttaaaaagtattccaaaacataatttaaaattgttatctttttatcacagagtgttcaagcaagcagacttttaactgataaattgtcatataaaagcagtgtcattactttacatcaacatagcagaacaaatttttgggtatgtacaatttttgttcttaattaggattgtttactctatctgcctacagtccagatattaattatggtaattccagaaattatttcttggggccaggcatggtggctcatgtctgtaatcccggcattttgggagtctgaggtgggcagatcacttgaggccaggagttacagaccagcctgcccaatatggtgaaaccccatctctagtaaaaaaacaaaaaaattagctggatgtggtggcacgtgcctgtatctcagctacttagggggctgaggtgggaggatggtttgagcccaggagatcgagggcaacagtgggagactgtctcaaaaaaaatttttttttttcttagtacttcttcattttggaaaatggctcagaccattcagtgctatccttgctgaagatacatttctactttctcaaatatgctgtttttatgactgttagaagatgttattcactaatcaatagcaggatatttgttgtgagtttttctaacatttctagttttttcactcattcttrtgtaggtcttcaatatcaaaggaacatgtttatgagtctttgactaaatggagaaactgtggccatgaagcagagtaagactgattgctttaaacggtgatcagatgcataatcatgacttttggtataactaactacagtgtatccaatgacctgaactttatggggtacaattaggacatggttttatttttctctcactagtgcctaatatagtcttttctttttgagacaaaatctcactccatctaccaggctggagtacagtggtaaaatcatggcttactgcagcctggacctcccgggctcaagtgattctcccacctcagcctcttgagtatctgggactacaagtgtgcactactatacacagctagtttattttttatttttttagaaatggggtctcactatgttgcccagactggtctcaaaactcctaggcttaagtgatcctcctgcctcagcctcccaaactgttgggattgcaggtgtaagccactggatctggtctagatgtttctttattgctgtttgcat

SEQ ID NO: 89514 - DNA, 977 bp, Homo sapiens
acaattctaatagtgtcctaatattataggtttaaattcctattttcatctatctgatgaaaaggccagctgacaagaatgttgtgttgccatgtgtcccttaaaggattgtagtcttagacttaatactagttcaaacagaaaggtatcttaatttggaagtaaatataggaaaatgactatattacttaagtaaacacaactcagtaggagctaaggtagaaaaaaaatttctttttgttgttgcctcataaatcatactaatagtctttgatatcagagctctacctaaatataccttatttgttcattcattcatttttgtttatttaccaagcaattattagccacctgcatacatttgccatgtactattctttccttgagtggagtttggctttaaaatgaacagaaaaaagagggtaagatgaaggtttcagtgagattagcataagctggycagaggggaccagaaaggaatttgtattgcagtttctatgagagctttactctttggcctctatcattgacctagtctaaacttccagatcctgaaacaaaacttaaaacagcacttaattccagttgcagaagcaccttgcgccagctttcccacctccgggttccctgggcaaagaaggagctttgtgggcagaagttcaagcactcctgaagagtgtggccactcggagcttggcaggaatgagggtggggtggttgtgtgctagaagcagcagaattaatcctgcaattgcttttttaatctaatctactgtttgtatttcaattctgtacattgatctaataatattctttagaagaattttttctcttcctcaaccagaccaagtctaggatctactattgcatttggttatcacgtctctttagccccttttagtctggaacattgtcccagcctttgtcttttatcacattgacatttttaatgaatacagtcctattagattgaagtt

SEQ ID NO: 89515 - DNA, 1290 bp, Homo sapiens
atcatgaatggaaaatggaattcaaatttctgaccatgaatgtggcctgtgatgaacaaatttgaatgttctgtattcagatccagagcccttgacttgttaaccgttcatcacaagatactgaaaataattttgtgctaggcaaaaagatttaggaatttagtaaaacagggtttttgttttgtttgtttgtttgtttttaaaaggctagttctctgatctcacaaccaaaaccacgagcacattcctttaaaaggatatccttttaatgatttaggaagctttttaggctctccggagttctcacagaggctaatatggaaaactcacttacccaagaggcttggttgactaattagacaatctgcaccaatctgatggccccagctgtccaaataaaacctgccttgatggtggaaagctcagcaaaactggaaggggcaggaactgagacaagaataaaaatccagggagacagccgagcyggctgctttctctgagtgtctgagaagcagcatctttataagactaaaagagtttattttaaccataactgaaagaaactaagtaccagttaccactagcaagggtgatctttatctgtctttgctgacctgagagaaagggaaggaatcttaaaaggctctagcagctgtgggctcctcacagaggacatctcccgcacatttctaacatgtcttggattttttccaaccttaccttgtgttagaagaagttgcttatgggagttaaatgcccttccttacaggtgaccccatgtaggtgttaccaactaccctgtactcagcagaatcagcgttttcccagtctgtttttggtaaaggccagtgcttgctttgtgaaaggttttgtggtctcctcctggcttggtttcccttggaaggctctctcccagcacctgtgagccctcaccctgagagatggctaatgtgctaattaccatgaacccaaaaatgtaagctgtaaacaaatgagagctgtgtttataatcaatcagttttatagccttctgatggtgacgatatcagtggcgtttacactggaagaccgcacagcgttctccagcagctggccgcttatgttgctctagagcggaggacgatgtggcccattaattgtagtatttgcactgaagggaatgttactttggccaaatagccaatcctgggtcttaggattgccaaataaattattttcaaaaatcttaaagtcagtttggatggttttcaaattatccgtggtttgggggcctatacttacccccaaaat

SEQ ID NO: 89516 - DNA, 1290 bp, Homo sapiens
atcatgaatggaaaatggaattcaaatttctgaccatgaatgtggcctgtgatgaacaaatttgaatgttctgtattcagatccagagcccttgacttgttaaccgttcatcacaagatactgaaaataattttgtgctaggcaaaaagatttaggaatttagtaaaacagggtttttgttttgtttgtttgtttgtttttaaaaggctagttctctgatctcacaaccaaaaccacgagcacattcctttaaaaggatatccttttaatgatttaggaagctttttaggctctccggagttctcacagaggctaatatggaaaactcacttacccaagaggcttggttgactaattagacaatctgcaccaatctgatggccccagctgtccaaataaaacctgccttgatggtggaaagctcagcaaaactggaaggggcaggaactgagacaagaataaaaatccagggagacagccgagccggctgctttctctgagtgtctgagaagcagcatctttataagactaaaagagtttattttaaccataactgaaagaaactaagtaccagttaccactagcaagggtgatctttatctgtctttgctgacctgagagaaagggaaggaatcttaaaaggctctagcagctgtgggctcctcacagaggacatctcccgcacatttctaacatgtcttggattttttccaaccttaccttgtgttagaagaagttgcttatgggagttaaatgcccttccttacaggtgaccccatgtaggtgttaccaactaccctgtactcagcagaatcagygttttcccagtctgtttttggtaaaggccagtgcttgctttgtgaaaggttttgtggtctcctcctggcttggtttcccttggaaggctctctcccagcacctgtgagccctcaccctgagagatggctaatgtgctaattaccatgaacccaaaaatgtaagctgtaaacaaatgagagctgtgtttataatcaatcagttttatagccttctgatggtgacgatatcagtggcgtttacactggaagaccgcacagcgttctccagcagctggccgcttatgttgctctagagcggaggacgatgtggcccattaattgtagtatttgcactgaagggaatgttactttggccaaatagccaatcctgggtcttaggattgccaaataaattattttcaaaaatcttaaagtcagtttggatggttttcaaattatccgtggtttgggggcctatacttacccccaaaat

SEQ ID NO: 89517 - DNA, 515 bp, Homo sapiens
ttgttctttagctctttgcaataaattttgctgctgctcagtctttgggtccgcattgcctttgtgagctgtaacactgcgaaggtctgcagcttcactcctgaggccagtgagaccacgaacccaccagaaggagcaaacttctgacacaccatctttaagaactaacactcaccgcgagggtccacggcttcattcttgaagtcattgagaccaagaacccaccaattccagacacaatatttgtattttgtgtttttagtagagaaggagtttcactgttggccaggctgatcttgaactcctgacctcaggtgatctgcttgccccagcctcccaaagtgctgggattacaggcgtgagccatcacgtccagcccttacaatctttaaaaccataatagcaggtctcattctgaagctggggcctctgcctcccacacctagtttgtttgtttttgcatggmgtctttattgatgagaatcagctgtggatggtgcagcctaaagtggtgg

SEQ ID NO: 89518 - DNA, 434 bp, Homo sapiens
taaagcttaaaataatcctgtgaagttgatagttctattttcccactcaaaaaaatttttttttattttcggtgtggagtggtaactcatgcctataattccagcactatgggagkccgtcaaggaaagatcgcttgagtccaggagtttgaaccaacttgggcaccatagtgagaccccatccctataaaaaatactaaataaaaaattaaatttttttcaaaaattttagttgcttcccccaacacagtgcacactattttaggtacagcaattgatcagagaggcaagacagcttgtccagggtctgtcagttcttcattggcagagttggaatcagaccctccctgtcatgaggccaaggtgccttctgaaaaattcactcccagcaaacacatgatttcctgggagaggtggttatagcttagtatact

SEQ ID NO: 89519 - DNA, 355 bp, Homo sapiens
atccagttttgtcatgccttgtctcttgatccatggaatcaatgaaatgtatgttgttttaagctgctaattttgtgttaacttattaaataacaatagagaactaacatacttagtagaatacaaacagtaagtaaatgaaactggttatgcaactttttatctagcataatctcattaaatacatatatatgtatatatatttatatggtacaaagattrgaagaaaatattaacaaaccattaagtatttatctaaggaggctgggattgcaggtgattttcatagtcttattaatatttttgtgaatgtcacacattttgtataataaaaatttacagcctggtatggtgg

SEQ ID NO: 89520 - DNA, 808 bp, Homo sapiens
tttctggtaatcccaatcagagaagccaggtagactttcttagaccatttatattttattcccaaatacttcattattctaactcaagcctcatgtttcagagatgcagatataacttgtcacttaaatgttgaaagaaaaaaaaggtgaactttttaattgaaaaaagtttattgaagtttattgtagtttattgaagactactatgtgccagccaccatgttaactgctttttatgtttgtagtgtttacagatgtttaaatatgttgaaagaacttcttccatatgctttttaatcccctttgcaagctacgaagtaggtgttggattaccccattttataagtgtggaaggaagcacaggttcagaaaggttaaataatctacctgcagtcacagagcaagtgctttgcttttcattagtatcaacgactrtggttgagactttcactgacacaaatacctgattccatgatgtagagctagccacccagtgtgaattactggctttaaccatgtccttgaagaatgaagataatgggaaatattctgccacagtatagggacattgcagagtttatataaagatatcaaacaagttttttatttttaaataacattcaggaagaatgcgcttttttttttttgtcagaagaaatgatttggttgtgagttctggtgctttaaaaagtaaagtgattatatgctgaatatagccaaggaaagcaattagcattctaatttctttaggatcttttgtctcataattaaatgaataaacaccatctttacaggctcctcgagatgt

SEQ ID NO: 89521 - DNA, 1019 bp, Homo sapiens
ttcccgagctgtggccctgcccccatcgtcaccacataccacaagcaccatgcaaggatagaagatcctaagtgttaccatctatttaaaatcccgagaatagcaacctcacactagaactgtgatgggccagggacatctgggtgctggagaacctggcctgctgtgaggagttattttgccagagggagcaaggaaacccctggaagggacctggtagcaggccctttgatggagggaaggggcactttgaagcctcatctgggagatctggaccccaacagcaagaactcctgtccaagtctaaggtcatgaggagggagcagcaaaaacagaaaaactctaaagacggtagtgcccaagacagtgttatttctgagccttatttctgatataaattgcataaatttatattcaagatataaactgagtagkgaattaatgaagctctcacagataaaggcatgtgccttgttttcataaggtttattgcttgcagctcacaattaactaaataaataattactgagcatcagttaagtattagatatgagactaagaaatggggatcgaaaggaagacaattcttgccatcaaagagtttgctgtgtggttgggggaaagaagtatgtataaattgctgtaccccaagatacacaaataatccccccacctgctgcccacagttacctccacacctagcctcaaaccaagaggagtcctctcgctgaaaggtactcacagggttctataactgatgagtccagattgcagaagattttatgattcctagaagaggtttaaacagaatccttcagaggtctggaaagctacagactacaaggaagccttactgcccttgcctgctgccactgatattggacttactgaccacaccgatttgttttcaaggaaaaatggacagggcaatgagggaactggagtgcctaagggaggaagagagacaagctccctaattcatgtttctgaatcatagaatacaaattaaaactcatgca

SEQ ID NO: 89522 - DNA, 539 bp, Homo sapiens
  misc_feature (1)...(539): n = A,T,C or G
acgtgttaattggcaaacttgcaagtattgtttgaatcaccgactagtaccttnattgcaaaagtaaaaacaaaaacaaaaaatccttcaaaccaactttttaaatacaacttgtcttgtccagctgatccttctgggtatcctgttwaatattagtatacattcccccacacgcagtgcacttttttgttttacacttgttctatacttgaatgtataactgaactgaggcgaaagtcacaaacaacatatgggagcatttcatggaaagtcccaggcttagagttactaacctctgtgggcatcagccatgtatccctggagactaagtaccaggggagccctttggcactggcagcactgatttgaaagcatagcatttctgtttttaatgagcaatttttttttgccataacaaatgtttatctatatttacttttttaactgacaaaaattatatatatttatgatgtacaacatgattttttgaaatacatacatacatatatatcttgtggaatggctaattccaacaaatt

SEQ ID NO: 89523 - DNA, 548 bp, Homo sapiens
cagatttatctagctgaaggcaaatgctgaggtaaatttggaacaaaaaaatatagggaaaaaggaaacccaggatcttggcactgcattttttcccccttctgctctgttaccaagctattagcactcaaagcaagtgttttttctcaggaacatagggatgagatggcggctaattgtaatctaactgaaaagtaatttgttatgatttcccttgactctagtctccacagtgattctacaccatttcttattccascttctctaagtcctggagaatgaatgtgctttggtttcctttcaaaccattctatcttctctgcaatttaccctgaaccattaattcatctactagatatacagcaaccatgcaaacacagatgtctaagaattggaagcattgattaaaaatttttttatggcttttcattttacattatacaaatgataaaggtatttttttgcaaaagagaaagggcaccatttgttatggtttggttctatgtccccacccaaatctcatctcgaattgtaatccccataatctc

SEQ ID NO: 89524 - DNA, 1523 bp, Homo sapiens
agttttgaggggacacagacttgcagtccatagcacctttcagtttactgtttggaattaggagagaaatcaatgaatgaataaattagtaagaacttactgcctgtaacaagaacgcacagtatgggttgcagtgaacacaggtggagacataggcgcctggcatcattttaagcatctctgtaaatgaagcaagtgtgtagttgatatgggggacattagttgacctccctgctgtctgagctgcaatgatttcatcccattttctacgaatactctagatgtcgtcagaaaataatgcccagagctgccacatggctgagatgcgggccttcctgaaagtgtcacacaaaggggttctctgaggactcccagccatgcacagatctctttttccctctctgcctgtttctccactccccctcatgcccaccctccttccacccttccctcaaatgttctgtagctgtcaggtttcttttatagaaataagtgaaattataatgacacaagagttagacgtgctggagatgaaaagaaagactttaaggaaataaaaaggaattgccatgctatttgaaagccgtaagaaggaggaaggagggtagatgaaggatgttaccctgctcggggacctctcttcttgcacatttgactttcaaaaatgcctctgatcatttcccagggagctggtgatgaattgagttggatccaaacaaagccttcacagctggggctggaaaacctcgagacccaaagacactctccttctggcccaaatggtcatagcctcttatgaggagctcactaggtgtgacctcttcaagaagtttgtcattgagaacagatgccttcccacttccagatttttataacattagccagttgtctgtcgtatcyacgggggatattctgctcaggattgataactgaggttgatgctctctgtcccggtagaagcagagtattagagcttacaaaaatttagagacttattgattataatagcaagcaagcatttgtatagtactttacattttacaaaatgcattcatggactttatcatctttgtttttgttttttgggtttctttttttttcctaaaaattgtgtgggtcttgtgtccttatcatcaccattttacaaattaaaaagtggtaaaagtcacatactttgtaagtactagagctagatgttaaacacagaccttttattttaaaatatctcattttatagctgaggtaatttatgctcaaaatgttaagtgacttgcacaagatctctctcaattctaaatgcagaagcaaagcagacatcgaaatcctgggcttcttgatcctgaacaagcagccatgactccctatgttctggctgaaggaattgttttggtgtgaaatctatgtattgtttgttgagataaggcaggtctggagtggaatattgcagctttaattctgaatatgatgaggttgaactgtctgcagtggagctgagtggaattcccttaggtatctggaactag

SEQ ID NO: 89525 - DNA, 1183 bp, Homo sapiens
gcatcagagccctcaggctaaggaaaaagcccaccaaagagaaaccataaaaaaaaaaaaaaaaaaaaaagaaggagggaaggaggaggaggaggaagaggagaggtttattctgagagattttgaattattttctgtggaaatcctttttttataacaaaagcaaaaatcaataattagaagattgtacttgctaataaatctgtgttccaatagccaagcataatttctgaaatgttgaggtagaatgactttcaaaagccaaattttccaagacaagtgacatcaagtctcaggtaaattgaagttttcttcttcctgggatattgtcatttttttaaactaattttccagcaagaatttgtttttctgtatattcatggattaagtcaccaatcatgtattcagtcacacagtggatatttatttaacacatactatgtgacaaacactctgctaagaccttgggatagaacagcaactaaggcggctattttacttttgaaaatttrtataaaatcttagctccaagatctctatagtgcagcttataatgttgaaattgtatgtaaacaatttttaattttcccttattctttccctcaccttccaaaatgtaaaacttgcacgtatgggtcagagactaatcactaggctcaaaatgaaagggggtgaggtagtggggcaaggccagcccaaggtataaaggaaaacaaagatttcttccaagaaaaacagctccttatccctttggataccaagcatagctgagacattttgttttccttttttggcttatgcttctggactggagggagacttctctgattagatctgagcaaaacttgacaaccctcaggagcctgccaagcattctcggtcttgggtgggccagagtgttcacaccatccatcattcaaaacctgccaggatgacactattaagctgaatgtttaaccaaggcaggagagaagccaatttatttgaggatagcttttcaatatccttggatgtgatggaagtcacatttccctaggccatgggagatagcccactattttctgtcttcctctaactactccatcactttctcacctatttctctgttgaactaaacagtcaacaatagatacacatgtattatcagcatcattggcatttttattagaggtttattaatgca

SEQ ID NO: 89526 - DNA, 1183 bp, Homo sapiens
gcatcagagccctcaggctaaggaaaaagcccaccaaagagaaaccataaaaaaaaaaaaaaaaaaaaaagaaggagggaaggaggaggaggaggaagaggagaggtttattctgagagattttgaattattttctgtggaaatcctttttttataacaaaagcaaaaatcaataattagaagattgtacttgctaataaatctgtgttccaatagccaagcataatttctgaaatgttgaggtagaatgactttcaaaagccaaattttccaagacaagtgacatcaagtctcaggtaaattgaagttttcttcttcctgggatattgtcatttttttaaactaattttccagcaagaatttgtttttctgtatattcatggattaagtcaccaatcatgtattcagtcacacagtggatatttatttaacacatactatgtgacaaacactctgctaagaccttgggatagaacagcaactaaggcggctattttacttttgaaaatttatataaaatcttagctccaagatctctatagtgcagcttataatgttgaaattktatgtaaacaatttttaattttcccttattctttccctcaccttccaaaatgtaaaacttgcacgtatgggtcagagactaatcactaggctcaaaatgaaagggggtgaggtagtggggcaaggccagcccaaggtataaaggaaaacaaagatttcttccaagaaaaacagctccttatccctttggataccaagcatagctgagacattttgttttccttttttggcttatgcttctggactggagggagacttctctgattagatctgagcaaaacttgacaaccctcaggagcctgccaagcattctcggtcttgggtgggccagagtgttcacaccatccatcattcaaaacctgccaggatgacactattaagctgaatgtttaaccaaggcaggagagaagccaatttatttgaggatagcttttcaatatccttggatgtgatggaagtcacatttccctaggccatgggagatagcccactattttctgtcttcctctaactactccatcactttctcacctatttctctgttgaactaaacagtcaacaatagatacacatgtattatcagcatcattggcatttttattagaggtttattaatgca

SEQ ID NO: 89527 - DNA, 775 bp, Homo sapiens
tcatatcttcgcctccccaagtattgtgataagaggtgtgagcctgcatgcctggccgtgcctgaagttttgaaatccagtctcaagactgacatagtgtcacttccactgcattttctctggccaaaggaagtttcaaagcctgtccaaattcatggggtgaagctgcaaatttacattccagggagttgggtataggaaaggttgaagaatggggtttttgctgtaattagtctaccacagtgattcataattattagatgattatcaaaataatttctaaattgtattccattaattgtatttctgtgctttcccatgaagactaaaatgaatgattttctaatattagcttaaatgtattgacatatttcaattttctcattttgtgggatattattctggttgctctttgcagggttcctgatgctttacatttttaagtttaacttcatttaaaagcattaataaagtttttttctcttttattcagaattacctccagaataagtrtacaacaaatcctgcaagtaaggtatcccaaagcatcatcctcattcttggtcaccacctccagaataagtatacaacaaatcctgcaagtaaggtatcccaaagcatcatcctcattcttggtcaccacctccaaaaaggcacccattaaattaaaaaaactggctaaatatgtaactgtgccttcattgtctttgggtggagaccttcacttcagaagcttcatgggctgttttttcactgttgctggtgcattgcaaga

SEQ ID NO: 89528 - DNA, 820 bp, Homo sapiens
tgatgagaccygaatcccctttaagtggagtggctgtacctctaacagctctgcccacttcacctggcaaagaacctgactctattttacactttatggtatttctgacaagacactgtccctgcctgttagttccactcacaaagcaatccaagccagggatgagctgcgctgccttcaagaagcaatgcgccttcagacctctgcagctacttcaggtttgccactttcccatcaagggttgaggattttttcatgaaagaaaataaagcttgaagcacatcaagctataaatcagcatcaggaaacaaggtcatgcattttacaacatatgatccaaacacgctgcaccaaattggcctttagtcacttgaattgacataaagtgtgcctgggctgacactttattcttaccatttgcccttattgctagataaaggctgtcgcctttctccttcctggggatttctcttcggcttaacagcttgctaaatgcttgcctttgtttgataatcattctaaggcattggtttaaatcatcattctccctttctaatttatctctgcccgacagcaaagcagctcccagctatctgtgctggggtaggtgattaactggctcgctgattgcccttatattaacattaacattgtcttccctgccatacagatgtgtgcgtgatgatgagagacagaagaaaagagacacaaattacaggaattgcttaaaataaaaagcattattaactaagagaggaggccaataataaaaactatttgttttcattaaaaaagaaaattactatggaaatacagtttc

SEQ ID NO: 89529 - DNA, 735 bp, Homo sapiens
tggccaaggcacttggcctctgtacgcctcaattagccaaacagtaaagctgaataaaataaaaatcttgatgaaaattagatgtggatttactctgatgagctttcctgagtaatttacagtcccaaagacaacagtcaaaacacaaagcaaacatccaaagtgccaacagwggagggagtcgtaccaatgcagctgatcaacttattatacaaagcctcttaaatcagctcatgtagcattctattaatttaatgcacgccacatgatggtgattaaatcttccacgttggaagcagaatgtgctatatagtttcagaagaagaggttaaacaaaaattctgatctccccacatgacccaaaaataataccttttctagaagttgctttaaagaaacccaccatggtactaaagggaaagggttgccaaatctctaaaggtttgaaagaaaaatactgtggaccgtaggggggtaatgagaacttctgaattatataattagttcctgagtacccaagactatttaaaatgcaatttgctgattggaaagaaaagaaataatgaagtacaaagaggataaatgaagacaccacacgttaagccagtgaactttcatagtatgggagaaaagaaagaaggacaaaccctgtctgttcacgttctaagcattcatgattttcaagaggatcagatgaacaatacttttttgctctggttttacaaataggtacag

SEQ ID NO: 89530 - DNA, 709 bp, Homo sapiens
ttttgcctcagcctcccatggcactgggattataggcatgagccaccatgtccagcctgctgttactattaattgtacttccctttactctcacagtagtccagatttagaagataaattatgtggagatcatttccacaactcccaccttctctgttccacccacccccagccatgggtgggcctgtgccatcttctctagctcagactgctgaaataagctactggctgggattccaatctccacactgcccttcccttcctctaattcatccattcccgctaggtgatctttctcaggtgaaaatctcatcaggtcaccccctgcttcgatggcttcccctgctttcagaataaagtttaaacactttcgaatagcgacgctcaaagacctcagagacctccataatttcacttcatccaataaatctcccattagatgtttgtctaactcaactgtactggtacctccctattaataataataatgcaaacttaaagttagttttcccagatcccaaaatattaaagtaccaacactttaggtctcaaacaacttcttttctgggaaaatataagaggtctgagacatcctggctactttccccagttagatgtgtttcaaaaaactgtatgtcratcttgtattttttaacaccttatattttttaatcaacttatatgtagaatgtgctagagactctatttg

SEQ ID NO: 89531 - DNA, 807 bp, Homo sapiens
aaataaaaataaaaaaaaaatcagagccaagtaagtgagatacaacttgtataaatacacttgaggaatttgcttacagtagaaattctatagtaaatccacctatttgacttaaatttgacttttgaacataatttttcaaggcagctcatagggacatcttcctcaaataatgctgatgctgaccaggtcagcattaatgtcccagatcactgagtgttaaaaacgttacacgcattagtttgtctccctcttcatctctccctcagtctgcaatttatttcagatcaattagaccagggaaatgatctaatttcctggttttaacaacaaacaaaatcttcaattattgaacactaatagatttttttctttttcttttaagacagctaaaattgtgaagctaaatatgacacacaagaaatatgtaatccaggccgagaataaaagttacaatctattctttctctctgacctttaggtaagccccatgctttctccttccatatcaataaaagagtgggcrcctgcaaatcctaattcccagacttctagaagacaaatgaggtaatagatgaaacactctgggtattactaaccaaggggggaaaaaaataatgaggttaaatctacccaaagcaaatctttaacattcaagccactgtttgcagacatatagtcccctggttcacacactaaccaccggagccaccagatgtagggattcataggattggtccacacaagaaaggcttcctagacgtgtacattagtgatgtcagtaggaagtgggatgtttcaggatcc

SEQ ID NO: 89532 - DNA, 1175 bp, Homo sapiens
atctcaaattatgatctgtggaggtcaaatatatctagtaacacagtatatttaccacgtcctgaataagaagtcacctactaataagaatattacaagtccaaaaatcagctagctaaggaaatgcagtgggaaagcaatagaaaactaaaagtagatgaaaatagaaccaaagtcctttctttgtagttcttcctttacagttctttataattctttactgttctttcttagtctgcttctgttcattacgttacccccaatatctagaatgtttcctggcacagagcaggattcaataaatatttatgtaaccaactgttggtaatagcgaccatttattgggaatctactttatcatgcctgatattaggtaacttacatgtttttaaacttcacaaaaattcaaagagttaatattactattaggacctaatattactattacatcctgtaaacaaaggacctgaggccaagagtctgtaacttgtccagaaccaggaaactgatgaacagcagaatttaaccctgtctgtccagatcctctgttcatttgctttgcacgacaacacatggccatagagtaatgtgaacacacgaataaaggtggtactttaagacttgctaatacaagaaaaaagtactaacacttcattttacttacagacttgaggaaacagttttttctggaatctgactgcatgtaaaatcctaaagcatcccacatggggggaaaatgttattctaatcccatgctgtaagtaatgctacagaaacaatctgccaaaccctacaagcctaacaagctaaataaggaaagtatagagaaatgaaaatatttccctggtccaatattttccaccatcttagaatcccatcagattcagagttccagatctgcctcatctggactgcaagattattatggtaaaaccactccacacaaagtacaattgtctgaaattacactgaagtcaaatgtacatcaaaaggtgccacacagggaagaagagctcaccgctgtgtaatttaatgaaacctactgagcaccaagggcacagacagccaaattgaattttaaatgtttcctaccaggaggctataatcaggatagccaccagtgggtggatgagataaaygaactgactttcttccaccaggcgatcaaaatagaa

SEQ ID NO: 89533 - DNA, 659 bp, Homo sapiens
tttaacggcagaataccataacagaataccatgaatatatgtaacagaatacttaacacaatataacagaataccataaatcaggtgccttctaaacacagaaatatatttcttacagtcctaaaggctggaaagtccaagatcaagacactggcagattcagggtctggtgagggccagcttcctggttcatagacagctgtcttctcttgtggtgtcctcacayggcagaaggagcgagggagctctctgggatctcttttataagggcactaatcccattatgagggctctgtcctcatgacctgaccacctcccaaaggccctgcctctgaataccgtcacattgggagttaggtctcaatgtttgaatgttgtgagggttataaacattcagcctatagcaatgatttacataaagtttgtggaatgagactgataaagtaattaccaatagccagtcaggttggtatcagaaaatttcttgctgtagtatgttagctacgtgagataaactttttgaagattaaacaaaccacagcagggatataggtgaatgaatgcaccattgtgccactgattaacttttctcccatttcttattcatatactacttagataaaataatactctttaatttttttaaagccataataata

SEQ ID NO: 89534 - DNA, 1807 bp, Homo sapiens
  misc_feature (1)...(1807): n = A,T,C or G
tcatatacttgactacaaattataaaacctaattaaaattattttcttatacaatcaccaaatctatactgttctgtattgtattattctacggtaagagagtttttgtgtttcagtcttgatactttgctcacaataatccaatgcaaatcagtacaacacaaactgactattcaaacatgtagtgttttgaaatcacagcccaagatatatgcttcttcctaaattttcacattaaaaacgtcaatgtaaggtgacatgtattggtagttagatcagaaaagaagtaaataattctgagttctattccttgaacttctattgattttaatacaccatgtatatatttagcaggtgcaaaaaaattaatgagtaccacacaaatattacagtttaaaaaatagcctctaggctgggcacagtggcttatgcctgtaatcccagcactttgggaggctgaggtgggcagattacgagctcaggagttcgagagcagcctgacaacacggcgaaaccccatctctactaaaaatacaaaagttagccgggtttggtggcatgtacctgtaatcccagctactcagggggctgaagcaggagaatcgcttgaacccaggaggtggaggttgcagtgagctgagatcacaccactgcactctagcctgggtgacagagcgagactccgtctcaaaaaaacaaaaaaatagcctctatattcattttgatgttatagtgagacatgggattattgataaatcaattttaataaatagtataaaatcctaaaacaactaaagtatctaaacgtaatttaacttttaattacagtattatgtgataagaatacgagtgtgaatatttcccatgcaatccattaaaatttaatattttattaaattaagaaacaccataaatagcttaagatatcttaaaatattatattattaaattaaaatatatcatgaaagataatgtcacattcttcggtgaacaatcagaaatccttgtcttgaatgaattatcaactaaatatatttacttttattaaatacatgcataaatgttaatagaaaattaatctgtgttaaatgaatrtgtctttctgaagatttctgtacatcatattatatggctcagattaagacacacactttacaaaatctagcatttctgagtataaaatcttctgacaaaattttttttcttatgagcacctaccatgtgattttagagtaacatacatacattaattttctctcaatgaactacatttagctatttattggctacttccaaatacacacaaataattatttgaataaagattatagctcaggaagctataaagttgttgcttttttttttttttttttttttgagagggagtcttactctgttgcccaggctggagtgtagtggggtgatctcagctcatgcaacctacacctcccgggttcaagcgattctctgccttggcctcctgagtagctgggattgcaggctcccacccccacacccagctaattttttctgtattttttagtaaagatggggttttgccatcttggccaggctggtcttgaactcctgacctcgtcatccacccgcctcagcctcccaaagtactgggattacagacgtgagccaccgcgcccggccgttgatcattttttaagaacacattctgtgattttcagtttattataccattgtaggtaacctaaaaatagctgtgcatttcgatatattagatattttatgtgttattgaaggaaaaaaacctagctttctacttganagagatgat

SEQ ID NO: 89535 - DNA, 1405 bp, Homo sapiens
tgcatgcaataaagttattcatattgattatatgtattttaaattcctataaaggtctcaaaaatttgacattgccgcaggcatactcttccatatccaaacacaaatgggagagttttgtttgtcattgttacacaaggtctaactaaaagtaataagactggttttgatgacttagttttgatgacttagttattatctgtctcattgcttcataggtacattatgtaacagtagacaatagtaattattgtgagttccttatatggaactttcttgaagtgaactaaattatttttgacctcatgataaatgtttgcccttttaaggatgttactaatatttataggacatttgctagtctttttttgtttgtttgtttttgttttttatttttttattttactttaagttctagggtacatgtgcacaatgtacaggtttgttacatatgtatacacgtgccatgttggtgtgctgcactcgttaactcgtcatttacattaggtatatctcctaatgctattccttccccctccctccacccccctacatttgctagtcttttaaaagtaaacttgaggctgggcgcagtgtctcacgcctgtaatcccagcactttgggaggccgaggcaggtggatcacctgaggtcaggagttcaagaccagtatggccaacatggtgaaacctcgtctctactaaaaatacaaaaatcagctggttgtggttgcatgcgcctgtaatcccagctactcgggaggctgaggcagaagaattgcttgaacccgggaggtggaggttgcagtaaaccaagattgcaccattgcactccagcctgggtgacaagaatgaaactctgtctcaaaaaaaaaataaaataaaataaaataagattataaactgcgttttctgattagttcaagacagcaccaaagtaatccttaacaattgaagaggaattgttgctttctaagcacatatgcatttatgttctcctactgtttaatacatcatgacagtcacaaatgttttgattaaacattgaaaatataaaaaygttctctccccgggagtggtggctcacacctgtaatcccagcactttgggaggctgaggcaggtggatcacctgaggttaggagtttgaaaccagcctgaacaacatggagaaaccctgtgtctactaaaaatacaaaattagtgggtgtggtggcgcatgcctgtaatcccagctactccagaggccgaggcaggtgaatcgctttaacctgggaagcagaggttgcagtgagctgagatcatgccattgcactccagtctgggcaacaagagcaaaactctgtctcaaaaaataaaaaataaaaaataaaaaaattaaaataaattttaaaaaaatctcttttt

SEQ ID NO: 89536 - DNA, 642 bp, Homo sapiens
ttgcctgagcttcttacaccaggaataatggaatattttttgaagcactggcgttcttgagacaaaggtgtaaattcagagcaaggcagtaagacaaaaatataagaggcaatttattagagcagagaggagcgaatttggagaggagcggtaggcatttgaatttatggcagaaaaggaagcgactcagaaggaaagaggttacagtccaggaaagaaaaagaccagctgtactagcgctcacagggaaagaagaataggtgaataccacctacaattccttattacttttctggccatgtgtttatttgaaagagtagtgtgtgaggaggccccaggcttaamttcctggtaccctgctaacccactaacagttaagtaggaggcccaagcttcagaaacgagagctgggaagtaaaatctcagcactatctactttggaattatcttcgagaaggagtgtacaaatacgtagaaaatcaaaatcccagctaatttttaacagaaggcttaatgccttccaaatgtgtgctattttggctttttttatattgcatgaatttttacaaagcaagtgggaaggtaaaggaagcgtgtttggaggtcagtaaggacacctcaaaggtcatctcatgggacact

SEQ ID NO: 89537 - DNA, 613 bp, Homo sapiens
caggggtcaacaacgacgcagcagccttcctatggctgtataatgtgccatggccgggacaggcgagggcaagctcaggctgactaagtgagatcccaggttcccaggtgggagcaggacagctgactggcaagacagccaagggtcccaaaaggaacggagtagaaacaggcagggaaaggggaccgcaagggggcagacttttcttcctcagctcctcttagcttgaagggctgataccaccatccggttctggagcccagccgccattcagcaggccctgcccacttgcctgtggagaggaggctggggttcacagttggcaatccagtttcttgttggaaccaggaccgtaaaaccatgcctagattccttgaattctagacccaattccccatcccgtcagcccctgagtggcatcctgggcctcagaattactttttcagaaccttattgctgccaaccaatctgatttctgttatctctgaatcatcttctcccrtctcctctgcaaaatcagccctcctcaaaggccaagattaaacttgtctactccaaaggaaatgaaatcaggattttttttcatatgaaatagaaaatcatttatttacag

SEQ ID NO: 89538 - DNA, 1756 bp, Homo sapiens
  misc_feature (1)...(1756): n = A,T,C or G
tgtgttagcctcttacgaaactgcgtctaccttaaaagggcacaggaaagggtgaaaagtatttttaaaaggctaaataaccacatagaagtcatgtaagttgacgcatgagccggcgaatggaatgatgatgtggccttggaggcctgatgggtcctcccgttggcatggtcccttctgctactggcgctcctgtgcctgcaatccaaacatctggggcctggccaaggggataccgggggctcgaggaacatgaggagctaagaggtgacctggggtcccggacaggcaggcaatgaggatgtgtggagttgagtacacgtcagggtgggggactgactgcccataatacatttaaaatggtgcatttcaattggtgtttgccaattcctagttgtggctgtttgggggaggctcaagaaaatgttttcacagcccttggggatcctgtaatgagaatcatgtgtaaacggaacgttgacgaagccacacctggggcacattggacccacgacagacactgatgtgggaaaagagccggtaccttttgaacctgacccattttatgagaagatgcatatcaaaacaaacaaacaaagcaacaacaagaacactgtggagtctaagattgaggtgtggtgtcttgaacaaaagacaaaagactcagccacgcttatgctaagaaggagagccagggaaagaaaatgctgcagtcgcagtcagaaggaaaagactgtttcactttggcttcatgtgcatcccccagagggactatcatgttactttcaaaatgactgcatagcagatgaaaaatgattctcatctgcctatggctgctgggaggtggagtgcagtgcgggactcctatggggatatttgtggctcctcacgtctcctggacccagggtaccaggacagtggrcataagggacaataaagcttatttgaacaaaataccatcttagattctgcattcatcacacattttgttctctttgctactaggatgtggcaatgcaaaaataatggcctgctggtgctttcaaggataccagagttctagattttattttgtctcaaaatgtgaggcactggagaatttcccattcaaaaaccgtctttactttgcagaaagagcccctttataagaacttgtttttttttttttacacgctttccccnnnnnnnnnnnnnnnnnnnnnnnnnnnnnnnnnnnnnnnnnnnnnnnnnnnnnnnnnnnnnnnnnnnnnnnnnnnnnnnnnnnnnnnnnnnnnnnnnnnntacaaccccctcatacctgggcccagtttaccataagaattcagttcaataaatgcccctacttttcttataccactgctcctttgctggtgccatttcctcttctggcaaccccttttgcccatttttctgctcaaaaactaccttccacttgtcttgagtcacagcttccatgtagtagcctgtggtctggtttccttgccattgcttggcatcacagtgtgctcacctctgtcatagccttcattgtacctgatgtagttacgttgggtgttgcctgcatgacccactggactctaatctccttgggtgaaggaaatgtgctcgttcatctttgaaactccagtgatcagtaacttggacagcatctagtacatgataggtgctcaataaatatcactgataggttgaataaaaaaatttcaagctcatgggctggtaaaactctacctaattgccggctttggataaagac

SEQ ID NO: 89539 - DNA, 1039 bp, Homo sapiens
caaaagaagttgcttgaggaataagagagttcttattctgggaagataatatggttttgatctgtgtccccaccaaatctcatgttgaattgtaatccccattgttgaaggtggggcctggtgggagstgtttgggtcatgggggcagatccctcatggtttggtattatccatcctcgagatagtgagtaagttctctcaaatctcgttgtttaaaaaagtgtgacacctcttccctcctgctcttgctccagctttcaccatgtgaagtgcctgctcccatttcaccttccgccatgactaaaactccctgaggcctccccagaagctgagcagatgccggcatcatgcctgtatagcctacagtactatgagccaattaaacctcttttctttataaattacccaggtttaggtatttctttctagcaatgtaagaacagcctaacacagaagacttgggtgggtgtttggatgtagccaaagacaggtatgaatgacaaagtagcttgtcacttctgtgactctcaatgagccatgcctcctggcattcacacccttgtgctgtctcttcctcttgatctgatccaggtctgttagaatgctggtagaggggacccagtgccaggtgtggacttcagctttaagaaggtttggccatttctgattgtgtatcttggaaggatcgaactttgtggagagagagaagcccatagattgcgtggagactgaagaacccagccaactgtgagaattgaggctacagacttctgactcccataaagtgtctctgtcagccttcagctacttgagccgatctaattgagggaccagatgtatgagtgaagaagtcatcttggacattctagcctcggcagacattgcatgggacacagacaagccaccctctgtgtgctgtctgaaatcctggtcgcagaatcatgagcaatgataaaatggttgttgggagagaccagccactaagttttgggtagtttgtttcacagcaattgatagctaaacaaacaaacaaacaaac

SEQ ID NO: 89540 - DNA, 1039 bp, Homo sapiens
caaaagaagttgcttgaggaataagagagttcttattctgggaagataatatggttttgatctgtgtccccaccaaatctcatgttgaattgtaatccccattgttgaaggtggggcctggtgggagctgtttgggtcatgggggcagatccctcatggtttggtattatccatcctcgagatagtgagtaagttctctcaaatctcgttgtttaaaaaagtgtgacacctcttccctcctgctcttgctccagctttcaccatgtgaagtgcctgctcccatttcaccttccgccatgactaaaactccctgaggcctccccagaagctgagcagatgccggcatcatgcctgtatagcctacagtactatgagccaattaaacctcttttctttataaattacccaggtttaggtatttctttctagcaatgtaagaacagcctaacacagaagacttgggtgggtgtttggatgtagccaaagacaggtatgaatgacaaagtagcttgtcacttctgtgactctcaatgagccatgcctcctggcattcacacscttgtgctgtctcttcctcttgatctgatccaggtctgttagaatgctggtagaggggacccagtgccaggtgtggacttcagctttaagaaggtttggccatttctgattgtgtatcttggaaggatcgaactttgtggagagagagaagcccatagattgcgtggagactgaagaacccagccaactgtgagaattgaggctacagacttctgactcccataaagtgtctctgtcagccttcagctacttgagccgatctaattgagggaccagatgtatgagtgaagaagtcatcttggacattctagcctcggcagacattgcatgggacacagacaagccaccctctgtgtgctgtctgaaatcctggtcgcagaatcatgagcaatgataaaatggttgttgggagagaccagccactaagttttgggtagtttgtttcacagcaattgatagctaaacaaacaaacaaacaaac

SEQ ID NO: 89541 - DNA, 1039 bp, Homo sapiens
caaaagaagttgcttgaggaataagagagttcttattctgggaagataatatggttttgatctgtgtccccaccaaatctcatgttgaattgtaatccccattgttgaaggtggggcctggtgggagctgtttgggtcatgggggcagatccctcatggtttggtattatccatcctcgagatagtgagtaagttctctcaaatctcgttgtttaaaaaagtgtgacacctcttccctcctgctcttgctccagctttcaccatgtgaagtgcctgctcccatttcaccttccgccatgactaaaactccctgaggcctccccagaagctgagcagatgccggcatcatgcctgtatagcctacagtactatgagccaattaaacctcttttctttataaattacccaggtttaggtatttctttctagcaatgtaagaacagcctaacacagaagacttgggtgggtgtttggatgtagccaaagacaggtatgaatgacaaagtagcttgtcacttctgtgactctcaatgagccatgcctcctggcattcacacccttgtgctgtctcttcctcttgatctgatccaggtctgttagaatgctggtagaggggacccagtgccaggtgtggacttcagctttaagaaggtttggccatttctgattgtgtatcttggaaggatcgaactttgtggagagagagaagcccatagattgcgtggagactgaagaacccagccaactgtgagaattgaggctacagacttctgactcccataaagtgtctctgtcagccttcagctacttgagccgatctaattgagggaccagatgtatgagtgaagaagtcatcttggacattctagcctcggcagacattgcatgggacacagacaagccaccctctgtgtgctgtctgaaatcctgrtcgcagaatcatgagcaatgataaaatggttgttgggagagaccagccactaagttttgggtagtttgtttcacagcaattgatagctaaacaaacaaacaaacaaac

SEQ ID NO: 89542 - DNA, 670 bp, Homo sapiens
cacattctgctagtgtcatcacaggaaagacttaaagcagaggattaatgtcaacttaactaacgagtcccatagtatagttttctttccatccttctgaaccatttttatttctttgaaaatattctttatttttataaaatgagggtatggtattataggtgagaatttatttttaatatccatatttggttttttttgaaaattttaaaatacagaaatatgaagaggaaaacaaacacttatgaattcagtgcccattatccaaaatgaataaatgctactgtaatggtcattttgcttcaaaattttttaataaaagaatatttgacagataaagctgaagccccctttgagactctgctaagttcaatcccaccttcatctccccagtgacatccacatgtggtgtgtctatctgtctgtgtatctgcctgtatctatatatagaaaaaaagcaggaaaataagggatttttccacatgtgtgcatttataaaatagtgcctaggactgatatcaacaaaatttctccttaagaacaaatgyataacctaccaagtttcctctaacacactgaagactgagaatagcgcaatggagtgcaaaatcaggaagctagaaatcagaagacctgggcctggcccaacagcccttattcactccctgtg

SEQ ID NO: 89543 - DNA, 677 bp, Homo sapiens
ctgagcatttactgtgtgtcacacgctgttttgagtcctggggcaatagcagagaccagaacaggcaaagttcctgccctcaaggagcttgtgcttcacaggggccagrgagatgataaacaaaatgaacaagaaaattacagcatccctggtggtaaatgctaggcagaaaacaccaggcagaggccggaagtgcgtgtgtgcgtgggcgtgtgcctcccttttctggctttcatttttttcattgtagtcaagttcacatagggcttactattttaaatactttgaaaatactttgaagtatacaattcagtggcatttagcacattcacgacattgtgcaaatgttaccactctctagttccggaatattttcattactccaaaaggaaacctcatactcattaagtaatcactccctattccccctaagccagcccctggcaaccaccaatctgccttctgtctctacggatttgcctgttctgtacttttctgtaaatggaatcatatgatatgtggcctttggtgactggctttttcttttttacttagcataacattttcaaggtacatccatccatgttgtaatatgtacaacctttctatgactgaacaatattctattgcatgtatatatcacattcttgtttatccattcatcttttgatggacat

SEQ ID NO: 89544 - DNA, 729 bp, Homo sapiens
ctcgctgtgtcacccaggctggagtgcagtggcatgatcatggcttactgtaatctccacctcctgggctcaagcgatcctcctaccttagcctccaagtaactgggactacaggcatgtgccaccagactcagctaatttttggagagacagggtgtcgccatgttgcccaggctcgcgtgtttatatttgacagagacgggacactgcactgacagttgtatgctgtgtttgctgttggtagggtgatttgtgtctgtcctcagcccctcccatcccactctagggtccccagagataggtgttcactttcacttaagctcctgccatttgaggccaggcactttctccttggctgactgagtcgtcataaacagagtaatcaggtttctggaaggggccttggggctttctcagcctgttagtagtttttgtgtacctgcccgaggtgcactttctctgtgtctgtccctgtaaagccaccttgcagtttycacaaccatcttggagtttatttagtgccagtgtcacagatgggccaccctgacctgggatgatacacatcgtttttattatttatttctcgccaagaccctgcacattggggaacttgtataaataaggaaatggaggctcaggaaaatagaaatgtctgtggaaggccagaggtgtaagtcacaggctgcaactctgattactggctgtttctggaacaccatctgtctgccc

SEQ ID NO: 89545 - DNA, 729 bp, Homo sapiens
ctcgctgtgtcacccaggctggagtgcagtggcatgatcatggcttactgtaatctccacctcctgggctcaagcgatcctcctaccttagcctccaagtaactgggactacaggcatgtgccaccagactcagctaatttttggagagacagggtgtcgccatgttgcccaggctcgcgtgtttatatttgacagagacgggacactgcactgacagttgtatgctgtgtttgctgttggtagggtgatttgtgtctgtcctcagcccctcccatcccactctagggtccccagagataggtgttcactttcacttaagctcctgccatttgaggccaggcactttctccttggctgactgagtcgtcataaacagagtaatcaggtttctggaaggggccttggggctttctcagcctgttagtagtttttgtgtacctgcccgaggtgcactttctctgtgtctgtccctgtaaagccaccttgcagttttcacaaccatcttggagtttatttagtgccagtgtcacagatgggccaccctgacctgggatgatacacatcgtttttattatttatttctcgccaagaccctgcacattggggaacttgtataaataaggaaatggaggctcaggaaaatagaaatgtctgtggaaggccagaggtgtaagtcacaggctgcaactctgattactggctgtttctggaacaccawctgtctgccc

SEQ ID NO: 89546 - DNA, 999 bp, Homo sapiens
tgtgccttctagttgacttttgtaaagtagaaagaaataataaattcttggatcacgcctgaaatcccaacactttgggaggccaaggcaggtggatcacctgaggtcaggaggtcaagatcagcctggccaacrtggtgaaaccgcatctctactaaaaatacaaaaaaaaaaaaaaattagccaggcgtggtggcacacacctgtagtcccagctactcatgaggctgaagcaagagaatcgcttaaaccctggaggcagaggttgcagtaagccaagattgcaccactgcactccagcctaggtgacagagtgagactccatctcacaaaaaaaataaataaaataataaagagagagaaaagaaagaaacaataagtcttgcagaggttagaaagaaggtaaagaaatggttactttgaatggagcaataatcacattttaacataaagattgtccaagatcacagagtaatctgcataattgtgcaaaaattctcatgttacatgactgttctccctgcagtatacactcagcctgttagtttttgtatctagaatcctagaaccttagagctccatggaacctgttttgcatcgtctccttgtttcacagatgaataggctgaagatcagacagtggaaactaagtcctcatgaccacactgtgtgggatcactggacaagctaacattttcttggggtggatggagtccagttatcattgcagggcctgttcttggggcagaagagtcaggaacccttttaactgctttctggttgtctgtaccttttctcgccactactttggtaacttgtatcccccatccctggggacaaaatcttcatttctagcgttttccaccataaccttgttctggtgctgaaacaagcaaaagcaaagtgctgaaacaagtgtcgatgctggcatatcacagtgtagaatggtgctcctcaaatttaggtggctatggaagtgaccggaggattgtgtttaaa

SEQ ID NO: 89547 - DNA, 1111 bp, Homo sapiens
aaatcatgactttatactatgtccaagctctcataattgctcattacttactcattgatttggcttgaccaaatgttagtcaacattctcttctcacaggttgaactgtgtcttgtacctaagctttcaagcaagcactgaaatgcagaacattctcttttgatagcacactccaagaatcagctgaccaaagagaataaaaatgttcttttaaaatgtgactctcatgtcatctgtttagcccytttcttatgccccacaccccacaaacttcttgctagccctatgtacttcctgctagctatgtttaccgctcctaataaaataaaagcttttttcgttttgatttggtatttcgccaatcttagggttggactattctccctattgcatagtgcccttctatctatcataacacagttgacccttgaagagtgggaggttagggttgctgatccatgcacagtcaaaattacacatataagtttttgctctctttttcaacttttattttaggtttgagggtacatctgcaggttggctacatgggtatcaaatcattataaaaacaccctattaaatagttttaaaaggtggttccgcacactttaaagttatataatccctcataccttccttatgtctctaaatagagaatgaattagtcatattttttagattggtgacttttatggacatttaagaggcagaatttggagacttactagcattatttttcttttttgtttttgttttaggttcagggggtacctgtgcaggtttgttacatgggtgaattgtgtgtcactgggtttggtgtaccaatgagttcatcacccagatagtgaccgtagtacccaataggtagtttttcaaacttcactatcctctcaacctccactgtcaagtaggtcctggtgtctgttattcccctctttgtgtccatgtgaactcaatgtttagctcccacttataagtgagaacatgctgtgtttggttttctctccctgcatttatcacttaggaaaatggcctccagctgcagtcatgttgctgcaaaagacataatttcatcctttattatgtttgtacagtattccatggtgtatgc

SEQ ID NO: 89548 - DNA, 581 bp, Homo sapiens
attcaaacatacagcttgactccagagtctatgcttttaatcaatacttaaaactgtcttgatgtagattctgatgggatattcagctatttctcctcagarttgtatatgtggtaatagtatctgaaaaacttggattcttttaaatgtaaggaaaatgattaataattaaacagcaaaattacattataggtaaaccatgtgtaggtttataaatagattttaagtaattaaggcatatataggagtacacaaaaaatgttttgcttattctctatttctgccacattaaaaatcttgtgtcatgcgagaatgaatgtcaggcctgaatgaggttgtcattagtaccatcctttctttgatttcaggcttgtgtagtggactggtctgaaaaagtgctttgcctccagggatttcctccacacttgttaaattgaatccctggcagtcaaaatgttctgtccttactgcagatgctgttattctgttgcctttactttagaatcttctgtttccatctctttgcattttcataataatatagacgagttgaggattctgaattttgtttaggcggaaaa

SEQ ID NO: 89549 - DNA, 629 bp, Homo sapiens
aacagagccatttgtcacatgtagtgacaggcactaagggcagggcttgagaggagaaaagagagtgagagagagaatcagaattgcatctttttttcttaattttactctgatacccactccacatggaattatcctaacgggcacataggaggagagactagcatttactgcacagctagcacattacgggaaacttttatttaaagtgggatcctcagaccaacaacattgacaccgcctggcgctatctcggctcactgcaacttctgcctcccgcatgcaagtgcctgcaccagcctctgtcgccaggccgcagtgcagtggtgcgatcttcactacaacctccgccttccgggctcaagcgattctcctggcccagsctcgctagtagctgggactacaggcgcgcgccaccacgcccagctaatttttgtatttttagtagagacaggtttcaccatgttggtcaggatggtctcaatctcttgacctcgtgatccgcccgccttggcctcccaaagtgctgggattacaggcgcgagccaccgcgcccagctaggaacttcttaaagatgcagaatctaagttcccatcctagatttactgaatcggaatctggcttttaa

SEQ ID NO: 89550 - DNA, 1330 bp, Homo sapiens
tgtccggggttggggaggcatgctgtcagcacatgtgagggccttcgcaaagggaatttcacctctgcaagaggcctgacaggccacgtctccctgggaaccaacctcctggggtacgaggtgaggagctgcagatgtgcggtggttagcccctgccctttgcgtgtcatccctatcaagtgtgagaaaggacaggcaggctgcagctaactagtgttcctgaggaaaggggtcagagaaacaatgcagatgctcaagacctaaggctacgtgggagctgcacatagatggatatacttgcaagtgtggggacaatggctgtgcaccccaccatgcctgggtgagggcgtgcagtggcccagattycttggggagtgggacctgtgggcccccataggaaggctggaaaagtcaggccctgctgtctgcacagactctagcctgggaggacacagagtgagggaacatgatggggcctaggggctcctccagcacgtgcctgccctgccctgggcttgcaattgtgattggctggaatccatggaggtggagacaggagccccaggtcaagttgttgctggctgtggcaaaaccaggctccctgcatcctgggggctgtggcctccggagaaggtgcctcccccagggaccaagaccatcctcatgcttgtgcctttccgcctgctgacccagccgaaggggcagctccttggccagctaccctgaagcccacatcccaggtctggggcatccctgagagccacatccaaggccacatccttccctttgctcatccatgctccagagtgtcaacctcagccctgtcccccatccaccactgtgggtggttttggcaggtgattgtgccagcgtcccacagaactgcaactaccagctgcaccttgggtccccaggcagaaagaaggcaggccctggtttccaagtcagtgacttgttccactggcctagaagccaagggtagggaccaagatgtccagtgtcctgttgtctgtacccccaaagtcagcagccctggaggcaggaactccagggacctgggcctctcactcctgcctggggtctgaccccagaagtccccttccacaggccccagttaccctcccactgcaggctctgacctacaggaaaacagctggagctgggctcctaccctgttcctctgggagagccaaaccctgtcctgaagctagaggaaaatccacgggcagaatcctgcagacgcacaccccagatagaccccacctggggccccacgccctaatcagaccccgcctggacccctcgccccacctagagagccgcagctcgt

SEQ ID NO: 89551 - DNA, 701 bp, Homo sapiens
aaccagtctggcctccggaccggactcccagtgttcagggtccccaatatgtctaccccctggagatctggcctccctctccctagtcaccctccctcctgtctgtccctcatttgagtgcataacctcgcgccagaccccacgtgcatccccaggccaccactcaagcctgcacccctgcagtctgtccttgcacagtcggctcccttgttcacttctttattcattcactacacgcaggtatcctgccccaggtgtccctgcacaccccctccaccattttgtagatcccagcacttccaggaagtgctgatgcagcctgggttggtgttcctgctgtaggtagctgggtagtctttttccatgtctccttccycatcctctctcttcctttgagtcccggcaactggatgaccatccggggtccctggggtatggtctgcactgccactgcccagggccaagtggtggtgaccaaggtcagctgtctgtgacctggactgtgggtgagaggcctctggacaggagaaggtgggttgaaccaggccagggaggtgaccgtaggggctggactcgtggttttcaaaccatgcacctcagagcacccaggaacgccagcagaggggcctgggggtgcccatgggtgaggccgggagaccaactgtctgcttcgcccaggactgcaggggcttccttttttg

SEQ ID NO: 89552 - DNA, 552 bp, Homo sapiens
taaagaactgaagtaattagccagacatggtggtgtkcacctgtagtcccagctacaggttgaggtgggaggatcacttgaacccaggagttttagaggctgcagtgagctatgatcacaccactgcactccagccccagggccacagtgagaccctgtctcaaaaaaaaaaaaaaaaaaaggaactgaagtgaagtcagaatatcttcttttcaggccttagagaaagatcgttatgagcatagtcccaaatctggatttctctgaagccaggtcctcccttggcttaccattctgtcttccactgataacttgaggcacgtagccattaactggactgcccagctgttcctggcctagggaggagccagaacccccaaccaatagtaatgaggatggtgatgcgagccttgggtcctccctaacttggctactgtgttacagaagcaatatccaaggcagtgtcatctgcaacaatgctgtgatcgagaagggtgcagacatcaaggactgcttgattggaagtggccagaggattgaagccaaaggtaa

SEQ ID NO: 89553 - DNA, 552 bp, Homo sapiens
taaagaactgaagtaattagccagacatggtggtgttcacctgtagtcccagctacaggttgaggtgggaggatcacttgaacccaggagttttagaggctgcagtgagctatgatcacaccactgcactccagccccagggccacagtgagaccctgtctcaaaaaaaaaaaaaaaaaaaggaactgaagtgaagtcagaatatcttcttttcaggccttagagaaagatcgttatgagcatagtcccaaatctggatttctctgaagccaggtcctcccttggcttaccattctgtcttccactgataacttgaggcaygtagccattaactggactgcccagctgttcctggcctagggaggagccagaacccccaaccaatagtaatgaggatggtgatgcgagccttgggtcctccctaacttggctactgtgttacagaagcaatatccaaggcagtgtcatctgcaacaatgctgtgatcgagaagggtgcagacatcaaggactgcttgattggaagtggccagaggattgaagccaaaggtaa

SEQ ID NO: 89554 - DNA, 690 bp, Homo sapiens
cccctcaacaaaattttcaggaggaggaggatatccctgttattttccagaataatcagtgatactctgtgatattgataatctaccttgttggcccttaccaarttactgggtgtgagtaacagctgactgtagctccctttctctaccctagtgctctggaaggaggaaaggagagctggcttgtatcttactttctcaagttatcagtccacaaacatgaagagtattagtgttacagatacaaagatgataactactgtcttatgagcctttattctgctaagtgtatccattatctcttttaatcttcacacaacccaccatcaatgaggtatatagtattcttatgttacacagcaggaacatctcagagattctgaaactggcccgtggttatacagatgggaagtggtagaggtcagattcagacacagtcctgtttgagtctgaccataaccttaatcctgtttgggccaattaagacagtcgtaaaagatctcagtatagagctataaagaagttaaatcacaaaagtgataaagtaagtttttttttgtttgtttgtttttttgagacagtctcactgtgttactcaggctggagagcagtagctcagtcatagcccactgcagccttgaactcctgggctcaagcgatcctcctgccttagcctcccaagtagccagg

SEQ ID NO: 89555 - DNA, 690 bp, Homo sapiens
cccctcaacaaaattttcaggaggaggaggatatccctgttattttccagaataatcagtgatactctgtgatattgataatctaccttgttggcccttaccaaattactgggtgtgagtaacagctgactgtagctccctttctctaccctagtgctctggaaggaggaaaggagagctggcttgtatcttactttctcaagttatsagtccacaaacatgaagagtattagtgttacagatacaaagatgataactactgtcttatgagcctttattctgctaagtgtatccattatctcttttaatcttcacacaacccaccatcaatgaggtatatagtattcttatgttacacagcaggaacatctcagagattctgaaactggcccgtggttatacagatgggaagtggtagaggtcagattcagacacagtcctgtttgagtctgaccataaccttaatcctgtttgggccaattaagacagtcgtaaaagatctcagtatagagctataaagaagttaaatcacaaaagtgataaagtaagtttttttttgtttgtttgtttttttgagacagtctcactgtgttactcaggctggagagcagtagctcagtcatagcccactgcagccttgaactcctgggctcaagcgatcctcctgccttagcctcccaagtagccagg

SEQ ID NO: 89556 - DNA, 690 bp, Homo sapiens
cccctcaacaaaattttcaggaggaggaggatatccctgttattttccagaataatcagtgatactctgtgatattgataatctaccttgttggcccttaccaaattactgggtgtgagtaacagctgactgtagctccctttctctaccctagtgctctggaaggaggaaaggagagctggcttgtatcttactttctcaagttatcagtccacaaacatgaagagtattagtgttacagatacaaagatgataactactgtcttatgagcctttattctgctaagtgtatccattatctcttttaatcttcacayaacccaccatcaatgaggtatatagtattcttatgttacacagcaggaacatctcagagattctgaaactggcccgtggttatacagatgggaagtggtagaggtcagattcagacacagtcctgtttgagtctgaccataaccttaatcctgtttgggccaattaagacagtcgtaaaagatctcagtatagagctataaagaagttaaatcacaaaagtgataaagtaagtttttttttgtttgtttgtttttttgagacagtctcactgtgttactcaggctggagagcagtagctcagtcatagcccactgcagccttgaactcctgggctcaagcgatcctcctgccttagcctcccaagtagccagg

SEQ ID NO: 89557 - DNA, 1087 bp, Homo sapiens
ccgggcctgggcattctcgggacagccagagtgggccaggggaccacgtcccatccccagaggccggccctccgtcggagggtttccagccctccagtaaaggagcgggggctgggaggggagggggtctgtaactggcatgagccggcgtcgtcgccgtgcctgtgccacgcgtgtcgccggctggagagctccgcctggatggtttcactccgcggaggcgccgccccgccactcagttagaaacctcagagccatattcaactctcgtctcctctgcagcaccactgccacagccctgcttttctcctcacgtccaccctcctcgcccccacccccgtctcctggccggtttccttttctgcagtttgccgcctccaagccgccctgcgcttcctgcccgtgtctgacaaagactctgctcccttactgaacaccacagtgcccgccacgggctgccactcaaggtcacatccgcacgaccaccccctgcagcctacctgccagtgtcatctctggtcacccctccctcccaggatccatctcctcatcgtgcttccgcacctgcggttcattccctgggccaagaatgtccctcctaattctttgttcatccttagagaccctgataaatgtcaccacaggagtggaaccttcccctgccccaccccagacttagtctctccacaacagcttgcacatccccttgtccaacattacacttgtccctacacacagctgcctcctctaccagactctgagctgctggagtgtgcggcctggctcttgttctcctcatcccccaccccacacacaaggcccggcacagagcagccattggcaataaataaaccgcattttaaaaaatgagtaagtggaagaccataagaactgggtagttgctgggtatgcggaaggggctggactgttgagcgttcatctgaggcttcttggaggccacactgggcagggttagatggaaggtcaatagatttggtgcagcgagaggacctcagggaagcaccasagtgacctgtgatgttaatttaacaaacacagaacaacttctattgtcaggcctcatact

SEQ ID NO: 89558 - DNA, 697 bp, Homo sapiens
tcagctcttgtccagaccagatgggcctggggctgaacagaggggctggatggaggcagagctggaggtgagattaatcctcacatctgaaatgggtgaggattaaatgagaaaacagatctgggaacaccttgaaacttgtttatttcactcaagtgcaggatctatttgtggctggtacatttgccccaaccagcggggcttctcagttttggggaggaatggggctctttctccaagagactcagtttctcaagcagattgagtgtaaggtgtacaaatgtggtcttagagtaaaaacagagacaagacagactgtgaagatgggcagggccagccaattccctgttgtgggagagactgggagagactgggagcactgkggggcctgggctggacggtcccacacacacagggaggctgctgctgcctcgcaggcctggccattgagctcgttcactgccatatcccacacacctcctcctgctgaaatctatgcctgcagcgaagaaacagcagatttagaatcaaacagatgggatttggttctacttaccatgtgactttgagcaagtatcttcctctcttttaactgtagtttcctcattcataaaataggggagaattctagcaccatctcctgaggttgtcaggatctgagaaacagacatggggatgggaacatggcgaaaagatc

SEQ ID NO: 89559 - DNA, 844 bp, Homo sapiens
tatagcagaatcctgtaaatttacacacaagcatcctccccttttaaaactggagcttactaccaggagcaatgaagcaaatggtgtgattatactcaagtaatcaagcagaataagataaacagaaatccttgtgcgaggaaaactaattgcactttggtacagaagtacagatgtaaagagggatcttaatacttgtcaaaactacagccggtttgtgtgtgattttctcttgtatttacagtaagcaaatatggctatcaccttgcatgctgcccacggcaccactgagtgatctttattttattaaatgcaccactaagcagccggcaaaacaaggcttatgggttactgataaccagtgaagcactcatgaaaaatatttcattttgtaccttattaatgacttgaacaaaccattgaagaaaactacatttcaaagtacactctaggaccaaacattaacccctatgccatcccaagacactcatttctatggcatgttagacctttatgtagctgctataagctttgcaacagtgctaggtaaaccatgagctttggcctcttgtcagtagaaacacttgctaattttttctgacaagggcactggatagcttttgtgcagcctaatgtagtttctgactaaactaggggtcatttcccacagatgaagacatggaaggttcttcacyacatctttctgcctgactcagcttatatttaaaaatcgccatcccgaggacactgatccaaaacatggggaggaaaggcaaattacagatttgaacaaagagacaaatcttacttacagaactgcttctctagtacaaggttttgtatg

SEQ ID NO: 89560 - DNA, 2079 bp, Homo sapiens
caaagagacaccaggggctcctgcatgcagaggaaaggccatgtgaggatgtggggagaaggcttccatctgcaagtctaggagagaggcctcaggagaaaccaaccctgcagacaccttgatcttggacttccagcctccagaactgtgagaaaataaatctctgttgttgaagccactcaggctgtggtactttgcaatggcagcctaagcagacaatatagcatccttatctagatgtttgctaaaactttcttctgatttaatcactgggcttttgttcttgttttaattattctgctttagaactatatgaacaaacatagtaataattatatcaatgtaaaaatgaaaataaatcacaaatgtcttttcttacatgttaactatgttcatttccccatgttcccaatgcattatgagattgggatgctgtttaacaggatgcagtatgtactctgaattagtgaccaacaaattgttttttctcccaaagccaggacacgactagtctggaaaccaagaggaggatgtggcaaaactcaaaattaaaattaatgatttactctcaaaagcatgtgctcagtctccctaaatctctgagcyctgcagatctgttttaggatccagtggagaaagggtactaccagggatcataaaagcaatgacactgaattggaagttaagactgccacgtggcaatcaacccaaatgcccatcaatcaacaagtggattaagaaactgtgatacacacacacacacacacacacacacacacacacacacatatgatggcatacttctcagccataaacaggaatgaattaatggcatttgcagtgacctggatgagattggagactatcattttaagtgaagtaactcaggaatggaaaaccaaacatcgtatgttctcactcataagtgggagctaagttatgaggctgcaaaggcttaagaatgacacagtggactttgggaactcagggggaaagggtgggaaaggggtgagggataaaagactacaaacagggtgcaatgtgtactgctcgggtgatggatgcaccaaaaactcacaaatcactactatagaacttactcatgtaaccaaacaccacctgttcaaccagtaacgtgtggggaaaaaaaagactgccacatctgccacgtggcaatttccgcctcctctttaggatcacactcttgaatggggaatttgaccctgaatattaaaagaaaatcgggttggcactctatcttggaagctggagaaagcttaagagaaatcctggtacacctccatgtgggatcatgcttaggggtaaaggttagtggaagaccaagcatcaagtagccatgccatgtagaccaggggcatgctttgcccatataacacctttatgtgaatgggagcaaggtgcctgctttgggtggctaaattctggaggctatatgcattggcaagctggattttgcctccattcgcactcacatctgggcgcccttgtgcaggttccatcacttggagttccaagtggcagccctgacatggactttacggactttacttcatgaatgaaagtttaggttaccccactagacaaagagtcccagtgagctaaggtgctggcggaaggcaactgtttcatggaatgggagaggactcagaaacaccagctacgctgttataaccagctaaagaaacgaagactataacttttcatgatttaaattatttttcttgatctttctttctcctttcccttactattgtatattcaatgtgttgcctgtggtttggtttatacttgagtccacagaagtgagtggagacttgagacaaactaaaagtaaagtaaatcagctgaggtgctggagctcagtagtcccatgacatcacttctagaagcagtagttgggtgtgatgctggctctgccaatgatgaagtgagtttgtatgtaggacagttacttggattagactgggatatttttggaactctgtgtgtctctctgtttatggacagtgtaggggtggactgaaatgaccttatccacccagtacctcctcctagcct

SEQ ID NO: 89561 - DNA, 1890 bp, Homo sapiens
tttgagactagtccaagaaacaagagtgattggcagaaatgttatttggcagaaagyactagatcttctacaatcaatttataaatcacaaatttgtctgtttcaaggtaccagggcatttcttataaatataaaaagctattccttcatgtttaaaagtctgctgttaaacacaaatttaagagactccatggggttaagcattctgttttctagtcatcattcagctttctccatgcctctgagcattgctgcatctcatatttgcatttctagtccttatttaatatccatattttttctgttctacatactagatatcccagtctatgtaagcatgaataatattgagtagggttagaaacttgaattttttttaagtcaacagaaaattatttttctaatgaaatttaaaagcctaaacttattttattaaaaataataatatataagccaggcgcagtggctcacacctataatcccagcactttgggaggctgaggcaggtgggtcacctgaggtcaggagttcgagaccagcccagccaacatggcaaaaccctgtctttactaaaaatacaaaaattagccaggcatggtggtgcatgcctgtaagtccctgctactcaggaggctgaggcaggagactcacttgaacctaggagacggaagttgcagtgagctgagatggtgccactgcactccagcctgggtgacagagcgagattccatctcaaaaaatgaaaaaaaaaatatatatatatatatatataaaatattcactatgggctccactaattatacatacatatgaatgtgaatccttttgggaactagatctatagtaattagttggaaataagagaacaactaatctttgtttagaatacaatattatgaaagattgctataaaattatgcatctctaaataagaagcaaacactaacagtttcttacataaagttatgttagttttgctaaatttacccaggttgtataattgataagtaatagaaaaaaataaaaaataaaattaaaataaaaaaatttcatctggcaataattcagatatttaccagacagtcatgggcaccaggctgctgctatacaattacttcctttggttgatggttctgccgttcattcatcaaatatttattgcatgtctgctgtgggaccagtcactgtattaggctatagggataaaattaatcagtcaaaacagacaaggtctcttctttcatgaagttacagtctaatgattcagacaacttaattattttcaagatagaagcataattttaggaaaataaaagttacaataattgaaataaaagttaacaagatggtccttacattctgtggtttcaatatataccagtttcagttaacacagcagtgagcaaaagcaaggattgcctatagtatcatattattactggctgtttcagtctggtagcagacactttaggtggaagacattgtttataccaactatctatccctatttgatttttaatgcttttctgtttatatgctatttgaagatatccgtgatacttttggttgtttctgctgataacaaaagtgctacccagtttctcagagttttgccaagactaggcaatttaaccaatgaaatacttgaaataatttccttgtgatttcctcttttctcccctacttaagaaagagactacatacctaaaaaagtcaacctccagaaattcatggcctgtccatgtttcttttattaatagagattcagcacatatgcactaattaataattaatcttttaggcccttacatgtttttcttattcgatttaccatttattacttgtactttaattgtgtcaacaaatgtcttttaccttactcaatcatgc

SEQ ID NO: 89562 - DNA, 746 bp, Homo sapiens
gatccactttatcaaagccacagatatatggcaaagttgaaaagataatgtgaaagttcctttagcacacagacgtcccaggccctggtttcaatcacaccagtaggacggaattttaggcagttgatcataaaagtttgtccaaacttaggaaatgtacaattaactagaaagaaggatcyactatgattgactataaaatgtgccacctgaaagaaaaaaaaatgaattgagcataggaagcctgtcaggcatcatatttataaatggtgctaatcctattcacaaacttagagtgcagggcagtagatttctaccttatggtgaattcactctgttgatgggcacaccggaaatctactatgatttcatactctgtttataaaccggaaaatgtctgtccatttaaaaatcccagtgctgtgtttgcaaataatttctcttacattgttccacttgtagtctccaggtaatattatgaagtgaaacttataataatatgagtccgtattcattgagaatcaaatgtgctagctactatatgcctggcactgtactgagtgatatcacattaaatccttacaagagtccagatttatctgaatttcacagacgagatactgaggtgcaaaggtgacataacctggctgaagtcgcacagctgatagatacgttagagtaccaagatttgaacccaggagatcaaacccctgagcccagctgcctcctgatgtcctttattgact

SEQ ID NO: 89563 - DNA, 717 bp, Homo sapiens
gggttgatgggtgcagcaaaccaccatggcacatgtacacctgtgtaacaaacctgcatgttctgcacatgtatcccagaacttaaagtaaaattaaataaataaataaataaataaataaaataacaaaaaccaaaaacttctaatggattacaataacatamaaattatgtaatgaatttttatcctaaaagtatagctatctctaaaagtgaaggttgacactaaatctactttaaattttaaaatgtgattaatttagaagctatgaaaattaaatgttaagagagagttttaggcaaatatgaaatctataaatacatttttcaaattttttgaatatgtttagatattatgtgtattagttagagcagatttaaggtatttaaacacagtagaaactgatttcctgcttatctgaccagaaatgggcaggtaagcagggtgcccatcatgcacacaatcatacaggaccattcaagatgctattggctttgcaacttcacctggtatatttgaaggtcttgctgggtgctgtttctattacagtcagctgaaagagaaaaaaagcatgaagaagcacagatgggaattaattatgtaccaatcattagagtcctacacatcacttccacccacattctattggttagaatgttgttaaatatccattcttaaccataatcaagtctgagaaagtaaacataggttttatcc

SEQ ID NO: 89564 - DNA, 629 bp, Homo sapiens
tataaaggacagtaaaataaactcccaaatctatgggaatcaaattaaaataagaaaaacagacaaataaaaaaattgcaatgcactgtgatagaagttataatgtatgtatacagggggtgtttcataggaaagtgttttgccatcctgcagcagggtgtrtgtgtgtctgtgtatttgtgtgtgtgagtttcaataatgagccagtcttcccacatataagatattgcatagttttatataaagcatttctggaacttttatttatttttgatgactaaataattgaatattcccccaaagacctagaagacaaaacataaccagggaacacatgttcccatacctgtttagtcacgaggtttcttttattgtctatttaagttcaagttaatagactgagaatcattaagctttttagaattattaaatgtagtggaacaaaaatttatgatgtatatattatgtgattacttatctaaaaataaaaatatatacttttattaccaaatactacttatttttagaaacagaattttcctacagtcatcattttaagaaaagcacattgtttcaagtactctttttatcttaatattaacacaatatgggataaattctaggagaat

SEQ ID NO: 89565 - DNA, 744 bp, Homo sapiens
aagaagttagtggtttaaatccccttctccattgactccaagctgtttataactccgaactgaaaataaggtacaattttacatggctagagttagatgttcagattgcttttgtcaattctagtactggggcctctgaggctttccagggagttttgaaacaaggagctaggaaaccagaattctgggtgggaagggaaataaagcctgaaatagtggggtggagacatcatggacacctacgtatcccattgttgtatgccttcaacatcagctagactaatggttgacaacattgcaaacaaatatttaatagctgccaagatggtagatgtgcagagaggttagactggagcagagatatgtgtcacatmgtcatttttctagctcttcctgtaaaaaaaagaaaaaaaggaaatgtttttgcatgtgtgatgattagggaagagcaggtaaatcttataataagagacaccattaatcactgtcttaaagttttgtttaattctaattagctgtttttgatgtatgcaggaaccaaacactatttatttgtttgtccgttaatagatatttcagttaggatgatgtttaggtgtgtgtgactgaaaatccaagtaaatggtttaagaaaagtagagatttactttattttattttattatcttgtttttgtcttatttatgtccaaaaagtcctgggataagcaacttagaattgttgtatcaatttcatggtctttag

SEQ ID NO: 89566 - DNA, 1149 bp, Homo sapiens
atggtcttagaattagcctcagatgggaaagggatctgaaggactatttaatctaataggtttctgttaaatggattccccagatgatatttttcagggcgcataaaagctaacagtggctagcttacctgattttggctctaaatgttagttcttccttacatttaaccaaaatccatctcctcataacttctgttcatygattcttgctctgccttccagtgctgtagcacaatgaatgtaattgctctttgctgtggcaatttttcaaatatctgaaggcagccagttcaatcctacaaagtattctccttttaaagattaataacccacaaccccacttcctttcttatctcccatccaactagttttaagtaccttcaatattttaatggatttctcctaaataaaatctaattaaaacaaaattaagccaaacaaaaattttaaatgtagcacctataactcaagataatactccagtttgtacagaacttaagtcaactaaaatcctatgtttgtttatatgtagcctcaccacaccctcccttaataagcctatatctgtgaaattcataatggaagctaggtgcaaggtttcatatctctatctatctatctatctatcatctatcttcttatttcctcctgtaaattatgccccaggtaccaactgtttaacccaatctcttcttgctactggatgatcataaaccttctttcacaatgccaaagtccttgaataaatgttgaccagtgcaaagactatgaaggacacttacataaaatctccagaatccttcatccagcctggcactgattcatcagtaagcactttgggtacattttatcacctgctatgaaacaatctaactgtgcagccgttctccccatttatctcaatctcattctcaaggatgttatgctagatttgatattcaccatgtctacaacacttctatgactgacaatcccttgaccaatatgaaaaaacattagaatgacaggttttggttttgtttcattcatgctatacaaactgcaactctattaactgtgacagaaactatgcaactttgaatattagaatctttatttttaaaattattaatacttttaaatttttgttggaacctttgggtatatgca

SEQ ID NO: 89567 - DNA, 1149 bp, Homo sapiens
atggtcttagaattagcctcagatgggaaagggatctgaaggactatttaatctaataggtttctgttaaatggattccccagatgatatttttcagggcgcataaaagctaacagtggctagcttacctgattttggctctaaatgttagttcttccttacatttaaccaaaatccatctcctcataacttctgttcatcgattcttgctctgccttccagtgctgtagcacaatgaatgtaattgctctttgctgtggcaatttttcaaatatctgaaggcagccagttcaatcctacaaagtattctccttttaaagattaataacccacaaccccacttcctttcttatctcccatccaactagttttaagtaccttcaatattttaatggatttctcctaaataaaatctaattaaaacaaaattaagccaaacaaaaattttaaatgtagcacctataactcaagataatactccagtttrtacagaacttaagtcaactaaaatcctatgtttgtttatatgtagcctcaccacaccctcccttaataagcctatatctgtgaaattcataatggaagctaggtgcaaggtttcatatctctatctatctatctatctatcatctatcttcttatttcctcctgtaaattatgccccaggtaccaactgtttaacccaatctcttcttgctactggatgatcataaaccttctttcacaatgccaaagtccttgaataaatgttgaccagtgcaaagactatgaaggacacttacataaaatctccagaatccttcatccagcctggcactgattcatcagtaagcactttgggtacattttatcacctgctatgaaacaatctaactgtgcagccgttctccccatttatctcaatctcattctcaaggatgttatgctagatttgatattcaccatgtctacaacacttctatgactgacaatcccttgaccaatatgaaaaaacattagaatgacaggttttggttttgtttcattcatgctatacaaactgcaactctattaactgtgacagaaactatgcaactttgaatattagaatctttatttttaaaattattaatacttttaaatttttgttggaacctttgggtatatgca

SEQ ID NO: 89568 - DNA, 1149 bp, Homo sapiens
atggtcttagaattagcctcagatgggaaagggatctgaaggactatttaatctaataggtttctgttaaatggattccccagatgatatttttcagggcgcataaaagctaacagtggctagcttacctgattttggctctaaatgttagttcttccttacatttaaccaaaatccatctcctcataacttctgttcatcgattcttgctctgccttccagtgctgtagcacaatgaatgtaattgctctttgctgtggcaatttttcaaatatctgaaggcagccagttcaatcctacaaagtattctccttttaaagattaataacccacaaccccacttcctttcttatctcccatccaactagttttaagtaccttcaatattttaatggatttctcctaaataaaatctaattaaaacaaaattaagccaaacaaaaattttaaatgtagcacctataactcaagataatactccagtttgtacagaacttaagtcaactaaaatcctatgtttgtttatatgtagcctcaccacaccctcccttaataagcctatatctgtgaaattcataatggaagctaggtgcaaggtttcatatctctatctatctatctatctatcatctatcttcttatttcctcctgtaaattatgccccaggtaccaactgtttaacccaatctcttcttgctactggatratcataaaccttctttcacaatgccaaagtccttgaataaatgttgaccagtgcaaagactatgaaggacacttacataaaatctccagaatccttcatccagcctggcactgattcatcagtaagcactttgggtacattttatcacctgctatgaaacaatctaactgtgcagccgttctccccatttatctcaatctcattctcaaggatgttatgctagatttgatattcaccatgtctacaacacttctatgactgacaatcccttgaccaatatgaaaaaacattagaatgacaggttttggttttgtttcattcatgctatacaaactgcaactctattaactgtgacagaaactatgcaactttgaatattagaatctttatttttaaaattattaatacttttaaatttttgttggaacctttgggtatatgca

SEQ ID NO: 89569 - DNA, 2275 bp, Homo sapiens
ggcccaaataaaataaagtctgacctttattttaggtcaaactaaaataaagttttagtttattttaacaccagactctgacctacaccacaccagactctgacctacagaactgtaacacatttatgttgttttaaatagctaaatttgtggtgatttgttataacagcaacagaaaactaatacactttcccttgtgtttcttgttcattatcatgtcatgtcccctctggcctctaagagctgatagctccctctttcaaccccagacctagtatcaatatatctatgcactgatacccagtaacaaagctatgacatggctagarcactgaaacaagacttgaccaaaatttgggggatgacagtagcattaccttagcagaacactgtaatttacaaactgatttctacctcatcaatttattgtgttaattaaatgacataacagatgttaagtgccacacagcctagcctagagaaagcagtcaacaaatattagctgttattattgtggtgattgttgttttttgtaatcccctagtcaaacagggagtctttggctatgagtgtgtgaggaagctgtagcaactgattgaccatattaagataaacaagagacagggctgatttgggatgaagatggtacaaatagtgtaatgggaaagtgctgcaacacaacccatagcaatagtgagtgacaacagccttcatgcaggcaaaaagaccaaagggtaacagtgcacaaaataaaaagcatgagtcaaccatttgttcacagatcttttcagtaagatgtatttgcatgtaatgggatatcaaagaatcataagaaagaaagacctaaggaagaagatgcaaaggaaaatgctttgttaacaataacaacaataataatagctaacacttatcgaacattcattctgtgccagattgtgtgctaagctctttcaaaataaaaataacatgagctcatttgagtcaagattattaaaatcaaggaaacatttcaatggataacattcctccatgcccacagctcttgttgtcaaagtgttattttaaccctcttttaggctaagcctgagtgtgcagaaccagaggctactcatgtctactaagaacaaatttagactagagtttatcccacgtatcatttttaccagttgttaagtggagttggaaatccataatcctaacaatgttgcttagaaactacaaatcagcaaagaacaacactctaaaaggacattaggaccacaacaatttgacaagttctgcaaagacatagtccagtgcactctgaataaatgcattagggctaaagggttctcaacaatctctctctaaatgcacttacccttagcttcttttaggtgaaggaatcgtcccaaaataatcatcttctaagtgaaattcacgatgtaaaacgtcatgaaaaacaagaatggcatataattataagaaagctaagaaagtctgagaacaaccaaaaggaatatgttgaattatgtttatgacagagaaacataaatgataagacaacttggaggcagagggtataatatatccattcattcattccataggtaacagaatagatactaagtgccaagcactacaggagattgttgtacttgagcgagttagagaaaacgcaacactttgagacaaattaagagtctttcattagctggtgactggaagacggctaacgcttaaaattttctcagcttcaaggaaagggcttgattaacttttatactttggtttaggaaggggatgggggggtggatctagttaaaacaattttacagaagtaaagtagtcaaaaagttaaaaggataaatggttacaggaaagtaaacagttccaggtgcaggggctttaagactattacaaggtgatagacctggggctttgggcgttatcaatcagacgaattcttgggaactgtggatatagcttgccacagtatcttatcagttaattgcattcttggatgtgctgggagtcagcttgcacaagttaagtccttgaggaaggggctgccagtgaaagagccaagatggagtctgtctggctcttttagctaagggagagtcaattcaggtggagacaaggctaggtgattaaaggaaaagggagagtctaaaaacagagttagtaaaaaccaggttgggcattacattcctcacttgtgtttttggggaatcaaaacgttgattccttagttataacaagggggttatatggagtcttaagatacataagt

SEQ ID NO: 89570 - DNA, 2275 bp, Homo sapiens
ggcccaaataaaataaagtctgacctttattttaggtcaaactaaaataaagttttagtttattttaacaccagactctgacctacaccacaccagactctgacctacagaactgtaacacatttatgttgttttaaatagctaaatttgtggtgatttgttataacagcaacagaaaactaatacactttcccttgtgtttcttgttcattatcatgtcatgtcccctctggcctctaagagctgatagctccctctttcaaccccagacctagtatcaatatatctatgcactgatacccagtaacaaagctatgacatggctagagcactgaaacaagacttgaccaaaatttgggggatgacagtagcattaccttagcagaacactgtaatttacaaactgatttctacctcatcaatttattgtgttaattaaatgacataacagatgttaagtgccacacagcytagcctagagaaagcagtcaacaaatattagctgttattattgtggtgattgttgttttttgtaatcccctagtcaaacagggagtctttggctatgagtgtgtgaggaagctgtagcaactgattgaccatattaagataaacaagagacagggctgatttgggatgaagatggtacaaatagtgtaatgggaaagtgctgcaacacaacccatagcaatagtgagtgacaacagccttcatgcaggcaaaaagaccaaagggtaacagtgcacaaaataaaaagcatgagtcaaccatttgttcacagatcttttcagtaagatgtatttgcatgtaatgggatatcaaagaatcataagaaagaaagacctaaggaagaagatgcaaaggaaaatgctttgttaacaataacaacaataataatagctaacacttatcgaacattcattctgtgccagattgtgtgctaagctctttcaaaataaaaataacatgagctcatttgagtcaagattattaaaatcaaggaaacatttcaatggataacattcctccatgcccacagctcttgttgtcaaagtgttattttaaccctcttttaggctaagcctgagtgtgcagaaccagaggctactcatgtctactaagaacaaatttagactagagtttatcccacgtatcatttttaccagttgttaagtggagttggaaatccataatcctaacaatgttgcttagaaactacaaatcagcaaagaacaacactctaaaaggacattaggaccacaacaatttgacaagttctgcaaagacatagtccagtgcactctgaataaatgcattagggctaaagggttctcaacaatctctctctaaatgcacttacccttagcttcttttaggtgaaggaatcgtcccaaaataatcatcttctaagtgaaattcacgatgtaaaacgtcatgaaaaacaagaatggcatataattataagaaagctaagaaagtctgagaacaaccaaaaggaatatgttgaattatgtttatgacagagaaacataaatgataagacaacttggaggcagagggtataatatatccattcattcattccataggtaacagaatagatactaagtgccaagcactacaggagattgttgtacttgagcgagttagagaaaacgcaacactttgagacaaattaagagtctttcattagctggtgactggaagacggctaacgcttaaaattttctcagcttcaaggaaagggcttgattaacttttatactttggtttaggaaggggatgggggggtggatctagttaaaacaattttacagaagtaaagtagtcaaaaagttaaaaggataaatggttacaggaaagtaaacagttccaggtgcaggggctttaagactattacaaggtgatagacctggggctttgggcgttatcaatcagacgaattcttgggaactgtggatatagcttgccacagtatcttatcagttaattgcattcttggatgtgctgggagtcagcttgcacaagttaagtccttgaggaaggggctgccagtgaaagagccaagatggagtctgtctggctcttttagctaagggagagtcaattcaggtggagacaaggctaggtgattaaaggaaaagggagagtctaaaaacagagttagtaaaaaccaggttgggcattacattcctcacttgtgtttttggggaatcaaaacgttgattccttagttataacaagggggttatatggagtcttaagatacataagt

SEQ ID NO: 89571 - DNA, 1175 bp, Homo sapiens
gcatgccactcaagcatttttttcctttagactctactttatctagtcattattattgtagcctaaatttgttactgtattttaagacctgtaaatcttgcttagcatttattagtcaaggtaggtagattaaattgtgaaagcaaactatcctgagatttcaatgtgtgaacatagcaaaggtatacttcttgcttatgtgatgtccactgattgtcaagaccacccccaccccacaaggcaactgtcctctgtacagcaacttgttattccaggtcaataggatgctgtaactattacctggactattggaaacaagtgggctcctattcaatcaagtgagggaagaaaaactggagaaatgtgtgtgggcttttcacagctaagcttgacgttgtacacayctccgtccattggctagaactagtcaaaagtctccaccacagcaaaagggcaagggtgtttagtctccttaagcttccgcaatcagatttgggcgagtactaggcgtgactgtaatgacatttataatctcaaagtaacattgtaactcaagctagaaaaatatctagttttcagcttttaattctgtgtcctcttattataatcccttgatgctacattgccacaaaagaagaaagaaaaagaactgcatttccttttgtttgtgataaacaggagggcacaatggctggtgttttcaggtcatgatttattggttcagccggaaccactgcaatgctacattcttctaggacactcagcaacacagcaggccttttaaagaatcccaactggctcccacgctgaatagaaaagaagggaaaagtatcatcccagctagctttggctgaaatgaaaatctgctcgaaccaaaaatagaactctcatggggattgtcttttaaaaagaacggcagggctcagtagttctatgtgacatatgttgaatcatttaaaattttttccctccacatagtttagtcagaaactaaatggctttgaggtaggaaaaaataatgaactttaactcaaaaagacatttcagaaatttcagaccagggcagccaaggtatttgtcagcccaggctattttcctttattccctcttgctcttggaatgtaagtttctaaaactctattgaatggcaatcctgtaatatcttactctattat

SEQ ID NO: 89572 - DNA, 555 bp, Homo sapiens
cattctctcaactgcactgtccctcacttcccatactattcctgtttgttgacagttttccttgaacctgctgtctaacttttcagcctcatttttttttcatgaaactttcctgccaataattccaccatgccctcccaggtttctcttttcaaaatgccttctgcattcagtaccatcccagatgatttaacactttatggttaccacatagaatgttattttatgatgttgtttttcttcacgatgctacaagtgaataactcttatagtcttaactaaaatgtaagcctttgtggtcaaggctgtttttatacttctttagtgctacacagaaaaggtcactgttgaatgaaagacgagccaagggttggctgcctgggctggcttagccctcaggactgaaaagtgagatgtgcttcatcatgaacttggttatttgggggaagatcttataaatgrcaggaagtggctgttctctttccagaactatcatgtggcagaaagtaacattaggcaagacatcctaggacctgaattgtgagactttaaaaa

SEQ ID NO: 89573 - DNA, 599 bp, Homo sapiens
  misc_feature (1)...(599): n = A,T,C or G
ttaattttnnnnnnnnnnnnnnnnnnnnnnnnnnnnnnnnnnnnnnnnnnnnnnnnnnnnnnnnnnnnnnnnnnnnnnnnnnnnnnnnnnnnnnnnnnnnnnnnnnnnttccgagacccatctctaaaagttcactctgggggaccataatattgagcaacttacactttttccaaaattaaaaatggtcctacaaagtgaaagcaaaagcttgttactatscagaagaaaagggtttcccttcaatcctgctgtgaagacacatggcaactccaggaagcatggcatcagtggggaaaagacagcagagtctcattaaacctgcaatactgaaagcatgtctttacttgcaggtctaaaaactagagaatcgggaaaagaatgctgctactaacttttaagcagtgatcattttaaactcttgcaactctctctaaaatagtcatcatgagcacttaacttttattttttcagaaaagctatgaggagtattatatacccataatatgagttactcttcctaaataacaatctactcatctgtaaaatgggatagtgactactgcccaccttgcaggatggggattaagccatacaat

SEQ ID NO: 89574 - DNA, 679 bp, Homo sapiens
atctctgttgacagaaataatgacttatgggccaatatcatgcgtttaacattcctgctgcttaatgatacctgagcaataaggagtgctgagaccaggacccctccaccccttaacacacaccacaagaggtgagcaccagggcatgctggcagacatcatgccaacatgtaccagtaatggaaggttgttgacagatgtctctgattctctgctacagcttgcaggccattctagaccactattaattatttttaggagttgtgttggtccctaatttttaattaaaaagatttggtccacattactctctaaaaataaatgtattgtctyttccctcccctctctccaacactctcaatcaaaaataggtttggcataccatggtacaaggcatggtctctgggcctttctgcaatcctgaggagttcagggggctagaagctaatcatcccactgcttctttgcactgctggtgttttctcagttcaggactcctggttgcctggcctacaagaacctccaaacggctctctctttagagaagtctctaaccattagtgaaaaggggagggactgacatcctgcaactacaaaattatttttttaaaaaaataagtttgttgccttgggatttccataattttgaatctttctataaatccagaccaatctagct

SEQ ID NO: 89575 - DNA, 1565 bp, Homo sapiens
tggcttcaccgctgtgaggctgggggcgcgggtaatttacttaacatctctgagcttctaagaactcatctgtaatgggaagatgacagcagttaccgcctcataggttatcgtgaggattgagatgatacttgtaaagcgtatagaacaggggcggcaaactttttctgtaaaagaccagattgtaaacattttgggctttgtgggccatatggtctctgtcggacgctgcaactcagctgttgtaacttgaaagcagccatagatagataatatgtaaatgatgggcgtggctgtgttccaataaaactttatttatagacactgaaatttgaatttcagatacttttcatgtgtcacaaaatagtcttcttctgattttttttttcaacatttaaaaatacaaaaaccattcttggctctcgggccatataaaaacaggcagtgagccggatttggcccgtgggccatagtttgctgactcctagtatagaataatgcctattatgtgtttattaaatgtcagtcactgatattaccttgatctttatcattattctttttatctcaggagggcgggttgaagacagtcagatatttggctcagaaagaggtgacttggtttgggggaaggagcatataaaccgttactaccaggaagggaagatgggatttgtcctgcactgtcccagaggtgtgtcctccaggcccgattggcagaattgacagggaggtagatttttggcttcgaggcccctagcagctagaggtactgaaagttgctatagactgccttgggcatagttgagtgcctgtcactgggggtgtcaagcagaggacagatactcctgacatgctgcagtggagggggcgtgctcaccggctggacaaatggacactgaggtgctggggtcaccaccgtttcttgcagcaccatcaaggctaatggaagagggggtgttttcctattcttccacggtccttttcttaattcgtgaagtatcttgtcctcttcctgccttctcaaataatccagtgacatgcacaggccacattctccccatttgaacaggagagacagagacagaaagcaggagaacagggaggtggtgggagacaggatgcagcgctaaccttcrctgtggaccttgtgcagtgcatgcgcttcgtgtatccccgtgaggctgagctctgctgggtgtagtcttccgtgttcacctagtgtttctaggggaaaagtcctgaatcaacacatgagaagtttgcataatgctcagattattccctaatgtatcgattgcattggaacaaatacgcattttaaaaattagtgttatggcagcatgaactgcactttggatcgggagttatgagcggtgggagggtcttttctagatagggacttccttgtaaggctcacctcaccccagaaggtgggctgttactcggcacttcagggcctgtgaaggtttctgggctttcggtgaggttgatcctctcctaaagtcggtttctcccccagaccccagcagcttgtcttttgggatctcaaggcaccatactgg

SEQ ID NO: 89576 - DNA, 3026 bp, Homo sapiens
tggtggcaatgtcaggtgatcctccagcagctcaggaaaaataaactcttcctatggccgtttcttttccctcggttctgaacgggaggaggacactgggatgcctgtttgtgttctatgactctagcctctagggtcattcctcaggccccattgccaaagaaaaatcatggctgtgttggtggtctcatctggcctcatattaccataggctggctggaagcacagctgggtacagagtctgattttgaacaaaactgtcacctcttttgtcccttggcaacatccctcagtgccacataaggtttgtttttgtgtacctgattcaccatctgtctcagggttagcaatccaagttctgaaatcatctgggcttcacaagcatgattagctgttgatctggcttctgttgactctaaaccccgggttgggggattacagatgtacctaagcagcctgtgcagtggggccagacgcctccgtgggtacagcatgtccaggatcgttgctgtctgttgctgggctcaccaccccagcaaggaggaggtcacgcaagggaacacagagcttgtagtcagaaaacaggggtgcttgtcaggtcacctctctgaacctcagatctctctcgtgtaaggggctggccccttcgagaggctcagtgtggaataaaatggctcttatcgcagtgggcttggcagcccgccactcctcatctttgctggtggaacctctagttggtttcggtgtccaccctcctccacgctgggagtgtgttcaggatgaggatcccatccccgtgcacggggtcaagtctgattggaggcgatcatttctggctgtcacattccttagaccagggctcagtctagagcgagcaagtattttaggcctggccagtgaggcaaagataatgcctgctggggccttctgaaaaaaatttccttaaaaagaggctcaaagaagagagatgtctcttttctttggctggacgttattaggactagatgtgatgcctgtgactacgtgaaccatcttgtgaatgtgacagcctggggacagagcttgcacactggggatgcaagatcagggagatattaatagaaaggacgtgggtcactgctaggagctgtggctcttgcgcactcgccatccctggcctcaccctgctgtagaacttcttgatacgtgaaataatacaaagtccttattgtttcaacaattcagaagtgctggcttctgtgacttgcagatcagttcaccctaaatgccctgctcctccaagtggccccagcatcatcagcatggggagcttgtgggaaatgcagactctgaggctctccccacccccccgcagcatcaccctctgttccttagtgagatccccaggcacttcgtgtgcatactgacgtctgagaagctccgccgatgggtttactttttgtccaacgtgttctgtggaggaggacttgggttttgacaatactgggttcaattttttctcgagacagagtaggaggtgttagctatgcagattttgaaatctcagctgtgtcaaggaattggggaaaagctcagggaggaaggtggagggcctagctggtctctaaaataaaattatgagagagttgtttattagtttctgctttacccaaccatttttcattgactcgtgtttgggtaccacatcgattttaatctaaagccgtgactacagtaaaatctcattaattcaggcctcaccaattttgaagtgataatttaaatggaggctgggctggctggcgtgagagcaggattgagagcaaactgttctgaaggacttgggcccaccaggtgggtgcaacgagatgcttccaattataaacgacccttggtgtgtttgagttcagcaggagccacacttggaaatcaatccatcaacaaagagttattgagtgtcccttatgcaaacgtccccggctggcagaacacacttggttagaagttacttttaatcattacccatgctggaagtatcagatttctttaggaaatgccatttcttaagcagcctgtgttcctatcctaggccaccttccccacgtgtgccagagcactttgctcttgaacagccccctctctctcccccgtgtcaattcctctttaccctccaaggtgtttataacttgctgtaggaactcttggattgtaaaataacatgaagtccctattgtttcagccattcagaagtgctggcttctgtgacttgcagattagtgcaccctaaatgccctgctcctccaagtggtcccagcagtgtcactgtggggagcttgtgggaaatgcagactctgaggctctgttccttaacaagatacccaggtactgggtgtgcacactgaagtttgtttctatccttttagaaagagctctctgatcttgattctatactctcctccagccacaccctattttcctgcttccctttgtctcctctaagagttgcctgctcccgtctccagctgtcctccattttcattcaaacacactgaaattcagcttccatggcgccccstttccatatgcatgcatggcctgaggccacgcactcatagtctctcctctccgcttgctgtccgcatcagccaccttgcacatgcttggtcactctccttttctggaaagactttcttgcttgtcctctaggacaaactcttgattctctgtgaagctcatgggtcactctggctccgtcgtctttgtggcttctcctcttctgagctctgggtgttgggctgcaggacccgttcctccctctctcctgggtaagtggtggagagtgtggctttgagcgcctgttggaatgccgatgggctccatgtttatatttctgcctgggttgctgccccacccaactggtcccctcactgccccactgcccctacctacctcatgacttctcgtctgaaggggttcatcccaggaggtttgcttcttgggtaaatttcaactccattcttccttgggccccgggcaaaactctcgga

SEQ ID NO: 89577 - DNA, 3026 bp, Homo sapiens
tggtggcaatgtcaggtgatcctccagcagctcaggaaaaataaactcttcctatggccgtttcttttccctcggttctgaacgggaggaggacactgggatgcctgtttgtgttctatgactctagcctctagggtcattcctcaggccccattgccaaagaaaaatcatggctgtgttggtggtctcatctggcctcatattaccataggctggctggaagcacagctgggtacagagtctgattttgaacaaaactgtcacctcttttgtcccttggcaacatccctcagtgccacataaggtttgtttttgtgtacctgattcaccatctgtctcagggttagcaatccaagttctgaaatcatctgggcttcacaagcatgattagctgttgatctggcttctgttgactctaaaccccgggttgggggattacagatgtacctaagcagcctgtgcagtggggccagacgcctccgtgggtacagcatgtccaggatcgttgctgtctgttgctgggctcaccaccccagcaaggaggaggtcacgcaagggaacacagagcttgtagtcagaaaacaggggtgcttgtcaggtcacctctctgaacctcagatctctctcgtgtaaggggctggccccttcgagaggctcagtgtggaataaaatggctcttatcgcagtgggcttggcagcccgccactcctcatctttgctggtggaacctctagttggtttcggtgtccaccctcctccacgctgggagtgtgttcaggatgaggatcccatccccgtgcacggggtcaagtctgattggaggcgatcatttctggctgtcacattccttagaccagggctcagtctagagcgagcaagtattttaggcctggccagtgaggcaaagataatgcctgctggggccttctgaaaaaaatttccttaaaaagaggctcaaagaagagagatgtctcttttctttggctggacgttattaggactagatgtgatgcctgtgactacgtgaaccatcttgtgaatgtgacagcctggggacagagcttgcacactggggatgcaagatcagggagatattaatagaaaggacgtgggtcactgctaggagctgtggctcttgcgcactcgccatccctggcctcaccctgctgtagaacttcttgatacgtgaaataatacaaagtccttattgtttcaacaattcagaagtgctggcttctgtgacttgcagatcagttcaccctaaatgccctgctcctccaagtggccccagcatcatcagcatggggagcttgtgggaaatgcagactctgaggctctccccacccccccgcagcatcaccctctgttccttagtgagatccccaggcacttcgtgtgcatactgacgtctgagaagctccgccgatgggtttactttttgtccaacgtgttctgtggaggaggacttgggttttgacaatactgggttcaattttttctcgagacagagtaggaggtgttagctatgcagattttgaaatctcagctgtgtcaaggaattggggaaaagctcagggaggaaggtggagggcctagctggtctctaaaataaaattatgagagagttgtttattagtttctgctttacccaaccatttttcattgactcgtgtttgggtaccacatcgattttaatctaaagccgtgactacagtaaaatctcattaattcaggcctcaccaattttgaagtgataatttaaatggaggctgggctggctggcgtgagagcaggattgagagcaaactgttctgaaggacttgggcccaccaggtgggtgcaacgagatgcttccaattataaacgacccttggtgtgtttgagttcagcaggagccacacttggaaatcaatccatcaacaaagagttattgagtgtcccttatgcaaacgtccccggctggcagaacacacttggttagaagttacttttaatcattacccatgctggaagtatcagatttctttaggaaatgccatttcttaagcagcctgtgttcctatcctaggccaccttccccacgtgtgccagagcactttgctcttgaacagccccctctctctcccccgtgtcaattcctctttaccctccaaggtgtttataacttgctgtaggaactcttggattgtaaaataacatgaagtccctattgtttcagccattcagaagtgctggcttctgtgacttgcagattagtgcaccctaaatgccctgctcctccaagtggtcccagcagtgtcactgtggggagcttgtgggaaatgcagactctgaggctctgttccttaacaagatacccaggtactgggtgtgcacactgaagtttgtttctatccttttagaaagagctctctgatcttgattctatactctcctccagccacaccctattttcctgcttccctttgtctcctctaagagttgcctgctcccgtctccagctgtcctccattttcattcaaacacactgaaattcagcttccatggcgccccgtttccatatgcatgcatggcctgaggccacgcactcatagtctctcctctccgcttgctgtccgcatcagccaccttgcacatgcttggtcactctccttttctggaaagactttcttgcttgtcctctaggacaaactcttgattctctgtgaagctcatgggtcactctggctccgtcgtctttgtggcttctcctcttctgagctctgggtgttgggctgcaggacccgttcctccctctctcctgggtaagtggtggagagtgyggctttgagcgcctgttggaatgccgatgggctccatgtttatatttctgcctgggttgctgccccacccaactggtcccctcactgccccactgcccctacctacctcatgacttctcgtctgaaggggttcatcccaggaggtttgcttcttgggtaaatttcaactccattcttccttgggccccgggcaaaactctcgga

SEQ ID NO: 89578 - DNA, 1204 bp, Homo sapiens
cactcaagtgttttatttatgcacggcagaacctcagtctaaaagcactaggctttccatatggcatagcctgagaatgtgttaaatatgtagttccagagccaagaatattatttttcaacttagcgaatgcattattaaaagacctctgctgtgcccaccactgggagatagggcaagaggcagcagtgaccctgcattctgaatgcacagagacactgacagtcactcactctaaataccaatgacaatatccccaaacccacaccaccctaacccatgccttgctctgaatttgggcagtctggaaaaaatgaaaatggaaamctttaaataaaactcataaaacttcagttccaagcacaatatttttggttctttggacaataagtgtttcactgagatttatgcctagggtccttttccatatcccggctctgtgtcagcgttcacatcagccctcagttcttcttgcaaatcaagggtataatatactgattccttcaaataatatttgtgttaaaatcattaaatgcccatgcaagtaattttttattaatgggatgagaaataatacataatacataccaattttatgacagcgagaggagttattaactttagaatatctgttgtataaattaaaaatcttaagaataagtccagtgttttaaatatactatggaaaaacaaaattaatgccaggagaattttgactggaatatagaaatgcctttatcattctgggaaaaatactaccctataaaagccacatcctctgataagttcagaaattatcctttttatataaatattattcacttggaaaaatgttttctataaacagctcccttagtgcattttaacacatacttttatttacagacattagatttacacatgtttccagtataaatctttcgtatatagcaaagagaatctgtgaccaaaaattctgttcaattcggatgtggggagcaaataaatgaccaatgttcccatatacatagtaatatatggctaattttatataacatgttcacattaaaaataagaacataaaaatttttaaatcttcaggaactgtcttcaggaaatttcagaagactatgacttttaaattacgcttttacttgatccaccttccaaaagctcagaatccttatattaaaagagctggcactgacataatttgatttaatcc

SEQ ID NO: 89579 - DNA, 1204 bp, Homo sapiens
cactcaagtgttttatttatgcacggcagaacctcagtctaaaagcactaggctttccatatggcatagcctgagaatgtgttaaatatgtagttccagagccaagaatattatttttcaacttagcgaatgcattattaaaagacctctgctgtgcccaccactgggagatagggcaagaggcagcagtgaccctgcattctgaatgcacagagacactgacagtcactcactctaaataccaatgacaatatccccaaacccacaccaccctaacccatgccttgctctgaatttgggcagtctggaaaaaatgaaaatggaaacctttaaataaaactcataaaacttcagttccaagcacaatatttttggttctttggacaataagtgtttcactgagatttatgcctagggtccttttccatatcccggctctgtgtcagcgttcacatcagccctcagttcttcttgmaaatcaagggtataatatactgattccttcaaataatatttgtgttaaaatcattaaatgcccatgcaagtaattttttattaatgggatgagaaataatacataatacataccaattttatgacagcgagaggagttattaactttagaatatctgttgtataaattaaaaatcttaagaataagtccagtgttttaaatatactatggaaaaacaaaattaatgccaggagaattttgactggaatatagaaatgcctttatcattctgggaaaaatactaccctataaaagccacatcctctgataagttcagaaattatcctttttatataaatattattcacttggaaaaatgttttctataaacagctcccttagtgcattttaacacatacttttatttacagacattagatttacacatgtttccagtataaatctttcgtatatagcaaagagaatctgtgaccaaaaattctgttcaattcggatgtggggagcaaataaatgaccaatgttcccatatacatagtaatatatggctaattttatataacatgttcacattaaaaataagaacataaaaatttttaaatcttcaggaactgtcttcaggaaatttcagaagactatgacttttaaattacgcttttacttgatccaccttccaaaagctcagaatccttatattaaaagagctggcactgacataatttgatttaatcc

SEQ ID NO: 89580 - DNA, 1204 bp, Homo sapiens
cactcaagtgttttatttatgcacggcagaacctcagtctaaaagcactaggctttccatatggcatagcctgagaatgtgttaaatatgtagttccagagccaagaatattatttttcaacttagcgaatgcattattaaaagacctctgctgtgcccaccactgggagatagggcaagaggcagcagtgaccctgcattctgaatgcacagagacactgacagtcactcactctaaataccaatgacaatatccccaaacccacaccaccctaacccatgccttgctctgaatttgggcagtctggaaaaaatgaaaatggaaacctttaaataaaactcataaaacttcagttccaagcacaatatttttggttctttggacaataagtgtttcactgagatttatgcctagggtccttttccatatcccggctctgtgtcagcgttcacatcagccctcagttcttcttgcaaatcaagggtataatatactgattccttcaaataatatttgtgttaaaatcattaaatgcccatgcaagtaattttttattaatgggatgagaaataatacataatacataccaattttatgacagcgagaggagttattaactttagaatatctgttgtataaattaaaaatcttaagaataagtccagtgttttaaatatactatggaaaaacaaaattaatgccaggagaattttgactggaatatagaartgcctttatcattctgggaaaaatactaccctataaaagccacatcctctgataagttcagaaattatcctttttatataaatattattcacttggaaaaatgttttctataaacagctcccttagtgcattttaacacatacttttatttacagacattagatttacacatgtttccagtataaatctttcgtatatagcaaagagaatctgtgaccaaaaattctgttcaattcggatgtggggagcaaataaatgaccaatgttcccatatacatagtaatatatggctaattttatataacatgttcacattaaaaataagaacataaaaatttttaaatcttcaggaactgtcttcaggaaatttcagaagactatgacttttaaattacgcttttacttgatccaccttccaaaagctcagaatccttatattaaaagagctggcactgacataatttgatttaatcc

SEQ ID NO: 89581 - DNA, 1020 bp, Homo sapiens
  misc_feature (1)...(1020): n = A,T,C or G
tacatgaaatgtacatgagcataaaacagccagctatagcccttctaatggagaccttcatagctgccataacagctgatggattggtgtaaggctagtagttttgaagttatattttgtatttattgttgaagctrtcagaaatgtagagaacactgaggtcaatcaagagtatatgattttccaagtatattaaaatgtgtttgtgttcctttcatacaaaacataaagcatccatctttaaaatgttcacagcaatcaatgcctttaattgagcagaaaagcatatacagatatagaaatgtttagtcctagccgtggttcctgacaatcatcttcagagataaatttccacaatggatgtttcaattaagacagtaaatttaggtaccgagctcgaattcgaaatcggtcaannnnnnnnnnnnnnnnnnnnnnnnnnnnnnnnnnnnnnnnnnnnnnnnnnnnnnnnnnnnnnnnnnnnnnnnnnnnnnnnnnnnnnnnnnnnnnnnnnnnaattcaagctcggtacctttttacagtgcttatttataccaggaactgttttttacatatattggcaagtatagtcctttaacagtcctgtatagtagatattattttttatattttataaatgaggaaattatgcttagactatttatgaagcatggctagtaacttacaaagctgggattgctttctctttttttcttttaatttttcttttctttttttttgtgaaagtcttagttttaaagaatttttttatttaaacattttatattcaaatgtttaactattccaaatagtttaaagaagtttacagtaaatactcatatacccaccactgtgcatcattctatccctctgtccattcatcattcatgaatcttatttttggacacatttctttctttcttttttttttttttttttttgagacggagtctcgctctgtcacccaggctggagcacagtggcacaatctctgctcactgcaacctccgcctcctgggc

SEQ ID NO: 89582 - DNA, 525 bp, Homo sapiens
  misc_feature (1)...(525): n = A,T,C or G
cagnctggtctcaacttcatgacatcaggtgatccaccccaccctggcatctcaaagtgctgggatancagtcatgagccaccacgcncctgccccaattcagtacattttaaagctccacagtaatttgatgttcagccaaggatgagaattagtggtttagcccttaaaacttctgacgccaaacaataaagaagagctagttttagatctgagagatgacagatgagtcctgggtgtgggtacatctatctgaaaaaacatgctttctttctrgtctttgaggataggcttgccattgacactcctatgggaaggagaaagatttcctttttaaaatttccttctaacagatgagtgtttgaagaaccttagtgatatgagagaaaaggtacattttcataaggacactacattagaaattaatggatccttttttttgcacaagtttatcttagattttcccaaaagttttgtttcctctcttgctcacacaaggaagtcaatgttttagtgcttctaaaa

SEQ ID NO: 89583 - DNA, 619 bp, Homo sapiens
aatggtggctgcttttgaatttcctgactctggtggcttcactgtcacatctatggtctgaatcccagcctgaggggtgtgcagggaaatggagctgaaaggaaattggcctcctggggtgactttcctcctcctctcttctctaggggatggtgggggctgtgcgcaggcatcctgtggcggggagatcaccttgactggcaccctgggtgttttttctctctctctctctctytttttttttccagcaggggtgtaaagggaggaagagtgtcgagttttgtgccatgaacagattccgtttctgcagaggacagcgtgcaggggacacccttcgaggctttggagccacctaggaagcaggctggctgctgcacaggcctctgctggcctccttgcacatgtccttggtgggtgaggtaagcgggccagggggtcttcccagggcatgggaaaggtgcttgggctccaagaaaacggctcagattgcagctgctctgcccccatggcctggtgagctgcagctcactctgcttccacccgtcatcggtgtagagcacgccctagcctacgcggggtgtagagcacgccctaacctgcgtggacgctccaggatccc

SEQ ID NO: 89584 - DNA, 618 bp, Homo sapiens
agttcctttcagcccatcccctcccatttgtgcacaccgtctcagaacaccgcgcccagaactgagtgtgacaccacgggtgtggtctcaccagggcagtgaggccactgccctccaacagtctgggcccttagcttcaatgagagcagaggaatgcattagtagtgtgcatatgtgttgtgtgtgcctgtgcatgcacttgtgtaaggagctgcatcactggtgtggccagttaagctgggcctgctgaaaacactcaggaattttcacataaaatgctgtcmagtcaggtctctcaaatcctacctgaccttttaagtctaggactctacatatctctgttaaattccatctgatcattttccagtcaaccaaaatgaattattttcaattctcattttgttatctactgttaatcatctccctcaaacttgtatcatgcctaaatttgattagtaaacctctacaactttgttcaagttattattgatgaaaatgtcaaacacgtcaggtcaaagagcccagaactctgtgttcaaggggttaatcaacatttttaatcagtttcaaacccacttcattgcactatcattatccattctgcatgtcaccaacatc

SEQ ID NO: 89585 - DNA, 618 bp, Homo sapiens
agttcctttcagcccatcccctcccatttgtgcacaccgtctcagaacaccgcgcccagaactgagtgtgacaccacgggtgtggtctcaccagggcagtgaggccactgccctccaacagtctgggcccttagcttcaatgagagcagaggaatgcattagtagtgtgcatatgtgttgtgtgtgcctgtgcatgcacttgtgtaaggagctgcatcactggtgtggccagttaagctgggcctgctgaaaacactcaggaattttcacataaaatgctgtcaagtcaggtctctcaaatcctacctgaccttttaagtctaggactctacatatctctgttaaaytccatctgatcattttccagtcaaccaaaatgaattattttcaattctcattttgttatctactgttaatcatctccctcaaacttgtatcatgcctaaatttgattagtaaacctctacaactttgttcaagttattattgatgaaaatgtcaaacacgtcaggtcaaagagcccagaactctgtgttcaaggggttaatcaacatttttaatcagtttcaaacccacttcattgcactatcattatccattctgcatgtcaccaacatc

SEQ ID NO: 89586 - DNA, 618 bp, Homo sapiens
agttcctttcagcccatcccctcccatttgtgcacaccgtctcagaacaccgcgcccagaactgagtgtgacaccacgggtgtggtctcaccagggcagtgaggccactgccctccaacagtctgggcccttagcttcaatgagagcagaggaatgcattagtagtgtgcatatgtgttgtgtgtgcctgtgcatgcacttgtgtaaggagctgcatcactggtgtggccagttaagctgggcctgctgaaaacactcaggaattttcacataaaatgctgtcaagtcaggtctctcaaatcctacctgaccttttaagtctaggactctacatatctctgttaaattccatctsatcattttccagtcaaccaaaatgaattattttcaattctcattttgttatctactgttaatcatctccctcaaacttgtatcatgcctaaatttgattagtaaacctctacaactttgttcaagttattattgatgaaaatgtcaaacacgtcaggtcaaagagcccagaactctgtgttcaaggggttaatcaacatttttaatcagtttcaaacccacttcattgcactatcattatccattctgcatgtcaccaacatc

SEQ ID NO: 89587 - DNA, 2593 bp, Homo sapiens
atcccagaaggagagaacaaacagaatgaagagtcaggaattcccaaaagctgaagaagctcatgactcctgagactaagggagacttagaactgataaggtttgccaagcaagatacacgactgcacatgggctagcgaggttataagcaccaaacaaaaaaagaatcataaaactttacacaaagaaaaatcagttaactacaaattaaagaggatcagctcaacatcagacttctcatcattgatagaaaacaatgtagataacaatggagagtgtctttaaagtcatttgataaaaaacaacttggaatgtagaattgtttcatactgagttattttttcattcaagtgtgaaggtgaaataaaaatgcttgtaagtaatgaaagccttataaaaattacccacaataggcattttataaaataatcactcaaggaggtatccaaacttgattaaggaaaaatataaaaaagatgatggtatgagctataagaaagggtggcacacaaggaaatcagtgtagtgcctagctgaatttccgtaattgttgatgtatgatttgaaagaacacaagcccctcctcccttggtaaaaattcagaaatgtaaactccatataatttcaacatgggaaacagtgaaaaataagaaaagaaagcttgtgaaacattgccaaggtccttagtctgtttgcggcgaggcggtatatagagtaattctagacagcaacaaaaaaatccacatataaatacatgctaacattttaatgacaacccttccaaatatgattaaaatgcatatcctaactgaataagaaaatttgggtgggaaattgatcagtttacaaaaaagactctcaaaaataatgatcagaaaccggatgatggaaaacagaaaaaatagccacctctttcactcctcctaaatatggcaggaaaatatggatagcctgttagtaattatctaaatgtgaacatgtttgtcaaaaagaacagggtatcctgtaccatgtatccttttcaacttgtttcttccatttaatatcatgttttttgtgtatatctttgttttttgatacaatacaatttaggttagtgcgctctctctctctctctctctatatatatatattttattttattttattttattttttattttttttgagatggagtctcgctctgttacccaggctggagtgcagtggcgcgatctcagctcactgcaagctctgcctcctaagttcatgccattatcctgcctcagcctccagagtagctgggactacaggcgcccgccaccacgcccggctaattttttgtatttttagtggagatggggtttcacgtgttagccaggatggttttgatctcctgacctcgtgatccgcctgcctcagcctcccaaagtgctgggattatgggcatgagccaccgcgcctggccaggttagcaatattaattgctctaaggtataccttgtatgaataaattgcgtttcattcacttattatcctcattcaaagccagttatgttttttctatttttttcactattagaataattcagtatacactttgcgtattttcatatgcacaggagagctaattctgggtgagtgttgggtgatagaattgtagggtttcaggtgatcggcatctccgattttaggagatatggcctaattgcactccaaagtgataaataattgtttaattcatttaaatgggctcatgcaaatgaaaaagtactgaggatgcatgaagtcaggctgacacacacttcagaacagttgttatctatgaggaaggcaggagggagaaggtgggaaactttggactggatccataatattttatttctttaaagggattgaaaactaaactaacatgataagctgttctctgttaaatctggatagggaatacaagagcatgtgttatgctatttcctcatctttatttgaaacatttcataatgacatgtattagagatgaaaattccatatgtattggtgtaaagaagggagggtacaaaaggaaactttcacagtttaactgttggggaacaaataattcattatctggtgacagatgatcaatagcaaggagttagaaaagagcaggacacttttggtggaaggctgcactggtgagagatggacaggaatttagactcaaggaccaggattgggccagattattagaggtcctgagattctgggcagagtttctgaatttcccagaagccatctgaagggtgagttgaggtggagaaatattcgaagcaggaaggcacattagaacatgcaatamtgtggttatgaaggatgaagaagttaaataaaccgtggcaggatggacaggcatgacagcaaactgaatatgaagaatgatcaccacgggaaagtcgcaaagcaatcctcctaaatttggggatggagaatggtgccattaagacaataaatacagaagatagatgaagctgggaagaaagatacttagttggatttgggacactatggatgtgaaatgcacatgcaatttgcagatgttcagtaagtaataggaaagactttttgttctcaaatg

SEQ ID NO: 89588 - DNA, 985 bp, Homo sapiens
tataattttttcttcagtttttagtaaaaaaaaaatgttaacatatatagttttactatataatactcttaaatctccatgaggtgaactactgtttttattttctggttactaacagggtttagggagtcaattcctgatctaaatttatctctaaattctaatagaaaatgaatttaaaaatcatatacaagagggaaattttagagataataaaactctgtattttgtagggagaccgcagaatgcttattgaacaagaatccagtttgatgttttgttaagtaaggacaattagtgtcttaggtccttttgaatttaatgataaagtatattgtatattttaatgtataaaaattgtaagtattttgcatacaatttctatgaatctgaaatgacaccccaattgagttgtttcttcccagtgaattttatgattagatcttaaaaacatgggcacattcacaataaatgcagtagattataatttgaaaggagtgatagtaataagcataaaagaaaacaaaaataatggcagatttaggttttactggcacatgagaggtcagtttttgagatatttgaaataacatagagtctcactatatataaacaacctgataatttttttaaagtttcataaccaagtcagcatttcagagggaagaaattttgatgaaagccatgctgtgtaaaaattagctcctgtattcattaactctgttgggaagcaaatgtttcacctaaggaggaatgtttctcaggaagctagtgtacgatatgtgtgtattgattaattttatgtcttaaaatatttaatgcaacttgataaaaatcaaattgactacagagaattaaaaatatcataatataaaatttcattttaggtatgtgtaagtcgttttccactgaattctgtgtcatgtgaaatccttacaaaattttataaagataatttatagawatatgtctgtatatgtatgta

SEQ ID NO: 89589 - DNA, 582 bp, Homo sapiens
tcctgccaagttgattgtatggaattctgctttggagtggagcccttggcacatgctcagagcagcttaggagaaagactgatgaaactttttggtgtttgttgcacaaatactaagaatctggttcatttctcaattcatgtcttttttatggggttgataggaggatttcgcccttcctcagtgctggaaatagttgttttaacttagaaaccgttttaatgttacgatctctcacaactgtgcagctgattggctccctatgtgagtgggccgatgtgaggctatagacagaaagtcctttccccttgagtgaagccgaggcggtcagtgaaattgcaaaggtataaaaaagtgcaagaatctggaatgctgtctggattgtccaagtggattyggagagggaggtcatgacccaagtggaatatcttcaatggaacaactgcggggatggagatggggcagcaggaagaaggccgagaaggggaaacagctggacaaagtgtctcaaaggaagggtttttatgtgaggctaaaaaaggttgaggaataattttctgaaactggttacaaagactagag

SEQ ID NO: 89590 - DNA, 756 bp, Homo sapiens
aggccagacagtgggrttaaaggactgaaacaaatcacgctacctccccctgcacaatattttcatgggataaaaatgcccttaagatgaacatcaaaggcaactctaaaagtgaaaagtaataacaaggctatttgttattactaaattgcttgtttggaataaagaaggggtacccattctgcatgtgctagtgagagtgctggtttataggtcaactcttaggcacagacttttcagcacttaaaaaatcgccagctgagcatccccttccacctcttctaccctttgaatgtcattgacccaccaacaccaccacagggctctgaagactgctcttgtgataccacagataatcaaacacacaacacgagcagtggggacactcctgaccgagagacagagtgcagaggacagacacccggacctgtgcccagtatcaaaagcactaacagagcggcgcttcccgtgttcactggacatgcagtgttcatattaggactagttctagttggacatcttgctgtttccacatttgttttagtggctcttcatcgtgtttacatttgtcttatttttgggctatttctataaccaagtgactatttgattaagatttatccattccataaatatgcccatttcattcaacatgctaccaacaagtttttggcaagtcctactatgtggccagtggtcacacagattaaagtcaaattcatgcagaatcctggcttgcagacaaagtttttatct

SEQ ID NO: 89591 - DNA, 756 bp, Homo sapiens
aggccagacagtggggttaaaggactgaaacaaatcacgctacctccccctgcacaatattttcatgggataaaaatgcccttaagatgaacatcaaaggcaactctaaaagtgaaaagtaataacaaggctatttgttattactaaattgcttgtttggaataaagaaggggtacccattctgcatgtgctagtgagagtgctggtttataggtcarctcttaggcacagacttttcagcacttaaaaaatcgccagctgagcatccccttccacctcttctaccctttgaatgtcattgacccaccaacaccaccacagggctctgaagactgctcttgtgataccacagataatcaaacacacaacacgagcagtggggacactcctgaccgagagacagagtgcagaggacagacacccggacctgtgcccagtatcaaaagcactaacagagcggcgcttcccgtgttcactggacatgcagtgttcatattaggactagttctagttggacatcttgctgtttccacatttgttttagtggctcttcatcgtgtttacatttgtcttatttttgggctatttctataaccaagtgactatttgattaagatttatccattccataaatatgcccatttcattcaacatgctaccaacaagtttttggcaagtcctactatgtggccagtggtcacacagattaaagtcaaattcatgcagaatcctggcttgcagacaaagtttttatct

SEQ ID NO: 89592 - DNA, 1849 bp, Homo sapiens
aagaaaatgaacgcggattaaagattaaggaatttgtgaaaatgggaagtcagggaatttgctcagttaggactgatggagaggctgagtgaccttaacatcaaaaggaatgtctctatgtgatactgtttcctgtctgtttctgggagagcatttcagtcacattttatcaaaggcttaatctgctgatttttggtgagtttgtatgtttttttctttcttttttctttttacttcataataaaattttgaattgacctaaatctgataatttattcaaaataaagccaaggagctattttgcctgaggacacagagcttgaaggggacaagtgaacagagtgaggagaaagggcttcttttcttagatttgctstgactcagccgagatcctgagtgaatgactcaatttctctttactttagtttctccatttgtaaaacaattttaataatactcgggattgctgcctgtgaaataactttatcccctcagaagaaatgagctatcaaaatacaatatgtgattaggcaatctgtagcttttgattgtgtactaaggggccaagtttagcaatatttttttggccagtgttctgaaggaaatagtttgattttcacaatcagttgggcttaccagcaaataatgatcacaaaagctatgtgtctgagtaaaatacaagttattttctagcatgctggctcccactgttccaggcagctaaatatgtagatggttgttcagcttcactgttatttttttggtcttgtctcatcagatacgcattccaagaaattaagatttgtttcaccattaaactgacattctcaactgcactccaatcaactggataaaagcagagaacccatcagaagctgtttctggttgactatcacctttcaaagaatatgtattgggagagagccttcatacttctcaattagtgattgttagaaatcactaatgatgtattgtaagatgcttttcatgtcaaagtgttccaaaaccctttgcaagcgcacatataaacaggcattacttcaccgccattgaaatgcagccacctcttggacaaaatgtggccgctgtttaataatgcatagcaacattccaaaacaatggaggcctggaagtaaggggcaaacttgcatccaactcaaatcacctgggaagttttctgggctgagttagttgtgctgtaagggagcttttgtaactgcaggaggccaggacattagtttgacgtctgtttaggaaagtaggctccattctgctcagcacccctggatcacgctcacctgttaaatcatccatgtcccagactgtatgtaacttgatggacagtcctctgaaatggggccagtttttgataccagctgacagaggggctgggcagtatggagaggtggcctttcatgagagacagggtgggcagacccctgcaacaagatttggaactgggaatggtcctgggtgatagaaagcagagattcatccaattctttctggttactgtaaagtgtgttctccaactttggaaatctttcccacaaattcattaacctctggtctatgccatccttcatactgatctactctgatgggccacagatcttgaaaaagagccagaaaaaatgtctctttttggaccaaaatttgattagcaaaaatagcttatcctttaggcaaaagaataactcaatttacaagtagattaacctgttctgaataggaaaatcaaagctcaatgaccacttgtattgctttacaccttctgtggtccccagggtagtgtgattatttttatggataaagagggaagtcaacacagcatactaaaacttacggg

SEQ ID NO: 89593 - DNA, 2645 bp, Homo sapiens
taggtataaaggtctctatggccaatgagttgtgggggataaaggctttggatgccatcctgaaaatcttatccctgctgaaccatgggacctcagtgttgccagatgggatggcttctctgtggcaggtckgaaatgcatttgagggtatggggtgggagtgtgctgctgagttgggctcttaatggacagatgaacatctcaccgaaatttcccggtatttggaagtaattggtgacttgtttccatcctaattgacagcctcaaaaccaagatcatgtgcatatagtgattgaattagcccttcctcccccagccctacccctgccccacccccagcatcccagatgtttactgtagctcaggcggactccagggcactaattgatgtaagaggatagaaactcttgtgtgcctgataggccgtgaacatctatgctttgtaatatatatgactataaccttcttaaaggatttatgttccttatacaagaacaagaggaaaaagaaagccactccctgatccctactcctaactatcagaatagtgaattggaaaaggatctgagacagccctcgatctgaacctcagttttgggaagcagtgacatacctctgggactcaaagcaagtcacttggccctgctagactttgggatggccccggcactgtgccaactctttcaaaaacattacctcatttagtgctgaagccacccatgtcttgctttcttttgcataaaacttgttggatgaaaaaggacctggttaaggtttaaaatacgatttgtaataataatagaataataggctctgtgttttgagcacattccacatgccaggcatgtgatacttacaatgtatgtttccaaacaccgtctcatttaatctttagagtaaccctatgaggcaggtactgattgaggttggtaaatctcaggtcgtaaagatagtatgccatgttgtgaagataggagtagaaatctaaatcccgaattattgtatttaaaatccagagcatcttttggcaaatctgtattttagcttcctagaactatactgaaattttttctggagtaatgaagtagtaatgagtaatgaaaacattagcaattctagtcattcttcaccaccataacaaagaattcaagatttctttttatgtggatctcagaaatctgatgacatacctggagtgttcttctggagggaatatttacactttacctttaggatatcacacaactctcttgtccatttctagccaagtcccacagaagccctgcgggtcactgagcattgaccccagaagttagcattttctttgttctcgtcttgaaagctacaagcagatgaaaaatcttagatccacgcatatgtgtgctgtagggctatggctttctttactaaatgaaggcatcttcaaactttgagaaaacactttgcttatgtagctgaaatcacatcaaatgtttgctttccttttcttgttgttgctgctgatgctatttttcaggcaaacactgagcttgagacagagaaatcttcaagagtatgtttcatagaggtgtttcagcttctctggcagaaaagaacccacaagttcaaaaatgaacatggacctcttgaaacagactgtattctagccccgatctcaggcaggctcctgacccacagaaagaacatgttctccagtatatctgttatcacagaaggagaaaaaagatggaatctgacatggctacagctttaggcagacaatattatgtataagcattttttttttataattgacaaaggtagtaaaactaagaaagtgatacgcttcattcttttagtcataaaaatggacttttctttggttactttcactgactgcttaagtagctttccaaactccaaatcctattgagacctgacacagaattgtcttaagttctttcttctcctctccctctggcatatcaagggtcagcctagatgttccatctcagcgttctccacatccctttgcagatggcggaggaatggggaggcaggatcttcagtggtaaaaggatgtgttagtagaggagagccaaggagagcacacccttatctgtgcttgaaggtgagagggaaggggtggtcagtgggtcagctctggtcctgctgaggatggccccggtctccaggcagtgagggctgaagggaggacagtcaaagagaatggactcaaggccgtcagagcagggctggaacccatgactcgccatgagtttacccgggcatgtaggtcccatttgggacaagggacagaacctttgaaaccagcagatgtcaccagtgcatacccagtgagccatgcaaggtcagagggtcccccttcccaatgggaggatatgtgggttgtcttctaccctttacacctggatgccgtcttagggagctgagtaggagagacccactggtagagacaaggcgtttctatctgggagagactgaagactgcataaaagagaaggttccaatgatctgatggaaaggccaggctgctaacaatgcatatcacttttcagcacatttgaattaaatgctttaagtgggcaaatgttgcagcttcatcgtagctgctaaacccaaacagtgaatctccagctgatgga

SEQ ID NO: 89594 - DNA, 545 bp, Homo sapiens
ccaggtcctccataactgctacagtagctataatatttatgtgatgaaatagtcaagtatagaataatattgagataaaaattttgacacaacagagactcagtaggaagaaattgtaaagmtggaaagagtaaacagtgcaatagtgattaactacagaataagtgtatcaaagtacaactttcaaattgttaaaacgtaactatctcttaaatgtatcatgaatatgtgtcagaaatttatttagctcatcaatgagggaaccagctaggatgttgccactgacttagtctgtcaggaaaggcgtgctgagatgtttgctaaattagacaacactggttaatgtcctatagggcagtaaaactgtaacctttatagttccttttctgaaagatagaaataatttgcatctctaatagaaaaaaagtactctgaagattaacctataacttacctgtaattagtagtaaatagcaggtcaaaataaagtgcgtcctagagaatgatagtcagttagacgggctttggtgtgatattgagagtac

SEQ ID NO: 89595 - DNA, 545 bp, Homo sapiens
ccaggtcctccataactgctacagtagctataatatttatgtgatgaaatagtcaagtatagaataatattgagataaaaattttgacacaacagagactcagtaggaagaaattgtaaagctggaaagagtaaacagtgcaatagtgattaactacagaataagtgtatcaaagtacaactttcaaattgttaaaacgtaactatctcttaaatgtatcatgaatatgtktcagaaatttatttagctcatcaatgagggaaccagctaggatgttgccactgacttagtctgtcaggaaaggcgtgctgagatgtttgctaaattagacaacactggttaatgtcctatagggcagtaaaactgtaacctttatagttccttttctgaaagatagaaataatttgcatctctaatagaaaaaaagtactctgaagattaacctataacttacctgtaattagtagtaaatagcaggtcaaaataaagtgcgtcctagagaatgatagtcagttagacgggctttggtgtgatattgagagtac

SEQ ID NO: 89596 - DNA, 732 bp, Homo sapiens
gtgcaggaggagagcaggcatcaagtggtgggactgggaaactccatgaaaactcatggacgctgggaccggtttgcaaagttagtgtggggtgagcaagaagctgacaatcgcaggccaagccttgaaggtcctcagatcaaggctgagatcaagcctggggtgggacagggcctgcaagagagaaggatgtgggaccaaccaagggaacaaagagttgtgggccccagagcagaccagttctcacaacagcagtgggaccacctcccgaggtttcaagccatggggttggacagcaagaggaggaatgtaacctgcacctaatattggagatgggcatgcattttcctgtagaagtatggattatacacggtcctggggcctacagcatagtgtgtgcygctctataatacactgtgacctgaatcttccaatatgaatccaaattccatattctgttttggcttttttttttaaattttattttagatccagcagatccctgtgcatgtttgttacggggtatcttgtgtactggtggggactgggcttccagtgtccattctccaaatggtgattgtacctgataggaaatttttcttccctcacccactcccttcttcccccattttggattcctgagcatctattatttccatctttatgtccgtgtgtactatatctgttctttcgttccagtatgatcacatgtacttgtcaactcatggatcc

SEQ ID NO: 89597 - DNA, 732 bp, Homo sapiens
gtgcaggaggagagcaggcatcaagtggtgggactgggaaactccatgaaaactcatggacgctgggaccggtttgcaaagttagtgtggggtgagcaagaagctgacaatcgcaggccaagccttgaaggtcctcagatcaaggctgagatcaagcctggggtgggacagggcctgcaagagagaaggatgtgggaccaaccaagggaacaaagagttgtgggccccagagcagaccagttctcacaacagcagtgggaccacctcccgaggtttcaagccatggggttggacagcaagaggaggaatgtaacctgcacctaatattggagatgggcatgcattttcctgtagaagtatggattatacacggtcctggggcctacagcatagtgtgtgccgctctataatacactgtgacctgaatcttccaatatgaatccaaattccatattctgttttggcttttttttttaaattttattttagatccagcagatccctgtgcatgtttgttacggggtatcttgtgtactggtggggactgggcttccagtgtccattctccaaatggtgattgtacctgataggaaatttttcwtccctcacccactcccttcttcccccattttggattcctgagcatctattatttccatctttatgtccgtgtgtactatatctgttctttcgttccagtatgatcacatgtacttgtcaactcatggatcc

SEQ ID NO: 89598 - DNA, 595 bp, Homo sapiens
cctgagtgacttttcaggattgcagattaatcaaatattcagatcctgggatctgcttccgctcagaaaacaataccccaaggcatgcctctttgacatgctgagtacttccaactaaagaagccttagaatcaaggttgctttgactttcttctgtcctgtgtcttttgcccctctgcctctcctaaagcacaggaaggggatttctttggagtctccatgtctgactgtaaggaaagttccaccagaagaaaaaatgcatttgctctaaacgccttccttggaatctaaattaaccagagaaggtgcaggagagcatattaaagacctccccacccaaaacactacatgcagacagacttttcatctattcttctgttttgtctattctgctgcctgagagactttgtctgcataataagaccacttttgttcatagtgcattcactctaccaaccctcccatagcctgtcaccaccaccctccaggagccttgargcccctatttctctctgtagctcaaaatgatatttaagagtcaaccatctggcccttctctgagtctcatatttttggggactcctatgcatatgca

SEQ ID NO: 89599 - DNA, 1102 bp, Homo sapiens
taaactagtgctttttaaatgataatacatttccacygtttaaataaggtatgctttttttctcaagatttttttcaaagcagcaattcccttcccagttcctgtagcaaatgaccatccaactgcttgaacactttcagcgacagggaatgcattactttgtgggagagttgattcttacacaggatagctaggagtattggacatttcattgtccttttggatgtatttattcatatattaatgatgtatttattgagcacctactatatgacaggctctgttctaggcacctggaatctagcagtgaccaaagggacagcaaccactgcccttatttatgttccatcttggtgtcactctacttatttgtcctaattctgtcttctgaggcaaaactaaatcattccattccctgtttctgtgacagccccacaaattgttgaaaatgacatgtcatcatcttcagattaaacattttcttacacggttttccccaggcccaccctgtctgtcactctcctctcgtctgtcagtgccccttcactgtgtgtttgtatcaggggtggtctgagaacactgggatgtccacctagagcacagctgagtggtacctgggcagcgtgagaggccagatcacagaggctttcacattcacgccatcatttcctttttgtgttgctcttgcacacatcatatagtgactctctgcctccatttccttgtctttttttttttttttttttttttttttttttttttttgagatggagtcttactctgttgcccaggctggagtgcagtggtgcaatctgggctcactgcaacctccgcctcccaggttcaattgattctcctgcttcagcctccagagtagctgggattacaggcacatgccaccacacccggctaatttttgcatttatagtagagatggagtttcaccatgtaggccaagctggtgttgaactcctgacctcaggtgatccgccagcctctgcctcccaaagtgctgggattacaggtgtgagccaccatacctggcctcattttcttatctttaaagtgaggataataatgctacctagctcaaaaagtcgct

SEQ ID NO: 89600 - DNA, 1102 bp, Homo sapiens
taaactagtgctttttaaatgataatacatttccactgtttaaataaggtatgctttttttctcaagatttttttcaaagcagcaattcccttcccagttcctgtagcaaatgaccatccaactgcttgaacactttcagcgacagggaatgcattactttgtgggagagttgattcttacacaggatagctaggagtattggacatttcattgtccttttggatgtatttattcatatattaatgatgtatttattgagcacctactatatgacaggctctgttctaggcacctggaatctagcagtgaccaaagggacagcaaccactgcccttatttatgttccatcttggtgtcactctacttatttgtcctaattctgtcttctgaggcaaaactaaatcattccattccctgtttytgtgacagccccacaaattgttgaaaatgacatgtcatcatcttcagattaaacattttcttacacggttttccccaggcccaccctgtctgtcactctcctctcgtctgtcagtgccccttcactgtgtgtttgtatcaggggtggtctgagaacactgggatgtccacctagagcacagctgagtggtacctgggcagcgtgagaggccagatcacagaggctttcacattcacgccatcatttcctttttgtgttgctcttgcacacatcatatagtgactctctgcctccatttccttgtctttttttttttttttttttttttttttttttttttttgagatggagtcttactctgttgcccaggctggagtgcagtggtgcaatctgggctcactgcaacctccgcctcccaggttcaattgattctcctgcttcagcctccagagtagctgggattacaggcacatgccaccacacccggctaatttttgcatttatagtagagatggagtttcaccatgtaggccaagctggtgttgaactcctgacctcaggtgatccgccagcctctgcctcccaaagtgctgggattacaggtgtgagccaccatacctggcctcattttcttatctttaaagtgaggataataatgctacctagctcaaaaagtcgct

SEQ ID NO: 89601 - DNA, 1102 bp, Homo sapiens
taaactagtgctttttaaatgataatacatttccactgtttaaataaggtatgctttttttctcaagatttttttcaaagcagcaattcccttcccagttcctgtagcaaatgaccatccaactgcttgaacactttcagcgacagggaatgcattactttgtgggagagttgattcttacacaggatagctaggagtattggacatttcattgtccttttggatgtatttattcatatattaatgatgtatttattgagcacctactatatgacaggctctgttctaggcacctggaatctagcagtgaccaaagggacagcaaccactgcccttatttatgttccatcttggtgtcactctacttatttgtcctaattctgtcttctgaggcaaaactaaatcattccattccctgtttctgtgacagccccacaaattgttgaaaatgacatgtcatcatcttcagattaaacattttcttacacggttttccccaggcccaccctgtctgtcactctcctctcrtctgtcagtgccccttcactgtgtgtttgtatcaggggtggtctgagaacactgggatgtccacctagagcacagctgagtggtacctgggcagcgtgagaggccagatcacagaggctttcacattcacgccatcatttcctttttgtgttgctcttgcacacatcatatagtgactctctgcctccatttccttgtctttttttttttttttttttttttttttttttttttttgagatggagtcttactctgttgcccaggctggagtgcagtggtgcaatctgggctcactgcaacctccgcctcccaggttcaattgattctcctgcttcagcctccagagtagctgggattacaggcacatgccaccacacccggctaatttttgcatttatagtagagatggagtttcaccatgtaggccaagctggtgttgaactcctgacctcaggtgatccgccagcctctgcctcccaaagtgctgggattacaggtgtgagccaccatacctggcctcattttcttatctttaaagtgaggataataatgctacctagctcaaaaagtcgct

SEQ ID NO: 89602 - DNA, 1102 bp, Homo sapiens
taaactagtgctttttaaatgataatacatttccactgtttaaataaggtatgctttttttctcaagatttttttcaaagcagcaattcccttcccagttcctgtagcaaatgaccatccaactgcttgaacactttcagcgacagggaatgcattactttgtgggagagttgattcttacacaggatagctaggagtattggacatttcattgtccttttggatgtatttattcatatattaatgatgtatttattgagcacctactatatgacaggctctgttctaggcacctggaatctagcagtgaccaaagggacagcaaccactgcccttatttatgttccatcttggtgtcactctacttatttgtcctaattctgtcttctgaggcaaaactaaatcattccattccctgtttctgtgacagccccacaaattgttgaaaatgacatgtcatcatcttcagattaaacattttcttacacggttttccccaggcccaccctgtctgtcactctcctctcgtctgtcagtgccccttcactgtgtgtttgtatcaggggtggtctgagaacactgggatgtccacctagagcacagctgagtggtacctgggcagcgtgagaggccagatcacagaggctttcacattcacgccatcatttcctttttgtgttgctcttgcacacatcatatagtgactctctgcctccatttccttgtctttttttttttttttttttttttttttttttttttttgagatggagtcttactctgttgcccaggctggagtgcagtggtgcratctgggctcactgcaacctccgcctcccaggttcaattgattctcctgcttcagcctccagagtagctgggattacaggcacatgccaccacacccggctaatttttgcatttatagtagagatggagtttcaccatgtaggccaagctggtgttgaactcctgacctcaggtgatccgccagcctctgcctcccaaagtgctgggattacaggtgtgagccaccatacctggcctcattttcttatctttaaagtgaggataataatgctacctagctcaaaaagtcgct

SEQ ID NO: 89603 - DNA, 742 bp, Homo sapiens
ggctgtatggtttttagaaatgcaaaaacctgaaaagacatctcaaaagactcaaaatagtgatattacctttaagagtaattgaggaagttgcaaatcttatgacttccagaataatggctggtaatattttgaattccagcccttctcattctaacttggtggctggtagcctttcattcattttacaagaacagtttagcttttgggaagggctattattgtatttaaactataaactaaattgcttcccaaggctagttcggcctacacccaggaatggacaatgacagtttagaggttagaagcaagatggagttgagtaggtctgatatctttcactgtcataatttccttagttataattttgcaaaggtggtttcaagttcaaagaaatgtcttccttattggytgcatcacatcttatcttctcttaagcattgtaaggatagtctcataatgttaatccttttagaatctaacaaagccttaaaagtagctggtataaacttcaaattagtggcagattgaatgaataaaaggatggataaatggatggatgaattaatggatggatgaattaacacctctcttatccttattaatataacaatgttaatgcaaaaactagggattaaacttttagccatatagcatggatttgagtctatatttgtccaagcataatatctgtaaaatttttattagaatttttgaatttctttaattgactttatagtat

SEQ ID NO: 89604 - DNA, 742 bp, Homo sapiens
ggctgtatggtttttagaaatgcaaaaacctgaaaagacatctcaaaagactcaaaatagtgatattacctttaagagtaattgaggaagttgcaaatcttatgacttccagaataatggctggtaatattttgaattccagcccttctcattctaacttggtggctggtagcctttcattcattttacaagaacagtttagcttttgggaagggctattattgtatttaaactataaactaaattgcttcccaaggctagttcggcctacacccaggaatggacaatgacagtttagaggttagaagcaagatggagttgagtaggtctgatatctttcactgtcataatttccttagttataattttgcaaaggtggtttcaagttcaaagaaatgtcttccttattggttgcatcacatcttatcttctcttaagcattgtaaggatagtctcataatgttaatccttttagaatctaacaaagccttaaaagtagctggtataaacttcaaaytagtggcagattgaatgaataaaaggatggataaatggatggatgaattaatggatggatgaattaacacctctcttatccttattaatataacaatgttaatgcaaaaactagggattaaacttttagccatatagcatggatttgagtctatatttgtccaagcataatatctgtaaaatttttattagaatttttgaatttctttaattgactttatagtat

SEQ ID NO: 89605 - DNA, 742 bp, Homo sapiens
ggctgtatggtttttagaaatgcaaaaacctgaaaagacatctcaaaagactcaaaatagtgatattacctttaagagtaattgaggaagttgcaaatcttatgacttccagaataatggctggtaatattttgaattccagcccttctcattctaacttggtggctggtagcctttcattcattttacaagaacagtttagcttttgggaagggctattattgtatttaaactataaactaaattgcttcccaaggctagttcggcctacacccaggaatggacaatgacagtttagaggttagaagcaagatggagttgagtaggtctgatatctttcactgtcataatttccttagttataattttgcaaaggtggtttcaagttcaaagaaatgtcttccttattggttgcatcacatcttatcttctcttaagcattgtaaggatagtctcataatgttaatccttttagaatctaacaaagccttaaaagtagctggtataaacttcaaattagtggcrgattgaatgaataaaaggatggataaatggatggatgaattaatggatggatgaattaacacctctcttatccttattaatataacaatgttaatgcaaaaactagggattaaacttttagccatatagcatggatttgagtctatatttgtccaagcataatatctgtaaaatttttattagaatttttgaatttctttaattgactttatagtat

SEQ ID NO: 89606 - DNA, 742 bp, Homo sapiens
ggctgtatggtttttagaaatgcaaaaacctgaaaagacatctcaaaagactcaaaatagtgatattacctttaagagtaattgaggaagttgcaaatcttatgacttccagaataatggctggtaatattttgaattccagcccttctcattctaacttggtggctggtagcctttcattcattttacaagaacagtttagcttttgggaagggctattattgtatttaaactataaactaaattgcttcccaaggctagttcggcctacacccaggaatggacaatgacagtttagaggttagaagcaagatggagttgagtaggtctgatatctttcactgtcataatttccttagttataattttgcaaaggtggtttcaagttcaaagaaatgtcttccttattggttgcatcacatcttatcttctcttaagcattgtaaggatagtctcataatgttaatccttttagaatctaacaaagccttaaaagtagctggtataaacttcaaattagtggcagattgaatgaataaaaggatggataaatggatggatgaattaatggatggatgaattaacacctctcttatccttattaatataacaatgttaatgcraaaactagggattaaacttttagccatatagcatggatttgagtctatatttgtccaagcataatatctgtaaaatttttattagaatttttgaatttctttaattgactttatagtat

SEQ ID NO: 89607 - DNA, 2642 bp, Homo sapiens
gcatttgtgccaaaacacacaactaaatttctgactctgttaaaggtaattaaaatagtgatttttttaaaaaagccattttcaaactcccagttcatgcctcctagtaacctgttttcattactaccttcacagtatagaacttttacattcacatttgaaagttttctggataatagttaagtgggaattaataataaattagagaatatttcggtcataattatttaaatgggaacaagagcatgtctgtttataaaacatccaaataatatgtgtataatagtatgtgaaaagcttttagttctagtgaagtggacatcatgatctctattttacagaagaggcaattaagccccagacatgttaaatgattgccaaagttacacagctatgaagtggaagaacaagatcttaagcacatgccttttctatcacactatctgccacccagaagtcagctatttgaaatatacatgtctgacacagtgaccagtgtagaataagaactcttacatgggagccaaggacttccagaagctccaaggatgggtgtaggattatctgattcccctgaaatttatgctgaaaaaaaggtgtgcatgtgcatgttgataacaccagggttcacaatttttattcaactgttaaaaagctctgtgagcaaagcaagaataagaacccaaaactgtagaggagggcaaagaaagaatgagaatgagaacacaacatccaattctacattttctgactataaaagtacaattagaatataaaaataaatgacaaataaaaattgcctctaatcccaacattcaaatgttttggtatatttttccagttttttagaacgttattttacatacaaatttgctatcatatttttggcccaggttggtgactgagaagacacaaatgcagtaaaagccagtgcatcaaagaccatacactttaattatatgacctgaaagcgtaccagggactacatattctacattcttccaaaaactctctacaactaagagggcacttcctcctgcaggttctgcaggctctaatctctggggacaactggtacttcagtgtgcagggtttcagaaagtctagttaaataccggaagccttcaggttctggcaaagttgctattaatctgcctctgatcttgtaatctacttctaaaagatgcaagtgaaagtaatttccaaagtgcatgcatgtaggaaatgttataattttaaattaatgccttattcctgagcctagtttctactttgtatgtaactgctaaaaatrtagatcttaaattattcccgagtctttctcagtaacctacagtataagtttcatattgcttctgtaacaaattagcataaacttagttgcttttaaaaatacacatttattctcttccagttctgcaggtagacagtcccaaatcaatctcactggatttaagtcatgatgtctgcagagccttctggaggctttgagagaagaatccatttccctgctgctttttgtttgtttaatcttccagaggccacctgccttcctggctcacagaccatgtcttgcatcttgcttccattgtcacatttcctactactgactctgatcctcctgcctccctcttcaagatcctagtgatttcactgggcccacccaataatccaggggaatctccccatcccaggatccttaacttaatcacatctgcaaaatcgtgtaaactgacgtattcacatactcacaagttgcagggataaggatatgggcaccttgggggaggcaatcattctgtctaccacacctaccctgtatccaaaacacacagaaacagaatccttcctagcctttgacacttacccacgcccctctgatggacagaatagctgcttccaaataccagtttttaaatgagagtccggtttcctaccaacataattttttaaacaccagcagctgtttactcgattgaatctctaatgattgcctgctcctgcttcctaggctgctttactcccctgctcagtgttacctgttatcatttgctggaccgctccagtaccacctgcttacctgaatttcttataactttaattattgcatcgctcagaaaaaaacgtacagcaattctcagtgattgtggagacaggaccattaggctccccagtgaattgtgagaatgcatttttctaagccccacataaatccatgaagaatttaatttcttgagtttataacatgcctttcatgagatttaaggccatagaatctagctaaataaaactaaagctagacatgtgatgctttacaaaatgagatttggggcctaaggctattgccaaatgaaggaaatacattctgcaagtcttttttccccattccactttcatttttatatagctgtaggggaagtagataattggtctttccttttagaaatttagatgaactccttaggtaagaatttgccttaaccgtataggttgacactgactgcaaatggaaaggtgccatttatgcaaaagatttttaaagaaatcagaaatatttcctgaagctttatgcggacagaggaagaggaacctcaggaaaaagaattatttcagagagaacatcatggatatttttaaataaa

SEQ ID NO: 89608 - DNA, 1195 bp, Homo sapiens
gagaaaacactgacaatcagtgaaagaaacaaactgagctaaaaagcagtggtccgcatcagttctggcttcctaggaactagttctgcaattctgggcagattatcattttactctgatcttagtcatctcctgtctgtaaaagaagtagctaaactagaaaatggccaagaactcctacactggtgtctgtgtttctatgactctctcaggatagactagagctaaaagcctttgcttcacttgtataatcaggtaaggtgttaattgtttaatctctagccagaaaataactatataaaacagctcttccttccttaatgaggccagaagcataggcttcagccctcagggttggcattatggaaatcaatcggcagagctaatgaaaaccaggcagtgggctcaaaatagaacccctcttaatccccactttctgcsctgcacagcagggggcctcagcttcccatagccatggtgtttactttgtgtcaagcaagtattagtattaatcccattttagagatgaggaaactgaagtacagaatgctaataactagtccatggataacaactagtaaatgtaggatctgaatcttgtaactaggcagtctagctggaaagcctatactcttgaaactactaggttcactcttccgggttccatactgactctcagtataatactctcctgttttagacttaaccgtgtgtctgctaccatctactagattgtgaattgcttcagagtagaaaaccagagaggcatggtcgaaagacatggatataaaccagtggttctcaactccaagtgattgccacccccaggggtaatttggcaaaatctaaagacagtttttgttgtcacaagggggaagaggtgttactgacgtctagttggtagaagccagagatgctgctaaacattctacaaggctcaagacagcccctcacaacaaagtattatccaggtctaaacatcaattgttgcaggggttgagaaaagctgctgtagaataagagaagctgggtttgaaccccgactctgccacttacccgctgcatgcattcagacacttgcacaaactccgtaagcctctcaatctcctcccttaaaaatggcaaaaggctgggtgcagtggctcacgcctgtaatcccagcactttgggaggccgagacaggcggatcacctga

SEQ ID NO: 89609 - DNA, 512 bp, Homo sapiens
gtgttgacctgacaagagggcagctgaggtttaggtaggctgcagtgtggacagagaagctggactctgaagacccagactccaaacccattgtctattttactccagcacaatagcatatttccgggggaaatatgtttcagaatgttgcagatattttggctccttctatgtgaagtaatgggcacagtcatctaatgggacaatgcctttgaagaaatggttcaaggataaccttgctgatccagacaaccaygtggatatgtgtatgtataatgttaagccagtgtttacaatcagataaaaataatggggatattttatgagctcttaactgttaatactttttacatctatgtgcatttattagttacaaagaatacttacttggtaaaaacaccaaaaactccatcacaaaattattgagggagaaaaaattgagtatttacaaaaatgtagctttgaaggaattaggaattttaaaaagtcatctagtcaataattaatgctta

SEQ ID NO: 89610 - DNA, 511 bp, Homo sapiens
ctggcagcccacggcagccagagaaccacacccactggagaactctaggttctctacggcctcttgttactgccagtgcttgtgtggtttgaggtgggtaatgcagcagcctcctgcagccagcccaggactgggcagcatggggccaggtagttagtgtaggagagcgagcctaggcttgtaaagcaagacttggctctgtcactgggcaacttttttatttttttatttttttttgagacagagtcttgctctattgcccaggctgaagtgcagtggcatgctcaaccccttcctccctggttcaagcaattctcctgcctcagcctcctgagtagctgggactataggcacgtgccaccacgcctggctaatttttatatttttggtagagrgggggttttgtcatgttggccaggctgttctcaaactcctcccctcaagtaatctgcctgccttggcctcccaaagtgctgggattacaggcatgaggcaccgcgcccagcctggg

SEQ ID NO: 89611 - DNA, 1995 bp, Homo sapiens
ctgtgtttctctaccagactctaagtgtctaggggaggcagaagtcaagcagttttttttttttttttgagacggagtctcgctctgtcacccaggctggagtgcagtggcgtgatctcggctccctgcaaactccgcctcccgggttcacgccattctcctgcctcagcctcccgagtagctgggactacaggcgcccgccaccacgcccggctaattttttgtatttttagtagagacggcgtttcaccatgttagccaggatggtctcgatctcctggcctcgtgagccgggcttcccaaagtgctgggattacaggcatgagccaccgcgcctggccctcaagcagtatttatgtttgtattcctcagtacttggcgcttggtacatggccctcttagtatctgctgaagtgtaaagccccacatctaggcatctactgatgaataagtataasagaggaagagatgtagtgatttgaagcaggcactctggggccagactgcctgggtttgaatcctggctctgctgctttgcagctgtcggcaaattagactatattccaattgtttgagaaaataatagtacctgcatcagtgtgttgtcacttagaacaatgggtgggttctattgtcactactagtggtactggatcaccctctgttgtctggagaagaacacaaccctggccccccagagaggatccagaacccttcctcctctataccttgcccccccccccacgaagtcagggtttaaggtatttgtgatacttgttcaagaccaagtaagtctgctaaaatcttgagttctacattggtttcttcttcttaagagtgtatgaaggagatgccagcagggagctgtaggggatgtgtgtgtgcacacgcactgcttgggcagagtggtatgtaccagttagataagggggagtcccagtccagcacaggaaggaaataaaagcaaaagcagacaaacaccccccaacttttaaagcatattatggccaggttaaaatatctccatctcacaacatgagggcaaaggtgagtgccgattattctgaacactcattctgcagctctcccgaagtcctcagggcacagtgctctctaacacactgtgcaaagacggtgctttaagccacccagagcacctccagggtagtcgtcctgaatggcctgcctaggttgggggaaggtatactattgttttcataaaacaagaacaggaactatgatcacttcctagttcatgcacgagccatgggcaagagagccctggaatcatacaatgcagtgatgtgattcatacccttaaaatgaggggggtcagtggaactctgatttccaaagttgcttccaggctatgagtaactgtcgactagacttgatacaaaatttcttaacatggcatgaagaaaaatgaatcacggcaggtgtcagaccagatgagctcaggcagacagagcctgcagtcttcccctctgcacgtcccactcagcagcacctttccagctgcatcctaactggcatgacctaacaatccccagtgcagtgtccctcctgggtattgccaattctactctgggcatgggttaagaggccagaagccaggctgcacgtaagagtgaggggaagacagcggaaagggttactattctcagtagtggaacggcctgtcttaataaagggcacattgtgctagggaggcatgtgatggtaacaggggccttgcggtttatacagtggccctcttctccagtgttcagtgccaactacaagatgcagcaactctttaccccaaatctgtctcaaaacagccaaaatgccatgggctcctaagtgcaaccccaactatgctgctctctaatgtccactgtctcattttaaaagttgttgctgaaatacagcccaaatcaatcatgcatgcacagaagagaatgagcttggactgttattttccaaactttcttcaaaagtaacatgctgttc

SEQ ID NO: 89612 - DNA, 886 bp, Homo sapiens
caagttctcaaaggcattcaacctgaaacaataaagagagccccatcaaaatggatcatttaaaaaatgtacaaactaaatcttagacttcygtttacaaagatgactgctaacagagaaaggaaatcggaatggggggagaaagactatagatccaggaggtgactgcattggacctggcagtatggagataacacccacggatgtaccagtggctacatactgaaagggggtctctacacataataatctatgggaaacaaaattggttctctagaaatgagactattttaggaaagtggtcaccaaatacaaatgacttcctaatgtgtagcactctacgaaatatttttggtttttaagcatatcttcctttccaaattctggttcaaaaagttcatttattcaactgcaatttcaaagcaattattgcaccaaatgtttacatttttaaaaagattaacttcatggaaattcttttgagatatccgaagtctttctaccaacgcctctttcttacatgcaaccacctttctaaagcacaaatctgatccagtcagtcctcctcctcttaaacaaaaattcattatctcccactgtgccgttggataaacttcaaattattagaggcattcggaccagagcaactccatcttgagtaggggctagataaaataaggctgagacctttattttaagtctaaattcccaggaggttaggcattcttagtcacaggatgagacaggtcagcacaagatacaggtcacaaagaccttgctgataaaacaggttgtggtaaagaagccgtccaaaacccaccaaaaccaagatggagatgaaagtgatctctggtcattctcactgctcattatatgctaattataa

SEQ ID NO: 89613 - DNA, 886 bp, Homo sapiens
caagttctcaaaggcattcaacctgaaacaataaagagagccccatcaaaatggatcatttaaaaaatgtacaaactaaatcttagacttctgtttacaaagatgactgctaacagagaaaggaaatcggaatggggggagaaagactatagatccaggaggtgactgcattggacctggcagtatggagataacacccacggatgtaccagtggctacatactgaaagggggtctctacacataataatctatgggaaacaaaattggttctctagaaatgagactattttaggaaagtggtcaccaaatacaaatgacttcctaatgtgtagcactctacraaatatttttggtttttaagcatatcttcctttccaaattctggttcaaaaagttcatttattcaactgcaatttcaaagcaattattgcaccaaatgtttacatttttaaaaagattaacttcatggaaattcttttgagatatccgaagtctttctaccaacgcctctttcttacatgcaaccacctttctaaagcacaaatctgatccagtcagtcctcctcctcttaaacaaaaattcattatctcccactgtgccgttggataaacttcaaattattagaggcattcggaccagagcaactccatcttgagtaggggctagataaaataaggctgagacctttattttaagtctaaattcccaggaggttaggcattcttagtcacaggatgagacaggtcagcacaagatacaggtcacaaagaccttgctgataaaacaggttgtggtaaagaagccgtccaaaacccaccaaaaccaagatggagatgaaagtgatctctggtcattctcactgctcattatatgctaattataa

SEQ ID NO: 89614 - DNA, 745 bp, Homo sapiens
aaaaactaaggcaggatactggaatcagattcttgccactcaaaataagaattatactttaaaaatgtagatgaaagctggcttcacttctccccacagaataaccaaaataaatatacaccatcgagattatcaccagcaatctctcagaactcatgaaagagaatcggtcagttcctggggccactgagaagtaaaaaaaaaaaaaaaamaaaaaaaaaaaactccagcagacagtaagagaatcagattttcatatctgtgacacccttcccccaatctgcttggtatcaagcacatgtaaaacttcccccaactcagattctacactggaaaaagtgagattaagttggacacacaacttgcctaccatcttggcttctttggcaggagacctatccatgcctcaacccatgagaagcatcaggagtgcctgaagggagataccaccctgtggacagccggacacaaaggaaggaggcaggattaccatctccagccctggaagctccgctctgtaactcaaccaaaggagacgccaaatcagagtgggtgttcggcagcactatgctgtaggaggtagattccacaggtctcttgggcatgaactcctagccagcctttccataccacagggatagctcctttgcaacctcccccattccagccaggcaatcctctgatcctttgctagaagaacagaggcaaacctgggttttaagtaccatttagtgctgaaaaagag

SEQ ID NO: 89615 - DNA, 1391 bp, Homo sapiens
gcatataccacattttccttaggcattcatctgttaatggacttttaggttgcttctgcatgttggtcattgtgaataattctgtagtgaacatggggatrcaaatgtctcttcgagttcctgtttttagttcttttgggcatatacccagaagtagggttcttgaatctcatggtagttctatttcttatttttttgaggaacctctatactgttttctgtagcagctgcaccattttacagtttcaccaacaactctcaccaatgtagggttccagtttctctacatgctaccgatgctttgtttttttgttgttgtttgttcttgtttttttttaatagtggccatcctaatgagtatgaggtgatactgtggttttgatttggttctgcctttttaaactccaaattcagtctctggttacagcttttcccataaccattttcaggtgaggtgcgtatgctgcgttggtaacataaatttaacattgtgagagcttttatcaggcagcaaattgtaaagccccttctaggtcagacagttgacctctgtaaagcttaagttaggaacttttatgttcttaataaaacacaagaaaatatgggaaatttccatttggcatgagcctttctgttttcttggtggtggtggtgtgggggtggtataggctctccctaaattgcccaggctggaatgcagtggctcttcacaggtgcaatcatagctcactacagcctcgaactcctgtctcagcctcacaagtactgggactacaggcatgaaccaccatacccagttccattctgctttaaacagtggaaaaaatacatgtattttttaaatggaagggttggttatatcttcaatgtgaaatcctctatgtgaaatctaaataaactattcctggaatgtccagtgtcctttccccgtgatgataaacaaagcccagagctgcctctctttaaagatagtaagaagcctatgcataaacaaaacacttaaaaataagatcatttattttattttactcatccgcttaaacccatcaatgacttttaacttagaagaaaacctagtcttcctactatgaccaacaggactaagcaaatctcataacctagcctctgcttacctctcacttcagcccaacctactctttccctctcttaaaaactcagtagctgaaatatatggagctctttctggccccgagcctccagaccttttaaagaaaaaaaaagattgtaattttgatgaagaccgcattgtcaatttttatttctatggctcttacttttggtattatgtctagacctctctaagccctaggtcttaaagatcttctaggttttcttaagttttatagttttttttttaattttagatttaa

SEQ ID NO: 89616 - DNA, 1391 bp, Homo sapiens
gcatataccacattttccttaggcattcatctgttaatggacttttaggttgcttctgcatgttggtcattgtgaataattctgtagtgaacatggggatgcaaatgtctcttcgagttcctgtttttagttcttttgggcatatacccagaagtagggttcttgaatctcatggtagttctatttcttatttttttgaggaacctctatactgttttctgtagcagctgcaccattttacagtttcaccaacaacyctcaccaatgtagggttccagtttctctacatgctaccgatgctttgtttttttgttgttgtttgttcttgtttttttttaatagtggccatcctaatgagtatgaggtgatactgtggttttgatttggttctgcctttttaaactccaaattcagtctctggttacagcttttcccataaccattttcaggtgaggtgcgtatgctgcgttggtaacataaatttaacattgtgagagcttttatcaggcagcaaattgtaaagccccttctaggtcagacagttgacctctgtaaagcttaagttaggaacttttatgttcttaataaaacacaagaaaatatgggaaatttccatttggcatgagcctttctgttttcttggtggtggtggtgtgggggtggtataggctctccctaaattgcccaggctggaatgcagtggctcttcacaggtgcaatcatagctcactacagcctcgaactcctgtctcagcctcacaagtactgggactacaggcatgaaccaccatacccagttccattctgctttaaacagtggaaaaaatacatgtattttttaaatggaagggttggttatatcttcaatgtgaaatcctctatgtgaaatctaaataaactattcctggaatgtccagtgtcctttccccgtgatgataaacaaagcccagagctgcctctctttaaagatagtaagaagcctatgcataaacaaaacacttaaaaataagatcatttattttattttactcatccgcttaaacccatcaatgacttttaacttagaagaaaacctagtcttcctactatgaccaacaggactaagcaaatctcataacctagcctctgcttacctctcacttcagcccaacctactctttccctctcttaaaaactcagtagctgaaatatatggagctctttctggccccgagcctccagaccttttaaagaaaaaaaaagattgtaattttgatgaagaccgcattgtcaatttttatttctatggctcttacttttggtattatgtctagacctctctaagccctaggtcttaaagatcttctaggttttcttaagttttatagttttttttttaattttagatttaa

SEQ ID NO: 89617 - DNA, 1391 bp, Homo sapiens
gcatataccacattttccttaggcattcatctgttaatggacttttaggttgcttctgcatgttggtcattgtgaataattctgtagtgaacatggggatgcaaatgtctcttcgagttcctgtttttagttcttttgggcatatacccagaagtagggttcttgaatctcatggtagttctatttcttatttttttgaggaacctctatactgttttctgtagcagctgcaccattttacagtttcaccaacaactctcaccaatgtagggttccagtttctctacatgctaccgatgctttgtttttttgttgttgtttgttcttgtttttttttaatagtggccatcctaatgagtatgaggtgatactgtggttttgatttggttctgcctttttaaactccaaattcagtctctggttacagcttttcccataaccattttcaggtgaggtgcgtatgctgcgttggtaacataaatttaacattgtgagagcttttatcaggcagcaaattgtaaagccccttctaggtcagacagttgacctctgtaaagcttaagttaggaacttttatgttcttaataaaacacaagaaaatatgggaaatttccatttggcatgagcctttctgttttcttggtggtggtggtgtgggggtggtataggctctccctaaattgcccaggctggaatgcagtggctcttcacaggtgcaatcatagctcactacagcctcgaactcctgtctcagcytcacaagtactgggactacaggcatgaaccaccatacccagttccattctgctttaaacagtggaaaaaatacatgtattttttaaatggaagggttggttatatcttcaatgtgaaatcctctatgtgaaatctaaataaactattcctggaatgtccagtgtcctttccccgtgatgataaacaaagcccagagctgcctctctttaaagatagtaagaagcctatgcataaacaaaacacttaaaaataagatcatttattttattttactcatccgcttaaacccatcaatgacttttaacttagaagaaaacctagtcttcctactatgaccaacaggactaagcaaatctcataacctagcctctgcttacctctcacttcagcccaacctactctttccctctcttaaaaactcagtagctgaaatatatggagctctttctggccccgagcctccagaccttttaaagaaaaaaaaagattgtaattttgatgaagaccgcattgtcaatttttatttctatggctcttacttttggtattatgtctagacctctctaagccctaggtcttaaagatcttctaggttttcttaagttttatagttttttttttaattttagatttaa

SEQ ID NO: 89618 - DNA, 1391 bp, Homo sapiens
gcatataccacattttccttaggcattcatctgttaatggacttttaggttgcttctgcatgttggtcattgtgaataattctgtagtgaacatggggatgcaaatgtctcttcgagttcctgtttttagttcttttgggcatatacccagaagtagggttcttgaatctcatggtagttctatttcttatttttttgaggaacctctatactgttttctgtagcagctgcaccattttacagtttcaccaacaactctcaccaatgtagggttccagtttctctacatgctaccgatgctttgtttttttgttgttgtttgttcttgtttttttttaatagtggccatcctaatgagtatgaggtgatactgtggttttgatttggttctgcctttttaaactccaaattcagtctctggttacagcttttcccataaccattttcaggtgaggtgcgtatgctgcgttggtaacataaatttaacattgtgagagcttttatcaggcagcaaattgtaaagccccttctaggtcagacagttgacctctgtaaagcttaagttaggaacttttatgttcttaataaaacacaagaaaatatgggaaatttccatttggcatgagcctttctgttttcttggtggtggtggtgtgggggtggtataggctctccctaaattgcccaggctggaatgcagtggctcttcacaggtgcaatcatagctcactacagcctcgaactcctgtctcagcctcacaagtactgggactacaggcatgaaccaccatacccagttccattctgctttaaacagtggaaaaaatacatgtattttttaaatggaagggttggttatatcttcaatgtgaaatcctctatgtgaaatctaaataaactattcctggaatrtccagtgtcctttccccgtgatgataaacaaagcccagagctgcctctctttaaagatagtaagaagcctatgcataaacaaaacacttaaaaataagatcatttattttattttactcatccgcttaaacccatcaatgacttttaacttagaagaaaacctagtcttcctactatgaccaacaggactaagcaaatctcataacctagcctctgcttacctctcacttcagcccaacctactctttccctctcttaaaaactcagtagctgaaatatatggagctctttctggccccgagcctccagaccttttaaagaaaaaaaaagattgtaattttgatgaagaccgcattgtcaatttttatttctatggctcttacttttggtattatgtctagacctctctaagccctaggtcttaaagatcttctaggttttcttaagttttatagttttttttttaattttagatttaa

SEQ ID NO: 89619 - DNA, 666 bp, Homo sapiens
tgcctgtggctcacccttcctgttattttaattcttttgttggatgcctttaatgaatgtagacatggacactcatacatcagagagcagaagtactttaagaaccatctagccctactctttcattacacggatgagaacgctgaggtccagggaaatggaaagctttgctctgtctcctgctgggacaagatccttaatcgcctgattcctcacatcatgctgatctttcctctaacaagaaattgactgagctttcacagacaacgaggcaacacctgaaagagcaaagataccaagtcagattcatctgagtttggatctctgcttgccattctttgttgtgtgatttttgacaagttacttaatctctccaagcttcacyttccccacctgtaaaatgaagattaaaaacaccttgaaggtgggctgtgaggattaacgtaaagcctttgggatagggtctgatattcacgagccaccatctagaccacattctctacttatgttgacttctccagcccctgtctcttccctaccctttctctattctcaaagggtttgcagggattctgcagaaaatttattctttggaaattctttgtggaactcaacacaaattcagcatatcaaataaacgaaatattaagaaatgactctaccttt

SEQ ID NO: 89620 - DNA, 663 bp, Homo sapiens
aaatgacacatccacattctaggcagcaggatggaggaaggtgactaaaccatgtgamtatattactgatttttaaaatataacaaaattataattataaacatgtagaatagattgtaaaagcccaaacaatacaaaaataaaatatatttttggattgttaaatcacctataattgttatttctatcagccccactccaaattcccagcctaagcatctagtttattgcaactattaaggactgagccagtcttgattcccacaattgaaaatgttttcagaaggaattattcttatggaagctcataaaatgttcttaaacccataggtttgaaaataagaaaattatctagagtggagtggtagacagctgagttatctgcctgcccagcactcacttcccattctggcaggcatacttcaattttggtttggggaacaaactaccaggttcctttgcttacagacttggtagaaattgtcatttgggctacagatgggaagacgtagaaatgtaactcaaactaggaccataatatccctctctcttcgaataatttgtctcttggatatggttaaaaagcatagacatatgactggggatcattttctctaacagagacatggaactcaaacaaattccctgagctgctttggatcc

SEQ ID NO: 89621 - DNA, 681 bp, Homo sapiens
tctggttgtcttcatycaacacccacctcctgggccaggcacctgtggatctctggggtgcagagttgaacacagcctcttctctgaggcattcccaggttgggggcattgaaccagggtagaaagggtggatggaaggaagtccagaggcttgtggaagcatggaggaggagcacacaggcagttaggaaagacttcagagggtgtagtcaatgggtttggttttaaaggatgcacaaggattttacaggcaaagagattggtggtgggaattccacccagagggatttttatccctcttcagtacttgtgactctgagggaccacacaggtgtgtgcatgggttctgcaggacagcctctagaggtgggaagagctcacatgctgtttgtgtggcttggttcctcagtcatgatcatctctgtccccttgacatgtcatggttcctagctaccttcttgtttttgagcatttttgctgaacttgttccattttgtcagcatctttcagaaagtaggagttagcatggtgcttaagagaatggtcttcagcactacactagacctcagtttgaatcctggctttgccacttattagctaggaagttagacaagtttctctgagcctcagtttctttatgcataaaatggaaaggccataatgccccactggcctttgggg

SEQ ID NO: 89622 - DNA, 733 bp, Homo sapiens
gaattccagtatgaaaaatactggcctccctgcttgagactgagtctagggtaggcagaatgcccaccacccagatagacaagcaatacagagatctccactaagaggyttctggtccatgccgttttgcagctccttccttccttccttccttccctccttccttccttccctccttccttccttccctccttccctccttccttccctccttccctccttccttccttccctccttccctccttccttccttcccccttccttccttccttcccttcttccttcctccctccttcttttttctttctttctttctttctctctctctctttctttctctctttccttcctactttcctttcttccttccttcattcctccctccctccctccctcttctttctttctctctatttccttccttccttccctccctctttctttctttctttctttctttctttctttctttctttctttctgtctgtctgtctgtctgtctgtctgtctttctttctttctgtctttctttctttctctctttccccctccctcctcctccctccctctctcctctctctttctctcattctctttctccccctccctcccttcctccttccatctgtctctctttctttctgtatttcatgtaagacaggattttctatattgctcaggctagtctcaaacttctggcctcaagtagtccttctgcctcagcatcctgag

SEQ ID NO: 89623 - DNA, 733 bp, Homo sapiens
gaattccagtatgaaaaatactggcctccctgcttgagactgagtctagggtaggcagaatgcccaccacccagatagacaagcaatacagagatctccactaagaggtttctggtccatgccgktttgcagctccttccttccttccttccttccctccttccttccttccctccttccttccttccctccttccctccttccttccctccttccctccttccttccttccctccttccctccttccttccttcccccttccttccttccttcccttcttccttcctccctccttcttttttctttctttctttctttctctctctctctttctttctctctttccttcctactttcctttcttccttccttcattcctccctccctccctccctcttctttctttctctctatttccttccttccttccctccctctttctttctttctttctttctttctttctttctttctttctttctgtctgtctgtctgtctgtctgtctgtctttctttctttctgtctttctttctttctctctttccccctccctcctcctccctccctctctcctctctctttctctcattctctttctccccctccctcccttcctccttccatctgtctctctttctttctgtatttcatgtaagacaggattttctatattgctcaggctagtctcaaacttctggcctcaagtagtccttctgcctcagcatcctgag

SEQ ID NO: 89624 - DNA, 510 bp, Homo sapiens
taaatcaagagatggagaaataaagaaatctgagaggtggagaaattaatagtagtcccacaaccaatgaattaattgataaatgtttactaatctcctacttttgagccctgaacttcaaagagagtgaagggaaatatgatagaacagactcattcaggatcactttttactcaatttaaaatgcaggcaagtgaaaacagaaactgggaggaaaaagagttctcctctattctcccctaattcctttattgagaggagaacttgcatggatgttcttggattatccaaagcttgtttcctccattctagacattatcatgaaaggcacgaactggtggtttattttgccttcttaatgttaaaaaaaatrgaaaattttacactgatactcagatttacactgatactctgttcttgaaaaatatctagcaaccgtaggtcaaaatttctgcatagcaataattttttgaaactaaacagtggctgcaacctttaaacagggtacat

SEQ ID NO: 89625 - DNA, 1116 bp, Homo sapiens
aggggcagacaggtagtttgcctcacctggaatcagaggctcccctatcagccttatcttcaagaagctgataggaatgctttgtttttcttttgtgtgctggacaaggagaggccccggaaggtctgtcatgtagattgacagtttccttttgtaagactggccaactgaggccaaagttgaaaatgtcagtaaaaacaaatagtattgcaaaagggccttatgcatttccttctctatcctctcattgccccatcagccgagtgctgcatgagtggcttaagagaacaccattaggcttgaaaaagagtgaactgcaaaaacacattttctccatttcacctagttgttattttccccccatgtgctaatgatgcaaacaaaagaaaataaaaataatagacattggcttaygtcttttcaagttccatttcttgtttcttcttttactattttcagaatcaaggaagataatacagaattttaacagttttcttacctcattttgcatttgttagacattgtttcctcgtggttgagacctgcttcctgctcaggaaagagaaagcagtggttgcccatacaattcaataataatgactctttgtcattatttaacagttgtttaggtgtgcctctctcctttcttcagttgcactaatgatagaaaaggatccttgggcacatagtaaagtggttcaaatcatgggtttgggtggtaaacaggtctgagatagatttcctgctctgccacttaagagctgggtgacgttggggagtcatttaatttttctgagcttcacccataaataatacatacatacataaaactcacctttcaggtttctgaagatgatgcaacacagaatctcaaaggtactgggtacccagggacactgcagtaataggtcccctctcctattgctgtcagctcagaaatacagaacagagcaactgggattcagaaaggagactataggctctagatagaggtactcactcacttccttgggcaactcacttccctgagcctcaactttcttgttggtaaataagtggaatcttcctacccaccactagaactgtgcaaggaagagatggagctggttaatgcca

SEQ ID NO: 89626 - DNA, 745 bp, Homo sapiens
aagcatgatacttttctttcagagtttgttgatactgtgtargggtgtcaatcattggtacattcataccagattgcatggttttacaagatgaggaattatacagcaaatgaggtaaacgtatacattgtggattcctttataatactgttctatcaggaaagtaattgggcaaagaagagtggttagcaattgaggttctagagtcagaactgggctcagatcctgatgttttcatttcctagctttgtgaccttggacaagttatttcacctttgtaagcctttgtcatctttaaaatagagataataactatattcaaagcctctgaaaatcaaaagttttttttttaactcatttggcagcaaaacttgatgtggaataatgacaatttatttgttgtctttatctcatttaatgtgcatctttatacattttgtggcagaaatattgatatatttgattaatgtatgctactccagaatctactcagggaaaatgctagatagctttcatttatacctccagattcactgtccacctttctccatctagctatgtgtccaggagtctgatagtatagattgtaagtatgcagtctgtgtttacaggctctctgctatctgctttcccattagctctggccgatggaagtcactggcgagatattggagtgaggcagcagagtgagagaggtatttaattcacctagttctcttcatgagtggtcaccgtagtgtgtctc

SEQ ID NO: 89627 - DNA, 745 bp, Homo sapiens
aagcatgatacttttctttcagagtttgttgatactgtgtaagggtgtcaatcattggtacattcataccagattgcatggttttacaagatgaggaattatacagcaaatgaggtaaacgtatacattgtggattcctttataatactgttctatcaggaaagtaattgggcaaagaagartggttagcaattgaggttctagagtcagaactgggctcagatcctgatgttttcatttcctagctttgtgaccttggacaagttatttcacctttgtaagcctttgtcatctttaaaatagagataataactatattcaaagcctctgaaaatcaaaagttttttttttaactcatttggcagcaaaacttgatgtggaataatgacaatttatttgttgtctttatctcatttaatgtgcatctttatacattttgtggcagaaatattgatatatttgattaatgtatgctactccagaatctactcagggaaaatgctagatagctttcatttatacctccagattcactgtccacctttctccatctagctatgtgtccaggagtctgatagtatagattgtaagtatgcagtctgtgtttacaggctctctgctatctgctttcccattagctctggccgatggaagtcactggcgagatattggagtgaggcagcagagtgagagaggtatttaattcacctagttctcttcatgagtggtcaccgtagtgtgtctc

SEQ ID NO: 89628 - DNA, 1131 bp, Homo sapiens
ataatctgagatatttataaaggaaaatatcatcttgctaagtggttatatctcagccaaaaataaatttacatttgttataaaaactgaaaatttatgtggtttatgtgtagaaggcttatagaatcagtatgattttcattcagattggtgtgtgattttttttatcagtagaaaattttatgataacaacatgaaccactgctgggaattcaatggaccgtaaacataggcacataacagacatggaaacacgtacattgtgaaggataagtagatatttatcaaattatatatatatgatacatatacatataagcatatatgtatatatatgtaaaacattgtaaccatggccaccacctttagtaaaggtacatggtgatatgagtgcttataatagggaattaccttgtcagggaagttaaggaaggctttcctgaacaactgatgcttgaactccaacctgtgggatgatgtgttagaactggctagtgagtgggaatatccttacaaggaggggccctgtakcagaaggaaaagcagatgaaaatattgtcttcatacttagaatttaattttaaattttactgatgtttgtgttaatatccttgtctaatactattcttttacataagctttaatggagaccacccaattggttccttcagaaaatgtatgttaattaatgctagggacctatagtagatgtcataaaccttatgattaaacattacaactgtgtaaaattacatcttagtaacctcagtcatttgtattatattaaaatgagaaaatgcacagtgatagaagtcagattaaaggtcatgtaactaaaattgtatgctgaatgttgaggaaagaaaatttggatgttctctgttcatttgggttattcaaaataacatgtagtcctgcatacatttaaaaaattaaattagacaatttatcagttgtctaatttaaaatgtttggattcatcttcctatctgataacaattttttgtttttatattcagtactttgaaaaatcacagacttcacgttaacacttaagcattctaaaaaggcacaaaagcatgtgaatatagaatttaagttttgaggattgttcttgtcatttcctgcaca

SEQ ID NO: 89629 - DNA, 707 bp, Homo sapiens
attcaaggactgatagagttgtggttattggtgcttgtgaaatgacatgttggtatggttcatagtcatttctgatgaaacctttagaacctgacatggtctaccatgcatatctatgtatttctacatacgcatatctacgtcaaacagataatagtcagtattaaggaaacctaaaagaacatacatatagaaactacattaatcaaagtaagcagtagttacaagcttaacattacaatcaaaagtactgggtactaactccacaactgtaggcatatgaaagacaggctgttaacccagctatattttaccttatagagattgattcaagtatatacaaataatagtgctcaaagtccatatagtaggctcatgcctgtaatcttagcacactggaaggtcaaggtgggtggaytgcttgagcctaggagttggagaccagcctggccaagatggtgaaaccctgtctctactaaaaatacaaaaagtagttgggcgtggtggcatgcgcctttagtcccagctactcaggaggctgaggcacgagaatcgcttcaacacaggaggcggaggttgcagtgagctgacattgcgccactgcattccagcctgggtgacagagcgagacttggtctcaaaaacaaacaaacaaacaaaaaccaataaaacaaagttcatagagtagaagtcagaggttaggggaa

SEQ ID NO: 89630 - DNA, 2015 bp, Homo sapiens
  misc_feature (1)...(2015): n = A,T,C or G
gcatccctcatgagcaccttgaagccctgcaaccatgcacggcctccatgcttgggcgtgtgaccactggcctatcatggtcactgctagatgtgctggcctctccctgccactggctctcaaatagcatccccaccggtgcttcctgcacccacaagtgcccacctgagcccagtagatctggagctgcaaggggacataaaatgggcactgctgatggcgatggcactggctagaacccagatggaatccagacgaggaggagacttctggtgccatgggggcaggtcagtacagatgcggaaggccaggcatccggccaagtgcctggccaggcagccaggatggtgacatatgccccaacaccagggactcccgggcatggtggtgtcatgtagcacccacaggaatgcaattcatagctgccagaatcaaagggtctcccagaccagcccccactttgcagccagagtatctgggagggcaagggacctgccaggtcacatgtcatctcagtgggacacagggtctgatctaaaagcactgagaacagagtacagtgagccttgagcctcccctgctcatggcacacatgggacacagccagggccagggaaacagcacgcacaatggtgggcgccccagcactcccagttcaagccccagagcactgtgaaggggatggcgcttacccacgtatttctcgacattgcttacatggaacgtgggggccgggacagccaagcccagcccgtcttttttagggatgaggatgggctcggtgaagctgtgctcctccatgtggcccagcgtgagctgactgtccggcacatgggccactatgtctttaacactgcaagaaaacacaggtcagagaccacgtcaggactgaggcctcctgcaccagaacaagtgtggacagggcctcagtgctggagaggcgagcctgtgtctggccacccacctccacagtcacaggaggaggcctggctgcggtgccgcatctgggaccatagggcagccagggcagatgcagtgctgaatccagaaccccacgtgtcagatggagacgctgagcctgtccaccccacgtacttcctcacactgcccaggtcacaccttctcctggggcaccaggtacggacatcttagactttttacatgtgcatgtgagcacatgtgcacacatctctagtggactatgtgcccatgcaacaatgcatgcacacacatgcatgcacacacatatgtacatacacgtgcacacacccctactggacttcaagtacctgggggagggacgcaatctcctctccacactgttatgtccctagctcccagccttgtattcgaccaggcagagaagagcagctgggataagggaggccactggggcacgcagatgcctccttgggggctgcttcgctgagtctgacacaggctgacccttgagcataaagggactgaattcaagagcagagccaggcagggcccgtatggtgcccatccttcacagacnaaggcggggtcggggagtgcacaggacaggggcctcaaaaaaccatgtcaccctcctgagtctcagtggttgtggggacaaagtaagctgacaaccccctagtgacaatgcctgtctgtgagcaggatctgcttccaacaccaaggagcagggctgggtggagctgggaccttttatttgcaaagaactttcgcattatgttcaatcttcttgcccgcaatcaagtggacgttatggaaatttggcaaaatctgagagtcaaggccagaaaccaggacttttgagggaagcatggggccccacagatgagcaataaaaggggttcaaatctgtctttcccaatccttttctagctgtgtgaccttgagcaaaccagtctaaataaatgtncctcatctttaataaaaaagctcgcacggccttgtkgggtggctgtgggatgtaagttggcacatgcacactgtctgcgccagactcctctgggcctttcctcagg

SEQ ID NO: 89631 - DNA, 738 bp, Homo sapiens
gtttccaaaacaccacgaaaaggcatcttttgctttctcccatctggccattaaaaaaaaaaatagttatttaccaaagaagattctttttgtaatacaatcaatcacttcctcctgtgtttagggttcaaatctagaagtccatatgtcagtctagcttagagcaaaatgtagctttcttcaccttggactagaacaacctatgagagaaagatggtgcccaatgggccagcacacagctgctttctaaattgacagccctgagcttctccatggacagtgttccaaaactaactgtggctgttaggataaagagggcagtttctcagcttcagtgcctttaaggttatttcaactttccacctctgttaactacgctgcagaaacttttgacactgaactctccttaatatccataagccagagatgttcattagaaaaatttctcactcctcatcagacagctgaagacctgagtcctttgtcttcccctattctggagatcacattgaagggatttttgggctacctgaaagtgtttatgacagacagactcttggattyaggcttaggacaagcaaacctttcatatgagtccttaaaaacagacagtgctctgtttgtaactttgaactccattctagtacaaacatgcttggcaactagtgccggagggttaaccagagagttttcttcctggcaaattgctctgccgccaccatgggtattaacactcca

SEQ ID NO: 89632 - DNA, 738 bp, Homo sapiens
gtttccaaaacaccacgaaaaggcatcttttgctttctcccatctggccattaaaaaaaaaaatagttatttaccaaagaagattctttttgtaatacaatcaatcacttcctcctgtgtttagggttcaaatctagaagtccatatgtcagtctagcttagagcaaaatgtagctttcttcaccttggactagaacaacctatgagagaaagatggtgcccaatgggccagcacacagctgctttctaaattgacagccctgagcttctccatggacagtgttccaaaactaactgtggctgttaggataaagagggcagtttctcagcttcagtgcctttaaggttatttcaactttccacctctgttaactacgctgcagaaacttttgacactgaactctccttaatatccataagccagagatgttcattagaaaaatttctcactcctcatcagacagctgaagacctgagtcctttgtcttcccctattctggagatcacattgaagggatttttgggctacctgaaagtgtttatgacagacagactcttggattcaggcttaggacaagcaaacctttcatatgagtccttaaaaacagacagtgctctgtttgtaactttgaacyccattctagtacaaacatgcttggcaactagtgccggagggttaaccagagagttttcttcctggcaaattgctctgccgccaccatgggtattaacactcca

SEQ ID NO: 89633 - DNA, 744 bp, Homo sapiens
tattctatgattcagaaacatgaattagggagcttgtctctcttcctcccttaggcactccagttccctcattgccctgtccatttttccttgaaaacaaatcggtgtggtcagtaagtccaatatcagtggcagcaggcaagggcagtaaggcttccttgtagtctgtagctttccagacctctgaaggattctgtttaaacctcttctaggaatcataaaatcttctgcaatctggactcatcagttatagaaccctgtgagtacctttcagcgagaggactcctcttggtttgaggctaggtgtggaggtaactgtgggcagcaggtggggggattatttgtgtatcttggggtacagcaatttatacatacttctttcccccaaccacacagcaaactctttgatggcaagaattgtcttcctttcgatccccatttcttagtctcatatctaatacttaactgatgctcagtaattatttatttagttaattgtgagctgcaagcaataaaccttatgaaaacaaggcacatgcctttatctgtgagagcttcattaattcmctactcagtttatatcttgaatataaatttatgcaatttatatcagaaataaggctcagaaataacactgtcttgggcactaccgtctttagagtttttctgtttttgctgctccctcctcatgaccttagacttggacaggagttcttgctgttggggtccagatctcccagatga

SEQ ID NO: 89634 - DNA, 960 bp, Homo sapiens
tagtgcttcatgatttaaggtatttatttaaatactcataaaakacaaactaaggaaaaaaatgcttacagtcatctgggagcaaaccttcacgttgtctgaaagtcagctttgtagtgtccataagaaaagcaggccaaagcatcaacacaaatgccaactgcacaggcagcaaagagccagatgctgttggcaaaacatgctccagagtgtggcatctgggtccaataatggccatacagagccccatctgtagctaaagctgttgactctgctttgggggaagaaaaatcagaaataaagaaggcagttaaattttaaaccatgccaggaatagcagaaggcaggttgcagtcagcattcaaattacatcgctagcccaatttgctttttaatgtcttgaaactgtgtaaacactaaactatgttaactccagttgtttagagagatgagcacatataggtagttcagtaacttaggacacacaaatcagctaaatagatttgatattccatcagacgttcatttatctaatttttttctcaaggaatataagcatatggtccatgaaatgcaattctaatttgatctattaaaatatgcaattttaagtgttcattatggtatataattttcttcaaatagcataaaatttaagactcttctttacaatgtttataatattttattagaataactcttcacaaagttaaataggatattcatgtatccttcactgagactccttaaagttttgatcagtggaaatttgtgggaaagctacaaagaaccttaagctttaatcaaataaagtttttcaaaattataaagagatgatcaaaataatctctttttagtgttcttcatttgttgtacatataaatatataaaatggaattagttgatatccagatgattaaaaagattcatcatttataagatgccacactaatcttatct

SEQ ID NO: 89635 - DNA, 1626 bp, Homo sapiens
ttttttttttttttttttttttgagacggagtctcgctctgtcacccaggctggagtgcagtggcgggatctcggctcactgcgagctctgcctcccgggttcacgccattctcctgcctcagcctcccaagcagctgggaccacaggcgtccgccactacgcccggctaattttttgtatttttagtagagacggggtttcaccgttttagccgggatggtctcgatctcctgacctcgtgatccgcccgcctcggcctcccaaagtgctgggattacaggcgtgagccactgcgcctggcccttgaaaaaatcttaaattcctcagccacagcatgttacataccttttccagtgttgtatgcatggttttatttacaagatttttgaaaagacaaaaaaataaagtcctgacaaacggatcaatgaatgctaggggtttgaaggygggggcagggcgtgtctataaagagacagcacgaggaagatttttgggatggttgaactgttctggatcttgattgtggtgatgattacgtgaatctatacatgtgttaaaatgtatagaagtgtataccaaaaaatgtcaagtttactgcctgataatctaaaacaaaattttaaaaatatttaaacagtttaaaaggcttatttttatgaagaaacatgaagggtccatggtttccaaaggtgggaattttcctggaacagatgccatgtatttaaggaataagaaagaaagtttagaaaagttttgtctttttcctaagaagagcaaagaaacaacaatgaataccaacatactgctcttccccttgagtaccactcaaccttcatcaattaattttagatgttcagatatatgagtgacgttttttgttgcaaggatcaatttttctacctttttccctagacaaaacaaattggaggaagccctgttattttctggacaattcacagatgccctacaggctctcattgattggttatatagagttgaaccccagctggcagaagaccagcctgttcatggagacattgatttggtgatgaatctgatcgataatcacaaggtattgttatctgggacattttattttatcttgtttgattattctgagtgtacaggaaatgtaaaccatttaaattagccttttaaaatcagaagactatagatcatactacataacagtctttattgttgaaatatgtgtccgtttgagcagaacctggaagcaaactttaaaagtgatggggaagtattatttagtgtcagtgaaatacttttgcttttaattaccagatctaaaacctttttagaacttggaaagtgatttcattctctggtgctttaaaacagatttcaagaatgttttactatctttagttatgcacttaaacaattatgtaataaaatttaaaatcattcattcagtgacctgacactaagtcattgcataagtatgtagatttgtgacatgacccatggtggtcatgaccaactgcttttaaaaataccgaaccaaaactgttttaaccttgccccttgaattatagcagtttatgagtcagcagcttatgctataagggatttgattattatttacttcgagaaaactggcttcc

SEQ ID NO: 89636 - DNA, 1626 bp, Homo sapiens
ttttttttttttttttttttttgagacggagtctcgctctgtcacccaggctggagtgcagtggcgggatctcggctcactgcgagctctgcctcccgggttcacgccattctcctgcctcagcctcccaagcagctgggaccacaggcgtccgccactacgcccggctaattttttgtatttttagtagagacggggtttcaccgttttagccgggatggtctcgatctcctgacctcgtgatccgcccgcctcggcctcccaaagtgctgggattacaggcgtgagccactgcgcctggcccttgaaaaaatcttaaattcctcagccacagcatgttacataccttttccagtgttgtatgcatggttttatttacaagatttttgaaaagacaaaaaaataaagtcctgacaaacggatcaatgaatgctaggggtttgaaggcgggggcagggcgtgtctataaagagacagcacgaggaagatttttgggatggttgamctgttctggatcttgattgtggtgatgattacgtgaatctatacatgtgttaaaatgtatagaagtgtataccaaaaaatgtcaagtttactgcctgataatctaaaacaaaattttaaaaatatttaaacagtttaaaaggcttatttttatgaagaaacatgaagggtccatggtttccaaaggtgggaattttcctggaacagatgccatgtatttaaggaataagaaagaaagtttagaaaagttttgtctttttcctaagaagagcaaagaaacaacaatgaataccaacatactgctcttccccttgagtaccactcaaccttcatcaattaattttagatgttcagatatatgagtgacgttttttgttgcaaggatcaatttttctacctttttccctagacaaaacaaattggaggaagccctgttattttctggacaattcacagatgccctacaggctctcattgattggttatatagagttgaaccccagctggcagaagaccagcctgttcatggagacattgatttggtgatgaatctgatcgataatcacaaggtattgttatctgggacattttattttatcttgtttgattattctgagtgtacaggaaatgtaaaccatttaaattagccttttaaaatcagaagactatagatcatactacataacagtctttattgttgaaatatgtgtccgtttgagcagaacctggaagcaaactttaaaagtgatggggaagtattatttagtgtcagtgaaatacttttgcttttaattaccagatctaaaacctttttagaacttggaaagtgatttcattctctggtgctttaaaacagatttcaagaatgttttactatctttagttatgcacttaaacaattatgtaataaaatttaaaatcattcattcagtgacctgacactaagtcattgcataagtatgtagatttgtgacatgacccatggtggtcatgaccaactgcttttaaaaataccgaaccaaaactgttttaaccttgccccttgaattatagcagtttatgagtcagcagcttatgctataagggatttgattattatttacttcgagaaaactggcttcc

SEQ ID NO: 89637 - DNA, 582 bp, Homo sapiens
atttagctagatcagcattgtcagatcttgggcaaatcatgtgcctcctcaggctcttgatttttcacattttcaaggttatgattaggtgagtgtgaggattaattgtggttatgtgtgtaaaagtattttgaaaacttgaacattctatgtatacaaatcacatatagatactacacttaagtgtatgtatagtatacacatatgtagataaatgactattaatattaataagagtaactcatgtatcagatgattataacattttaagctaataaagggaaaatcagttgtttaaaaatatacatgtaatttgtttcaatgcatttcctscaaatagttctctggctgtgttttcattgaggaatattatattacattccctatgttcctcaagatacttgtttattttttttaactttgggagaattttttaaatgttgtgatctggaaaaagtgcaatgattgtataataaaatctcatacttatgattgttttagacattctctacaaactcatataaagattgtaaaaaaaaaacttctccaaatgttgcctatgtattttgtctgtaaagactg

SEQ ID NO: 89638 - DNA, 1370 bp, Homo sapiens
atcataagtaaacattctgtcaggtataataattattcagcacttattataaacaaagtatcataccagtacttcagatgtttataattatacatgctttattaatgaaaatggctatattgagttttatatatctacgctcacaagtattattttgccagaaaagcacattttaatattttcaacaaaaagactattgtttggtataattttaatataaacttcaaaccattgcatttttataaataaaggctatcttataacttgccactccatttaataggtataaattggtcactaacaaatcacagtgtatatgactctttgtaactacctggcagaaaaaaacttaatcctgctgcctctaagtgtttagtcacttcgagattaaagtttagattttggtagatatttagttaaaaccaggtactgtttttaggtactgtttgaggccagcctagatgaccgtgtcatctcagttacaattcaaagctccttcctgtaattctttccctcctagtatcatgtctattttcaccctgctcagccttacaggagtggctacagggatactgttttcttgctggcatatatgaaaagggaacgagctgtatatctggtcaataatatctttttgccagttctagaaagtgtagtggaaaaacatgggcaaggcagctaatggtactggcaagacagtggctaaagcaacagcccacagtctagtacagataaagaatgaaatgaaaacagacatgatgaacagggagaaaatgaagaggctaaaacactaaagaaactgaagaattggtagaatttgaaaaagggagaagtgaaagtttaagacattcattcatttaatcaacaagtattaataccttctaacatggtttagatctgtggccccacccaaatctcttgtcagatggtaatccccagtgttggaggtggggcctggtgggaggtgactggatcatgagggtggtttctaatggtttagcaccatccccctcttggtactgaatagtgagttagttctcaggagctccggttgtttaaaactgtgtagcacctcccccttctctttcttcctcctggccatgtgaagctcctcactctcactttgtgttccatcgtgagtaaaagctccctgaggcctccccagaagcagaagccgatgtgcttcttgtacaacctgcagaaccatgaacgaattaaacctcttttcttyataaattacccagtctcaggcatttctttatagcagtgcaagaatggactaatacatcttccatgtggctggaagttctggagtttaagattcagaggaaatgtgtatgagtagcttgattaaagataaagatgacaca

SEQ ID NO: 89639 - DNA, 2135 bp, Homo sapiens
aaaatccatgtccttcttatatatgacactcagccttatgagttataaaaatctgtatatagaaaatatgaaatggcgaatcttcatacctctcctcaatctattgaacattctaattatactaatattcatttggggctgctgttattataattgttattgtttgaggaaacgaaacgggatattggatttaattatttcagtattgtaatgagagagccaaacttgaggacacaaagcaaagaaggataacatatacaaatgatccgaacagagcaggcatattgttattctctattaccacatgagcaattacataatacttacacctggaaaaccaagagcccccatacttcccatacctcatgatgttcccttgggtgttaggaaatgatgtgttatgctgtaaactctttcttgaatgtagacctttgatttcctaatcttctttaggaaatcaaaaagagattctacgacaaacatttatccattttgtggatactgagctttatttcttattttgttagtagcccaaaatattttgaacacagaattagtaactcatcacctctcaaagagtcaggcatatgaaagaagtatagcagtctgtccgatagggctctttttaagttggtaatttggttacagttgcaaagaactttctatataaaccagcagctagtcagtggctttggtcatactgattcaataattttgactaggttactgaattattatttgctcaaattcagcaggttatattgaaactcctttgtgagtaaatacacagcttttgaaaacaggttaatagtgaatttggtaaatataataattgctatatttatataggtgcaatgttaaaagaaaataatggttcttaaagatcaagattgagtactgagtagaaaagttttatttccaacctggaaaccaatccagcacagtataaataagctctagagctaggagatagtacttaggaaggaggaatggaacaggtttttaaaagccaaaacccatctgcctttcttcctgaataaagcaatctaaaagccattaggtggggccaaacaaggctgtcatctgtgcaattttgagagtgagagaagagccatgcagagatctgacagactattgggatccatgcatggggacaaggacataatggtactgggtactgatgccacatgctgggccatttggtatcataatttgatgatcaaattatggccatttggtatcaaattatgataccaaatggcccagcatgtggtatccgtacccaagtgggcaaacaggctggaaygtgtggtgggtggacaagggataaaacgttagaagcagtgattggtgattacttatacagagagcagattaagcaaacaagtaagtatatttaagataacagaagtcataattttcactgtcagaaaaggcagtcacagatatgaaaaggcagaacattagaatgaacactgtggttttatattgaaattaaagttattggcataaactctaatcattttcaatatataaagagatggagtagaggtagataaaagtttaggtacgtgtgagtttgcacatacatatatttcctatctttgtctgggaacggtgctacctaatagcagtgagcatacctgcacccagatcttgctttctaaatgccattgtccactggcagaaagaagggcttattagaaaaaatggccaatttcaaaactgagatggggttaaaaaaaaaacaagatgagcctggaacattgcgttacgctagaaagcaaagaagtactcaaataatgatgggaacatgtcaagagaatataggagccagtttgaaggagcttcactgccaaattaggtataatttgagcatcaaaataaataacgataataataaatttaacccattgaatattcatgagcccatagtgatataaataaataaatgaataaattaatcagagagggaaaaatctcttttttaacagtagaagatcaactagtgaaaatgtagacataatattggaagtgaaaatcacctttttattgccatgatattaataattatttcagccccaattttaaagctggtggagaaagttttcaaaacggatctttccacagtatta

SEQ ID NO: 89640 - DNA, 2135 bp, Homo sapiens
aaaatccatgtccttcttatatatgacactcagccttatgagttataaaaatctgtatatagaaaatatgaaatggcgaatcttcatacctctcctcaatctattgaacattctaattatactaatattcatttggggctgctgttattataattgttattgtttgaggaaacgaaacgggatattggatttaattatttcagtattgtaatgagagagccaaacttgaggacacaaagcaaagaaggataacatatacaaatgatccgaacagagcaggcatattgttattctctattaccacatgagcaattacataatacttacacctggaaaaccaagagcccccatacttcccatacctcatgatgttcccttgggtgttaggaaatgatgtgttatgctgtaaactctttcttgaatgtagacctttgatttcctaatcttctttaggaaatcaaaaagagattctacgacaaacatttatccattttgtggatactgagctttatttcttattttgttagtagcccaaaatattttgaacacagaattagtaactcatcacctctcaaagagtcaggcatatgaaagaagtatagcagtctgtccgatagggctctttttaagttggtaatttggttacagttgcaaagaactttctatataaaccagcagctagtcagtggctttggtcatactgattcaataattttgactaggttactgaattattatttgctcaaattcagcaggttatattgaaactcctttgtgagtaaatacacagcttttgaaaacaggttaatagtgaatttggtaaatataataattgctatatttatataggtgcaatgttaaaagaaaataatggttcttaaagatcaagattgagtactgagtagaaaagttttatttccaacctggaaaccaatccagcacagtataaataagctctagagctaggagatagtacttaggaaggaggaatggaacaggtttttaaaagccaaaacccatctgcctttcttcctgaataaagcaatctaaaagccattaggtggggccaaacaaggctgtcatctgtgcaattttgagagtgagagaagagccatgcagagatctgacagactattgggatccatgcatggggacaaggacataatggtactgggtactgatgccacatgctgggccatttggtatcataatttgatgatcaaattatggccatttggtatcaaattatgataccaaatggcccagcatgtggtatccgtacccaagtgggcaaacaggctggaacgtgtggtgggtggacaagggataaaacgttagaagcagkgattggtgattacttatacagagagcagattaagcaaacaagtaagtatatttaagataacagaagtcataattttcactgtcagaaaaggcagtcacagatatgaaaaggcagaacattagaatgaacactgtggttttatattgaaattaaagttattggcataaactctaatcattttcaatatataaagagatggagtagaggtagataaaagtttaggtacgtgtgagtttgcacatacatatatttcctatctttgtctgggaacggtgctacctaatagcagtgagcatacctgcacccagatcttgctttctaaatgccattgtccactggcagaaagaagggcttattagaaaaaatggccaatttcaaaactgagatggggttaaaaaaaaaacaagatgagcctggaacattgcgttacgctagaaagcaaagaagtactcaaataatgatgggaacatgtcaagagaatataggagccagtttgaaggagcttcactgccaaattaggtataatttgagcatcaaaataaataacgataataataaatttaacccattgaatattcatgagcccatagtgatataaataaataaatgaataaattaatcagagagggaaaaatctcttttttaacagtagaagatcaactagtgaaaatgtagacataatattggaagtgaaaatcacctttttattgccatgatattaataattatttcagccccaattttaaagctggtggagaaagttttcaaaacggatctttccacagtatta

SEQ ID NO: 89641 - DNA, 2135 bp, Homo sapiens
aaaatccatgtccttcttatatatgacactcagccttatgagttataaaaatctgtatatagaaaatatgaaatggcgaatcttcatacctctcctcaatctattgaacattctaattatactaatattcatttggggctgctgttattataattgttattgtttgaggaaacgaaacgggatattggatttaattatttcagtattgtaatgagagagccaaacttgaggacacaaagcaaagaaggataacatatacaaatgatccgaacagagcaggcatattgttattctctattaccacatgagcaattacataatacttacacctggaaaaccaagagcccccatacttcccatacctcatgatgttcccttgggtgttaggaaatgatgtgttatgctgtaaactctttcttgaatgtagacctttgatttcctaatcttctttaggaaatcaaaaagagattctacgacaaacatttatccattttgtggatactgagctttatttcttattttgttagtagcccaaaatattttgaacacagaattagtaactcatcacctctcaaagagtcaggcatatgaaagaagtatagcagtctgtccgatagggctctttttaagttggtaatttggttacagttgcaaagaactttctatataaaccagcagctagtcagtggctttggtcatactgattcaataattttgactaggttactgaattattatttgctcaaattcagcaggttatattgaaactcctttgtgagtaaatacacagcttttgaaaacaggttaatagtgaatttggtaaatataataattgctatatttatataggtgcaatgttaaaagaaaataatggttcttaaagatcaagattgagtactgagtagaaaagttttatttccaacctggaaaccaatccagcacagtataaataagctctagagctaggagatagtacttaggaaggaggaatggaacaggtttttaaaagccaaaacccatctgcctttcttcctgaataaagcaatctaaaagccattaggtggggccaaacaaggctgtcatctgtgcaattttgagagtgagagaagagccatgcagagatctgacagactattgggatccatgcatggggacaaggacataatggtactgggtactgatgccacatgctgggccatttggtatcataatttgatgatcaaattatggccatttggtatcaaattatgataccaaatggcccagcatgtggtatccgtacccaagtgggcaaacaggctggaacgtgtggtgggtggacaagggataaaacgttagaagcagtgattggtgattacttatacagagagmagattaagcaaacaagtaagtatatttaagataacagaagtcataattttcactgtcagaaaaggcagtcacagatatgaaaaggcagaacattagaatgaacactgtggttttatattgaaattaaagttattggcataaactctaatcattttcaatatataaagagatggagtagaggtagataaaagtttaggtacgtgtgagtttgcacatacatatatttcctatctttgtctgggaacggtgctacctaatagcagtgagcatacctgcacccagatcttgctttctaaatgccattgtccactggcagaaagaagggcttattagaaaaaatggccaatttcaaaactgagatggggttaaaaaaaaaacaagatgagcctggaacattgcgttacgctagaaagcaaagaagtactcaaataatgatgggaacatgtcaagagaatataggagccagtttgaaggagcttcactgccaaattaggtataatttgagcatcaaaataaataacgataataataaatttaacccattgaatattcatgagcccatagtgatataaataaataaatgaataaattaatcagagagggaaaaatctcttttttaacagtagaagatcaactagtgaaaatgtagacataatattggaagtgaaaatcacctttttattgccatgatattaataattatttcagccccaattttaaagctggtggagaaagttttcaaaacggatctttccacagtatta

SEQ ID NO: 89642 - DNA, 2135 bp, Homo sapiens
aaaatccatgtccttcttatatatgacactcagccttatgagttataaaaatctgtatatagaaaatatgaaatggcgaatcttcatacctctcctcaatctattgaacattctaattatactaatattcatttggggctgctgttattataattgttattgtttgaggaaacgaaacgggatattggatttaattatttcagtattgtaatgagagagccaaacttgaggacacaaagcaaagaaggataacatatacaaatgatccgaacagagcaggcatattgttattctctattaccacatgagcaattacataatacttacacctggaaaaccaagagcccccatacttcccatacctcatgatgttcccttgggtgttaggaaatgatgtgttatgctgtaaactctttcttgaatgtagacctttgatttcctaatcttctttaggaaatcaaaaagagattctacgacaaacatttatccattttgtggatactgagctttatttcttattttgttagtagcccaaaatattttgaacacagaattagtaactcatcacctctcaaagagtcaggcatatgaaagaagtatagcagtctgtccgatagggctctttttaagttggtaatttggttacagttgcaaagaactttctatataaaccagcagctagtcagtggctttggtcatactgattcaataattttgactaggttactgaattattatttgctcaaattcagcaggttatattgaaactcctttgtgagtaaatacacagcttttgaaaacaggttaatagtgaatttggtaaatataataattgctatatttatataggtgcaatgttaaaagaaaataatggttcttaaagatcaagattgagtactgagtagaaaagttttatttccaacctggaaaccaatccagcacagtataaataagctctagagctaggagatagtacttaggaaggaggaatggaacaggtttttaaaagccaaaacccatctgcctttcttcctgaataaagcaatctaaaagccattaggtggggccaaacaaggctgtcatctgtgcaattttgagagtgagagaagagccatgcagagatctgacagactattgggatccatgcatggggacaaggacataatggtactgggtactgatgccacatgctgggccatttggtatcataatttgatgatcaaattatggccatttggtatcaaattatgataccaaatggcccagcatgtggtatccgtacccaagtgggcaaacaggctggaacgtgtggtgggtggacaagggataaaacgttagaagcagtgattggtgattacttatacagagagcagattaagcaaacaagtaagtatatttaagataacagaagtcataattttcactgtcagaaaaggcagtcacagatatgaaaaggcagaacattagaatgaacactgtggttttatattgaaattaaagttattggcataaactctaatcattttcaatatataaagagatggagtagaggtagatawaagtttaggtacgtgtgagtttgcacatacatatatttcctatctttgtctgggaacggtgctacctaatagcagtgagcatacctgcacccagatcttgctttctaaatgccattgtccactggcagaaagaagggcttattagaaaaaatggccaatttcaaaactgagatggggttaaaaaaaaaacaagatgagcctggaacattgcgttacgctagaaagcaaagaagtactcaaataatgatgggaacatgtcaagagaatataggagccagtttgaaggagcttcactgccaaattaggtataatttgagcatcaaaataaataacgataataataaatttaacccattgaatattcatgagcccatagtgatataaataaataaatgaataaattaatcagagagggaaaaatctcttttttaacagtagaagatcaactagtgaaaatgtagacataatattggaagtgaaaatcacctttttattgccatgatattaataattatttcagccccaattttaaagctggtggagaaagttttcaaaacggatctttccacagtatta

SEQ ID NO: 89643 - DNA, 1778 bp, Homo sapiens
gggaaagcagacaattcagcatgccctttaagagtaggcatttagcaggtgtggcggcgggtgcctgtagtcccagctactcgggatgctgaggcaggagaatcgcttgaactcgggaggcggagattgcagtgagctgagatggcaccactgcacaccatctttggcaacagaatgagactccgtctcaaaaaaaaaaaaaaaagtgggcatttaggctgggcttggtggcatgtgcctgtaatcccagtgctttgggaggatcccttgagcctaggagttccaaggctgcagtgagctatgatcaggccactgcaccccagcctgggtggcacagtgagacccagcttcaggaaaaaaagaaagaaaaaatagactttccatccaattgactgaattttaaaaatatctatagaagacatggaggtattgatagcataagtcaagaattctccattttggaatgctggrcattggggagataagagtgaggtgacagctagtgtgctgggaattgtacaaaaccagtactgacaacttctgacatcctacagtaaaacagaagcagtattcaattttcctatgttgccactaatatctgtgaattatctgttttgtcaaatagttgttcaattaggaagacagttgacaaatatttcccttttagatttgaatggcagatagcatttacattgaaagtggcatcataacgttttgacaaaatgatgtcaggagggtttatcccagttaaatttttctaagcttttttcctttccttcgagtgaaagcagctggaatgcagtctggctatgtgtcatattttttcatttcagcctactctatatgtttctgtacactactgaattgccagtgtcaggaaatatactggcaaaatccatttggcttaatttttaactatctttgcttttataggatttgagaacgattcttttaggctttgaataatgtaaactaccaaccaagatgccaaatttatcattgacgctttatttttttccttccaaaatgcaagtttttttttagatttgcaaactttctatggctcttgcaagggagatcatcagatgcagaaaattaactcatgtttttatagatgcaaaaaaaatggggggagagacttggaactttacaagtgctggcaattaaaatgatcacatagtttttatctttgcatttaaagtggagagttgaggcaactatctaagagggaggaaagtcttacatttacatcaattatttggtttaaaggcttgcttactcccctccttgaatgtcacggacaggggcttcctttggtcaaggccaagtttgcatttgctgagctataaagggaagtaagtactcagctatggtctttctattcagtgtccttcctacctttattgcaatatttcatctgtataataggaatatcagcaaagctcaaaataactggctgtattccttggaaacgcacagttagcagacatatagtattagaaagaaacctatacaagtgatgccttaaaatttagggtgctagtatttatttctgtttgttttgattctattccccatcacacaaaagagggaagatatttggcattaaaagtatctgactttggcctgtgtttgaataatccttcaggcattattgtaattaaggggactgccctttgattcttctctattactaccactttccaaatggagtttgttttgtttgtttgttttttgcatcacaaaagaaagtgaaagtgttggaaattagtaaggat

SEQ ID NO: 89644 - DNA, 1041 bp, Homo sapiens
ctttcaaactcattgatccttgaagctagttttctccccgccagaatagctataggccttaaagccagaatcatctcagcaagaaaagcttcccaataacattagtgagccaccacacaaagaaactggagtgttctatgctagataagtttcaagaggaaattgattttagatttctttgctgtaaaacttgaagtagtaagtagtctacacaagatattccaagggctgaaaatcttaaaacaaaatgcacaggaatacctaatcaatggattgttatcagggtgcctcctttaattcctctatacagagaggacctgggaacagcyggagctagctggcactgtatgtgggtggcaagaacctcatgcatgtattgattgggtgcccacagctctaaggcttctagaaggaggatatctctgaagagaaaagtttcacataaatgttcactcactcactcccatctgatcatctatagccccttttctttttcttccatctctcacaaatacatcttccgtctatggccacatagaagattcttgcttggagttcctgctcctgagccatgcatgccctatgcaggaaccaggcaaggcattctctggcctgaagaggaatacatgtgggtgagtctggtgaaagttcacctgtggcaagagggcaaaccaaatctcctgctcgacaaaagaggacataattgtttcctaaaatataatcattcatgtaccaccttcataatttttgctgtggccatgtaccaactgaaccacaggagaaataatatttgtaaaagatcaactcatagcatacaaattgtggaaccagactatctggatttgaattctggctctatcacttactaactggggcaacttgggctgcttattaacctctgtgcctctgttttctcatctattaagtggagataaaaatagcaactacttcataggattattatgagggttaaacagataagtacatgtcaacctaaaataggtctgtcacatagtaagcacagtggaaatgttagttaca

SEQ ID NO: 89645 - DNA, 759 bp, Homo sapiens
gtgtggaatgttgccataacaaaaacctaaaatgtctggcatcagctaagcaacgaggatgtgaatggcagggaaactgactttggaggctggaaagatgaagatctatgttatgcggtggcaaaacctttgataaaactgcctcttgctataactcaaaagacaggccaagtgcatgctgattctttagctctagggaaaagggttggaaaacagaacgttagtagcaatttccaaaaaaaatggatgaactcaggcaaggattggcttgttttcaagcaaaaatgaaatggaatgtcagaaactagaggtgttgaaaagttggaaaaattgactgcttccaaaaaaacagtaggaaatcagaatgaataagactcagccttgcagctaagaacaaatcaagggtgaagtcttcctatttagmcccgatgggttcaatacagtagacagagaatgaaacatgaagacttagaaagcaagaatataaatcaggcctaagaactatgactagggaagaaccttggatatgctttctagcacatgaagttgattggaagtaaatatattagaaatctactaggtttttgagggaattgtactgccaaagaaaccataaagttagactaaagcatacctttgattattaaaataggctttgggccaccaaagttatacagcctcctaggagggtgtattttccttcactcatattacaagtggccaaggaggaaaaggacaaagaagaaacttttacatagt

SEQ ID NO: 89646 - DNA, 523 bp, Homo sapiens
aataataattgggtgatctagataaataaatgttgaattattatcttatggttgaaaattaagagctgtatcccaacggctaaagaatttttcagatgagtaggaacattttactaaagaacaatatatattgtcaactctgtgataaaaacagtcatagaatggataacccaatttgcccatgcccttgcaactagtgggtccaagaatagttaatactgggaatctaaaaatgatcttctgtttgctaaaggcagttgatgggtgatgtgttgaatgcacagctgccttaggtatgttttagaaaagtgcttattctgattttctgaagagagattaaatggccttgccaaggagtttatattgcttagggtatgaaaaaggcaggctcgttagcatccctcaaaacaggcaaggattcaaataatatttattcaaaaaatgaatcaacctgtgaattaagacctcatcagcattggatatgtcctgccttattkgagattctagatcattagtttagaaa

SEQ ID NO: 89647 - DNA, 746 bp, Homo sapiens
attgtttctgtgggaaatgtttgggtgttcggagaaggtgcttgggggcatgtgcagctttgggaattgtctgcctgggtacgtggcagttaataattagtctagctgctgctttataaccatctactgaggcaatagtaagttggtaaaaagaaacacttacatgagccctagattaaaaagtaggtttgtgtcagtccttgaagtggtatgccttgcagacttttggggaaagagggtgggtagagggagcaacatatgcattccccaaccttccacttgtgtacatgggggcccagtccatgtgccacattgttgccttattcatgagtagggcctgtaggacatatgatcccatatagacacctgagaaggttgaagctcttgggtcatctcttgaacatttagcagctctcacttttctatccctcctacaaagaaaattttgacacctaccaaaaagtgaatcttttttattttgcaagatacactactcagatcctactactgtttatctcatgcatacaggatctttaggaagttgcaagctaatatgccttctgaggcttgggtagrtaatagacacagttgaagggagatgggcacaagacggcagggtgagggggctgaggtgaactagtaagtacctgctctgtccagaggagcagtggctgctcagatccagctgattgttgctaagcaagaatgcagactcagagggccacccagatttttgtgtgacatct

SEQ ID NO: 89648 - DNA, 1323 bp, Homo sapiens
ttttcattctctcctgaaatttcactgctatatcggtttattagctatcgaatatatcagaagccatcaaatttatcaataatgaatttgttcaaatttagcttaaaygaagaatcaaaaatcaaatccacttggaaacacatacgtgtgtctttatgtgtataaaaaggtgaagacatgtgtgcatgtgtgtgtctgtgtgtgtgtgtgaattggcagcatgcataagcctactgaatcttctccatcattttatttttttcttttacctacaccctttacaaaggaatcttcaggataactgtttccaattgtgctactataaattgatactcactagtatatgtcctcccaagtggcatgtctctacaaaaagacagaagttgccctaaaaggacaggtttcacagattaagcttctatccagaactacattgcccaatccacatgtcactatttaaataatttaaatttaaatgaatttaaattaaataaaatttcaaattcagttcttcagtcacactagctatatttctagtgttcattaggcacatgcagcttgcagctaccatattggaaagcaaagagaacatttcaacatcacaaggagttctgtcggagaaaaagaggaaggagaagagagagattttaaaataatgaataggcttgggtagattgaatcagacttctaatacaaagcctacagcactaaaaaaagggtggcagaagaggcacatctctgaagctgaaaagagttaaattgagaccagtttcattggtaagcagcaaaatgtaaatatagagaactttacaaccgaaggtagtagataaaatgattttggaaatttatagaaagtcatagattgatagtcagttgggctctcttgaaaccaaaaacacatgtccatgtgctatgttaatagaaatctttgaaggagctatgactttactttttagttatatccaaaacttctattccatttagaataccacaattcaaataaatataaaatgatttccgatactttcacattaaattgttctttagtattatgggatcaaaatgagggttaagagcatatcatgagcaaataccacatcattgaatatttataagcacttgcaatgtatacagaattgtgctggtttctttaagaggtagcagtttaacaaaaggctgtctttatactcaagtgaatgtcattaacagaataactcaagtttgagaggggcagacagttaaaatatatgccagtctgattaatatgtagtgataagaagaatgctaatatctgaaatattaacatggcctttgttaaaatag

SEQ ID NO: 89649 - DNA, 1587 bp, Homo sapiens
cgtccactcatgcctcatattcttagtctccctgaataatataactgggtgaatcactgttttcctcagaagatgcatgccgggctatagcctgaaactctgttcaactgatgataatcctaagctgtgaaaagaatcctttcaggaaaaactattaagggattatgtcactatcccttactctctgaaatatgttatggtgtgctggtaaataggatggagtaccaggctttggagttataccaacttcagaccatcccttgcttccctactaccaacagtgtgaccttcacaagttagctgacttctaaaatctgttactagaaaatgaagtaatcattttcttcttgcactttggtcaagagaactaaatgaaataatgtattaacatgcctaccataacacaagtgacctacaggctatcaatccgttagttcacttcccagggtgttcatgtgagacataagtgagaggcctaggtgctagcccagtactttccaaattgctaaatgatgtttttaaacgataaagtatcaaacccatctctccttgataactaagcttgctttgctttatagtaccaagcaaaaggaggaaaacccatgcataggacaaaggacttgtaaaaatgttttttgaacccaaactaagtgcaagcatgttttgcttgtaagaagaggagaactatgcaatggagaactccaggcagagatcaagtcaagtataattaaaatctcccaaaagctgcatacagtggtcatcctgaaggtggagaccaccatccttctttgcctactaatcaaccttctgcttttccatcaacgattttttctattttccataaattctagaaaaggaattcagaggcccaaagttgccacttttgccacttccaagtaagacttttagaagggtgatcatagctctgggattctgtttctttctttctccaggcacactacagggataagatgaaagaacagccactttgcaaaaasatggggaactggaacaagccatgacccccaaaatagacatgaagatacagagactgtatttttctacccaatagcccaaaggagaaactcttcaattaataacacttttgatacaaagccagactgcccaagatgactgcctaaaaatacacaaaaatctaggaaaaacaagctctccatcctggagggaatgtcaatggaaaatagttgctaggcttttccagttaccagtaataaaagaaaaataggctccccattatgaatccagtgctggagggctcgtcagctggttctgagccagctttggtattttctgagtgcgttacaaattacaggaacaaaatgtggacttttcactctaaccatgttttctaaggccagacaatttattattaggtttacttcctaatggtctatagttggaaaagatgtctccacgtatggataatatttataagcttttaaagcacacatattcttattatgaacagcaattacacaatgtgcacagattttaaatgaaagaattaagagaaattcaaacagaaattaataggacatgaatcccttcattattaagcattataat

SEQ ID NO: 89650 - DNA, 1790 bp, Homo sapiens
gttggaggacttaccgatatgacacacaaaaagtggaggattcaggagtccttctggagccagttctgggaaatacagttttctcaaggtaggcctaaagtcatttgtctttgatctggccccagaccagtttctcagttctcataacctttctagaaccagtccttctagatatgcaacccagtttactaaatttatctgtctaacgtccactaagcaccaaaaaattgatttcccctttttattgccatgatggttttgagcatcctaaatatatgtgtgtgcataatataaacacacacacacacacatatatataatatataattattgacttcagatatatctaaaataaaccaaaatacagtagtcccctctcatctgcggttttgctttgaatggtttcagttacccacagcccaccaaaaataggtgagtacagtacagtaagatattttgagagacagagaaaccgtatttacataacttttattacagcatattgttatgattattttattttcttattagttattgttattaatctcttactgtgcctaatttataaattaaactttatcataggtatccagatatagaaaaaacaacacagtatagggttcagtactatccacaggttcagacatccactgagtctcttggaacatatctcaaaaataaataggagactactgtacactcgtacatttcaaaatgagtggtaactgtatactgttctaacaagaaggtctcttaaatgaatggattaagctgataagctactgtcttctattcacttatccattcgtgtaatcattgtgccagatataagctaaatgcatagtctctgactatgagaaactcaatttaatggggaaagtgacccgtggactaaaacacaaatttagaacaaagtaacaagggtggtgatagacatgcacacaaggctctctggtttgcaagtggcagaaaccaaccttgaagcaacttcacagagagggagaacttgctggatggataaatatattgcattaagttcaaagtctcattttggaagcaaccaggtccccagaccatagacacagctacattctcaggacagggaaggggagagagaaaaagaaattcttatatcctagaaaagaaaatgccctgcaattttgagtatatatttggtgaaaaacaacttttgcagcatcttcagtttttaggmcaaggatgtcaggattgtgacccattgggtgaggatgcctgagcaacaagtgagagaagcctataaaaagaattctaatttctagtatcaaacaagcccttgttctgccccacaaacacctcctaaaaactatcaactaaagggcttttcaggagcactgctttgtcagaccatcaacctgaacacctaaattattgttaaaaaaacaaacaaacaaaaaattcttccgtcctggttcagcaacacataaataagatctgtcacaatgcctcaggaaccaaaaccaaaggattacaagctcttgttactcagaattttggagcatatttgggtcaaaacagaagagaacagcctccattttggggcacctagcctccaatttaatatctcttttcttgatattatatttaaaaaaaacgtttcaaaatatgaggctgctttcactttgagaagctggtattcacagccagaactgctagcagaaaatccaagtcttcccaagaggtggctgcaataaaaagtagagacgatattggctgcaaacttaacagtcatgttgggtggagcccaccttcat

SEQ ID NO: 89651 - DNA, 960 bp, Homo sapiens
aaataataaataagacctactttgtgacagcacaataggtgactatagtcaacaataattgtacatttaaaaataaagaatgtaattgaattgtttgtaactcaaacgataaatgctcaaggggatggatacctcattctccataatatgcttatttcacattgcacttctatatcgaaacatctcatgtaccccataaatatatacacctactatgtactcacaaatttttttwaaaaaatttaaaaagatataaaaggaaacatttttcctttaaaaaaaagtctaattaaagccctgtttaagatatcaggttgaacacactcacttaacctcagctctctctttcccaaaatctacttaaatgccattagacgctacaatgtttttgttattgtttgtctgtctgtctacctactaatttgttttaaggtataaagattcaaggacaaggaaaagaaagaggagctaagagtaacagcattttgaaaaatggaaagtaactgaatgagttagtgacagacttagcagaatcctaagatggaagaagatgtaatttcaaaataacaggaacaaagaaaagatcccccaagttgcaaaaaagagacatagttttcatataaaaggtcaataattatattggcatcctaattgtaaacagaaatcttagaaccaaaggaaaattgtgcaatgcctttaaattttaagggaaaatgtgccctttccagatgattataccaaactaagctatcaattaaatgtgttgacagaacaaagccatttctagacattcaaaacttctttaaaaattatcaccatattttattcctcatgacactactacagaatgtgctccatcaaaataagagaataaagcaaagatgaggcatgtgacctgggaaatagcgccaccaacattacaatgcacacagaatgttgaataccacatgattccatgca

SEQ ID NO: 89652 - DNA, 960 bp, Homo sapiens
aaataataaataagacctactttgtgacagcacaataggtgactatagtcaacaataattgtacatttaaaaataaagaatgtaattgaattgtttgtaactcaaacgataaatgctcaaggggatggatacctcattctccataatatgcttatttcacattgcacttctatatcgaaacatctcatgtaccccataaatatatacacctactatgtactcacaaatttttttaaaaaaatttaaaaagatataaaaggaaacatttttcctttaaaaaaaagtctaattaaagccctgtttaagatatcaggttgaacacactcacttaacctcagctctctctttcccaaaatctacttaaatgccattagacgctacaatgtttttgttattgtttgtctgtctgtctacctactaatttgttttaaggtataaagattcaaggacaaggaaaagaaagaggagctaagagtaacagcattttgaaaaatggaaagtaactgaatgagttagtgacagacttagcagaatcctaagatggaagaagatgtaatttcaaaataacaggaacaaagaaaagatcccccaagttgcaaaaaagaracatagttttcatataaaaggtcaataattatattggcatcctaattgtaaacagaaatcttagaaccaaaggaaaattgtgcaatgcctttaaattttaagggaaaatgtgccctttccagatgattataccaaactaagctatcaattaaatgtgttgacagaacaaagccatttctagacattcaaaacttctttaaaaattatcaccatattttattcctcatgacactactacagaatgtgctccatcaaaataagagaataaagcaaagatgaggcatgtgacctgggaaatagcgccaccaacattacaatgcacacagaatgttgaataccacatgattccatgca

SEQ ID NO: 89653 - DNA, 667 bp, Homo sapiens
ttgatagagtttaaccagcctagctaacaattttccaaaataagtttctttccctcctcccacttctaataggttcagattaatttctctggaatatttgcaggcttcactgtgccaggatatgtctcccttataaagtaaggcaattataaagcaatttaaggtatgggactagaaactcaatctttctgacccatgagagcactgttcaaatagacaaagaaaaactatgcaaaaagaaggggaatggattcaaatagtttgctccggggtctccaaaagattcagtagaaattatttttagaatttctgcttctcagcacttacctgaatatctgatagaaaggttgtggaagttcagagttasagatattaaacaatccactcctgctgtgccatgtaaaacagcatgaaattgaactctttagtattcgggggtagataaagttgttttgttctgaattcatgcactccatgtcacagtttatatggatgataaatctgaggaagatcagataaaaatagggctctgcacactcttagagatctaaattccttgtaaacataaatatttgtatgagtctatatgatcacatatgaaaacagacaggcagggtgcggtgggtcacgcctggaatcccagcactttcagaggccgaggcgggca

SEQ ID NO: 89654 - DNA, 2024 bp, Homo sapiens
cagcgcataatacctctttacatgtagtaaaatgactggtaatccattctgtctatgctcggttaatggtttgtttttggttttgtgttttgaagttcaactgtcctgtttcatcktctatggtttcatcacatgtgttttgtctctgccaaaattcatgttgaaactcgatcccagtgtggcagtgttggggggtgcgacctagtggaggtttttgagtctctggggtgcttccctcatgaatggatgaatgcccttctgtatgggttaagtcctcactgacggaataagttagctcctgagagagtttgttgtaaaaaagagtctggcttcctcggtttctctctcataccctctttcaccatgtgatctctttgcactcccaccccacttctgctttccacagtgagttgaagcagcctgaggtcctcaccacatgcagatgcccaatcttgaaccttccagccagcaaaatcttgagccaaataaacctcttttctttataaactacccaatctcaggtattctgttacagcaacactgcttatcaggaaggacaagctggtgaagaaaagagggagactccatctcctgggcatactctttaatcattctgaggattttttttttttctttttttgagacagagtttcactcctgtcacccaggctggagtgcagtggtgtgatccattctgaggatttttatttgggtgaaaatttaaatcttgggtgtgataatttgttagtttattctcaaagtaggtcaaccctcccttttcctcagtcatagaaaagaacagcaacacagcttatgggatagaacgaacatttatggcatgtgagccttgcactgagtgctgtacctggtgccatcacatgtgttatctttgtgatcctccacactactgtatatatttggtatttcagtctcttctttgccaggcccagttctggccatcctactgtaataaaccaacagcaagaacaacagaagaaaaaaaaacccaaaatcttcctcttgcgatactttatgctaagcataatttcaaaccatttttactggaaacttagatgatttttaaggaaacataaatggtaaacagtttattcaaggaatacatatgggaagtgtctgagctgggattaaattagtttgtctcatgctaaagcccatgctattttcactataatttattaaaatctggcatattggacttttaaaatttgcattgtgtttttcagggaaggctgggaatctagacacagcaacagtaacaacaacaacaataacaatgaaggctcactgtgaaaacatcaattcattaggaaagttacatcccctccgccactgtttcagatgctgtttctcattctccatgggagcagccagcatcgtgtttaggatggggatacaatagcctgagctcctgattgagtcagaccctggactttcccttttgtatctgtcattttcctctggatcctcacacctttgtgtttaatttttttaaatttcatttgttgacttcctatgtggggtaaaatgacttcctttgattaatgtactttctgtatcctagagtttccctttccctttgtgatttagtccaacgtgtcctactacagcctcaaaaattgtcattggaatcaaaagctttccaaggtgcatcaggttaatgatttggatgcatcctgaggttgtctcctgtagcatggaggcattataataggagtctcagaagttacaccatttttctacagcacatcacaggcccagaggcttgaatctaagagaatccactctatgtctgtcagcctgaatccttccttcttgctgcacaacaaagcaactgaacgtattttgagtttaggtgaaaactatcactcattcatcaaagttctatctgggtgatatatgctatcgaaacagatgtggacactgggctgacagatgttgagaacggacctgttgctgaagctcatgttatcacacatgctgtgggaagagaggtcattggcatt

SEQ ID NO: 89655 - DNA, 2024 bp, Homo sapiens
cagcgcataatacctctttacatgtagtaaaatgactggtaatccattctgtctatgctcggttaatggtttgtttttggttttgtgttttgaagttcaactgtcctgtttcatcttctatggtttcatcacatgtgttttgtctctgccaaaattcatgttgaaaytcgatcccagtgtggcagtgttggggggtgcgacctagtggaggtttttgagtctctggggtgcttccctcatgaatggatgaatgcccttctgtatgggttaagtcctcactgacggaataagttagctcctgagagagtttgttgtaaaaaagagtctggcttcctcggtttctctctcataccctctttcaccatgtgatctctttgcactcccaccccacttctgctttccacagtgagttgaagcagcctgaggtcctcaccacatgcagatgcccaatcttgaaccttccagccagcaaaatcttgagccaaataaacctcttttctttataaactacccaatctcaggtattctgttacagcaacactgcttatcaggaaggacaagctggtgaagaaaagagggagactccatctcctgggcatactctttaatcattctgaggattttttttttttctttttttgagacagagtttcactcctgtcacccaggctggagtgcagtggtgtgatccattctgaggatttttatttgggtgaaaatttaaatcttgggtgtgataatttgttagtttattctcaaagtaggtcaaccctcccttttcctcagtcatagaaaagaacagcaacacagcttatgggatagaacgaacatttatggcatgtgagccttgcactgagtgctgtacctggtgccatcacatgtgttatctttgtgatcctccacactactgtatatatttggtatttcagtctcttctttgccaggcccagttctggccatcctactgtaataaaccaacagcaagaacaacagaagaaaaaaaaacccaaaatcttcctcttgcgatactttatgctaagcataatttcaaaccatttttactggaaacttagatgatttttaaggaaacataaatggtaaacagtttattcaaggaatacatatgggaagtgtctgagctgggattaaattagtttgtctcatgctaaagcccatgctattttcactataatttattaaaatctggcatattggacttttaaaatttgcattgtgtttttcagggaaggctgggaatctagacacagcaacagtaacaacaacaacaataacaatgaaggctcactgtgaaaacatcaattcattaggaaagttacatcccctccgccactgtttcagatgctgtttctcattctccatgggagcagccagcatcgtgtttaggatggggatacaatagcctgagctcctgattgagtcagaccctggactttcccttttgtatctgtcattttcctctggatcctcacacctttgtgtttaatttttttaaatttcatttgttgacttcctatgtggggtaaaatgacttcctttgattaatgtactttctgtatcctagagtttccctttccctttgtgatttagtccaacgtgtcctactacagcctcaaaaattgtcattggaatcaaaagctttccaaggtgcatcaggttaatgatttggatgcatcctgaggttgtctcctgtagcatggaggcattataataggagtctcagaagttacaccatttttctacagcacatcacaggcccagaggcttgaatctaagagaatccactctatgtctgtcagcctgaatccttccttcttgctgcacaacaaagcaactgaacgtattttgagtttaggtgaaaactatcactcattcatcaaagttctatctgggtgatatatgctatcgaaacagatgtggacactgggctgacagatgttgagaacggacctgttgctgaagctcatgttatcacacatgctgtgggaagagaggtcattggcatt

SEQ ID NO: 89656 - DNA, 2024 bp, Homo sapiens
cagcgcataatacctctttacatgtagtaaaatgactggtaatccattctgtctatgctcggttaatggtttgtttttggttttgtgttttgaagttcaactgtcctgtttcatcttctatggtttcatcacatgtgttttgtctctgccaaaattcatgttgaaactcgatcccagtgtggcagtgttggggggtgcgacctagtggaggtttttgagtctctggggtgcttccctcrtgaatggatgaatgcccttctgtatgggttaagtcctcactgacggaataagttagctcctgagagagtttgttgtaaaaaagagtctggcttcctcggtttctctctcataccctctttcaccatgtgatctctttgcactcccaccccacttctgctttccacagtgagttgaagcagcctgaggtcctcaccacatgcagatgcccaatcttgaaccttccagccagcaaaatcttgagccaaataaacctcttttctttataaactacccaatctcaggtattctgttacagcaacactgcttatcaggaaggacaagctggtgaagaaaagagggagactccatctcctgggcatactctttaatcattctgaggattttttttttttctttttttgagacagagtttcactcctgtcacccaggctggagtgcagtggtgtgatccattctgaggatttttatttgggtgaaaatttaaatcttgggtgtgataatttgttagtttattctcaaagtaggtcaaccctcccttttcctcagtcatagaaaagaacagcaacacagcttatgggatagaacgaacatttatggcatgtgagccttgcactgagtgctgtacctggtgccatcacatgtgttatctttgtgatcctccacactactgtatatatttggtatttcagtctcttctttgccaggcccagttctggccatcctactgtaataaaccaacagcaagaacaacagaagaaaaaaaaacccaaaatcttcctcttgcgatactttatgctaagcataatttcaaaccatttttactggaaacttagatgatttttaaggaaacataaatggtaaacagtttattcaaggaatacatatgggaagtgtctgagctgggattaaattagtttgtctcatgctaaagcccatgctattttcactataatttattaaaatctggcatattggacttttaaaatttgcattgtgtttttcagggaaggctgggaatctagacacagcaacagtaacaacaacaacaataacaatgaaggctcactgtgaaaacatcaattcattaggaaagttacatcccctccgccactgtttcagatgctgtttctcattctccatgggagcagccagcatcgtgtttaggatggggatacaatagcctgagctcctgattgagtcagaccctggactttcccttttgtatctgtcattttcctctggatcctcacacctttgtgtttaatttttttaaatttcatttgttgacttcctatgtggggtaaaatgacttcctttgattaatgtactttctgtatcctagagtttccctttccctttgtgatttagtccaacgtgtcctactacagcctcaaaaattgtcattggaatcaaaagctttccaaggtgcatcaggttaatgatttggatgcatcctgaggttgtctcctgtagcatggaggcattataataggagtctcagaagttacaccatttttctacagcacatcacaggcccagaggcttgaatctaagagaatccactctatgtctgtcagcctgaatccttccttcttgctgcacaacaaagcaactgaacgtattttgagtttaggtgaaaactatcactcattcatcaaagttctatctgggtgatatatgctatcgaaacagatgtggacactgggctgacagatgttgagaacggacctgttgctgaagctcatgttatcacacatgctgtgggaagagaggtcattggcatt

SEQ ID NO: 89657 - DNA, 2024 bp, Homo sapiens
cagcgcataatacctctttacatgtagtaaaatgactggtaatccattctgtctatgctcggttaatggtttgtttttggttttgtgttttgaagttcaactgtcctgtttcatcttctatggtttcatcacatgtgttttgtctctgccaaaattcatgttgaaactcgatcccagtgtggcagtgttggggggtgcgacctagtggaggtttttgagtctctggggtgcttccctcatgaatggatgaatgcccttctgtatgggttaagtcctcactgacggaataagttagctcctgagagagtttgttgtaaaaaagagtctggcttcctcggtttctctctcataccctctttcaccatgtgatctctttgcactcccaccccacttctgctttccacagtgagttgaagcagcctgaggtcctcaccacatgcagatgcccaatcttgaaccttccagccagcaaaatcttgagccaaataaacctcttttctttataaactacccaatctcaggtattctgttacagcaacactgcttatcaggaaggacaagctggtgaagaaaagagggagactccatctcctgggcatactctttaatcattctgaggattttttttttttctttttttgagacagagtttcactcctgtcacccaggctggagtgcagtggtgtgatccattctgaggatttttatttgggtgaaaatttaaatcttgggtgtgataatttgttagtttattctcaaagtaggtcaaccctcccttttcctcagtcatagaaaagaacagcaacacagcttatgggatagaacgaacatttatggcatgtgagccttgcactgagtgctgtacctggtgccatcacatgtgttatctttgtgatcctccacactactgtatatatttggtatttcagtctcttctttgccaggcccagttctggccatcctactgtaataaaccaacagcaagaacaacagaagaaaaaaaaacccaaaatcttcctcttgcgatactttatgctaagcataatttcaaaccatttttactggaaacttagatgatttttaaggaaacataaatggtaaacagtttattcaaggaatacatatgggaagtgtctgagctgggattaaattagtttgtctcatgctaaagcccatgctatyttcactataatttattaaaatctggcatattggacttttaaaatttgcattgtgtttttcagggaaggctgggaatctagacacagcaacagtaacaacaacaacaataacaatgaaggctcactgtgaaaacatcaattcattaggaaagttacatcccctccgccactgtttcagatgctgtttctcattctccatgggagcagccagcatcgtgtttaggatggggatacaatagcctgagctcctgattgagtcagaccctggactttcccttttgtatctgtcattttcctctggatcctcacacctttgtgtttaatttttttaaatttcatttgttgacttcctatgtggggtaaaatgacttcctttgattaatgtactttctgtatcctagagtttccctttccctttgtgatttagtccaacgtgtcctactacagcctcaaaaattgtcattggaatcaaaagctttccaaggtgcatcaggttaatgatttggatgcatcctgaggttgtctcctgtagcatggaggcattataataggagtctcagaagttacaccatttttctacagcacatcacaggcccagaggcttgaatctaagagaatccactctatgtctgtcagcctgaatccttccttcttgctgcacaacaaagcaactgaacgtattttgagtttaggtgaaaactatcactcattcatcaaagttctatctgggtgatatatgctatcgaaacagatgtggacactgggctgacagatgttgagaacggacctgttgctgaagctcatgttatcacacatgctgtgggaagagaggtcattggcatt

SEQ ID NO: 89658 - DNA, 2024 bp, Homo sapiens
cagcgcataatacctctttacatgtagtaaaatgactggtaatccattctgtctatgctcggttaatggtttgtttttggttttgtgttttgaagttcaactgtcctgtttcatcttctatggtttcatcacatgtgttttgtctctgccaaaattcatgttgaaactcgatcccagtgtggcagtgttggggggtgcgacctagtggaggtttttgagtctctggggtgcttccctcatgaatggatgaatgcccttctgtatgggttaagtcctcactgacggaataagttagctcctgagagagtttgttgtaaaaaagagtctggcttcctcggtttctctctcataccctctttcaccatgtgatctctttgcactcccaccccacttctgctttccacagtgagttgaagcagcctgaggtcctcaccacatgcagatgcccaatcttgaaccttccagccagcaaaatcttgagccaaataaacctcttttctttataaactacccaatctcaggtattctgttacagcaacactgcttatcaggaaggacaagctggtgaagaaaagagggagactccatctcctgggcatactctttaatcattctgaggattttttttttttctttttttgagacagagtttcactcctgtcacccaggctggagtgcagtggtgtgatccattctgaggatttttatttgggtgaaaatttaaatcttgggtgtgataatttgttagtttattctcaaagtaggtcaaccctcccttttcctcagtcatagaaaagaacagcaacacagcttatgggatagaacgaacatttatggcatgtgagccttgcactgagtgctgtacctggtgccatcacatgtgttatctttgtgatcctccacactactgtatatatttggtatttcagtctcttctttgccaggcccagttctggccatcctactgtaataaaccaacagcaagaacaacagaagaaaaaaaaacccaaaatcttcctcttgcgatactttatgctaagcataatttcaaaccatttttactggaaacttagatgatttttaaggaaacataaatggtaaacagtttattcaaggaatacatatgggaagtgtctgagctgggattaaattagtttgtctcatgctaaagcccatgctattttcactataatttattaaaatctggcatattggacttttaaaatttgcattgtgtttttcagggaaggctgggaatctagacacagcaacartaacaacaacaacaataacaatgaaggctcactgtgaaaacatcaattcattaggaaagttacatcccctccgccactgtttcagatgctgtttctcattctccatgggagcagccagcatcgtgtttaggatggggatacaatagcctgagctcctgattgagtcagaccctggactttcccttttgtatctgtcattttcctctggatcctcacacctttgtgtttaatttttttaaatttcatttgttgacttcctatgtggggtaaaatgacttcctttgattaatgtactttctgtatcctagagtttccctttccctttgtgatttagtccaacgtgtcctactacagcctcaaaaattgtcattggaatcaaaagctttccaaggtgcatcaggttaatgatttggatgcatcctgaggttgtctcctgtagcatggaggcattataataggagtctcagaagttacaccatttttctacagcacatcacaggcccagaggcttgaatctaagagaatccactctatgtctgtcagcctgaatccttccttcttgctgcacaacaaagcaactgaacgtattttgagtttaggtgaaaactatcactcattcatcaaagttctatctgggtgatatatgctatcgaaacagatgtggacactgggctgacagatgttgagaacggacctgttgctgaagctcatgttatcacacatgctgtgggaagagaggtcattggcatt

SEQ ID NO: 89659 - DNA, 2024 bp, Homo sapiens
cagcgcataatacctctttacatgtagtaaaatgactggtaatccattctgtctatgctcggttaatggtttgtttttggttttgtgttttgaagttcaactgtcctgtttcatcttctatggtttcatcacatgtgttttgtctctgccaaaattcatgttgaaactcgatcccagtgtggcagtgttggggggtgcgacctagtggaggtttttgagtctctggggtgcttccctcatgaatggatgaatgcccttctgtatgggttaagtcctcactgacggaataagttagctcctgagagagtttgttgtaaaaaagagtctggcttcctcggtttctctctcataccctctttcaccatgtgatctctttgcactcccaccccacttctgctttccacagtgagttgaagcagcctgaggtcctcaccacatgcagatgcccaatcttgaaccttccagccagcaaaatcttgagccaaataaacctcttttctttataaactacccaatctcaggtattctgttacagcaacactgcttatcaggaaggacaagctggtgaagaaaagagggagactccatctcctgggcatactctttaatcattctgaggattttttttttttctttttttgagacagagtttcactcctgtcacccaggctggagtgcagtggtgtgatccattctgaggatttttatttgggtgaaaatttaaatcttgggtgtgataatttgttagtttattctcaaagtaggtcaaccctcccttttcctcagtcatagaaaagaacagcaacacagcttatgggatagaacgaacatttatggcatgtgagccttgcactgagtgctgtacctggtgccatcacatgtgttatctttgtgatcctccacactactgtatatatttggtatttcagtctcttctttgccaggcccagttctggccatcctactgtaataaaccaacagcaagaacaacagaagaaaaaaaaacccaaaatcttcctcttgcgatactttatgctaagcataatttcaaaccatttttactggaaacttagatgatttttaaggaaacataaatggtaaacagtttattcaaggaatacatatgggaagtgtctgagctgggattaaattagtttgtctcatgctaaagcccatgctattttcactataatttattaaaatctggcatattggacttttaaaatttgcattgtgtttttcagggaaggctgggaatctagacacagcaacagtaacaacaacaacaataacaatgaaggctcactgtgaaaacatcaattcattaggaaagttacatcccctccgccactgtttcagatgctgtttctcattctccatgggagcagccagcatcrtgtttaggatggggatacaatagcctgagctcctgattgagtcagaccctggactttcccttttgtatctgtcattttcctctggatcctcacacctttgtgtttaatttttttaaatttcatttgttgacttcctatgtggggtaaaatgacttcctttgattaatgtactttctgtatcctagagtttccctttccctttgtgatttagtccaacgtgtcctactacagcctcaaaaattgtcattggaatcaaaagctttccaaggtgcatcaggttaatgatttggatgcatcctgaggttgtctcctgtagcatggaggcattataataggagtctcagaagttacaccatttttctacagcacatcacaggcccagaggcttgaatctaagagaatccactctatgtctgtcagcctgaatccttccttcttgctgcacaacaaagcaactgaacgtattttgagtttaggtgaaaactatcactcattcatcaaagttctatctgggtgatatatgctatcgaaacagatgtggacactgggctgacagatgttgagaacggacctgttgctgaagctcatgttatcacacatgctgtgggaagagaggtcattggcatt

SEQ ID NO: 89660 - DNA, 1476 bp, Homo sapiens
tggaatccaactgctgcttcagactagtctgggaacgatgatgaaagagtaggtccttgatgtttgcagaatagtccatgttccagcaacatctatgttgcagttagtatctgaaagctagttagaaatgcagcaactccagcctcatcccaaacttactgcatcagaatcttcattttaacaagctccccaggcaattcactgattgaggtgaaattggmatctaggcagagcttatcattaatgccctctcaccacttctctctgggccttaactctccactttcagcctagtcatttcctgtgccctcagccaccacttcccgcaaccacagtcttcatgttacctccctggcatcccagagctctgacctacaaggcacaacccctagcattgcctgtgcaaggaacttttctacatattgaacctgtcctttccctctcccatcaaaattctcctggacttaattctgctctctcagggccctgctttctcattaacagttttccaaaaaattaactcctactaaaatgcttattccttttattatgttaatatgtgactggttttcttgtgatgtgtgatatgtatttttaaataatgcttaagaaaagacagggcatgattctataatagaaataaccattgggggccctgtgaaccacaacagtgattcagccaatctagaagctacttgtaactggatcccacttggccatttcctcaccagtgactcagggtcccaatggagtctgagagctgactgcttttcgccttttcacgtaactgaaatttatcatagctatctgcactttgcagtccaaaatcaagagtagttatttaaggaaggatcccagagacattaggcttcatgaattactggttttaaaaaactgaaatgaacctcatcttttttattgtcatattgctaccacaaatatttgtggaatattggcaagtgataacttgttgctacgtagctgtcaaggtacattatggtactgtggcagtcgaactttgattggagaaacagctttcagctcaatttttattttattgccaggattccattaagattccttatcaacttctaggagacaatccacatccccaacactttctaaagcttcccattactgtagagctgggagatgcttcattttggttaaagttaaatttgggcctcattgtaacttaaatctgatacccctttgaaaaggggatgcattttaaattggttatttcacttatttgaagagtaggataagaaagcaacggtcattggtaccaaaaagggaagctgacctgccaactatgtgtctatacatgacccagacaaagccattcgtgtaaggatgtgtttcctgccctgatgaatcttctgggtgtctagggatatctttctctttttgattttctatgaattctagtcatattctcctctgtttagaagccacactgtgttaaattagaac

SEQ ID NO: 89661 - DNA, 718 bp, Homo sapiens
taaaatatctcttttgtaggttcacttctttccataaaaagacacccagattacttagctaagcaatgtttgaccccgggatttaggaggaataattgttgtgatagaattttttagttttcatccaaatatgtcatattatgtggactacataatgtcctcactctcaaacagagatacaagataaaaattatttccacatccctcagtcactcagaatgtactcttattataccgtagttactcacatgagtgcttttctctcctattaatgctaaattccttgaggagggcctataccatttcttatactaaataaggtagagcaattcagaggtaaatgagtcaaattgtttgacttcaatcaattagggaagaaaagacataaacaaaaggagaagcaacttagraggttacaaatacgccaaagtttagcaacagatgaagtactgtccaagttcaaggaaagaatgatcaccttcaactcattacaatggaagaaagtttaattaataaggtaatatttgtgcctattcttaaagaatagtaagaattcagaatgtgtgtccagggaggagaaatggacatcctaagtgaaggagcagaatgaattgcttggaggtaatactttatattacctataaagtatacctattttgtaatataatgtattacctccaagtaattcattctgctccttataatataaagtatatag

SEQ ID NO: 89662 - DNA, 876 bp, Homo sapiens
atgcatttacatcaccttaaatttagtatagtaatttgaatggcttaaaaagattgtaagcaaagatagtaatccttataaatgacaatgcagccaacagagcagaatgttcaaagccctaaatgactttcagccagttctcttttgggtttcaatgatatctcaagatatgaaagaggcggtaraatccagtgtcacatgaattatatagcagccaagagataggctggcattctaaccacaaacagaaggaagagcaatacctaggacccaaaggtctataaaagtatgggcaggaaataatgaaatgaaatttggcctggataatataagctaataaatggaaaaaaaaatccaaaacatggatatgcagagagtgtgcaaaaagtggcaaagaaagagggtaataaaagatggcaaactacaaagggagtttcagcagttttagtgtgattgtatctccatattaaaaaaaagagagagagaaaggaaggaagaaagaaagagagagagagaaagaaaagagagaaaatatgagacactttctcaaactctgcagcctgctacagtaatggtcagggagtcaagggaactggagattagaatagatgccctgatcaaccctatgactttggacaagtcactttccctctctgggctgcagtttccccttgtatagaataagagttaaatcaagtagctttgtgatcccttttagctgtgtcactctaagatatatttggttcttgacattttgccctttgatcactaaatcagttattcagttaagaggggaaacatgaaaaaaaaaaaaagatggagaaacatgatcagcaaaatgaagatcgagaagcgtgtagatgatgaacccattct

SEQ ID NO: 89663 - DNA, 876 bp, Homo sapiens
atgcatttacatcaccttaaatttagtatagtaatttgaatggcttaaaaagattgtaagcaaagatagtaatccttataaatgacaatgcagccaacagagcagaatgttcaaagccctaaatgactttcagccagttctcttttgggtttcaatgatatctcaagatatgaaagaggcggtaaaatccagtgtcacatgaattatatagcagccaagagataggctggcattctaaccacaaacagaaggaagagcaatacctaggacccaaaggtctataaaagtatgggcaggaaataatgaaatgaaatttggcctggataatataagctaataaayggaaaaaaaaatccaaaacatggatatgcagagagtgtgcaaaaagtggcaaagaaagagggtaataaaagatggcaaactacaaagggagtttcagcagttttagtgtgattgtatctccatattaaaaaaaagagagagagaaaggaaggaagaaagaaagagagagagagaaagaaaagagagaaaatatgagacactttctcaaactctgcagcctgctacagtaatggtcagggagtcaagggaactggagattagaatagatgccctgatcaaccctatgactttggacaagtcactttccctctctgggctgcagtttccccttgtatagaataagagttaaatcaagtagctttgtgatcccttttagctgtgtcactctaagatatatttggttcttgacattttgccctttgatcactaaatcagttattcagttaagaggggaaacatgaaaaaaaaaaaaagatggagaaacatgatcagcaaaatgaagatcgagaagcgtgtagatgatgaacccattct

SEQ ID NO: 89664 - DNA, 750 bp, Homo sapiens
tttctcaagttcataaaactagaagtttccaggttgttgtttttgtttcctcccctcttccccctttctcctgttattcagctttccaaattaagatctgtgtgttccagattgtgttgaaattgaagtacaagtcacattacctgcagggaaccccactagatgccaagatgatcatgcagagtgcattgtctctgagtcctgcttctcactgcagacctcagggtcctcccatcccctcctatagcctcaatgagtaagggctgggaatcactacatgattcgctctcttccttttgcttttgaagaggaggcagtactcttgtctaggttgcctcgagcttgatttttcctaggaagagtctycaaaggatgcaatgcagtgatgtatgaaaggaacaggtggacagcagtcacttatgtttttaacagcatcctgcagaccttccaactcaaacaagaactcccatttttaaagacaaaagtggtatttctccctggcctgcccctccaggcttcagaggtagaaacagtgactgtgatgtacaaaccggggagctttgtccaccacaggtgcaatggacactgttgacttatatgtccaccactctatcagcagggttctctgaggaacaaggaccttccagagtgatgcttttccctagtggcagccttggccagggcaacagacatctgcacaaacgcagggtgttgaagcagctgttctgagatgcagtgcctgagaatctg

SEQ ID NO: 89665 - DNA, 1352 bp, Homo sapiens
gtgtatttatgaaatataacattaaaaaagatcagagattttaaaactgaggttgggcagttcttttttttaaatatatataaatacactagaagctttaaggggggcccgggatggtgtcctgggcctcttgtggtttctgccttgccccttagcctatgaggcacacgcccctgacctggcctctcccgcctgggccagcacatctgaagcccagaggggcgcaggcgaggctggggtcttgccagagcaaacatagcccctgtgcagggccaagggaaacagcgttgggtcaatattagctcgtgcgaaacaggcctgaggaacgtgtggtttgtcccactcggcctctgggagggagaggtggactcaggcgctcacagcagcacttaccattgttgggccagcctccttctgtgtggatggggaaactgaggcccagaggtggcagggcagggacttgccttgggtcacagtgctcagaacaacactcttttgtagtctacattcttttttttttttttttttctggagatggccttgctctgtcgtccaggctggagtgcagtggcgcaagtatagctcactgaaagcttgatctcctgggctcaagggatcctcctgcctcagcctccggagtagatgggtctacaggtgcatacttccatactggctaacttaaattttttttttttttttgtagagatggggtgttgctatgttgcccaggctggttttgaactcctggtctcaagtgatcctctcgcctcagcctcccaaactgkgaattctccattcttttccttcagttgtttctgttttcctccctgaggcttctgggaagcagcagaagtcaggtcagcaagcactggactgagagtcaggagttctagtcccatttctgtctcgctctgcagtgggactctggggatgttactgcttcattctgggcccttatatctcaaaggttccttctccctgaaaattacaaactttgaccttcagtgcatccgctcaactaattcaggtcctcaaaatcgaaattctttaggggccaggtagagaaggtaaatgtggggtgtgacaagttgtgggacaatagggagaggcggggacggtggagagctggaaagtgtgtgcctgtcatgaagacattcgaagtgaaacaacaagatggtgggaccgtgttggtcctgggaagccccgagtgtctgcaggcctggctgactgctttcaggtgtagcaggcctgaggcagagcagaaggacagagccccggctctcgcatcatgtcacactgccccctgtatctgaccctggagaagagggaggcctggctggggctgccgtttc

SEQ ID NO: 89666 - DNA, 1174 bp, Homo sapiens
gttccaaagtgttgatagctggaggaggagcccggggagatgtgaggcacggggtttgggcagccctgggttttccaggctccagtgacagcaggatggaggctcagggtcagctctgggtacagtggggtggagactcagggaacatcttcagggaggccacctccaccccatccctcctggtccacagagatctgttgtctcgaagttctgaagtccagagtctggaatgagggtgttggcagggccggccctagggaggcatctgttccagggcctttctccagcttctggtagtttctttgcttgtgacagcaaagctccagtcttcacaaaccttcttccctgtgcgtgtttctgtgtccacattccccttttgataaggacataatcatcatgaatgaagcatggccctaatgacttccgaacttcatcatttgcaaagaccctatttccatataatgccatacttgtaggtactgggtgttagggcttcaacatatgaattgttagggatggaactcaacctataaccttgtccctgcctctgccagtgatctccacattcctgctggccccaraggcaccatggccccttccagggtgccccaggcagatcacgggagggcctgactgctggggatggggctggtgctgggatcctctgcccagtgagggctgggatgagactattatggggttgggggtgctgaagttttgaaggcagggtaaaacagaggctgggtccctctctggaccccaggctccagggaacacctctcctgggagttcccatgctccctgtggcctgggcaaaaaaaaaaaaaaaaagtacttgcagtccgaggccccccaaaggcaaaagcctggctccgataagcatcctccccaccctgtgtgcctttcgagcccctgaggtttgtggggagtctcagaggttttgtggggagcctcagaccagatcctggtcagcagggttgaggcaggcctgagaatgtatctttagcatccagagattgggagggtgtggacggaagcaaggttcaggcatcctcagctctaactaagtatcaaatactagtgtgaatccacttcctggagctggcctctggggagccttgggttggtgtacataaacagggtctgcctgattcatcaggtttctcatggggcc

SEQ ID NO: 89667 - DNA, 1174 bp, Homo sapiens
gttccaaagtgttgatagctggaggaggagcccggggagatgtgaggcacggggtttgggcagccctgggttttccaggctccagtgacagcaggatggaggctcagggtcagctctgggtacagtggggtggagactcagggaacatcttcagggaggccacctccaccccatccctcctggtccacagagatctgttgtctcgaagttctgaagtccagagtctggaatgagggtgttggcagggccggccctagggaggcatctgttccagggcctttctccagcttctggtagtttctttgcttgtgacagcaaagctccagtcttcacaaaccttcttccctgtgcgtgtttctgtgtccacattccccttttgataaggacataatcatcatgaatgaagcatggccctaatgacttccgaacttcatcatttgcaaagaccctatttccatataatgccatacttgtaggtactgggtgttagggcttcaacatatgaattgttagggatggaactcaacctataaccttgtccctgcctctgccagtgatctccacattcctgctggccccaaaggcaccatggccccttccagggtgccccaggcagatcacgggagggcctgactgctggggatgkggctggtgctgggatcctctgcccagtgagggctgggatgagactattatggggttgggggtgctgaagttttgaaggcagggtaaaacagaggctgggtccctctctggaccccaggctccagggaacacctctcctgggagttcccatgctccctgtggcctgggcaaaaaaaaaaaaaaaaagtacttgcagtccgaggccccccaaaggcaaaagcctggctccgataagcatcctccccaccctgtgtgcctttcgagcccctgaggtttgtggggagtctcagaggttttgtggggagcctcagaccagatcctggtcagcagggttgaggcaggcctgagaatgtatctttagcatccagagattgggagggtgtggacggaagcaaggttcaggcatcctcagctctaactaagtatcaaatactagtgtgaatccacttcctggagctggcctctggggagccttgggttggtgtacataaacagggtctgcctgattcatcaggtttctcatggggcc

SEQ ID NO: 89668 - DNA, 813 bp, Homo sapiens
attgtcacacttatgtatgtctctttttcctgcatagtgggagatgatatttctacagctaaatccattttaaaaatcaagaataatgctttttgttctttcccaaggaaggtagttctagtacatcaagttcctattttgataatttagtcttatataatttctattttcaaaataattctggttaaaaaacaacagcaaatataaayggctctattggtgctttatttagttggaagatcaaaaatttgcagcccagttttttcaagttgattcagttccctgcccaaattgattagaaaagtctcatttcatgcaattacagatctttattgcctttcattatagaatgttttccttaaggaatagccaatttttgagaaagactaatcttctggagtgatttaaaaaattgtggcacctcattcttttgaaaattgaatttgaacaaaatccaaggacagtttaaaattcagcttccactttagaggacttcattttaagtccatcaatgcctataaagcatcaagtaaaattctctttctactcatcatattatcatctgatttcaacaatagctcaaattttaataaaaattttaatacttacatgattattatctttatttgaactagatgggcactaactaaacttattcctaagggaggagaatagaagagcctccttcaactttactgcctctttctcatgcatccaaagctcctgttatgaacattcctggattgtgaatttgttctatagcacacagcaaacaggagcagcgtcatctctgcatttaacatatgaacatct

SEQ ID NO: 89669 - DNA, 813 bp, Homo sapiens
attgtcacacttatgtatgtctctttttcctgcatagtgggagatgatatttctacagctaaatccattttaaaaatcaagaataatgctttttgttctttcccaaggaaggtagttctagtacatcaagttcctattttgataatttagtcttatataatttctattttcaaaataattctggttaaaaaacaacagcaaatataaatrgctctattggtgctttatttagttggaagatcaaaaatttgcagcccagttttttcaagttgattcagttccctgcccaaattgattagaaaagtctcatttcatgcaattacagatctttattgcctttcattatagaatgttttccttaaggaatagccaatttttgagaaagactaatcttctggagtgatttaaaaaattgtggcacctcattcttttgaaaattgaatttgaacaaaatccaaggacagtttaaaattcagcttccactttagaggacttcattttaagtccatcaatgcctataaagcatcaagtaaaattctctttctactcatcatattatcatctgatttcaacaatagctcaaattttaataaaaattttaatacttacatgattattatctttatttgaactagatgggcactaactaaacttattcctaagggaggagaatagaagagcctccttcaactttactgcctctttctcatgcatccaaagctcctgttatgaacattcctggattgtgaatttgttctatagcacacagcaaacaggagcagcgtcatctctgcatttaacatatgaacatct

SEQ ID NO: 89670 - DNA, 2164 bp, Homo sapiens
ttaatatattaatattatttcttaaataaccatatttgttctataatttttcctttgctctagttttcttatgctgtacataactgtttctttattgaacaggatagtccacagtagctgcactgttcagatccaaagtttccaaggtaatgcagcaggaaacagaaaaaaaaacaggtagcatatcagcaattaataatacctgataagaaatgacttcattcattttggctcatcacacatcagtagtaactagtcttataacctttacctaattacaaagtattctgaaaaatgcagggaagcacattaaatatgagatgaacaacactttatcagccatagtcccttacacagaataggcaagtcagtaaaatatctttgataaaaatatcgtgtgaataagagtgtatgacattataacaaaaggcaaagatactatgttaatgaagaaatcctagagacttaaaagaaagctagttaatatgcaacagatttgaaacaaatgaaaggataaatgcaaattcaaaatagggcacgataagctaatctcaatatttagaaaaatttgacaaataattgctccacattgtgaacactatctcttattctgaagagaatacccaagattttcagagtcacttggtaaaaaatctcaaaggttttccagatattctatcaccacatatcataacttcaagtactcttctcctcaaagggaaagtaacaaagcagaattattcattggggattatggtgataaaatattcacaattcctattaaagcaataatgtgccagtttttaaattactgaactattctttttgttatttccaagggaatctgattagcaaagatagaacatactaacatggttttgctttgggattcatcgcatgtctgattaaagaatatttaaaaatacatttcagatatcttctcctcacttgctataaagaggctgaaatgacaattaggtagtctcatggttattaaattcagaggacatgaaggtaccttgtaacttgggaaattgaaccagaaatgcacataataacgtagacagtaaaaagaaataaaaggatcagacttatagttttaaaatagatccagttctgcatgcatagaattatcccccaaagcattctgtatataattttaagcatacaaatcaccttggtcaagcaacatgataatgcaagtacaagcctctacttagaaatttagttacttgccccagtaagaagtggtctgaaaatatctatgttgccatgtagaaaaagtaaattgtctatttttttcagattctttgaaccttgcttattgatccagccaatttacataaagaacctattttaatataagcaacccagttctataaacctgtagttaacaataattcaaagatgtttttatctagtttttctatgtttccatagttcaatacaattatatgaaataaatatcccatgctgctgtaacccaatgtttcactgcagttccaaattattgagcatagggtgaattttcaaatttgaaatttttaatgactgtttagtgagaggtcacaaattacatcagtactgttttcaagtagtcatatataccgccccccaccaaaattaactgattacagaagaagtatattttacttatgaattagaagaggttcatttttttctaatcaagtgggtcctttccaatcatagagaacatggagctagcaaatgtgtggaaaactgcatcacgcttcatattaccacctcccacttcttttaaaatgaagggagaggacactaaacgtaggcaggattaggttctccaattcaattccaattcatatattaatctgatgatctgtgggttcctgaggcatctgagtgtggctcctatgatcaggaaagagacagttattccgtgggcaagttctggcgggtggaaaagaacaagcacggaccagagtgcttgtctttttgcattagcctttccctgaaagagtatcaagggaagagccaactggactagttatgktgtttatcaagagcagccaaatatttatatgcacatttaacccctagataatgcactatcacttaaatcaaatacaattataattcttacattgcacctgcctgcaaattcaaacttctgtattttgacaca

SEQ ID NO: 89671 - DNA, 1329 bp, Homo sapiens
attccctcagagatcccctccacatatacaaacacacacacaaagacaagacggacagaaggccttccaaaccaagatccctaaccaagaattccaagagtattccttccaaactatcctattctccrtctgagaagtctccccgaaatcttactgattgaggagaagtctccagaaccaagactcttcctactaattagggagagtaaaccgagacccctgaagaagctgaaccaattgggagaaggaaaggggtgttggcagcacctagactactcaccaaatcagacaccccataatggggctgcagctgcagacaatccatgatggggctacaaacagacactgtgataaggttacagttacaggcaccccatggtggagctacagagggacaccttgccatggagctctagttatgagatatctccccaggacaatttctctattgcaaagtgtactccatacatattgggctagtagtgccctgccgatagagatgacgccagagtcagcccccagtccaaaactaggtggccgcttgggctggcctctggatccatcgccagagggggtctacagaaccggggcaggtagcacaagagcaatcccgaatgagcccccaaatttttaactgctcaactggttcaccatgcccactacctacacagctgatttatcaaaataggggaattgcaatagagagagtaattcatgcagagccagctgtgcagtctggctgagttttattattactcacatcaatttcccctagcattcagggatcagaggtttttggggtttttgtttgtttgtttttgaaatggagtttcgctcttgttgcccaggctggagtgcaatggcacaatctcagctcactgcaacctccgcctcccaggtttaagcgattctcctacctcagcctcccaagtagttgggattacaggcatgcaccaccatacctggctcattttgtatttttagtagagacagggtttcaccatgttggcaaggctggtctcgaactcctgacctcaggtgatccacccgcctcagcctcccaaagtgctaggattacaggtgtgagccactatgccccaccttggagatcagagtttttaaggataatgtggtgggttaagagaggccagtatgccaggagtgctgattggttgtgttggagataaaatcatagaaagtcaaggctgtcttcttgtgccaagtcagttcctggttgggggacacaagatcagatgaaccagtttatcaatctggtggtgccagctgatccatcaagtgcagggtctgcaaaatatctcaagcactggt

SEQ ID NO: 89672 - DNA, 695 bp, Homo sapiens
aaatccagactcacttcccttctctaagtcttgataccacatcgtcaggttgctgtgagatgagcaaggagcttaagagcgtgtagcctttggtctgggtgtggtggctcacgcctgtaatctcagcactttgggaggctgaggcgggcagatcacctgagatcgggagttcgagactagcctgaccaacatggagaaaccccgtctttactaaaaatacaaaattagccgggcgtggtggcgcatgcctgtaatcccagctactcgggagggagaattgcttgaacctgggaggtggaggttgctgtgagccgagattgcgccattgcactccagcctgggcaacgagagtgaarctctgttcccccgcccaccccccaccgccaaaacaaaaaacaaaaaaaaaaaaccaaagagcgtgtagccctggcccatggtaaagttctcaataaacggtagcaaccagtgggccaaggcaagcatttgagtagctttcctaaacctctctgtgcctcagtttcctaagctgtaagctggggtccatgatagcacctaccttatagaggagatgttcattcatataaagtgcctcagagcagtgcttggcaagtgctcagccaggtgttagtctcctacatgtatattcctgttttgtcaaatatatttcagtctgaacataagctcttcattgacac

SEQ ID NO: 89673 - DNA, 737 bp, Homo sapiens
tatgggaatccctgctctgcctcctaaagacccaacgagatcctctgttgtaagatgctgggggcctagatagtgcctggtacacagtaaatgcccaagagatatttactaattctatgcaaatataaaggaccctcttattactccatgcagccttaggcccaaggagtcctgcactgtgcatacagaaccccacttaccacagccagtaagcgcaggggtggacggggaacagacagcaccaatgacagacaggtgggacagctggggacccgttccagaaggcctttgatttattcaatgttgactcacctccactctgtgccctgcctgcactatctcatttaatcctaatgatcctgcaaagcaggtgtgtttgcctaaatcttttttttttccttccttccttccttctttcctttccttccttcctttccttccttccttccttccttccttccttcctttctttttctttctttctttccctcccttccccccttcctttcttttcttttcttttcagggcctcactctgttgcccaggctggastgcagtgctgcaatctcagctcattgcagcttctaccttctgggctcaagtgatcctcccacctcagccttccgagtagctgggactacaggcgtgcaccaccactcttcttttttttttttttttgtagagacaggattccaatatattgcccaggctgggctcaaactcctggcctcaagca

SEQ ID NO: 89674 - DNA, 1301 bp, Homo sapiens
gcataaaccgcagattaaatttaggtattagaattggaattcaaagtgaattaaaaattttcataaagcttgcatggagaattgtacacccctttctagatgcccagtactaaggttgcattgtactatgtgtaaataggaatgaaaatattgcactgggggagctgggtgtgatgtctcacgcctgtagtcccagcacttcgggaggcagaggtgggaggatcacctgagatcgggagtttgagaccagcgtgggcaacatagaaagatcccgtcctccacaaaaaatttaaaaattagccggaaattgtggtgcatgcctgtagtcccacctactcaggaggcagagacaggatgatcacttaagcccaggagatcaaggctgcagtgagctataattgtgccagtgcactccagcctgggtgacaaagcaaaatmctgtctcaaaaagaaaagaaaaatattgcattggggtctggaaggagctgtgtcacagaaacctaactcctaaacaaactgaagtctgaaaattagtgagtcattcacaacagtatgtaattttaacacatggcttctgtgcactttacaaacacagaatttcacaatggaaagttttcaacaatgccattcccgattgccaagagccagagtcactgggtgaagggatcctggaaatggcctaaggagctgtagcaaacaaacagggcctatgtgcagtgttgcaccacaatatattgcaaagtacactacagggtatcatacatgtccacctgagcaccacccagtctcacatgatccgtttgctaatgtttcagacacaaatcaaaccatgcctattgtgtagtctgcaattgcccctggccactctctgagttaccaagccaagttgcaaaatgataatattttgaaatcatgaagtttgtgtctctgaagagcaaggaaccagggctcctgagcatgtaaggaggacagcagatgcccctgaggacagctgtcctggccagaagcagattcgccctgaagctaataaaggtgaagctttggggcctgtaacttacacaggtgccttccaaggttggtggggacagcaatttttcctaaagaggctctcaaattttttcacatccactaaaacctggatccacccacctcttctttctctagccattctcagaaaattttgaaaatgcgtttattggccattttctacagggaaacattgacaaataccggtgagatttctggcatcccctacagggcctagcacagagccatccacatggtagggctcaataaccatt

SEQ ID NO: 89675 - DNA, 1301 bp, Homo sapiens
gcataaaccgcagattaaatttaggtattagaattggaattcaaagtgaattaaaaattttcataaagcttgcatggagaattgtacacccctttctagatgcccagtactaaggttgcattgtactatgtgtaaataggaatgaaaatattgcactgggggagctgggtgtgatgtctcacgcctgtagtcccagcacttcgggaggcagaggtgggaggatcacctgagatcgggagtttgagaccagcgtgggcaacatagaaagatcccgtcctccacaaaaaatttaaaaattagccggaaattgtggtgcatgcctgtagtcccacctactcaggaggcagagacaggatgatcacttaagcccaggagatcaaggctgcagtgagctataattgtgccagtgcactccagcctgggtgacaaagcaaaatactgtctcaaaaagaaaagaaaaatattgcattggggtctggaaggagctgtgtcacagaaacctaactcctaaacaaactgaagtctgaaaattagtgagtcattcacaacartatgtaattttaacacatggcttctgtgcactttacaaacacagaatttcacaatggaaagttttcaacaatgccattcccgattgccaagagccagagtcactgggtgaagggatcctggaaatggcctaaggagctgtagcaaacaaacagggcctatgtgcagtgttgcaccacaatatattgcaaagtacactacagggtatcatacatgtccacctgagcaccacccagtctcacatgatccgtttgctaatgtttcagacacaaatcaaaccatgcctattgtgtagtctgcaattgcccctggccactctctgagttaccaagccaagttgcaaaatgataatattttgaaatcatgaagtttgtgtctctgaagagcaaggaaccagggctcctgagcatgtaaggaggacagcagatgcccctgaggacagctgtcctggccagaagcagattcgccctgaagctaataaaggtgaagctttggggcctgtaacttacacaggtgccttccaaggttggtggggacagcaatttttcctaaagaggctctcaaattttttcacatccactaaaacctggatccacccacctcttctttctctagccattctcagaaaattttgaaaatgcgtttattggccattttctacagggaaacattgacaaataccggtgagatttctggcatcccctacagggcctagcacagagccatccacatggtagggctcaataaccatt

SEQ ID NO: 89676 - DNA, 2498 bp, Homo sapiens
agtaaatgcattaggaagcttttggatgtgtgatttagttttcacatcatgtaacatttgctgagtttatcagtcccctgaggcctccgcaggacagaagaggagagagagacaaaaagctcttacaaataccattattattgcaattattcactaaggcagaaggtggttttatcttagattcaaagctttgctgggaggagggaagagagaggagcacagagccagggagactgtgagcacattggctggagatgttctaaccatattggaaggacaggaggtcacagaaagtctggtcccattccatcagcttagatctgagggagatgaagtggacatgacaactgagcattcaatctagtggagccaacgtcaagcccttaaaccagcctagccatggatttagcttgagctgcaaccaggagcttagattctttcaggactcagaggcctataaaatatggtgcaaaactttttacataacaaaatctcccactcttcctacacctctattcccatcatggaactatgtggagtttccagaatctactgtgctctttgcccacttttcctttgttcatgctagggcttctgcatggtgtgccagcttttaggcctggcaaacacttacttttctttcaagactcaggtcagttgctagctcctttgggactccctaagaaatcataggtacttctttttggtctactaatagcatctcaatttaacttaaaggccctagggaatttattcataaatgtttgattgacatatctatttccacaatagatattgaaacgggagaattccctgaaccccttgtgagatgtgcaacaggggtgtggctcatttatttggcctccacgtgctcaaacctcttatgggaggggagcatgcagatgagcaggtgtaggagccaaggcgagtgcttttggggtctgaccctatggcagtgcctaggggtgttacaatgcttttttagccctgctgtctggggacaacttaagtgttaaacagctcagtgaagagtcagtgtgacagcctttttgggttcctgcacccagtgtgccctgaattcttgtctggcatccaggaagaatcaggtcacacagacttgaaggatggtgaatatggggattttattgagtgatggaggtggctctcagtgggatggggagctacagaggggatagagtggggagatgatcttcccctggagttcagccatcctgcagctgatctcctctctgaccatccccagctgaactcctctaaaagttcagatgcatcttctcttctctccttctctaccatgccactctgctgctctgctgctttgctgctcttctgcttatggagcctgggatttggggtttatacaagcacacgactgggggctgtggtgggccaaaaggcaacattcgggcatgaaaacaggaatgcctgttctcatttaaggccatgtgtttccaggcttgagggtggggcctttgctggggaactgccctcttctacccaatacttccctgcctcctgtccatatcaatattaagatttttgtggataaggactctcactgaagtatgcacatctctaaaaacagcattcatcgttcatgttggaatactaataaatgtttgcagaatgaatgcataacaaatgccaagaatgctatatgtctgaagttttactgtagggcaaaaatgctgaattactaatggaagtttcccttcttggatcctggtaatcaggctgcagtgtggctactagcaggaacacaggcagggagatggtggccatgtgagagctgtgttggtgagggtgaagtccagttcctgagaacactattgcataagagtggcagtgggctaggggctaggcagagaaattgcgattcaaaggctccacctacccagcactgtttagattattattgttaaaatataccccagctgacagaccaaatgaacaccctgtggctaaaatgagacacaccagaaatggattcaaatgcccacagcaaggagaagagttaatcaggtacccctatattaccagctgccataaggtcttctttcctgtacttgaacaaatactagttcttaaaaacaccttcaaaacagctacaactgggagtttcccaactgacctgggtggaccacccagctccagccaactgaactgcccccacccctccttgtggccccactagcaactccaaytggataggagactgaccttacaaacattcttgcctgataaacagccacgaacttcaacccagtttcagccagctcatggagaatgtgcaaacttctttatgctctttagttcacattttgacataaaatttcaccttactttaatgttaaaactccacccaaaaataagcacaatatttctgttatgtatgtttgcctactgccacaggggttgacttcccccataaatattcatagacttcctccaaacctgctaaatacacgtctaagatg

SEQ ID NO: 89677 - DNA, 595 bp, Homo sapiens
tggcaaagaattgaatcagacaaattagaaatgaaggaagaggacatagagtaccaggttaatatttttataagcttaagatgataacatttcaggtcctcatagtaaaacattatacctcttccctccctatgatactttcaactttttacttgtgttataattttttttatcaatttctctctgtcagattctaagcacctcacaggtaagataaacataattacagtgttaacttaaattcaagtggacattcttgctaccaattattaacacacacaaaatatatagccaacaggtatactcgttaatgttcatggtctgktaactactactgaggactctgagtgatttaaaaaaaagggcttaaggcccaaactctcatgaaaatgtctgaaatgattcctgttgaaaaggaattgaagtggatagggttattttcagtggcaactgaccaatgaaattcaatttatttcaatttaacaatcctattatgtttcaaaaaagacagtgtaaaaatatactctccagctgtattggaagagaattttaaaggactgcttttggcacacagttggtattcttaagaaatcat

SEQ ID NO: 89678 - DNA, 1356 bp, Homo sapiens
accctgacttatgtatgaagatctctagtatttctttactattgtgaggatgaccagcggagaggtaatattatagcagttgcctagtacttcttccctagagcactgaagttctaaatatgaaagagtggataagtaaatatatcttttttatcactttcattttgtttcattttttagactttaaatattaacacaatgacagcctcatttgaagctagcagcaaatatttggaaggagggaacctttaatacatcaagattaaagttaactttaaattataaatgagtcattttaatatgtgggagtgagaatcttaaaacataatgaaaacctccaaaagaaaagtgaattaggaaatacatgcctgcttacctgtctttcacaccccaattttagaagaaaaatacttgggatggattgagtagggggcaagagagaaaaaaatatattacagtaaatatcactgaaaaatgttcaatttgtggaaatgaatacaaataaaattttatcaatcaacttttttttttttttaaagagacaggatctcaccatgttgcccaggctggagcacagtggctattgacaggctcgatcaggcacacttcagcctagaactcctgggctcaagggatcctcctgcttcagcctcatgagtagctgggactatagatgtgcactagtgagcccagctcaacagttagttttaaaggcatagaaatgtttttatgttcagagaaaagtatcagcgctgatacagggccgtggtagctaaaagtcaattaaatttgaaatgtaactagtacacagctttgcagaccattgaatagactaccaaatcaagcacctttgcagtaaaacctttgtagagacttgaaattatttgaattttttccatgtcacaaaattataccaayttgtagttgattagaccacaaaatataggtatgcttatgttggttgaatttatgtatttgatttgccctgcaattttcttatgaactcttacaattttttttttttttttgagatggagtcttgctctgttgcccaggctggagtgcagtggtgctatctcggctcattgcaacctccgcctcccgggttcaagcgattctcctgcctcagcttcccaagtagctgggattacaggcatgcaccaccatgcctggctaatttttgtatttttagtagaaacagggttgcatcctgctggccaggctagtctcaaactcccaacctcaggcgatccgcccaccttggcctcccacagtgctgggattacaggcatgagccaccgcgcccggccttaaaatgtttttagcgaagctctgttagttggttttgaactctgg

SEQ ID NO: 89679 - DNA, 611 bp, Homo sapiens
atttttggagccatatcttaaagttactcaactctactgtcatagcataaactcaaattctgttaccacaccctgtggtttaaaaagagaaattgaggcctggcgtggtgtctcatgcctgtaatcccagcactttgggagaccaaggcaggagtatcccttgagtctaggagttcaagacactcctgggcaacatggtgataccctaactctataaaaaatacgcagaatagtctggataatggagccttkggagaaaaagtcttaaaaaagaaaagaaaagaaaaaacaaaacaaaaacaagcaaacaaaaaaaaactggtcgagcatgggggtgcatgcctgcagtctcagctactagggaggctgaggtgggaggatcacttgagcccgggaagtcgaggctgcagtgagccgtgataccaccactgcagtccaggctgggtgacagagtgagaccctgtctcaaaaaaaaaataagaccaggtgtggtggctcatgcctgtaatcccaacactttgggaagcggaggtgggtggatcagccgaggtcaggagttcaagaccagcctggccaacatgatgaaaccttgtctctactaaaaatacaaa

SEQ ID NO: 89680 - DNA, 662 bp, Homo sapiens
tcttgaggggacctggtttttggctacagcatcagctcaggtgttgggaagaaaaactcattatcgtgcatcagactcaagagctcagtggcagtccccagacttycagtggggatgtggagaaagaacccggcaagtaagaagcactgcttgggcgggcgtggtggctcacgcctgtaatcccagcactttgggaggctgaggcaggtggatcatgaggtcaggagatcaagaccatcctggctaacagggtgaaaccctgtctccactaaaaatacaaaaaaaattagccgggtgtggtggcgggtgcctgcagtcccagctactcaagaggctgaggcaggagaatggcatgaacccgggaggcggagcttgcagtgagccgagatcgagccactgtactccagcctgggcaacagagtgagactccatctcaaaaaaaaaataaaaaagaagcactgcttgtgattcccttcaatccttggttgactttggggcgtttccagaacactgactgcgttgcaattcagcacagctcctaaaagccagactctggtccaaaagcaagttaagatgctgataacagaatagccctttttctttcagccctttgcccccataacttcctcttaacactcaacatttcaagccttgattgagag

SEQ ID NO: 89681 - DNA, 662 bp, Homo sapiens
tcttgaggggacctggtttttggctacagcatcagctcaggtgttgggaagaaaaactcattatcgtgcatcagactcaagagctcagtggcagtccccagacttccagtggggatgtggagaaagaacccggcaagtaagaagcactgcttgggcgggcgtggtggctcacgcctgtaatcccagcactttgggaggctgaggcaggtggatcaygaggtcaggagatcaagaccatcctggctaacagggtgaaaccctgtctccactaaaaatacaaaaaaaattagccgggtgtggtggcgggtgcctgcagtcccagctactcaagaggctgaggcaggagaatggcatgaacccgggaggcggagcttgcagtgagccgagatcgagccactgtactccagcctgggcaacagagtgagactccatctcaaaaaaaaaataaaaaagaagcactgcttgtgattcccttcaatccttggttgactttggggcgtttccagaacactgactgcgttgcaattcagcacagctcctaaaagccagactctggtccaaaagcaagttaagatgctgataacagaatagccctttttctttcagccctttgcccccataacttcctcttaacactcaacatttcaagccttgattgagag

SEQ ID NO: 89682 - DNA, 662 bp, Homo sapiens
tcttgaggggacctggtttttggctacagcatcagctcaggtgttgggaagaaaaactcattatcgtgcatcagactcaagagctcagtggcagtccccagacttccagtggggatgtggagaaagaacccggcaagtaagaagcactgcttgggcgggcgtggtggctcacgcctgtaatcccagcactttgggaggctgaggcaggtggatcatgaggtcaggagatcaagaccatcctggctaacagggtgaaaccctgtctcyactaaaaatacaaaaaaaattagccgggtgtggtggcgggtgcctgcagtcccagctactcaagaggctgaggcaggagaatggcatgaacccgggaggcggagcttgcagtgagccgagatcgagccactgtactccagcctgggcaacagagtgagactccatctcaaaaaaaaaataaaaaagaagcactgcttgtgattcccttcaatccttggttgactttggggcgtttccagaacactgactgcgttgcaattcagcacagctcctaaaagccagactctggtccaaaagcaagttaagatgctgataacagaatagccctttttctttcagccctttgcccccataacttcctcttaacactcaacatttcaagccttgattgagag

SEQ ID NO: 89683 - DNA, 662 bp, Homo sapiens
tcttgaggggacctggtttttggctacagcatcagctcaggtgttgggaagaaaaactcattatcgtgcatcagactcaagagctcagtggcagtccccagacttccagtggggatgtggagaaagaacccggcaagtaagaagcactgcttgggcgggcgtggtggctcacgcctgtaatcccagcactttgggaggctgaggcaggtggatcatgaggtcaggagatcaagaccatcctggctaacagggtgaaaccctgtctccactaaaaatacaaaaaaaattagccgggtgtggtggcgggtgcctgcagtcccagctactcaagaggctgaggcaggagaatggcrtgaacccgggaggcggagcttgcagtgagccgagatcgagccactgtactccagcctgggcaacagagtgagactccatctcaaaaaaaaaataaaaaagaagcactgcttgtgattcccttcaatccttggttgactttggggcgtttccagaacactgactgcgttgcaattcagcacagctcctaaaagccagactctggtccaaaagcaagttaagatgctgataacagaatagccctttttctttcagccctttgcccccataacttcctcttaacactcaacatttcaagccttgattgagag

SEQ ID NO: 89684 - DNA, 1020 bp, Homo sapiens
ggccaacatggtgaaaccctgtctctactaaaaatacaaaaattagctgggcatggtggtgcatgcctgtaatcctagctacttgggaggctgaggggggaaaatcacttgaacccgggaggcagaggttgcagtgagctgagatcacgccattgcactccagcctgggcaatagagcaagattctgtctcaaacaaaacaaaacaaaaaaaaagaaaacctttcagatgtgtgcagcaggtgcattttgttatggtttacaggttgtggggtgtcagtaagtaaagtatgaatgtgtagatcctacaaagatcttcaactgatcttgaggggttggaaataagtctaaggcagacatgagttactgtgggagataaaagatgacccctggttccaaagaacctagaaacaatgtggacaggaaagaaaacagctaagttcatcatcctttatcccctcacttctccatccatggagaactgttttcccaggtccagcctgccttctgcgaaaggattcctcttttttcacatacccaggcctagttagaaatgctcccgagggagtgtccacaggggttggggcgcagggagggatgccccaggctggtctcttcgagtggatgccaggtagtcccgcagtcagacactcgggagggccggccagtggtcggcgtcgggttgtggacctgcatctgccggggatccaggcctaggtagcctctcagtgatgtttccccycaacccacccaccttgttctttttgacgctctcaggggctcctggagcagactttttgttctgaattaaatggtggttttgccagcaaccttcagggctggggtatttccagcaagggatgccccgactcctcttcccacgggtgtactgtggacggagaagacacagcccaggtgcagtcaggtctcttcccctcacactggagccactgggccttccctcctccatttctacagcagagaagggtgggagcagctgtgggatgggggtggccacccca

SEQ ID NO: 89685 - DNA, 1020 bp, Homo sapiens
ggccaacatggtgaaaccctgtctctactaaaaatacaaaaattagctgggcatggtggtgcatgcctgtaatcctagctacttgggaggctgaggggggaaaatcacttgaacccgggaggcagaggttgcagtgagctgagatcacgccattgcactccagcctgggcaatagagcaagattctgtctcaaacaaaacaaaacaaaaaaaaagaaaacctttcagatgtgtgcagcaggtgcattttgttatggtttacaggttgtggggtgtcagtaagtaaagtatgaatgtgtagatcctacaaagatcttcaactgatcttgaggggttggaaataagtctaaggcagacatgagttactgtgggagataaaagatgacccctggttccaaagaacctagaaacaatgtggacaggaaagaaaacagctaagttcatcatcctttatcccctcacttctccatccatggagaactgttttcccaggtccagcctgccttctgcgaaaggattcctcttttttcacatacccaggcctagttagaaatgctcccgagggagtgtccacaggggttggggcgcagggagggatgccccaggctggtctcttcgagtggatgccaggtagtcccgcagtcagacactcgggagggccggccagtggtcggcgtcgggttgtggacctgcatctgccggggatccaggcctaggtagcctctcagtgatgtttccccccaacccacccaccttgttctttttgacgctctcaggggctcctggagcagactttttgttctgaattaaatggtggttttgccagcaaccttcagggctggggtatttccagcaagggatgccccgactcctcttcccacgggtgtactgtggacggagaagacacagcccaggtgcagtcaggtctcttcccctcacactggagccactgggccttccctcctccatttctacagcagagaagggtgggagyagctgtgggatgggggtggccacccca

SEQ ID NO: 89686 - DNA, 1420 bp, Homo sapiens
atagcaaggccctggggcacccagagctcagccagaattggagcactaagggtggggtcaggagctggttctttcagtccacaaacatccatcctcttatctaccttgctcaacaaagcatttggaccacagcgagtgtttagtaaatacaatgctttacttaagctgcatgggcggtggataagactttcttgttcctgtaacagatacactctgagcacctcccagatgccaggcctggcttggggaccccggggaacaaaagcaacaaagcccctgatctcacaaagcttaccatgattggggaggataaaccaccacaaacaaatacttaggacactgtcaggcagcactcggaaggaaagagaagaggcatggtgtcttacaggtcacagcaagtcctctctgtgaaggtgactccccactgcacacttcrgaaccccagaggcagatgtttagagatgtcccctttagggccaggcaggcggctcaagcgagattctcacaccaggtgctaaaccacttgctttaagattaaactattcccctgcttgattgcaatatattttaatatagcctgtggcccaagcaaaagccaccccacaggctgtttaggacctaagggctgtgagcatttgggaagttcaatgctacagaatgtaatggatccatcccccatagtatctataggacttacagaatcatacaggtacatgctatagggtaaatgcaagaagggagggtgtagtgtccaagagtttttagctaatgctacatttaggttctcaaatgctcccatcaattgaattagacccctgccgacagcgaagaagagagcctgtgtcctggtaagttcacctgcaatggatgttccacttggtacactataacaagtaggaactccctagcttctccacagaaataaccaggattaagaagtctgtagccattgagtcctttttctatatactgtatttaagtacatatttctgcacacagcttttttaaagaagatcttactgctcttttacatgaatttgccaagcaacattcttggcccttcttcgacggtatctccagctatgtctcattttctgtttgtttgtcattttagtatctgtgcgccctgatggtagaaatggtatggtgatgacaactcttctggtatttactgtatttacttgtattccttcttcagtgaactacctgtttaagctctttgctcatgttaccattgcactatctttttagtgttctttctctttttcttcttcttcttcttcttattattttaaaatggagtctcactctgttgcccaggctagagtgcagtgatgcaatctctgctcgctgcaacctctgtctccagggtctggtccaagtgattctcccgcttcagcctccgagcagctgagattac

SEQ ID NO: 89687 - DNA, 611 bp, Homo sapiens
gctttaaagtctgcgcacatcttggagaatgttctcatttctgtccttgttgagagaaaggggaaaggggaaatgcaggcaggacttgctaggagaattttttcccctttcctactcactaagggcatacaagaaactctgaaaagtatctgagacatgaaatactgccaacacaagacacaaaacactgcctttttggaaaaggctgtctgaagattatataaggagggccgggcgcggtggctcatgcctgtaatcccagcactttgggaggccgaggcgggcggatcacgaggtcaggagatcgagaccatcctggctaaaayggtgaaaccccgtctctactaaaaatacaaaaaattagccgggcgtggtagcgggcgcctgtagtcccagctactggggaggctgaggcaggagaatggcgtgaacccgggaggcggagcttgcagtgagctgagatcgcgccactgcactccagcctgggcgacagagcgagactccgtctcaaaaaaaaaaaaaaaaaaaaaaagattatacaaggagataactcatatgagtgtgtgtgtgtgtgtatacacatctggacaaccacgtgtacagggcaagac

SEQ ID NO: 89688 - DNA, 1412 bp, Homo sapiens
tgggtcagaggcatcgctctggagccttcttcattggacggggagaaactagggttgtggggtgacctccatggagttccaacatagaggtaggtgtggatggccacgcaggtagaggcagctcctgagcagatgctgctaaaatttcacaatctgaggcgttatcatgcagagtctacagtgaacaccgtcaacaatgcgtgcaggaaaaaattttaaaatgtctgatatgctagcacataacacacaagcaccaatgaaatccatctttttataaccacttcaactttaagacctaagcctttattacgattaaaaatgtgttgataaagagcccctgctgttaagtctgatgtcaaatttcataaatcatgaagtttttaagataacttctactgaagtataatatacaaattaaaaagtacacatatcacaagcacatggcttgatgtattttcagaaactagtcatgaagttttatggccaacttctactaatctttcaaataatgtgacaagaagagacagtttggcatagtgaaaaggaaaaaccagtagccagagaagctgctgggtcattttacttcattctggctctccgacactggataaatcagtgacttatttcagtcttcatttccacatctaatcagagtagacaatttctaagtgtaccttctagtctaaaatgttatactttgaaaatgtatgttcccttaactgcaaaaaagcactctcgatgatatcactcacagtgtttcagacgactcagttatgccaacatgtcgcgctaactcactaccacgcaagggagaaagtagttatgctgcaactttttccttcccaggccacttcctaatacatttacyagcaagaaaggcatgtcttcagcaaccatccacgtcagagaacggcgaagcgctggtagcagagcgtaagcagcccttgggtgcctgcacctgctttccagtgagccttttagatgtggctccctggttccgtggctcccggctctcagctcctgggggcaagcatgcctggagtcgccacatggtgcccaatattccgggctacagagatggcctgtgctaattacgatacgtttctctccacgaccgtggaacataattctgatgttgactatggcaagctcttaaagtcagccttttctgaattttaacaacgtgttactacttgggcttggtaacgagatgttcttgctcacattgatcaaaactacattaggtctgttaagtcagcttttcatcccattgtaacaaaaaaaacatagaaaagaaaaaatatataatgaaaaagattctattaggaggtcaggccacctattttaaggaattgcagtaactccttcagatcagttgaagaccccatattatggtttccacaaaataaaag

SEQ ID NO: 89689 - DNA, 1412 bp, Homo sapiens
tgggtcagaggcatcgctctggagccttcttcattggacggggagaaactagggttgtggggtgacctccatggagttccaacatagaggtaggtgtggatggccacgcaggtagaggcagctcctgagcagatgctgctaaaatttcacaatctgaggcgttatcatgcagagtctacagtgaacaccgtcaacaatgcgtgcaggaaaaaattttaaaatgtctgatatgctagcacataacacacaagcaccaatgaaatccatctttttataaccacttcaactttaagacctaagcctttattacgattaaaaatgtgttgataaagagcccctgctgttaagtctgatgtcaaatttcataaatcatgaagtttttaagataacttctactgaagtataatatacaaattaaaaagtacacatatcacaagcacatggcttgatgtattttcagaaactagtcatgaagttttatggccaacttctactaatctttcaaataatgtgacaagaagagacagtttggcatagtgaaaaggaaaaaccagtagccagagaagctgctgggtcattttacttcattctggctctccgacactggataaatcagtgacttatttcagtcttcatttccacatctaatcagagtagacaatttctaagtgtaccttctagtctaaaatgttatactttgaaaatgtatgttcccttaactgcaaaaaagcactctcgatgatatcactcacagtgtttcagacgactcagttatgccaacatgtcgcgctaactcactaccacgcaagggagaaagtagttatgctgcaactttttccttcccaggccacttcctaatacatttactagcaagaaaggcatgtcttcagcaaccatccacgtcagagaacggcgaagcgctggtagcagagcgtaagcagcccttgggtgcctgcacctgctttccagtgagccttttagatgtggctccctggttccgtggctcccggctctcagctcctgggggcaagcatgcctggagtcgccacatggtgcccaatattccgggctacagagatggcctgtgctaattacgatacgtttctctccacgacygtggaacataattctgatgttgactatggcaagctcttaaagtcagccttttctgaattttaacaacgtgttactacttgggcttggtaacgagatgttcttgctcacattgatcaaaactacattaggtctgttaagtcagcttttcatcccattgtaacaaaaaaaacatagaaaagaaaaaatatataatgaaaaagattctattaggaggtcaggccacctattttaaggaattgcagtaactccttcagatcagttgaagaccccatattatggtttccacaaaataaaag

SEQ ID NO: 89690 - DNA, 581 bp, Homo sapiens
tttctatgtgataggtaacaggttaaacactttgcattaccttacacagtaaaatttgaaagctttaaatacaaacagttataaaacaaagtcttatccaaatgtgaaatgtagtgcctactgggtgaatgtgataccccaccttcccttaaaaaaagaaaaagaaaatactgtggggtcttcctctctccatagcttgtggatctcaactacccgtgggatgtgcacagaccaaaaacagaaaaagagaaaaaatgaaatatatatatacaaacaaaaccttttggtgactgtttctaaaaacaaagatttagaaagcagtatttcacaaagtgaaaaataagtgcacacttggtcagaaaattttcaaaatctgtagaatattacaacataaaaatacagaatttcaacctcatgcacacacccctctgaaaatgtgcccagtgaccagctgggattctctgtgtgtaccrcaagcccaaagcagcattacacattgcccttctggatgagactgaccttacctctgccacacaaactataaactgaatgccacaccctttagttatgtaatttgctca

SEQ ID NO: 89691 - DNA, 1075 bp, Homo sapiens
atattaagtcccctaaaataataaggctcaaaatctttgtcactggtttattcgtaggctaatatagctgggcacagtgcaaacaggcttcccctgctgcctcgtgaatcctcaactggaaaaacccctttgaggggtaaggtcactggtcttcgtcactgctgggtcctgcatgtgtgccctggagcagaagctgtcccctggcacatgcaaatggtattcaggcaactgctcaccagggaccctatttagaccactaaactcatgtcatttaggcctgtgagtaaaggtcatgtggctgccgggaaatcaaaagaaaaaaagtatgtttcatccacagtctttcaaaggtaagaaagcaaatttggaagtctgttatttttattcttttctaataacagttcattaagatataattcacacccataaaattcacccttttaacagtttacagttcagtggtttctagtacattcacagcagtagatgccatcatcaccatctaagcccagaacattttcatcaccccaaaaagaaactccgtacctagtactcagtacctcagaacctagtatcagcagccactcyctggtccccaactctcactctgaccccaacagccctgtcactatatatttgcctactgtggatgtttcatacaaatggaatcatacaataggtggtttttagtgactggcttccttcgcttaccatgttttcactttggttgagtatatacctaggaatgtagttgctgggtcatacagtaacactatatttaacattttgaagaactaccagaccattttccaaaatgcctgcgtcatttcaccttctcaccatcaatgaacaagagttccaatttctccacatcctacatagacttgctgtggtcttttttgttatatccatcctagtggtgtgaagtgctatcttgttgtggtttttctttttcctaataaataatgttcagcatcttttcatatgcttatcagccatttgtatcttgtttttgtagaaatgtgtatttgaatccgttagccatttttaaattgggtcatttgttgagctgtaa

SEQ ID NO: 89692 - DNA, 1075 bp, Homo sapiens
atattaagtcccctaaaataataaggctcaaaatctttgtcactggtttattcgtaggctaatatagctgggcacagtgcaaacaggcttcccctgctgcctcgtgaatcctcaactggaaaaacccctttgaggggtaaggtcactggtcttcgtcactgctgggtcctgcatgtgtgccctggagcagaagctgtcccctggcacatgcaaatggtattcaggcaactgctcaccagggaccctatttagaccactaaactcatgtcatttaggcctgtgagtaaaggtcatgtggctgccgggaaatcaaaagaaaaaaagtatgtttcatccacagtctttcaaaggtaagaaagcaaatttggaagtctgttatttttattcttttctaataacagttcattaagatataattcacacccataaaattcacccttttaacagtttacagttcagtggtttctagtacattcacagcagtagatgccatcatcaccatctaagcccagaacattttcatcaccccaaaaagaaactccgtacctagtactcagtacctcagaacctagtatcagcagccactctctggtccccaactctcactctgaccccaacagccctgtcactatatatttgcctactgtggatgtttcatacaaatggaatcatacaataggtggtttttagtgactggcttccttcgcttaccatgttttcactttggttgagtatatacctaggaatgtagttgctgggtcatacagtaacactatatttaacattttgaagaactaccagaccattttccaaaatgcctgcgtcatttcaccttctcaccatcaatgaacaagagttycaatttctccacatcctacatagacttgctgtggtcttttttgttatatccatcctagtggtgtgaagtgctatcttgttgtggtttttctttttcctaataaataatgttcagcatcttttcatatgcttatcagccatttgtatcttgtttttgtagaaatgtgtatttgaatccgttagccatttttaaattgggtcatttgttgagctgtaa

SEQ ID NO: 89693 - DNA, 758 bp, Homo sapiens
aaaaaaactgtgagaaaacattggagagccatgttataagaacagaagcaaacaagaggtagcttgagttttgccatttaagtgagattgtacttattttggtaaccaaggtcatcactgacaggaaaatagtgatttctctataagatctgctttttttttttttccgcgacagagtctcactctgttgcccaggctggagtacagtggtgcgatcttggctcactgcaacctccacttcctgggttcaggcatttctcctgtctcagcctccctagtagctgggattacaggtgcctgtcaccacacctgctaatttttgtatttttggtagagatggggtttcaccatactggcctggctggtcttaaactccttacctcaagtgatctacccgcckcatcctcccaaattgctaggattacaggtgtgagccaccacacctggcctaagacctgctgttatgtaagaaatcttaaaagatattcaggcagtagaaatatggtactcaacaaaaacttacaactacacaaagaaataaggagtgctggaaattaaataaatgaaagtaaaaataaaactatttaggttatctttcttatttttaattgctctaagacttaattgactctctaaaatagaggttagcgagcctttccataaaggatcagatagcaaatactttgttttgtaagccaaatgaactttgctgaaattactaaatttcaacattgtagtgctaaagcagccatagataa

SEQ ID NO: 89694 - DNA, 831 bp, Homo sapiens
cctctactccattaccgcagtaaaggttctgctgtgaagccagatatgcagcagccctccctccagcaccttgctttcacaggatctgtttcttgccatgcatgccatagattcacagagcattttataaattgaaaaaggctattcaatggcaaggtattactattaccgtgtatccaactggtgatgttatccctatagacaggatgtgttagggacaccctgggtctcttcctccccactccttcccattttgaagtacacatttatgtttatcaattgttactatatccagagcccagtcttctcctatttctcctacttgttccttgccaacaaatttcattaaggctcttctgggagacccaaaaagtggtgggaagaaaatgcaattctgacgtgcaaaggtgggatgatggaaaatcaggaatctgttgtagaattttaatttaaatataccattgtcgttaaatacaccaatggcgaggggctgagtcattgagcactagaattccacatgcrtttgataatgatggtttctagtcggtaattacgtggctgtggcccccatgtttttcttggagtctttgtgatactccctcaatttgctcttcctgtactcacttcttgtctttcattcttgtccttgaatattttgggtatataggacaaaaataagaatgcaagcaggcacccaccagcatgacaaaaatgaaatagatggaagatgcttactgttggcaaggaagtgggacaactggaactcacatgcactgctggtgggagtatacattgacacaacctttttggaaaaatggttgctagtatcta

SEQ ID NO: 89695 - DNA, 726 bp, Homo sapiens
attcgtgaggggagatcttgcaccagatatggaaccaggacttccaccgaaatcttagctctggaagttgatttttttcgtgggagttgagagtgggtgggcgtgcagagcaataacacaatggttctcaaagtgtgttcctggaatagtagcagcagcaacagcacctgggaattgttagacacacaaaacatttggctctattccagaccaacaactcagagactctgaagatgggcccagcgaactcttttaacaaggcctcccggtgattctaatatgctgaactttttgataatgttcaaggactgctggtatgctcatcttgtctttttttccttaaagacaggatcttgctctgttgcccaggctggagtgcagtggtgycatcatgactgactgcagcctcgaactcctgggctcaagcaatcctcctgcctcagcctcctgagtggctaggactacaggcgtatgccaccacatccagccaatttctaattttttgtagggatgtgtcttgctatgctgcccaggctggtctcaaactcctggcctcaagagatgctcccgccttggtctcctagggagctggggttataggcctgagccaccgtgccaggcctgatgcgctcttttccgtggttacgttctaccagtgtgacctccatcccttctccctcttcacttccttctttctttccttccttgcataaacattgaatgtac

SEQ ID NO: 89696 - DNA, 615 bp, Homo sapiens
ttacctccaaacttatcaaagtgtgcaacttcaatatatgcagtttattgtcggtcaattatacctcaataaggctgttaaagggaaaaaaaacaacggctgggcaagctggctcacgcctgtaatcccagcactttggaaggccgaggcgggcagatcacaaggtcaggagtgatcaccatgttggatcagcctgaccaacatgrtgaaaccccgtctctattaaaaacacaaaagttactgggcgtggtggcgatcgcctgtaatcccagctactcaggaggctgaggcagcagaatcgcttgaacccaggaggcggaggttgcagtgagctgagatcgcgctactgcaccccagccggggtgacagagtgagactccgtctcaaaaaagaaaacaagaaagaaagaaaaagaaaaagaaaaaacattgagagctttgggaagggaaggtagcaacatctttctaaggtcaaagggcaaggctgtgcagctgatgagatcagagatctcacagtggtgctcccctatccactcagtcttcaaggaagacacctcctctctgctgggctttgactaaggctgcatttcactttcatattgtgtaatccagctgc

SEQ ID NO: 89697 - DNA, 749 bp, Homo sapiens
tttcatgtatagattatgtattatgttcatcttaacacattcctctgtcccacctttcactcaatttaaaaaaaaatgtaagattttagccaaattagtatttcccaatgagctgactgcaaagctacttttggaaatttggtagaatcaaataagcatctttcactgccagcgtaattatggagcaagctgctaaccagtttatgtatcactattcaaaatagaaaaagtacatcgtctggctcaaaatacactttaattatggcaatgtgtatgatttagcccagctgcatgataaaaattgctctatgatagatcttcatttcccatattggmatatgaacaaatacatttgtaaactacagaggttaatgtgttttaatttttcataatacatgctaaattattaggattttaaaatatttattatggaaatttttcacacacacacacaaaagaatagtatgacgagctcattacccagctctaacgattattaataaatggctaatctttcacctacacctccaaccacgttcacctctccccaattatttttaagcaaactgtattcctcatatccttcatttcagctgtaatgattttaaaactataattgtcattcctaaaaatacaatttaatattgtttttcctaaaaatacaacttaatatcataaatttccagctagtgttcacatttctctaattgctgtacaatttcttttacagtatacttgagtcagaattt

SEQ ID NO: 89698 - DNA, 749 bp, Homo sapiens
tttcatgtatagattatgtattatgttcatcttaacacattcctctgtcccacctttcactcaatttaaaaaaaaatgtaagattttagccaaattagtatttcccaatgagctgactgcaaagctacttttggaaatttggtagaatcaaataagcatctttcactgccagcgtaattatggagcaagctgctaaccagtttatgtatcactattcaaaatagaaaaagtacatcgtctggctcaaaatacactttaattatggcaatgtgtatgatttagcccagctgcatgataaaaattgctctatgatagatcttcatttcccatattggaatatgaacaaatacatttgtaaactacagaggttaatgtgttttaatttttcataatacatgctaaattattaggatttwaaaatatttattatggaaatttttcacacacacacacaaaagaatagtatgacgagctcattacccagctctaacgattattaataaatggctaatctttcacctacacctccaaccacgttcacctctccccaattatttttaagcaaactgtattcctcatatccttcatttcagctgtaatgattttaaaactataattgtcattcctaaaaatacaatttaatattgtttttcctaaaaatacaacttaatatcataaatttccagctagtgttcacatttctctaattgctgtacaatttcttttacagtatacttgagtcagaattt

SEQ ID NO: 89699 - DNA, 749 bp, Homo sapiens
tttcatgtatagattatgtattatgttcatcttaacacattcctctgtcccacctttcactcaatttaaaaaaaaatgtaagattttagccaaattagtatttcccaatgagctgactgcaaagctacttttggaaatttggtagaatcaaataagcatctttcactgccagcgtaattatggagcaagctgctaaccagtttatgtatcactattcaaaatagaaaaagtacatcgtctggctcaaaatacactttaattatggcaatgtgtatgatttagcccagctgcatgataaaaattgctctatgatagatcttcatttcccatattggaatatgaacaaatacatttgtaaactacagaggttaatgtgttttaatttttcataatacatgctaaattattaggattttaaaatatttattatggaaatttttcacacacacacacaaaagaatagtatgacgagctcattacccagctctaacgattattaataaatggctaatctttcacctacacctccaaccacgttcacctctccccaattatttttaagcaaaytgtattcctcatatccttcatttcagctgtaatgattttaaaactataattgtcattcctaaaaatacaatttaatattgtttttcctaaaaatacaacttaatatcataaatttccagctagtgttcacatttctctaattgctgtacaatttcttttacagtatacttgagtcagaattt

SEQ ID NO: 89700 - DNA, 810 bp, Homo sapiens
tttgaggctgcggtgagctatgattgtaccactgcactctagcctgtatgacagagcgagaccctatctcaaaaataaataaataaataaaattaaataaataaaggaagttcattgtggaattagtttttctcatgagatttaatgttttaatgtttttcattttacatgaagaaggggacaataagcaaacgtattgcctctggaccagtatcaaatgcatttggaatttaccctgtgttatgaagaaaatattgtcagtctatcaaaagcatcagatagagttggtgatgacttccttctcaaacccttcattgccctctaggtttttcttccatttcacttggtgtttctaatttttctgtgctcagtcctcctaattattgttcatcagtgaatgttagaacatccaaggactcatcttccatgtcttcttttctttgcctacagtatctttctagcagatgttatcaagttcatatatcttctccacrctgattgcttccatatttacattcctgaccctgaccttgtccctaaattttagtaactacttgagatttcccactgtaggtctgataagcatgtcacgctcagtgggttctaagcaaaactcttagtactacccctttcccaccccttcctaatcatctcctcatctctccaatgtttctatcttagcaaatggcatcattgttcagccagttgctcaggcttccaaatttgaagtcattattgactcttgttcttttttaacatcataccacacatccaatctgtgaagaaatccaacaggctatatcttcaaat

SEQ ID NO: 89701 - DNA, 897 bp, Homo sapiens
tactttgttagtaaatatatgtaaagataaatgttgtaaaatataaaacactgttagtattggacttgtaaaataatccccaaaattgaactctggcaaaaatattcacagcagaaaaaaaaaatcagtaaatgaatgagttgcttgtgttttatcagcawgggccatatagcttatgatgacagaactgttaataatcacttgtccacaaaggtctcttaggttggagttcacactcatatttaaacaactagggcagattacttgaataaggacattagtaaattgctcatgtttccagggataggggaaaggggtaaaagggagttgtgttgttcagtgggtaaagagtttcatttttgcaagatgaaaaagttctgttgcctaacaatttgcatatagttgacactactgacctgtacacttaaaaatagtgtacatgataaatttgatgttgtatgtttttatcacaattaaagaacaaagcaaaactgagggaggactcaatagatttgacagtaaggtgttgaagacagcacttagtatgttaagtgatagttattagcttttgtgtgtcattttgtgtagtctacagatttagggctcgtggcacacgttctcactgataagtgagagccgaacaatgtgaacacatggacgtagggagggaacaacacacactgggccctgtcgcggggtgggaaccggggacaggagagtatcaggaaaaatagctaatgcacacagagtgtaatacctaggtaatgggttgatagatgcagcaaaccaccatgacacacatttatctatgtaataaagctgcacatcctgcatgtataccctggaacttaaaaaaaaatattgaagggtcatggttaacttgtatgtgtgccaata

SEQ ID NO: 89702 - DNA, 897 bp, Homo sapiens
tactttgttagtaaatatatgtaaagataaatgttgtaaaatataaaacactgttagtattggacttgtaaaataatccccaaaattgaactctggcaaaaatattcacagcagaaaaaaaaaatcagtaaatgaatgagttgcttgtgttttatcagcaagggccatatagcttatgatgacagaactgttaataatcacttgtccacaaaggtctcttaggttggagttcacactcatatttaaacaactagggcagattacttgaataaggacattagtaaattgctcatgtttccagggataggggaaaggggtaaaagggagttgtgttgttcagtgggtaaagagtttcatttttgcaagatgaaaaagttctgttgcctaacaatttgcatatagttgacactactgacctgtacacttaaaaatagtgtacatgataaatttgatgttgtatgtttttatcacaattaaagaacaaagcaaaactgagggaggactcaatagatttgacagtaaggtgttgaagacagcacttagtatgttaagtgatagttattagcttttgtgtgtcattttgtgtagtctacagatttagggctcgtggcacacgttctcactgataagtgagagccgaacaatgtgaacacatggacgtagggagggaacaacacacactgggccctgtcgcggggtgggaaccggggacaggagagtatcaggaaaaatagctaatgcacacagagtgtaatacctaggtaatgggttgatagatgcagcaaaccaccatgacacacatttatctatgtwataaagctgcacatcctgcatgtataccctggaacttaaaaaaaaatattgaagggtcatggttaacttgtatgtgtgccaata

SEQ ID NO: 89703 - DNA, 568 bp, Homo sapiens
aggcctgtacattattcattttgcctttggcacctggagcacacctttcaaccgcatggacagatggatggacatagctatgctagtagtcacttccccactgcaaaatgcacctgaaaaccacatcttcccaagctttccctcaggcattttaaatactcaaaacctggtaaatttttcaattttacaccraagtgaacaagtaccctactgtgcaggagttttactcaactccaaaaggagaaagtattttttaaaagttataagcagcttaaatacggttttgcacaataagctgtttcatttggctttttatctgtatcaaaactagacagtaaaatgtttactgcttcctaactagatctggcaaaggttttattctatgtccttactttgtattttctctcagaaatctcaggaaattaaggataaaatgagtattaacaatgtttatgttacaaatgtaaacacaggaaagtcaagaagccttttaaacattcctggtttttttcttttttttttttttttgagacagggtcctattctgtcacccaggctgctatgcagt

SEQ ID NO: 89704 - DNA, 568 bp, Homo sapiens
aggcctgtacattattcattttgcctttggcacctggagcacacctttcaaccgcatggacagatggatggacatagctatgctagtagtcacttccccactgcaaaatgcacctgaaaaccacatcttcccaagctttccctcaggcattttaaatactcaaaacctggtaaatttttcaattttacaccaaagtgaacaagtaccctactgtgcaggagttttactcaactccaaaaggagaaagtattttttaaaakttataagcagcttaaatacggttttgcacaataagctgtttcatttggctttttatctgtatcaaaactagacagtaaaatgtttactgcttcctaactagatctggcaaaggttttattctatgtccttactttgtattttctctcagaaatctcaggaaattaaggataaaatgagtattaacaatgtttatgttacaaatgtaaacacaggaaagtcaagaagccttttaaacattcctggtttttttcttttttttttttttttgagacagggtcctattctgtcacccaggctgctatgcagt

SEQ ID NO: 89705 - DNA, 1415 bp, Homo sapiens
tttacacaaaagacttaagtttaaaacaagataatatggtaagatgatgtagaaagagaaataatttctctgaaagtaattaaagttaaaaaataagaatcttaggccaggtgcggtggctcacacctgtaatcccagcactttgggaggccaaggtgggcagatcacctgagtgaggagtttgaaaccagcctggccaatatggcaaaaccccatctctactaaaaatacaaaaattagctgggcatggtggtgagcacctgtaatcccagattttcaggaggctcaggcaggagaattgcttgaacccaggaggcagaagttgcagtgagccaagatcgtaccgttgcactccagcctgggggacagagtgagactccatctcaaataaagaaataaataaataagaatctttttaaaaaataaaaatctttttctagagatatgggagcctatgctctgcttggaaactacattgtcagtagaaatatggctatgatcagtaactacaggggctaggcactgaacacaggccctgtgaacaaggatgagggctcctatggttcccaaccagagtgggtgatctctgttgtccatagggagaatcagtgccctacacatagccaaagagcattgcctgcatgacagtaacagtatcaactgccctggatgaagactcctccatcattttttttttcaagaccaagcaagcgtctaaagttcttgaacaattcgaagagtagagccctaataagaccaacgtaatattcttctgctaaccaggcagactgaagcataccaattttttcttaatcttttaaaaaatgtgagaagtataatattattacaccagtattatagtttatgtatgtttcaatagcaaaacgtaaacagacctaggaaattcaactcaaataaaaagtgggcacaaatatgccaactctaaaggtcaacacggttgtctttggctctgtgctattttgaaatgatcagtctgtgttgaaggctaagatcttttttaaaaggcaagttccaaagcacatttattgttatgactttacttgagctttctgaagaaaacataatggttttaagaaaatattgaatgtggctttcaaaatccctaaatgaatctacatatacataaaaaatgcctaatgccacatataaaggtcatataccttcttgacccttcatccaggagccaaattcaggtgggtrccgacgacttctcagctactggtagatgaccactccctcttacctgttactcagcccgtgcatagatttgagtaatttcatcagttaccaaaagtgaagcattggactctgatcttgcaaagcaaataactctttgggtttacaaagggcaaaaatttccatgggaaatcccacatattataatcaccctgggt

SEQ ID NO: 89706 - DNA, 700 bp, Homo sapiens
tctggcttgcttcttccagctaaaactcctcatgaaatctacatggatggatgacatgcaggaagaaacataagccatttcttctcagagttcaccatatcactaagaatgatcagaatgattgtgaagcaccggaaaactcctaaacatgagaaaaagaagrtaatttagagtttgtttatcagagcatccaggtaggaagtagaaaacacagtttgccattcaaatgtttattttatagatttgaatggaggaaatgtaggccctgaatttttcacttcttacctgttattgctgttaggtcttaacaactgtctccccctaccctcctcaacagaagtaactgaagcaaggcacctatgaactctgccttcctggctcagaagccagtgctgaccaggtcagtaaatacaggaagaatctatctcccaccgtgggtaagaaatggagtcagtcttgctattgttatcctgagagcgttgctggcctgagcccttgtttgctgaatgccaggggcctcgcctgtaggcagtggggtggagaggttaaagatgtgaacttcagagtcacacctgggctgggttgctgatctctctagctatgagatcttgggttgcttcctaagttctccaagcctctgattcctctgtaaaacaggggtaataaagacttaccccttaaggttgctgtgacgctcagg

SEQ ID NO: 89707 - DNA, 700 bp, Homo sapiens
tctggcttgcttcttccagctaaaactcctcatgaaatctacatggatggatgacatgcaggaagaaacataagccatttcttctcagagttcaccatatcactaagaatgatcagaatgattgtgaagcaccggaaaactcctaaacatgagaaaaagaagataatttagagtttgtttatcagagcatccaggtaggaagtagaaaacacagtttgccattcaaatgtttattttatagatttgaatggrggaaatgtaggccctgaatttttcacttcttacctgttattgctgttaggtcttaacaactgtctccccctaccctcctcaacagaagtaactgaagcaaggcacctatgaactctgccttcctggctcagaagccagtgctgaccaggtcagtaaatacaggaagaatctatctcccaccgtgggtaagaaatggagtcagtcttgctattgttatcctgagagcgttgctggcctgagcccttgtttgctgaatgccaggggcctcgcctgtaggcagtggggtggagaggttaaagatgtgaacttcagagtcacacctgggctgggttgctgatctctctagctatgagatcttgggttgcttcctaagttctccaagcctctgattcctctgtaaaacaggggtaataaagacttaccccttaaggttgctgtgacgctcagg

SEQ ID NO: 89708 - DNA, 700 bp, Homo sapiens
tctggcttgcttcttccagctaaaactcctcatgaaatctacatggatggatgacatgcaggaagaaacataagccatttcttctcagagttcaccatatcactaagaatgatcagaatgattgtgaagcaccggaaaactcctaaacatgagaaaaagaagataatttagagtttgtttatcagagcatccaggtaggaagtagaaaacacagtttgccattcaaatgtttattttatagatttgaatggaggaaatgtaggccctgaatttttcacttcttacctgttattgctgttaggtcttaacractgtctccccctaccctcctcaacagaagtaactgaagcaaggcacctatgaactctgccttcctggctcagaagccagtgctgaccaggtcagtaaatacaggaagaatctatctcccaccgtgggtaagaaatggagtcagtcttgctattgttatcctgagagcgttgctggcctgagcccttgtttgctgaatgccaggggcctcgcctgtaggcagtggggtggagaggttaaagatgtgaacttcagagtcacacctgggctgggttgctgatctctctagctatgagatcttgggttgcttcctaagttctccaagcctctgattcctctgtaaaacaggggtaataaagacttaccccttaaggttgctgtgacgctcagg

SEQ ID NO: 89709 - DNA, 700 bp, Homo sapiens
tctggcttgcttcttccagctaaaactcctcatgaaatctacatggatggatgacatgcaggaagaaacataagccatttcttctcagagttcaccatatcactaagaatgatcagaatgattgtgaagcaccggaaaactcctaaacatgagaaaaagaagataatttagagtttgtttatcagagcatccaggtaggaagtagaaaacacagtttgccattcaaatgtttattttatagatttgaatggaggaaatgtaggccctgaatttttcacttcttacctgttattgctgttaggtcttaacaactgtctccccctaccctcctcaacagaagtaactgaagcaaggcacctatgaactctgcctycctggctcagaagccagtgctgaccaggtcagtaaatacaggaagaatctatctcccaccgtgggtaagaaatggagtcagtcttgctattgttatcctgagagcgttgctggcctgagcccttgtttgctgaatgccaggggcctcgcctgtaggcagtggggtggagaggttaaagatgtgaacttcagagtcacacctgggctgggttgctgatctctctagctatgagatcttgggttgcttcctaagttctccaagcctctgattcctctgtaaaacaggggtaataaagacttaccccttaaggttgctgtgacgctcagg

SEQ ID NO: 89710 - DNA, 700 bp, Homo sapiens
tctggcttgcttcttccagctaaaactcctcatgaaatctacatggatggatgacatgcaggaagaaacataagccatttcttctcagagttcaccatatcactaagaatgatcagaatgattgtgaagcaccggaaaactcctaaacatgagaaaaagaagataatttagagtttgtttatcagagcatccaggtaggaagtagaaaacacagtttgccattcaaatgtttattttatagatttgaatggaggaaatgtaggccctgaatttttcacttcttacctgttattgctgttaggtcttaacaactgtctccccctaccctcctcaacagaagtaactgaagcaaggcacctatgaactctgccttcctggctcagaagccagtgctgaccaggtcagtaaatacaggaagaatctatctcccaccgtgggtaagaaatggagtcagtcttgctattgttatcctgagagygttgctggcctgagcccttgtttgctgaatgccaggggcctcgcctgtaggcagtggggtggagaggttaaagatgtgaacttcagagtcacacctgggctgggttgctgatctctctagctatgagatcttgggttgcttcctaagttctccaagcctctgattcctctgtaaaacaggggtaataaagacttaccccttaaggttgctgtgacgctcagg

SEQ ID NO: 89711 - DNA, 563 bp, Homo sapiens
tatttattccatgtttacttatgatacattcttatagagttatagaaattgggattatactcccaatttttcataaactttcccaatttttcataaattgctttttaaataatattctttacaagtaataaatccacttttatgacatgaatttcaatttcatgtcattttctgttttatggctatatcataatataatcaagttcttattgctgggcattcaggttatttgtaattgttgctatttattctacagaacgccrtgaaacaattctgttctgtgtgcctgtcctgttgtcctagtataaattcctagatcctgcacctaggagaatatgcatatttaagacttctgatacataccacaaattaccttctagaattgtggttacattttatattaccttcagtggtgtacagggcatgcccagattgccacgtcttcaaaatataagctattatttaaacctttggttagtttttatattgtctttttttaaaaaaatatataaatactgaccaatggaatttggtcttttatcatcattatttagatttggaaa

SEQ ID NO: 89712 - DNA, 515 bp, Homo sapiens
agaatgaagatacatagggattctagggggaccgtgaagctggcagtagtgaggatagctgggggatggtggtaaaggtcccttcgttgagccctggagccaacctgggatttaagattggtgactttccagttcaggatatcagaaatgtatttctttctgaagtggcaggtggagcagggactactcctgtttttacgtggtggctgcatctccaggacagctggtgtcactgctgttggtccctgccctccccttgagctgggactcagtcccaggggttgttcttagggcagcttttttcccactgtgaccttcattttctctgctactrtttcccctgtggaatccccttttctatcccagccacctcccccttcagagagagaatctagagatttttctagaggtttcaccaacattattggtggtggtaactgcatgtgcctgttcctttgtaattccttaagttgggaattgtctgtttaaaatattcaccatctcacctctctttc

SEQ ID NO: 89713 - DNA, 641 bp, Homo sapiens
cctctgtttcctaaagagtaggacatggtgttaactggaacttgatgtaaggtttttaatttagaatcttttgttttatacacatttctagtcattcatattttgcaatcaatgtgacagccttttgaatgcttgaggatcatttgcagagagccaagtgccaggactgaccgtagttctgccaaatcttcatttataagatccacatgggaaaaacgaatttctctgggtagggatatttattcagggaaatttgtaggactcagaagagcccttttgtgtagtcacaatggtgtttcatcatctaattagtagtcattgtttcatgggtttctctaatggttaaatgataccacaccagtaaggcatttagcattagcctctagcacattgtaaggttgcaataaatattagttgctgtgattggaagaaattttaggccaggatgaacatgataaccttggcttgcacctaccctgatctttaaataattttgcctgagcccagccacatgtrttatagcaagaggtgggattatagagcctagaagatacaggtattcctgttcacccccaaaatgtaaggagtcaataacgctgtattcaaattccttgaataagttaattcaggaaatagctgag

SEQ ID NO: 89714 - DNA, 644 bp, Homo sapiens
ttttggaatgcataaaaatggcatctaaaatgtgtaatattaggtaattgcttaaataaggcccagctgagggagcagggtcatctaagttggttacacttgctagaaatattttgcaatatcattgtaatggataaaatgaagatctgatatgttccttttttttgacacagagtctcgctctgttgcctaggctgaagcatgcagtggtgcgattttggctcactgcaaactcctgcctcctgggttcaattgatcctcccacctcagcctcctgagtagctaggactacaggcctcaccaccatgcccagctaatttttgtatttttggaagagaaggggtttcatcatgttggccaggctggtctggaactcctgacctcaagtgattaccccacctcatcctctcaaagtactaggaatactggcatgagccaacctaccgggccagatacatcatttcctgccactttgtatctgaaagacaagagagcttgaatgagtttttcttccaaggtggcaagaatgttgagctcttggctctactaaattgtaattcttcctgcatttastatatatgtttactgagtatctattaatggtttaggcactgaggtaggtcttgccctttggtctgatggta

SEQ ID NO: 89715 - DNA, 1068 bp, Homo sapiens
ccttttggttgtggaatttcaggcgtcattttcaagtctgccctatatggttgtgcacgtggcttactgcacaaggcagtgattagaggttgaaatctagtctgcactttgcttgccaagccatgcaccttggaacagggctacatcagcctagagaaaagggcgcattttccttgttctcacaaagacattccatgggccagtggcagccctggtctattgcctgtttagaactgcagtttttctctgtatgaaataagagatttttaggggtctgtccttagaaattctagatccctctccttcccatgtaccattacttcttttcccttccttcctattcagggaaaaaaaaaaggcttttggtttttcactctgagcttgcagaagagaagatggagagagatggagagtgtaggcagagcctacaggtatttagaggatgaatatagcaggactttccagggcctgggtgtgaggggggcggtgggggagctaaccctcaggcttgaactcacagtgggtggaggagcaggaggccaagtttgggaatggggtgtggtatggaatgagcttatcctaggcaagtgggttcatggaccttccrggagagatgctcagcctgcacaggtttgaaactcagaaaatcagcccggactagaggcacaaattggagtcatggggcacatgacaggtgagcccatcagatctgcactcatgactccaactgctgtcaaagaagaaagctatttcaaagcaggaaaggacaggatcctagagcccacttcggctccagcactttagaaggctttggtgccaggtgggacttcatgtcacaaaggtgcagggaaaggctccacatctctctacagacagaaaatggccacaaagtctgagccgggtcaggtctgtctccccaggcagctgggctgttggaaaacgagatcacagggatttgggtcaagctctgataaacgttcctgtctgggacaccttctctgacctgaatctatttttagaaactcattttaatgaacagtatgcaaaactatgaattcagcagagtat

SEQ ID NO: 89716 - DNA, 1081 bp, Homo sapiens
gaggggacacagagccccctccatgggaggagtgtcagcatcacattgtaagaagagaatacaaatgtggtcagttttggaaaatacaagccgccccacccactccagaatgagtttggattttattgtatacgtgacagtaggatggcaacaagactgggtttacatttgagaagtggctgggtggacggtggattagaagggagctgagtggaatccttccagttaggaggcactagccctagtccagctaaggggtgatgtggatttgcgccctgggcagcagtggagatggggtgggcaccaggacctgcacactttgtggctcactagtacaatgcccagactcagacatgtcagcaaggccgtgcaggacgtgcttgggggtctagactttatcctggggcagtggggacctactgagggattctaagcaagaaagtaatctgctcaaactgtgtcttaaggaaaactctcaaagaaggctgaatctaggacaagactcgcaatctgacctttgtagtaatggcccagagaaacaggtgttgctctgcctcagcaagcccagtaagttcaccaaaaaccaatatcccccaacctcctgcctcttgtttcaagccttaagccatgggtgtttctctctgaattcacacagcttttggagttggcctctctggggcatatatactgtttccacccacccagcacccaattccctctgtgtatcagtcagcttctgctagaggctgcagtaacaaatgatccccagatctccgtgatttccagtggcaaacatttgtctcttgcacycagttcacacagacttcaggttagctgcagctctgttccatgtggcttcttcgcagttgggtccaggctgaaggagcagtctctatttcggacagccccttctagagggagaaggaaaagaggaagagagctggtggaaatctgtaatattaaagcttccgttcagacgtggtgcatatcacatctgctcacacaccgtgagccacagcaagtcacatgccacgttcaaggttagtggagaggggaggtagactcctcccacaggaggcac

SEQ ID NO: 89717 - DNA, 546 bp, Homo sapiens
attctcctgcctcaacctcctgaatagctgggactacaggtgcacgccaccacacccagctaatttttgtatttttcgtaaagatggggtttcaccatgttggccaggatggtctcgatctcttgacctcatgatctgcccgccttggcctcccaaaatgctgggattacaggcatgagccaccgcatccggcctagagatcttcttaagagatgtcttcccccatgctcaggacttgatgtgggcagagctcatgcccgttccatcttggaggggtagagaatgttccttccatacccctcccttctggccacatcaggaatgtttcaaaaaagagcctgttatcagccaatgaggtggatttccaggacttttgttgaaagtagtgagcaacagtaggtttgttcactggcattgctggaagcaggggtgaaaccagtctgggagttctgggggayagccaggtggtttagaaaagaagccagcacgagagagcaagacatgagacagggaaaaacaagacccagtgatattctttgagctcct

SEQ ID NO: 89718 - DNA, 551 bp, Homo sapiens
tcatgttgctgcaaaggacaggatcacattctttttcatggctgcatagtagtctatggtgtacatgtaccacattttctttatccagtccactgttaatgggcatttaggttgattccatgtctttgctcttgtgtatagtgttgcaatgaacrtacacgtgcatgtgtctttatagcagaacaatttacattcctttgggtatatactcagtaataggattgctgggtcaaatggtaattctgttttaagtactttgggaaatcaccaaaccgttttctacaatggctgaactaatgcacatccccaccagcagtaaataagcattccttttctctgcaactttgccagcatctgttatcttttgacttttaaataataacttgctgcccctttagcctggaccctgggatgaacacccttcgagtagatctgagcccagtcctcagagagaagccaaacccagccaagtcctgcttacatcagctgaacccccgccaacctgcagaggtgtgcgagagaaacaaatgcatattgtggtatgtccctga

SEQ ID NO: 89719 - DNA, 1110 bp, Homo sapiens
ataccaaaaagaaatgagctatcaagccatgaagagacatagaggaaccttaaataatgaatcttctttcactattactaagtgaaagaagccaatctgaaaagcctatatagtatatgattccaactatacaccattctggaaaaggcaaaactatagagatgtaaaaagatcagcagttgccaggggttagggaagaaggggatgaataggcagagcacagaggattttgagggtagtgaaactactctgtatgatgccataacagtaggtacatgtcataataaatttatccaaagtcatatgatgtacaataccaagagtggaccctaagataaactatggacttggggtgaccatgatgtgtcagcgtaggttcatcagttgcaaaaaatatttaccaccctggtgaaagatgtttataataggggaggctatccatgtataggggcagggagtatataggaaatctctgtatcttctgttcattattgctgtgaaccaaaaacttgtgctaaaacacaaagtctatttttttttaaactacataaaagtaaatacacaggcacatgtgcataaacagacacgcacacagtcgagtacaggtaaaacaggaaatttgaacaaaactggtggatcatacctgtctcaatatcttgagtttgatgttgcactattgttttgcaaaatgttattattaggggaaaattgagtaaagtgtacctgggatctttctgtgctattccctacaactgcatgggaatctgattatctcaaaataaaawaattttttttttaagttactactaaatttccaagggcatgggcttcctaccaaagaattgtatattgtgaaattaaatcattcgaacttaaaacaattcaaacttatagctgggagaactttaaattattctgagccatgagaagactgtggctatgcagcctgagtcatgcagcaggcagctgtaacttctgcctttttatcctgtgaatagttaaaaccaaatggcgccagagataagacccactcagatcactacgccttttcagggagcaataatcttccttggaatgtagcaatatgtaaccaatcaaagtgatgtaact

SEQ ID NO: 89720 - DNA, 1110 bp, Homo sapiens
ataccaaaaagaaatgagctatcaagccatgaagagacatagaggaaccttaaataatgaatcttctttcactattactaagtgaaagaagccaatctgaaaagcctatatagtatatgattccaactatacaccattctggaaaaggcaaaactatagagatgtaaaaagatcagcagttgccaggggttagggaagaaggggatgaataggcagagcacagaggattttgagggtagtgaaactactctgtatgatgccataacagtaggtacatgtcataataaatttatccaaagtcatatgatgtacaataccaagagtggaccctaagataaactatggacttggggtgaccatgatgtgtcagcgtaggttcatcagttgcaaaaaatatttaccaccctggtgaaagatgtttataataggggaggctatccatgtataggggcagggagtatataggaaatctctgtatcttctgttcattattgctgtgaaccaaaaacttgtgctaaaacacaaagtctatttttttttaaactacataaaagtaaatacacaggcacatgtgcataaacagacacgcacacagtcgagtacaggtaaaacaggaaatttgaacaaaactggtggatcatacctgtctcaatatcttgagtttgatgttgcactattgttttgcaaaatgttattattaggggaaaattgagtaaagtgtacctgggatctttctgtgctattccctacaactgcatgggaatctgattatctcaaaataaaaawattttttttttaagttactactaaatttccaagggcatgggcttcctaccaaagaattgtatattgtgaaattaaatcattcgaacttaaaacaattcaaacttatagctgggagaactttaaattattctgagccatgagaagactgtggctatgcagcctgagtcatgcagcaggcagctgtaacttctgcctttttatcctgtgaatagttaaaaccaaatggcgccagagataagacccactcagatcactacgccttttcagggagcaataatcttccttggaatgtagcaatatgtaaccaatcaaagtgatgtaact

SEQ ID NO: 89721 - DNA, 1110 bp, Homo sapiens
ataccaaaaagaaatgagctatcaagccatgaagagacatagaggaaccttaaataatgaatcttctttcactattactaagtgaaagaagccaatctgaaaagcctatatagtatatgattccaactatacaccattctggaaaaggcaaaactatagagatgtaaaaagatcagcagttgccaggggttagggaagaaggggatgaataggcagagcacagaggattttgagggtagtgaaactactctgtatgatgccataacagtaggtacatgtcataataaatttatccaaagtcatatgatgtacaataccaagagtggaccctaagataaactatggacttggggtgaccatgatgtgtcagcgtaggttcatcagttgcaaaaaatatttaccaccctggtgaaagatgtttataataggggaggctatccatgtataggggcagggagtatataggaaatctctgtatcttctgttcattattgctgtgaaccaaaaacttgtgctaaaacacaaagtctatttttttttaaactacataaaagtaaatacacaggcacatgtgcataaacagacacgcacacagtcgagtacaggtaaaacaggaaatttgaacaaaactggtggatcatacctgtctcaatatcttgagtttgatgttgcactattgttttgcaaaatgttattattaggggaaaattgagtaaagtgtacctgggatctttctgtgctattccctacaactgcatgggaatctgattatctcaaaataaaaaawttttttttttaagttactactaaatttccaagggcatgggcttcctaccaaagaattgtatattgtgaaattaaatcattcgaacttaaaacaattcaaacttatagctgggagaactttaaattattctgagccatgagaagactgtggctatgcagcctgagtcatgcagcaggcagctgtaacttctgcctttttatcctgtgaatagttaaaaccaaatggcgccagagataagacccactcagatcactacgccttttcagggagcaataatcttccttggaatgtagcaatatgtaaccaatcaaagtgatgtaact

SEQ ID NO: 89722 - DNA, 1110 bp, Homo sapiens
ataccaaaaagaaatgagctatcaagccatgaagagacatagaggaaccttaaataatgaatcttctttcactattactaagtgaaagaagccaatctgaaaagcctatatagtatatgattccaactatacaccattctggaaaaggcaaaactatagagatgtaaaaagatcagcagttgccaggggttagggaagaaggggatgaataggcagagcacagaggattttgagggtagtgaaactactctgtatgatgccataacagtaggtacatgtcataataaatttatccaaagtcatatgatgtacaataccaagagtggaccctaagataaactatggacttggggtgaccatgatgtgtcagcgtaggttcatcagttgcaaaaaatatttaccaccctggtgaaagatgtttataataggggaggctatccatgtataggggcagggagtatataggaaatctctgtatcttctgttcattattgctgtgaaccaaaaacttgtgctaaaacacaaagtctatttttttttaaactacataaaagtaaatacacaggcacatgtgcataaacagacacgcacacagtcgagtacaggtaaaacaggaaatttgaacaaaactggtggatcatacctgtctcaatatcttgagtttgatgttgcactattgttttgcaaaatgttattattaggggaaaattgagtaaagtgtacctgggatctttctgtgctattccctacaactgcatgggaatctgattatctcaaaataaaaaaattttttttttaagttactactaaatttccaagggsatgggcttcctaccaaagaattgtatattgtgaaattaaatcattcgaacttaaaacaattcaaacttatagctgggagaactttaaattattctgagccatgagaagactgtggctatgcagcctgagtcatgcagcaggcagctgtaacttctgcctttttatcctgtgaatagttaaaaccaaatggcgccagagataagacccactcagatcactacgccttttcagggagcaataatcttccttggaatgtagcaatatgtaaccaatcaaagtgatgtaact

SEQ ID NO: 89723 - DNA, 880 bp, Homo sapiens
atcggaaataagccccatcatgtttgggtcaggtcattttattcattgctttctcctcatcctcatcatgggacatcgtgaaatcatgaaaaaggtagtgaaagaatkatgacaaggccgagcacagtggctcacgcctgtagtcccagcactttgggaggccgaggtgggagggtcacctcagatcaggagttcaagaccagtctggccaaagtggtgaaacaccatctctactaaaaatacaaaaattagctgggcatgttggtgcatgcctgtaatcccagccactcaggaggatgagtcaggagaattgcttgaactcgggaggcagaggttgcagtgagcagatattgcaccattgcactccagcctgagcgacagagccagactccgtctaaaaaaacaaacaaacaaacaaagcaaatcaaatatataatttatttcaatccatttggtttaaacttcttgtcaaaaaaccaagtctactagacaggatcaaaagcaacaaatcttgtatttataaaaaacatgcctcaagttaaatggcatagtattacacacacacacacacacacacacacacacacacatattaagggaatacgcaaacaaaaaatggcagaaataatatgggaaaagacagaacttaagaaagaaattgtcaagcaggtctacaaaatgattgttttattttggtgccaggtacagtccacaatgaagtcaagatattaagaagtaaagtggaccaggagaagttagagcagaaatatctcttttcaatagtgagagcagaaaaagaagtagaaaagctgggaacaataggtaaagtttaggctaggccttagacttctcctatattgtaatccctctggtttgccac

SEQ ID NO: 89724 - DNA, 880 bp, Homo sapiens
atcggaaataagccccatcatgtttgggtcaggtcattttattcattgctttctcctcatcctcatcatgggacatcgtgaaatcatgaaaaaggtagtgaaagaattatgacaaggccgagcacagtggctcacgcctgtagtcccagcactttgggaggccgaggtgggagggtcacctcagatcaggagttcaagaccagtctggccaamgtggtgaaacaccatctctactaaaaatacaaaaattagctgggcatgttggtgcatgcctgtaatcccagccactcaggaggatgagtcaggagaattgcttgaactcgggaggcagaggttgcagtgagcagatattgcaccattgcactccagcctgagcgacagagccagactccgtctaaaaaaacaaacaaacaaacaaagcaaatcaaatatataatttatttcaatccatttggtttaaacttcttgtcaaaaaaccaagtctactagacaggatcaaaagcaacaaatcttgtatttataaaaaacatgcctcaagttaaatggcatagtattacacacacacacacacacacacacacacacacacatattaagggaatacgcaaacaaaaaatggcagaaataatatgggaaaagacagaacttaagaaagaaattgtcaagcaggtctacaaaatgattgttttattttggtgccaggtacagtccacaatgaagtcaagatattaagaagtaaagtggaccaggagaagttagagcagaaatatctcttttcaatagtgagagcagaaaaagaagtagaaaagctgggaacaataggtaaagtttaggctaggccttagacttctcctatattgtaatccctctggtttgccac

SEQ ID NO: 89725 - DNA, 880 bp, Homo sapiens
atcggaaataagccccatcatgtttgggtcaggtcattttattcattgctttctcctcatcctcatcatgggacatcgtgaaatcatgaaaaaggtagtgaaagaattatgacaaggccgagcacagtggctcacgcctgtagtcccagcactttgggaggccgaggtgggagggtcacctcagatcaggagttcaagaccagtctggccaaagtggtgaaacaccatctctactaaaaatacaaaaattagctgggcatgttggtgcatgcctgtaatcccagccactcaggaggatgagtcaggagaattgcttgaactcgggaggcagaggttgcagtgagyagatattgcaccattgcactccagcctgagcgacagagccagactccgtctaaaaaaacaaacaaacaaacaaagcaaatcaaatatataatttatttcaatccatttggtttaaacttcttgtcaaaaaaccaagtctactagacaggatcaaaagcaacaaatcttgtatttataaaaaacatgcctcaagttaaatggcatagtattacacacacacacacacacacacacacacacacacatattaagggaatacgcaaacaaaaaatggcagaaataatatgggaaaagacagaacttaagaaagaaattgtcaagcaggtctacaaaatgattgttttattttggtgccaggtacagtccacaatgaagtcaagatattaagaagtaaagtggaccaggagaagttagagcagaaatatctcttttcaatagtgagagcagaaaaagaagtagaaaagctgggaacaataggtaaagtttaggctaggccttagacttctcctatattgtaatccctctggtttgccac

SEQ ID NO: 89726 - DNA, 880 bp, Homo sapiens
atcggaaataagccccatcatgtttgggtcaggtcattttattcattgctttctcctcatcctcatcatgggacatcgtgaaatcatgaaaaaggtagtgaaagaattatgacaaggccgagcacagtggctcacgcctgtagtcccagcactttgggaggccgaggtgggagggtcacctcagatcaggagttcaagaccagtctggccaaagtggtgaaacaccatctctactaaaaatacaaaaattagctgggcatgttggtgcatgcctgtaatcccagccactcaggaggatgagtcaggagaattgcttgaactcgggaggcagaggttgcagtgagcagatattgcaccattgcactccagcctgagcgacagagccagactccgtctaaaaaaacaaacaaacaaacaaagcaaatcaaatatataatttatttcaatccatttggtttaamcttcttgtcaaaaaaccaagtctactagacaggatcaaaagcaacaaatcttgtatttataaaaaacatgcctcaagttaaatggcatagtattacacacacacacacacacacacacacacacacacatattaagggaatacgcaaacaaaaaatggcagaaataatatgggaaaagacagaacttaagaaagaaattgtcaagcaggtctacaaaatgattgttttattttggtgccaggtacagtccacaatgaagtcaagatattaagaagtaaagtggaccaggagaagttagagcagaaatatctcttttcaatagtgagagcagaaaaagaagtagaaaagctgggaacaataggtaaagtttaggctaggccttagacttctcctatattgtaatccctctggtttgccac

SEQ ID NO: 89727 - DNA, 880 bp, Homo sapiens
atcggaaataagccccatcatgtttgggtcaggtcattttattcattgctttctcctcatcctcatcatgggacatcgtgaaatcatgaaaaaggtagtgaaagaattatgacaaggccgagcacagtggctcacgcctgtagtcccagcactttgggaggccgaggtgggagggtcacctcagatcaggagttcaagaccagtctggccaaagtggtgaaacaccatctctactaaaaatacaaaaattagctgggcatgttggtgcatgcctgtaatcccagccactcaggaggatgagtcaggagaattgcttgaactcgggaggcagaggttgcagtgagcagatattgcaccattgcactccagcctgagcgacagagccagactccgtctaaaaaaacaaacaaacaaacaaagcaaatcaaatatataatttatttcaatccatttggtttaaacttcttgtcaaaaaaccaagtctactagacaggatcaaaagcaacaaatcttgtatttataaaaaacatgcctcaagttaaatggcatagtattacacacacacacacacacacacacacacacacacayattaagggaatacgcaaacaaaaaatggcagaaataatatgggaaaagacagaacttaagaaagaaattgtcaagcaggtctacaaaatgattgttttattttggtgccaggtacagtccacaatgaagtcaagatattaagaagtaaagtggaccaggagaagttagagcagaaatatctcttttcaatagtgagagcagaaaaagaagtagaaaagctgggaacaataggtaaagtttaggctaggccttagacttctcctatattgtaatccctctggtttgccac

SEQ ID NO: 89728 - DNA, 880 bp, Homo sapiens
atcggaaataagccccatcatgtttgggtcaggtcattttattcattgctttctcctcatcctcatcatgggacatcgtgaaatcatgaaaaaggtagtgaaagaattatgacaaggccgagcacagtggctcacgcctgtagtcccagcactttgggaggccgaggtgggagggtcacctcagatcaggagttcaagaccagtctggccaaagtggtgaaacaccatctctactaaaaatacaaaaattagctgggcatgttggtgcatgcctgtaatcccagccactcaggaggatgagtcaggagaattgcttgaactcgggaggcagaggttgcagtgagcagatattgcaccattgcactccagcctgagcgacagagccagactccgtctaaaaaaacaaacaaacaaacaaagcaaatcaaatatataatttatttcaatccatttggtttaaacttcttgtcaaaaaaccaagtctactagacaggatcaaaagcaacaaatcttgtatttataaaaaacatgcctcaagttaaatggcatagtattacacacacacacacacacacacacacacacacacatattaagggaatacgcaaacaaaaaatggcagaaataatatgggaaaagacagaacttaagaaagaaattgtcaagcaggtctacaaaatrattgttttattttggtgccaggtacagtccacaatgaagtcaagatattaagaagtaaagtggaccaggagaagttagagcagaaatatctcttttcaatagtgagagcagaaaaagaagtagaaaagctgggaacaataggtaaagtttaggctaggccttagacttctcctatattgtaatccctctggtttgccac

SEQ ID NO: 89729 - DNA, 545 bp, Homo sapiens
cctgatgataacagtcttgaatcaccaagaaacatttacattgctaaagatgatagttcatgactattaaagttcatagatttccttggaacttatggtctctgatggccaaaattttgtctgtcttgaacctcattgtcaacycaggaatcttactatgcctgatttaaagtagacaaccaaatgggtgtttgtaaaaaaattaaaaaaaattactttccaaattcattatgaacgtagctacctggatggtccaaaaacactgtctttgggcttttgcaatagactgtaatttaggtctcacaacagttagttgcctctcaacaaaagccttacagatttaaattccatccaccttagttatagtctttctaaaagaaaaaaaattatattcatagcactgtcgcaggtcactaatatttcagtcatcttaagtgaaactctaatagaacttaaaagctcttgttttctttctagaaatcttttgtccaaatcctccagctatccttaatgggagacacacaggaactccccctggagatatt

SEQ ID NO: 89730 - DNA, 545 bp, Homo sapiens
cctgatgataacagtcttgaatcaccaagaaacatttacattgctaaagatgatagttcatgactattaaagttcatagatttccttggaacttatggtctctgatggccaaaattttgtctgtcttgaacctcattgtcaacccaggaatcttactatgcctgatttaaagtagacaaccaaatgggtgtttgtaaaaaaattaaaaaaaattactttccaaattcattatgaacrtagctacctggatggtccaaaaacactgtctttgggcttttgcaatagactgtaatttaggtctcacaacagttagttgcctctcaacaaaagccttacagatttaaattccatccaccttagttatagtctttctaaaagaaaaaaaattatattcatagcactgtcgcaggtcactaatatttcagtcatcttaagtgaaactctaatagaacttaaaagctcttgttttctttctagaaatcttttgtccaaatcctccagctatccttaatgggagacacacaggaactccccctggagatatt

SEQ ID NO: 89731 - DNA, 992 bp, Homo sapiens
ggtatcagacctttgctgtctcacctcagcactggcaccaggagccctgcaaagcagcatctgggagatggacagccagggggaaaataaaggaagctttcagaagtggctagatgagatatttgaaatactgaaaactaaaaatcccaactgcatggaagagctggcctcagatgtggtcagttcttacgacaacctggacacacagtgctgacccgcatgatgggatgcaccaagctgggcccctgcaacgcacttggaggcttggccctgccgccgccccacctcccagctccagctacaattgcagtctgacctgggcaagcaagagcacatggtggagatcctgatggagacctgagccacacgtgccacagtgctggccagacatggaggatgggatcccgccaagggaactctggccagcctgtagcccactgcccagccttgccggctcctctgctgattcctgcatggtctgcagccccaggcccattcccttccttcccctctgcagagggcaagccggaggctggtctcagcaggagctagggctctcctcaaaggctttctgaccttggggcaggcttgacatccccatrgccctgcatccctcatcccttttcatgtctactggaggacagtgagccatagctgcagcaatcttgtttaaatttaggtagttgaattttttagaattaagttttgtatgttttgagcaataaattgtcttaagatatatattttaggttgcttcaagatagctgaataggaacagctctggtctacagctcccagtgagatcaacgtagaagacaggtgatttctgcatttccaactgaagtacctggttcatctcactgggactggttggacagtggatgcagcccatggagggcaagctgaagcagagcgggatgtcacctcaccaaggaagtacaaagggtcaggggacttccctttcctagccagggaaagctgtgagtgactgc

SEQ ID NO: 89732 - DNA, 689 bp, Homo sapiens
aaaaacaatccttataagaaccttgtacatggtcggcactttcccataaggtgtctcatttaatcctcacaactactccatcaacagggtatacttagccccaagaagaaaacccaggctcagagagtaaagtgacttgcccaagatcacacagttagtaagcaggaaactcaggattcatactgactactggtttccaaggacttgttatttctactggggtgcaccttctacaacaccccatctgctggttttgcagttttgctttgctcccagtccaagatccattttctgcctgctccatgctccaggagacaaatctctgtgcatagtatcacagggctctcctgtcttctgtcttccagtttkggttagattaacaggaagctttggcaggagatcaaaggcaggagacaggtcaggatgtttcttctgctccctccttccctgccttgctttaattctacgactacaactccttctgggcagcccccttgcatggctccaacactttctgggtcctgaggactccattcttccatgcatctcctcaggttgagagtaggaagagcttcctgttgttgctggtccctacctgtctcagcattccttgttgattcccttaaccttgccgtacttctgcaaatggttccctcatgcaattaccttcataatcccagttgaggatc

SEQ ID NO: 89733 - DNA, 555 bp, Homo sapiens
cacaatttcctatcccctgacctaatgtctctttgttctgaactcagtaagcaatcttctgattattagttttctgggtaagcttggtaccaaaaagggaatacttggtaggaatactcaccattttacatttaccgtgggctccttagtgctatggtttgagtttgaccccaccaaaatgcatgttgaaactgatccccaatgtggcggtgttgggaagtggggcccggtgacaggtggggacagatctctcataaatggttggtggtagtcagcgcttgctctctgtgagactgaactagttctcacaggaatgctcccttgagagtgggctytaatagaaccaggacactccttgaaatttacctctttgcacatgtccacttcccctttgatcttccaccatgtcttaatgcagcaagaaagcccacacagaagccaagcagatgccagcaccatgcttcttgaacctcccagcctgcagaaccatgagctaaatatacctcttttctttataaattactcagccttgggtattctgctatagcaacacaa

SEQ ID NO: 89734 - DNA, 536 bp, Homo sapiens
cctcattccacggtagacccgaggccttgcggctggggcagacgggagcagaggggagagatcacagtaagkctggggtgagcagagagtgctaagtggacactagggctccgtgtttccagtggggttgggaagaggctgctctgtctcactggagagtccagctctgtgaccccaggccagtccttttccttcattttcatccccatagtgagggcagtaatgagcgtctaccaggggccagatactatgctgagctttctttgcattatgtggcttaattctcagggcaaccctgtaaagtcatactctgcacactttgcacaggaggagcctgcagcttggacaggctacttgacttgtccagggacccgcagcagagccaggatttgaacacaggctgatctgactcccaaagctgtgcttaactgaactgtctccccacccagagtgacttcacccatccggagattcgtgagactctagaattggccggggccagctcctccccagccagaaaacagtctgcagcaatc

SEQ ID NO: 89735 - DNA, 1767 bp, Homo sapiens
tgcattgaatcctgaccctggacaacaactgagcttttatcatggtcacaaactggccttgatccctaagacttgccttccaacaccccaatgagttaaggaccttccagaagaggctcttgtgtcaggccaagctttagtctcagaaggaagtaattcctggaaacacttttgttggggagagaaggaattctgggtctccaaatggtccagaaactcctcggccttggacccctaagaggccaggcagagaaaggctggttctaggttgcccaggacatgagggaagaagggcagctgggtaccttctcaaggtatccccacagccgtgggggcggggcctcttctgcctgcctgtccatctggggagcctcccgactggcagcctcttcatctgcacttcsgactcccttctgctccacggtctgtgctccaccccttgctagctttccaggaaaataaggagggacattccatgcaaggggtggaaccaggccagactgaaggccccatgcccccaacctgtgccctggccggaagagaagcccctccctctgggagctcactttggctgcttgctccaaacaggcgagaaaaggtgaatcaggctcaaggcggctccagcagggcctcaggttgacagcggccaagacataggagcatgaggcagttgtgtgggaagtccccgaggcccgagtatgttcctggagtctgcagcttgtgaaggtgtggtaggtgagggcaaaggacagcatagtccctccccagggcacactgaccaacttaatttctgccatccccagggttcagcctgggtgccctcccgctgcagggcccactggcctccaggctcacctagggaggcaccaagggcgggggtgggggccgagccagggaggagctggggcggaggatgggggcagctcgagtcaaaaaacgctgacgccaaagacaatgagctctccgaggctgaggcaactcatttggtcccggccacgctttattaaattctcataaacctgtcaggggggacagggctcgcttcagtttacctcattagcccgacacaatgacagtggtggggggacaggcagggtgggggtgcaacaaggggaggctggcgctcagagctgagaactgagccagccgggaagataattgaattaagtggcttttgttaatggtttttaagactccaaagtgtaaataacatttaggggctttcttttaatggagctagggttttagagacccagggagcttaggggaggcccagcctggtccctgccttctcccccaccctaggggagctcccgaggggagaacttgccggagccgccccagggatgcattgcagttagccttgggaggaccaaggggacttccccaagggaaggggacaacatcattggagccaaagaagctgagacaacttcctggtgaatctttgaaaagaatcagtgtacatgagcaaaagaggggatggatgcaggggactgtgacgacctacccagtcctggaatgctgctgtcggacaaagtggccagggacgtctctgagatgttgctggaagtatggtcctggcctcctggggtcaatgttcattccccatgagaggttagtgggaatggaaggtactggctgtgttgccagcaggtagtgagctccccatcacagcggatgtgggaaggctgtgagttggggtatccccaaacgaggcagtggattagactagatcccaggcttgctgaaggcaactggacttga

SEQ ID NO: 89736 - DNA, 601 bp, Homo sapiens
gggcccctggaccatgctctgagggagtgaggaaacagagaaatggagactcagacagcagggagaggccaggcatgaggcattcctggaagggacagtcagagcttgagcctctggctttcaggcccaggttggcccagcaggcctgggaggggctccagcatcaggtgtggtgggcctgtaccctctgcccacaagaagggaagcgcggtgctgcttacaagcgtgctcagaggagatgcacggtgccgcttaccagtgtgcttggaggagacacaggtgtcctctcctcttgctctccagctgctttcagtacccaaggctggtgccctaaacttgagagccctccgagggcagggaccacatgtaccttccctgccttctctggcagatttgggtcaattgaatgggacaagtgttaacaaacatctgagggaagctsggctgctcctaaggtgggcctgcctccagccatgacagaacattgccccttaggagttcaggggaggcttcctggaggaggtagtgatatctaaggctgttggattccaaggcctagtgacagtcacttgtacccaggaactgacaaaaagcttcagcc

SEQ ID NO: 89737 - DNA, 928 bp, Homo sapiens
tgcatagaaaaaagtctggaaggttataacctgaaatgttaacagaggttatctctgggagatagcaaatgggattacacgtgattttcacatttatattatttctttctttcttttttgggggaggggggtaggggctgggggraggtatccacgtctttcgctggatatgaggatgaaaccaggctctggagtgtcacaagctccaggtggggaagggggaacagagtttagaagcaatttcatccatcccaactcctgcttttggaatgcccctcccccaccaaactcaggggctttgttgctttagaactcactgctgttgatgtggtaagtgacattttaattgacttaattatcgctgatctcacagtttttgatgcacaatgcagctttattaactgaagccagagagatccctctctgggccccacaattgccccatccccatggccctcggaaggtctctgagatcttcccagtatggcctgatgccctccccctccccagcaccaagcactaccagactacctaccactccttctcatctccacgcctttactcttgctgggccctctacctgaaacaccattcctcttctttcccttcccctaacaaattcttccctctccataaggcctagctcaactgagccctcttcagaaatggggccttccccaagtcgcctctgacaaggcatctctctccactccaggctgtgataagtattctcagatcatagaaatgaggatgatcacaatgatgacaacaacaacagtactagctataatgtactgaacacactctgtgccagataccacactcagcaccttccatgtattttcttaattctagtgcctgcagcagagtgctgtgatgacacttctatctccccaactagactagactaagctcgttgagggcagaa

SEQ ID NO: 89738 - DNA, 165 bp, Homo sapiens
gccctaaccggccaccttatacgtgggctggggggtgtgttagggaaggaggaggtgatgtctaaggtaacacttggaagacgagtgaggggtggccaggcrgagagggggctgaagagccgcaggtgggacagggcagtctggaagtgagagtggatgtggccc

SEQ ID NO: 89739 - DNA, 416 bp, Homo sapiens
acaggcatgagccaccgtgcctggcctatcagtttcttaagtgaccttccagggttattttatatgagcaaatsagatcacacacgcgcacacacacacacacacacacacacacacacacacacttttttgtatatacgcctggtaaaatttcatcttcacagttcttgaagatgcttttttcacctactagttataactgggaggtggctctggatcaggccaggaagaacttctccactggtttttcttggccacagttctccacttaaaggatgtaccatcatgtacttagtagcagtccccttttgatagacatttaggttgtcaccaggatatcttacatgagcaatgctgcagtgaacctccttgtccacaagccatctcctctgtgctggggtatatctgtaggatcc

SEQ ID NO: 89740 - DNA, 781 bp, Homo sapiens
tcccttgaggaagagtgaagccttcaatgctgccacaagtgtatgctgtaaatcttccttcaggccttccccagaaggccctgaagccatttatgtgggtgactgaagaaagggaaatactcagagcttctgtggcttgttggatgctggctctgaagaatgctaaactgagggccctgcggtggccatgaaaatgcactacttgcatctccagctgcaggaggcctaacgaatcagcagcctcagctgctaccctccgaatggaggacttgatgacatttcccctggatctgcactagcccrtgaggaggaaagcctcctatcaagtcctcccaacagaacacccatgatgactcatgaggatgttgaaggtgttttcctgtggcaactgtgagtgtctttcttcaaagtctgttttgttcctgcacattaactgatttatataaaataagagaataaatgcctagactcccatgagtctatcttttactgataaactctagttctgaggacagaagcctgatggagtcagtatagggggaatttataacctggcatccagttcagagacttggagcttctcgactgaggggagatcgggtccctttggggaaaaaagaagccttcaatgttgtcacaagtgtatcctggaaatcttcctctaagccttcctagagggacctgataacatgacttatgatacagtgaccccaaattcagggtgttcttgtctactgtcaagaatgcaatatcttattcctctgaattgaacgtagtacca

SEQ ID NO: 89741 - DNA, 812 bp, Homo sapiens
tccactgagtcttctggttagggtcatattcctactgcaaatggcccttactgagctgagagatgtcattgccacagggaggacctataggcacatgtaggttgaatgaaactctagttccacttggaagcccaggcaagggatgggtcagtgagcagggctctcttcctagtctcaggccatgcctgtggcaccctaatccyactctcaagatgttggatctgggcagatgtgacaaattcacacaactctgattttgtctcaattttgtagatcttgtagatttcatccttcactctaatttcagcgtctaaaatcctcgctaccatgaagaatctgagtatttgatgagacagggctgaatattgcagtttttctcccagcaaccatttgggggcatttgctttaaatcgattggaaaaatatggcataaccatttgcacaaacttgggacaaatgatcttgggataacgatctaccagaatagggaattttacccacagtttctgggacaaaaacccaggaatctctatcatgatcagccttcaggcctcctgaagaagatctctcacagtgtcctattctcatgctgaggagcctgaagtccctgtgtgaggattagacagtggattgttatgtgtgtaggagaaccagcttaatatgtctgtccatgtctgaacttattgcagaaattgaaaagtaccaagaagtggaagaagaccaagacccatcatgccccaggtaactttgagcaattatggatgcttaattctgtgttgacacctggagatgccaggtccagggaaaacaag

SEQ ID NO: 89742 - DNA, 812 bp, Homo sapiens
tccactgagtcttctggttagggtcatattcctactgcaaatggcccttactgagctgagagatgtcattgccacagggaggacctataggcacatgtaggttgaatgaaactctagttccacttggaagcccaggcaagggatgggtcagtgagcagggctctcttcctagtctcaggccatgcctgtggcaccctaatcctactctcaagatgttggatctgggcagatgtgacaaattcacacaactctgattttgtctcaattttgtagatcttgtagatttcatccttcactctaatttcagcrtctaaaatcctcgctaccatgaagaatctgagtatttgatgagacagggctgaatattgcagtttttctcccagcaaccatttgggggcatttgctttaaatcgattggaaaaatatggcataaccatttgcacaaacttgggacaaatgatcttgggataacgatctaccagaatagggaattttacccacagtttctgggacaaaaacccaggaatctctatcatgatcagccttcaggcctcctgaagaagatctctcacagtgtcctattctcatgctgaggagcctgaagtccctgtgtgaggattagacagtggattgttatgtgtgtaggagaaccagcttaatatgtctgtccatgtctgaacttattgcagaaattgaaaagtaccaagaagtggaagaagaccaagacccatcatgccccaggtaactttgagcaattatggatgcttaattctgtgttgacacctggagatgccaggtccagggaaaacaag

SEQ ID NO: 89743 - DNA, 812 bp, Homo sapiens
tccactgagtcttctggttagggtcatattcctactgcaaatggcccttactgagctgagagatgtcattgccacagggaggacctataggcacatgtaggttgaatgaaactctagttccacttggaagcccaggcaagggatgggtcagtgagcagggctctcttcctagtctcaggccatgcctgtggcaccctaatcctactctcaagatgttggatctgggcagatgtgacaaattcacacaactctgattttgtctcaattttgtagatcttgtagatttcatccttcactctaatttcagcgtctaaaatcctcgctaccatgaagaatctgagtatttgatgagacagggctgaatattgcagtttttctcccagcaaccatttggggrcatttgctttaaatcgattggaaaaatatggcataaccatttgcacaaacttgggacaaatgatcttgggataacgatctaccagaatagggaattttacccacagtttctgggacaaaaacccaggaatctctatcatgatcagccttcaggcctcctgaagaagatctctcacagtgtcctattctcatgctgaggagcctgaagtccctgtgtgaggattagacagtggattgttatgtgtgtaggagaaccagcttaatatgtctgtccatgtctgaacttattgcagaaattgaaaagtaccaagaagtggaagaagaccaagacccatcatgccccaggtaactttgagcaattatggatgcttaattctgtgttgacacctggagatgccaggtccagggaaaacaag

SEQ ID NO: 89744 - DNA, 744 bp, Homo sapiens
gtctttcttctaattctgcttctgcttcttatttcctccctggatttgaactttacttacctaaactaccagttaggttaccttctcagaacctctaaggcagcagtttgaggttgatgatggaagatttaggattagaaaaaagaaacatgaatgaatttctgatgttttattataggggtttgtaatgcaggtagaaagacctttttcagagttaagagtttgatccgacaaatgagctattttgatatttataacgttgtctaataaaagtttcctataaaaacacatttggtttggatgtctttgttagcttttagtcgacacttgaaaaaaccgcttagaacagtttctaaatctttgtggttactcttttctgttatcctccaggggktagttccagagaggcgttggtggtttagtggtagaattctcgcctcccatgcgggagacccgggttcaattcccggccactgcacgtggttgtttttcacttcgctatggctctttacttgtcttttacgctgaaaattatactgcataacccaagagtgcatttaggggcttggccaccacaaggtaaagtgacaacaacactcaccaaagtagcggcaggagactaacccaggaccccatgcagttgttggactcaaacagcttagcaagctggcaagcatgaagtgtctctggtgagtcactgcagttttgatactggtacctgttactttcatttattcactggaa

SEQ ID NO: 89745 - DNA, 673 bp, Homo sapiens
cacttctggagtcaaaaccacctggtttgagtcttggctccgtcacttactatctggtgagaaacggcaagttacctagcttccctaagtctgtttccccatctttagaataagagaataataaggccgggcgcagtggctcacgcctgaaatcccagcactttgggagaccgaggcgggtggatcaygaggtcaggagatcgagaccatcctggctaaaatggtgaaaccccatctctactaaaaataaaaaaataaaaaaataaaaattagctgggcatggtggtgggcgcctgtagtcccagctactcaggaggctgaggcaggagaatggcatgaacccaggaggcagagcttgcagtgagcagagatcacaccactgcactccagcctgggtgacagagtgagactctgtctcaaaaaaaaaaaaaaaaaaaaaaaaaagagaataataacagcatatacctcacaggttcattgtgagaactaaaggagatgaagcatttgggtacttcagacagtgcctggcacacaccataatttttttactattgtttttgttgttttattttctttagctctaacactctaccaattaatccatacatcagccacttattacgtgtttacttaaagctccgtgccatataagctattatcaggatattttaaa

SEQ ID NO: 89746 - DNA, 656 bp, Homo sapiens
caattgatctatttgtttctttggttccctggttccctgtgcttttggtatcagatcgaagaaatcattgccaaatccraggtcatgaagcttttcccttatgttttatcctaagagttttatggtttcaggtcttacattaagatctttggttttttgagttaatttttgtatatggtgtaagttaagggtccaacttcatgtctaacattaattttaatagccatataatattcagcagtgtggatatttcataatttagtagttttgctgttataaacaatgtcataatacatttttatattggtgcttttattcctgtaagatcgattcctaaaagtgggattgctaaggcatataagttgtttatccactcccttttagggtagccaggaaagccaggattcaagtatacacgtttgttaataaatgcagtgaatggtaaggttaaaactgccaagaacttaagcactttaaaagcattttcatctgaacaaacttgtgaggaagttatttgaaaactaggggaaatgaagagaaagactattttaaaactgctggtagcaatcttcctttcttacaagatttgccttatttaatctcttccaacaaaagtaggttgatgttttttcctggtaggcaaaagatgagagcgg

SEQ ID NO: 89747 - DNA, 740 bp, Homo sapiens
ccccagaaaatatccatccaaacccttcaaacaaatggacacacctaagtctaartgcaatgagaagaaaagaggtactagctcctataagatgcctctcacagataagagtatttcttaatgtgtttcttttctttttttattacagagaggccagatactggctgtttcgtttctaagttctgcagaatgggaatgtgatctctaatgaatttttcagtttatgaaagtactattatagaatactaattagggtgtcccatgaggtctgtccttaatagttattactagttactattattactagtttaatcctttttgctttgagatcatcctttttctttctcaattggtatttcttacctctcatttataattttctttttttccaaattcatatatttatagattcctccaaaaggtagttttatcagatcttaaagtgctaaatatattaactgctatttgtcttaaagtgttaaatgtattaattgctatttgtctattaataaaggcagtttcttttccttacttcctgttctgccccttctggaacttttttttttcttagtggcaaatttgtagcaatagcccaaagcatggccactatagcaaatatgtagtggctatttaggtctctaaagcttgtgatgtttctctacctctaccctcaccactaggagaattagaataagagaactgaaataaactcttatctgttgtattgagatctccattgg

SEQ ID NO: 89748 - DNA, 1446 bp, Homo sapiens
atgatgaggaccagacatgtctgggataaaagtgaacatcagaatagaaaatatttagtgttatgctgaattgaaatgggaatctatgttcgagtctctcaaaatcacttgagctgtgaggaggcaagatggcctcgtttatgacgtagccttcagcatagcgccgatgtgcccgtgtcaccagcagatggcgcgctccggggtgtgagctgaagcacttccaaaggcccatctgcctggaaaccttgctgtcttgctatttagctcagagccctggaagcgttgcttttgatgtctaccattactgcttaacttaggaacgctctgcctagtgaggggtctgtgctaagcagagtgttcctaaatgtaactgagctcatcaaagggatgcctgttcccatgttcaggtatcagtagacatcgtgcttcgatacttggtttgtgcctagtcratgcaccgaatgataactcattagcaacaggcaggggacaagtttcagatggtactcttcacagtaagacattaactgccaaaaaatgaacaagataatttcgggtcaaaaggaaatgtgctctgtttgcctgtagacataccagaaggtagttttgctaagtcacaacaatcaagattggaagaagaggttgcttcgggatcccctttctcaataacagaagaaagagagttgccaggtaacatcatgcacccagccaatggttcaagtaggagtgggataaatgggtcagcacaggatgtaacaacatgaatcacaagggaggtatagttttaagatcatagtagctacaaaatcctaaaaactaagcttttgtgctttcggagacaaataagttgttgcacaaattatagataaaagcaagtgccattatcccctagcatttttatttcttcctcgtaactcttccttctgggaattttcagggcccaagggttcctaaagttataggtctctgatatagttgatagttatcaaccaaatttttgtgtgagaaatatctataccgattaagaagaatgatctggaatgtctgcatgtttgaggctggccttctggacaaatggtaccacgcattttgaaacaaagggctccaacgcaacagatttgaaagcattgattccagacagcctggatttgaatccaggagctgctggtatgagcatgcaagacttatgcaagctctgttaaatgggaatcctgacagtacctacttcacacaatttttgtgagacttaattgatgcttgcaaatccctcagaacagcaccagaccccttgcaagccctctgaagactggcacccagaagcagttacaccagagaaataccctagctatatgtcctccttagaacctattacaacaccttggcctgcttcttagacaaaatgtcagttgccccgatttaaagtgctgggaagatatagaagaaatg

SEQ ID NO: 89749 - DNA, 672 bp, Homo sapiens
agttgaccctgagaattaactgggagttaagaatgttaaggctctttcaaaacacactgaaaaccagatcatgtgtatgaaaatataactaggaatgcgaagtatatgaaatggatatcgtgagtattgtaaaagttcagatgaatgagtatttgattaattcattcaataaatattaagtgcccattatgtgccaggcattgttcttggaattggggctaactggagcttagattttagtggaggacccagccaatacacaaattaacaggccagtgaaagtctgggtaatacgtgctgtaaagaaaaaatagagcaggtcaggcgatggtgaatgactgcagcacaggccaggatgccacaagcagatgcttccctcttctttggtaactaggcccttgagatgatggggagatatgtaaggagttaccatttggccagactctgaataaaacacaagagccatgtgygggaagtggagcataaccaaactgcagcaatagttctgtttgtaaagtccttttatcaccttaattgaatgggactgtcctgtggcctcagggctacctaggatgcaaataaaatcacccactattggctttgtggtatcctgagataccacagcacaagaaaggggcttgagatccgcagagatcattctccgctatccaa

SEQ ID NO: 89750 - DNA, 774 bp, Homo sapiens
cacgaaaaaaattgctgatatttgtattgggattgttctaaatatataaaggaacttatagagagaactgacgttttatcatatagagtcaacctatccaagaaaaaggaatctttatctctttgtttgaggtatttcattrtatctttcaagagtattttaaaaatttcctcatataggctttccacattttctattaatcctattcttaggtgtttcatatttttgtttttcctgtaaatggggatttttataccattacattttctagctattattgtttttatttgtaaagcctattgacttctgtataatgattttacatcttgctaccttactgaattattttgttacttttagttttgaatctctaattttttttcagatatactatcatatcatagtttttattcttgtagttctcactacctttaattaatttatcttttctaattgcattgagtgatatctctgtccaatactgaagaatagaggagatagtgagcatttgtattagtctcttctcaccctactaataaatacatacccgagactgggtaatttatatagaaaagagttttaattggctcacagttctgcatggctggggaggcctcaggaaacttacaatcttggcagaaggggaagaaaacatgtccttcatatggcagcaggagagagaagtacagagcaaaaagggggaaaagtccctcataaaaccatcagatcttctgagagctcactcactatcatgagaagtgcagcatgcgggtt

SEQ ID NO: 89751 - DNA, 774 bp, Homo sapiens
cacgaaaaaaattgctgatatttgtattgggattgttctaaatatataaaggaacttatagagagaactgacgttttatcatatagagtcaacctatccaagaaaaaggaatctttatctctttgtttgaggtatttcattatatctttcaagagtattttaaaawtttcctcatataggctttccacattttctattaatcctattcttaggtgtttcatatttttgtttttcctgtaaatggggatttttataccattacattttctagctattattgtttttatttgtaaagcctattgacttctgtataatgattttacatcttgctaccttactgaattattttgttacttttagttttgaatctctaattttttttcagatatactatcatatcatagtttttattcttgtagttctcactacctttaattaatttatcttttctaattgcattgagtgatatctctgtccaatactgaagaatagaggagatagtgagcatttgtattagtctcttctcaccctactaataaatacatacccgagactgggtaatttatatagaaaagagttttaattggctcacagttctgcatggctggggaggcctcaggaaacttacaatcttggcagaaggggaagaaaacatgtccttcatatggcagcaggagagagaagtacagagcaaaaagggggaaaagtccctcataaaaccatcagatcttctgagagctcactcactatcatgagaagtgcagcatgcgggtt

SEQ ID NO: 89752 - DNA, 774 bp, Homo sapiens
cacgaaaaaaattgctgatatttgtattgggattgttctaaatatataaaggaacttatagagagaactgacgttttatcatatagagtcaacctatccaagaaaaaggaatctttatctctttgtttgaggtatttcattatatctttcaagagtattttaaaaatttcctcatataggctttccacattttctattaatcctattcttaggtgtttcatatttttgtttttcctgtaaatggggatttttataccattacattttctagctattattgtttttatttgtaaagcctattgayttctgtataatgattttacatcttgctaccttactgaattattttgttacttttagttttgaatctctaattttttttcagatatactatcatatcatagtttttattcttgtagttctcactacctttaattaatttatcttttctaattgcattgagtgatatctctgtccaatactgaagaatagaggagatagtgagcatttgtattagtctcttctcaccctactaataaatacatacccgagactgggtaatttatatagaaaagagttttaattggctcacagttctgcatggctggggaggcctcaggaaacttacaatcttggcagaaggggaagaaaacatgtccttcatatggcagcaggagagagaagtacagagcaaaaagggggaaaagtccctcataaaaccatcagatcttctgagagctcactcactatcatgagaagtgcagcatgcgggtt

SEQ ID NO: 89753 - DNA, 776 bp, Homo sapiens
ggaagatcttggtcagcctccacagtgatggttttttcactgttcagagcctgatcctgactcttgcagattcagacagtccccttaaaggacatgtggtcagttgcttcccccagccgggccgaggaggcatccccttcccctgggcagctggcagaaacaccaacccccagctctccagccccatcctgatttttttttttttttttttttttttttgagcccgaatctcactctgttgcccaggctggagtgcagtggcgcaatcttggctctctgcagcctccgcctccctggtttaagtgattctcctgcctcagcctcctgagtagcttggattataggtgtctgccactatgcccagctaatttttgcatttttagtagaggcggggttttgccctgttgtccacccaccttggcctcccagagtgttgggattacaggcgtgagccatggcgcccagcctcccagcctgattcttggtctcggtgggtccagggaatctgcttcaagtcccyggcaccccaggtgtttagtgccctgctagcatgggaacctctaatctgatccaactgctcatctgacagaggaaggcccaggcccagagagggagaagggctgctcagagaccgaggcacaatctctccccagctcccgtgtgccctccctccaacctcacctctgtgccctgcccctgccctacatggagcataagcagccccgccccttgctgtgttgcagtggggacgccctactacatgtcaccggagagga

SEQ ID NO: 89754 - DNA, 570 bp, Homo sapiens
gcaattctcctgtctcagcctcccgagtagctgagattacaggcgcccgccatcacgcccaactaatttttgtatttttagtagagacagggttttgccatgatggccaggctggtctcgaactcctgacctcaggtgatccacccacctcagcctcccaaagtgctaggattacaggtgtgaaccaccaaacccagccgttaagatgatttttttaaaaatatgtccactctgcttggggatgaggcaagacttacacatggttttgacctctgttcaccatctgcctttcagggtgactccaggctcctcccagctctaagacaagctgcagcgggaggatgtgttacccagggggtagtgagctccttgtcataggagtatgtgaaggaggaagcactcactctgtgaggtgcctaggaagagaatcatctgtcaaatkggcgttgaacttgatctatctgaggccggggcccttggactcttgaaggagcagagcaggctccagggattatcctggctccctgccctggatctttagctgaggtagggaaccttggtcccagtggc

SEQ ID NO: 89755 - DNA, 570 bp, Homo sapiens
gcaattctcctgtctcagcctcccgagtagctgagattacaggcgcccgccatcacgcccaactaatttttgtatttttagtagagacagggttttgccatgatggccaggctggtctcgaactcctgacctcaggtgatccacccacctcagcctcccaaagtgctaggattacaggtgtgaaccaccaaacccagccgttaagatgatttttttaaaaatatgtccactctgcttggggatgaggcaagacttacacatggttttgacctctgttcaccatctgcctttcagggtgactccaggctcctcccagctctaagacaagctgcagcgggaggatgtgttacccagggggtagtgagctccttgtcataggagtatgtgaaggaggaagcactcactctgtgaggtgcctaggaagagaatcatctgtcaaattggcgttgaacttgatctatctgaggccggggcccktggactcttgaaggagcagagcaggctccagggattatcctggctccctgccctggatctttagctgaggtagggaaccttggtcccagtggc

SEQ ID NO: 89756 - DNA, 598 bp, Homo sapiens
tgggtcctggagaggaaaaagcaggtgacccagccttgaggcccccttctccctctcccaggcgtgcctgtgggcatcgtggcggtcaccctggccatgctcccccatgactacgtggcccccggacattgctggctcaatgtgcacacaaatgccatctgggccttcgtggggcctgtgctcttcgtgctgactgtgagctggggacctgcaggggaggggcgtgttggggatggggaagtcctcttgcccactgaccccaggtctccaggccaacacctgcatcctggcccgtgtggtaatgatcaccgtgtccagtgcccgccgccgtgccsgcatgttgagcccacagccctgcctgcagcagcagatctggacccagatatggtgaggccccagaatggggggccagcaggaagcaggaagtgcacagtcagccggcgccaggcgtgaggctcactgggcgagagcacgtgcgagtctgtgtccagagcgtgaccgtgtggctatgcccaagtctgtattgagtatgtgggtacacacgtgtccctgcatctgtgtcacacatgcttgggcatgtcaacatgtgtcaacatgc

SEQ ID NO: 89757 - DNA, 1081 bp, Homo sapiens
ccccttggggtctgcggcctgctgggatagcagtttagaagagggtttggtgaggaggccagttcatgaggccacaggaaagggcccgggcttcccgggtctcttggggcctgtgtgctagaaccacagggagagggccaactaggtccctctcgggggattggcaggtctgtggggggccagaacattaactgaagtgacagccagggggctgggtgctgggagtcagggaggcccttcctggcccctcgttttccctcgacctccctggaccaccccccaggcacctctccctgtcacctgcacctcctgctccctgcttgcccagcccgggtccctctcagggccaaaaggtgggtgggcaagggcccaggctggactgtgccaggctcaggaagtcaggtgcgaactccacccagggtccatgtgtcctccaagctggggaccctccatcttttccttgaagaaggagagccaaggtggtaacagccactcacagtgcctgggtgctccctctgagccccaggccaggctcctatttgtatctcccaataagccttgtaagtggggaaactgagacctcatgaggtcacttgcccaaggccccccaggaggcagcagcagcgggggcaccactccagagtctgcgttctcagccacagggcatccagctatgaccacagatgggtcctggctggtccctgggagcatgcttggacccagttactcattcatccatgtgctcttcatggctcgcccagtgtgtgccaggcactgtgctgggtgccrggccgcagcagcagaagaggcagcaaaaagcccctgtatttgtggagctgcccttggtagagcaggcagaccatggccacgatgaagaaatgaagtgttcagtgaggggacgaggcaggaagccctcttccaagccccacgccccccagggcttcatggctgggttcagtctggctgggcccctggcgaggcttctccacctgtcacacggtggggcaggtggtggcatcttgttgccatggcgattcctccagctctttgccaggtgcccctctccacatcatagggggtt

SEQ ID NO: 89758 - DNA, 2195 bp, Homo sapiens
tgcattttattcttccaggttgaagctcaaatatttgatcttaaatacctgatgctgagggagttctcctggtagcacaaacacaaagcaggacactttttttgcaatatactttcagagatacatattccaaaaaataaggctttttgagtctcaaagttaccatctttggatggttaatgaggtcaataaagaatttttttaaatgcttctcttgtaaattttggtttgaataatttatggaaaccaaggctttctagctcagggtttctcaaattgtaacttgcacagggatcacctcaggattctgttaaaatcagattctgattcaagaagcctggagtgatgcttgagagtctgtgtttctaacattttctcagatgatggtcacgcggctggtccatgggccatactttgagtagccaggctcttggtaacaggtggtggaagggtgaagggagcaggcttgctggagtgaagcacttttcttggagtagactgaaccccagagtgcgaggaaagtggatacatgctgaggcatccaccaaatcatagtttcccttttctggaatcttctaaaatctcccaagatattactgcaaacaaggacctgggggcccttgagacctgctttgaatgctctttctgttccacctccccctgggcatatgaaagactgttgagttcacatccttaggatgcctccatggttctttgcagcatctctcaaatctctgacaacaccagaaagaatttgattaatgtaatgctacaaagcaacctcttggaggaaaggaccgtgtctatcttggtcatctccatgtcccccagcacctaacacagtgcttgccacatagtagaggtcaatatatagctgttgaatgaatgcatgagctaggagtatgggatgacagcagcacctgtcattttctttgatgtgagatctgtccaaggtgctgccccggggacctcaatctccccagagacagcattgtggtcaaagccatagtgatgtgtgaaaccttcattcaggcaactcctccttccatcccagtagctggttgtgtggtagaaaattgttcctcttggacacttgtttggttttcaaagtatttcagcttctttgaagctgctgtcaaaagtgagaatgtagtaataagctctcctcttgtggtgggcgttcagaggtgatagtctacaatggtggtgataatactttaattagtgaattttcttcacattctgatattctactcttcaaataatgccaagttcacagactcctacatctgctgaggtgtgtgtgtttatgtagagaaacagaagcagactgagaacactttcttggaatttttcttcttcaaaaagaggagcagaagctaactctgatgttttcatgctgatcatcattgatgacaagatacccaagccaaaccctcctgaactggccactgggtgacaatcatctgcctgttccagaggcccagtgagagggctgtagcttggtgagccgagggctggttgtgtgagccacctgggcatagcagccaccacagcagacactctgaggcagcatttttaccgaacacaagcacctgtgtaggggtcacgagtgggttctaatcttagctgtgttgtttgccaactgtatggccttgggtaaatcacttctcagatcatcagcktactcatctataacatgagatttacaacatcactttgcccaacttctaggctttgttatgagtattaaagtgctttaaaaattctaaagtgccatacaaatatgaggtgttgataatattactaccatctcttatccaaaaatgaaaaactggaatatgacagatacattcacattaaaatccctccaggtggagtttttagaggctggcactacttcttttaatttcaaggagggatataggaactccaggagtcactattttatgctaccatttttgagtcctgagtctgcctatataagcatcttttagttgagttacataatgtcagtttcctcacctgtaaatatggtatttttcttgcccatcttacatgcacaatgagaaaaacaaatgggataaatatattcaaaccacatttgccccagtattagaatataattgtagttcccaaaggaaacctttctatttcaatagagttcttaatgacaacttcatttggagaccatt

SEQ ID NO: 89759 - DNA, 840 bp, Homo sapiens
agaaagggccatttatcttgaatgttaygtcatctttactactggctcaattcactgtgtctggaggtagttccctgtagacacaaaatggtagcttgggcagcccgctgagatggaggggccagcatttgtgatggaaaccaactctgtctggcttgtgtctgttttcagagccaacattactcagagccgcagttcccactccttgaacaaacagctcatcattaacatggaacccctgcagcccctgcttccttcccccagcgagcaagaagaagaacttcctctgggtgagggtaagtctgtctcttcatcccaaatgctggtgctgcaggcttcctctggaaaaaacaagggaggcgccaattctgcatatgatgggtaattgattagtgtatggggtggagtgggccataaactatgtttttagtaaataagctttttgcagctggaaggctgtattatactgggagctctattagtttctcttggagagacttcactggtataaagtatttctaaaattatatatgaaaagactaatggtgttagacctacaccagtccagtacactaaccattagccatgtgtggctgtattaaactaagtttaaattcattgtaattaaaaatccatttcctcagtcacaatagccagattctcagtgctcaatagccacatgtggctggtggctgccatattggacactgagactgagataatttcctctatcactgaaacttctattggatgttgatgtctgccactgtaatcacaattaaattggtggcaataaagagttctccacaagtatctctacactcgtcatcccatttattc

SEQ ID NO: 89760 - DNA, 801 bp, Homo sapiens
atccaggccagacacagacttagaatagcagtggttctgggtttctgggtgcctccaggaatacacacaacagccatcacagtgagtgggcaactacatttgaagcaagtggacaactttgacccctccctctggttgctttgtgctgagtcatgggcagcagcaggcttgagcggaaggtacccggtgtgcgtgcctagaactagaaccttcggcccccagtcaagttactgatacatgttgtattagttgttcttgcattgctataaagaactacacaagactgggtaattaagaggtttaattggctcacagtaccacaggctgaacaggaagcatggctggagagtcctcaggaaacttacaaacgtggtggaaggcaaagaggaaggaggcacatcttatgtggctggagcctgaggaagagagagcagggggaggtgctacacacttgtaaacaaccagatcttgtgaggactcactatcccgagaacagcaagggagaaatctgcccccatgatccaatcacctcccgccaggcccctyctccaacgttggggattacaattcgacatgagatttgggtggggacacaaatccaaatcatatcacatgctgttccacacggcacatcccactcttccctcaacctctggaggctgatacatcaaatataaaaatgagagtccaacaggaatcaccaaacacttaaggaaacatcagctccacaaattacagactctgagtcagcatacaaaatgaccttcaccaagaaagcagcattaatgcagccaacaagat

SEQ ID NO: 89761 - DNA, 617 bp, Homo sapiens
cctccggcccgcacgcggttgccgcgcggcctgacgggaaacgtagtttccggggscaagagagcagccccgcccgggacttgtttatcgttgcaaagaggggccggaggcgaaggaggcggcgaggctgtgcggcgggtcggagcgacgccgaggtctgacgtgtccgcgtccctgcggccccactcccggccgccgtgacctccccttgcacggggcggacacgagcaatgtcacgggccccgccgcgcgccgcgagcactcaccagggtgagggctgcccgggtgggctgcagcttcctcttgctcacagcccggacagttgcccggactaaggaagccgacatcttcgccgtcccggcgccccggtgcctcgggccgaaggtcggccgcctcagcttctctccatggacacggcgggcgcattgacgccacaagcttcggcgcacggcgccctcagtcctagccccgccccccgccgccaccattgggtgagttgcatgagtgacgagccgggggcggggcaagccgctcggggcggggttttgccgctcaacgccgggggtctagcagctgggttgcgcacggtctccggcagtggggttaccacgctgcag

SEQ ID NO: 89762 - DNA, 617 bp, Homo sapiens
cctccggcccgcacgcggttgccgcgcggcctgacgggaaacgtagtttccggggccmagagagcagccccgcccgggacttgtttatcgttgcaaagaggggccggaggcgaaggaggcggcgaggctgtgcggcgggtcggagcgacgccgaggtctgacgtgtccgcgtccctgcggccccactcccggccgccgtgacctccccttgcacggggcggacacgagcaatgtcacgggccccgccgcgcgccgcgagcactcaccagggtgagggctgcccgggtgggctgcagcttcctcttgctcacagcccggacagttgcccggactaaggaagccgacatcttcgccgtcccggcgccccggtgcctcgggccgaaggtcggccgcctcagcttctctccatggacacggcgggcgcattgacgccacaagcttcggcgcacggcgccctcagtcctagccccgccccccgccgccaccattgggtgagttgcatgagtgacgagccgggggcggggcaagccgctcggggcggggttttgccgctcaacgccgggggtctagcagctgggttgcgcacggtctccggcagtggggttaccacgctgcag

SEQ ID NO: 89763 - DNA, 597 bp, Homo sapiens
gagttaatacaggagaagcccttagaggggtgcaaggcacacagcctcactcaaatggtaattgttaatgagtatttaaagatgccatgtattgtgaaactactataatggtggatagatatcattatgcgtttgtcaaaacccacacaatgtacaccaccaagagtgaaccctaaggtaaactatgggcactgagagctaatgatgtgtccatgtaggtttaagattgtaacaagtgtaccactgtggtgcagagtgacagtgaggcacatgtggaaacaagggatatatgcagytctgtttttctgcttaactttgctgtgaacctaaaacagccctaaaattaaaatttaataaaaataaaagatgctgtcatttttttttcagttattgacacattacacagttgtgcagcactttacaagattcagaaaactccatgagcatattatattatctcatactagcctcacaactttgaactgagtagggcagaagcactggcatggcagttttacagatgctgaaactcaaggattttagtagagagcattagacactattgaaaacatctagtcctcaattttctgattcagg

SEQ ID NO: 89764 - DNA, 1313 bp, Homo sapiens
ggcaaacacataaggtggcagacctccttcttcagggcgatctatactgcaaagctacaaacaagagaaaagaaagttaagcattctttttgtatgaatttgtcatttacacgatttggcctaaaacctgtaacctcattcttgtttactacatgatttacggtaattcttcagctgaaaatagcagttacaaaatatacaacttccttatacttttgcagcaaccacatattgtggttttaagtgatagtttcaattttgaatatttaatcctgttaaccatactcacttgtggatggccctaaaatattatttcctattttattttttgatatccatggtcaattcattcatttgtttagaatacatgttaatgaattaaaaacgattgttcagttacacattaagccagttcaatggtcctcttaccctaacccatagcgtcttgcatatgcatgctttggtcacaaagattggcgtggggagagaacgtggacaaactcatcaccactaatggaaataacaactaaaagggcatgttctacttagtgatgaagcaggcggtggttttcaaaggatagcatattataattataatttagccagtgaagagtgggaaatccgttgttcattcaggatccaagaaacgggaagtatctattgttattgatatacctgaatcagtaaagcttttgattttctctaaaagcacatacatggaatctctttttttttttttttttttgagacagagtcttgctctgtcacccagggtggagtgcagtggcacgatcttggcttactgcaacctgtacctcccaggttcaagcgacagaatctcaattttataatcatgactcaacctcacattttgggggaacgttaaatcttctactgtttgagtattttaattgaaatatatttaaaacattatggaaatgtaaacaagatcagagagtatcttctattttttgccgtctctgtgtatgttattggacatgatatgagaagctttatctcaacgttcctgtgcctaacaaccactgtggtaaactagttaaaatgtaaattcctgggccttatcctctgagatttaactcacaaatctgatttttaataagcyctataaatcattttgatcttttgagcaatactgttaaagtgaaacagaaacactgaatcttccgtctgtacgtttctgttgcaaaattcagatgtctttctcttttgatgtctataaatttgcatttaaacactgaagattaaattaagtaaaaatcaaagcatactgcttatacatatgtagaatgtat

SEQ ID NO: 89765 - DNA, 1313 bp, Homo sapiens
ggcaaacacataaggtggcagacctccttcttcagggcgatctatactgcaaagctacaaacaagagaaaagaaagttaagcattctttttgtatgaatttgtcatttacacgatttggcctaaaacctgtaacctcattcttgtttactacatgatttacggtaattcttcagctgaaaatagcagttacaaaatatacaacttccttatacttttgcagcaaccacatattgtggttttaagtgatagtttcaattttgaatatttaatcctgttaaccatactcacttgtggatggccctaaaatattatttcctattttattttttgatatccatggtcaattcattcatttgtttagaatacatgttaatgaattaaaaacgattgttcagttacacattaagccagttcaatggtcctcttaccctaacccatagcgtcttgcatatgcatgctttggtcacaaagattggcgtggggagagaacgtggacaaactcatcaccactaatggaaataacaactaaaagggcatgttctacttagtgatgaagcaggcggtggttttcaaaggatagcatattataattataatttagccagtgaagagtgggaaatccgttgttcattcaggatccaagaaacgggaagtatctattgttattgatatacctgaatcagtaaagcttttgattttctctaaaagcacatacatggaatctctttttttttttttttttttgagacagagtcttgctctgtcacccagggtggagtgcagtggcacgatcttggcttactgcaacctgtacctcccaggttcaagcgacagaatctcaattttataatcatgactcaacctcacattttgggggaacgttaaatcttctactgtttgagtattttaattgaaatatatttaaaacattatggaaatgtaaacaagatcagagagtatcttctattttttgccgtctctgtgtatgttattggacatgatatgagaagctttatctcaacgttcctgtgcctaacaaccactgtggtaaactagttaaaatgtaaattcctgggccttatcctctgagatttaactcacaaatctgatttttaataagccctataaatcattttgatcttttgagcaatacygttaaagtgaaacagaaacactgaatcttccgtctgtacgtttctgttgcaaaattcagatgtctttctcttttgatgtctataaatttgcatttaaacactgaagattaaattaagtaaaaatcaaagcatactgcttatacatatgtagaatgtat

SEQ ID NO: 89766 - DNA, 773 bp, Homo sapiens
ttttactctattagcgtggtgtattacatttatttgtgtatgtttaatcaactatattcctggagtaaatcccacttggtcatggtatggaatcctttatctatgttgctggattattacatcacaggatcacaattaggcagccaggttcatagcagaacagtaatattgaaaacagcagagccagaaacctaggacttgggagtgtggttaagcaagctgtgayatatcgtatatgatagaagtgcatgtggccatgggtagtgacaagaatgtgactcagaccatttcctatttagaaatgatcccataaacatgtcaaggagtaaccatgcatccaggagaataggcatataccaattacttataactggataccactgcatatgtgcaattaacaaaaaactagagaagtatgtggaggacacatccaggaactgggaacctgggattatgtccagccctgctgctgttttctctgtgatcttgggcaaatcttttcttatatccgagcttcagtttccatgtcttacagtgaggggtttgataatttggtactttgtgtcacacatggctttggttttgttttgttcatttcataaaatttctagtaaatatacttaaaaaatgcaaactttgcgaaagtgagagagtatgaggagtttttggccacttggggggtgtagctggtactccctcccttccctccatatcagctagaactctgtggttgtgtgcagggagtaggtgtggggttcccagccaggcttggg

SEQ ID NO: 89767 - DNA, 619 bp, Homo sapiens
cttgctcttggccagtcctcacaagaggaacccgtgggaccacccagaccggcctcctttgtgcccagttggggatacctaagcagataggaaggactcaaccaaggccacagagctagcctgcacaggaccaagcttttcccaccctctccacataccccccactcccacccccagcagctcagctcagggcccaaggagtggcacaggtctcagtcagctctagggacgacctggctggattgaatctctgagctgasctgagaacaggtttccaagcatctggtaaaacactggggcacctgcctctctaatgccaaagttaatcctaggccagcatgattgtttaaccctctcctggtctggcttatgagaacagcagagatgtctgtgaatgtgcagggatggggcaatcacttattctgtaccagtctccatgctgggcaccagggcagaggaaccccatgcagcccctgacccttcccagctcacagtgtgtctggggagatggataagtacaacccagcagcgtgtagggcctttagggggagtacagaggcctgtaggagccagtgggggtggggaggaggtgagggtattccaggcaaagcaaacagga

SEQ ID NO: 89768 - DNA, 918 bp, Homo sapiens
atcaccatgcccggctaaatttttgtatttttagtagggatagggtttcatcatgttggtcaggctggtcttgaactcctgacctcaggtgatccactggcctcagcctcttaaagtgctgggattacaggtgagagccaatgagctttttgagtgtgaggatcacatcccaatgcccagaacactgtgctaggattacaggtgtgagccgccacgcccagcccactccaggtgactctaatgcacagccaggattgacaaccttggcttttcgcttttcttgatgtccaaagtcattaacccagcatatgtattgggatagcttctgatagagtratttcctgggtcctgtgggcatttttttttttttttgagatagggtctcggtcttatgcccaggctaaagtgcagtggtgcaatcatggcgtactacagcctcaacctcctgggctcaagtgattctcccacctcagcctcccaagtatctgggactacaggcgtgtgccaccatgcccagctaatttttgtattttttgtagaaacagggttttgctgtcttgcccaggccagtctgcaactcctgggctcaagtgatccacccaccttggccccccaaagtactgggattacaggcatgagccactgttctggcccctgtggttattttgaggattgtgtgtgtgtccttccagtttgtccacccttctcttgggaccaaacttcctgatgagccatttcactgaggttcctggaatccctcttttcattgctagcttggaattcaccgagaaaacatgagccaaatagagtgagctgcctacaagccctgcctgaggggcccttgggatcctttaagagttttccagaccttttctctctcctaggtttttccacccagatgctgatgacccactgtgt

SEQ ID NO: 89769 - DNA, 578 bp, Homo sapiens
tttacttaaaactttaataatatttgtgtggcttttgtgaatccaaagtaaaaaagtaaaattaatcaaatatttttaaaaagttttattactactgatagagtatctttcaaatgtctatttgaaatatatttttcacttataaatttatcttcatggccacatcccattttttatttgcctttttatttgttttcatttcattttaaaatgattgttcagatcactatttgtcaacatagaaaatatacctgatatttgttaaatggggtgaagggaagcagcttataaaagattacataaagtatgatcctatttttgatagataatcatatgtacatttaccttgttttcatgactcctagcattgtaacatctttatgatttaaaaacttgttaattttattaatcaaatgagaagtagagttcacttccaactatggaagtcaacaaagggaacagagcttcctcttctcatgtactgcagctagsacctgagtgtgttagccaagatcattcataatctttgcatattgacagactggcacaaataaatcaggacaatataatattgaaag

SEQ ID NO: 89770 - DNA, 804 bp, Homo sapiens
attttagcatggaaggtgaaatgccttakttattatagcctatggtcacccagtagaagcaaagcttcagggtgtagcactgatgtcgtcattaagcactatgaaggttaagaggaatttaatgacagcatggttgagtaggtatgttaaaatgcactggatagcataaatacagtgaacgacacacacttctaaattctctgctaaaggaacagactgaaacctagagacattttttgacattgcttaaagcatctcctatctcttttagcctcaggctgaggtaaccaaaatacaaaagcaaaattaaatcctattacttatgatttttaatgtcagctgaattcacaaggttactacattttttagatgagagagtatgagtttggaaagagttataccctgaaattgaaatgggaataccccaatcatctaaagtttctgctctcccttaactgacaagtacccttttataacttgtctgatagggttgctcatcgtaagattgaagatgatgatattctttttcctgtaggagttgacttgcaacagaaagtcagtaatccacatgcttgctaaccaactacctctcaatgttctttacctgtattatcagattccagcataacctgaagagctgattacaggctgaagcattttatctatagacaaactacgtaatttccctaatttatatcatcaataaggaattttgaaaatcagtaaatctttggcttctaatgttatttcaccaaggtggagggatgtatttttagatcaggttcaatttattaatatggatac

SEQ ID NO: 89771 - DNA, 804 bp, Homo sapiens
attttagcatggaaggtgaaatgccttatttattatagcctatggtcacccagtagaagcaaagcttcagggtgtagcactgatgtcgtcattaagcactatgaaggttaagaggaatttaatgacagcatggttgagtaggtatgttaaaatgcactggatagcataartacagtgaacgacacacacttctaaattctctgctaaaggaacagactgaaacctagagacattttttgacattgcttaaagcatctcctatctcttttagcctcaggctgaggtaaccaaaatacaaaagcaaaattaaatcctattacttatgatttttaatgtcagctgaattcacaaggttactacattttttagatgagagagtatgagtttggaaagagttataccctgaaattgaaatgggaataccccaatcatctaaagtttctgctctcccttaactgacaagtacccttttataacttgtctgatagggttgctcatcgtaagattgaagatgatgatattctttttcctgtaggagttgacttgcaacagaaagtcagtaatccacatgcttgctaaccaactacctctcaatgttctttacctgtattatcagattccagcataacctgaagagctgattacaggctgaagcattttatctatagacaaactacgtaatttccctaatttatatcatcaataaggaattttgaaaatcagtaaatctttggcttctaatgttatttcaccaaggtggagggatgtatttttagatcaggttcaatttattaatatggatac

SEQ ID NO: 89772 - DNA, 804 bp, Homo sapiens
attttagcatggaaggtgaaatgccttatttattatagcctatggtcacccagtagaagcaaagcttcagggtgtagcactgatgtcgtcattaagcactatgaaggttaagaggaatttaatgacagcatggttgagtaggtatgttaaaatgcactggatagcataaatacagtgaacgacacacacttctaaattctctgctaaaggaacagactgaaacctagagacattttttgacattgcttaaagcatctcctatctcttttagcctcaggctgaggtaaccaaaatacaaaagcaaaattaaatcctattacttatgatttttaatgtcagctgaattcacaaggttactacattktttagatgagagagtatgagtttggaaagagttataccctgaaattgaaatgggaataccccaatcatctaaagtttctgctctcccttaactgacaagtacccttttataacttgtctgatagggttgctcatcgtaagattgaagatgatgatattctttttcctgtaggagttgacttgcaacagaaagtcagtaatccacatgcttgctaaccaactacctctcaatgttctttacctgtattatcagattccagcataacctgaagagctgattacaggctgaagcattttatctatagacaaactacgtaatttccctaatttatatcatcaataaggaattttgaaaatcagtaaatctttggcttctaatgttatttcaccaaggtggagggatgtatttttagatcaggttcaatttattaatatggatac

SEQ ID NO: 89773 - DNA, 567 bp, Homo sapiens
tacaacaattctgtgaacttagttaatgctcctgagatctagtctcatactgctgacaaatttaaatttctgagtcttcaagtttcaaggtcagactctggaatayggtatccttaccaaagtaatttgttttgggggaagccagctgactttctccttataacatggctctgtttcttcttgtgccatgtaccgttttcttcaaactttctaccagtatatttgtacctatttatagtcaacagtatagaaaaattgcaacttagaaaacagaatatttcacattttaaaaagtgtttatcacaagatctctaacaacaacaacaaactcctctggtacaattcaaataatatttgattctcctgcattatttaaaaataactgtttagtaacatatatgcacacaatgaataaagtaaaattcacatggccatgaacaatatctactataaaacaaaagccaaataattggtaaggtaaaactatttcttattctagagtcagatggtacatggtatttcacaagatctgcttttgaagagtgccaattattttttactgtggag

SEQ ID NO: 89774 - DNA, 944 bp, Homo sapiens
gatggcgagaaacaatgtggaaccagaaagaccagcgagtcagagaccattgaaatactcttggctagaggtgactgcagctgcaattcaactttgaaatccagaaaaggaagtgcccagactctcattattccaaaatatttacttacatctcacactaaaattaagctatgggacaggaagttcaagccagcacatgggcactgctattttcaagagatgtcaggcaggcctaactgctccactgagaagtttcctaaccataattgatgtgttaaagctcagcagctgtttacacaactttgtgggcacccacaggaatagcagtcggtggcgagtgctgctaagtgatggcatgcattagactaagcctgtgcrtcacctgttccttcacatcttattacctggctattagatggcacatctgtaatccgctgcaatcacaggtaggccaggcagggatggcaacgtgatcatgatgaatgggattctgtctgtatcactgggaatgttccataaatggcttctggatcctggagccactttcataatttattgagagataaatcttgctgcacatctctagagacagtagacaatctcactttctctctcctcttctctttctcctttctctctttttctctgtttctcaccctcttctgcttccttccttctctccttccttccttccttccttccttccttcctctcttcctctctccccttctctccctctgtctctcataatggagtgtggttggaaaatcctgcttaattcctacatttaactcttaagtgccaccttttcacaatatctggctcagcaaatcacagagatgcagataaataaggaccagacaagtttcattttcaaggctgggagtagggtggaggagggtgtcagacagatgtaggaggaagaaagtgggcctcataagcta

SEQ ID NO: 89775 - DNA, 684 bp, Homo sapiens
tcacaaatggctaactcctatgttgtctcctactctgaggagtctttcctaattgcctctccccacctctttgctcccttggggcttagaacacaataccccaaagcatagtgccttggcgtgctgagcacttcaaactgaaggagactgagggggtctcaggcacaaggtccttctgaccttccctggccctcctgtcccttcctcttctttctcccctgagatgggtsacataaattagaatttctctcccaaagcatgaaacctagaagggtcattccctgaccttttcccttttcccctgaagatcctcatgtgataggtgtcctgccctgttccctgggggaaaggaatgccacacagagaggccaagaagaacttggacaaacaggccttgcttggttctccctcagtttattaacatttttcatacccttttttgtccaggcacatttttacatgactgtctattcttcatagcacctaagtatgaaagtacaaaagctttcctacattctaaacactcatctgtatttccacagctccacatatttctcaccttcctctgctgggaaaattcaggaggaatcctaggagctctgggatgcagagagaaccatccgtggtgaatgcccacatcaccactggcagaagaacagagatggccaaccatggacctcactt

SEQ ID NO: 89776 - DNA, 661 bp, Homo sapiens
taggaatgttgatcctgataacattttgcatggaagtacctagaaagtcatgaagaagagacagtggcccttgagtggcaaagtcaacagatacagtgggccatgatttacagtattcctctctgctgctggtactgaggaacttccagggagtcccagctcatcctttggccaatactgaccaatgctggtcagtgttgcatggcaagtgtagcatgctggttgagctgtgtcagacttcagagtgagacagaccagattttaagttctggtttgtctactaactcccagtgtatacttgggcaagtttcgctatgcctcaaaaactcagcttccatttttgtaaaacaaggatagtgaaacctccttctagggttgttgtgatgattacatgagataatkgttgtaaatcactaggcttttagtaagaggactcaacctcacaaagaggcagccttggggatcagttttctagtcctcagtgtgtctcatgactagcagcccatttctgaatccacagagtgtttgcctagttgatggggcatagcatttgtcctagtgtcctgattactttggaatgccctgccaggagtgagagacagcttatattttggctgctaggctggggtcctgaggctcctcattgatcttgccccatggt

SEQ ID NO: 89777 - DNA, 661 bp, Homo sapiens
taggaatgttgatcctgataacattttgcatggaagtacctagaaagtcatgaagaagagacagtggcccttgagtggcaaagtcaacagatacagtgggccatgatttacagtattcctctctgctgctggtactgaggaacttccagggagtcccagctcatcctttggccaatactgaccaatgctggtcagtgttgcatggcaagtgtagcatgctggttgagctgtgtcagacttcagagtgagacagaccagattttaagttctggtttgtctactaactcccagtgtatacttgggcaagtttcgctatgcctcaaaaactcagcttccatttttgtaaaacaaggatagtgaaacctccttctagggttgttgtgatgattacatgagataattgttgtaaatcactaggcttttagtaagaggactcaacctcacaaasaggcagccttggggatcagttttctagtcctcagtgtgtctcatgactagcagcccatttctgaatccacagagtgtttgcctagttgatggggcatagcatttgtcctagtgtcctgattactttggaatgccctgccaggagtgagagacagcttatattttggctgctaggctggggtcctgaggctcctcattgatcttgccccatggt

SEQ ID NO: 89778 - DNA, 647 bp, Homo sapiens
ccgggtacagatctgggtaggkggggtgcagtgggtttccatgcaaatagccctaggcccagccattgtgtgcccatagcaggctctgatagttccagggctggagatgtgatagggatcaaaatgggccaggctttcttcctgagttagagcccgcctctgggctgcagaggtctcttgggagaggcacacagggaaacatgtgcacccagctgggggtctgctgtagctagcgatctcaatagcctgtgcacggaaatgcagcaggtcacaggaaagctagtctgcacaaagctatggtcctcctgcacccgaggtgcacccgagggagcagccatttcttgcaaagtccccagctgggagtccctggggtatctcgcgtgggttcacaaaccaacccaccaggtatggtcaccaggtggaggctgtgctgttctccccctggctgtcactgatctctactcgggaagcctctagaggtgcctggaggtgccctactggtggtgccccagcagggatgaggatgacagtgtccatgccaagggggctgggtcctcaagaccccagagccactcgaatgctgcaaacctcagaagtagaagagaggagaagatttactatacagggatagggagaaggcagggagg

SEQ ID NO: 89779 - DNA, 647 bp, Homo sapiens
ccgggtacagatctgggtaggtggggtgcagtgggtttccatgcaaatagccctaggcccagccattgtgtgcccatagcaggctctgatagttccagggctggagatgtgatagggatcaaaatgggccaggctttcttcctgagttagagcccgcctctgggctgcagaggtctcttgggagrggcacacagggaaacatgtgcacccagctgggggtctgctgtagctagcgatctcaatagcctgtgcacggaaatgcagcaggtcacaggaaagctagtctgcacaaagctatggtcctcctgcacccgaggtgcacccgagggagcagccatttcttgcaaagtccccagctgggagtccctggggtatctcgcgtgggttcacaaaccaacccaccaggtatggtcaccaggtggaggctgtgctgttctccccctggctgtcactgatctctactcgggaagcctctagaggtgcctggaggtgccctactggtggtgccccagcagggatgaggatgacagtgtccatgccaagggggctgggtcctcaagaccccagagccactcgaatgctgcaaacctcagaagtagaagagaggagaagatttactatacagggatagggagaaggcagggagg

SEQ ID NO: 89780 - DNA, 1284 bp, Homo sapiens
caataaggctagacagagagaagaagagatctgaagacccagccctggggcattcccatatttggaggacatggtgatgacagaaacaggcaaaggaggctgaggaggggtcccagtgcttcctccccttccctggaagcccccagacccagcctgtggacctgcccaagaaagaaagatgcagaaaaaaaataaacccttccaacttgtattgggagtcagaggggaggtagtacatgatgtgggggttgaaatcggagcactggaaaaggccagatttggacacacaggatttacaaaaatagcagttaaacagcctcttctcaagttgatgagctgctagaaaaagccgcactaaattaaagggttgtgctgtctctgcacttagattccccgctcctctctccctactatctgcttcagcccccccaaggaagtcccacagcctcccccctctctcattccttttttttttcctcctccctcctcccccagagctgtaccctgagaggttccagtgcaagcagagagctgcgaaagggaggagggcaggaggcggacagctcttctccctcagcacccaccccagcccctgcgttccatccctgtctaggagccatggaggatcccagagggtccctcctgctgacaggtgcccctgcctctacctccacctcctcttaacagtgggggtgggggaagtgcaggacctaggggctcttgacttcagctcctctcccctgaggaacgaggcccacattcatggctaaccaagactggccttagtggcttcgcacctgctgggcctccactccctcygcagcctgagctgggaaggaccctgtctcctggctgcccccaccacctatagctcctggcgggggtgcatttcaagatattcagggaggaggaagctgagcctaggtctgcaatctcttaccgaaaagaaatttataaaatgcgtaaggcatagcactcacgcagctggcactaactgggtggccaccccgctcggctgcaggtgaggaggtgggggctcagggaggtcgagaggagcagaggaggacctaagtccagctctgcctgccactcggccctgggtctttccattgttgggggcggctccgaggctttgttattcattcactcattcctccagaacaccagaagcccggcccctgggaagcttgggtccagtagtggccccagagaagacagggcaggggcccagaggggtgcagaggagctggggaggggaggacactggtttgcttgcgaggagca

SEQ ID NO: 89781 - DNA, 1284 bp, Homo sapiens
caataaggctagacagagagaagaagagatctgaagacccagccctggggcattcccatatttggaggacatggtgatgacagaaacaggcaaaggaggctgaggaggggtcccagtgcttcctccccttccctggaagcccccagacccagcctgtggacctgcccaagaaagaaagatgcagaaaaaaaataaacccttccaacttgtattgggagtcagaggggaggtagtacatgatgtgggggttgaaatcggagcactggaaaaggccagatttggacacacaggatttacaaaaatagcagttaaacagcctcttctcaagttgatgagctgctagaaaaagccgcactaaattaaagggttgtgctgtctctgcacttagattccccgctcctctctccctactatctgcttcagcccccccaaggaagtcccacagcctcccccctctctcattccttttttttttcctcctccctcctcccccagagctgtaccctgagaggttccagtgcaagcagagagctgcgaaagggaggagggcaggaggcggacagctcttctccctcagcacccaccccagcccctgcgttccatccctgtctaggagccatggaggatcccagagggtccctcctgctgacaggtgcccctgcctctacctccacctcctcttaacagtgggggtgggggaagtgcaggacctaggggctcttgacttcagctcctctcccctgaggaacgaggcccacattcatggctaaccaagactggccttagtggcttcgcacctgctgggcctccactccctccgcagcctgagctgggaaggaccctgtctcctggctgcccccaccacctatrgctcctggcgggggtgcatttcaagatattcagggaggaggaagctgagcctaggtctgcaatctcttaccgaaaagaaatttataaaatgcgtaaggcatagcactcacgcagctggcactaactgggtggccaccccgctcggctgcaggtgaggaggtgggggctcagggaggtcgagaggagcagaggaggacctaagtccagctctgcctgccactcggccctgggtctttccattgttgggggcggctccgaggctttgttattcattcactcattcctccagaacaccagaagcccggcccctgggaagcttgggtccagtagtggccccagagaagacagggcaggggcccagaggggtgcagaggagctggggaggggaggacactggtttgcttgcgaggagca

SEQ ID NO: 89782 - DNA, 1284 bp, Homo sapiens
caataaggctagacagagagaagaagagatctgaagacccagccctggggcattcccatatttggaggacatggtgatgacagaaacaggcaaaggaggctgaggaggggtcccagtgcttcctccccttccctggaagcccccagacccagcctgtggacctgcccaagaaagaaagatgcagaaaaaaaataaacccttccaacttgtattgggagtcagaggggaggtagtacatgatgtgggggttgaaatcggagcactggaaaaggccagatttggacacacaggatttacaaaaatagcagttaaacagcctcttctcaagttgatgagctgctagaaaaagccgcactaaattaaagggttgtgctgtctctgcacttagattccccgctcctctctccctactatctgcttcagcccccccaaggaagtcccacagcctcccccctctctcattccttttttttttcctcctccctcctcccccagagctgtaccctgagaggttccagtgcaagcagagagctgcgaaagggaggagggcaggaggcggacagctcttctccctcagcacccaccccagcccctgcgttccatccctgtctaggagccatggaggatcccagagggtccctcctgctgacaggtgcccctgcctctacctccacctcctcttaacagtgggggtgggggaagtgcaggacctaggggctcttgacttcagctcctctcccctgaggaacgaggcccacattcatggctaaccaagactggccttagtggcttcgcacctgctgggcctccactccctccgcagcctgagctgggaaggaccctgtctcctggctgcccccaccacctatagctccyggcgggggtgcatttcaagatattcagggaggaggaagctgagcctaggtctgcaatctcttaccgaaaagaaatttataaaatgcgtaaggcatagcactcacgcagctggcactaactgggtggccaccccgctcggctgcaggtgaggaggtgggggctcagggaggtcgagaggagcagaggaggacctaagtccagctctgcctgccactcggccctgggtctttccattgttgggggcggctccgaggctttgttattcattcactcattcctccagaacaccagaagcccggcccctgggaagcttgggtccagtagtggccccagagaagacagggcaggggcccagaggggtgcagaggagctggggaggggaggacactggtttgcttgcgaggagca

SEQ ID NO: 89783 - DNA, 1579 bp, Homo sapiens
taaaggtttatgtttaacaaacgaactttttaaaaacacacacacaatgcaatgccatgtaattgtgctattattcacaagataattagaggatttatagaaaatatgaattcatagtgcacagtgggaggtgtggctgggtaatgagatgcaagcgcacagtggcctggcgagcagctcctgcgttcctcccattgtgtccctttgttactacatgttacatcctcatttgggcataccagtggscaagagaccttcctccacctggcctctgcctcgtgttatctccccacactcggcaccctctctggcttttttttttttgagacagtgtctttttttgagacacagggcagggacaagtctttggttaatcttccattaattaatctatgtatcagttactcacagatgtttattgagctcctattttgtattctggaatccatgttttgctctggggacatggcagtgaagaaaacagacaaggtccctgctctcgggaagcccacagtcttgggtgggagacagacacttaagtaaatcaggccatataaacagtgataggggctgtgaagggcattaacaggaactgagatggaattacaggagactggccggatgcagtggctcacgcttgtgagctgggattacaggggtctgccaccatgcctggctaattttttgtatttttacgttatttatttatttatttatttttgagacagagtcttgctttgttgcccaggctagagtacagtagcgctatctcagctcactgcaacctctgcctctcaggttcagttcaagtgattctcctgtctcagcttcccgagcagctgggattgcaggcgcccgccaccacgctcggctaatttttgtatttttagtagagacagggtttcattgtgttggccaggctggtctcgaactccgacctcaagtgatccacccaccttggtctcccaaagtgctgggattacaggtgtgagccactgtgcccagtcccaaaccatatttgaattagagctgaagggctccaggcccaaatgactgttgaggggcaggaccagctgcgtcactgtcactctcctttccagagaaaagctattctggtccaattcctagctgcgtgcctttgggaaaactctttcatctctctgtgcctcagtttcttcatctgtaaaattttttttttttttgagacagcatcttgctcttgttgccaaggctggagtgcaatggcgcaatcttagctcactgccatctccgcctcccaagttcaagtgattctcctgcctcagcctcctgagtagctggattacaggtacccgccaccatgaccggctaattttttgtattttcagtagagacggggtttcaccatgttgaccaggctggtcttgaattgctgactacaggtgatcctcctgcctcagcctcccaaagttctgggattacaggcgtgagccaccacatctggattttttttttgagacgtagtctcgctctgtcgcccatgctggagagcactggcataatcttggcccaccgcaacctccgccgcctggttcaagcg

SEQ ID NO: 89784 - DNA, 535 bp, Homo sapiens
agagcagccgcagggggctgggagcctccatcaattggaagtttggtgaggtgtctgctcagcaagagtgtgtgtgtgtgtgtgtgtgtgtgtgtgtgtgtgtgtgtgtgttcgttccagctaccacctacactagatagaatgaaaaacacttctcccatcccccagcctcttctaaaaggagcgccaactctgaactgtgtcagagggtttggcctgtggctgtgcttggagatgtygaattccacactttcgtgcctccttgttctgggaggactggacgtcctcgaagaaggctgtgtggcttggagtgtcacagactgctggggtagaactggacatgtgatcattgacaggtcactggctgtctctgtctccatttccctgactatataatggagaatttagatgctctccaagatccattccagctcttacgactctggttcttactctaactgcctcttcccatccctgatttcaccctggtgacatcactgctgctgcatgtttgggccctgaaagttttgcctca

SEQ ID NO: 89785 - DNA, 1388 bp, Homo sapiens
aacttattttgcatacaaattggtcctactatgatttgtctttgataaaatgatggactagagagaatttatgttccaaaagaaaactatggcatatgctattagattccaaccctgatcattgttttagagtttttattatttgctataatttgggctgaatcctgaattatttcctggctccaagtgttccctagtgaatctgaatataatatatttttaaaaacttgttttatcctgtcaggaatgagatgtatttttgaaggactactcaaacttgcaattacaattcgattattatgattataggatctcgggatttctcttccttcttgtcaaggtctttacctgatgtttgtctcattaaaaaaaatgagactgattacactctactcaagactgaagacgtgtactttaacctatctctgttaccagcaaaccaaagccttaactttcagaatctgtcagggaccctgtgtggtccctggatcaaccacccatgggcttatgaatgtattgaccgctggcatatgagaagtaattgtctattaggttatgtgactcttcctctttctgtttataactccaatgtttctgaacactgaagtagttcatcaaatttattttccaggattagacaaaccataccttcaaaccaaggagatgaattttatcctatgtttggcagaagtcgcttgccatgctggggagtaacctctcatgaacatataattagaaatctgtcaaccactctaggtaacttagcaaatgaactagctgaagccatagctaccaaacaaagatctttagactccttagccaggatagtcatggatgacggaataactttaggctacatagtggtgaaacagggagaaattcatatggcagctagctaacacatcatgttttgtttaaatccgtacatcttctgaagttgaaacacatgtaaaaaaataagacaatatgagaattaattatgacaaatcctagggaagaggctgaaagagctgtaacacaaacagggctgagacatgccccttgctttccacattgtgggcaaagagaagaaaagaagagctgtgaccctttgggaagcctgacctgggagctccctgagccagggctgtgattccctctttggggccctgtggttcctggtatctccaagcttctgggttccactgtgttcccaatgtgccagctgtggaagctgcttgaggtgcccgtggtccagccatagccttgyggagagctggcgcccgtgttggcacctggagctacctgccccactgcagcagccagcaagtctgactgcacagtggccagaccccatgctcgctcacacatcccttgccattccatgcagtctcccttggcaaacatgg

SEQ ID NO: 89786 - DNA, 1388 bp, Homo sapiens
aacttattttgcatacaaattggtcctactatgatttgtctttgataaaatgatggactagagagaatttatgttccaaaagaaaactatggcatatgctattagattccaaccctgatcattgttttagagtttttattatttgctataatttgggctgaatcctgaattatttcctggctccaagtgttccctagtgaatctgaatataatatatttttaaaaacttgttttatcctgtcaggaatgagatgtatttttgaaggactactcaaacttgcaattacaattcgattattatgattataggatctcgggatttctcttccttcttgtcaaggtctttacctgatgtttgtctcattaaaaaaaatgagactgattacactctactcaagactgaagacgtgtactttaacctatctctgttaccagcaaaccaaagccttaactttcagaatctgtcagggaccctgtgtggtccctggatcaaccacccatgggcttatgaatgtattgaccgctggcatatgagaagtaattgtctattaggttatgtgactcttcctctttctgtttataactccaatgtttctgaacactgaagtagttcatcaaatttattttccaggattagacaaaccataccttcaaaccaaggagatgaattttatcctatgtttggcagaagtcgcttgccatgctggggagtaacctctcatgaacatataattagaaatctgtcaaccactctaggtaacttagcaaatgaactagctgaagccatagctaccaaacaaagatctttagactccttagccaggatagtcatggatgacggaataactttaggctacatagtggtgaaacagggagaaattcatatggcagctagctaacacatcatgttttgtttaaatccgtacatcttctgaagttgaaacacatgtaaaaaaataagacaatatgagaattaattatgacaaatcctagggaagaggctgaaagagctgtaacacaaacagggctgagacatgccccttgctttccacattgtgggcaaagagaagaaaagaagagctgtgaccctttgggaagcctgacctgggagctccctgagccagggctgtgattccctctttggggccctgtggttcctggtatctccaagcttctgggttccactgtgttcccaatgtgccagctgtggaagctgcttgaggtgcccgtggtccagccatagccttgcggagagctggcgcccgtgttggcacctggagctacctgccccactgcagcagccagcaagtctgactgcacartggccagaccccatgctcgctcacacatcccttgccattccatgcagtctcccttggcaaacatgg

SEQ ID NO: 89787 - DNA, 1388 bp, Homo sapiens
aacttattttgcatacaaattggtcctactatgatttgtctttgataaaatgatggactagagagaatttatgttccaaaagaaaactatggcatatgctattagattccaaccctgatcattgttttagagtttttattatttgctataatttgggctgaatcctgaattatttcctggctccaagtgttccctagtgaatctgaatataatatatttttaaaaacttgttttatcctgtcaggaatgagatgtatttttgaaggactactcaaacttgcaattacaattcgattattatgattataggatctcgggatttctcttccttcttgtcaaggtctttacctgatgtttgtctcattaaaaaaaatgagactgattacactctactcaagactgaagacgtgtactttaacctatctctgttaccagcaaaccaaagccttaactttcagaatctgtcagggaccctgtgtggtccctggatcaaccacccatgggcttatgaatgtattgaccgctggcatatgagaagtaattgtctattaggttatgtgactcttcctctttctgtttataactccaatgtttctgaacactgaagtagttcatcaaatttattttccaggattagacaaaccataccttcaaaccaaggagatgaattttatcctatgtttggcagaagtcgcttgccatgctggggagtaacctctcatgaacatataattagaaatctgtcaaccactctaggtaacttagcaaatgaactagctgaagccatagctaccaaacaaagatctttagactccttagccaggatagtcatggatgacggaataactttaggctacatagtggtgaaacagggagaaattcatatggcagctagctaacacatcatgttttgtttaaatccgtacatcttctgaagttgaaacacatgtaaaaaaataagacaatatgagaattaattatgacaaatcctagggaagaggctgaaagagctgtaacacaaacagggctgagacatgccccttgctttccacattgtgggcaaagagaagaaaagaagagctgtgaccctttgggaagcctgacctgggagctccctgagccagggctgtgattccctctttggggccctgtggttcctggtatctccaagcttctgggttccactgtgttcccaatgtgccagctgtggaagctgcttgaggtgcccgtggtccagccatagccttgcggagagctggcgcccgtgttggcacctggagctacctgccccactgcagcagccagcaagtctgactgcacagtggccagaccccatgctcgctcacacatcccttgccaytccatgcagtctcccttggcaaacatgg

SEQ ID NO: 89788 - DNA, 709 bp, Homo sapiens
tccctcctccctaaacccataggaaagaagtggagacatagagacacaaagaatttgaacaaacaggacttgctaagcttccccagtttatgtcattagaccatactcctttttgaccaatcatacttctatatactatccactcttcatcaaacctaascataaaaagacacagttttccctggttctttgaatcttcatttttggatgctcctatgtcctataaaacttatgttaaatgaatgggtatgcttttctcttgttaatctgtctttttttatagggatatcagccatgaacctagggataggtaaggaaagaaatcttcccctctctgcaactgtaaatgtcacattactgcttcgatattaccactctctttagcctatagaacttctcttttcttaatgtcaatataaaacaatgatagggctgggcgcagtggctcatgcctgtaatctcagcactttgggaggccaaggcaggtggatcacgaggtcagcagttcaagaccagcctggccaacatggtgaaaccacgtctctactaaaaatacaaaaattagccaggcatggtggtggacacctgtaatcccagctactcgagaggctgaggcaggggaatcgcttgaagccaggaggcggagtttgcagtgagctgagaccacgccattgtactccagcctgggcaacagagcgagactccatct

SEQ ID NO: 89789 - DNA, 709 bp, Homo sapiens
tccctcctccctaaacccataggaaagaagtggagacatagagacacaaagaatttgaacaaacaggacttgctaagcttccccagtttatgtcattagaccatactcctttttgaccaatcatacttctatatactatccactcttcatcaaacctaaccataaaaagacacagttttccctggttctttgaatcttcatttttggatgctcctatgtcctataaaacttatgttaaatgaatgggtatgcttttctcttgttaatctgtctttttttatagggatatcagccatgaacctagggataggtaaggaaagaaatcttcccctctctgcaactgtaaatgtcacattactgcttcgatattaccactctctttagcctatagaacttctcttttcttaatgtcaayataaaacaatgatagggctgggcgcagtggctcatgcctgtaatctcagcactttgggaggccaaggcaggtggatcacgaggtcagcagttcaagaccagcctggccaacatggtgaaaccacgtctctactaaaaatacaaaaattagccaggcatggtggtggacacctgtaatcccagctactcgagaggctgaggcaggggaatcgcttgaagccaggaggcggagtttgcagtgagctgagaccacgccattgtactccagcctgggcaacagagcgagactccatct

SEQ ID NO: 89790 - DNA, 709 bp, Homo sapiens
tccctcctccctaaacccataggaaagaagtggagacatagagacacaaagaatttgaacaaacaggacttgctaagcttccccagtttatgtcattagaccatactcctttttgaccaatcatacttctatatactatccactcttcatcaaacctaaccataaaaagacacagttttccctggttctttgaatcttcatttttggatgctcctatgtcctataaaacttatgttaaatgaatgggtatgcttttctcttgttaatctgtctttttttatagggatatcagccatgaacctagggataggtaaggaaagaaatcttcccctctctgcaactgtaaatgtcacattactgcttcgatattaccactctctttagcctatagaacttctcttttcttaatgtcaatataaaacaatgatagggctgggcgcagtggctcatgcctgtaatctcagcactttgggaggccaaggcaggtggatcacgaggtcagcagttcaagaccagcctggccaacatggtgaaaccacrtctctactaaaaatacaaaaattagccaggcatggtggtggacacctgtaatcccagctactcgagaggctgaggcaggggaatcgcttgaagccaggaggcggagtttgcagtgagctgagaccacgccattgtactccagcctgggcaacagagcgagactccatct

SEQ ID NO: 89791 - DNA, 707 bp, Homo sapiens
caagtattggctggatattctgaagcaattcaacatgagcaatatgacggccactgtcaggccacctttttttttctttttttttttagagagggggtcttgttctgttgcccaggctagagtgcagtggcaggatcatagctcactatagcctggaccccataggctcaagtgatcctcccaccttagcctcatgagtagctgggaccacaggtgtgtgccaccatgcctggctttaggttgttgttgttattttttacagatggggctcattatattacccaggctggtctcagactcctgggctaagcagtcctcccaaagtgctgggattacagatgagaggcaccatgcccagggaggccaccaatttttttttttttttttkggtctgagatggagtcttgctctgtcgccaaggctggagtgcagtggcacgatctcagctcactgcaaccacagcctcccaggttcaagtaattctcctgcctcagccttccaagtagctgggattataggcacccacgaccacacctgactaatttgtgtattttcagtaaagacagggtttcaccatgttggtcaggctggtctcgaaatcctgatctcatgatccacccaacttggcctcccaaagtgctaggatgacaggcgtgagccactgagcctggccccattttttaatgtggttaagtatagaagaatta

SEQ ID NO: 89792 - DNA, 707 bp, Homo sapiens
caagtattggctggatattctgaagcaattcaacatgagcaatatgacggccactgtcaggccacctttttttttctttttttttttagagagggggtcttgttctgttgcccaggctagagtgcagtggcaggatcatagctcactatagcctggaccccataggctcaagtgatcctcccaccttagcctcatgagtagctgggaccacaggtgtgtgccaccatgcctggctttaggttgttgttgttattttttacagatggggctcattatattacccaggctggtctcagactcctgggctaagcagtcctcccaaagtgctgggattacagatgagaggcaccatgcccagggaggccaccaattttttttttttttttttggtctgagatggagtcttgctctgtcgccaaggctggagtgcagtggcacgatctcagctcactgcaaccacagcctcccaggttcaagtaattctcctgcctcagccttccaagtagctgggattataggcacccacsaccacacctgactaatttgtgtattttcagtaaagacagggtttcaccatgttggtcaggctggtctcgaaatcctgatctcatgatccacccaacttggcctcccaaagtgctaggatgacaggcgtgagccactgagcctggccccattttttaatgtggttaagtatagaagaatta

SEQ ID NO: 89793 - DNA, 707 bp, Homo sapiens
caagtattggctggatattctgaagcaattcaacatgagcaatatgacggccactgtcaggccacctttttttttctttttttttttagagagggggtcttgttctgttgcccaggctagagtgcagtggcaggatcatagctcactatagcctggaccccataggctcaagtgatcctcccaccttagcctcatgagtagctgggaccacaggtgtgtgccaccatgcctggctttaggttgttgttgttattttttacagatggggctcattatattacccaggctggtctcagactcctgggctaagcagtcctcccaaagtgctgggattacagatgagaggcaccatgcccagggaggccaccaattttttttttttttttttggtctgagatggagtcttgctctgtcgccaaggctggagtgcagtggcacgatctcagctcactgcaaccacagcctcccaggttcaagtaattctcctgcctcagccttccaagtagctgggattataggcacccacgaccacacctgactaatttgtgtattttcagtaaagacagggtttcaccatgttggtcaggctggtctcgaaatcctgatctcatgatccrcccaacttggcctcccaaagtgctaggatgacaggcgtgagccactgagcctggccccattttttaatgtggttaagtatagaagaatta

SEQ ID NO: 89794 - DNA, 717 bp, Homo sapiens
tttagtgttggtgggtttcatgctgcagaccagactgacttctatgaacattacatcttatcctcctacaagaacaattcgccaatcgtataaaagtgttcgtgcatccattaatgcattattctgtctgaaaagcccgactacacaaagggaaaagctgaaatctcatctcaccctgaactcagcctacttagttagagatgagaaaacagaactttctttatgccagtgcaagggggagagctttttatactcgtatgtaagagcagaattacaaagaagcagaataagagtttctttttgggaaatgatgtcttttacctaatgatcacaattctaaatactagctcaggttccatatcccaagcaaggcccagacacaaagtcattgagagtcattgagagtcattgagagtcaacaagagtgagaagatagctactctaaaaatgctataaaacaagagttttcctccatttgcactgcattctcctgggataactaaggcagctttgtcctcagcaaagaatggtgacaactatgtgacctttatcagacacaaygtgcttgtgttttatgagaacacaaagggtgactaagcaagttgggtgaccctcagccctaactccttctagaactcatgtccagttggcagagcaaggctgagacaccgccatgaagttgcttgtccatttctaaagcatatacaggtaaactac

SEQ ID NO: 89795 - DNA, 821 bp, Homo sapiens
ttatttataaaattttgttgcctgattgggtaaaactaggtactttccaaatcttgagaaagatcaaagagttttatccttttctctgcaagtaactacctattccttcagcaaaaggagagaggagaaaatgaatattactgtcatcactaaaatggctacagtaacaagaagtttaatgattgagaagaagttaaagtaaaacagtctcatgaagtgcctcttttctcagcatcacacaacaaaagtttctttacttagatatttgattcttatttactatttgccttgttttgctctctgtggccaatttgtcactagattctgaagctctcagtcatgtctcttttgctattctcatgggtcctgaaaatggaacccagtgtttttttccctttgtttctttgaccacaccgggttttgttttggattatttaactgggatatgtggtagaacgtttccactggaaagatgagaaaagataaactacaccaagacttctctgttttcaattttgctgtgacttatttcatctttgctcaatatcatttcttgytcttggtgagaagtggagctcataataaatatagtcttgtgggaaaatgatataacattatgaagcccaaaccaggggacacagtcatcgtgcaagtcactgtatgaaaagcattcttagctttggttttcattccctttaggcagtttctggaggagataggctattctattctaaaattatgtgcctaatactgtcattttatttcttgagaagatttttgtgtatattagtataatatgtaaaaatccaatataataacac

SEQ ID NO: 89796 - DNA, 1148 bp, Homo sapiens
tctgtttgcatgtgtgtgcatgcgtggcagctggaagcacctaccagggagagccctacttttgcttgtcagggccccagaaaactgcaacttattgctctgacttaaattggcaaactataaaggtcacttttggtcctttttagaaaacatctaaccagaaaagggaagtgcaaattagaacagtttaggcagaaactgaaagttaagaaccgagggaargcctttagaaagagaagtaaccagagaggtgagaggaagaacaccaagaagaaggagtgctcatatatgccagacttcttacaaggagtcctcaggcctccagcaatccatggctttactgagagctttctcctctatatagcactcctatctattaaatagacatgcgtaaaattggctaaaacctcctgtcccagaaaggattgtgatgatgggcatttctgagagggaagtctgctcacctgtgaaacgttcctggcagaacttctgtggctcagtccaggaagaaaatggacccatcaaatgggtttagcattgaggctcccttcctagccattgccagccttccagcactagccacatggcctgcggatgctaagtaggaaagcctagctgccccaacaacctgatgtgttttagctttagggccttacagagggaagcctggatcaggagttagaagaactggacttgtcttcatatttaaatgcctgtaagatgtctgggcatggtggctcatgcctgtaatcacatcacttcgggaggccaaggcaggcggatcacttgaggtcaggagttagagaccagcctggccaacatggcgaaaccccatctctactaaaaatacaaaaaatcagctgggcatggtggcagactcctataatcccagctactccagaggctgaggtaggagaatcacttgaacccaggaggcagcagctgcagtgagccaagatcataccattgcactccagcctgggtgacagagcgagattccatctcaaaaaaaaaaaaaaaaaaaatctgtaagatgaagaaagttggtgaatatcagtggggtgttttgttttattttattcactgatttacggtatttttttcagtagcagaacctattttcaatagaaatgcgatttgaaaatcaa

SEQ ID NO: 89797 - DNA, 669 bp, Homo sapiens
agaccaagatgcagaacatgctagcatcccccagtcactatcttccacaaaaggtgaagcactatcctaactgctaactgcaaagatttgttttacctggttttgtattttatgtaagtggaatcccatagcctataattctttgtgtctggcatcttgcgttcaacattttatttgtgaaatgcakctacattttggggtgttgttatagatagttcatgccctttatagtttctttttgtgaatacaccactatttctagtctatagttgatggatatttggggtatttccagtttggagctaccatgtggcttctgcttttgaaccagatgtttgcagagtcagttaccccaaaagagatactgaacacaaaagaaagtcactcattcattcagcaaacaccatctgtgggaaacctacaatatgccagccatgtagacaaacaccgagatgggacagtgttcaaagtcgacatgccccagccctcatggagctgaatgtttgtaagggaaatggtgtgtagtcagatgattagaacacagccagatccgagctttgctaagggtggagagaaagtcagcaaagtgtaggctcgaagcttcagacaaaggtggctgccgagagtgtgttcaaggtagaaggaacaccttgtgccaatggcacattt

SEQ ID NO: 89798 - DNA, 738 bp, Homo sapiens
gggaatagagcgagactctgtctcaaaaaaaacaaacaaacaaacaaaaaaagccaaacggttttcccaaaacaacaatttatattcccattagcagcatgtaaaagtccccctggctctctatctttgccaacacttggtattgccagatactttaaaaatattcacctgggacaatgtggttattaaatagtaagtagctccttgtcttaaactaccttttctcaatgtactgaggttgaccattttttcaaatgtttattggtcattgtatggtctttcccagaagaccatacaatgttgtcctttaaaagattgaattgtctgtcttttctttattgatttgtagacttcagatattccagatactaatcctttgttaagtagatgaagcagatctcttctctctgtttgtgacatatcttttagtttctttatagtattatatattttgatagaaaaagyttataattttaatgtaatcaaatttatcactctattcatttatggcttcctcttttgccttgtttaggaaatctttctgtatatgctgaggtcatatgaatattcttctataatacaattttttctgtaatatgatttttaaaccattttaatgccgtggaccctttgtcatgttggtaaaggtaaaaaatgaaactcatagaattacaaagaaaaccaattatgctgaaatatagttattaaaatatttaaagtgatgatatataacacatg

SEQ ID NO: 89799 - DNA, 824 bp, Homo sapiens
ccacggagatagaggctgtgaccgagtttgcagagctgggacacacagccctggggttgaacaccgcctctcaacagtgtggcctccgccaataccgagcctcatttcctagcttgcagaacggattaactcggacctgccgggtgttgtggcggctactgggaccggctgggaatgaatccctgtggctccttcccttccccttagtcgcgcccctttcttcttacggacaggagagtggactaaatgcagattcccaattcttcggcctcagtttccctaaggatctcatgtgagcgttcagggtccgcgtcggcgatgcgtccaccaggcacgggtcccgcggggaggggaatgacctacacttggcctcgcgaccctgcgggcgcccgggttccaggatgagccccgggcgtggctggggagtgcgcgcgtcccggctccaccccaccccgggcacccctggcccccagtctccgccagcggrcggtgcggcagcgccaccgtgtggccgcgcgacatcaaagcgccgcgcctctgcccgctggcgggtcccgcgccgcggagccggagagcgacttccccggagctagggcggtgcaggagggcatctggtccaggtcccccgacacacctcaggattttcttgcactccccccgccccccggcggggctgccagcgtcaccaattacgagtggacggagcggaggcagtgcctccctgccctcggtggagggcggggccgagggcacctcggccgggccaggccttccccgcccgtcgcatcgtcccattccgaggtccgggttctgcgtctactctt

SEQ ID NO: 89800 - DNA, 1484 bp, Homo sapiens
cattaaagtgagaaaggtcttatattttgaaaatgcaatggatctctaaaaagtagcagattaggcctattttaaaaaacacattagtatatttttacctcaggaggtagtttcagggatggggaggttgtttattattatgctttattacttacatatatatatatcacgtattttcttttatatatgataagtatcacataataatactttttcaagagcttgaaaaccctgctgttatgttttgtttataattaaattattcagtaaatgttagcagcacttccctcatgaattcctatgttgataatttccaaaaaaattaaatgtttggttaaattaactgtcttttctgtaaatttcctataactccagagaagtagttcttcattgtttatattaattatactttaattttcaagagtctgaacatttccatttatattatcaaagctctttgtacacacatacacacacacacacagattcattttaaatactcacatataagttggtaggcaaccttgatctctctgaagcttaagaaagtaaaacaaggtctccaagatattaaaataaacgccacagtattcaggcattaaatatgcattgtatttctaaacgaattcccacattcttacttagagaatttttactttgattttcccacacttcagcctggagtagttttcaggttgcccagtcgaaaattgatcagaataagtacctataaaatggcagcttctttgacattagcaagtagaggcaaatagtgagggacaagacttcaaaactataaaaagatttctgccataattttcatacaggccaaaaatgctattaatatgagtgtttaaaaatcctaaacttacaaccagatgtcaaagtataataactggggtctattctgaagttctgagttattaagaaaaaaaattctatatattatattttgtataaaaatgagataatacacaacatgttagatttttagccaaatgattttcatcagaatttattacattacaagcaagaaaatgttggcacttacaatttagctgttcraaataatctattattagcactaattttatccccaatctccttggatgacagactttcttacatattcattcattgtcttttctgaaaacggatggccaagattctaaaacactcaattcacacagtcagcacacagaggcatcaaagactgatgctgcttttatttcctgagatattaataattttttcttaacacaagaagctgtgaaaattaaaactcttcctctagagtttaaagtgctagacagagacatattggcaacaatagtcaatgaagaaatgataaaacataagtaaaaccaaaatgataaaagatgaaaaaatacattaaaaaaattaaaatgcttcaatacaacaatatctattatattttaataactagtacagcttcctaggcatttgaactttaatcacacaat

SEQ ID NO: 89801 - DNA, 1043 bp, Homo sapiens
gtctccttgggggcacgaacatgccaagcatttgcttacacctgtcccagaatagcagaattttctctttttctttcttccttccttccttcctttctttttctttctttcttctttcttctttctttctttcttcctctttctttctttttcttgttaactgtaactcagagccatcggtaaaccatgaaaaagaggaaaatttaactgttgaaaggcagaagcacttatgtaggccccaactaaagactgctttccattcactcatttgttaattgattgaatatttattgtgcacctactatatgccataaacatgcttaattttcgggatacaaagaattaaaaagtccctgttttcaacaaaaaaatgatatagtagagataaaaagcaataaataatttcaatattgagaaaagaaatttgaggatgtcatgaaagtatggaagaggkgaccttgactggggttggagataggaggcagctcaggactgatgggaggcagaacaggcttctaaggagagaggattcttaagccaagtttcaaatgttgactaggagttagaaggtgagtagtggaaggtggatctagtcatcaccagcttagagctttttatctccagattttctaagcaccatagactatgttatagaccctcttaaaatcctaaatcatgaacaaagaaaccacttgcttagtgattgcaataagataacataatttctgactcaccgagagtcagagaatcagaaggagctatccacaggccaatgctttatctaagtgattgcctttttatttccttgagccaaatctgctgagtcccattctccatgcctgcaggaaacaatatgtacaattctcttcaccaatgcagcataatcagccagaacctataaacttgtctagaaagaaagagaaaggaaaggagggagaaataagaaaggaaaggaagaggagggaaaaagggagggaaactgcagcttctgtgttccgatttatgtggatcaatccatattaccaaacatttgcttagcagca

SEQ ID NO: 89802 - DNA, 1043 bp, Homo sapiens
gtctccttgggggcacgaacatgccaagcatttgcttacacctgtcccagaatagcagaattttctctttttctttcttccttccttccttcctttctttttctttctttcttctttcttctttctttctttcttcctctttctttctttttcttgttaactgtaactcagagccatcggtaaaccatgaaaaagaggaaaatttaactgttgaaaggcagaagcacttatgtaggccccaactaaagactgctttccattcactcatttgttaattgattgaatatttattgtgcacctactatatgccataaacatgcttaattttcgggatacaaagaattaaaaagtccctgttttcaacaaaaaaatgatatagtagagataaaaagcaataaataatttcaatattgagaaaagaaatttgaggatgtcatgaaagtatggaagaggggaccttgactggggttggagataggaggcagctcaggactgatgggaggcagaacaggcttctaaggagagaggattcttaagccaagtttcaaatgttgactaggagttagaaggtgagtagtggaaggtggatctagtcatcaccagcttagagctttttatctccagattttctaagcacsatagactatgttatagaccctcttaaaatcctaaatcatgaacaaagaaaccacttgcttagtgattgcaataagataacataatttctgactcaccgagagtcagagaatcagaaggagctatccacaggccaatgctttatctaagtgattgcctttttatttccttgagccaaatctgctgagtcccattctccatgcctgcaggaaacaatatgtacaattctcttcaccaatgcagcataatcagccagaacctataaacttgtctagaaagaaagagaaaggaaaggagggagaaataagaaaggaaaggaagaggagggaaaaagggagggaaactgcagcttctgtgttccgatttatgtggatcaatccatattaccaaacatttgcttagcagca

SEQ ID NO: 89803 - DNA, 716 bp, Homo sapiens
cttgagaatcaaaagaccccaggaagaacctgcttaatacatcagcattaaaattcagttaccctaagttcgggtggaataatttattagaaacttatttctaagttaataatattggtataaatcctaaacatgggccaggagtggtggctcacacctgtaatcccagcactttgggggggctgagacaggtggatcacttgtggccaggagttcgagaccagcctggccaacatggtgaaccccatctctagtaaaaaaaaatacaaaaattagccggatgtggtggcaggcacctatttgggaggctgaggcaggagaatcgcttgaacctaggaggtggaggttgcagtgagccgagatggcaccactgcactcccgagtgggcaacagagtgagactctgtctcaaaaaaaaaaaaaaaaagatactaaatatggaatcacttaacytcttgtagacttacctgtaaaacatggatttaatagctatattatagagtttctgagaaaataaaatgaattgataaatgtgaaattactaagtaaccataatgcataatatcaattgttcttaaaattaaactcttttaaacaaatgcatagatgtagacaggaaaggaagttgtgaccagatgcctatttgaaatgcacaagattgtctttatttctaagtaagaaccatgtatacaaggcatttaagcttagctgggttgc

SEQ ID NO: 89804 - DNA, 714 bp, Homo sapiens
ggatccatcatcacattatgactaggtcaagttctattatggacctactctgaaaagagcccttcttggtaaattatctcagctgagacaaaaaaaaaaaaaaaaaaaaaaatacataagaggaaggttttccatttttacagattctgccccagtgtgattatttaagytgatttcagagtctagcacttctagtcatggccaggaaaaaatgctgcatgaatatattcactttatgcaaggtcaaggctttaggcaaaacattgctggcatctgggttaaaggatgtttgaatgggaaacaaccattggaagttaaagatggagacctcctgagaaacttaggatcttcttcccagaagctattgtgcttacactctcagaataataaacctagggacctttgtctccccagagacaatttatttactttagaaagttgaagtctttctcttttcttctccaggggaaagacaggcagctggctcagctgcacggtatgagttctgagacacatattttccaagctcctctcctgtggtacaaacccctgtatacacagggtacatctggctattaggtcccccactggggactggggcatggggaaccagtgctaagtttgctatgtaagtaaataatttgtctgttctctgatccaaaaaacctcatttcctgtcacggattaagagatataaatatgaagtaattatct

SEQ ID NO: 89805 - DNA, 714 bp, Homo sapiens
ggatccatcatcacattatgactaggtcaagttctattatggacctactctgaaaagagcccttcttggtaaattatctcagctgagacaaaaaaaaaaaaaaaaaaaaaaatacataagaggaaggttttccatttttacagattctgccccagtgtgattatttaagctgatttcagagtctagcacttctagtcatggccaggaaaaaatgctgcatgaatatattcactttatgcaaggtcaaggctttaggcaaaacattgctggcatctgggttaaaggatgtttgaatgggaaacaaccattggaagttaaagatggagacctcctgagaaacttaggatcttcttcccagaagctattgtgcttacactctcagaataataaacctagggacctttgyctccccagagacaatttatttactttagaaagttgaagtctttctcttttcttctccaggggaaagacaggcagctggctcagctgcacggtatgagttctgagacacatattttccaagctcctctcctgtggtacaaacccctgtatacacagggtacatctggctattaggtcccccactggggactggggcatggggaaccagtgctaagtttgctatgtaagtaaataatttgtctgttctctgatccaaaaaacctcatttcctgtcacggattaagagatataaatatgaagtaattatct

SEQ ID NO: 89806 - DNA, 1529 bp, Homo sapiens
caacctccatctcttgggttcaagcacttctcctacctcagcctcctgagtagctgggattacaggcacccmccaccatgcccagctaatttttacatttttagtagagacgggctttcaccacaattggccaggctggtcttgaactcctgatctcaggtggtctgcccgcctgggcctcacaaagtgctgggattacaggcattagccacggcacccagccctcctccagaatcttttaaagaacccaaccagcccatgtcacatattatttaatgttcttcaatcacaacattgtccttgagatgaccttctgatttttcaacttgctacataaagcctctatgttctgactccttttaaagatttaactgccatttggctctaattagacacctaatgttttggctcaaactttcactactggtaattcctcaaattagtcacacattcttaccaaaatgcttttccatgaacattgtaccatttctctagaatgaatttaaattccaattattttgttattcattcatcaagtatacatgagtgtgcctgctctgtgtcaggcactgtcttcggggttcatggtactgatcaaggaagatgccatacgggtttacaacatggtgaagtcatacattaatcaagccatgctaatcctttaccccgactgcagatgcatggacattaggatcctgctgatcagagctgacagctccgtgttgtaaagtaatcctttaggaagaaatcaagaactactttaaacacacataggttttctaggatcattaattcctgtattcctccttctctcaattatttgttttcagtctgtatgtaccctagtttggtttttccccaagcctttatttctattcagattcctttgaaagagaattgcttattttgcagacctatataatagagaggtacttttggattacttgtcagattcttatgcagggagctttgtctaaggcatttttaggtgctggacatctagtagagtgctttatatatgataggaactcaaaaagcactctggggagaagaattatagacatattaaaaaacaaagtggttagagaatatggatcatttttataaatgtatcttgacacagatgtaacacagaggatttgggaacagtgagatgagtatgagaggatgagatgagttggagccaagtcatgaagagtttagcagcagtgttaagagagaaagatgaactgaatcataatattggatcagaagtttattgaatgtaggaaaatatgttaggctatctttatatcctctgtagtctctgatgcatacttgtgaatgtcaagtaataaatagaaatgagtaaaaattaaattaatatgaaataaaaatattggtcagtgagattaaataagaaacatatattggttttaatgtgtgctttacatggtgaaatcttttccctttctagaaatttatcagataattaagtagtgaaagaccaaaaagaccagtgtttatactggcatattattttctcttca

SEQ ID NO: 89807 - DNA, 1529 bp, Homo sapiens
caacctccatctcttgggttcaagcacttctcctacctcagcctcctgagtagctgggattacaggcacccaccaccatgcccagctaatttttacatttttagtagagacgggctttcaccacaattggccaggctggtcttgaactcctgatctcaggtggtctgcccgcctgggcctcacaaagtgctgggattacaggcattagccacggcacccagccctcctccagaatcttttaaagaacccaaccagcccatgtcacatattatttaatgttcttcaatcacaacattgtccttgagatgaccttctgatttttcaacttgctacataaagcctctatgttctgactccttttaaagatttaactgccatttggctctaattagacacctaatgttttggctcaaactttcactactggtaattcctcaaattagtcacacattcttaccaaaatgcttttccatgaacattgtaccatttctctagaatgaatttaaattccaattattttgttattcattcatcaagtatacatgagtgtgcctgctctgtgtcaggcactgtcttcggggttcatggtactgatcaaggaagatgccatacgggtttacaacatggtgaagtcatacattaatcaagccatgctaatcctttaccccgactgcagatgcatggacattaggatcctgctgatcagagctgacagctccgtgttgtaaagtaatcctttaggaagaaatcaagaactactttaaacacacataggttttctaggatcattaattcctgtattcctccttctctcaattatttgttttcagtctgtatgtaccctagtttggtttttccccaagcctttatttctattcagattcctttgaaagagaattgcttattttgcagacctatataatagagaggtacttttggattacttgtcagattcttatkcagggagctttgtctaaggcatttttaggtgctggacatctagtagagtgctttatatatgataggaactcaaaaagcactctggggagaagaattatagacatattaaaaaacaaagtggttagagaatatggatcatttttataaatgtatcttgacacagatgtaacacagaggatttgggaacagtgagatgagtatgagaggatgagatgagttggagccaagtcatgaagagtttagcagcagtgttaagagagaaagatgaactgaatcataatattggatcagaagtttattgaatgtaggaaaatatgttaggctatctttatatcctctgtagtctctgatgcatacttgtgaatgtcaagtaataaatagaaatgagtaaaaattaaattaatatgaaataaaaatattggtcagtgagattaaataagaaacatatattggttttaatgtgtgctttacatggtgaaatcttttccctttctagaaatttatcagataattaagtagtgaaagaccaaaaagaccagtgtttatactggcatattattttctcttca

SEQ ID NO: 89808 - DNA, 659 bp, Homo sapiens
cagaatgtctttttggaaaaaggaaggtttcatagcccatggctgttagagacagacttggtgtttcactaacaactaggattattgctaaaagcccrgacattttaatgcctatttctctaaagccagcaaggttgaacattttttcatcttaaaaaaaaaatctttttttacatgacttatgttttcatttcagttatttttttaaaaaattttctgctgaggtcttggtgagcaaatggttttaaactccacacttttggctaagaatgagatgtaagatatagacactagttcttaaaattcagcactgttcacttttgccaagtgaatataaactgaattgcatcaaattacagagaacagtgtatctagaatattgttttattttatcatttttacctttccattgaaagatgaaatcaggcgatcaaagtagcaagggttaagtttctagactaccacaaattagaattgacaagaaaagctttctgatccatatttgcctgggaaggctccaagggaaacacaagaagcagcaactcaaatcctgttctcttcattatccttttttttttaatagctcttgcataggctcggtttttggaagttgtatgctgctaatttaggtatatatgtcattacaattttagcatgga

SEQ ID NO: 89809 - DNA, 1618 bp, Homo sapiens
  misc_feature (1)...(1618): n = A,T,C or G
cccagcttcatccaatctttttcttgtctccaggaccgctcatcttcatcccccctttgcctcactcaaattaaaccctaaatcctctgtggtttctgtcaaatcttgcattacttaaccattacctctgttttataatttaattatagaggccccaaccaagagagacaaacattctgagaacttgtgatttccccaaatgagaagagccttagagcagatkacatttcccataaaatgaaaacccacactagaacaagcagcccactaagatgtccatggccagcgtcaggctggcttggctcaccagcctaaggaacttgctcctgttaacagtaagcaatgctcaggacaaaccatggcccctcatggactcttgccaagagttgaaaccttgaaggttaaatcctatcatattacaatccactaggagcagtaggttctgtcccagttgttcctgacccgggctggggctgtccttctagggcagtggctctcctatttttggtcacaggactccttgacaactcttaaaaagaagtactgaggaccccaagagcttttactaatgtggggcacactgatcaatacttactgtattagaaataaaactgnnnnnnnnnnnnnnnnnnnnnnnnnnnnnnnnnnnnnnnnnnnnnnnnnnnnnnnnnnnnnnnnnnnnnnnnnnnnnnnnnnnnnnnnnnnnnnnnnnnnacccccggtataagccaccgtgcagccttatattttgttttaaattttcctctgtatttttctctctggcaaattgtttagggagtttctttagtttatcagactaaatttcaaggctttccttccaattttgacatgtaaacagtccctcatttctgcttatctagtgattattcccaaatctgtgtttacagtctagctgtctctcctgagattaagacttgtttctctaactacctgacggcagaatctcctcttggaagtatcaaggaggcagttcaaaactgaactgggcattggctccactccttctccttctctttactattaataccctttctctccttctatatgaccacactaagtcttatttaggcatcgtttcttctgggagacctttgtagaatctctgaggttatgttaacatgctaaggttttcttgacattctcagattgggttaggtgaacttttagcaacttatctttttactaaaaagtcatccctcagtatctgtggggaattggttctaggactccctaagatatcaaaatctgcatgagcagcccaggtgagaccagcagaagcactttacagtcacctacaggatcatgacaaataataaatcatgtttaagccacaaagtcctttacataaaatggtatagtatttgcatataacctacacatcttcctgtatcctttaatcatctctagttataatacctcatacgatgaaaatactacgtaaatagttgttatactgtattgtttagggaataatgacaaggaaaaaagtccacgcgtgttcagaatagatgcttttttttctcgtctaatattatggatccacagttggttgaatccacagatgtggaatccatggataccaaggaacgactgtatg

SEQ ID NO: 89810 - DNA, 599 bp, Homo sapiens
tttagtgttgtcaaggagaaggaacagaggtgtggatgggtgggcacagacacaggagcacagctgaagcagaggattacaaagggtggagcctgatgtaaagaaacctaataggtgacagagcatggaggctcttgaataccaggctggaaactgcattaggaacggtgctcataattgcagaaaattttacatggcctagatagtcatcaraggatgatgtacaaacaactatggcatatttatacaatgtgccgacaggatgcactgaacattttgaacaacaaagagacttgataatggcgaggttttgaggaggtgaatcaggatgcaaaaaaagcaaacaactaataaagttgattgatgacaaacactatcaaaaggcagccaggagaaaagctactggttacctccagggagctggtgagggaggctgggtgggaggatctacccttctgaattctgagggcacctccagtgtggccctcagaaagcaggagcttccaggctagaatcagatcccgacatccctgttaattccacggattccacaccgagtcagatttatgatttactatagggttttaaaaaccaaattg

SEQ ID NO: 89811 - DNA, 674 bp, Homo sapiens
ttcttttcctccctggaggatcaaatggcagcaatataagatggaaccatgggagtgaggagcacaaaggataaatttaaaggacacagttcagcctttctcaagaggaagaaggtcttatttttagttttgtattctccaggtcagcaaaacatgcttctcctactgattttgtccttttccatccaagtggttttgatttacaacaccaacttggatacttgcttgctctgcctacgtatctcttcgtgctagattcatctactcttgttgctaccactttagaaacagaagcagtggcaggtttgctcttcttgtttcagcgatgtggaatattggatttttgtttgtttgttttcttagggtgtaacctcccaaacatcctggtaaatttaaagagaaaataaaaggtatgcaaactgtggctatgctccaatcttggccatattgctttgaggcacagtctgctcagcccacctccataccttacattcccttccactgacaccaaattactctttacacattaatcagcaatgctgccaaaataagagtccaattagagcattctttcttgattgttttattctttaaattaacactaagccaaaagaccaaccctcagatgagcaaataaagatctawctgctttaagcaaacctgatggattaaat

SEQ ID NO: 89812 - DNA, 722 bp, Homo sapiens
ctgacttactgcacctattactggttctttgaatatattttgagctttttcatctctgaaagtcaaatcccttctctttgactgagacactcactgcttaccttaatgctcagaaaatactaccacttaaggtctacgaagcctcaacacattgcctttcctggtcatcccagcagcgagctataggttttgcctctcctgtgagctgctattttgatgcactctctaccctttacttgaggctgaccatacattgcagttatttgtaagtattacatgtcctggaaggccagacactctatgtttacttgcatccagctcactcattcacaatatttgttaaatattaaatatagtaatattatttagtactttaaaatcctcagaaaaatgtatttttgtacacacatgtttttgaagtccagatatcgactcatagttatagaatatatcagctgggcacggtggctcacgcctgtaatcccagcactttgggaggctgaagtgygtggatcaccaggtcaggagttcaaaaccagcctggacaataaggtgaaactccatctctactaaaaatacaaaaattagctgggcatggtggtgcacacctgtaatctcagctactgaggaagctgaggcaggagaatcgcttgaaccgggaggcagaggttgcagtgagctgagatcacaccactgcactccagcctgggtgacagagtgag

SEQ ID NO: 89813 - DNA, 2576 bp, Homo sapiens
  misc_feature (1)...(2576): n = A,T,C or G
attcctgtttatgtcataaaacaggtagttaacgtatcaggctaaatgtctatcagatgaaaactggcagaaaattaagcaaagatctttaaagagtgtaacataatagcagaaaatgtttgaggatataagaaaatatggccaccaatcagacatatatgcaagtttgtgtgtatgatttacaaaatttgggattaaaattcaacaactggttaaggtccaaaatgagctgttaatgttcaatgtgatttaaaagaaaaagagtccttcatttaagacatgaaggctttttcatttactaagtaatttttaaaataattattaattcaaaaagtgatttaatatgaatttgttctagtattacaaattatattgagatatagccagccaatcaaagtagcctcaaaaaatatacaaaagtacatatgcatacatgtcttttgagaaaaatggtcaagatcagtctagttagagtaaggtgtgtcaatagaatttaagcaaatctgaaaaaatactgtcatccaaccctgattcttgattttcttcttcccttcctttttcctttcctcgctccctctctcaatttattcattgattcaacaaacattcagtgagtgccagctccaactatgaatgaatcactgggtactgggagctttgttgggaataatataattcctgctatcaagaagcttattgtctagtcaaggaaataagcattaagcaataatgagacatttctatactgataattgtgatatgtgctttgaagaaaaaaatccaggatgcgaaggcagcatattgcaagtgatctacgtagtgcggtcaggtcagtgaaagagagccttaaattagaagtgagatctaagccaagacctgcagatgttcaggagtgagccaagcgtgaatgtggggggccagggaacagtatgcttggagtgaggggatgggaaatataatggagaaatgcagacagatttgggtcttgctaaagtattgctcaagtaagagatggatcccattttgggtgtaaagcaagggatgggtttgggtatgaccacctctagagttcggagcttgaagcctgaaaattccctctttgaaactgtcatttgtattgttgggtaggaatatgnnnnnnnnnnnnnnnnnnnnnnnnnnnnnnnnnnnnnnnnnnnnnnnnnnnnnnnnnnnnnnnnnnnnnnnnnnnnnnnnnnnnnnnnnnnnnnnnnnnnttaaaccgattctaattcgagctcggtaccctttgaaactgtcatttgtattgttggrtaggaatatgaggtatttaacagtcacaaataaatcttaagctcctgctacctgttttgctatgttatagaagctggaaacgcagccgggaacaatacagacagagtctttggtctcatgaagcttactttccagttcatatcactcacatcagctgtattattctgaaacattccttgtatattacacatgttttgtagaaattcagttcaatgaaataaaccagatacaataggattttttcataaaactataaatgtgaaagcaaaacatccagaattctgtgagagattaaaggtttaccaggcacaggcttgtcactttgaacttctccaaaggaaaaggaaaaatagatttttctctctgagcatgatcctattgttaaaacctatgtgctcaataacaagaaattagcaccatgttttacagtcatagaaaaaaagtgtttctgcatactcttcatgagtagtaatgaaactaaataaaaccaggaaatacagggccattcttccatggcctccctctatgcctgtcatggcaataaatgcttgttattataatgcaaacagaaagcatttttccagagggcaagttttgtctgtgatcctttcaggaaattagagaaggaaatctgtttaaactttcccttttgctctccgtaatgctccatcaaacaggactccaagcttgcttggttggcaaattactgctttcaacaatggggaatactattcttgacagataaaatagaggttaatgggacagaaagcagcataccatagccacctgccaagtcgacagaaaaagactgtggcggaattccagggcagccccagagtagagataggggtggggagggatgttgctgatttcttacggtggctcaaattagtttttagtatagcttttggaagtgatagagacagaaagagaggtacaaagaatccagtcttattacatataacaatggaattccagtgatcgtttcatcttttaaggacactggagtttaacctctgccttttcattaatttgttcaattaacaatttggagcctaccaagtgtgactgtctgcttatttcaatgttctattcgggcactcagtatgatgacctgatcacaacaaccgatacacatttgtggcatgaatggatatcagacgttatacttgtgctaagaatagaaatacaaaattaatcgtcatataacagctgtcatatatagacagcaagtgaagggctacaagttatgaaggggtctctcctttaatcatttttgtcta

SEQ ID NO: 89814 - DNA, 3044 bp, Homo sapiens
caccgtgagtgctcgatccagcctggagcacaagccaaaggcagcccactgaaccaagtgggtggggtacctcctgtggcaatccaagggcaatcctgggtaggggcgtcaccagcctcagaagtcaccagctggcaaagcagcaccgaaaattcctgtgtcactagtctactttcttagtttaagatactgggagaagacatagttctttgctccgctgatactaataaaaaaataccttttgaatattaagcctccttcttacttgtgcctcccccaacaatttgctctataaattcagacaaatgtcttagcatcatcaatgcatttttcattagctcaacctatttctcagttccttcacgatctgccatattttttcaaggtgacctactamcgtataaattctatttaagcaacacttgagcaggacacaatgcttttctaagtaagtattcattgacaaagtgtattttctaacataagtaattctctaaaggtcaccatatattgaactagaattcttagtatctgatgtacttaacctaaattttatattaacttaaacatttgtgtcaaacacaaaaaatatcccaggcatgaaaaaagtacattgcacagagaatgaattgaatcaataaggacaaatttgaaaagtgttagggaaatgaatagaaggtcaaaagtcaaatattctttcgaatatatgcaaacagtcttagtgccaagactgaaaattagtttttatgattacagaagctgtagatacgccctgacatttgcaaaaaatatgctatagtagtgggccaggagaggtagtctagaaactgattgatttggagaacatataaaataatcagcttaaaatgtattattattgttttcttaccatagccagttctgtgaatcaggaatgaatctaggaatgctgtattctgaaagcatgtggtgattttatggttcaagtaaaacaataacaaaaatattaaaataaataccacacacttgttacaaaaggaatgaacactgaaaagaagtcaaatatgattcggttttaaatctcttagatatattagtgtatcttgacatcacaaatgtatttaataaatatacttccaatttgatgtcaatttgaattaagtgattacataataacataattattaacttgtaaagagcttctcttttgccagacactattctattttgtttactccttacaactcactgagaaagttattttttttgtcattttacaacggaggaatgtgagattataaatgaatttcccaagatcacactattcctgacttgataccagttatatcttagtccaaaataaaaataaaagctgtaatttgttttaaaaatttgtgtaaagaatattatgttatttatcatctatttatctctatcagctgtatttcttataacatcccaattgctagatatcatgacactgcaagtcattcaatcccttctcagaattaacgagatttaatagtgctgagtatattaagtatattttgactgtaaatgaaatgtttaatgactgatattcaagtataaaggcatcaatcatctggcaggcaccatttttaagagaaaaataatgcattttaaattcatgatgaaagaaggaattcctaatttggactcaaaataagatcaaaagtccaacgactagcactggttctgctaatagccagctcaatggctccttgtataaagatacctgatattttaggtctcactcatctccatatttcttcaaacagtattttaaaaggacttatgatgtgccaaaaacaaaagccgagctcggaataaagtgatataacagagtcatcaaacatacagactacttttccaggcattggactgcacgaaataacttagcaactgggtgcagaaactataatagagaagtggttggaagtctcagttcgtagacacagaagaaattccagatccataaaatgagaaaggataagcaaaggggaatgagaaccagctgccaatgtgatagaatttaaaccaaggtaagatatcgcgagagggcgggcccgctaggcttggcgtcgctcccgagctggagctcttgccggcgtctcccctcggccagcggctgaagtgctggcggttaagggcccgtgagcagccgccactccttcggcgttggctcttgcgccggggtcgttgtttcgtgacaaccactcaggtagccgtttctgagacggcagatgcggccgctttagccctgagcgggctccgcggctccctggacggtctctgccagtgcccgactcttctcttccggactccacgccaagcagcgaccctgagccaacagccagagcgcccagaaatggcggcctggactgcctcgcactggccagtcaaggggatcctgaagaacaagacctctacagcttcctctatggtggcctcggctgaacagcccagcgggagtgtcgaggaggagctgagcaaaaaatcccagaagtgggaagaaatgaacatcctggcgacatatcatccagcggacaaagactatggtttaatgaaaatagttgaaccaagcactccttcctgtcgtaagatgggtgatggtgaagatgcgtgtagtggtatagaaaccactgaagccgtggcaccagatatcttagctaagaaattagctgttgctgaaggcttgaacccaaagtatcgggttcaggaacaagaaagcagtggagaggaggctagtgacctctcacctgaagaacgagaaaaaaggcgacaatttcaaatgaaaaggaagcttcactacaatgagggactcaatatcaaactagctagagaattaatttgaaaagacctacatgatgacaaagatgaagaaatgttaaagactgcaggtggagaaagcatgaagacggaagaatcaaatcaaagctctacaacaagtgaccaacggcaaaacacattcagtaagttcatagaagagctttgttcaacactacaactgtttgctagatagaaaccctgttactataatacat

SEQ ID NO: 89815 - DNA, 3044 bp, Homo sapiens
caccgtgagtgctcgatccagcctggagcacaagccaaaggcagcccactgaaccaagtgggtggggtacctcctgtggcaatccaagggcaatcctgggtaggggcgtcaccagcctcagaagtcaccagctggcaaagcagcaccgaaaattcctgtgtcactagtctactttcttagtttaagatactgggagaagacatagttctttgctccgctgatactaataaaaaaataccttttgaatattaagcctccttcttacttgtgcctcccccaacaatttgctctataaattcagacaaatgtcttagcatcatcaatgcatttttcattagctcaacctatttctcagttccttcacgatctgccatattttttcaaggtgacctactaccgtataaattctatttaagcaacacttgagcaggacacaatgcttttctaagtaagtattcattgacaaagtgtattttctaacataagtaattctctaaaggtcaccatatattgaactagaattcttagtatctgatgtacttaacctaaattttatattaacttaaacatttgtgtcaaacacaaaaaatatcccaggcatgaaaaaagtacattgcacagagaatgaattgaatcaataaggacaaatttgaaaagtgttagggaaatgaatagaaggtcaaaagtcaaatattctttcgaatatatgcaaacagtcttagtgccaagactgaaaattagtttttatgattacagaagctgtagatacgccctgacatttgcaaaaaatatgctatagtagtgggccaggagaggtagtctagaaactgattgatttggagaacatataaaataatcagcttaaaatgtattattattgttttcttaccatagccagttctgtgaatcaggaatgaatctaggaatgctgtattctgaaagcatgtggtgattttatggttcaagtaaaacaataacaaaaatattaaaataaataccacacacttgttacaaaaggaatgaacactgaaaagaagtcaaatatgattcggttttaaatctcttagatatattagtgtatcttgacatcacaaatgtatttaataaatatacttccaatttgatgtcaatttgaattaagtgattacataataacataattattaacttgtaaagagcttctcttttgccagacactattctattttgtttactccttacaactcactgagaaagttattttttttgtcattttacaacggaggaatgtgagattataaatgaatttcccaagatcacactattcctgacttgataccagttatatcttagtccaaaataaaaataaaagctgtaatttgttttaaaaatttgtgtaaagaatattatgttatttatcatctatttatctctatcagctgtatttcttataacatcccaattgctagatatcatgacactgcaagtcattcaatcccttctcagaattaacgagatttaatagtgctgagtatattaagtatattttgactgtaaatgaaatgtttaatgactgatattcaagtataaaggcatcaatcatctggcaggcaccatttttaagagaaaaataatgcattttaaattcatgatgaaagaaggaattcctaatttggactcaaaataagatcaaaagtccaacgactagcactggttctgctaatagccagctcaatggctccttgtataaagatacctgatattttaggtctcactcatctccatatttcttcaaacagtattttaaaaggacttatgatgtgccaaaaacaaaagccgagctcggaataaagtgatataacagagtcatcaaacatacagactacttttccaggcattggactgcacgaaataacttagcaactgggtgcagaaactataatagagaagtggttggaagtctcagttcgtagacacagaagaaattccagatccataaaatgagaaaggataagcaaaggggaatgagaaccagctgccaatgtgatagaatttaaaccaaggtaagatatcgcgagagggcgggcccgctaggcttggcgtcgctcccgagctggagctyttgccggcgtctcccctcggccagcggctgaagtgctggcggttaagggcccgtgagcagccgccactccttcggcgttggctcttgcgccggggtcgttgtttcgtgacaaccactcaggtagccgtttctgagacggcagatgcggccgctttagccctgagcgggctccgcggctccctggacggtctctgccagtgcccgactcttctcttccggactccacgccaagcagcgaccctgagccaacagccagagcgcccagaaatggcggcctggactgcctcgcactggccagtcaaggggatcctgaagaacaagacctctacagcttcctctatggtggcctcggctgaacagcccagcgggagtgtcgaggaggagctgagcaaaaaatcccagaagtgggaagaaatgaacatcctggcgacatatcatccagcggacaaagactatggtttaatgaaaatagttgaaccaagcactccttcctgtcgtaagatgggtgatggtgaagatgcgtgtagtggtatagaaaccactgaagccgtggcaccagatatcttagctaagaaattagctgttgctgaaggcttgaacccaaagtatcgggttcaggaacaagaaagcagtggagaggaggctagtgacctctcacctgaagaacgagaaaaaaggcgacaatttcaaatgaaaaggaagcttcactacaatgagggactcaatatcaaactagctagagaattaatttgaaaagacctacatgatgacaaagatgaagaaatgttaaagactgcaggtggagaaagcatgaagacggaagaatcaaatcaaagctctacaacaagtgaccaacggcaaaacacattcagtaagttcatagaagagctttgttcaacactacaactgtttgctagatagaaaccctgttactataatacat

SEQ ID NO: 89816 - DNA, 3044 bp, Homo sapiens
caccgtgagtgctcgatccagcctggagcacaagccaaaggcagcccactgaaccaagtgggtggggtacctcctgtggcaatccaagggcaatcctgggtaggggcgtcaccagcctcagaagtcaccagctggcaaagcagcaccgaaaattcctgtgtcactagtctactttcttagtttaagatactgggagaagacatagttctttgctccgctgatactaataaaaaaataccttttgaatattaagcctccttcttacttgtgcctcccccaacaatttgctctataaattcagacaaatgtcttagcatcatcaatgcatttttcattagctcaacctatttctcagttccttcacgatctgccatattttttcaaggtgacctactaccgtataaattctatttaagcaacacttgagcaggacacaatgcttttctaagtaagtattcattgacaaagtgtattttctaacataagtaattctctaaaggtcaccatatattgaactagaattcttagtatctgatgtacttaacctaaattttatattaacttaaacatttgtgtcaaacacaaaaaatatcccaggcatgaaaaaagtacattgcacagagaatgaattgaatcaataaggacaaatttgaaaagtgttagggaaatgaatagaaggtcaaaagtcaaatattctttcgaatatatgcaaacagtcttagtgccaagactgaaaattagtttttatgattacagaagctgtagatacgccctgacatttgcaaaaaatatgctatagtagtgggccaggagaggtagtctagaaactgattgatttggagaacatataaaataatcagcttaaaatgtattattattgttttcttaccatagccagttctgtgaatcaggaatgaatctaggaatgctgtattctgaaagcatgtggtgattttatggttcaagtaaaacaataacaaaaatattaaaataaataccacacacttgttacaaaaggaatgaacactgaaaagaagtcaaatatgattcggttttaaatctcttagatatattagtgtatcttgacatcacaaatgtatttaataaatatacttccaatttgatgtcaatttgaattaagtgattacataataacataattattaacttgtaaagagcttctcttttgccagacactattctattttgtttactccttacaactcactgagaaagttattttttttgtcattttacaacggaggaatgtgagattataaatgaatttcccaagatcacactattcctgacttgataccagttatatcttagtccaaaataaaaataaaagctgtaatttgttttaaaaatttgtgtaaagaatattatgttatttatcatctatttatctctatcagctgtatttcttataacatcccaattgctagatatcatgacactgcaagtcattcaatcccttctcagaattaacgagatttaatagtgctgagtatattaagtatattttgactgtaaatgaaatgtttaatgactgatattcaagtataaaggcatcaatcatctggcaggcaccatttttaagagaaaaataatgcattttaaattcatgatgaaagaaggaattcctaatttggactcaaaataagatcaaaagtccaacgactagcactggttctgctaatagccagctcaatggctccttgtataaagatacctgatattttaggtctcactcatctccatatttcttcaaacagtattttaaaaggacttatgatgtgccaaaaacaaaagccgagctcggaataaagtgatataacagagtcatcaaacatacagactacttttccaggcattggactgcacgaaataacttagcaactgggtgcagaaactataatagagaagtggttggaagtctcagttcgtagacacagaagaaattccagatccataaaatgagaaaggataagcaaaggggaatgagaaccagctgccaatgtgatagaatttaaaccaaggtaagatatcgcgagagggcgggcccgctaggcttggcgtcgctcccgagctggagctcttgccggcgtctcccctcggccagcggctgaagtgctggcggytaagggcccgtgagcagccgccactccttcggcgttggctcttgcgccggggtcgttgtttcgtgacaaccactcaggtagccgtttctgagacggcagatgcggccgctttagccctgagcgggctccgcggctccctggacggtctctgccagtgcccgactcttctcttccggactccacgccaagcagcgaccctgagccaacagccagagcgcccagaaatggcggcctggactgcctcgcactggccagtcaaggggatcctgaagaacaagacctctacagcttcctctatggtggcctcggctgaacagcccagcgggagtgtcgaggaggagctgagcaaaaaatcccagaagtgggaagaaatgaacatcctggcgacatatcatccagcggacaaagactatggtttaatgaaaatagttgaaccaagcactccttcctgtcgtaagatgggtgatggtgaagatgcgtgtagtggtatagaaaccactgaagccgtggcaccagatatcttagctaagaaattagctgttgctgaaggcttgaacccaaagtatcgggttcaggaacaagaaagcagtggagaggaggctagtgacctctcacctgaagaacgagaaaaaaggcgacaatttcaaatgaaaaggaagcttcactacaatgagggactcaatatcaaactagctagagaattaatttgaaaagacctacatgatgacaaagatgaagaaatgttaaagactgcaggtggagaaagcatgaagacggaagaatcaaatcaaagctctacaacaagtgaccaacggcaaaacacattcagtaagttcatagaagagctttgttcaacactacaactgtttgctagatagaaaccctgttactataatacat

SEQ ID NO: 89817 - DNA, 3044 bp, Homo sapiens
caccgtgagtgctcgatccagcctggagcacaagccaaaggcagcccactgaaccaagtgggtggggtacctcctgtggcaatccaagggcaatcctgggtaggggcgtcaccagcctcagaagtcaccagctggcaaagcagcaccgaaaattcctgtgtcactagtctactttcttagtttaagatactgggagaagacatagttctttgctccgctgatactaataaaaaaataccttttgaatattaagcctccttcttacttgtgcctcccccaacaatttgctctataaattcagacaaatgtcttagcatcatcaatgcatttttcattagctcaacctatttctcagttccttcacgatctgccatattttttcaaggtgacctactaccgtataaattctatttaagcaacacttgagcaggacacaatgcttttctaagtaagtattcattgacaaagtgtattttctaacataagtaattctctaaaggtcaccatatattgaactagaattcttagtatctgatgtacttaacctaaattttatattaacttaaacatttgtgtcaaacacaaaaaatatcccaggcatgaaaaaagtacattgcacagagaatgaattgaatcaataaggacaaatttgaaaagtgttagggaaatgaatagaaggtcaaaagtcaaatattctttcgaatatatgcaaacagtcttagtgccaagactgaaaattagtttttatgattacagaagctgtagatacgccctgacatttgcaaaaaatatgctatagtagtgggccaggagaggtagtctagaaactgattgatttggagaacatataaaataatcagcttaaaatgtattattattgttttcttaccatagccagttctgtgaatcaggaatgaatctaggaatgctgtattctgaaagcatgtggtgattttatggttcaagtaaaacaataacaaaaatattaaaataaataccacacacttgttacaaaaggaatgaacactgaaaagaagtcaaatatgattcggttttaaatctcttagatatattagtgtatcttgacatcacaaatgtatttaataaatatacttccaatttgatgtcaatttgaattaagtgattacataataacataattattaacttgtaaagagcttctcttttgccagacactattctattttgtttactccttacaactcactgagaaagttattttttttgtcattttacaacggaggaatgtgagattataaatgaatttcccaagatcacactattcctgacttgataccagttatatcttagtccaaaataaaaataaaagctgtaatttgttttaaaaatttgtgtaaagaatattatgttatttatcatctatttatctctatcagctgtatttcttataacatcccaattgctagatatcatgacactgcaagtcattcaatcccttctcagaattaacgagatttaatagtgctgagtatattaagtatattttgactgtaaatgaaatgtttaatgactgatattcaagtataaaggcatcaatcatctggcaggcaccatttttaagagaaaaataatgcattttaaattcatgatgaaagaaggaattcctaatttggactcaaaataagatcaaaagtccaacgactagcactggttctgctaatagccagctcaatggctccttgtataaagatacctgatattttaggtctcactcatctccatatttcttcaaacagtattttaaaaggacttatgatgtgccaaaaacaaaagccgagctcggaataaagtgatataacagagtcatcaaacatacagactacttttccaggcattggactgcacgaaataacttagcaactgggtgcagaaactataatagagaagtggttggaagtctcagttcgtagacacagaagaaattccagatccataaaatgagaaaggataagcaaaggggaatgagaaccagctgccaatgtgatagaatttaaaccaaggtaagatatcgcgagagggcgggcccgctaggcttggcgtcgctcccgagctggagctcttgccggcgtctcccctcggccagcggctgaagtgctggcggttaagggcccgtkagcagccgccactccttcggcgttggctcttgcgccggggtcgttgtttcgtgacaaccactcaggtagccgtttctgagacggcagatgcggccgctttagccctgagcgggctccgcggctccctggacggtctctgccagtgcccgactcttctcttccggactccacgccaagcagcgaccctgagccaacagccagagcgcccagaaatggcggcctggactgcctcgcactggccagtcaaggggatcctgaagaacaagacctctacagcttcctctatggtggcctcggctgaacagcccagcgggagtgtcgaggaggagctgagcaaaaaatcccagaagtgggaagaaatgaacatcctggcgacatatcatccagcggacaaagactatggtttaatgaaaatagttgaaccaagcactccttcctgtcgtaagatgggtgatggtgaagatgcgtgtagtggtatagaaaccactgaagccgtggcaccagatatcttagctaagaaattagctgttgctgaaggcttgaacccaaagtatcgggttcaggaacaagaaagcagtggagaggaggctagtgacctctcacctgaagaacgagaaaaaaggcgacaatttcaaatgaaaaggaagcttcactacaatgagggactcaatatcaaactagctagagaattaatttgaaaagacctacatgatgacaaagatgaagaaatgttaaagactgcaggtggagaaagcatgaagacggaagaatcaaatcaaagctctacaacaagtgaccaacggcaaaacacattcagtaagttcatagaagagctttgttcaacactacaactgtttgctagatagaaaccctgttactataatacat

SEQ ID NO: 89818 - DNA, 566 bp, Homo sapiens
tgaacctgagaggcagaggttgcaatgagctgaatttgtaccactgtactccagcctgggtgacagaatgagactctgtctcaaaaaaaaaaaaaaagatttttaacagccagtgtggcacacacatagatcaatcagaagcacaccggccaggtcatgcagggggatgcagggatgctcaccaccaggacacagccccgtgctcacatgcctctgggacggcacatgggctataccccatttgcctctgtgttagtcagctcaggctgccatcacataataccacagactgggcaacttaacaacccagataaatcttctcacagttctgaaggctagaagtttgagatcgaggtgccagatgattctgcgtctggtgagggctctcttcctggcttgcagatggcagccttctcactgtgacttcacatggagggcgagagagggagagacagagagagagagagagctccctggaggcccttcttctaaggcactaatcccatcctcctgacctgatccaccctcctgacctgatstaaactactcacctcccaaaagctctg

SEQ ID NO: 89819 - DNA, 687 bp, Homo sapiens
aactcccacttcacatccattacgtcaggattctgggggtagggcttgggcacccatgttttctagagctctgaaagcggttcccatatgcagcgggggttgggacttcacctctactgctttgaacaaaaggtcccgtgagcgcagaggtgattgtgttttccttatggggagtgatatatgcaggtgggcctcaaacttcagcgggcatcagagccacctgaagcgtttgttaaaatgcggattgctgggtccctgcactcagagtttttgtttctgaaggtcggggtggggccaagaatgtgcattcctgacaagtccccaggggaagctggggccactggttggggctctagctggaagccccactgcgtgtgcggggagtgtttctgacctcagggactgtatttcttcccatccaagcatgagaggagtccctttcagaggtgagggggggcaagcccaacmcagaggcccgtcttcctggtctcatggcagttaatgcgatgggcttcccggtgggatctggtactgagcagtcgtcgcaggtcacctgatacgggacagcagctgctctggactggcgctcgctctcaccgtctctctctctctattgccctcgggtgggaggagccagctgagcggctggcagtctcaggcttcgaaattctaccagtttccatgctg

SEQ ID NO: 89820 - DNA, 687 bp, Homo sapiens
aactcccacttcacatccattacgtcaggattctgggggtagggcttgggcacccatgttttctagagctctgaaagcggttcccatatgcagcgggggttgggacttcacctctactgctttgaacaaaaggtcccgtgagcgcagaggtgattgtgttttccttatggggagtgatatatgcaggtgggcctcaaacttcagcgggcatcagagccacctgaagcgtttgttaaaatgcggattgctgggtccctgcactcagagtttttgtttctgaaggtcggggtggggccaagaatgtgcattcctgacaagtccccaggggaagctggggccactggttggggctctagctggaagccccactgcgtgtgcggggagtgtttctgacctcagggactgtatttcttcccatccaagcatgagaggagtccctttcagaggtgagggggggcaagcccaacacagaggcccgtcttcctggtctcatggcagttaatgcgatgggcttcccggtgggrtctggtactgagcagtcgtcgcaggtcacctgatacgggacagcagctgctctggactggcgctcgctctcaccgtctctctctctctattgccctcgggtgggaggagccagctgagcggctggcagtctcaggcttcgaaattctaccagtttccatgctg

SEQ ID NO: 89821 - DNA, 747 bp, Homo sapiens
gattctcctgcctcagtctcccgagtagctggggttacaggcgcccgccaacacgccagactaatttttgtatttttagtggagacggggtttcaccacgttggccaggctgggctgaaactcctgacctcaggtgatccgcccacctcgacctcccaaagtgctgggattacaggcgtgagccaccatgcccggctrcctccggtttttttgttacttaggtgtgaaaagttggggttttccttttgatttagttctaggaagtcagcgtgaaatcggccttaggttccctgcctccagaccctattctccgcctcagaaagtcacccaatgataaccaatgcacttttctcaccacacgatttcctcattcctgcttgagctgccttaccaaagccgattgttctgcaacacccagccgagtgccttctgttttgtagtctggaggctgcctgtttcatacattgctaataagagtcaattaaatctttaaaactcaatttgtcaaaatgttgttctttggtgtcagagaccaatactgtagggaatttgtgttcattgactgagctcaagtacatagaacagctggagggaagagacgcgcagggcaaggtatgaggtgggggctgcaggtgcaccacattcccacaacttggaaactcttccaacctgcttgttcaagagcttttttagagcttgatttctagtcccctccccttctcacaggtctaggggtgaggctgaagg

SEQ ID NO: 89822 - DNA, 658 bp, Homo sapiens
  misc_feature (1)...(658): n = A,T,C or G
gcagcwaacnnnnnnnnnnnnnnnnnnnnnnnnnnnnnnnnnnnnnnnnnnnnnnnnnnnnnnnnnnnnnnnnnnnnnnnnnnnnnnnnnnnnnnnnnnnnnnnnnnnncagaaatgactccctaaaagagtatcaaaaaatcgagaatgttaacagcagaaagaatggatgctaggcagccaaaaccgtcagaaatctataacattagagtccttggctacccacccatctcagacactcacttcttttcatacatataactacttaaatatccatgtttaacatggctatcttagacacatagaaagtgtacttaccaccttaccagagggtgaaaaaagacaaagacaaattactgcatctaacctcaagtctgaaatttttgtgttatgacaatattcttcttggtggtacctcaaacctgaccaattatatagctatataatgaatttaactataacttctaattaatatacaatggtaaaagaacattaagaaacaataactgcacttagaagactggagaaggttaaagaaacaccatgataactaatttcaaagcataaaccatatatcattggtcagagtaacaagaattccctgtccttgctaatggaattccttgggtcggccaaaatgaacacattcactaccact

SEQ ID NO: 89823 - DNA, 658 bp, Homo sapiens
  misc_feature (1)...(658): n = A,T,C or G
gcagcaaamnnnnnnnnnnnnnnnnnnnnnnnnnnnnnnnnnnnnnnnnnnnnnnnnnnnnnnnnnnnnnnnnnnnnnnnnnnnnnnnnnnnnnnnnnnnnnnnnnnnncagaaatgactccctaaaagagtatcaaaaaatcgagaatgttaacagcagaaagaatggatgctaggcagccaaaaccgtcagaaatctataacattagagtccttggctacccacccatctcagacactcacttcttttcatacatataactacttaaatatccatgtttaacatggctatcttagacacatagaaagtgtacttaccaccttaccagagggtgaaaaaagacaaagacaaattactgcatctaacctcaagtctgaaatttttgtgttatgacaatattcttcttggtggtacctcaaacctgaccaattatatagctatataatgaatttaactataacttctaattaatatacaatggtaaaagaacattaagaaacaataactgcacttagaagactggagaaggttaaagaaacaccatgataactaatttcaaagcataaaccatatatcattggtcagagtaacaagaattccctgtccttgctaatggaattccttgggtcggccaaaatgaacacattcactaccact

SEQ ID NO: 89824 - DNA, 585 bp, Homo sapiens
tgcttaactactttaacaattcaatcactttggtgcaagtttaaacaaacagacatgcaaccaagaattcaycctaagtactggttttgaggaacttttttataacctgtggtacttagaattttaccgtgttcccatatcctgggagttaacttgactggcaggtccaattaaatatgaataataacaaaactgattatggtggatttgtatattgacctttttcatttgagaggacaattaaaacgatctgaatatacctcaagatacctaatatttctggtgacttgcaataatctttattgaaaagggaagacctcatgaaatattaaagaaaattatatcattcctttcaaggaacagtcatgcctatttagttttaattcaatactaacagcaagattactgtgtacattttaatttttaaaaattaaaggtttattttttgtctcgtatctgtgcagacatagatatgtacttttctcacagacaaggctggcagtgagaatcacccatgtttttagataatttcgaaagtcctctgaattgtacgtgcctgtgaaaaaaggaaacattaataattgg

SEQ ID NO: 89825 - DNA, 631 bp, Homo sapiens
cgcgggccctgggttttgcttttttaaggaaaatcaggaaaaggccttgtagaaaataatcctacagggatcttttcctggcctgttggggtgcctcaatacccatcttttcagaatggacaggagcgtttcggagccggcgargcggaggtgggggaaggatggagctcgctggggaggagctcacctcggaggggacagtggccaaccagggcgcggcctgggtgggtgggttttaggctgtaagggcgatgcaaaatatgatgttcctcaccgaggagcacagaaaccagaaagttcctgggcaatttgtccgaggctctgcacctctctaagcagctgtcagatctgtacattatggtacattgaatctgaatgaggctctcaacatcaaaaccctgcatccattatgatatcatctcccgctctaggctgtaatgcttattaattctgcacccatactctcccggcttcagcaaatgtattccatcagcctagcatttaatttaattagtacagctgggctctcattctcctttctgtgtcagaggtattgtcagcacgttctgctgtaacacaattactgattgcttttagataggcagaaatatgattagggtattgggtgact

SEQ ID NO: 89826 - DNA, 1317 bp, Homo sapiens
acgggatgcatggcagtcagtggctgccacctgtgggtttatggaccatggggagagcttcttagacttcatttcagtcttgatttggggacctgttcactcattcctgccagctccattatagcaattcccacctattcaaatatatggaactctggtgaagacatgggttctttccccaaaatggtacatagcaaagaacttgcttggccttggagggaattcttggcagcataatttgcagcyggaattaaaatcagctgactctggccaagcattaatattcagcgagcgactggatgaataagagatgaatgaagccaagaaacacccaaactgttccagtgacgttttactttttcaatggccctgaggagaaggtagccagcagtcctgccagctgccaccttagaatgggaggcatggcaggggattccaggccccaaggcacagtgtagacaccaaggaaaggagagacgcggtggccgaggacggcagcagccagggcaggccttccacagccaccccatctccacccaccctccataaatggcctctgaaccccaacagcaaggctcacaaacacacttctctcctaccaggtggattgctatttgccccaatgcttttttttaaataccctttgcaatcactgttgtaatttgtaatttaaatgttacataagccactgaaatatgaatgcaacaacaacaaaaaaaaagaatgaattgtttttttctgtgaaaattaaattgggtattttggaatgaccagacaaaatcaaattgcttttaaaaatacacgagcgtaaattattgaggaaaatcattgaagcctaagacgacattcagattgtttgacacatggttttagttcattgtttcactttgaggaaccttaaaagacgcatcttagataggtggtgtttatacaagaaagaagaccccataagccagtcagcagcccgaaactcaaagaaaagactttggcattgagaggctgaggcaagaggatcatttcaggccaggagttcaattccagcctggtcaacataatgaggcctcatctctacaaatcatttttttaattagccagacatggtagtgtgcttgtagtcccagctactagggaggctgacgtgggaaaatcacttgagtccaggagttcgaagctgcagtgagctatgatcacactactgtactccaacatgggagatagagaaagaacccatcaaaagacattggacttacagcaaaatatgtatgtgttttacgttaaaatgtttctggtgtagatgtgtatttttttgatactcta

SEQ ID NO: 89827 - DNA, 1317 bp, Homo sapiens
acgggatgcatggcagtcagtggctgccacctgtgggtttatggaccatggggagagcttcttagacttcatttcagtcttgatttggggacctgttcactcattcctgccagctccattatagcaattcccacctattcaaatatatggaactctggtgaagacatgggttctttccccaaaatggtacatagcaaagaacttgcttggccttggagggaattcttggcagcataatttgcagccggaattaaaatcagctgactctggccaagcattaatattcagcgagcgactggatgaataagagatgaatgaagccaagaaacacccaaactgttccagtgacgttttactttttcaatggccctgaggagaaggtagccagcagtcctgccagctgccaccttagaatgggaggcatggcaggggaktccaggccccaaggcacagtgtagacaccaaggaaaggagagacgcggtggccgaggacggcagcagccagggcaggccttccacagccaccccatctccacccaccctccataaatggcctctgaaccccaacagcaaggctcacaaacacacttctctcctaccaggtggattgctatttgccccaatgcttttttttaaataccctttgcaatcactgttgtaatttgtaatttaaatgttacataagccactgaaatatgaatgcaacaacaacaaaaaaaaagaatgaattgtttttttctgtgaaaattaaattgggtattttggaatgaccagacaaaatcaaattgcttttaaaaatacacgagcgtaaattattgaggaaaatcattgaagcctaagacgacattcagattgtttgacacatggttttagttcattgtttcactttgaggaaccttaaaagacgcatcttagataggtggtgtttatacaagaaagaagaccccataagccagtcagcagcccgaaactcaaagaaaagactttggcattgagaggctgaggcaagaggatcatttcaggccaggagttcaattccagcctggtcaacataatgaggcctcatctctacaaatcatttttttaattagccagacatggtagtgtgcttgtagtcccagctactagggaggctgacgtgggaaaatcacttgagtccaggagttcgaagctgcagtgagctatgatcacactactgtactccaacatgggagatagagaaagaacccatcaaaagacattggacttacagcaaaatatgtatgtgttttacgttaaaatgtttctggtgtagatgtgtatttttttgatactcta

SEQ ID NO: 89828 - DNA, 1317 bp, Homo sapiens
acgggatgcatggcagtcagtggctgccacctgtgggtttatggaccatggggagagcttcttagacttcatttcagtcttgatttggggacctgttcactcattcctgccagctccattatagcaattcccacctattcaaatatatggaactctggtgaagacatgggttctttccccaaaatggtacatagcaaagaacttgcttggccttggagggaattcttggcagcataatttgcagccggaattaaaatcagctgactctggccaagcattaatattcagcgagcgactggatgaataagagatgaatgaagccaagaaacacccaaactgttccagtgacgttttactttttcaatggccctgaggagaaggtagccagcagtcctgccagctgccaccttagaatgggaggcatggcaggggattccaggccccaaggcacagtgtagacaccaaggaaaggagagacgcggtggccgaggacggcagcagccagggcaggccttccacagccaccccatctccacccaccctccataaatggcctctgaaccccaacagcaaggctcacaaacacacttctctcctaccaggtggattgctatttgccccaatgcttttttttaaataccctttgcaatcactgttgtaatttgtaatttaaatgttacataagccactgaaatatgaatgcaacaacaacaaaaaaaaagaatgaattgtttttttctgtgaaaattaaattgggtattttggaatgaccagacaaaatcaaattgcttttaaaaatacacgagcgtaaattattgaggaaaatcattgaagcctaagacgacattcagattgtttgacacatggttttagttcattgtttcactttgaggaaccttaaaagaygcatcttagataggtggtgtttatacaagaaagaagaccccataagccagtcagcagcccgaaactcaaagaaaagactttggcattgagaggctgaggcaagaggatcatttcaggccaggagttcaattccagcctggtcaacataatgaggcctcatctctacaaatcatttttttaattagccagacatggtagtgtgcttgtagtcccagctactagggaggctgacgtgggaaaatcacttgagtccaggagttcgaagctgcagtgagctatgatcacactactgtactccaacatgggagatagagaaagaacccatcaaaagacattggacttacagcaaaatatgtatgtgttttacgttaaaatgtttctggtgtagatgtgtatttttttgatactcta

SEQ ID NO: 89829 - DNA, 1317 bp, Homo sapiens
acgggatgcatggcagtcagtggctgccacctgtgggtttatggaccatggggagagcttcttagacttcatttcagtcttgatttggggacctgttcactcattcctgccagctccattatagcaattcccacctattcaaatatatggaactctggtgaagacatgggttctttccccaaaatggtacatagcaaagaacttgcttggccttggagggaattcttggcagcataatttgcagccggaattaaaatcagctgactctggccaagcattaatattcagcgagcgactggatgaataagagatgaatgaagccaagaaacacccaaactgttccagtgacgttttactttttcaatggccctgaggagaaggtagccagcagtcctgccagctgccaccttagaatgggaggcatggcaggggattccaggccccaaggcacagtgtagacaccaaggaaaggagagacgcggtggccgaggacggcagcagccagggcaggccttccacagccaccccatctccacccaccctccataaatggcctctgaaccccaacagcaaggctcacaaacacacttctctcctaccaggtggattgctatttgccccaatgcttttttttaaataccctttgcaatcactgttgtaatttgtaatttaaatgttacataagccactgaaatatgaatgcaacaacaacaaaaaaaaagaatgaattgtttttttctgtgaaaattaaattgggtattttggaatgaccagacaaaatcaaattgcttttaaaaatacacgagcgtaaattattgaggaaaatcattgaagcctaagacgacattcagattgtttgacacatggttttagttcattgtttcactttgaggaaccttaaaagacgcatcttagataggtggtgtttatacaagaaagaagaccccataagccagtcagcagcccgaaactcaaagaaaagactttggcattgagaggctgaggcaagaggatcatttcaggccaggagttcaattccagcctggtcaacataatgaggcctcatctctacaaatcatttttttaattagccagacatggtagtgtgcttgtagtcccagctactagggaggctgacgtgggaaaatcacttgagtccaggagttcgaagctgcagtgagctatgatcacactactgtactccaacatgggagayagagaaagaacccatcaaaagacattggacttacagcaaaatatgtatgtgttttacgttaaaatgtttctggtgtagatgtgtatttttttgatactcta

SEQ ID NO: 89830 - DNA, 1317 bp, Homo sapiens
acgggatgcatggcagtcagtggctgccacctgtgggtttatggaccatggggagagcttcttagacttcatttcagtcttgatttggggacctgttcactcattcctgccagctccattatagcaattcccacctattcaaatatatggaactctggtgaagacatgggttctttccccaaaatggtacatagcaaagaacttgcttggccttggagggaattcttggcagcataatttgcagccggaattaaaatcagctgactctggccaagcattaatattcagcgagcgactggatgaataagagatgaatgaagccaagaaacacccaaactgttccagtgacgttttactttttcaatggccctgaggagaaggtagccagcagtcctgccagctgccaccttagaatgggaggcatggcaggggattccaggccccaaggcacagtgtagacaccaaggaaaggagagacgcggtggccgaggacggcagcagccagggcaggccttccacagccaccccatctccacccaccctccataaatggcctctgaaccccaacagcaaggctcacaaacacacttctctcctaccaggtggattgctatttgccccaatgcttttttttaaataccctttgcaatcactgttgtaatttgtaatttaaatgttacataagccactgaaatatgaatgcaacaacaacaaaaaaaaagaatgaattgtttttttctgtgaaaattaaattgggtattttggaatgaccagacaaaatcaaattgcttttaaaaatacacgagcgtaaattattgaggaaaatcattgaagcctaagacgacattcagattgtttgacacatggttttagttcattgtttcactttgaggaaccttaaaagacgcatcttagataggtggtgtttatacaagaaagaagaccccataagccagtcagcagcccgaaactcaaagaaaagactttggcattgagaggctgaggcaagaggatcatttcaggccaggagttcaattccagcctggtcaacataatgaggcctcatctctacaaatcatttttttaattagccagacatggtagtgtgcttgtagtcccagctactagggaggctgacgtgggaaaatcacttgagtccaggagttcgaagctgcagtgagctatgatcacactactgtactccaacatgggagatagagaaagaacccatcaaaagayattggacttacagcaaaatatgtatgtgttttacgttaaaatgtttctggtgtagatgtgtatttttttgatactcta

SEQ ID NO: 89831 - DNA, 1097 bp, Homo sapiens
ttttgtggggaaaaggaggtatgtatacacatacatttgtattgacataaggaaaggtctggaaggaatcacattgatccaagaaacggctgcagatttcatgtgaggctctgaggaggcttttattttaactttagattctaccaaatacatattttaaataattctgcatttttgcctttgctttaatcacgagcacatgttactatcacaaaaaaaaatgcacaccacaatatgaatctctctatataggtaacaatcttcagattaattcttatatttgcagttgaaaatgatggatgacagaagaaatttacctaattatatttttggaaattatgccacagctatcaaatgtaatttaattcatagcccaacaacacagtcyaaactttcttaaaatatagaattataacttaatcctagttcctgccatagttaaacaaaaacagcaaatgcaagttctaattgtcaatctagatcttcagattttgaataagaatacttgatttgaatacatttgaagctacgcatgctttcttaaaatgctttctgtgatgcagtctgtgatacaatcacacagaaactatgaagtaggaactgtcacgagatgtataaagatggaatgtctgtaaatttgggatgtcactatgtcacatgagttgtgatggtgcctgggaacaaaatgccatttctgaaaaacatggactagtgggtcatggtcctcattttctaacttactgacctagtgatacttgagatataaataaaatagatcaatcacagatatgaccttatttttatagttaatcaaatactgtgaaggtttttttttaactatctttactactttttagaaccctaagaagatgaaaacaaaatacagaataaatgagaatactctctacttgtgttttctggttaatctttcactgataacttagtctttactgtactcacgtgatcatgtcttccggttctttgtttaacatctgtacattagtcagcatcatacaccttcctacttctttatcaaggtgccttaaaatgttgtctacagcttttcgtacttgagagtaatataaggacatgcctga

SEQ ID NO: 89832 - DNA, 497 bp, Homo sapiens
aaaaagtataaataaaaagaaaagcttaaaaagaaggaagtctattcagcccttcaaaatatgccattgttttaagtgrccaacaaccaagaaccatatcaaggcaggaacagtgttgccagactccagtgggaaaaggaccctgaacccagcatccttgttgatctttgccatacgtgtgtgcatgcactaaggtaggtggaccagggctgagagggaggaagaagaagagggaaagagcaggaaaacagtagggcaggcagtgacataatgatacaacagagcactggacaacgtcctcaactctgcctctagtgagttttcataattcattcaacttctcgatttttttatctgtgcctcatttttttatctgtcaaattaaaatctggccaaatttaaaactctatgatactctaagccaaagggttagaaacagaaccattcctttgtacttagttcccagaaagatgggtgatttagctggtatcactttt

SEQ ID NO: 89833 - DNA, 1288 bp, Homo sapiens
gtttaaaactaaaaacacttttacrccttcattaaagttatgaccgatgtgtttaattttaaagacatagctgccattcttaattacttcctctacctttaacatccctgtcttacataaaatattcaaaaaaaaaaaaacaatgtgaggccgtgctttggattccatgtggccaatttcactctgtggcagttgccagcagaactccacatctagaacaaccagtatgtgcctaaggcctttcctgttctttttgtttccttgagtttattcctgtcaggtgtaagcactccagaaatgtagaattatgacataggaactcacactgagtcatagctggaactcatctcttctgagttcacaattaaaaacaaatgaaatctaaaattacattgaaaacataaaggtagatggaagtttaaagtgcagatgtggcttcagccccagctggatatgctcaggggggaacagatgtcagtaataaacctaggagagctacaaaagttagcttatatccatcaccaagtgaaaatgctgacgtacatataaaactgtgccctgcctgctttcctacccagtctgagtgtgcaatatggaaacagcctggaaaagaacccagaaaccctgtggagatgcagagcaggtctgccacatcagcggtgaggaagtcacttactgcatggtcggggtaggctagccatgcagcaccatcaggaaaggtatggtttcttctaacacttggcacctggcctatgcatcctctaagttcaccaaagaaagaaaacacataatctgcggttacattcattaaagtctgccacaggagaatagggttctcgatgggtatggggagatgacagaacaaaactataaatgaccaggaatggaataaaattaaacctaaagtgaccagggcaaaaagcaaaccccagaatgatcatcatggtattaataattacataaagactataaactcagaagaagctaggagaacacccagagcctgaaagttggagaaggttatagctgccacactctttagatgaagttcatttatgagactttctttatatagcctgtatagttacataaactagagtcaatcaggtttttctaaactgcgctcttgttactagatcttattacagtcttcacatttcagagctaaattaaaaaaacacacacatttagccatatgttttctatggaaagcactaaccatacatttgaaaatgagggtgactttcttttttgtattttgcagccaggatattttattcaccaaaat

SEQ ID NO: 89834 - DNA, 1288 bp, Homo sapiens
gtttaaaactaaaaacacttttacaccttcattaaagttatgaccgatgtgtttaattttaaagacatagctgccattcttaattacttcctctacctttaacatccctgtcttacataaaatattcaaaaaaaaaaaaacaatgtgaggccgtgctttggattccatgtggccaatttcactctgtggcagttgccagcagaactccacatctagaacaaccagtatgtgcctaaggcctttcctgttctttttgtttccttgagtttattcctgtcaggtgtaagcactccagaaatgtagaattatgacataggaactcacactgagtcatagctggaactcatctcttctgagttcacaattaaaaacaaatgaaatctaaaattacattgaaaacataaaggtagatggaagtttaaagtgcagatgtggcttcagccccagctggatatgctcaggggggaacagatgtcagtaataaacctaggagagctacaaaagttagcttatatccatcaccaagtgaaaatgctgacgtacatataaaactgtgccctgcctgctttcctacccagtctgagtgtgcaatatggaaacagcctggaaaagaacccagaaaccctgtggagatgcagagcaggtctgccacatcagcggtgaggaagtcacttactgcatggtcggggtaggctagccatgcagcaccatcaggaaaggtatggtttcttctaacacttggcacctggcctatgcatcctctaagttcaccaaagaaagaaaacacataatctgcggttacattcattaaagtctgccacaggagaatagggttctcgatgggtatggggagatgacagaacaaaactrtaaatgaccaggaatggaataaaattaaacctaaagtgaccagggcaaaaagcaaaccccagaatgatcatcatggtattaataattacataaagactataaactcagaagaagctaggagaacacccagagcctgaaagttggagaaggttatagctgccacactctttagatgaagttcatttatgagactttctttatatagcctgtatagttacataaactagagtcaatcaggtttttctaaactgcgctcttgttactagatcttattacagtcttcacatttcagagctaaattaaaaaaacacacacatttagccatatgttttctatggaaagcactaaccatacatttgaaaatgagggtgactttcttttttgtattttgcagccaggatattttattcaccaaaat

SEQ ID NO: 89835 - DNA, 1288 bp, Homo sapiens
gtttaaaactaaaaacacttttacaccttcattaaagttatgaccgatgtgtttaattttaaagacatagctgccattcttaattacttcctctacctttaacatccctgtcttacataaaatattcaaaaaaaaaaaaacaatgtgaggccgtgctttggattccatgtggccaatttcactctgtggcagttgccagcagaactccacatctagaacaaccagtatgtgcctaaggcctttcctgttctttttgtttccttgagtttattcctgtcaggtgtaagcactccagaaatgtagaattatgacataggaactcacactgagtcatagctggaactcatctcttctgagttcacaattaaaaacaaatgaaatctaaaattacattgaaaacataaaggtagatggaagtttaaagtgcagatgtggcttcagccccagctggatatgctcaggggggaacagatgtcagtaataaacctaggagagctacaaaagttagcttatatccatcaccaagtgaaaatgctgacgtacatataaaactgtgccctgcctgctttcctacccagtctgagtgtgcaatatggaaacagcctggaaaagaacccagaaaccctgtggagatgcagagcaggtctgccacatcagcggtgaggaagtcacttactgcatggtcggggtaggctagccatgcagcaccatcaggaaaggtatggtttcttctaacacttggcacctggcctatgcatcctctaagttcaccaaagaaagaaaacacataatctgcggttacattcattaaagtctgccacaggagaatagggttctcgatgggtatggggagatgacagaacaaaactataaatgaccaggaatggaataaaattaaacctaaagtgaccagggcaaaaagcaaaccccagaatgatcatcatggtattaataattacataaagactataaactcagaagaagctaggagaacacccagagcctgaaagttggagaaggttatagctgccacactctttagatgaagttyatttatgagactttctttatatagcctgtatagttacataaactagagtcaatcaggtttttctaaactgcgctcttgttactagatcttattacagtcttcacatttcagagctaaattaaaaaaacacacacatttagccatatgttttctatggaaagcactaaccatacatttgaaaatgagggtgactttcttttttgtattttgcagccaggatattttattcaccaaaat

SEQ ID NO: 89836 - DNA, 2105 bp, Homo sapiens
gcataagagcaagatgtgaaaaaagatactaactatgctacttctctgcctttgctctctgaaacccatatctccaggcaaaacccctctcctgaatccatacccacagaaccagccatgaccagagacttccacctggaggtcacacagcgtgatagaatccataatcatctcactattttcttgctcacccttatggctcttttcctgtgtttcctcccagaaaataccacgattacctagttgtgtaggctggaaacataaaaaccattgctgtctgacctgttcaatcaccacagccagtcaacacccaagtgcttttcaacagtcacttaatgcttatatcagacttagagagttyatcattttataactattttaaacatgaaaaaattgaggttgggaaagtttcaaggttcaagttacgtatgtaaggatggccaagctagttatgataaatgaatcacggcacatgcaaaaaagcttccatcatactaagattaaaagccaaaaaaaaaaaaaaaaaaaaaaaaaaaaaaaagtcctgtaaatgacttgcaaagccctctaagaaccagccctggttcttagagggcttgtctcctcttctcatatgagcttctcatagctcctcttctcaagctatgaggagtcttctcacagcttgtctcctatgtctatcaccctcctcctccctgttctagagtctaaccattttgctgctccagtgaattacactgaagcttatggcttggcacctgccagctcctcttcccagaaatgtctccttgctatgtccccgaggctgctcactcaccatttcttgtttgtgtcaccacattagaaatacacactctaaatgtcctcctaagagagaggctcctacctggtgctcctaaatgtattactctccagagcactcattaccaccgaacgtcgatgctgagcacagaatcatgtctactttgtatctctagcacctagaacattcattgctatggagttgacattttataaatatttgacaaacgtgtattcatgctagcaaatgcctcctagctccatcccgtcttctccattcccactgttctgccttggctcaggtcatctcagcttaccagtctctggttactcaaattcaatattcattgttatctaatctttacactatgccaaagttaccttcctattatacacatgtcatgcatttgcctcttcagagaccttcaaaagcctccactgcctatggtaaaatctgcatttcatactgtagaattcttagtcctttatcactttacccttcattgcctttacaaaaaattcccaccagcattattttgtgatagacacatcaagcagctcaccagtctgcaaatatcaccgatgttcagatttttcacattctctacctactgaaattcttcaaaaaccaggacaaatgttaccaccagaagaaggacttacgggatagtacttgaagaaaaggaaggaaagaaaaagagtaagtgtcctgatctcagcgcaactaaaaactagcctgatgatgtgaggattggaaaaaaaatatggaagaggaaataggaagcagcctaggaacacagtgaccatgacagtagtgatgttgaaagaaagcagtgttcagccaggcgcggtggctcatgcctgtaatctcagcactttgggaggctgaggagggcagatcacctgaggttgggagtttgagaccatcctgaccaacatggagagaacccatctactaaaaatacaaaattagccaggcgtggtggtgcatgcctataatcccagctactcgggaggctgaggcaggagaattgcttgaacccgggaggcggaggttgcggtaagccaagattgcgccatggcattccggcctgggatgaagagagactctgtctaaaaataaaaataaaaaagaaagaaagcagtgttcattggctgtaaactttgtagttgcatttggtattagaataattgcttattttttccaccttgtttcaaaaggtttaacgtttataataatagctgtagtttctcgagtggaacatattctggttcacgtactaagctaaaatgctttgcatgca

SEQ ID NO: 89837 - DNA, 2105 bp, Homo sapiens
gcataagagcaagatgtgaaaaaagatactaactatgctacttctctgcctttgctctctgaaacccatatctccaggcaaaacccctctcctgaatccatacccacagaaccagccatgaccagagacttccacctggaggtcacacagcgtgatagaatccataatcatctcactattttcttgctcacccttatggctcttttcctgtgtttcctcccagaaaataccacgattacctagttgtgtaggctggaaacataaaaaccattgctgtctgacctgttcaatcaccacagccagtcaacacccaagtgcttttcaacagtcacttaatgcttatatcagacttagagagttcatcattttataactattttaaacatgaaaaaattgaggttgggaaagtttcaaggttcaagttacgtatgtaaggatggccaagctagttatgataaatgaatcacggcacatgcaaaaaagcttccatcatactaagattaaaagccaaaaaaaaaaaaaaaaaaaaaaaaaaaaaaaagtcctgtaaatgacttgcaaagccctctaagaaccagccctggttcttagagggcttgtctcctcttctcatatgagcttctcatagctcctcttctcaagctatgaggagtcttctcacagcttgtctcctatgtctatcaccctcctcctccctgttctagagtctaaccattttgctgctccagtgaattacactgaagyttatggcttggcacctgccagctcctcttcccagaaatgtctccttgctatgtccccgaggctgctcactcaccatttcttgtttgtgtcaccacattagaaatacacactctaaatgtcctcctaagagagaggctcctacctggtgctcctaaatgtattactctccagagcactcattaccaccgaacgtcgatgctgagcacagaatcatgtctactttgtatctctagcacctagaacattcattgctatggagttgacattttataaatatttgacaaacgtgtattcatgctagcaaatgcctcctagctccatcccgtcttctccattcccactgttctgccttggctcaggtcatctcagcttaccagtctctggttactcaaattcaatattcattgttatctaatctttacactatgccaaagttaccttcctattatacacatgtcatgcatttgcctcttcagagaccttcaaaagcctccactgcctatggtaaaatctgcatttcatactgtagaattcttagtcctttatcactttacccttcattgcctttacaaaaaattcccaccagcattattttgtgatagacacatcaagcagctcaccagtctgcaaatatcaccgatgttcagatttttcacattctctacctactgaaattcttcaaaaaccaggacaaatgttaccaccagaagaaggacttacgggatagtacttgaagaaaaggaaggaaagaaaaagagtaagtgtcctgatctcagcgcaactaaaaactagcctgatgatgtgaggattggaaaaaaaatatggaagaggaaataggaagcagcctaggaacacagtgaccatgacagtagtgatgttgaaagaaagcagtgttcagccaggcgcggtggctcatgcctgtaatctcagcactttgggaggctgaggagggcagatcacctgaggttgggagtttgagaccatcctgaccaacatggagagaacccatctactaaaaatacaaaattagccaggcgtggtggtgcatgcctataatcccagctactcgggaggctgaggcaggagaattgcttgaacccgggaggcggaggttgcggtaagccaagattgcgccatggcattccggcctgggatgaagagagactctgtctaaaaataaaaataaaaaagaaagaaagcagtgttcattggctgtaaactttgtagttgcatttggtattagaataattgcttattttttccaccttgtttcaaaaggtttaacgtttataataatagctgtagtttctcgagtggaacatattctggttcacgtactaagctaaaatgctttgcatgca

SEQ ID NO: 89838 - DNA, 929 bp, Homo sapiens
aataaactattgatacacataacctggatgaatctctaattatgcctaatgaaagaagccattactcctttttcataaaatttttttaaaaaatgtaaactaatctaatctacagtggcaaatagcgtatcagtggttacctaagaaatgaaagaggcagggctgggcacagtggctcatacctgtaatcccagcactgtgggaggccaaggtgggtggatcacctgaggtcaggagttcaagactagcctggccaacatggcgaaaccctgtctctactaaatatacaaaaattagcttggcatggtggtgggcacctgtaattgcagctacttgggaggctgaggcaagagaatcacttgaacccaggaggtggaagttagtgagccaagattgcgtcactgcgctccagcctgagtgacaagagcaaaactccatctcaaaaaaaaaaagaaaaaaagaaatggaagaggcagtaggcagtaaggaaaggtcagagggaggaagaagtatgggaaaacrtttggaagtgatggatatgttctttatcttgactgtgctgatggtttcacaggtgcatatatatgtgaaaacgtatcaaatatgtgttatgtcaattaattgttgtaattgacagttacagctgtcataaaaaaatgtaaccttaaagataagaacggaaaccctaacagttatagttgctctgctatcacatcccaaacagcaagtgtttaaacaatgcaaagtggagggaaatgcttgtgggccaggggagagacccagtggatcacacagattatgaatgcagatttaaagtactgcagaatttggatggggttgagagaaggagcaggcaggagctcctccagaagagggaagtccaaatgtaagcaaaggcacaatgccttacatggaacaggaaaatatgc

SEQ ID NO: 89839 - DNA, 660 bp, Homo sapiens
aaaatttggtgcgtgtgtgtgtgtgtgtatatatatgtatatgtatatatatatatggaatgttattcagctttaagaaggaaggaaattctgatacataccacaatacaaatgaacctcaagggmattatgctagatgaaataagccagtcacaaaaagacaaatactgtatgattccacttatatgaggtacctacagtagccaaagtcataaagacaaagtagaatggttgttgcctgggctggggtatggggatggggagctcttatttaatgggtacagagtttcagtttgtcaagatgaaaatagctctgtggatggatggtggtgatgtttgcacaaccaacagtataaatgtgcttaacagctctgtacttaaaaatggctaatgtggtaaatttattggggaaaaacaataaacgaagacatatatttttaaaataattttcttacagaagagagaaggaatgaaggaaaagatgagaatcaaggaggggatggggccaggagaggtggcagtatctattaggaatgttatctggtaatttttaaaagttgaaagtcacatggattttttttttagcctgcaatgaattatcattatcaaaatgattctgtcaaaatattgatcaaccttttcgtaattatggaaagaatg

SEQ ID NO: 89840 - DNA, 660 bp, Homo sapiens
aaaatttggtgcgtgtgtgtgtgtgtgtatatatatgtatatgtatatatatatatggaatgttattcagctttaagaaggaaggaaattctgatacataccacaatacaaatgaacctcaagggcattatgctagatgaaataagccagtcacaaaaagacaaatactgtatgattccacttataygaggtacctacagtagccaaagtcataaagacaaagtagaatggttgttgcctgggctggggtatggggatggggagctcttatttaatgggtacagagtttcagtttgtcaagatgaaaatagctctgtggatggatggtggtgatgtttgcacaaccaacagtataaatgtgcttaacagctctgtacttaaaaatggctaatgtggtaaatttattggggaaaaacaataaacgaagacatatatttttaaaataattttcttacagaagagagaaggaatgaaggaaaagatgagaatcaaggaggggatggggccaggagaggtggcagtatctattaggaatgttatctggtaatttttaaaagttgaaagtcacatggattttttttttagcctgcaatgaattatcattatcaaaatgattctgtcaaaatattgatcaaccttttcgtaattatggaaagaatg

SEQ ID NO: 89841 - DNA, 1120 bp, Homo sapiens
tcctttaagaacctaaaaacatcccaagtaacagagaataaactgaatcaaacatacttgcattttccaccaaaactttgggcacacgctggyggttcattaggagtgggaaaggatctctcccatcattccgttcgtggacctctcgaatttccaccgtatcatccataagatagtaatgaatgatgtaggtccgacattcaccatacatgctgtctgtatcatcccagattgcatagaatcgaaggacctttgaagaatccaaagtagtgactcaagaatcctaaaagtagggagttcaacttggctactttggcaattatgtatcaacgatggaaagactagctggaaagactatgaagtaatttcagatggggtaaattgaaaaaaaaagaaatattcatcaaacatactaaaacatctgaaattatgtactatatgtcagcagctggaaagaattaaataataggattataagtttgtgccaaaaaagaagagctcactttgatccaaaatattagtcagtgaaagagaagctaaattaaaagagcaatgaagttctttacatagtggtatatatatattaataaaggtacatgtgaatatggtttatatataattagtgtagaaaaaatttttatttattaaccagtctttttttggtcccatcaacacatatcttctagcaataatataaacacaatctttttttttttttttttggctaggcttcttcaaatcgtgggaataaacacaatctttaaatacaaaataataacagatatatgactgatatgaacaaaatccttaaaagaccatgctagtgctagtttacattttctgaactaaaaggggttaaatgtctaaagaaaaggagcagcaaagaagcactgagggtgatctcttccttttctttctccctttagtacagaaagggaaggatttaaatctgcttatacacatcagctcacaagggagaggattaggaaggttggaacagagttggaaaatgctcagaacattctggactccaatattaatataacatttaacaaggaagcatctgtagtggggcttctgtgaaattaaacattttaacattacaacctacatgtatgca

SEQ ID NO: 89842 - DNA, 1279 bp, Homo sapiens
tcccatcttagcctcatgagtacctagaactggaggtgcacactaccacacccagctaatttgttcacagagatgaagtcttgctgtgttaaccaggctggtcttaaactcctgtgtcaagtgatcctcctgccttggcctctaaagtgctgggattacaggcatgagccaccatgcccagccaaaattcaccattttttaagcgtctaattaagtgggttttggtataattagaaggttgtacaatggtcatcattatctaattccagaatatttttgtcatcctcaaaagaaaccccacatccattagcagtcactctgcattccctgttgcccctagctcctggcaaccactaattatgcttctgtgtctgtgagtttgcctattgtggatatttcatacaaatggaatcatataatatgtggcttttgtgtctgtttccacttagcataacgttttcaagcttcatccattttgtagggtgcatccgtactttattcagaagactggtgtttaacttttagcaaaagtttttgcattcccatccttgacttagaaggctttcccacacctttagagtacatccttcaaaatccaaatggaggaatgtctctttattaatccatagaatttggmaaatctttatgctgaaaggagctgtagaaagcatcctcagctgctccctgaaggcgtccctgactagtctagccacaggaaactcttttctgactcctagggcactcgctgtgtaggctatacaattaaatgcctagttctgtaaatgttcactgtgtctgacttctcaaatcagtgtgaaaacttctgggggcagagtgtaagaggtatcttatgctgtatttttcctttattgtttgcaatacttagcacactattgtatggaactcttacctataatcaaataaaaaccaaaatggcacttaatccctctaattgctaaaaagtttccaggaacattattacttcattttttaaaagggttgactgtttctttcttatactctgtaatgtactcttggattcttccttatactcttggattactgctcaattcacaacaattattctccattttctgaaaattggtcctcttttttcctcatcccaggctgatatttagctagaatgccctggtctggctctggaaccagtggattgttaatggcttgtgtccattctcaatggttctgcccataacataccaattgttaaaactgtcagtatccctcctatgccaccatccacatagtaatatcaaca

SEQ ID NO: 89843 - DNA, 650 bp, Homo sapiens
aaaacctaagttggtaaaatattaagaccctccccaagaaacaccccagcattataaaggaatacacccatacttgcatttttctgtgagctcaactagttagcataccaaattaattattacgagtaacctaactatacttgccatagggtaagctattggtcatggggggtttaaagggaaaaaaatatgtaacatctactgttaatgcagcaaagatgttctcttagattggaaaagccagtatacacaatattgtcaaaagaccttccccacagcacacaaactcaaacggcattaatacgtgagtcacttcctgaccatgtgggtttgtggtacggctgaaccgtgcctataaaaaaaaagtaaggtacacctttttgccacagatctggcagcaagatgtgtccttctgggctcagtgagctctccacttatgaatcttttcctctgtggtgccctataatattcctaagaggagaaagaaaagacagccttaatttgttgctgtgccctgggaaagatgagcagagcaaatttcctctgagtgcctttttctctttatctaactagaaccctctagctagaatttctgtctgttctgtcayttcctatactttccacatctcagctaatctcacttgagaaag

SEQ ID NO: 89844 - DNA, 1006 bp, Homo sapiens
taatcacccaaggaaggcaataaaactaaaaagattccattggttcattaactattaaaatccaacaccaaagacacagcccctttaaagccttgacaacaaatattaacttattacacatacaaattatgctcaagaccagcgactttataataccagcagtaatgctgctattcaaataataaacaggcaatattattcctactgggttgaaagaatgaaaaatagcttaaggagtgaattttcaagtgcacgtaaaatgtggcaagttgggacatggaaaaactgaaagtcttaaaggtagttccgttaccagaaagggatataaaaataaaaagctcactcaatgaaaacataatgcagaattaggtcagcaaagctgaaaacataatacagaattaggtcaccaacacagacctagaaacctccttcctctctcccaactccacacataattcagtcaaggctggctgctttttcaccaaccaatccaaggataaaaagctaggaatgaacaacattcaggtaaaaggaggcctctccttctatgagtgtcaaattatataaacctatgagacagcctctcagagtcatggccattgtaacttacagctgaatggaacataaactttctccacaaataaattctgttttgcattgcttgacccagggccagccttggaaamttcttccatgtctctatcaccagagactctgccaaggagagaggaaggctgcaacatcaagctcttccgcatccccttcaaaactccaggtgagctagagcccttaagtgccttcgagaacagcagctgggtgcgtaagggggcgtgtcccatctggtcctgcttaagaccagcaagagcagagctggctcctctgtccttcttcctttttttcttttctacatcacacccaaatggttggagctggtggccagagataagaacttagaggcatttctaccgctagccccctgggctccccactctcccattgcttcctt

SEQ ID NO: 89845 - DNA, 1006 bp, Homo sapiens
taatcacccaaggaaggcaataaaactaaaaagattccattggttcattaactattaaaatccaacaccaaagacacagcccctttaaagccttgacaacaaatattaacttattacacatacaaattatgctcaagaccagcgactttataataccagcagtaatgctgctattcaaataataaacaggcaatattattcctactgggttgaaagaatgaaaaatagcttaaggagtgaattttcaagtgcacgtaaaatgtggcaagttgggacatggaaaaactgaaagtcttaaaggtagttccgttaccagaaagggatataaaaataaaaagctcactcaatgaaaacataatgcagaattaggtcagcaaagctgaaaacataatacagaattaggtcaccaacacagacctagaaacctccttcctctctcccaactccacacataattcagtcaaggctggctgctttttcaccaaccaatccaaggataaaaagctaggaatgaacaacattcaggtaaaaggaggcctctccttctatgagtgtcaaattatataaacctatgagacagcctctcagagtcatggccattgtaacttacagctgaatggaacataaactttctccacaaataaattctgttttgcattgcttgacccagggccagccttggaaacttcttccatgtctctatcaccagagactctgccaaggagagaggaaggctgcaacatcaagctcttccgcatccccttcaaaactccaggtgagctagagcccttaagtgccttcgagaacagcagctgggtgcgtaagggggcgtgtcccatctggtcctgcttaasaccagcaagagcagagctggctcctctgtccttcttcctttttttcttttctacatcacacccaaatggttggagctggtggccagagataagaacttagaggcatttctaccgctagccccctgggctccccactctcccattgcttcctt

SEQ ID NO: 89846 - DNA, 1006 bp, Homo sapiens
taatcacccaaggaaggcaataaaactaaaaagattccattggttcattaactattaaaatccaacaccaaagacacagcccctttaaagccttgacaacaaatattaacttattacacatacaaattatgctcaagaccagcgactttataataccagcagtaatgctgctattcaaataataaacaggcaatattattcctactgggttgaaagaatgaaaaatagcttaaggagtgaattttcaagtgcacgtaaaatgtggcaagttgggacatggaaaaactgaaagtcttaaaggtagttccgttaccagaaagggatataaaaataaaaagctcactcaatgaaaacataatgcagaattaggtcagcaaagctgaaaacataatacagaattaggtcaccaacacagacctagaaacctccttcctctctcccaactccacacataattcagtcaaggctggctgctttttcaccaaccaatccaaggataaaaagctaggaatgaacaacattcaggtaaaaggaggcctctccttctatgagtgtcaaattatataaacctatgagacagcctctcagagtcatggccattgtaacttacagctgaatggaacataaactttctccacaaataaattctgttttgcattgcttgacccagggccagccttggaaacttcttccatgtctctatcaccagagactctgccaaggagagaggaaggctgcaacatcaagctcttccgcatccccttcaaaactccaggtgagctagagcccttaagtgccttcgagaacagcagctgggtgcgtaagggggcgtgtcccatctggtcctgcttaagaccagcaagagcagagctggctcctctgtccttcttcctttttttcttttctacatcacacccaaatggttggagctggtggccagagataagaacttagaggcatttctaccgstagccccctgggctccccactctcccattgcttcctt

SEQ ID NO: 89847 - DNA, 592 bp, Homo sapiens
catttgtaatcccagcactttgggaagctgaggtgagaggattgcttgagctcaggagttcragaccagcctgggcaacatagtgagatactgtttctataaatttaaaaaataaattaataaaaaaatttttaaaaacaaaaaatatatggacctacctcatttttaatggctgcataatatgccacagggtgattattctgtagtaaacttatttatttattattgggcttctcaagtttttcctccatttgacattattacaaataatactgacaatacttgcacatatctcagatatgtcactgcactccataaacagcatgtggctatataatatactgatattatgtttggctcatgatagaaaaagtcatgaatatgatggcagttatttgttcagaataatatgaaattttgtctttcataatttctgagaattttgttaagggaaaaataagagctcagtcagagacctctaattcatctgccctcagcaattcctattcactttctgcctagctacctgcttgatacaaagagctgtaatttttttcttttttctttttttacttggagtttcactcttgtt

SEQ ID NO: 89848 - DNA, 674 bp, Homo sapiens
tcctcccacctcagccccactacagtagatgggctgcaggagagcaccaccgcacctggctaatttttaaattttttgtagatatgaggtttcactatgttgtccagattggtctcaaactcctggccttaagcaattcttccacctcagcttcccaaaatgttgggattacaggcgtgagccaccacgcccagctctctttttcatctacttcacggaataatgattttgtttcaggtccaaatagttcatggcatcccctggactgattataattcggggttaaaaagcactcagggaaaaaaaaaatggagaaaaatgtaattcctgatagttttgagagaaattggattactgaatgcaatatttctaacaaataaataaaacatgcagtggcaactgacatttagcattattatttagtagaaaaaattaaaaagaaaaatttaaaaatattttcaatgtcatagaatttaggattgattagagaaaatcatgtagatgtctgtaaatttattaatttttatcatgtatgataaaaaacatcatatgacagagaaaatgaccattacttgaggtttactktaactacttagaaaaaaattttaacgccgagttttcttgaggtagttgattattgggtacattttttttctttttctttttatagagat

SEQ ID NO: 89849 - DNA, 639 bp, Homo sapiens
aggccgaggtgggtggatcacctgaggtcaggagtttgagaccagcctggccaacatggtgaaaccccatctttactaaaaatacaaaattagctggatgtggtggcaggcrcctgtagtctcagctatgtgggaggctgaggcaggagaattgcttgaacccgggaggaggaggttgcagtgagctgagaccacgccattgcactccagcctgggcaacaaaagcaaaactccgtcacacacacacacaaaaaagtgtaggaagaaggcctcacttttatcttcttggctttgctgattttcgaatcatgggaatgctttagctttaaagatgtaagcatatagatcattaaaataaactttacaagccgtaaagtacatcattggtgtataattacaatttaacacacaaattatcatttaaaacacagacctgatggcctggtgtagtggctcacacttgtaatcccaacactttaggaggccaaggccagaggatcacttgagcctaggagttcaagaccagactgggcaacacagtgagactccgtctccacaaaagaaaattaaacaatttgtcaggcacattggcatgcacctgtattctcagctactcaggaggctgaggcagaaggatcc

SEQ ID NO: 89850 - DNA, 972 bp, Homo sapiens
aagtcaagcaataactgaaatccctaaaaactcaaacacaaacaaaagctgattaattcgaatactcgttttccaaacagtgatgggcacttagatgttttttgaggtttaagtactttgctataataatgactcttggctgggcactgtggctcacaccttaatctcagcactttcagaggccaaggcgggaggatcgcttgagctcaggattttgagacaagcctgggcaatatggtgaaaccccctctctacacaaaataataaaattatstgggcctggctgcacgtgcctgtggtaccagctactcaagaggctgaggcaggagaatcacttgaacccaggaggtggaagttgcagtgggccaagatcgtgtcactgctctccagcctgggtgacggattgagactgtctcaaaaaaaaaaaaaaaaggtgaagagaattggataattgatttattcttacgatatcctgagtagctaaaagcacttgtatatgtaatctcatttcccttcaaaatctatttggatgggagaaagcagatatgtattcatataatttctttcatgtttacaaatacaaatgaagaaaatgcttttgaatcttaagttgaaaactgagtggccataaactcaaggtaagaatccaggactctcaatcagctccctctctcaatcagctttcacaatttcttttcctaattttaaaatcctggcagccagaattaatcaccaaatttaggaaaatttctttacacaaggttctttccctttggtttgtattttaaaaatataatgacgctacctgcttcccggtaatatctatcagaacaggtcctaactgggccaaggccattgtacttctctttaagagcacaataatggcactggtggagttttgaatttaatatgtaagctctatcaagtcctttaaaaaaacattataaatgtgtgagctagaaatattttact

SEQ ID NO: 89851 - DNA, 726 bp, Homo sapiens
cctgagcccaggagttcaactctgcagccagctatggtggcatcactgtcctccagtctgggcaacagactgagaccctgactcttaaaaaacttacttagattcataatgtgacttgttggaagayacacaccatttctatgccagaaaagaaatccataagacccaatgttgattattcatagaacttcatggttttgaagacatgatgtggaataatcaaatggcttcccgctatggatatattgagttaagataaataaattatctttctctgaagttacacattttggatcatgtaaatctgcagttgccagtcaccatcactctgattgcatttcatactaccacagaggactatgagggcaactcacagccggaaggaatgctgagaggtggaaggcagagtttgatgtcctgtgccagccttaactaaaacaaacttcaccgtaggagttcacagttacctgagtcaataaattccttttattaaaaaaaaaaaaatagactattttgaactggacatctctcatgtgaaacaatacaaatgaaaaatattttataaaaaatcaagtcttttagagattaattcatttccacatgtaaaaatggaggcatatcatatcaaaatgataacatttattttgctgatttttttttcagaatttctttgaggaacaactaagattgtgcagtataaaaatatccactaattttgaaacaaaa

SEQ ID NO: 89852 - DNA, 726 bp, Homo sapiens
cctgagcccaggagttcaactctgcagccagctatggtggcatcactgtcctccagtctgggcaacagactgagaccctgactcttaaaaaacttacttagattcataatgtgacttgttggaagatacacaccatttctatgccagaaaagaaatccwtaagacccaatgttgattattcatagaacttcatggttttgaagacatgatgtggaataatcaaatggcttcccgctatggatatattgagttaagataaataaattatctttctctgaagttacacattttggatcatgtaaatctgcagttgccagtcaccatcactctgattgcatttcatactaccacagaggactatgagggcaactcacagccggaaggaatgctgagaggtggaaggcagagtttgatgtcctgtgccagccttaactaaaacaaacttcaccgtaggagttcacagttacctgagtcaataaattccttttattaaaaaaaaaaaaatagactattttgaactggacatctctcatgtgaaacaatacaaatgaaaaatattttataaaaaatcaagtcttttagagattaattcatttccacatgtaaaaatggaggcatatcatatcaaaatgataacatttattttgctgatttttttttcagaatttctttgaggaacaactaagattgtgcagtataaaaatatccactaattttgaaacaaaa

SEQ ID NO: 89853 - DNA, 697 bp, Homo sapiens
gaatcccctgaaagacttttttttttttcttgagatagctggagtgcagagctgtgacgttggctcactgcaacctccgcctcctgggttcaagcaattctcctgcctcagcctcccgagcagctgggattacaggcacatgccaccatgcctggctaatttttgtattttttgtagagatggggtttcaccatgttggccagactggtcttgaactcctgacctcaggtgatccacacgctcagcctcccaaaatgctgggattacaggtgtgagccaccgcacccggccctgctaaaggacttctaatgaattcagatgtggagtcccctccctagagactgagtcagtacatctggaagtagcctgagcatctgcattttaaagtcctccccagcctcctaaggcgatttaataatgaccaggatttaggaccagctgtcctaagcatctccatccccactactgctgccctggttcagcccccagcacctgcagccccgcttctgcactcaggctctgcattctctcagccatcctctaccgcattcaacaataccacagcacacacattgaatgcctatttttttccaggtactttgttaaccagtggaagyacaaagatgaacaaaccatactcctcccctcaagacaactctttcgtgagggagataacccaggaaataggagtctattc

SEQ ID NO: 89854 - DNA, 984 bp, Homo sapiens
aatcctttattacctactccctaacaagaattcctccagatcttatatacggggcctgcagggcaggacacaggcctatggtaattacttccaatgtatcgggcattgtgctaagcactttgcatgggtggtcacagcacctctggagccaagtgttgtcccataagggccacaaggcttcaagaggacggagcctaccccttggtcactgaggggtggccctggtctgcaaggctacagaactgccttgccaccctgtggcactgcctctcatttcatagctggcacatgtcattttgccacccccatcacatgtcatgctggcatcaacccagggaggtgggtagtatttttgttgaagagctgcaagaactctgcccagagaagtcgacaacctgctcaagttgtgcagctaataactacaaaagccaagactcaactcagatctgttgactctcagtattaccccaacctttatgccccaaaccaaaggatgcccttttcatttcagtcacgggtaaaatgaactttggcccattccgaaagatgataccagctatttgaacagacaggtacttgaggataatgaggtaattttttctaataagtaaagataattgtttgggtattaaaagctatgattttgtcataattctttttagtccaagtataatagagccagctctttcctaattctctaatggaatggcatttctaccccttacccaccccccaatccaaggcctctttcttctttgtgaattgctaaatacagttctgggctagtgggcagtggttcaaaacccatcgtttgaccctgcttgaacaatcaaaaacagatccagtgtcctaagataaaascactatacaaagcaaacattccctctcagtggctcctcggtaatgacccagcaagtattgtctgtttcccgtgcctctcactatagccatcagggaccacttctactaataatcagaggtctg

SEQ ID NO: 89855 - DNA, 598 bp, Homo sapiens
ccaagctccccacagaatgattaattacttggacatggttgccgagacaagctcggtcagggagaccctaacccagtggtgctagaggaattaaagacacacacacagaagtataaaggtgtggagtggaaaatcaggggtctcacagccttcagagctgagagcctcgaacagagatttacccatgtatttattgacagcaagccagtgataagcattgtttctatagattatagattaactaaaagaattccttatgggaaataaagggatgggccgaaataaagggatgggctctggctagttatctgcagcaggagcacgtccttaagacacagatcactcatgctattgtttggggtttaagaacgcctttaagcagttttccaccctgggtgggccaggtattccttgccctcattccagtaaacccacaaccttccagcataggcgtcatggccatcatgaacatgtcacagtgccrcagatattttggttatggccagttttggggccagtttatggccagattttggggggcctgttcccaacacatggttacctttattttattacagaaatctctgatatcctttgc

SEQ ID NO: 89856 - DNA, 754 bp, Homo sapiens
ggatcctcaactatttacaactctgcaaaatcaagagacaccctccrccccattccagaagctgccaaaaaccattatgtgaatccacaatccctgaccatttcccagagaaaattttctagaaattaatggatgtccaggcccagagcagccctcctccacttcctggggcattctccacaccatatgggtccaagaaatggtcttacgactgctttgctgtaaaatattccaacaccaagaactcccgagaagcgacctgtttgaggatgaagaggctgaatctttcagggtcgtcctgcttctgcgtcttcttccttcagcattctccacagccagggcctgcaggagtgacccaaagagcacagtcaggacatctggcttcagcatgggaacagtgagtatcaatcagggagaggtcggaggagtgacctgggatggagccctgaagaacccagcagctgatgggcccacccaggacgaggacccagcaaaggctgctgaggaaggtcccgggggagaagaggacttaggagaccaagacgttcaacttcattctggttattcaggctctaaacccaagtcatcatggctttcctctttccctcacaccccacgtctaatccatcagcaaaggacgccagcttcaacgtaaagtaatatccagaccctcaccgtttctcgacacctccactggtaccactttagtccaagcaagcagcatctctcattaggttattgtgataacccccta

SEQ ID NO: 89857 - DNA, 622 bp, Homo sapiens
tttagagtcatttcaatttatttagagaaacttctacatgcaacccgttgtaaaggtactcactaaaacatttaaagaaaaataattgcttaattacaaaatataacaatgtttattcttacagctaataatcaggaaaagcaaagttccttaaggttttacaatgaaattacagatggacaaacaaaaaattctcaatgtcaaatctaacccaactgaccaaaacagaaaatatttttccccctgtggtggtcattgtataacagaaatcaatttttaaattatagtaattcaaaatatcatgagaatgctctttggatcttttctctttatgatgtcaggcttcatgtagaaagtgtcagaccgagattgaatatgaagactgaaataaaattaaaataagtggaattaagtgttgataatcaatgacaaagaataattmtgtgggttaatatttaaataaccagattgtccttgttccttgaatctttatagttactatacctttgaaagcatcataacaaattttgtggcataaaaggagagtaagatttttctggtaaattggtcaattttaaattgtttaagattgttattttcaaaaattcagaatccatagcca

SEQ ID NO: 89858 - DNA, 1830 bp, Homo sapiens
ggttttattcaagaaataattagtttgtagaacagaaaggaaagctggtactttattgtatatgagggataaggagagtgagaagtcacagctgatgccgccttcctagttgttctaactatatgcagttgtgctctcctttgagattctaaacaataagaggaagaagagcaggaagataatgatgatgatgttcagtgtgaagtgtaggcacttgcatatgttattctaaaattcaaatgaaagatgtgggcaagaaataagaagttgataagcagataagcattgcctaggggaaaagtataaagtggaagtaaagcaagattagttctaatgtttgaggaactcttttattgaaagaccatatagaaaggaaaagccagcagacacagaatgaaaggtgatatttgtatttgtttgtttttstttctttttttagacaaggtcttgctctgttgcccaggctgtagtgcagtggtgagatcatagctcactgcagcctcgaccttccaggctcaggtgatcctcccacctgagcctcccaaatagctgggaccacaggcatgcaccaccacacccacctaattttgtatctttagtagaagtggggtcttactatgttgcataggctggttttgaactcttggattcaagcaatccttctgtcctgacctcccaaagtgctgagattacaggtgtgagccattgtgcccagcctgaaagtgatatttgtaagaggaaaacctataggtgtggtgtgatctaaggtaagggagggtgttttgagaataagggagtgataaatgctattcctcagaatgaaatctcattgtaatggaagcaggtttgtttagtgttctctttgaaatgctaatgttatctgtctctgcttagactgatgatctagttactgcaggtgatagaaaataaaatacttgaggactggtgacttcacattgcaaagagtgcatggtgccaaatctattctagaataacatttatctcttgaatggtataatttaggatgtcttcgtttaattcactgctaatgttgtattagacgttaatgtgacttgtcagtgcattattgtactcacgttgaaaagaattctttctgacattaagtatgagcatctgaaagtctgaatgtgtttgaaatcatgcataaatacaagtattataccatcagttacttatataggaaattctcatccactctcccattcagcaaacatttcttaattgcctgatatatgccaaccattactaaatgctggggatgtaaaaaattatcttgaaacacagtttttgtaaaccaccacactcttggggaaaatatgtgtgtcctgtggaggaggaggtaagctaggtaagatagatcaggcctagattgcgaagtgatttagcacaaagcttaaaactacagtgtagagtaaacaaatcattgacgaggaaaagttctttttttatagaaaatttgtagctaataaatcaagattcagtaaaatataataattttgcttaaaataatgaattaatagatctaggccatagctggtaacataaatagagacaaaccattcttatgtacctcttgatgctagttacatgagatgacctaagaagttttctagcttaaaatgttaaatctgaaacagatcactactcttcactactctagatctaattattaaattataggaaatacatagagaataaatgaatatgttaatcataccatgggggtgcaatctgcaaaacccagataaacaacccattttcttcagtaacaactacaataataaaagaaaaaatgaaagaaagaaagga

SEQ ID NO: 89859 - DNA, 1830 bp, Homo sapiens
ggttttattcaagaaataattagtttgtagaacagaaaggaaagctggtactttattgtatatgagggataaggagagtgagaagtcacagctgatgccgccttcctagttgttctaactatatgcagttgtgctctcctttgagattctaaacaataagaggaagaagagcaggaagataatgatgatgatgttcagtgtgaagtgtaggcacttgcatatgttattctaaaattcaaatgaaagatgtgggcaagaaataagaagttgataagcagataagcattgcctaggggaaaagtataaagtggaagtaaagcaagattagttctaatgtttgaggaactcttttattgaaagaccatatagaaaggaaaagccagcagacacagaatgaaaggtgatatttgtatttgtttgtttttgtttctttttttagacaaggtcttgctctgttgcccaggctgtagtgcagtggtgagatcatagctcactgcagcctcgaccttccaggctcaggtgatcctcccacctgagcctcccaaatagctgggaccacaggcatgcaccaccacacccacctaattttgtatctttagtagaagtggggtcttactatgttgcataggctggttttgaactcttggattcaagcaatccttctgtcctgacctcccaaagtgctgagattacaggtgtgagccattgtgcccagcctgaaagtgatatttgtaagaggaaaacctataggtgtggtgtgatctaaggtaagggagggtgttttgagaataagggagtgataaatgctattcctcagaatgaaatctcattgtaatggaagcaggtttgtttagtgttctctttgaaatgctaatgttatctgtctctgcttagactgatgatctagttactgcaggtgatagaaaataaaatacttgaggactggtgacttcacattgcaaagagtgcatggtgccaaatctattctagaataacatttatctcttgaatggtataatttaggatgtcttcrtttaattcactgctaatgttgtattagacgttaatgtgacttgtcagtgcattattgtactcacgttgaaaagaattctttctgacattaagtatgagcatctgaaagtctgaatgtgtttgaaatcatgcataaatacaagtattataccatcagttacttatataggaaattctcatccactctcccattcagcaaacatttcttaattgcctgatatatgccaaccattactaaatgctggggatgtaaaaaattatcttgaaacacagtttttgtaaaccaccacactcttggggaaaatatgtgtgtcctgtggaggaggaggtaagctaggtaagatagatcaggcctagattgcgaagtgatttagcacaaagcttaaaactacagtgtagagtaaacaaatcattgacgaggaaaagttctttttttatagaaaatttgtagctaataaatcaagattcagtaaaatataataattttgcttaaaataatgaattaatagatctaggccatagctggtaacataaatagagacaaaccattcttatgtacctcttgatgctagttacatgagatgacctaagaagttttctagcttaaaatgttaaatctgaaacagatcactactcttcactactctagatctaattattaaattataggaaatacatagagaataaatgaatatgttaatcataccatgggggtgcaatctgcaaaacccagataaacaacccattttcttcagtaacaactacaataataaaagaaaaaatgaaagaaagaaagga

SEQ ID NO: 89860 - DNA, 644 bp, Homo sapiens
accctgtcttgattaaaccctgcagttcaaccacagtgaacttatttaacactgcagcatgccataatttgttttatccgtagggttctgccttcatttacagtaacaaacccttcccatcaaatcatacgcccctgtttccatccccttctggaacattctttcctggtctttatactgactcactccaactcatcattccagaatcagccatctcagaccattttcaaaaacttactgagattgctgccctgtttaattttccccttcctagaacttattctctgtcttgtcattatctgtctgaatcccacatctgaataagttcctgaagttcatatcaaaagtcttgaaacattgtaaccaytctgaaaacactggctgtagcaatggctaccttgttctaacctttgttttgtcccttatgcctatgagatttcttgtttgccttgataatttaattttgggcatgtgccaatttatgcctaggatcaagtttctttttttattttaggttttctaatgcagaaaaactctgttttcatgtggaggtcttatttcagcttttcaaattttacctgatgacgtccttgtttgtttgaacatgtctgtatatttatattccaaggggcatgaaaccagga

SEQ ID NO: 89861 - DNA, 644 bp, Homo sapiens
accctgtcttgattaaaccctgcagttcaaccacagtgaacttatttaacactgcagcatgccataatttgttttatccgtagggttctgccttcatttacagtaacaaacccttcccatcaaatcatacgcccctgtttccatccccttctggaacattctttcctggtctttatactgactcactccaactcatcattccagaatcagccatctcagaccattttcaaaaacttactgagattgctgccctgtttaattttccccttcctagaacttattctctgtcttgtcattatctgtctgaatcccacatctgaataagttcctgaagttcatatcaaaagtcttgaaacattgtaaccattctgaaaacactggctgtagcaatggctaccttgttctaacctttgttttgtcccttatgcctatgagatttcttgtttgccttgataatttaattttgggcatgtgccaatttatgcctaggatcaagtttctttttttattttaggttttctaawgcagaaaaactctgttttcatgtggaggtcttatttcagcttttcaaattttacctgatgacgtccttgtttgtttgaacatgtctgtatatttatattccaaggggcatgaaaccagga

SEQ ID NO: 89862 - DNA, 628 bp, Homo sapiens
catagtcccatgagatcagaaaacccagtccttttgcaatttcccccaaggttatctctggcctctcaaggagagtcatcaccttttcaagcaggctggtatcttcccactgatgcacttcctgcggctttggtgacaagcagatgagagggtggctgagtagttgtttgtaatagagaagcactgctctttggtatgccagggaagttccaacattttgacctaattaactataggccataagcaggtcatgaaactgactcaaacaagattgtgcatcagartcccctggaaagcttgtgaaaacacagattcctgccccctaccccataactctgattcgggaggtcttgggtggggtctgagaatttgcatttctgagttcccagatgatgccaaccctgttgtttgggaacacagtgtggaagccactgttcgatatttcaacctcattatatcagaggcctagagaagtttttctcaacctttaatatgcacacaaatcacctgcgaggcttgtaaaatacagagttttgcttcagtaggtctggggtggattctgagattctaggattccattcagctcccaggtgatgccactgctgccgatccacagaccacactgagt

SEQ ID NO: 89863 - DNA, 686 bp, Homo sapiens
tttagatgtgttaagggcctctcagaaatggaggygtatgtatgacctcacttaattccttccctgattaaagaagtaatgcatgatcactgtagaaaacacaaaaaatgcacacaagaacaaaataagtgacagtaacatcctgtaattctaccaccccagtttcagttgtaggtaggaggacaaaaggagctattccccaaagacagcaaaatgtgatgactggaaacttggacaaaatggtgggttttcagctggggatgattttgctctccctttcccagcacatcgggtaatacccagagacattgttattgtcagaactggttggggcggcagggtggggttggaggtgctcttggcatctagtgggtaaaagctatgatgctgctgtacatcctacaatacaaaagactgccctccattacaaagaattcacctgcccaaaatgtcaatagtgcaaaagttgagaaaccctattgataaaactatcaaaagcatgaggatcagttgtttgtcttgcattagtgtaaatggcaaatttcccaaattaggaaactgctcttccgaacactgtagtcattccaggccttcgacccatcaagaactattgttaatattttgttgaataagcttccaggctctttcttatacatagagtattttaatcctaattctggagtccg

SEQ ID NO: 89864 - DNA, 686 bp, Homo sapiens
tttagatgtgttaagggcctctcagaaatggaggtgtatgtatgacctcacttaattccttccctgattaaagaagtaatgcatgatcactgtagaaaacacaaaaaatgcacacaagaacaaaataagtgacagtaacatcctgtaattctaccaccccagtttcagttgtaggtaggaggacaaaaggagctattccccaaagacagcaaaatgtgatgactggaaacttggacaaaatggtgggttttcagctggggatgattttgctctccctttcccagcacatcgggtaatacccagagacattgttattgtcagaactggttggggcggcagggtggggttggaggtgctcttggcatctagtgggtaamagctatgatgctgctgtacatcctacaatacaaaagactgccctccattacaaagaattcacctgcccaaaatgtcaatagtgcaaaagttgagaaaccctattgataaaactatcaaaagcatgaggatcagttgtttgtcttgcattagtgtaaatggcaaatttcccaaattaggaaactgctcttccgaacactgtagtcattccaggccttcgacccatcaagaactattgttaatattttgttgaataagcttccaggctctttcttatacatagagtattttaatcctaattctggagtccg

SEQ ID NO: 89865 - DNA, 797 bp, Homo sapiens
ccaacttcattcttttgcatgtgtatatccagttgtgcttacaccatgtattgaaaacattattctttccccattgaattgtcttggcacctgtgtaaaaaatcagctgattgtaagcataaagggttttaaaaaaatattttttcccatctctcaacttttagctgaagatgaagytttatttctgtatcttaattctattccattaatctatatctatccttatacctatacaacattgtcttgattactgtagccttgtagtaagttttgcaatcagaaatataagttattttgttctcacaaaagaagaactttgttcttcttcaagattattttggctattctgagtctcttgaatttccatacaaactttaggagcaatttgtcattttttgcaatgaaggcagttgggattttgagaaaaattggattgaatctgtatttcaattttgggaatagtgttatcttagcaatttttttttaaattattgttatttgtggagatatggtctcactttgttgcctagggtggtcaggaactcctgggctcaagcagtcatcctcccatgacctcctattaataatattaaatcatctgaaccatgaaaatgggatggggtgccttttcaattatttagatctttgttaatttcctttaataatattttgtagttttcagagtttaagtttgacatttctgaccgggcacaatggctcatgcctgcaatcccaacactttgggaggctgaatgtgaggattgcttgagcccagaagttcaaaatcaggctgagca

SEQ ID NO: 89866 - DNA, 841 bp, Homo sapiens
tgattgtgaggcctcccctgccatgtggaactgtaagtccattaaasctctttttcttcccagtcttgggtatgtctttatcaacagcatgaaaatggactaatacaccacctcatgagaccttgtgccagttatcaatgtattgtctctcaggtccaaattcatccttcactgactgctctgagaaaatggatctgagccttaaattttttttcctttgttctctttcgtgatgatatgctttataggtagaaggccctgaagaggcgtttcaggaggaatgggttttgcttcctggtccagttgtgctcactggcacacttctgcagcacagcagcttctccagcatctgttcctgctttgattggtggccagaaacactcagcagccagcagtgttccttagcaccctattgggcagttttatagcagaggcttccaggagacccctccccatgaatacgtttcctcagcaacgtaaaagtgccagaaaattctagagggtggatttataggaagttccactggaagattcccagtgacttcttgccatttaatgagccacagccacactctcttcaaaagggtctcaatctgccctggctggaggcgagaggctcctctttgggaactctatcacagcattagagtagcagctgttccttatatctgctattgctatactctttaaagctctctagttcttattagccagtgcttcattattctaataccctgttatagctaataattcctcatatattaaactgtctttattcaaatgagcatggtttgtcttctgattagaccttgactgatgaagatatcttaagcttttccat

SEQ ID NO: 89867 - DNA, 841 bp, Homo sapiens
tgattgtgaggcctcccctgccatgtggaactgtaagtccattaaacctctttttcttcccagtcttgggtatgtctttatcaacagcatgaaaatggactaatacaccacctcatgagaccttgtgccagttatcaatgtattgtctctcaggtccaaattcatccttcactgactgctctgagaaaatggatctgagccttaaattttttttcctttgttctctttcgtgatgatatgctttataggtagaaggccctgaagaggcgtttcaggaggaatgggttttgcttcctggtccagttgtgctcactggcacacttctgcagcacagcagcttctccagcatctgttcctgctttgattggtggccagaaacactcagcagccagcagtgttccttagcaccctattgggcagttttatagcagaggcttccaggagacccctccccatgaatacgtttcctcagcaacgtaaaagtgccagaaaattctagagggtggatttatagraagttccactggaagattcccagtgacttcttgccatttaatgagccacagccacactctcttcaaaagggtctcaatctgccctggctggaggcgagaggctcctctttgggaactctatcacagcattagagtagcagctgttccttatatctgctattgctatactctttaaagctctctagttcttattagccagtgcttcattattctaataccctgttatagctaataattcctcatatattaaactgtctttattcaaatgagcatggtttgtcttctgattagaccttgactgatgaagatatcttaagcttttccat

SEQ ID NO: 89868 - DNA, 841 bp, Homo sapiens
tgattgtgaggcctcccctgccatgtggaactgtaagtccattaaacctctttttcttcccagtcttgggtatgtctttatcaacagcatgaaaatggactaatacaccacctcatgagaccttgtgccagttatcaatgtattgtctctcaggtccaaattcatccttcactgactgctctgagaaaatggatctgagccttaaattttttttcctttgttctctttcgtgatgatatgctttataggtagaaggccctgaagaggcgtttcaggaggaatgggttttgcttcctggtccagttgtgctcactggcacacttctgcagcacagcagcttctccagcatctgttcctgctttgattggtggccagaaacactcagcagccagcagtgttccttagcaccctattgggcagttttatagcagaggcttccaggagacccctccccatgaatacgtttcctcagcaacgtaaaagtgccagaaaattctagagggtggatttataggaagttccactggaagattcccagtgacttcttgccatttaatgagccacagccrcactctcttcaaaagggtctcaatctgccctggctggaggcgagaggctcctctttgggaactctatcacagcattagagtagcagctgttccttatatctgctattgctatactctttaaagctctctagttcttattagccagtgcttcattattctaataccctgttatagctaataattcctcatatattaaactgtctttattcaaatgagcatggtttgtcttctgattagaccttgactgatgaagatatcttaagcttttccat

SEQ ID NO: 89869 - DNA, 1244 bp, Homo sapiens
ggatcccatctccccacgtaaggcatgtaaaaaactttatgaggtctcgtctgctagttgcaagagctgctacctcagaatcctggtttttctaatctcagtggctgaagagtcyagtgctacctacctattttcccaccttacagaactccttgtgaaagtgcccctgcctcccacccaaccattacccatacctgcaggcatgtgccaccagcgacttataccaggctcttcttcagaaacatgatttgacaaaacttgttcaagctcctcaagacacatgttaacgaaatgagtcttcttaagtccctgggttgaaaacttcaatgacttcccaccacacacagaataaaatccaaactccttactgcaaactctaacaatctgttagcctgcccttgtctgcctctttaagccttcatttctagtttctttccccacttgtcctctccagccacactggccttcctctctccaactcaccaagctgttctcacctcagggcctttgcacatcctgttaattctgccaaaaatgtctgtcccttcttcttcacttggccatgtgctttgaatctttcaggtatatcccaaatgtcatgaactcaggcctctccccaccatccattttactttttataacattactctggtctactgacttcatgcaggcatctaacattatcccatgaattaatgttaatctacatgagagtactttgtctgtattccttgaactctgttctgttcctggcacatggcaaatactcaactgatactgaatgagtgaatgaatgaaagaataagtgaatgaattcccctggctgacttctcaacctcactggcaggacttctctctttttggctcaaagtgatatatcacactactggatcagagccctccacccaccaaaatcacttggagggagttacagtcaatctatctcatgcttccagctgtgcctgggctcagacacatgggagactgggtaatgcctttccatgtgtaccccaggaacaaaatgcaaatgcaggcccaggaaaagtctggatgtcacatagtgctccaaggtaattctgcaccttaagccaatagcatacctggtcttcactgagcatccatgcaccaaatttgtaaataaatcttcatttgccaagaaggtcagttaagactgcttaaccttaacaagagacagtagagccagatagccagtgttcataccctgcacttcacacttactccaa

SEQ ID NO: 89870 - DNA, 896 bp, Homo sapiens
aaaccattctcccccttctccccccacccctgccccgcctttttccacaaaaccrgtccctgttgccaaaaaggttggggaccactgctctaaaggactcctcatagtccagtggctctaggaatgagtgacaggcacataacagtactgataaaggaaatccttttgaaggatgggctgaacatgtcctttaaatttggtttcaagctggactgaaaggaagatgcttcataggatctctgtttaaaactgtggggtacaaagtcctttgtttagcatctggttcctgccctaggaaaagaacattgtctttcttgagctttgcctaaaatccctagagcagacgatcctctgttctcaaaccaccacttcaaacatctcagggtaggggttagaaataaaagaaagctcttgtttttcccactacaaccaccatacaaaacgccagcagctcatggctcaccccaaaccgctgggcacttagggatccatggtggccatgagaagcaacgagatggagagtggaaggcaaaaccacttacggcaacatagtctgcctcatcgccaatgcccacatgactggcagagtgcatgagcctggggtaagaggggatgggcatggagggctcagggaggagttgctggaactttcagtaccatggctgtctagtgcttaaaccaaccttcccactgaaaaccaccaaaaatgctaaggaagaaaaagtttacctgcaccaaaaactgatcattatcaggccaaacctacatgaagccagacccccaaagagatagctgtgatttgtagctctttagccctgaaggcatttgctgaagtcagcacatttgagctctggtttttacagcttcccagagcactggggaagaagacaatactt

SEQ ID NO: 89871 - DNA, 1086 bp, Homo sapiens
ttttaacgcttcagtgataaatatttcccccaaaactcggggcaaacataaagaaggatttagtgtcgaccgtctccaccttggcctcctcctgcagtgctgtcgaagtggcgtcctgaaagccgggggccttgcccggaacagggaggcytgggctgcggccaggggaggcaccagcagctggagcacactagaccagagccggccaggacagagcctggcccgatctccctcggaggtagaactggacccccttcatgctcaggctgaggagcagggtaataagttgtcataagaaatgaatgaaagtatttcatgcaaggcctgacgcttcctccccccgattctgagatggcagcacagcacccatgtgtgatctggggagacaagcggagatgcaagggaacgcttttcccacaaaagaagccccgataagcatctcctgtgtgtccagatcaggcttccaagtttttcttccgtcgcagtttcccaccatccctcttttttttttttttttttgcttagtgacatcactagagacggagccacatagagaaaattcccttcccttctcatttctcactacgctgaatccgagtcagacaggcgctctgtttgatttgggccctgtcactcatttggtgggttgtgggagattgcttagcagcagtcacaggctcctttctgtgcggatcgatgggtgggctaaggagccaatagatgtgtgttcatctttgaagagagatgaaggcacaatacaaaatcatcacatttattttctgcagcttctagcctgggttcacagagaggttgtcacccttctgatttggaagtttcctgatatggaggtggatgaactatacttctttattgtaataaatcatgccttgaccttgaagcaaagggctttagggaccttaagaagtcatttttccccaccccatccctgactccgccctcacttctggtcctttgagtactaactttcagtttagacatttataggacctttctatgtgtcacaatatttctagagtgattaacacataccacggttgtgcatgagcccagaagtgactgttcaca

SEQ ID NO: 89872 - DNA, 742 bp, Homo sapiens
agtaggaggaaacttaggtgcatggtttcactatcactttctcaagaaggatggagtggtcttctaaagagaatgttgcagagaaggtaaattaaggatagaagagtgccccattggtcttaaacatggagatcttgtcagggggcagatgacaaaaattggaatatctgttagacaaaaggtcagaataaacaatccccagaaaatacatgggaacataaatgtaggaaaatgttcatcattcctgatagtcaaagaaatgtatgctataattttgatgttaattttcatttataaaattagcaaaggcttaaaaaaatgagcacaaccagaactgacaatggggatataaaacaggtacaataaaaattattggtgagaatattaattggtaccattacttaagcaacaaaatatttaaaatagagacctttttgcgtcggagtcatctagtctgaattctgagatttggttaaaatatgtactctgtaatcttatttgtttagtgagctttctttaatactagtttgaaacttcctctctcatcagtcttaaggtttgtgttttactytgagcaattagtatttcccatgaagtacgtttttccctttgttcaggatgacagcaaaaacagttatgtttatattgtttctatttctgggaagtagattttttgaattagaataatttttatacttttgatttacaagactacaaatgcatatttaacataagtttgttt

SEQ ID NO: 89873 - DNA, 1086 bp, Homo sapiens
taattattaaatttaggactaactgcaaaatgtttgttcataagcttaaaaatgtcattaaaagtagcaggtcatttgacctcagcaaatatataaaatactacatatttgacttatcttttttaaatgtgaagtgtttcttccttgaatgaataataccttctgaaaatgtactgttgtcatatctcaggcatatctttctttaaatgctatttccctacccaacactcataatgggtatatgaagaaacaagataaaactgaagatacattactcaagacaaaattatcacatccctcttagacttcttcagttgattccattctgggcacttgccccagaatttatactttataattcatctggttatatagctaataagtatatttagtatatgtatataatcttgtatattataaaataccattttatcatcgttagctattcaataagcacttactgattgcctactatgtgccaggtgcaaagcctacaaaaacaaaacagcaagtgatgcaccctcaagaaacaaagtgagaaagaatcaaaaagtagtatgaagtatttatcattacttatttggtcatggtaaattctgtgtaataaagtactatgaaaattcaaagaatgagaaaaggtggttcaggtcagacctctcaattctrttaattcacatctaccctgaagcaaaaagtattgatgttacttaaagaaaatttgttaatatattaccttaactggttatagtcaaccagagatcatcagtaataacggaaggagtattactggagtggaactatagcatggtagttaaaaaatgtgcattctagaaccacatggcctacactggaatgttagctctgccatttaccaactgtggcacccaaacaacctctatgtgcctcagtttcctcatctgtaaaataagatgactaataaaacctatttggttgtgtagttcaataatagcaattgtttatactagtaattaaactagtaagtttaatagcagtaatagtaataatgaacatctactttacagaatagttgaggattcaatgagtaaatacatataaagcattcaa

SEQ ID NO: 89874 - DNA, 1274 bp, Homo sapiens
tcccagctactcgggaggctgaggcaggagaatggcgtgaacccgggaggcggagcttgcagtgagccgagatcgcgccactgcactccagcctgggcgacagagcgagactccgtctcaaaaaaaaaaaaaaaaaaaaaaattgccctagaccctaaatcagggagacagacttgagcccactcctgtctccttgctgaccacttgcaataaagcctttcgtcaaaggcaggtgccatagtttttggctttagtgtgtaacgggcagtgagcccatttgcttgataacatttttactcctagttcattcaatattatttcaagataaaatgtagcctctgttaatagctactcttaaatcctatctcctaatcgaaaacttagctgtttcattctacttaagatttgctttttgttgtgttttgagacagggtcttgctctgttgcccaggctaaagtgcagtggcacaatcatagctcactgcaacctcaaattcctgggctcaagtgatcctcccacatcagcctcctgagcagctaagtctacaggtgcataccactacacccagctaattttttaaaattttctgtagagacagggttttgctatgttactcaggctggtcttgaactcctgggctcaagggatcctcccaccttgacctcccagagtatgaaattactggcatgccagagcgtgagccacttcacccgccaccctcactctacttaaggtttttggggccgggtgcagtggctcatgtctgtaatcccagcactttgggaggccraggtgggtggatcatgaggtcaagagatcgagaccatcctggccaacatgatgaagcccatctctactaaaaatacaaaaattagctgggtgtggtggcacacacctgtaatcttagctactagggtagctgaggcaggagaatcacttgaacctggaaggcagaggttgtagtgagcgaagatcatgccactgcactccagcctggcgacagagcaagactccatctcaaaaaaaaaaaaaaaattttttttgacctttaccaacctatcctccaaaatttctttccctttgacttttgaaacactttttatggggtttttccctaatgtactgaaaaatctttccttgttccttcttttgaattctgatatggtttagctgtgtcccccacccaaatctcatcttgaattgcagcttccataattcccacatgttgtgggagggacctggtgggagataattgaattatggcagcagtttc

SEQ ID NO: 89875 - DNA, 1274 bp, Homo sapiens
tcccagctactcgggaggctgaggcaggagaatggcgtgaacccgggaggcggagcttgcagtgagccgagatcgcgccactgcactccagcctgggcgacagagcgagactccgtctcaaaaaaaaaaaaaaaaaaaaaaattgccctagaccctaaatcagggagacagacttgagcccactcctgtctccttgctgaccacttgcaataaagcctttcgtcaaaggcaggtgccatagtttttggctttagtgtgtaacgggcagtgagcccatttgcttgataacatttttactcctagttcattcaatattatttcaagataaaatgtagcctctgttaatagctactcttaaatcctatctcctaatcgaaaacttagctgtttcattctacttaagatttgctttttgttgtgttttgagacagggtcttgctctgttgcccaggctaaagtgcagtggcacaatcatagctcactgcaacctcaaattcctgggctcaagtgatcctcccacatcagcctcctgagcagctaagtctacaggtgcataccactacacccagctaattttttaaaattttctgtagagacagggttttgctatgttactcaggctggtcttgaactcctgggctcaagggatcctcccaccttgacctcccagagtatgaaattactggcatgccagagcgtgagccacttcacccgccaccctcactctacttaaggtttttggggccgggtgcagtggctcatgtctgtaatcccagcactttgggaggccaaggtgggtggatcatgaggtcaagagatcgagaccatcctggccaacatgatgaagcccatctctactaaaaatacaaaaattagctgggtgtggtggcrcacacctgtaatcttagctactagggtagctgaggcaggagaatcacttgaacctggaaggcagaggttgtagtgagcgaagatcatgccactgcactccagcctggcgacagagcaagactccatctcaaaaaaaaaaaaaaaattttttttgacctttaccaacctatcctccaaaatttctttccctttgacttttgaaacactttttatggggtttttccctaatgtactgaaaaatctttccttgttccttcttttgaattctgatatggtttagctgtgtcccccacccaaatctcatcttgaattgcagcttccataattcccacatgttgtgggagggacctggtgggagataattgaattatggcagcagtttc

SEQ ID NO: 89876 - DNA, 1274 bp, Homo sapiens
tcccagctactcgggaggctgaggcaggagaatggcgtgaacccgggaggcggagcttgcagtgagccgagatcgcgccactgcactccagcctgggcgacagagcgagactccgtctcaaaaaaaaaaaaaaaaaaaaaaattgccctagaccctaaatcagggagacagacttgagcccactcctgtctccttgctgaccacttgcaataaagcctttcgtcaaaggcaggtgccatagtttttggctttagtgtgtaacgggcagtgagcccatttgcttgataacatttttactcctagttcattcaatattatttcaagataaaatgtagcctctgttaatagctactcttaaatcctatctcctaatcgaaaacttagctgtttcattctacttaagatttgctttttgttgtgttttgagacagggtcttgctctgttgcccaggctaaagtgcagtggcacaatcatagctcactgcaacctcaaattcctgggctcaagtgatcctcccacatcagcctcctgagcagctaagtctacaggtgcataccactacacccagctaattttttaaaattttctgtagagacagggttttgctatgttactcaggctggtcttgaactcctgggctcaagggatcctcccaccttgacctcccagagtatgaaattactggcatgccagagcgtgagccacttcacccgccaccctcactctacttaaggtttttggggccgggtgcagtggctcatgtctgtaatcccagcactttgggaggccaaggtgggtggatcatgaggtcaagagatcgagaccatcctggccaacatgatgaagcccatctctactaaaaatacaaaaattagctgggtgtggtggcacacacctgtaatcttagctactagggtagctgaggcaggagaatcacttgaacctggaaggcagaggttgtagtgagcgaagatcatgccactgcactccagcctggcgacagagcaagactccatctcaaaaaaaaaaaaaaaawtttttttgacctttaccaacctatcctccaaaatttctttccctttgacttttgaaacactttttatggggtttttccctaatgtactgaaaaatctttccttgttccttcttttgaattctgatatggtttagctgtgtcccccacccaaatctcatcttgaattgcagcttccataattcccacatgttgtgggagggacctggtgggagataattgaattatggcagcagtttc

SEQ ID NO: 89877 - DNA, 664 bp, Homo sapiens
tacgccaccaagcctggctaattttgtatttttagtagaaacggggtttctccatgttggtgaggctggtctcaaactcccgacctcaggtgatccacccgccacggcctcccaaagtgctgggattacaggcaagagccaccacacccagccgaagtgataggcactttaagcagagacccgaatgccaagaagctagccagcctgggggaagagcaatccaagcaggaaactacacgtgtacagagagtaaagcaggaatacacttgggcatgtttgaatatcagagagaaggccagtatcactgaagccgaattggcaagggggaatggcacaaaaagtcagaggcagaccctccagataaggcactggggattttcttctaagtatgatgttacaagtcatttttccctacccacacaaaatgtcttcctcttatagaatccttttcatatyaatgtgcataaccatccatccaatcatagaagtcaaaacaaaagaaaaccctggctccctcttgttacggtagatggccccacttctggcctacctaacaaaggaaacaatagctacaagacagaattccccattcagcttaccaacatcaaatttacaaacccatctgcatcctgaatacctttctcactctctcatcttgtgctct

SEQ ID NO: 89878 - DNA, 707 bp, Homo sapiens
  misc_feature (1)...(707): n = A,T,C or G
tgggagcgcctcacaacagctaccttngggacaacacgactttggaaggcctaaagtttgaaccaaaaatggagcccctgccgctctccccatatgggattcaaattgaaaagctacaaggtaaaataagagaagccacaggtgcagagttttcttcctgggggcaagcctgttacttttctttttttttttttattgtaaatatacttgtttttattttttatttatttatttatttttttattatactttaagttctagggtacatgtgcacaaagtgcaggtttgttgcatatgtatacatgtgccatattggtgtgatgcacccattaactcatcatttacattaggtatatctcctaatgctatccctcccctctccctccaccccacaacaggccccggtgtgtgctgtcccccttcctgtgtccaagtgttctcattgttcaattcccacctatgagtggaacatgcrgtgtttggttttttgtccttgtgatagtttgctgagaatgatggtttccagcttcacccatgtccctacaaaggacatgaactcatcattttttatggctgcatagtattccatggtgtatatgtgccatattttcttaatccagtctatcactgttggacatttgggttggttccaagtctttgctattgtgaatagtgccacaataaacatacatgtgcatgcgtcttta

SEQ ID NO: 89879 - DNA, 631 bp, Homo sapiens
cacactgtggttcctgccacctccacagggccctgcacctcccaagatccgacaagaaaggcagcaacagagaaaagtccatctccagcaaggcaggcatggggcaggctccggggcggggtggcaggtcacagcccagccagaagggcttagggaaggggtggaggggagaggaagaggatggacagaygtttgtggccacgttcactcaggccagttggtccagttcagcaccaccccctcctgtccgcaccagcctctgtcctgggttggtgctgagctgggagcacccccagggtgtgggagccacaagcccagttctgtctccctctcacacactgccctcggtctccccaccctcctggctgcagtctagtcctcaagcccccttcagccactgctggcgtccaacggggcctcagctcagcctatcagagacgccgtgggaatcacttcctattcatgaggccagagtagggcgagcgaccctcatttgtaaaagagaagatgactctcaggagctgacctggcccttgtcgaagcagacagggctgggtagacataggattgattgctcctttgccaagcgccagccccttggatgatgcccacatcccactggtaatcttct

SEQ ID NO: 89880 - DNA, 631 bp, Homo sapiens
cacactgtggttcctgccacctccacagggccctgcacctcccaagatccgacaagaaaggcagcaacagagaaaagtccatctccagcaaggcaggcatggggcaggctccggggcggggtggcaggtcacagcccagccagaagggcttagggaaggggtggaggggagaggaagaggatggacagatgtttgtggccacgttcactcaggccagttggtccagttcagcaccaccccctcctgtccgcaccagcctctgtcctgggttggtgctgagctgggagcacccccagggtgtgggagccacaagcccagttctgtctccctctcacacactgccctyggtctccccaccctcctggctgcagtctagtcctcaagcccccttcagccactgctggcgtccaacggggcctcagctcagcctatcagagacgccgtgggaatcacttcctattcatgaggccagagtagggcgagcgaccctcatttgtaaaagagaagatgactctcaggagctgacctggcccttgtcgaagcagacagggctgggtagacataggattgattgctcctttgccaagcgccagccccttggatgatgcccacatcccactggtaatcttct

SEQ ID NO: 89881 - DNA, 768 bp, Homo sapiens
tgtgaaacatggagaactaactccatgctggtttttaaaaaacacttttttaggtaaatactcatttttctataatttctaaatatcagcacctaattgaatgctttaaaaagaagataagaaagaatgaatttttattttcaaaaaggcatgctttttaaagaccaatttcaagtttgtacccttaaatttttgtacgtagacttaatacttgtaaatgttttatgtttagaatataatatagtatgtaaaactgctaactcagttttttctttatttccaaagttcatgtctagtgagtttttccccatgtttagttttatattctattttattgatatggtacgttgactaaactaacaaagtaatcttagttctgaagagaatacctaaacgtaaggactagaatttttaattttactctttatactgagggaagaaatgttaccttcataagaagaattagatgtaggtcttatgaaagttatagcgctctttacccaagataggaattatttaaaaagtctagagatgaagtccaaatttgtatattttggaaggctattcaaargacaaaatatattcagaagtcaagttgataccagtgactatagtcatttcactttactttgtcaagacatttaaacagatggtgtactaaattttattctttttaatttttttttaacggagtcttgctctgttgcttaggctggagtgcagtgatgtgatcatagtttactgcagccttgaacccctgggctccag

SEQ ID NO: 89882 - DNA, 575 bp, Homo sapiens
tagagttggtaggaggagagtttaaatgtttctgaatttattatttgggcagttccacaaaataaatttatttgttttcaattttcagygtagaggtcaactatgatacaataactaggatgttattcgtttagatttctgttgccctgtacccctaaatttggaaatgataaaataaactatggtgaattcatttagcagaatcctatcccatcattaaaaatgagggttataaatactgtacatggaaatgacaaccttcatcattcaagaaaaagcaggatatcttttgacataaaaatcaacaagagctgtcttatgagaaggattaaagtccatttaggaacacacttaaacatgatacagtggttgtggtagaattattaatgaattacttattctgtttccaaatttttattactttcataataaaacacataaattaaaaaattctgatgctcttacttctctcagtgacttcagttccatctcgtttgtttttcttggttacatccataccatagccacctgcaggaaaaatcagaaaccatgatagtcatacttatcattgtttt

SEQ ID NO: 89883 - DNA, 575 bp, Homo sapiens
tagagttggtaggaggagagtttaaatgtttctgaatttattatttgggcagttccacaaaataaatttatttgttttcaattttcagcgtagaggtcaactatgatacaataactaggatgttattcgtttagatttctgttgccctgtacccctaaatttggaaatgataaaataaactatggtgaattcatttagcagaatsctatcccatcattaaaaatgagggttataaatactgtacatggaaatgacaaccttcatcattcaagaaaaagcaggatatcttttgacataaaaatcaacaagagctgtcttatgagaaggattaaagtccatttaggaacacacttaaacatgatacagtggttgtggtagaattattaatgaattacttattctgtttccaaatttttattactttcataataaaacacataaattaaaaaattctgatgctcttacttctctcagtgacttcagttccatctcgtttgtttttcttggttacatccataccatagccacctgcaggaaaaatcagaaaccatgatagtcatacttatcattgtttt

SEQ ID NO: 89884 - DNA, 964 bp, Homo sapiens
caaatgagctttatctcatggtatatacaacatttaattctaaatggatcaaaggtcaaaatgtaaaagcttctaaatatgaaaattctaaaacttcctaaagaaaatacacgagggaaatttctgtgactttggagtagacaaaagatttcttagggcacaaaaggcatgacacacgaaagaaaaatactgataaattgcacttcatcaaagttaaaacatctggtcttcaaaagactctttagaaaatgtccagtttacaataatttgttaagttttaatcttatgttttatatactcgcgtatatgtattatatatctaaaaactagagtttaataataatttatattttaccttcaatagttatttaatattcatctgaagtgaaagttataaaaatattgagtgttaattctgtatctttgacatgtttatgtttatattattactaatctgtctgttattcttgaaattttccactattaaaatgtatataaatatcatgtagcaagataacaaattccatggaatattattcattaagaaacatagtatttaaagttatgtttatactgttattactagctgcataaaaaagatattaaaagatctaataattaaaatgctatcagtatatttttttcatgttggtacaaaactgggtatttttttccttgaaaagttgtgttaatttttttcaactgtagtgcatgttactagtatacattacatttgatattattcagaaaaataatctaatgaacatcataattatgatatttctactttattcaaggtagttgtccacctttaagagaaagagccyttttgcattttaaagatcgttgtcttagtgttcggaaatcatggcctttctctgaggcctagacagacaagaaactcctgtttgcataggaagactcaagctaaggcatcactctcatcagcagatttgtgtgatga

SEQ ID NO: 89885 - DNA, 703 bp, Homo sapiens
ggaacatatacacaaatgtgaccttcagactgggcagcatggagaagctcgttcactgggggtggaggcagccaggcaaagctggaggccccagggttgaagaggtcacatggcgtagaggggaaaacagggattagaggtctcaatgtcgtgtgcaggtcttagcccaggctctcccctatgcaagcaacctgaccatggcctgtaatgcccctgagatcatgtgagcccaggccatctcctgcgagtgctcccatcaactcctaggggttgggagaagccaccagctgaatggaggctcaggcccaaagccacttatatgtctccaaatagccaggggctggtttcttcggtagggctcagacatctggttggcttgcagggaaccaaatgccttagcctaatgccatcctcagtgaggccactgagattcatggaagatttaagttttaggtcaaagtctctgggtatagctgggcatggtagctcaggcctgtaatcacagcactttgggtggctgrggtgggcagatcacttgaggccaggagttcaaaaccagcctggctgatatggcgaaactccatctctactaaaaatacaaaaattaccctgatgtggtggtgcctgcctataatcccagctactcaggaggctgaggcacaggaatcacttgaacccaggaggcagaggttgcagtgagctg

SEQ ID NO: 89886 - DNA, 563 bp, Homo sapiens
ctttggccctcagggccacactcaatcccagaatagatcaagactctcttttaataacttcagtattaacttcatcggatgctttacatagcataaaatggacaattaccatccattcccagcatgatactctcccacagccatcgtgtgggcataaaataatattcagaattgaaataatctaattaaccttatctttaaaaatgggawaaaccactattttcttatcgatttttaaaaatctttgagttaaataagaagtaggattacaggtgactgaaaatgtcaagattcagtaatattctgtaaatgaggaaactgaaaatagaatataagcactagcttatatctttatttttatcctattatgataagtgataacaatataactatatgcaataatttaaattttgaaattcccaaactaaatgtaaaaaaaaaaactatgaatttctaatgaaaaatgaaaaagctaagccatgtatggtggcacatgtctatagtcccagctactctggaggccaaggtgggaggatcacttgagcccaggaggttgcagtgag

SEQ ID NO: 89887 - DNA, 589 bp, Homo sapiens
catgtacccaggtatgggcccagggtggacaggggccgtgcttacagggcgaggggccccaggtgagtggatactgcccgcaggggtgatgtgcccccggtgggctctgggcagtgtcccagtgctacccctcggccctgggaccttaggtgttcattaccatttagtcttgtttacagcctgggagtttctagtcargcacagctggtggggaggctccgtgcctcttctcctctgccacctccacccttgtgccctcctccacgctcccttctggatgcctcatgcacctgtatttcacgtgcaggacagggttccatggtctgtcagccaccacctactgagctgttcccacgaggcgcatgcctcccagccagtgggtcatcagcccatttcacgaatgggggcaggctcaggactgatgaactgcggcacagctcacccagccatgcgtggtgctccgccatgtggagaactatgttgcctcccctgcggaggccatcggtgagggggtgctgggccatgaggacttgggtgggctggggctgtgtgcagaatggcctcctgtttcttacacgccaaggcttcc

SEQ ID NO: 89888 - DNA, 691 bp, Homo sapiens
attttacatatgagcaactgagatatagagaagttaaaccactagcttatggtcagcaactagtaactgacagaccagggacttgacctctatgatatagtgccttttaatacacaatcttgggccgggcgcggtggctcacacctataatcccagcactttgggaggctgaggcaggcggatcacctgaggtcaggagttcaagagcagcctggccaacatggcaaaatcccgtctctactaaaaatacaaaaattagccacgcatggtgacgggcacctgtaatcccagctactcaggaggctgaggcaggagaatcacttgaacctgggaagcagaggctgcagtgagccatgattgcacccttgtacttcagcctgggtgacagagtaagactccatctccaaaaaaaataaaataaaataaaacaygatcttaaaccacactactagcatatatatatcttgtagattgcttctaaagttttacatatttatcattattattttctgctacatatgtttgttgcctatgcatagtgttgaatgcatgaaaatttcgcaataaccactctaatgggtaagaaaaatgaagctgaaaaaagttcccttagctactctgttaatttttgctctctggtttaaagaactaggactttgaagaaggagcctgaaaaaaaaaaatccttcaa

SEQ ID NO: 89889 - DNA, 756 bp, Homo sapiens
cctaactttcactttctgaaaatcactttctaatcaacaaccaaaaaaaaaaaaaaaaaatccctctatgaccatatagaaatcccaccagtttgaaagctaagtcaacgtaacggaaattgagaagactcaagaataaagacaaaacaattaagagtttggctaaacctgctactctaatgtttatattattgatgaatgacgatttcagaaacgttttactgcaagagcgtgacaatattttctgacggggtttgccactgaaacttctggccattggagaactttaaaaaacatgaaagatatccatgctgtatgtgcagaactttccagtaaatgccaaactccctcatttatgctacgtggctcacccaagaaaggcttccataaatatttatcgaattaaactgaagggatgacaaaaacccaatgatgtcttgacatccattccratcctatattctatcattcatccaataagcactgatcagaaaccactgaggcaccgcacaggagactaacagctattgcatggaatacacagaacaccctccatttgtcaaagggagaaggaaaagagaggcaagaacagctatggaagatccagactgagaaggaacttcaaaacaaatttttttacttctagcatataaaaaccaagtatcactacgatcacagtagtcaaaggatttataggagtgaagcttaatttggaagacgaaaatcatgtgactcatgatgataaaagattctggg

SEQ ID NO: 89890 - DNA, 983 bp, Homo sapiens
atttggaaattttgtgtctcccctttctaccttctaggtagctagtgggatcatgctaatccctactatatcctctggactatgcagttatgagaacttccaactcccagccccaatccttagtattttgtagattttttgcatttgtacctgacctgttgagactctgagaacaatcttttccaagcagctcatttacctccaggcctgcttggaaagaaaaaaaatctaaaacaaataatcctgtgacattggtggaagtatcagcaaaaagctgggggacattttgtttctcaaaatttaggcactgtgagtatttccggatgttagtatgaaatatgcttagatgctatcttttatgattttgacttagagttccatagaatcaggaagtaacaacagccagtttttcagtaaaactggctgtttattaaaaaagaaaaagaaagaaaaggaagggctcatgtcaacgttacattgaagtgcctgaaacctaggacagcgatcgctgaaatgacgaagtgaactggtttccggcctttcctatgaactgagaactaaacaccccaaatctccatcatgtggtctacaaagcacatcctttgcctggatctccgctgtggaacgtggctttaatatgcacaggaggtagccaggcgcagtggctcatgcccgtaatctcagcactttgggaggctgaggcaggtggatcactttaggtcaggagtttgagatcagcctggccaacatggggaatccccstctttactgaaaatacaaaaattagccaggcgtggtggtacgtgcctgtaatcccagctactcgggaggcttaggcagaatccaggaagtagaggttgcagtgagccaagattgcagctctgcactccagcctggacaacagagactccatctcaaaaaaaaaaaaaaaaaaaaaaaaaaaaaaaaaaaattcacaggaggtggacaactgtggtagatag

SEQ ID NO: 89891 - DNA, 983 bp, Homo sapiens
atttggaaattttgtgtctcccctttctaccttctaggtagctagtgggatcatgctaatccctactatatcctctggactatgcagttatgagaacttccaactcccagccccaatccttagtattttgtagattttttgcatttgtacctgacctgttgagactctgagaacaatcttttccaagcagctcatttacctccaggcctgcttggaaagaaaaaaaatctaaaacaaataatcctgtgacattggtggaagtatcagcaaaaagctgggggacattttgtttctcaaaatttaggcactgtgagtatttccggatgttagtatgaaatatgcttagatgctatcttttatgattttgacttagagttccatagaatcaggaagtaacaacagccagtttttcagtaaaactggctgtttattaaaaaagaaaaagaaagaaaaggaagggctcatgtcaacgttacattgaagtgcctgaaacctaggacagcgatcgctgaaatgacgaagtgaactggtttccggcctttcctatgaactgagaactaaacaccccaaatctccatcatgtggtctacaaagcacatcctttgcctggatctccgctgtggaacgtggctttaatatgcacaggaggtagccaggcgcagtggctcatgcccgtaatctcagcactttgggaggctgaggcaggtggatcactttaggtcaggagtttgagatcagcctggccaacatggggaatccccctctttactgaaaatacaaaaattagccaggcgtggtggtacgtgcctgtaatcccagctactcgggaggcttaggcagaatccaggaagtagaggttgcagtgagccaagattgcasctctgcactccagcctggacaacagagactccatctcaaaaaaaaaaaaaaaaaaaaaaaaaaaaaaaaaaaattcacaggaggtggacaactgtggtagatag

SEQ ID NO: 89892 - DNA, 650 bp, Homo sapiens
tgatgggttgataggtgcagcaagtcaccatggcacacgtttacctatgaaagacacctgcacatactgcacatgtaccccagaatttaaaatacaatacaataaaataagagagatagtgtgatatgtaattggtataccagacctctctcttggtcccagattctctcttcagggatgtggcttcacagatctattataacagatcacaactccatgacrtaaataaaatatcaatggacgtaataaaatatatccatagtgacaatattgtgcttggcacagtaaacacacacacccccaccaccccacagtattacagaatctaacaatggtgagaagcataatattgtcaactgtataaaatacaaaagtaaagtcaagtaaataattttttaaaagatcatcaaataacactttaaaaaggattgtgattagctgtttaaaccatgcaatcctgggaaagcaggcttttcctgaagttctgagtacaatactattaaagaaaatgcaaagagttcatgctaagcactcagtccttcgttttactctccttgtcctaaatatttttacctaatgaattagaatccagaagattggatccattaactttccagagggcttcctggagaagtgcctctcccctcagc

SEQ ID NO: 89893 - DNA, 650 bp, Homo sapiens
tgatgggttgataggtgcagcaagtcaccatggcacacgtttacctatgaaagacacctgcacatactgcacatgtaccccagaatttaaaatacaatacaataaaataagagagatagtgtgatatgtaattggtataccagacctctctcttggtcccagattctctcttcagggatgtggcttcacagatctattataacagatcacaactccatgacataaataaaatatcaatggacgtaataaaatatatccatagtgacaatattgtgcttggcacagtaaacacacacacccccaccaccccacagtattacagaatctaacaatggygagaagcataatattgtcaactgtataaaatacaaaagtaaagtcaagtaaataattttttaaaagatcatcaaataacactttaaaaaggattgtgattagctgtttaaaccatgcaatcctgggaaagcaggcttttcctgaagttctgagtacaatactattaaagaaaatgcaaagagttcatgctaagcactcagtccttcgttttactctccttgtcctaaatatttttacctaatgaattagaatccagaagattggatccattaactttccagagggcttcctggagaagtgcctctcccctcagc

SEQ ID NO: 89894 - DNA, 737 bp, Homo sapiens
attacacagcactttgtgagtctctatatattttggaggtaggatataccacaaacagaatgtggttctgacccattcatttgttaaggctggcaggtttgagtggggtccagagcaagagaaggctgtgcatcagtttccagtttatttctttttattgtgaaagggatacaaaagtacaaatagccagcacacaatttttgataaaaagacaggtactgcatttaaatgaagaatgwaatatgcaaagatttgagagcagggaagccctggtgagaatgtctgtatagcttaggagagataggacacaaaatagtctactgtttaataaatgaaggcacagtagttatctaacctactcagttttacggtatagccaatggaacaataagcattttaaaacaagcagttttacttagatttagatacccaagaacaatatttttaagagagagtattaatatagtctatgttatagaaaataaaatatacacactgatttgagattaattggcacacattgaacatatagatgcacccatggcccagaataggaagaagtgtttattctaagaaaagaattatgtttaaactatttatataaatgtaaggggaaaatccaaaactcccttttttgataaggcatattgcagattttaacaaagaagactggaagcatttgagggaaccaagatttattgctagaagtttctttctttctctcctaaactcagcta

SEQ ID NO: 89895 - DNA, 737 bp, Homo sapiens
attacacagcactttgtgagtctctatatattttggaggtaggatataccacaaacagaatgtggttctgacccattcatttgttaaggctggcaggtttgagtggggtccagagcaagagaaggctgtgcatcagtttccagtttatttctttttattgtgaaagggatacaaaagtacaaatagccagcacacaatttttgataaaaagacaggtactgcatttaaatgaagaatgaaatatgcaaagatttgagagcagggaagccctggtgagaatgtctgtatagcttaggagagataggacacaaaatagtctactgtttaataaatgaaggcacagtagttatctaacctactcagttttacrgtatagccaatggaacaataagcattttaaaacaagcagttttacttagatttagatacccaagaacaatatttttaagagagagtattaatatagtctatgttatagaaaataaaatatacacactgatttgagattaattggcacacattgaacatatagatgcacccatggcccagaataggaagaagtgtttattctaagaaaagaattatgtttaaactatttatataaatgtaaggggaaaatccaaaactcccttttttgataaggcatattgcagattttaacaaagaagactggaagcatttgagggaaccaagatttattgctagaagtttctttctttctctcctaaactcagcta

SEQ ID NO: 89896 - DNA, 737 bp, Homo sapiens
attacacagcactttgtgagtctctatatattttggaggtaggatataccacaaacagaatgtggttctgacccattcatttgttaaggctggcaggtttgagtggggtccagagcaagagaaggctgtgcatcagtttccagtttatttctttttattgtgaaagggatacaaaagtacaaatagccagcacacaatttttgataaaaagacaggtactgcatttaaatgaagaatgaaatatgcaaagatttgagagcagggaagccctggtgagaatgtctgtatagcttaggagagataggacacaaaatagtctactgtttaataaatgaaggcacagtagttatctaacctactcagttttacggtatagccaatggaacaataagcattttaaaacaagcagttttacttagatttagatacccaagaacaatatttttaagagagagtattaatatagtctatgttatagaaaataaaatatacacactgatttgagattaattggcacacattgaacatatagatgcacccatggcccagaataggaagaagtgtttattctaagaaaagaattatgtttaaactatttatataaatgtaaggggaaaatccaaaactcccttttttgataaggcatattgcagattttaacaaagaagaytggaagcatttgagggaaccaagatttattgctagaagtttctttctttctctcctaaactcagcta

SEQ ID NO: 89897 - DNA, 844 bp, Homo sapiens
tgaaatgtaaaaactcttcccatgattctgatgtgcagtcaagactgagaacctctgaaaagagaaagacagtattttcaataagaggaatcatggttggacagtgactcaactgaattctctctttagctgtcttctcttgcaccctatatacttgcagctccatgaattgaggggtttggtctcgtttctgacagtatctgagagtccagtccaatgcctagctgagtaagtgcttaaccaatatttgttgacaacaggaaaatggtttctgaaagataacgtaatttaatcttgtgtctttaacttttataagtagatggcttttaaatctacatctctcatatcctcttatcaacaattggatctttaaactattcacaatggttttaagtcttttatccttaaatataatgtaggaacactaaggagagaacttatagggtaaattggaaggcacagaaatgccatcaggaggtaaaaaccaagaaaaaagtgttmttgtgttgatgagaaatatactcgtttataatgacatacattggcttattcatataattaaacgtactggcttataatgacaaaactctatttcaattcatgtacactcacactaagggtcacaggttgcatatttaacgaatagcaaaccgaactagatcccaaaatttttggactctaagtctattgctactacaccatggcaatgggaacagtttaatattgtctatataaccaaataatgctgggagccaagtgagatttcagtaatcactaaatatattgatgaaaagaaatcagttttgtatttcatcattttgagccatagttttgccttaatcag

SEQ ID NO: 89898 - DNA, 844 bp, Homo sapiens
tgaaatgtaaaaactcttcccatgattctgatgtgcagtcaagactgagaacctctgaaaagagaaagacagtattttcaataagaggaatcatggttggacagtgactcaactgaattctctctttagctgtcttctcttgcaccctatatacttgcagctccatgaattgaggggtttggtctcgtttctgacagtatctgagagtccagtccaatgcctagctgagtaagtgcttaaccaatatttgttgacaacaggaaaatggtttctgaaagataacgtaatttaatcttgtgtctttaacttttataagtagatggcttttaaatctacatctctcatatcctcttatcaacaattggatctttaaactattcacaatggttttaagtcttttatccttaaatataatgtaggaacactaaggagagaacttatagggtaaattggaaggcacagaaatgccatcaggaggtaaaaaccaagaaaaaagtgttattgtrttgatgagaaatatactcgtttataatgacatacattggcttattcatataattaaacgtactggcttataatgacaaaactctatttcaattcatgtacactcacactaagggtcacaggttgcatatttaacgaatagcaaaccgaactagatcccaaaatttttggactctaagtctattgctactacaccatggcaatgggaacagtttaatattgtctatataaccaaataatgctgggagccaagtgagatttcagtaatcactaaatatattgatgaaaagaaatcagttttgtatttcatcattttgagccatagttttgccttaatcag

SEQ ID NO: 89899 - DNA, 844 bp, Homo sapiens
tgaaatgtaaaaactcttcccatgattctgatgtgcagtcaagactgagaacctctgaaaagagaaagacagtattttcaataagaggaatcatggttggacagtgactcaactgaattctctctttagctgtcttctcttgcaccctatatacttgcagctccatgaattgaggggtttggtctcgtttctgacagtatctgagagtccagtccaatgcctagctgagtaagtgcttaaccaatatttgttgacaacaggaaaatggtttctgaaagataacgtaatttaatcttgtgtctttaacttttataagtagatggcttttaaatctacatctctcatatcctcttatcaacaattggatctttaaactattcacaatggttttaagtcttttatccttaaatataatgtaggaacactaaggagagaacttatagggtaaattggaaggcacagaaatgccatcaggaggtaaaaaccaagaaaaaagtgttattgtgttgatgagaaatatactcgtttataatgacatacattggcttattcatataattaaacgtactggcttataatgacaraactctatttcaattcatgtacactcacactaagggtcacaggttgcatatttaacgaatagcaaaccgaactagatcccaaaatttttggactctaagtctattgctactacaccatggcaatgggaacagtttaatattgtctatataaccaaataatgctgggagccaagtgagatttcagtaatcactaaatatattgatgaaaagaaatcagttttgtatttcatcattttgagccatagttttgccttaatcag

SEQ ID NO: 89900 - DNA, 844 bp, Homo sapiens
tgaaatgtaaaaactcttcccatgattctgatgtgcagtcaagactgagaacctctgaaaagagaaagacagtattttcaataagaggaatcatggttggacagtgactcaactgaattctctctttagctgtcttctcttgcaccctatatacttgcagctccatgaattgaggggtttggtctcgtttctgacagtatctgagagtccagtccaatgcctagctgagtaagtgcttaaccaatatttgttgacaacaggaaaatggtttctgaaagataacgtaatttaatcttgtgtctttaacttttataagtagatggcttttaaatctacatctctcatatcctcttatcaacaattggatctttaaactattcacaatggttttaagtcttttatccttaaatataatgtaggaacactaaggagagaacttatagggtaaattggaaggcacagaaatgccatcaggaggtaaaaaccaagaaaaaagtgttattgtgttgatgagaaatatactcgtttataatgacatacattggcttattcatataattaaacgtactggcttataatgacaamactctatttcaattcatgtacactcacactaagggtcacaggttgcatatttaacgaatagcaaaccgaactagatcccaaaatttttggactctaagtctattgctactacaccatggcaatgggaacagtttaatattgtctatataaccaaataatgctgggagccaagtgagatttcagtaatcactaaatatattgatgaaaagaaatcagttttgtatttcatcattttgagccatagttttgccttaatcag

SEQ ID NO: 89901 - DNA, 844 bp, Homo sapiens
tgaaatgtaaaaactcttcccatgattctgatgtgcagtcaagactgagaacctctgaaaagagaaagacagtattttcaataagaggaatcatggttggacagtgactcaactgaattctctctttagctgtcttctcttgcaccctatatacttgcagctccatgaattgaggggtttggtctcgtttctgacagtatctgagagtccagtccaatgcctagctgagtaagtgcttaaccaatatttgttgacaacaggaaaatggtttctgaaagataacgtaatttaatcttgtgtctttaacttttataagtagatggcttttaaatctacatctctcatatcctcttatcaacaattggatctttaaactattcacaatggttttaagtcttttatccttaaatataatgtaggaacactaaggagagaacttatagggtaaattggaaggcacagaaatgccatcaggaggtaaaaaccaagaaaaaagtgttattgtgttgatgagaaatatactcgtttataatgacatacattggcttattcatataattaaacgtactggcttataatgacaaaactctatttcaattcatgtacactcacactaagggtcacaggttgcatatttaacgaatagcaaaccgaactagatcccaaaatttttggactctaagtctattgctactacaccatggcaatgggaacagtttaatattgtctatataaccaaataatgctgggagccaagtgagatttcagtaatcactaaatatattgatgaaaagaaatcagtttygtatttcatcattttgagccatagttttgccttaatcag

SEQ ID NO: 89902 - DNA, 526 bp, Homo sapiens
tgagaaataatgagtgatttatctgccctttgggtttcaaggtttctaacaacactttgaaatggaaatccccagagacagtttgtaacagctgatctttggtacattctctgtggcataaattttgcatatttttgtcatatttaaattttatatgagctcaaaaggagataaaagttggcctgattttttcagatgacaggtctgaaactcagagaattacaaagctaattcgtgccgtaacttgaacagttttctggatgcaagcacatgtgatttctactacaaccacagctgctgggaagggaagaaagacatttgttgagtgccgacaatgtgtcaggtataaagctgcatcatttaatgctcattctgaatgttagacagattatctcctcaatatcacagaggttaaatcagaygttggctaactacagctgagcagcaaaattcagccaaccacctgtttttgcaaattaagttttattggccctcagccatcctcattcatttacatattgtctct

SEQ ID NO: 89903 - DNA, 535 bp, Homo sapiens
caaaaatttcacaatgtatcactctggaaattttctgaagccttaacacagatttggaagacagcatctctttctgactgcatgactccagaagttggtggaaactattaaactatactggagcagcttcttcttgattctacttcatgaattattgttaagtagatttgtggaagcaggtctggccagaagtaacatggtccattaccccaggagcattgcatttgaatctaacagtcctagaggagttcctgcagttgtaaacactttaatttgcttatattagtgcagaataatagtgcctaacccatgttcttttgaaaatcaaatgaagtattatcataaagtatatatcaccatgacatagttattactgagtaaatggtaataatcataataatgactagaaacacagtcattctcagttagtccagaacactgtaaaaacagtttgctgagcctggtgccatccactcttttgagattaagtacatatttaagtgaggcccaaactgggcaattatatgaygggttg

SEQ ID NO: 89904 - DNA, 1968 bp, Homo sapiens
gggggtcccgcccaggtcttgcatcctcgttgtagaagcagcagctctttccttctaaggcctgagtgaggagggggtcgraggtgcgggcctggtgaccaggggtggctgctggggctggagtggcagccggacgggtcctccgatgacttttctttcttagaaccacctgagtgtggagacaggcatcgtctatgaggcgctccctcaggcctcctcggggtggctactctcaggactgaatgagctaagccttttccctcactttatactgtttaagcctcacaacctgtccttattccattttacagctgagaacactgaggccaggggtagggaagaacttgcccagtgctgcccagctccaaatcaggtggccagatgtccacagccaagttccccaagccctcctgccacccacatcctgaccccagggctctgctccccgacatagtgataacagggctccaccagcccccagggtgccgggaagccagggcagctggcaaggtgcaggtctcctgcccttccccggcccactgggggcccatctggatggtgctactccctcaagtagattcagtccagctctgcctggaggccccaagggcaggcagcccgagcaaggggcttcctagcaggtgagggaggccaaggtctcacctatgggctgagttggggggagagcatctcaggctccggaaccttccagggattggggactgggtccaggagtgatgtctgcagagaggaaatggaagaggatcccaaagccaggcagcccccactgcgtggaggacgaggaaggggaggaggggagagaggagtgggtgggtttgcccctccagccccgggagccttgggtgggtgacgcataaacaatttctgcccggagcagacgctgtctgggagcctggaacggcacccctgctttccctgcccctctccaagtcccagccatgggccactcacacatgtaggtcactcttcagtgggtcccatgggacccgtccaggtgccagcctcccagctcctgtgatggtgccccttccaggtatgccccccaaatgccctgcccccaaccagagtcaatgatttcctccttacagaaacacagctgcagaatccctcaatcgtgcttaagctactgggctttggaggacgaggactcttgggcacattggcctgctggagggtctctgctgcccttggccttggcagagctgcctgggccttctgagcaggtgggccgccaggccctgagcattcctgagaacgctgacccctggggaaatggcgggcagagaggatccgagaggcacgcgtctgtgtcgcaaccaggactggagcctgcatctttcccacaggtgccttctggggcctcagtattcccatctgtccagtggggctggagtcccccaaacaccttcttacaaaatgcttttgtaatgctcgatccacacagcatccccaggacgtggggcggcactggactggaggtcccgggattttacctcctccagtccttgccattgtcctggcctccacagtagagctcaggcccgttgtgtggatgagaaaatcaagacctgggagcagaagcctcttgcctgacctactgtgtttgtaagtggtgggctgggctgcagagctggacccacagggcccggagtgggtggcgggtgacatgtgcttgtgcttcgggggaacccaggcagagccgttcccaagagctaagtgtggggggccaaggtctttgtcaccacctcccacagccgaaagtctaatggtgaaacactaatttgcaaatagcatccagccctccggctgctggcccagacttggagatggagccgtgacccagcagagggaagtcttgcgttccccattccttggacgtgtcaccctctgcagagcgcacagccagggagcccatgtgggtgggtaggacgtggagactctgccctg

SEQ ID NO: 89905 - DNA, 2353 bp, Homo sapiens
ccctgtcctgcgtctgtcccagagcttgtcctgtgtagacctgctctcctggcagagcgtttatttccattctcttcaaacagaagctgcccagcgatgctggaattgggagtttggatgaaaacggctctcactgtcaccttccagccctcctcactttacccaccctctgcctgggctccctgtcgcttttgatatcctttttttttttcttttttctttctttttattgtggtaaaatacgcataattcaccatcttaccatttttaagcacacagttcagtggccctgagcacattcacctgacgctgcggctgtcacctccctccatccacagaagtctccatcttccccactgaagctctgtcctcatggaacactcacacccctgccccagcccctggcacccacctttccacctccagtctctgggcgtgaagactcacacgcgggtttgtcctttggctgcctgcacctggctgcggcatgccagtgtcttccttccagggacatcaccctcccagcttccagccaggtcacagctcagcagctccccagggccttcgggccttcccttcccaagacagactctcctgagcccctcagcccccgagctcctccctgcgaggggtgctttcagctgcctgcgttggaagtggccaacgccaggcctggttcccttggcagaaaacagcctcaccgtctctcagaagaccccagggagggcgggtgagggtggcgatggcgggacgcaggcggggagccctcagccctgccagctagcgggcagcacggagcttgccagggcacgtcagcagcctcagaaaggtcagccccatcagcaggtccaaccagagagcggcatttgaaatgtgtgtgtgcacagatttatgtgcagggatgttcatcacagcattatttataataaaaaattggcaccaactcacacatccaatcagagaagaaaggtgaggtgaatgatggtgcatccgagctctggaatacaccgtggccactgaacatgagatttatgaggggtactcggacttgaaaaaatgttcattccataaggtcaagcagggaaaaagcagaatgcaagcccatgtatgtcccatcagccctattttgaaattcaataaaataaagcatttagccagacggagagcacgggccgtcaaacgtcccaggctgggctggagccccatctgcgcagggccccacagggatgcatgctgagggcttcacagaggtcctccaccaagaggtggggggacgggggccttgggggaatgaggtggggtcccaaggtgggctcaggtacagtcaaggccttggactgcaccaaagtgattcagctcacggtcagctcagaaaaggcacgcaccagcctcctcctcctcctcctccctctctctgtctctttctttgtctctctccatctctgtctctctgtttctccttccgtctgtctctccttccctctctctgtctttctgtctctttctctgtctttgtctctctctctctctccattgtctcttcctcatccactagaatgacacaataagcaggtttggctctggttgaattagtttcactaaattttacaaaaataaacacccacaaaactttggtcccatttttaagcacaaacacctgcatgggtctcggggtgtcggygcagtttgcctgggtttggggttcctgctggacgaggcggcctcctgcagtggccgagtaagcctggggcagagccgcggacacccgagaggttccgcgcccgcagtgcaggcgccacctccagcccgcggtgtccgagacaggcccccttcccccagaaaaggacataatcctgatttaatcgggaatcttcagtaggtacaagcgggctctgaaagggtgatgtggaaggaaacagccattctgagcacatttgggttctcattgttcgggaaaagacacagagggacccaggccgaggttggtggagccaaacaaaaccggagtggagctttttccagacggtgcttcccaggtctggctgattcaggtgtgggaaggaggctgccccaggccgttcccaggtagcagtgaagtcgagccccgtgcctggttgaccgaacctacctccacgtcagggagtgactgaaacagctccccaggtggaaagagagctggttctccgtccccacctcggaaggccttcggccccagcgttggtgtcccgccctggccccccttgggctcatgttcacaggaattcatcatttcccagccgctagattactctggggctgattaaattagcgaatgcaatcacaatctgaagcaagttaattgagagaatttatt

SEQ ID NO: 89906 - DNA, 2353 bp, Homo sapiens
ccctgtcctgcgtctgtcccagagcttgtcctgtgtagacctgctctcctggcagagcgtttatttccattctcttcaaacagaagctgcccagcgatgctggaattgggagtttggatgaaaacggctctcactgtcaccttccagccctcctcactttacccaccctctgcctgggctccctgtcgcttttgatatcctttttttttttcttttttctttctttttattgtggtaaaatacgcataattcaccatcttaccatttttaagcacacagttcagtggccctgagcacattcacctgacgctgcggctgtcacctccctccatccacagaagtctccatcttccccactgaagctctgtcctcatggaacactcacacccctgccccagcccctggcacccacctttccacctccagtctctgggcgtgaagactcacacgcgggtttgtcctttggctgcctgcacctggctgcggcatgccagtgtcttccttccagggacatcaccctcccagcttccagccaggtcacagctcagcagctccccagggccttcgggccttcccttcccaagacagactctcctgagcccctcagcccccgagctcctccctgcgaggggtgctttcagctgcctgcgttggaagtggccaacgccaggcctggttcccttggcagaaaacagcctcaccgtctctcagaagaccccagggagggcgggtgagggtggcgatggcgggacgcaggcggggagccctcagccctgccagctagcgggcagcacggagcttgccagggcacgtcagcagcctcagaaaggtcagccccatcagcaggtccaaccagagagcggcatttgaaatgtgtgtgtgcacagatttatgtgcagggatgttcatcacagcattatttataataaaaaattggcaccaactcacacatccaatcagagaagaaaggtgaggtgaatgatggtgcatccgagctctggaatacaccgtggccactgaacatgagatttatgaggggtactcggacttgaaaaaatgttcattccataaggtcaagcagggaaaaagcagaatgcaagcccatgtatgtcccatcagccctattttgaaattcaataaaataaagcatttagccagacggagagcacgggccgtcaaacgtcccaggctgggctggagccccatctgcgcagggccccacagggatgcatgctgagggcttcacagaggtcctccaccaagaggtggggggacgggggccttgggggaatgaggtggggtcccaaggtgggctcaggtacagtcaaggccttggactgcaccaaagtgattcagctcacggtcagctcagaaaaggcacgcaccagcctcctcctcctcctcctccctctctctgtctctttctttgtctctctccatctctgtctctctgtttctccttccgtctgtctctccttccctctctctgtctttctgtctctttctctgtctttgtctctctctctctctccattgtctcttcctcatccactagaatgacacaataagcaggtttggctctggttgaattagtttcactaaattttacaaaaataaacacccacaaaactttggtcccatttttaagcacaaacacctgcatgggtctcggggtgtcggtgcagtttgcctgggtttggggttcctgctggacgaggcggcctcctgcagtggccgagtaagcctggggcagagccgcggacacccgagaggttccgcgcccgcagtgcaggcgccacctccagcccgcggtgtccgagacaggcccccttcccccagaaaaggacataatcctgatttaatcgggaatcttcagtaggtacaagcgggctctgaaagggtgatgtggaaggaaacagccattctgagcacatttgggttctcattgttcgggaaaagacacagagggacccaggccgaggttggtggagccaaacaaaaccggagtggagctttttccagacggtgcttcccaggtctggctgattcaggtgtgggaaggaggctgccccaggccgttcccaggtagcagtgaagtcgagccccgtgcctggttgaccgaacctacctccacgtcagggagtgactgaaacagctccccaggtggaaagagagctggttctccgtccccacctcggaaggccttcggccccagcgttggtgtcccgccctggccccccttgggctcatgttcacaggaattcatcatttcccagcckctagattactctggggctgattaaattagcgaatgcaatcacaatctgaagcaagttaattgagagaatttatt

SEQ ID NO: 89907 - DNA, 744 bp, Homo sapiens
tgcttccccctccatgctgcaccttcggctctacgaagccagagaggcaattccaccctcatgttcaactctaaaatgagaccttggaccttggtatgcaccaccggggacccacgtgggccacacagcatctctgagtggacacaccgctgcagctgccgtgtctgtgtcccaaggcccctgggctttccctcctggccccgccatgggtgcgtggcagctcaacgctcgctccccatggagggaatggggtggaggtcagctctcacggcccagctaccagccagtcccagtggacagttaggggctggatgccaggcacagaggagccagcctggaagaccacaagcccttaactgtgttgccccaagacatgcggccccagggagcgcagcctgtgagcaggcacagccccctgtgccatcccctccgccaggcaccctggggggctgttgtgaggatcaagagatcagagtccctgtaggtccaggcagggaggggctgcagtrgaggagcttccatccagctaagggaccctccttcccgggcagctgttccaggggtgctgacccagctcactgagaggcctggggctcagctcctccctgccctcctcgcagccaagttggcacctgcagaccgggtaacctgagccactcctgtgcgccggtgctgctgctttttttaagaaaagagggagccctccccttcaataattgatgaaagatattaacaattgaatcc

SEQ ID NO: 89908 - DNA, 633 bp, Homo sapiens
ctgtaactggcataaataatttggtaagtaacccaagtgactctgaaaacatacaactccactcactggagcacaagtacatgaaagtactagcacctgatatcgatcagaatgttttacagagggaatgagggacagtatttaatcctctaaattggttagtcaattggttaagtggaagctggttaaaataattctaactgaacactaacccagtcttcttagagattccagagttttctctctagaaaatgtacctcagtattacggtcccctcctgaaagcccgttaatggcctcaagataaaaccaagctccgtggacagaatgatatttgagagatgaaatttaacttgtcaaggaacacttcccttcaggttatttttgattgagttctgaatattttagaggaaaatattaattatggaaataatgcaggcttggattgatgtttcctgctccaaggagaatttagatttgcctctggcagtggctaggggcactagcaatgaaacttcacattaggcygtttatagtgattgagtccctaggacaaaagactatttctggttcactgtcccatcttgaatggaggccttaaggtccccagttcaaagcgtgtatggtttactgt

SEQ ID NO: 89909 - DNA, 658 bp, Homo sapiens
aggttcagatgggaaccaccatgatatgcagcctaaaggagaaaagacttgggtggatataatgttattgaaaatgttattggaaggatgataaattaggttaacgacagcccccaaggaagtagaataagaatgttgagtagaagttactaggagatatttttgaccaatctaagaaatcacattctaaaagaggtatctaaagatggtatagctttgtctgagacgtagtagtttcygtaacactgaaggtatcagacatgggttagatgaacacttgggggaatattacaaagaatatattgatactggctatatagtaacactagattatttttacatgttttgcaaccctgagaggatgtgattccagttttgcatggccacgtgcttgggatccctatgtcccctactataacacacccagtcttcaccctccgttgtctccatttttactttctccaacttgtaagactgattcttattttaatttttgtcttctagtctgaaattgtatcatttaaaggagatagagtcctcctctgctgtccatattcagcattcagtaaacctttaataatacagtatacaaaaacagatagttttataggagaagagtgttttgtacaagctaggtactccatcaatgtattcatgc

SEQ ID NO: 89910 - DNA, 406 bp, Homo sapiens
aaaaaaaaaaaaaaaaaaaaaaaaaaaaaaacaaccaccaccacccatgctttaagaacatgcatttctgttgcactataaaatataggagataggtcttgccactgagcttagaaaaagaaaaaaaaaaaaaaagacagaatatgagagacgggaaaataaagtgacttaggaatcccaattactgccttatgaaccctgtgaggaccctcttggtctgaggattaccagcaggaaaccagaatgtgctgcttgtcctctgagtttgaggctgaagtctctgtccttcaccggcaagatgggccaccgaaccatctactttcccttggtatttatgactgtgagtacctttgaatgagggccagagggggttgagggtctaggtgccaakggaggggcatgaaaa

SEQ ID NO: 89911 - DNA, 933 bp, Homo sapiens
aaaacaaaactaggccaggcacggtaaccggggcctgtaatcccagctattcggaggctgtggcaggaaaatcgcttgaacccgggagttagaggctgcagtgagctgagactgcgctattgcactccagcctgggtaacaagagcaagacttcatctcaaaaaaaaaaaggctggccacagcggctcacgcctgtaatcctagcactttgggaggccgaggcaggtggatcacttgagttcaagagttcgagaccagcctggccaacatgatgaaaccttggctctactaaaaatacaaaaattagctgggtgtcgtggcgggtgcctgtagkcgcagctacccgggaggcggaggcaggagaatcctttgaacccgggaggcagaggctgcagtgagttgagatggtgccactgcactccagcctgggtgacaagaacaaatctgtctcaaaaaactaaaaaaaaaaaaaaaaaaaaaattatacatggagatatgaaaataaaaacataatggggcaaaaaaataaaaccaataaaaaagatttatttttagctgaaagtaatccttcctcagtatttaatctatctcttttcccatgaaaagggagctaaaggaagtaacacatcatgttttaaaggccaggccaattgctcatacctgatgtccactctaagcttaggataatactgagacacatatttcctgatgagactgtaggaagcttctttaggttcacaaaggcgagtaaaggccagtgggaggacatcctccaattttacttgtggttctggatccactgcagagctcctattctgaaaagtaattatcaaaaattatgatcattatagaacgtaaatgtttctacatacaactcaagggctttcctcagttgattaccaaatttgtcaattttatggcaatttctttgat

SEQ ID NO: 89912 - DNA, 702 bp, Homo sapiens
tactgttaccttagtgtcataccttctgggaagactttcctgatttcctaaaaccaacttagatatattttccatgttcaagcacaaaaccctcttccttctccttagcagttaaactacattttaatagtttgttggttatctgatttttccactagactgtaagctccacaaaggtagagactgtgtactctaactccctgcattaacactatgcctggcacatttgatgtgctcagtaaaaattttttgcattaatatatgaatgaaaagtccaacagaagaaatgtgcaaactattttttcaatatctcatctttttttaaggctcaaggttttacttagactgtatggaaaagtaaaataaaattgatcactttaaacaaattatataaattccattctcagctttgtcttcagaacctcccaagcttgctccagaaacttgtcttacttcagaaatttccactgygtttctaaaacacaaaacagctttcttttaagacatctggagttagtgctgtttttaatcaattcagtatacttttgagcacctaccagcataaagcagctatcgtaaaaggtatggataacaaagagatgattaagacccgtcgtttgcccgctaggaaactcaagttattgaaagacaaagaaaaaaataagttacaatgtattgcaggaatgtggtacggcgtattgg

SEQ ID NO: 89913 - DNA, 702 bp, Homo sapiens
tactgttaccttagtgtcataccttctgggaagactttcctgatttcctaaaaccaacttagatatattttccatgttcaagcacaaaaccctcttccttctccttagcagttaaactacattttaatagtttgttggttatctgatttttccactagactgtaagctccacaaaggtagagactgtgtactctaactccctgcattaacactatgcctggcacatttgatgtgctcagtaaaaattttttgcattaatatatgaatgaaaagtccaacagaagaaatgtgcaaactattttttcaatatctcatctttttttaaggctcaaggttttacttagactgtatggaaaagtaaaataaaattgatcactttaaacaaattatataaattccattctcagctttgtcttcagaacctcccaagcttgctccagaaacttgtcttacttcagaaatttccactgcgtttctaaaacacaaaacakctttcttttaagacatctggagttagtgctgtttttaatcaattcagtatacttttgagcacctaccagcataaagcagctatcgtaaaaggtatggataacaaagagatgattaagacccgtcgtttgcccgctaggaaactcaagttattgaaagacaaagaaaaaaataagttacaatgtattgcaggaatgtggtacggcgtattgg

SEQ ID NO: 89914 - DNA, 853 bp, Homo sapiens
cacacacacacacacacacacacacacacaccctagctgtgtctatccaaacacctaatctccttagcactcatccatggtctcagtgcttactcagacatgggtgtctgtgtttgtctaatcaaggtaaaccaggctgggaaaggactggtattgctttgaagcttttactaaggactgacataggttgggcttgaaatatgacctgaacagagcagttttgccatttgaatgtggagccttatattgaataaactgaaacttttccacttggttttttccatctctttggagaacaggactggacactaaagcaggctctggcaggagaatgtcctggtcttgcagaatcttctggttgctaaggctgaggacacagccccactgtcctttctctggcaacaaaggacatttgtcacatgttggggcgacttatgtttctaatttgggacttaactgcactagtaaaagacagcaaatgtggaatcagtagaaaggtagagattgtgcatttgaatcaagactttcttccacttcacattaaagtgtaaaaacttaatgctttgcatttgaataccttctgataggtggctaggtgtctcacataagcgtaaaagatgagtaatgcaggtggtattatcattcttatgggcaagaaggagaggctgtaaatcaagttaattgtataaaagcataaagctttggggacgaccagtttaaggtcacacagggagttaatgttagccagatatctagacccactaaggcttcatttttgctctaawacttatgaatggagagaaactccatttacaaaagaattcacttggaaactactaaaatgtatttctgg

SEQ ID NO: 89915 - DNA, 1191 bp, Homo sapiens
cagattaggaagttgctccctctttgcatttcccacataattgaatgcatattccttcacctctatgaagggcctctagttagggactattttttatgaagacatttgaattcctttaagtattgaccacaaagctggggacatagcaactgtttagcaaatcttctattttactgattcatcaattggtacagatgaattattcttgcagtgccaggccatggaactgatatagagatcttagacttgttcttcatacaaaattgaaatatgcgtgtttccatttgttaatcttttggtatttgtattgcagaataaaatacagggtactcaattcaatttaaatttcagataaacaacaaacaatgttttagcgtttaagttatgtctcaaatattgcaaaggatatacttctaatgaaacaaattatttgttgtttatctgaaatttaaattgaagtagatatcttatatttttatttgctaaatctggtaatgctatttagtgttcataaaataataactttaaagtatatcctgaaaagacagggctatcattccttcttttgaagaaattaggatattttcatctcactggatctgaatctatgttctaaccttggtcaaaaggtacctacttatgaggggaacaaacattcttctcagtatgtcactaaaaacatactagtaatatgatctaaaatgccttgagtccaactgccttccagctctaaaattctttaattctaagtaactctcaaatatctaaactaggtttctacttttcccaattagtatttgtgtttcgaccaccctgcatggaaacatgggttatgaaatgccttcacaagtatggtagaaaatatgctgctattgtatgttgccttggacttctagaagtctaggtgttggtggttattatatggcgatagtaaagtaaaatcctccctactgttctagtacccayaatactacttttcatactttagctactttaccttcagtctctctgtcaacctctgatctaaagacttctttactaaataacattcttcttgcctaatactgtattatggacttcatcagggaagggactaatccatctttgcatgctaacgtttaagctgaaataaagtaatccctcaattaacattttgcagaaacctccttaggttcccctacaaacctgccc

SEQ ID NO: 89916 - DNA, 758 bp, Homo sapiens
ctagtcagggctccagcttccctcctctttgtgtgcaatctaagttttggacccaagggtggaggacctatcactgtacaatgctgagtaagacatggttttcaccgaagtcagtgaagttcccagtcctttctggcgcgagctgcattcccagacactccagctcttacggaaagaagcactgtcttttgcgctagtgtttgtctaccgtcccctgtcctaaaataatgactgccctctacctgagggaaagggacttcaatggtggtaatctactcgcggctggctgcatccttaaaaaagcccatttctcttctactatcttcaagatcttggttaaccagattcacattgtatgtgccggactctttctcaggtgactgctctgtgcttttttatctaaagaagggcaagtcacccacgggtactaaccctcccccacccacatcaagggagaaacactcctctactcttttctggacattcctgttcagagtcgaggtaagggttgcacggccccgcccctccgttaccaagccttccctcgcctgcctcgcagcctcaggcccttagaacccaggcggggcggggccgggaaaggtgaggctgctggcgggaagcgggggcggcgcgcagcggtacctagcggcgctgccccgctggcagccggaggacgtggcactgtccgagaatgcagggaggggattcstctttctcctccccgcgaggaggagcctcgacatcctgcagaggcggga

SEQ ID NO: 89917 - DNA, 758 bp, Homo sapiens
ctagtcagggctccagcttccctcctctttgtgtgcaatctaagttttggacccaagggtggaggacctatcactgtacaatgctgagtaagacatggttttcaccgaagtcagtgaagttcccagtcctttctggcgcgagctgcattcccagacactccagctcttacggaaagaagcactgtcttttgcgctagtgtttgtctaccgtcccctgtcctaaaataatgactgccctctacctgagggaaagggacttcaatggtggtaatctactcgcggctggctgcatccttaaaaaagcccatttctcttctactatcttcaagatcttggttaaccagattcacattgtatgtgccggactctttctcaggtgactgctctgtgcttttttatctaaagaagggcaagtcacccacgggtactaaccctcccccacccacatcaagggagaaacactcctctactcttttctggacattcctgttcagagtcgaggtaagggttgcacggccccgcccctccgttaccaagccttccctcgcctgcctcgcagcctcaggcccttagaacccaggcggggcggggccgggaaaggtgaggctgctggcgggaagcgggggcggcgcgcagcggtacctagcggcgctgccccgctggcagccggaggacgtggcactgtccgagaatgcagggaggggattcgkctttctcctccccgcgaggaggagcctcgacatcctgcagaggcggga

SEQ ID NO: 89918 - DNA, 1561 bp, Homo sapiens
aaagcaaaacgtacaatgtttatggaatattttcctgttcattgattccacaaatatttagggagtgcttcctgagtactatgcaacaagaatacaaggacacaaaatatgccttgtcagctctcaaaacactctagccaggttgaggtcatcgtaaacagactgtgacagcacaatgggatgaatgctgttggagaggtctcaggttgttatggaagctgtaggagtttatgaagatgtattagttagtcattgactttttccttgggcagcttcagactagttggaaagatcaaacacacaaaaagtcgcgtaactctaaaagatgtaaataacccttcaagataacaaaagccacatcataaggcagcatatgaacacttgttgaatgttaatatctgccttagagttcaaaagaggaagaagtctttccaggctagggtaagaggaaaggctttgcttgggtggaatttgggaacactcaagttgaatgatctaagccaagagttgaatatgtacggctagatcttgggtgagaagactcggttggagatttgggaattgtttcgaaggtgaaagtatagccctaaaagtggataaaacctccatggataaaaatgtgaagagaaaaaaaagtagaaggctraggacttaccatcatttaaatacccactttcaggagctggcaaaaaacacagaaaaggatccagagagatagaagaacaagatatcatggaggaaataagcataaatgtccaacagaaatctaggatgcataagaataccctggattcatacacagttttacttcctgtaaaacttttatgaaattattttacctgataaaggaatctaagtagacagccaaagcatgattaaacacttatctaaactctggcagcctggctccccttgagcaaaatggaggtgatattaactgggttatcaccttgaagagcttagaccaggaaagggccttaaaaatcactaattttggccagacgcggtggctcatgcctgtaatcccagcactttgggaggccaaggcgggcggatctcaaggtcaggagatcgagaccatcctggctaacgctgtgaaaccctgtctctactaaaacaatgaaaaattagccgggcgcggtggcgggcacctgtagtcccagctactcaggaggctgaagcaggagaatggcttgaacccaggaggcagaggttgcagtgagttgagattgcaccactgcactccagcctaggcaacagagcaagactctgtctcaaaaaaaaaaaaaaatcaccaatttttaaagccatttcattttttaagtgaggacagttaggcttctagagaaatggtctataacatagctatttagtaagagaactgggaatggaaaaggatattttgagttgttttaacttagacttttttcttcactgtctctaactaagcctagttggcattctcaaattctaagaattcagatttagtgaaaatagttaaatggattttaaatgtgtagtttttttttttcaaatggtaaatatttgggcttgcctattt

SEQ ID NO: 89919 - DNA, 731 bp, Homo sapiens
cacacacacacacacacacacacacacacagcctttttcctttttagcttatttattttgtttcatatgaggaattgagaaagcaccatggggtactggagccatggtggtgatagctttctagaattatctgagactaactgtgtggtcagaggcatttctcatctttgttcttgggccagttggtctgacgaggtgagaagctggatggggagccccctcttcagggaattctatttcccacttcaagagtgaaccgtagtcrtcagcccatgggctttggtgtctgagagatgtgagttcaatttgggctctttccagttctacaacttgatgcaagttactcctctgagcaataatattcccagcttaattaataaattaattaataaatgctcaataaaaattatcattactgttattattttattaatttcatttgtaaagcaagtcttctatgtaaccttccagtgaaatcaggaaagaccctactgtcataatttaaaacaagttttgtaaaacttaattttcattcctttatcattggtaacattcacatggttcaaaagttactaaggctatcttccccagggccttccatggaggccttcactgtgttatgcctttttaaagtgtgtagattaggaatatgcaaacaaacaagcacatacatgtaccaggtagttacttactaagtagactatgtgagcactttgctttttttggtcact

SEQ ID NO: 89920 - DNA, 779 bp, Homo sapiens
ggatcccaacacctgggtatttagcatgagcactgtctaaacacatgcagagacacatagtatttaaaataaccagaagagacctttgaatggcaaaattgacacaagttgtcaccttacaaatcaaaagccaaatccacaaatttataataatgatggttgccaacatgcgctgagtgcttaaaatgtgccaggtaataaataggtaaagggctttagaattgtgcaccatactcacaaccaccctgcgcagcagattctgttattaaaccccttttacagacgaagttgaggctcacagagattatgtaactcactcaagacaacacagataaaagrtgaaactgaatgcaggtctctgtctccatagccgtgaattctaattctatactatgcaacatgtcaactattctctaccatctctgcattcccaaaatgaatattttccagtacaaagtctagggagatctggtgaatatttgcaaagtgtatcttccaaggttttgtaaggtatagaatatacaaattctacttactcctttgggtaaagcatattcacccagaactgttgccttgtcaagagtccgagttgtaaatggtacactcggcgtaagcctgaaaagataaaatcaaagatgtaaaggtgagcacagtctaagttctctctgaagtgtcaatgggaatgcagattggattaaataaatgctgcccaagtgcatactcaaagaggcagcatgatcacagatcttcctaaagaagttgtttttttcttctcaata

SEQ ID NO: 89921 - DNA, 779 bp, Homo sapiens
ggatcccaacacctgggtatttagcatgagcactgtctaaacacatgcagagacacatagtatttaaaataaccagaagagacctttgaatggcaaaattgacacaagttgtcaccttacaaatcaaaagccaaatccacaaatttataataatgatggttgccaacatgcgctgagtgcttaaaatgtgccaggtaataaataggtaaagggctttagaattgtgcaccatactcacaaccaccctgcgcagcagattctgttattaaaccccttttacagacgaagttgaggctcacagagattatgtaactcactcaagacaacacagataaaagatgaaactgaatgcaggtctctgtctccatagccgtgaattctaattctataytatgcaacatgtcaactattctctaccatctctgcattcccaaaatgaatattttccagtacaaagtctagggagatctggtgaatatttgcaaagtgtatcttccaaggttttgtaaggtatagaatatacaaattctacttactcctttgggtaaagcatattcacccagaactgttgccttgtcaagagtccgagttgtaaatggtacactcggcgtaagcctgaaaagataaaatcaaagatgtaaaggtgagcacagtctaagttctctctgaagtgtcaatgggaatgcagattggattaaataaatgctgcccaagtgcatactcaaagaggcagcatgatcacagatcttcctaaagaagttgtttttttcttctcaata

SEQ ID NO: 89922 - DNA, 779 bp, Homo sapiens
ggatcccaacacctgggtatttagcatgagcactgtctaaacacatgcagagacacatagtatttaaaataaccagaagagacctttgaatggcaaaattgacacaagttgtcaccttacaaatcaaaagccaaatccacaaatttataataatgatggttgccaacatgcgctgagtgcttaaaatgtgccaggtaataaataggtaaagggctttagaattgtgcaccatactcacaaccaccctgcgcagcagattctgttattaaaccccttttacagacgaagttgaggctcacagagattatgtaactcactcaagacaacacagataaaagatgaaactgaatgcaggtctctgtctccatagccgtgaattctaattctatactatgcaacatgtcaactattctctaccatctctgcattcccaaaatgaatattttccagtacaaagtctagggagatctggtgaatatttgcaaagtgtrtcttccaaggttttgtaaggtatagaatatacaaattctacttactcctttgggtaaagcatattcacccagaactgttgccttgtcaagagtccgagttgtaaatggtacactcggcgtaagcctgaaaagataaaatcaaagatgtaaaggtgagcacagtctaagttctctctgaagtgtcaatgggaatgcagattggattaaataaatgctgcccaagtgcatactcaaagaggcagcatgatcacagatcttcctaaagaagttgtttttttcttctcaata

SEQ ID NO: 89923 - DNA, 651 bp, Homo sapiens
aggaagctggttatgagtaagccaagtacacagcaagacttgtgttttactcaagcatggtgactagatcccatctcaagcacctcctttgatcaatgagtaatggcttctcagagcactctattgagaagtattctgaggctccgtatcagctaagtgagaaaggatgctgtgcttgattaataatgtctgtcatagtcatgaagtaagagaggagtggtggcacctgtaccacatatttgttatccctattaagctttggaggcactgctgtaggactccgagggcatcactggccccagagactggacaaaatgaacccagataatgtgaataaagtaacccagcaacccacttctccgttgcagctgtttcaaactattcctgtatttttcaagctcatgaaactctgacaatcctccatgcttaaaagataacccctttggctttcctgaaaggaaggaagccatgtgtcatgagttaccctgtgtccctgcctccatcactcagtgtctcttatcttcccccatctttcctcccgtgtttttccatgacagaggataaagtgtcctccctccccttcagggcagcttctccattttttttttttttttccakagcttattactcatcacttaaaatagctgttgt

SEQ ID NO: 89924 - DNA, 1417 bp, Homo sapiens
agagaatggcgggaacccgggaggcagagcttgcagtgagctgagattgcgccactgcactccagcctgggggacagagcgagactcaaaaataaaaacaaaaacaaaaaaacaaaaacttgctcatggctgggcatagtggttcacgcctgtaatcccagcactttgggaggctgaggtaggcggatcactgagatcaggagttccagaccagcctggccactatggcgaaaccccatctttactaaaaatacaaaaattagccggccgtggtggcgagcgcctatagtcccagctactcaggaagctgaggcagaagaatcacttgaacccaggatacggaggttgcaatgagccaaaattgtgccactgcactctagcctgggagacagagcgagattctgtctcaataaaataaaataataaaataaaacaaaacttgctcacatgtatgtggataccatcatttcacagtagagagatatatttctgacatttctgaaatacagtaagtcttataagaaagcacaattcttctaacaaaatggcatattattactggaaaaccaaacactaactgtggatggttttcaaattgtttatgttaatgaccaaatcagtttctttctttttttttttttttggcatttaacaattaatagcgctgagggctgtattgctctttcagttttgtattttgagctttttattcttgaactcacacagaaagagaaaactaaaagataaatgatcattctcttgttagtggttatctctcaggtcctaaggatccattgcaaagtaagtgttactcacagttggtcttcatttaagttaaaatcccattatactatttcccagtttctactgaggcacatatctaaggattattaatgttctctctggtgatgtttatggatgcagaaacagggaacaatttgtctcaataagagagactaagactgtagaatgatatttgggtatctaaatatttaaaatacctaattgcttatctctaagtaatatatcctccctttagggaggctgcagtgtgtgatgttgagctactgaaaaggacataatttaatattttcatatgaatgatcaaatgcaaaagataaagcagaggtatgtatgtttgatgagaatagctatgaaaaaaaccttaaaaacatagaacgtgctgaataattgaaagtggaacgaaaaataatttattaacccatgctattgaaaaatacaaccaaaatgtattatcaagggatgtatattaacctatcatctttctttgayaacttgggttttgctattaccaaaaagtaatcctttcaaaaaccttataatgttcataatgtgaatttataatgtaaatcattttgttgggatcaagtatagaatctgaccctacaagtgttat

SEQ ID NO: 89925 - DNA, 1156 bp, Homo sapiens
aagatcaacatacaaaaatcatttgtatttttctctatatagtgtgaaaatgaaatttaaaaaacaatttacaattgaataataaaaaaatactcacaagcctgggcaacacagcgaaactcaacccctacaaaaatcagccaggcatcatgatgcgtgcctatagtcccagttactcaagaggctgaagttgagaggatagcttgagcccaagaagtcgaggctgccaagagccatgattacacccctgcactccagcctgggcaacagggcgagacccagtctcaaaaaaaaaatgtacttagaataaatttaataatcttttgctctggaaactataaaacagtgttgaaagaaataaaaaaaaaaaaacctttaataaataaatccaggycaagcccagtggctcatgcctgtaatcccagcacttttggatgccaaagcgggaggatcacttgagcccaggagagtttgaggacagcctgggcaacatagtgggatcctgccctacaaaaaatttaaaaattagccaggtgtggtgatgtgtacctgtggttctagctacttgggaggctgaggcaggaggaccacttgaactcagaggtcaaggctgcagtgagccatgatcatgccactataccttagcctgggtgacagagcaagaccctatctctataaataataatttttaaaaatcagaaaacttaaccttcgttttttgttgtttctgtttaagagacaaggtcttcctctgttgcccaggctggggtgcagtggtgcaatcatagttcaaggtaacttgaacttctaagctcaagccatactcctgccttggcctcccaaagtgctgagattcaggtgttagccaccatgtgctgcctctactttctttttaaagggtacaatgccaggtacaaatagacaatagttggaggaaatactgattattcaaaaaaagagaggacagaagaaaatacttcacaagggctttacatatatgtgctttaaaattccatcactctccttgcaattctatcagtttaaaaaaataatgataaaataaaattccctcatgctgacttctaccactgtgttcctccattttgaaagaaacctagacaaagctggtcaaatcagcacttaatagctaagaagt

SEQ ID NO: 89926 - DNA, 1156 bp, Homo sapiens
aagatcaacatacaaaaatcatttgtatttttctctatatagtgtgaaaatgaaatttaaaaaacaatttacaattgaataataaaaaaatactcacaagcctgggcaacacagcgaaactcaacccctacaaaaatcagccaggcatcatgatgcgtgcctatagtcccagttactcaagaggctgaagttgagaggatagcttgagcccaagaagtcgaggctgccaagagccatgattacacccctgcactccagcctgggcaacagggcgagacccagtctcaaaaaaaaaatgtacttagaataaatttaataatcttttgctctggaaactataaaacagtgttgaaagaaataaaaaaaaaaaaacctttaataaataaatccaggtcaagcccagtggctcatgcctgtaatcccagcactttyggatgccaaagcgggaggatcacttgagcccaggagagtttgaggacagcctgggcaacatagtgggatcctgccctacaaaaaatttaaaaattagccaggtgtggtgatgtgtacctgtggttctagctacttgggaggctgaggcaggaggaccacttgaactcagaggtcaaggctgcagtgagccatgatcatgccactataccttagcctgggtgacagagcaagaccctatctctataaataataatttttaaaaatcagaaaacttaaccttcgttttttgttgtttctgtttaagagacaaggtcttcctctgttgcccaggctggggtgcagtggtgcaatcatagttcaaggtaacttgaacttctaagctcaagccatactcctgccttggcctcccaaagtgctgagattcaggtgttagccaccatgtgctgcctctactttctttttaaagggtacaatgccaggtacaaatagacaatagttggaggaaatactgattattcaaaaaaagagaggacagaagaaaatacttcacaagggctttacatatatgtgctttaaaattccatcactctccttgcaattctatcagtttaaaaaaataatgataaaataaaattccctcatgctgacttctaccactgtgttcctccattttgaaagaaacctagacaaagctggtcaaatcagcacttaatagctaagaagt

SEQ ID NO: 89927 - DNA, 568 bp, Homo sapiens
accattcgcagctgcttgagatatggcttctgttcataaatccctattatttcattctgagaatctggacttgtcagcttctttcttcagctcctcaccttccytggcctttggaagtaggtttgtataggcctgctcacctcggaacacacacacacacacacacacacacacacacacacagagagagggagagggagagagagagagagagagagactagtgtggttgttgcttggaagtgggagacaagatataggagaggagaaacaccctggaagagagcttctctcaatgttttggaatttgtcccagttaattggccaaccccaggtgtgataatcaaggatagaaagattcttgggataaggatatcatattaagctaatcagttatgaataaacctaaaccccgccaacagcagctgctgatgcaaaccaaagggctggctttgcccctttacaggcaatgcctgtcctttaatccctgcagatggttagcaatgccatgagccatagcattttggaaaagaaaggggaaccacgggatttctggaagatatgagaat

SEQ ID NO: 89928 - DNA, 1151 bp, Homo sapiens
  misc_feature (1)...(1151): n = A,T,C or G
ccnnnnnnnnnnnnnnnnnnnnnnnnnnnnnnnnnnnnnnnnnnnnnnnnnnnnnnnnnnnnnnnnnnnnnnnnnnnnnnnnnnnnnnnnnnnnnnnnnnnnaactccttgtctgcaccactcatttgctaccttagaatatgctactggaaatgttatcttctgataaatgtggcctgtctttccaaataggatccccataatttantcagcgtctttgaaactggaaactacagttgttagctcttatatcataactacttagagtacygaaacaaaacatttggaggaaaaagcaacatttattccccgtaggtatgaatgacacattcccatgtctaaccccactgcaggctgaacaaggacctgacaggaaaccacaaggcagcagcccttgctaagcatgacaatgaatcagaaacctatcgacatcctctttcccatcaacaggacagaattacaaatctatttccagggacagctccatcaaacccaccatctgtcaatgggtatttcataatttatttggtttgattactaaagattcaggcatttttaaaattaggaagtgggagaaaaggattaggaggtcttcctggactctttgtgctatattaaagtatcctcctgatataacgccgcggccttcaggctttggagaagagtcaagtagcaaatatccatgttttgatcccgttccacaacatcatccattccactccaaagttcaagagccaaaggggttatagaaacaatctgtttaacttatgactcaaagcaaccgagacaggccagatctacaggctagttgagttttttccaaagccactacccacaaagatgagaagtccttcctggacttcccagtgatggtccaagccctccccacccccacttcatgacgcaacactcttggggatattctgtcacgccacttatcacagtgtatttaaactttgtgtgcctctttactccaaatggaatataatgtcctcaagattagggcttctgtatccttataacttcagtcctcagaagagtatccagcaaagagtatacctgtaatgtttatggtgaacaaaacctgacagcttattgtgattttcaacatttagattatcctaacaccatttcagaaaatgtagctgtat

SEQ ID NO: 89929 - DNA, 897 bp, Homo sapiens
aacaatttcctggctcaggagaaggggagagagggattccatgggcaggaatggaggaccatcaggaggctgttcagatttgctacctcagaagctttgtggtggcagaaccagcgctcaggccacagcagtctgggcatcactcactgacggacaagcaggagtgaagctcatctgacttttgctaagttctgtccaacccacctgataaggacaatcacctcccctccctcttcaatgacatggggcacttaagcaaccacaaacaactaggaaggagggcagggccttgacacccggagggatggaagcaatggcatccggagagcccctaggactaactgaactgaaccatttggtggtctaccttgtgcttctcaggctctcctccctcttacccytaacactgtggcaatcaggcagcaacccattagaccaagaatgtatctaatagtcccattgtgcatagtaagctatggaggggcctgatgcaattgggtttgtctgttgggaatctgacataaatagtgacactgatttattatcagtgtcttctagatttctccacaatactcagagatttttataatatattcggtctgttatttcatcatgcaccatactgtgggggcttcttgggtcatactgcagatatttctcttaactcattcatctctgataaatgattcattagtaaaccaacggcagtcatggagcaatgcacacgttaggcttccttccctttaccaatgacataggtcccagtgccaggccttgtaatgatttaagagctagaaagggcaaagcaccaattacagtccatcaggcttggtccactgggtgaggaggaactagcaagcttaaccttttacacttatgctaacatgtaggtcacca

SEQ ID NO: 89930 - DNA, 1027 bp, Homo sapiens
taatccacatgtaaaagtgaaccctgtaaatatctcttgtctgaagtcctaagccaaaaggaattttcttgtaaccactaaaggatttttcttgtaatcttttacattgacataattttctagtatttattaaatccccatctgccaatggcagatccacttttaaaggagaaaagtacaagaggaaaaatcttttcaggaaagttacattaggtagtaaaattaaagtattaaaaattatatataaattcttccagctcatcacatcccatatagatggcaatcacatagtgttcacattctatamgttgaccatagctaaagtaaactgcaggtgtcctctttttacaaagaaatgttcttcacagaagtgcaatgtacatatttgattttcctacaccattagaaatgattctgcaaagcattctcagaagaattctatgcatatggatgagacagaatgagaagagtataatatgggtaaaaagtcaattaaatatattgaacactgaaaccgtattaatagtttggggtcaaaatcggagcagctattgcgtggagtttataaggaaccgtcctgggtccaatctccctccatattttctattaatagctctgaggatcctatgacaaatgcactaatcaatccacagaaaatgcagctctgggaaacattgctaatgctttggatgacaatattaaaattcaggacgatcttgttaaattgaagaaatgagccaaaatcaatagagcagcacacgcagttctgccaggtgttccacattgcaggatacagggagccctcgaacggaaaggaagaccagcctggtaggcgaaactccagctggtaaagctatccaactcctgttctccctctccctccctgacagccacaaggatatccagacaggtgtttagggctgtcatctacacatgatttaactccactgcctacagcttctcaactctttcccccagagcccagcagtgagggaagagagatgatgaatttcctttaatataagtt

SEQ ID NO: 89931 - DNA, 1476 bp, Homo sapiens
attgtactctaaaccatcacacaatatgcccatgtagcaaacctgcacatgtaccccttgaatctgaaataaaagttaaaattatatattttttaaaagataagtgtggtcaaatgacttcatagaagatagttttccagaaaaggtttgtaatggctgacagtaagtaaacctcctcatctcctctttccaacccttttttattgtggaaatcgcattaccaaagagcaacaagactgattgaagaagtgaggggcaggggagctccacactggaaagcactcagatgtccatacataataaaatgaataagtaattgggatttattcaaacagtgaaatttaacacagcaatgaaaatgaatgcatcgtagcacacaacaccatggatgaattctaaaaacataagattgaataaaagaaatcagacacaaaagatacatattcaatgattccatttacagaaagttcaaaaagtcaatatttaggcgtgcatagtgatgatcataaaagtgagtcgtgattcctgtggcatggaggaactgatgatgggaagagacatgtgggtgtggtgggggatatttctggaattctgccaaaatcatatttcttggtctgtatgatagctacctgagtatttgcacgtaacaatttttaatgctgtgtatttacactttgatcattttcttttcatgtattgtaggttacaaaaagtctttaattccagatgtaagtttataatttttaaaatgagaataaacagtttatgaggaaaggtatcagaaacctaagctaaaagcaagtggagtaaatctctttgttatatccatatgccccatttttccacatatctctccgtgtgtcttcaccaactcaattcccaacatcttccaatcataaaaggttgaaggataattataaataaatgcagattactgcaacaagcactaaggatattctcacagtgcacatgagggatctgattctgcttagatgggaacaacaaaacctggataatcaagatgatgaaacatattgttgagagatgctcttttttgaggagaaaagtgatgaacatatgttctaatttagataatctgctcctygtctatttcagactctaagtttactcagctaacctttttacagaaataggaaaaagtgctggataataatgattcagtacaagtccattctcatgttccagttaatggctcatagcaacagctattctactgatccatttgtaacattttaaacaagaaaagtttttctggcctaaaactagtgactttgaaactatctgccctgtaatgttgaccttcttcagagaaacaatttaaatgtataaatataaagaaatatagttaagtaaaatccataagatgagagaagaaaaccgtcctctttaagacaacagtctgtaaggctatattgttttcttgatattgctatgctgggaaccagaaggtcatat

SEQ ID NO: 89932 - DNA, 800 bp, Homo sapiens
taaaaaccgaaccctaatctcctgtgttgacagatgaagaatcggaggcttaatgtggcccgcccatggacacaacagaactcrcagatggcagagctagggagattaatgactcataataaaaaatggaaaaacacagatgtttcatgaattatattcaaataagctcctttcttacagagaataaccctaagacttcaacagaataaggggtgccaaggtggcatctggcgggagagaaaccaagggatacgtcttgaagttgggttcgaccagctagaacactgtttatttagattagtaaaaatagcagttttctaaacatactcttagtcagactttacagactttacattgagagtcttgagttttacaagtgacctcaaggctgtctggttcataatgacctccagtgggagttggctcttttagtatccatcatggcagctttgaagagcatttgaagaaagagcctcaatcatctgggctttggatttagttgcaaaataaagccatcatttacttggatatgtattcactcttcccaatgaagtcaaagaaaacattccattttgcctaatgaaactaaggtggggaattaggggtggcattttagagcactctacgtataggctttctatgtgaggtctagcatgtgcgaaaggagagaagggatttgtgtcaaagagtcataaagttctgttccacctgccagataatacagaacagaaaaacaatgaagaaaatactcagataagatcaatacaaagtgtcagtgttcaaataagtccacgttcaca

SEQ ID NO: 89933 - DNA, 570 bp, Homo sapiens
ggatccagctaggttaggkctatttcccctgtactggagttgcagctcttgacatcaaactacgagctagttgttgttttaattgttaagaacatagattatacagttattaaaattttgtaatctcaaatttattctttttctttaaaggaaaaatttactaagttgagcagggcttttaaaaatgtgcctccaaattcattaatgggctatggaatcaaatgaatgggtttcaacctgcattaaaaaaaaaaagctaggagctggggcatccacctgtagtctcagctatttaggaggctgggacaagaggatcacttgagctcaggatttgaggctgcagtgagctgtgattgcacctgtgaatagccactgtactccagcctgggcaacgtagtgagaccctgtctcaaaaaagaaaaaccaacccagaatagaaaagaaaatatccaagtaaattgcaaagagtaagggtaagtgttgtttagtaaaactatttttgtttcaattttatacattcatatatccattttaccctcataaatgtaaagtacatacgtgcgtgtgtgt

SEQ ID NO: 89934 - DNA, 570 bp, Homo sapiens
ggatccagctaggttagggctatttcccctgtactggagttgcagctcttgacatcaaactacgagctagttgttgttttaattgttaagaacatagattatacagttattaaaattttgtaatctcaaatttattctttttctttaaaggaaaaatttactaagttgagcagggcttttaaaaatgtgcctccaaattcattaatgggctatggaatcaaatgaatgggtttcaacctgcattaaaaaaaaaaagctaggagctggggcatccacctgtagtctcagctatttaggaggctgggacaagaggatcacttgagctcaggatttgaggctgcagtgagctgtgattgcacctgtgaatagccactgtactccagcctgggcaacgtagtgaraccctgtctcaaaaaagaaaaaccaacccagaatagaaaagaaaatatccaagtaaattgcaaagagtaagggtaagtgttgtttagtaaaactatttttgtttcaattttatacattcatatatccattttaccctcataaatgtaaagtacatacgtgcgtgtgtgt

SEQ ID NO: 89935 - DNA, 621 bp, Homo sapiens
agggacagttagtggctyaggtcctgcggctccaggtgcccagacgtgcatttcctgtgtggagtggccggggcctctccttggtgtgcagcccagaaatgtggcaactttgggttacccaaccttcctaggcggggaggtagtccagtccttcaggaagagtctctggctccgttcaagagccatcacagtcccttgtattacatccctctgacgggttccaataggactatttttcaaatctgcggtatttacagagacaagactgggctgctccgtgcagccaggacgacttcagcctttgaggtaatggagacataattgaggaacaacgtggaattagtgtcatagcaaatgatctagggcctcaagttaatttcagccggttgtggtcagagtcactcatcttgagtagcaagctgccaccagaaagatttctttttcgagcatttagggaataaagttcaagtgccctgcgcttccaagttgcaggagcagtttcacgcctcagctttttaaaggtatcataatgttattccttgttttgcttctaggaagcagaagactgaggaaatgacttgggcgggtgcatcaatgcggccgaaaaagacacggacacgc

SEQ ID NO: 89936 - DNA, 1125 bp, Homo sapiens
cggactgtcccggggaacgctcggcgagcgcccgctcctccccgccgctctcggaccgcggggccccagtgcgctgcgctcagccacccgggtggggcctctgccgggagcaggcgtggtgcgcggtccagtccgtgtcgcggacatcagtgaccctgacccacaagggcagcccagggcccaaataccgttaacttactgacttacaagcctagcctttaaaatccgagcgaagagagggcgggcgattttgaccaaacgatgtggtttgaggaatcgatgaggtccgcccgccacctaagtcagccttcgctgggcgtttgggagacgggcggtggaacagtcaggggccgggggttttaccagcagttagaccgccgccattgaggggtcaaagccccgaggaacttgagggttcggactcgcagtctctgctcagtggggctgagtggcggagatttgtgcctcgttcccctgggcgcagagagccagatttcggagcgcctttcttttaagcatcgtggagaaaaggtaaaatatgaaataaaatatagtaatataaaataagtcattgcaatgattcccgggaagaaaagtcaataggatggagcgtagtacaacaacaacaacaacaaaaagcttgttaaacccaaaaagcagtaataattaaatattctttctcagtgggaagactaactagaccgtcagtttccaagtaacaagtaatagttccaattagattggagaaactactaaacccggagacagggcgaagtggtaacttctgagaactcactgtaggttgggaaaggtgctaacataactatattaaataaaatgttgtattttctatttcacaaatacattttttgttttgaaaagtcacttgtattaaaatataattgcttagagaatttaaatacctcactcgactattatgtaaagataaatctagstaaattacatgaatctaaaattacggagggaaaagtacgtgatttattagattttctgcttcacataattatatctttattttgaaaacatgctgactttagtgaagcatcgttttctttgtaattggaagcatcttagatcagtggaaactttacagaaatgtgagtg

SEQ ID NO: 89937 - DNA, 804 bp, Homo sapiens
acagaaacaacacagaagaaaaaacaattaactttgaaggtaattttagattttctccaaggttaaatagaggaaaaaattggtggggagggataataaaacaccttaaaatgtgtttcaggcatgacaacactatgatcaaaaatacttctgtgtgaaaagtatgtggcatgawacagaaaatgagtatttttgtttggctgtagtttaaagggaacatggtgaaaaagtggagaacgatgctaacaatgtaggcaggggtcatgctaaggagtttaattcctacaggcaatggagaccaaatggaatattttaaatggggagtgacagggtcaaatttgtaatttagagcaataattcttagagaagtacagagtaagctctacaggaagacaagcctgaggagggtaaatctatttggaggtaattatgggagaccagacaagatgaggcagtggcagcggagatgaagagagggaacagatttaagaggtacttctggagacagaagagatagcaattggaatgtggaagtgagagggagtgagtgacatgtgtgagggcccaagaaggtaacattcaaaaatgaatcccaggtttccacctcaaaggaattgttggataaaaatagggatttccatggcacaagaacacttaaaggattagtttagttcaggaggaaaatgtaagttttccacagagcaatcaaatgcttcaatattaaacttacaaaccatacaaaaatgtatctgtcccctggatggctatttgcttccctcagtagccacaaagctatgttgtatg

SEQ ID NO: 89938 - DNA, 766 bp, Homo sapiens
atgcattattaaaagacctctgctgtgcccaccactgggagatagggcaagaggcagcagtgaccctgcattctgaatgcacagagacactgacagtcactcactctaaataccaatgacaatatccccaaacccacaccaccctaacccatgccttgctctgaatttgggcagtctggaaaaaatgaaaatggaaamctttaaataaaactcataaaacttcagttccaagcacaatatttttggttctttggacaataagtgtttcactgagatttatgcctagggtccttttccatatcccggctctgtgtcagcgttcacatcagccctcagttcttcttgcaaatcaagggtataatatactgattccttcaaataatatttgtgttaaaatcattaaatgcccatgcaagtaattttttattaatgggatgagaaataatacataatacataccaattttatgacagcgagaggagttattaactttagaatatctgttgtataaattaaaaatcttaagaataagtccagtgttttaaatatactatggaaaaacaaaattaatgccaggagaattttgactggaatatagaaatgcctttatcattctgggaaaaatactaccctataaaagccacatcctctgataagttcagaaattatcctttttatataaatattattcacttggaaaaatgttttctataaacagctcccttagtgcattttaacacatacttttatttacagacattagatt

SEQ ID NO: 89939 - DNA, 766 bp, Homo sapiens
atgcattattaaaagacctctgctgtgcccaccactgggagatagggcaagaggcagcagtgaccctgcattctgaatgcacagagacactgacagtcactcactctaaataccaatgacaatatccccaaacccacaccaccctaacccatgccttgctctgaatttgggcagtctggaaaaaatgaaaatggaaacctttaaataaaactcataaaacttcagttccaagcacaatatttttggttctttggacaataagtgtttcactgagatttatgcctagggtccttttccatatcccggctctgtgtcagcgttcacatcagccctcagttcttcttgmaaatcaagggtataatatactgattccttcaaataatatttgtgttaaaatcattaaatgcccatgcaagtaattttttattaatgggatgagaaataatacataatacataccaattttatgacagcgagaggagttattaactttagaatatctgttgtataaattaaaaatcttaagaataagtccagtgttttaaatatactatggaaaaacaaaattaatgccaggagaattttgactggaatatagaaatgcctttatcattctgggaaaaatactaccctataaaagccacatcctctgataagttcagaaattatcctttttatataaatattattcacttggaaaaatgttttctataaacagctcccttagtgcattttaacacatacttttatttacagacattagatt

SEQ ID NO: 89940 - DNA, 1106 bp, Homo sapiens
tgttttttttcctgatagtaaagttagtctatttatgaactaagcgaccacaagcaagagaaggaaaaactacctgtatatgacagaaagaggtgaacagcattacactctgtccctgcaaagctcataacaaaaatgttaaggatttttctttctctgtgttatgtagacatgaaactcacagcaaaggggaaaaatagtacatgaagtcagtgttctctttttctgttgttatcttttcagaggaaaaaaaaaaagatttcttctaagcattaggtttatttctgctgtctgttctgaggtccattctcctaacatatattggtgggaagagaggtagagagtgtggagggaggcacaatttattctgccagtaacggttgcagtgrgcctctcacaaacatcatgctaaattatgggcctctccatgggctgaacgtaatgttaagttgtgtgatagattttatcttacacaagctgcttcggtccatgaaatgagataagaaaccattgcagctggagttcactgagggttgaacttagactgaaattccagagttaacaaaatggtataagtggctacgatactcagtaagtgtgttctgtgcctatgggttgagattttcaaggaaacttgagtctgtcattcacagggtgttttgtgggcattcccaggccagttatctcctctggttaaagtgtgagggcaggggggcaggtttgctcagaaaaaaaacctttgatccccaaatctagaaggctgctgtgcagcaggagaggacttagaatggtgcctgagcatgggtacatccctaaaagctgctttctttcctggggaaggcagaggtttccagagttcagccgtaggaccttgaattaggttcagccccaccttcattcaggacacacacctcctgggcaagcagcagccatgctaaggaagctgtactcctggtctgggaggaggtctttgggagaaaagatactaaagatgtttgtaaagcaccctataaatttacaaagcactcaacggtgggaaggtttcgtatgatgtgtaaaatactaataagaactcaatgattgattttaaaatctggtgagtgaaa

SEQ ID NO: 89941 - DNA, 1171 bp, Homo sapiens
taatacacctaatctattgaacctcgtggcttagcctaggctaacgtaaacgtgttcagaacacttacattagtccacggttgggcaaaaccttctaacaccaagcctattttacaataaagggttgaatatctcaggtaatttattaaatagtgtactgaagtcaaaaacagaatgcctgtatgggtactcaaactgctacctgtatacccagatgtggcccttctaaaaacataggtggtgatttcttttctacatgctcaaagtaaaaatttttgataaaagcagaccaagccctcagagtagagtccagaaraatataatgaacacatggccaggcacagtggctcacgcctgtaatcctagcactttgggaggccaaggcaggtggatcgcttgaggtcaggagttcgagaccagcctggccaacaggccaacatggtgaaacctcatctctacaaaatatataaaaattagccaggcatggtggcacaacctgtaatcccagctactcagaaagctgaggcacaagaatcgcttgatcccgggaggcgagactgcagcgagccgagatcgtgccactgcactccagcctgggcgacagagcaagactttgtctcaaaaaaaaaaaaaaaaagaaagagaacaaaaatgaaaaagaatataatgaacacaatctaatatgctcaagtgatccatatattctgcataaattgccttgatatgtggccataattattagtttggctttgctgacatttagatcaaatctggaatttccagattgtcttttcttcttgtctgccagcttgagaatacaatttctcataaaaaaggaaagataaaattaaattttccatgggaaaactttccagggttaaagatagcagagtatactcatcaaagaaacaaactcaagaggcccaacagttatataaagaccaagagggacatgtggcttgaattagctggacagctacttcatttggccagaagggcctaagtctgaactaccactaaattcaggtttttttctttcagatttcaggggcatacagaaacgactgtactttctccaattatctatacttagtagatagtagaggtgggggttaaggcaaaacaatagctgttagaaagattagttacctttggctccatattatatatg

SEQ ID NO: 89942 - DNA, 1171 bp, Homo sapiens
taatacacctaatctattgaacctcgtggcttagcctaggctaacgtaaacgtgttcagaacacttacattagtccacggttgggcaaaaccttctaacaccaagcctattttacaataaagggttgaatatctcaggtaatttattaaatagtgtactgaagtcaaaaacagaatgcctgtatgggtactcaaactgctacctgtatacccagatgtggcccttctaaaaacataggtggtgatttcttttctacatgctcaaagtaaaaatttttgataaaagcagaccaagccctcagagtagagtccagaagaatataatgaacacatggccaggcacrgtggctcacgcctgtaatcctagcactttgggaggccaaggcaggtggatcgcttgaggtcaggagttcgagaccagcctggccaacaggccaacatggtgaaacctcatctctacaaaatatataaaaattagccaggcatggtggcacaacctgtaatcccagctactcagaaagctgaggcacaagaatcgcttgatcccgggaggcgagactgcagcgagccgagatcgtgccactgcactccagcctgggcgacagagcaagactttgtctcaaaaaaaaaaaaaaaaagaaagagaacaaaaatgaaaaagaatataatgaacacaatctaatatgctcaagtgatccatatattctgcataaattgccttgatatgtggccataattattagtttggctttgctgacatttagatcaaatctggaatttccagattgtcttttcttcttgtctgccagcttgagaatacaatttctcataaaaaaggaaagataaaattaaattttccatgggaaaactttccagggttaaagatagcagagtatactcatcaaagaaacaaactcaagaggcccaacagttatataaagaccaagagggacatgtggcttgaattagctggacagctacttcatttggccagaagggcctaagtctgaactaccactaaattcaggtttttttctttcagatttcaggggcatacagaaacgactgtactttctccaattatctatacttagtagatagtagaggtgggggttaaggcaaaacaatagctgttagaaagattagttacctttggctccatattatatatg

SEQ ID NO: 89943 - DNA, 979 bp, Homo sapiens
agcaagtaggttgggtcaagtgtgagtgacagcatcacagttgtgaggagagcagataaggaggtgatatgcagtcatgcctaaaagagggtccagtgaacaaaaggaaacacaggtagtgactttcactgatggcaataaataataatatttaaaattgtcctacacttcattcttttttattgagttcctgccatgatttatctgcaaatctktaaagcaagcattaccaaaaaattaattacctgattgaaatcaacggatgagtttattatttttcaaaccttccactgtatgttttatcttccctggacatgtagggctaagtagatgatgtataccggaaaaatcagaactaatgtttcaagttttttttttttactttcttcatccaagaaataatagtagacagcatttgtaatttaacactgcttcaaagggaattgtacttacatttcccatctttagtgttatctacttaaaatccatacctattgttttcccttcatatattataaagtcataatctcctttatgtgctaggctgagcatgacttctctgttggcaaacaacgcaatacctgcttgaaactcacttaatgttcaaaggaagaaacaccaccaaatgtttagtacattctcaggcatatctaatgaaaaacatatctattgtttctaagaactatttgatgtacatccatgggcaataaatctggtgaattctcaaaaaaaaaatgttatggaaaacacctactggcttaaagaagttaacctttctcccaaattggacaaatcctcatgagagcaaatagtacatggtatttaaagacctatttgtctatgtctctagacaaatatgtcacaggaggggagattgtgtctacagttggttcactactgtgcctagtatgctgcatggaacataaatattcaataaacatttgtgaaaagaatggaagttgcctaaggtgaaaaccaa

SEQ ID NO: 89944 - DNA, 979 bp, Homo sapiens
agcaagtaggttgggtcaagtgtgagtgacagcatcacagttgtgaggagagcagataaggaggtgatatgcagtcatgcctaaaagagggtccagtgaacaaaaggaaacacaggtagtgactttcactgatggcaataaataataatatttaaaattgtcctacacttcattcttttttattgagttcctgccatgatttatctgcaaatctgtaaagcaagcattaccaaaaaattaattacctgattgaaatcracggatgagtttattatttttcaaaccttccactgtatgttttatcttccctggacatgtagggctaagtagatgatgtataccggaaaaatcagaactaatgtttcaagttttttttttttactttcttcatccaagaaataatagtagacagcatttgtaatttaacactgcttcaaagggaattgtacttacatttcccatctttagtgttatctacttaaaatccatacctattgttttcccttcatatattataaagtcataatctcctttatgtgctaggctgagcatgacttctctgttggcaaacaacgcaatacctgcttgaaactcacttaatgttcaaaggaagaaacaccaccaaatgtttagtacattctcaggcatatctaatgaaaaacatatctattgtttctaagaactatttgatgtacatccatgggcaataaatctggtgaattctcaaaaaaaaaatgttatggaaaacacctactggcttaaagaagttaacctttctcccaaattggacaaatcctcatgagagcaaatagtacatggtatttaaagacctatttgtctatgtctctagacaaatatgtcacaggaggggagattgtgtctacagttggttcactactgtgcctagtatgctgcatggaacataaatattcaataaacatttgtgaaaagaatggaagttgcctaaggtgaaaaccaa

SEQ ID NO: 89945 - DNA, 979 bp, Homo sapiens
agcaagtaggttgggtcaagtgtgagtgacagcatcacagttgtgaggagagcagataaggaggtgatatgcagtcatgcctaaaagagggtccagtgaacaaaaggaaacacaggtagtgactttcactgatggcaataaataataatatttaaaattgtcctacacttcattcttttttattgagttcctgccatgatttatctgcaaatctgtaaagcaagcattaccaaaaaattaattacctgattgaaatcaacggatgagtttattatttttcaaaccttccactgtatgttttatcttccctggacatgtagggctaagtagatgatgtataccggaaaaatcagaactaatgtttcaagttttttttttttactttcttcatccaagaaataatagtagacagcatttgtaatttaacactgcttcaaagggaattgtacttacatttcccatctttagtgttatctacttaaaatccatacctattgttttcccttcatatattataaagtcataatctcctttatgtgctaggctgagsatgacttctctgttggcaaacaacgcaatacctgcttgaaactcacttaatgttcaaaggaagaaacaccaccaaatgtttagtacattctcaggcatatctaatgaaaaacatatctattgtttctaagaactatttgatgtacatccatgggcaataaatctggtgaattctcaaaaaaaaaatgttatggaaaacacctactggcttaaagaagttaacctttctcccaaattggacaaatcctcatgagagcaaatagtacatggtatttaaagacctatttgtctatgtctctagacaaatatgtcacaggaggggagattgtgtctacagttggttcactactgtgcctagtatgctgcatggaacataaatattcaataaacatttgtgaaaagaatggaagttgcctaaggtgaaaaccaa

SEQ ID NO: 89946 - DNA, 752 bp, Homo sapiens
agcagttcaaggctacagtgagctgtaacggcaccactgcaataaataatttatttagttaaaatattaaactaccttcaggctatttaagatgaatatgaaacatgaatgaatttcatgtttagactgggtcccatccccaagatatctctctctctgtctctctctmtatatatatatattgcaaaatctgaatcacttcctgtcccaagcatttcagataagggatattcaacctgtattacttctccccgcaatgttctctgcagtttacctgtttctcccacacacttaaatactatgtacaacatattaatatatgctatatctttaaagttgctgattaatgttatttctaacataccttttttggaactgttttgattcttcttggtggtgctgctatctgctttcttaacattggcacttttcacagattttttacttttagaagtagctttctgtttaggtttttctcttttggctgtcttttttggtggctgttacaaaagaaagtaaaagtacacatattgatgagattcaatgctatcccatcccatccctctacttcccctatgccccttaataatattagagaaaaccaatatatttggtatcagcaattaaaaattctttttgagagatgactaatatacaacaattttatcccaacacaagtctaagcatgacaaatcacaatcacacacacacaagagttgcccatatttattcaacactatggataaactaca

SEQ ID NO: 89947 - DNA, 562 bp, Homo sapiens
gcatgtgagaatttgtatttcagcatatctgcaggagccaataaagatagagtataaatctcccaaatcattccctttagtcatagcatattataatgtctttggaatttcaaggactagattcaatagagcaagtgattcagtaggtaaatttttatttatttctattattctccttctcttccatcatggattatgttctctatattccaatttgaataataatcacattttaatttatctttccctgaacagcccgtttaccctaacctcagtcatgctaactggctctcaccctgcattgattaagagctcccagagataacagagtgtgcaggarcatgaataatctccttgcttctcaagtcaattcttgtgcatctccgcagtctggcaataacacccacaatttgagtagtgaggggctagctgtgaactctccaatagcatatgtatgaccttctgttgaaaaaataaacatagaaaaaattaatattaatataatgaactgtttccctagaagaagaaaatacttgaacattttctacttctgctccagctc

SEQ ID NO: 89948 - DNA, 626 bp, Homo sapiens
cacatactccaaacatagctaagaatgaggaaataaacaaaactgactgaaaagccaatatagatcatctgtcacagtctactacagtttatgtacttgctcggagaagaaactcaggttctttgctgtgtccacttagcttttttatgcgaaactctacctagtgtaaaacctacattccaagacctcaacaggttagaagcaggagaaaggccaacacaaaacttcacaaggaatagcagacagcagtttgatatcatgggatgaaacagaccatcaaaaattgaaagcctagtacacactcaatagcttctgtgacatcattaaatctgaataaattattatraaagaatttctctatttattcactcatttatatatttatgaataattattcaatatctaggatgtgtaaggaaataggctggttgttgagatacaactgtggataagacaaagttcctgttcataagaaaggcttaatctaaatgaggttacagattattttaatacaatacacttggttactatagaatgatagagtaagacagagaatgctatagtgccacagagaaagggaataaaacccactagaggaagctcaggagaggcttttagagaaacta

SEQ ID NO: 89949 - DNA, 626 bp, Homo sapiens
cacatactccaaacatagctaagaatgaggaaataaacaaaactgactgaaaagccaatatagatcatctgtcacagtctactacagtttatgtacttgctcggagaagaaactcaggttctttgctgtgtccacttagcttttttatgcgaaactctacctagtgtaaaacctacattccaagacctcaacaggttagaagcaggagaaaggccaacacaaaacttcacaaggaatagcagacagcagtttgatatcatgggatgaaacagaccatcaaaaattgaaagcctagtacacactcaatagcttctgtgacatcattaaatctgaataaattattataaaagaatttctctatttattcactcatttatatatttatgaataattattcaatatctaggatgtgtaaggaaataggctggttgttgagatacaactgtgrataagacaaagttcctgttcataagaaaggcttaatctaaatgaggttacagattattttaatacaatacacttggttactatagaatgatagagtaagacagagaatgctatagtgccacagagaaagggaataaaacccactagaggaagctcaggagaggcttttagagaaacta

SEQ ID NO: 89950 - DNA, 625 bp, Homo sapiens
tcagagacccctatggagtggtggtgggaacatgcggacttgaattagattgctatcaatccacttttaaactactaacatgtctgtttctaacagcctcagggaataggcattacaaaccatcacaaaaactcatttttttaaaaaaacacatggcagcaaccataataataaaactgcacaaaagaaccaaagcaagaaaaagcaagaaggaagaaaaggtcagcattacagtgatgttgattggattgcaatgacctgttcatattcttgcttttgaaacaccaggttctytaggtcatttaaaaggaaactaattaattgcttctgatattttctttcatctccaaatcatgtctctttttttttttttttttaaggtttttggctacacattgccactgggtggagctcaaagtccacaaaagcaccttggaaccagcaagtaaataaaaagcagccagccacggactcattttcagacacataacatttacaatattttttttctcttgtattgatacgtgaagaagcacaaacactgaatgaaaggaagtggccatcttttagaaagaaagaaagcatctctgcaactgaaaaaaaaaaaaaacagccagctcggaaa

SEQ ID NO: 89951 - DNA, 1018 bp, Homo sapiens
ctacacactatgatacacagccccacacctccccacctgccctccaccactcactgcattgatcttcaaattgagtaagaaatcaggtgctattatcayaagccgcttcatttggaggattgtttactatagcattgaatgttgttttacctgctaactctacattccccaaaaagaaattcctacatgactatctaccatgcaatgtctaaacaatattgcctctttgtccttttcttctagttgtatatgctacagcctagtggattttgatctttttggggccaagagctctattaaacctaggaaaaatcccaaacccctctccccaggaaaataagcaaacatacatgtgctcaaaacttagcctagaatttcaagatgttttcagaacctcaaaaagatcaatataacccaggctaagaaccctgctactagcaattagtttactatgaatgcagaagaaccctaagtaagtaataagtgtatattacttccaagctttccaattttactcatcttttcttttatgtacagcttcccagtcatatttatgtctttgatctttgaattttaaaaacacagaaaatttagggcttcaatattgatttttctctcccaaagcaaagatgtcagtgtaacagtctcaatgccaaccatcaattccgtgaccatgccttttgatttctgtatcaactgtgagcagtctctgcctcaaaatgatcagcgatgcaatggtcaatattctatgccaggcacttcgcaattacttttggaaatggaatcttcattttctagcataacccttaagattttttcaattttgcccttaaaattctctctaacctcatctctcatctggccccaacataaactttttgttccaatgatatcacactgttcatagtgcactgaagctaccatattctctcatgactctgtgaccttgcctggaatattctttctcttgtctgtccaagaactcttattaacctctaagattcagcttaagcatcaa

SEQ ID NO: 89952 - DNA, 1018 bp, Homo sapiens
ctacacactatgatacacagccccacacctccccacctgccctccaccactcactgcattgatcttcaaattgagtaagaaatcaggtgctattatcataagccgcttcatttggaggattgtttactatagcattgaatgttgttttacctgctaactctacattccccaaaaagaaattcctacatgactatctaccatgcaatgtctaaacaatattgcctctttgtccttttcttctagttgtatatgctacagcctagtggattttgatctttttggggccaagagctctattaaacctaggaaaaatcccaaacccctctccccaggaaaataagcaaacatacatgtgctcaaaacttagcctagaatttcaagatgttttcagaacctcaaaaagatcaatataacccaggctaagaaccctgctactagcaattagtttactatgaatgcagaagaaccctaagtaagtaataagtgtatattacttccaagctttccaattttactcatcttttcttttatgtacagcttcccagtcatatttatgtctttgatctttgaattttaaaaacacagaaaatttagggcttcaatattgatttttctctcccaaagcaaagatgtcagtgtaacagtctcaatgccaaccatcaattccgtgaccatgccttttgatttctgtatcaactgtgagcagtctctgcctcaaaatgatcagcgatgcaatggtcaatattctatgccaggcacttcgcaattacttttggaaatggaatcttcattttctagcataacccttaagattttttcaattttgcccttaaaattctctctaacctcatctctcatctggccccaacataaactttttgttccaatgatatcacactgttcatagtgcactgaakctaccatattctctcatgactctgtgaccttgcctggaatattctttctcttgtctgtccaagaactcttattaacctctaagattcagcttaagcatcaa

SEQ ID NO: 89953 - DNA, 596 bp, Homo sapiens
ctccccgccctttcccccaaccccctaacaggctctggtgtatgatgttcccctccctgtgtccatgtgttctcattgttcaactcccacttatgagtgagaacatgtggtgtttggttttctgttcctgtgttagtttgctgaaaatgatggcttctagcttcacccatgtccctgcaaaggacatgaactcattcttttttatggctgcataatagtccatggtgtatatatgccatattttctttatccagtctatcactgatggcatttgggttggttccaagtctttgttattgtgaacagtgctgcaataaacatacatgtgcatgtgtctttatagtagaatgatttataatcctttgggtatatacccagtaacgggattgctgggtcaaayggtatttccggctctagatccttgagggatcatcacactgtcttccacaattgttgaactaatttacattcccaccaacagtgtaaaagcgttcctaaaccctgatgttccatttactctggttccctcattttattttgctttattatttgtagctttttaagctgttaaaacctttttggaaccacacaaggta

SEQ ID NO: 89954 - DNA, 909 bp, Homo sapiens
tacatgtgtgtgtgtgtgtttttgtgtgtgtgtatcatatcttgcagatttcacctgattgacagcattgagatagagcgtttcaggtttgagatgtggttgtttttacatatttggaggtagagtgaggaagtgtggagaagtttcatggaaggaggaacaaaacacatctttgtttctctcttccatatcttttccttactaattcagatctggctcaggaaaaaaaacaactttttaaaatcccagtggcatcagccatctggagatgacagtatgattcttgttctacttttcagcttcttcactatttcatcattgatttcccagatactttcattcattcattcattcattcattatttgtgcaacaaatatacatgaagcaccaagtttgtgttaggtgttggggatgcaatgataaatgtcttctctgtgcttacaataaagtgagcaactagggagaattcataatagcaaatcataattagtgaaataacagaagtaggagcagatgggatcacatagaagggaaaccacatgacagggtatgagagaagtcaggaagccctcccagaggaagggatgcctaagtcaagatataaataaagagtgaggcaaggggaggaatctgggaagaactgttcctgaccaagggacaatagttgaagtgtttctgaggatgaaaaatattcccagaaacatcaagaaactgaaaaaaaaattagcgctcaagggagatatgtaggtaattgtgcagataataaggaaaagttaaaggtatagaaaatgataggtgcmccagttcttgataaggatgggactcagagagcaggaggctttggagatgaggtcgactcaccaccattgtgataggtgggaaggagatgacgccatgtgggacacaat

SEQ ID NO: 89955 - DNA, 709 bp, Homo sapiens
caatgaactggatagctctacgctctcagtggggggtccatggcatatggggcaaggaggaaatgtgaggagtagccaagcttgagatatccctggggatgcaggagttctagaaccttgaaagggaactgggttcctgccttgatttaggtgtggggttgaaataccaacatctggatctaaattacagtatagtttcatttgtagccataagctagggcagcttggaggacatctaaattacattttggggagtgtaacagtcaggattccagcagataacagttgacaccctcacaacgggtaacctgagaaaagtttaataaagagtctttacaaatgtgtgagcaggatttagccaaagcacaagagacagtgcagaacctggggccggtgacaggaaaactagacctgaaagtgtgagaggaaagagaagttgcttgaactcagagagrcctctgtggagagggccatcctgcaggagctgagatcttccactaagggatgcggcagcccgtggcagcctcgcagaggcgtcagaggagtccatatcttacccctatcctcctcccaccctccaactcctgccagtgctctcactggctaagcccagcaggaagccagaggacaagagagctcactgatgtggttggttcctagagtttatgtgcttggcatccaaagcaaggtggaaaaaggtggagagtgg

SEQ ID NO: 89956 - DNA, 719 bp, Homo sapiens
ctcagacctctgcagcttccagcaactaaagggttaataactggcacagcagggaccaccaggatctctacaactttgttttggacacttggcatgctttctgattcattcctgtcctgccttatttgtcagatattttaaatatccttgtttacagataaggtttagagaagttaacttcattcattcattcacatggtcattcattcattcagcacattgttattgagtgacagctttctgccagccctgagctaagtgctgaggatacaatgctgaaccaaactgacatggaagagtccagcttggtgcagagacagatgaaaaattaggagctaagcagataaacatgtactaacaaactgactcgtgctccaaagagaaagcatggacagaatcatgtagagactcgcttttagatgagaggcctctgaagtactttagaaattaaccagacaaacaaagggcagagctgttcaggcacagagggcacagcagacatgaagaatatggtgttaggtgaacttgcccaagattacctggcagaaaagggatagggcttggttctgggtcctggtctgactggctctgaartctctgttctttctgtcctcctggatttttttgcctctgctcattcagccccgtttcctcaatccttgggtgtggacctcagatctgcaaatcactactgtactacttataccataaaaagctac

SEQ ID NO: 89957 - DNA, 1340 bp, Homo sapiens
cctgaacaccaactagtacttagccctagagctacctggggtttcatgcattttatggatatcttcaccacaaaccccacctcctcttttaaagtgtcccaaatgattctgtttatattatatccaagggttattagtcagcatttgctaatctgtgctacagaaaccacccctaaatctcaawgactgacaaccacaaagattttcttcccacttatgttaataacagctgcaggttatttaagcttctgctgtatgcgtcctcacattctaggtcttagactgaaggagcagctcctatgtcagtctgaagacagcaggaaaaatgcaataattgaatcttgcaatggcttttaaagcttctttggggccagtgaattatacagcccccatagagagacactacacggtaggcagggatgggtaatcccttttctgaaagtccaacgaataattgggaataataatactatttaccacaacagtctaaaatgaaagtcagacatcatatgttagggcaggtgcttttattattgccattttacagatgaggaaactgaggcttagagaagataagggccccacagttatatagttttatacttgcttttagaacaggatgtttctgagaggttcacctcagttttctgcaatggatccaattgttattaaaaaaaaaaaaaagacccttgtagagagtctagaataccctctgccttctaaagttcatgtttggaagccaaactcaggggtctgtaaagagcttaattcagctcagcatgtagaaagagaggaaaaggccacagaatatgaagttagggtgcttgggggctggttcaggggctctgccactatatccctgttcaaactcagaaagttgtttaacctctctgatctcagtgtttatacatggaagggctcagagcatgcaattaataaggtctttcctggctctaagatgctagtatctaatttcaccattccaagtgaattctttatttaaaaactaccttgaaagataatcttgataaactgccaatttctggtcatctgctcattcattttagctgttctatcaaaagttgatagcgtgcagtctgtgccaggctctgctttaggaactgggggtagaggaatgagtcagacctggtcttttgcttccaggaattcataatctgttggaggagagagacgaggatatggataatggtaagcctgagatacatatcttaattacaaaacagagtgatcagaactataaagaagatgtagaagatgctgtatcagactaggaggaagtggctttctcgggctggatgtgatgctaaccagtgagggaa

SEQ ID NO: 89958 - DNA, 1340 bp, Homo sapiens
cctgaacaccaactagtacttagccctagagctacctggggtttcatgcattttatggatatcttcaccacaaaccccacctcctcttttaaagtgtcccaaatgattctgtttatattatatccaagggttattagtcagcatttgctaatctgtgctacagaaaccacccctaaatctcaaagactgacaaccacaaagattttcttcccacttatgttaataacagctgcaggttatttaagcttctgctgtatgcgtcctcacattctaggtcttagactgaaggagcagctcctatgtcagtctgaagacagcaggaaraatgcaataattgaatcttgcaatggcttttaaagcttctttggggccagtgaattatacagcccccatagagagacactacacggtaggcagggatgggtaatcccttttctgaaagtccaacgaataattgggaataataatactatttaccacaacagtctaaaatgaaagtcagacatcatatgttagggcaggtgcttttattattgccattttacagatgaggaaactgaggcttagagaagataagggccccacagttatatagttttatacttgcttttagaacaggatgtttctgagaggttcacctcagttttctgcaatggatccaattgttattaaaaaaaaaaaaaagacccttgtagagagtctagaataccctctgccttctaaagttcatgtttggaagccaaactcaggggtctgtaaagagcttaattcagctcagcatgtagaaagagaggaaaaggccacagaatatgaagttagggtgcttgggggctggttcaggggctctgccactatatccctgttcaaactcagaaagttgtttaacctctctgatctcagtgtttatacatggaagggctcagagcatgcaattaataaggtctttcctggctctaagatgctagtatctaatttcaccattccaagtgaattctttatttaaaaactaccttgaaagataatcttgataaactgccaatttctggtcatctgctcattcattttagctgttctatcaaaagttgatagcgtgcagtctgtgccaggctctgctttaggaactgggggtagaggaatgagtcagacctggtcttttgcttccaggaattcataatctgttggaggagagagacgaggatatggataatggtaagcctgagatacatatcttaattacaaaacagagtgatcagaactataaagaagatgtagaagatgctgtatcagactaggaggaagtggctttctcgggctggatgtgatgctaaccagtgagggaa

SEQ ID NO: 89959 - DNA, 1340 bp, Homo sapiens
cctgaacaccaactagtacttagccctagagctacctggggtttcatgcattttatggatatcttcaccacaaaccccacctcctcttttaaagtgtcccaaatgattctgtttatattatatccaagggttattagtcagcatttgctaatctgtgctacagaaaccacccctaaatctcaaagactgacaaccacaaagattttcttcccacttatgttaataacagctgcaggttatttaagcttctgctgtatgcgtcctcacattctaggtcttagactgaaggagcagctcctatgtcagtctgaagacagcaggaaaaatgcaataattgaatcttgcaatggcttttaaagcttctttggggccagtgaattatacagcccccatagagagacacyacacggtaggcagggatgggtaatcccttttctgaaagtccaacgaataattgggaataataatactatttaccacaacagtctaaaatgaaagtcagacatcatatgttagggcaggtgcttttattattgccattttacagatgaggaaactgaggcttagagaagataagggccccacagttatatagttttatacttgcttttagaacaggatgtttctgagaggttcacctcagttttctgcaatggatccaattgttattaaaaaaaaaaaaaagacccttgtagagagtctagaataccctctgccttctaaagttcatgtttggaagccaaactcaggggtctgtaaagagcttaattcagctcagcatgtagaaagagaggaaaaggccacagaatatgaagttagggtgcttgggggctggttcaggggctctgccactatatccctgttcaaactcagaaagttgtttaacctctctgatctcagtgtttatacatggaagggctcagagcatgcaattaataaggtctttcctggctctaagatgctagtatctaatttcaccattccaagtgaattctttatttaaaaactaccttgaaagataatcttgataaactgccaatttctggtcatctgctcattcattttagctgttctatcaaaagttgatagcgtgcagtctgtgccaggctctgctttaggaactgggggtagaggaatgagtcagacctggtcttttgcttccaggaattcataatctgttggaggagagagacgaggatatggataatggtaagcctgagatacatatcttaattacaaaacagagtgatcagaactataaagaagatgtagaagatgctgtatcagactaggaggaagtggctttctcgggctggatgtgatgctaaccagtgagggaa

SEQ ID NO: 89960 - DNA, 1340 bp, Homo sapiens
cctgaacaccaactagtacttagccctagagctacctggggtttcatgcattttatggatatcttcaccacaaaccccacctcctcttttaaagtgtcccaaatgattctgtttatattatatccaagggttattagtcagcatttgctaatctgtgctacagaaaccacccctaaatctcaaagactgacaaccacaaagattttcttcccacttatgttaataacagctgcaggttatttaagcttctgctgtatgcgtcctcacattctaggtcttagactgaaggagcagctcctatgtcagtctgaagacagcaggaaaaatgcaataattgaatcttgcaatggcttttaaagcttctttggggccagtgaattatacagcccccatagagagacactacayggtaggcagggatgggtaatcccttttctgaaagtccaacgaataattgggaataataatactatttaccacaacagtctaaaatgaaagtcagacatcatatgttagggcaggtgcttttattattgccattttacagatgaggaaactgaggcttagagaagataagggccccacagttatatagttttatacttgcttttagaacaggatgtttctgagaggttcacctcagttttctgcaatggatccaattgttattaaaaaaaaaaaaaagacccttgtagagagtctagaataccctctgccttctaaagttcatgtttggaagccaaactcaggggtctgtaaagagcttaattcagctcagcatgtagaaagagaggaaaaggccacagaatatgaagttagggtgcttgggggctggttcaggggctctgccactatatccctgttcaaactcagaaagttgtttaacctctctgatctcagtgtttatacatggaagggctcagagcatgcaattaataaggtctttcctggctctaagatgctagtatctaatttcaccattccaagtgaattctttatttaaaaactaccttgaaagataatcttgataaactgccaatttctggtcatctgctcattcattttagctgttctatcaaaagttgatagcgtgcagtctgtgccaggctctgctttaggaactgggggtagaggaatgagtcagacctggtcttttgcttccaggaattcataatctgttggaggagagagacgaggatatggataatggtaagcctgagatacatatcttaattacaaaacagagtgatcagaactataaagaagatgtagaagatgctgtatcagactaggaggaagtggctttctcgggctggatgtgatgctaaccagtgagggaa

SEQ ID NO: 89961 - DNA, 1340 bp, Homo sapiens
cctgaacaccaactagtacttagccctagagctacctggggtttcatgcattttatggatatcttcaccacaaaccccacctcctcttttaaagtgtcccaaatgattctgtttatattatatccaagggttattagtcagcatttgctaatctgtgctacagaaaccacccctaaatctcaaagactgacaaccacaaagattttcttcccacttatgttaataacagctgcaggttatttaagcttctgctgtatgcgtcctcacattctaggtcttagactgaaggagcagctcctatgtcagtctgaagacagcaggaaaaatgcaataattgaatcttgcaatggcttttaaagcttctttggggccagtgaattatacagcccccatagagagacactacacggtaggcagggatgggtaatcccttttctgaaagtccaacgaataattgggaataataatactatttaccacaacagtctaaaatgaaagtcagacatcatatgttagggcaggtgcttttattaytgccattttacagatgaggaaactgaggcttagagaagataagggccccacagttatatagttttatacttgcttttagaacaggatgtttctgagaggttcacctcagttttctgcaatggatccaattgttattaaaaaaaaaaaaaagacccttgtagagagtctagaataccctctgccttctaaagttcatgtttggaagccaaactcaggggtctgtaaagagcttaattcagctcagcatgtagaaagagaggaaaaggccacagaatatgaagttagggtgcttgggggctggttcaggggctctgccactatatccctgttcaaactcagaaagttgtttaacctctctgatctcagtgtttatacatggaagggctcagagcatgcaattaataaggtctttcctggctctaagatgctagtatctaatttcaccattccaagtgaattctttatttaaaaactaccttgaaagataatcttgataaactgccaatttctggtcatctgctcattcattttagctgttctatcaaaagttgatagcgtgcagtctgtgccaggctctgctttaggaactgggggtagaggaatgagtcagacctggtcttttgcttccaggaattcataatctgttggaggagagagacgaggatatggataatggtaagcctgagatacatatcttaattacaaaacagagtgatcagaactataaagaagatgtagaagatgctgtatcagactaggaggaagtggctttctcgggctggatgtgatgctaaccagtgagggaa

SEQ ID NO: 89962 - DNA, 1340 bp, Homo sapiens
cctgaacaccaactagtacttagccctagagctacctggggtttcatgcattttatggatatcttcaccacaaaccccacctcctcttttaaagtgtcccaaatgattctgtttatattatatccaagggttattagtcagcatttgctaatctgtgctacagaaaccacccctaaatctcaaagactgacaaccacaaagattttcttcccacttatgttaataacagctgcaggttatttaagcttctgctgtatgcgtcctcacattctaggtcttagactgaaggagcagctcctatgtcagtctgaagacagcaggaaaaatgcaataattgaatcttgcaatggcttttaaagcttctttggggccagtgaattatacagcccccatagagagacactacacggtaggcagggatgggtaatcccttttctgaaagtccaacgaataattgggaataataatactatttaccacaacagtctaaaatgaaagtcagacatcatatgttagggcaggtgcttttattattgccattttacagatgaggaaactgaggcttagagargataagggccccacagttatatagttttatacttgcttttagaacaggatgtttctgagaggttcacctcagttttctgcaatggatccaattgttattaaaaaaaaaaaaaagacccttgtagagagtctagaataccctctgccttctaaagttcatgtttggaagccaaactcaggggtctgtaaagagcttaattcagctcagcatgtagaaagagaggaaaaggccacagaatatgaagttagggtgcttgggggctggttcaggggctctgccactatatccctgttcaaactcagaaagttgtttaacctctctgatctcagtgtttatacatggaagggctcagagcatgcaattaataaggtctttcctggctctaagatgctagtatctaatttcaccattccaagtgaattctttatttaaaaactaccttgaaagataatcttgataaactgccaatttctggtcatctgctcattcattttagctgttctatcaaaagttgatagcgtgcagtctgtgccaggctctgctttaggaactgggggtagaggaatgagtcagacctggtcttttgcttccaggaattcataatctgttggaggagagagacgaggatatggataatggtaagcctgagatacatatcttaattacaaaacagagtgatcagaactataaagaagatgtagaagatgctgtatcagactaggaggaagtggctttctcgggctggatgtgatgctaaccagtgagggaa

SEQ ID NO: 89963 - DNA, 740 bp, Homo sapiens
gatcctttcactttcataaaaggtattccttcccacgtcaagagaaaaagccaacatgtttttcctccaatgcataaaaggaacttccatagggctggcaggagtcaggctgttcaagacaactggaaggagttgaataacatctatccagtgagtcctgcaagacttcaggctctactacctccagcagctccctgctgagcctggaaaaggaggaaaaagtaaagaataagccaggggaaatcagacacaacagagccccaactaggtttcatgggtagcatagggaagtggttaaaaaactaaaaggatagatccattaatgaggtaacaaattattgccttcatgttgggacagaacagggccaaatggaaaagaatgaaagagaaagacagatagacacacacacacacacacacacacacacacacacacacacasacacagagagagaacgagctcagtgaattgtccaggtgacacactgatgagggagtaacaggacactctgagttagtgccctcaggacacacagcatacagggatcatgaaaagactgtgctcaataattttccataaaatgtgctcaagtttccatgcagtcgccatgagaatacagtttttgaagtctggtccacctacagtaggttagtaaatgataaggggaggaagaaatggaaacctaaatatctactgcaatgaaaaccaacagcaatgttagtaggaataattcaggctt

SEQ ID NO: 89964 - DNA, 740 bp, Homo sapiens
gatcctttcactttcataaaaggtattccttcccacgtcaagagaaaaagccaacatgtttttcctccaatgcataaaaggaacttccatagggctggcaggagtcaggctgttcaagacaactggaaggagttgaataacatctatccagtgagtcctgcaagacttcaggctctactacctccagcagctccctgctgagcctggaaaaggaggaaaaagtaaagaataagccaggggaaatcagacacaacagagccccaactaggtttcatgggtagcatagggaagtggttaaaaaactaaaaggatagatccattaatgaggtaacaaattattgccttcatgttgggacagaacagggccaaatggaaaagaatgaaagagaaagacagatagacacacacacacacacacacacacacacacacacacacacacasacagagagagaacgagctcagtgaattgtccaggtgacacactgatgagggagtaacaggacactctgagttagtgccctcaggacacacagcatacagggatcatgaaaagactgtgctcaataattttccataaaatgtgctcaagtttccatgcagtcgccatgagaatacagtttttgaagtctggtccacctacagtaggttagtaaatgataaggggaggaagaaatggaaacctaaatatctactgcaatgaaaaccaacagcaatgttagtaggaataattcaggctt

SEQ ID NO: 89965 - DNA, 740 bp, Homo sapiens
gatcctttcactttcataaaaggtattccttcccacgtcaagagaaaaagccaacatgtttttcctccaatgcataaaaggaacttccatagggctggcaggagtcaggctgttcaagacaactggaaggagttgaataacatctatccagtgagtcctgcaagacttcaggctctactacctccagcagctccctgctgagcctggaaaaggaggaaaaagtaaagaataagccaggggaaatcagacacaacagagccccaactaggtttcatgggtagcatagggaagtggttaaaaaactaaaaggatagatccattaatgaggtaacaaattattgccttcatgttgggacagaacagggccaaatggaaaagaatgaaagagaaagacagatagacacacacacacacacacacacacacacacacacacacacacacasagagagagaacgagctcagtgaattgtccaggtgacacactgatgagggagtaacaggacactctgagttagtgccctcaggacacacagcatacagggatcatgaaaagactgtgctcaataattttccataaaatgtgctcaagtttccatgcagtcgccatgagaatacagtttttgaagtctggtccacctacagtaggttagtaaatgataaggggaggaagaaatggaaacctaaatatctactgcaatgaaaaccaacagcaatgttagtaggaataattcaggctt

SEQ ID NO: 89966 - DNA, 740 bp, Homo sapiens
gatcctttcactttcataaaaggtattccttcccacgtcaagagaaaaagccaacatgtttttcctccaatgcataaaaggaacttccatagggctggcaggagtcaggctgttcaagacaactggaaggagttgaataacatctatccagtgagtcctgcaagacttcaggctctactacctccagcagctccctgctgagcctggaaaaggaggaaaaagtaaagaataagccaggggaaatcagacacaacagagccccaactaggtttcatgggtagcatagggaagtggttaaaaaactaaaaggatagatccattaatgaggtaacaaattattgccttcatgttgggacagaacagggccaaatggaaaagaatgaaagagaaagacagatagacacacacacacacacacacacacacacacacacacacacacacacasagagagaacgagctcagtgaattgtccaggtgacacactgatgagggagtaacaggacactctgagttagtgccctcaggacacacagcatacagggatcatgaaaagactgtgctcaataattttccataaaatgtgctcaagtttccatgcagtcgccatgagaatacagtttttgaagtctggtccacctacagtaggttagtaaatgataaggggaggaagaaatggaaacctaaatatctactgcaatgaaaaccaacagcaatgttagtaggaataattcaggctt

SEQ ID NO: 89967 - DNA, 714 bp, Homo sapiens
ttccacttcttggtacttttcaatttctgcaataagttcagacatggacagacatattaagctggttctcctacacacataacaatccactgtctaatcctcacacagggacttcaggctcctcagcatgagaataggacactgtgagagatagtcttcaggaggcctgaaggctgatcaccatagagattccttggtttttgtcccagaaactgtgggtaaaattccctattctggtagatcgttatcccaatatcatttgtcccaagtttgtgcaaatggttatgccatatttttccaatcgatttaaagcaaatgcccccaaatggctgctaggagaaaaactgcactattcagccctgtctcatcaaatactcagattgttcatggtagtgaggattttagacgctgaaattagagtgaaggatgaaatctacaagatctacaaaattgagacaaaatcagagttgtgtgaatttgtcacatctgcccagatccaacattttgagagtaggattagggcgccacrggcatggcctgagactaggaagagagccttgctcactgacccatcccttgtctgggcttccaagtggaactagagtttcactcaacctacatgtgcctatagttcctccctgtggtaatgacatctctcagctcagtaagggccacttgcagtaggaatatgaccctaaccagaagactcagtgg

SEQ ID NO: 89968 - DNA, 714 bp, Homo sapiens
ttccacttcttggtacttttcaatttctgcaataagttcagacatggacagacatattaagctggttctcctacacacataacaatccactgtctaatcctcacacagggacttcaggctcctcagcatgagaataggacactgtgagagatagtcttcaggaggcctgaaggctgatcaccatagagattccttggtttttgtcccagaaactgtgggtaaaattccctattctggtagatcgttatcccaatatcatttgtcccaagtttgtgcaaatggttatgccatatttttccaatcgatttaaagcaaatgcccccaaatggctgctaggagaaaaactgcactattcagccctgtctcatcaaatactcagattgttcatggtagtgaggattttagacgctgaaattagagtgaaggatgaaatctacaagatctacaaaattgagacaaaatcagagttgtgtgaatttgtcacatctgcccagatccaacattttgagagtaggattagggcgccacaggcatggcctgagactaggaagagagccttgctcactgacccatcccttgtctgggcttccaagtggaactagagtttcactcaacctacatgtgcctatagttcctccctgtggyaatgacatctctcagctcagtaagggccacttgcagtaggaatatgaccctaaccagaagactcagtgg

SEQ ID NO: 89969 - DNA, 707 bp, Homo sapiens
tgtaatgaaactgtagtctcagctggaagcctagacatgaaatggttcagtgagcaagactctcttcctagtctcaggccatacctgtggcgccctgatcctattctcatgacattggacctgggcagatgtgacaaattcagagaactgtgattttgactcaagggtttgtagatttcctttttcactctaatttcagtgtctggagtcctcactaccatgaacaatctgagtatttgatgagacagggctaaatattgcagtttttctcctagaaatcattgagggtatttgctttacgttgattggaaaaatatggcgtaactgtttgcasaaacttgggacaaatgatattgggataacgatctactagaatagggacattttacccacagtttctgggagaaaaaccgaggaatttctatcatgaccagccttcaggcctcctgaaatatatctctcacagtgtcctattcttatgctgaggagcctgaggtccctgtgtgaggattagacagtggattgttatgtgtgtaggggaatcagcttaatgtgtctgtccatgtctgaatttattgcagaaattgaaaagaaggggaaggggaaaaaaagaaggggaagaagatcaaagaaggaaagaagaaggggaagaaaagaaggggaagaagatcaaaacccaccatgccccaggtgactttcagcaattg

SEQ ID NO: 89970 - DNA, 1006 bp, Homo sapiens
aagtgcatctgtgtgtgtatgtgtgtgktgtgtgtgtgtctgtgtttgtgtgtgtgagggggtgggaggaaaaagagagacataaaggataaagagaataagaatactaaaacattgcctgtgagcctatccattcagacaatgtgcaggaagaagttaggtatcccttacaagactaactggctgtggatatttataaaaataaaatttttagttaactgtccattttccaaactgctcaagaacaactgatgtcttttctcagagtattcctaactctggcacgtagcttctggccataatagagtgacataacttttcattgcccatgctacattttaaaaattaataatataatatgaagatcagtatgggtaaattttcatggaggaaggataaatttctctaatagagaatggaagatctgtaaagactgaaaatgccatgctgttacgtgttaccatccctattagaatcacttgtttctagtcctcccaatcaatgtgtttccaatgatgccagctgaaggaatggaaggaaagggacgtgggacagcttcacatcagaaagaatgtgcataaccaagaacaagacagttttataactcagtcattctaagagactatttattacacacaccatatgcctcctattcctgatgggagaggttccttcagttgtatactagttgcttgttttctgttaaatcaaacaaaaatgttttgatgttagcatacactataatgaaatccttggatagcatggggatttcactgaaagaaggtataccctctagtgtaacagtgtagaataaaaataaagacagaaatagcatttcatgaagtgcctggaatacagagtgagccaaaaagcatgatcttcttaaatttacagtctttgcaaaggatgaaaaataaccaaagcaggaaagtagtttaattcactaaggtaccaacttgtgtttaaaagcatgtgctccttctgatggtctaatatttactaagta

SEQ ID NO: 89971 - DNA, 947 bp, Homo sapiens
gcatttatttattatcagacatcttaactagaatgtaagttctatgaaagcatggatttttaaaaattcacttttgtatcctcagaacctagaagagtgcctgacacataatagatacttaataagtgtttgttgaagaaatgagtaaacaaatgagcaaatatacagtctgtctatgaatttggcttaatgatcctagcttaatacataatccaagagggaaaaaacttgttttgagcattactcacttttcgttgttttacagagtccaattttatgagccaatatgaagccactttggttttatgatacttccagttatcaatgatctgtttggaaggaggaacattaagaaatttacaggttgaaacccattttttaaattaatttgtgtaatgaaagcactataatatacttgcaacaaataatgccaactttcataaaaacacatgtgcaaagatttctaatacaaattaaagaaaccatctacatccaaagctttctattctagttgtattaagaatacaatctctgtggcccacacctgtaattccagcactttgggaggctgaggcaggcagwtcacttgaggccaggagttcaagaccagcctggccaatatggcaaaaccctgtctctaagaaaaatgtaaaaattagctgggtgtggtagtgcatgcctgtaatcccagctatttgggtggctgaggcacaagaatcacttgaatccaggaggtggaggttgcagtgagctgagattataccactgcactccagcctgggcaacagaatgagactctgtctcaaaaacaaaaaacaatctccaatgaatgaaagtcaaatgtcttcaggcacataagatttggcaagaaatccaagaaatagatttttcatttgtattttagaggctgatttatcattcatagtaataaaatattgaataatgca

SEQ ID NO: 89972 - DNA, 947 bp, Homo sapiens
gcatttatttattatcagacatcttaactagaatgtaagttctatgaaagcatggatttttaaaaattcacttttgtatcctcagaacctagaagagtgcctgacacataatagatacttaataagtgtttgttgaagaaatgagtaaacaaatgagcaaatatacagtctgtctatgaatttggcttaatgatcctagcttaatacataatccaagagggaaaaaacttgttttgagcattactcacttttcgttgttttacagagtccaattttatgagccaatatgaagccactttggttttatgatacttccagttatcaatgatctgtttggaaggaggaacattaagaaatttacaggttgaaacccattttttaaattaatttgtgtaatgaaagcactataatatacttgcaacaaataatgccaactttcataaaaacacatgtgcaaagatttctaatacaaattaaagaaaccatctacatccaaagctttctattctagttgtattaagaatacaatctctgtggcccacacctgtaattccagcactttgggaggctgaggcaggcagatcacttgaggccaggagttcaagaccagcctggccaatatggcaaaaccctgtctctaagaaaaatgtaaaaattagctgggtgtggtagtgcatgcctgtaatcccagctatttgggtggctgaggcacaagaatcacttgaatccaggaggtggaggttgcagtgagctgagattataccactgcactccagcctgggcaacagaatgagactctgtctcaaaaacaaaaaacaatctccaatgaatgaaagtcaaatgtcttcaggcacataagatttggcaagaaatccaagamatagatttttcatttgtattttagaggctgatttatcattcatagtaataaaatattgaataatgca

SEQ ID NO: 89973 - DNA, 1089 bp, Homo sapiens
ctgccattgcaagcaatcagtaaatattakccattatatccattgctttgggattatttctctgggcagttttcaagtgccttaatgatcttctcctgtccttcatctgatacacattcccatatcatttgctggatattcatattatggaatcagaatactgtaatgttgactttctttttcccaggattgattatgtcaagtggccaggcatggaaggagcaaagaaggttcactctgacagcactaaggaactttggtttaggaaagaagagcttagaggaacgcattcaggaggaggcccaacacctcactgaagcaataaaagaggagaacggtgagcattgcatatgacagaggtgagagactgtggcccatttgttcattggacagatacttactaagtgagtaagtgcttgttctatgcccagcactgtgctaggaatggaagatagaacagtgaacaactctgtcctcaaagagttttagaagtaaatacacaaagatgggcactaaacacattactgaatttaagccctggtccgcagtttgacttccctggagttgactgaatacttgttgtatgtcagatgcagtgtaaggtcatgtggccagctcctcatatatggttctgcactaggtatgtcttatgccatgtaaagtagactctcagtaggaaatggagacaaatccatcagaaggatccatcttgcccttcctccaccttcaggacagccttttgaccctcatttcaagatcaacaatgcagtttccaatatcatttgctccatcaccttcggagaacgctttgagtaccaggatagttggtttcagcagctgctgaagttactagatgaagtcacatacttggaggcttcaaagacatgccaggtaaggcagctgtctctccatatctttgttcagtaaattggggccgatgtcagccacagatgggtttttccttttagttttttttgggtttttgaagttaaaatataacctttcaaaactaatttcaacacaaacttatttgaaataaatctattgactttagttttttaactaatatggaatatttatatgcaaaaa

SEQ ID NO: 89974 - DNA, 1089 bp, Homo sapiens
ctgccattgcaagcaatcagtaaatattagccattatatccattgctttgggattatttctctgggcagttttcaagtgccttaatgatcttctcctgtccttcatctgatacacattcccatatcatttgctggatattcatattatggaatcagaatactgtaatgttgactttctttttcccaggattgattatgtcaagtggccaggcatggaaggagcaaagaaggttcactctgacagcactaaggaactttggtttaggaaagaagagcttagaggaacgcattcaggaggaggcccaacacctcactgaagcaataaaagaggagaacggtgagcattgcatatgacagaggtgagagactgtggcccatttgttcattggacagatacttactaagtgagtaagtgcttgttctatgcccagcactgtgctaggaatggaagatagaacagtgaacaactctgtcctcaaagagttttagaagtaaatacacaaagatgggcactaaacacattactgaatttaagccctggtccgcagtttgacttccctggagttgactgaatacttgttgtatgtcagatgcagtgtaaggtcatgtggccagctcctcatatatggttctgcactaggtatgtcttatgccatgtaaagtagactctcagtaggaaatggagacaaatccatcagaaggatccatcttgcccttcctccaccttcaggacagccttttgaccctcatttcaagatcaacaatgcagtttccaatatcatttgctccatcaccttcggagaacgctttgagtaccaggatagttggtttcagcagctgctgaagttactagatgaagtcacatacttggaggcttcaaagacatgccaggtaaggcagctgtctctccatatctttgttcagtaaattggggccgatgtcagccacagatgggtttttccttttagttttttttgggtttttgaagttaaaatataacctttcaaaactaatttcaacacaaacttatttgaaatmaatctattgactttagttttttaactaatatggaatatttatatgcaaaaa

SEQ ID NO: 89975 - DNA, 1088 bp, Homo sapiens
actttatgcataaatgcacttgccaaacaaatttttttaaacagtgtcacagtatacataatttgtagtctgcttttttaacttaacattttgtggacaaattttcacgttataaatattattcttaccatcttttttaatgctggcatagtaattcccattatatgaatacggcaaaattgtatacttaattgagatgtctaactcatttctaagaacaatgacttacatacagtaaacatctagtaaatatttgttgaatgaaataatatataatgtgaggttaactaaaactctagagtagaggttctcaatgaaggacaattttgcccccaagggaacatttggcaatacctacatacatttttggttatcgaaactacaggagtattactgtcacttagcagttagaagtcagagatatgactgaacatcctacgctgtacaggacagtccctgrcaacaaagaaccatctagacaaaaaagtcaatagtgctgacattgtaataaccctgctccacattgcatggtattaaaagagaatcgaggaccttgtagaaaatacacaacatatttacattagggtgagactttaataaagggacatttacaaggatttggacaggatcttgaggaaacaactacagagtgccattccctggggctagcaaaagcaagtcattaccaaccatagacctaaaagagaacatggaagtaataaccaaaaattagaaaagatagctataccgaaggtccttcacaggaactggccttggaaagaaagaggcaacagatctaagtgactcagcagggaactctcttctaccctctaacttcctgctgatacatcccttagtaaaacccaactacaagtcaaatgaaaagagatcttggtgatcctgtccacgtgtcaacctctacaaaacctactctgcatcattttgatactgtcggtccatttattttggccaatccagtaaataagcagtatcccactggatttttaatgggaatcttttcatctattcactgaccattgggatattttcggttggcccatttttctatttattgtttgactctttcc

SEQ ID NO: 89976 - DNA, 547 bp, Homo sapiens
cggttcagtgtcccctcctgaagtcacagagcaaacagcacatcagatttctagcacactcctcagactttgctccggcccggccacgtgggaagccccccagtgcttgccatgccttcttagtccatgagccatgtgtggggccaaaggtgtcaagtgctctggagcaacagggtggctcaggagctgccggctgcctggtcacagaccgctgtgtgacttcagggccacagcacttgtgggcgtagggagagggggattcgagacagttcatcaaatattaaatcctaaaaactcattcataaatttggatcactgtttctgcccaagccagaggtaaaaacaaataacaggtagacttgggatgtccccagccaccctcacaaaagcagccatgmtgttccagctccactccttgagaaccatgcgagtgcagagctctccgccctttccgagcagccaaatcctatttcttctagaggaagcttcgggatgtgtgaaggcagacccgacttcaggacctcattcagagtgagagcctgggaac

SEQ ID NO: 89977 - DNA, 547 bp, Homo sapiens
cggttcagtgtcccctcctgaagtcacagagcaaacagcacatcagatttctagcacactcctcagactttgctccggcccggccacgtgggaagccccccagtgcttgccatgccttcttagtccatgagccatgtgtggggccaaaggtgtcaagtgctctggagcaacagggtggctcaggagctgccggctgcctggtcacagaccgctgtgtgacttcagggccacagcacttgtgggcgtagggagagggggattcgagacagttcatcaaatattaaatcctaaaaactcattcataaatttggatcactgtttctgcccaagccagaggtaaaaacaaataacaggtagacttgggatgtccccagccaccctcacaaaagcagccatgctgttccagctccactccttgagaaccatgygagtgcagagctctccgccctttccgagcagccaaatcctatttcttctagaggaagcttcgggatgtgtgaaggcagacccgacttcaggacctcattcagagtgagagcctgggaac

SEQ ID NO: 89978 - DNA, 547 bp, Homo sapiens
cggttcagtgtcccctcctgaagtcacagagcaaacagcacatcagatttctagcacactcctcagactttgctccggcccggccacgtgggaagccccccagtgcttgccatgccttcttagtccatgagccatgtgtggggccaaaggtgtcaagtgctctggagcaacagggtggctcaggagctgccggctgcctggtcacagaccgctgtgtgacttcagggccacagcacttgtgggcgtagggagagggggattcgagacagttcatcaaatattaaatcctaaaaactcattcataaatttggatcactgtttctgcccaagccagaggtaaaaacaaataacaggtagacttgggatgtccccagccaccctcacaaaagcagccatgctgttccagctccactccttgagaaccatgcgagtgcagagctctccgccctttccgagcagccaaatcctatttcttctagaggaagcttcgggatgtgtgaaggcagacccgacttcaggacctcattcagagygagagcctgggaac

SEQ ID NO: 89979 - DNA, 517 bp, Homo sapiens
tgaacaccttagcctgatattcaaggtctctaccatrggcgagtgctattttctcacctgactccccattgtttccctgcatgcgtcatgcagctggctcactgcccccctgtcatgcctcatgaattcccttccactcttaagtctatgctagctgtttccctaacattgcagctgcttctggatgctttccctagcccacaaggacccttcaggctttagaatgccaacaccccatccttggcctgtctcagaaaccacctgtggctgctgttagtccaagggaagcccttagccacatctggaactaaagctcctcaaagaagggattaacatctcattgctcttcaccaccttctctctgccacccattgctcactggctgctttatgatggtcagtgcttgttgacttgatgcctacaggtgcaggagctggagctgccgacagacctcttggagggtgttggagaaaagccataggaggtaagggaggcagacacaaggcacccctggcag

SEQ ID NO: 89980 - DNA, 386 bp, Homo sapiens
cttgrgctggtttggggagtggtgaggtaggggtgggggtgctgtaggctctttttcaaagaaaacaaaaaacaatgaaaacctcatttgggaagaaaagctgtagggattcccccacccaaatacaagtcccagtggaaaggaaaggtagtacctattcttctccatggggttcctaacaccctccattactctttcagtctccaagcactttgaatccatttttaaacattcaggttgccagacctgtcacacagtggactctgatagggttacggagggggcctggctctcagtctctactctcctatgtcccatcagttggttggaggccaccttccagggggtatgggagacaggttttggtttttaagtgtctttttttt

SEQ ID NO: 89981 - DNA, 554 bp, Homo sapiens
ctgaaatggaattatagtgataataccaaatttataggtttttatgagaataaaatgagctgataaatgcataataactttcaaaccataaaattccatacaagtgtaagttattttaaatacgatctaggatggaggtgaagggaagtgaacagggggtttctggaaaaaataaggtagttcaacttttctcaagtcagttctctcactctcttataaacatgcaaagatctataagtaaattgccccccacccccagttccaaggtatctatgtcaattccctagagcatgggaatgtcaaaagatgtgattaaattaaggatctcgagaggagaagtttatcctggatgatccaagtggggcctaaatataatcacatatatccttctaagagaaaggagaaaggagttttgagagagacagaacacaaaggagaaggagacagagcagagagagagacacggccacaagccaagkaatgacaacagtcaccaaaaactgggaggggcaaggagtggatcctcccctatagcctctggagggagcctggta

SEQ ID NO: 89982 - DNA, 799 bp, Homo sapiens
aaaaaaaatctttaagtatacatcttatgtaggtaatagcttctttgcatatctctcttcaaaaaatactttacagcagtatataaataggttacctacacatttaattttataattttgtcccaaaactatagatctgtttcattttcatgacatatcaatttttgcccaacattaataaagctgacaaactcgttgaaatggaaatgcttttgtcttccacaacaaaagttgcaatttgatagaaaaaacaaaacaaaacaaaaaaacaccctacagtaacactcgtcagttgtttaacctgagcgtttggcctactaggagtagcagcttttttccttcatgcacgctcacatccacaccgcctctgcacacatacagattgagcacacacttccagatgctggtaggccaaaatatgcttcccattgctctaatcaagtgggaaacagtgtagctagtgattaaccacactatatacacaactagcaaataccttaaggcaaccattgcaatggggggttaacttgcagggtggatttaatgttctagatcaagtcagcctgtatatacatatgtgtatgtgaatctatacacgtacacctttctattttttaaccctccaagacaatgtttatttttttaattttgtgcaaatttctaaatatcctaccatttaaggcaaagagtttgcattaagaaaggtcagaaaataggcttacgtttatycaaaagcatctcaccttgcacactactgttgttgttttttaaacacatacaacttttaagtgtggacact

SEQ ID NO: 89983 - DNA, 799 bp, Homo sapiens
aaaaaaaatctttaagtatacatcttatgtaggtaatagcttctttgcatatctctcttcaaaaaatactttacagcagtatataaataggttacctacacatttaattttataattttgtcccaaaactatagatctgtttcattttcatgacatatcaatttttgcccaacattaataaagctgacaaactcgttgaaatggaaatgcttttgtcttccacaacaaaagttgcaatttgatagaaaaaacaaaacaaaacaaaaaaacaccctacagtaacactcgtcagttgtttaacctgagcgtttggcctactaggagtagcagcttttttccttcatgcacgctcacatccacaccgcctctgcacacatacagattgagcacacacttccagatgctggtaggccaaaatatgcttcccattgctctaatcaagtgggaaacagtgtagctagtgattaaccacactatatacacaactagcaaataccttaaggcaaccattgcaatggggggttaacttgcagggtggatttaatgttctagatcaagtcagcctgtatatacatatgtgtatgtgaatctatacacgtacacctttctattttttaaccctccaagacaatgtttatttttttaattttgtgcaaatttctaaatatcctaccatttaaggcaaagagtttgcattaagaaaggtcagaaaataggcttacgtttattcaaaagcatctcaccttgcacaytactgttgttgttttttaaacacatacaacttttaagtgtggacact

SEQ ID NO: 89984 - DNA, 627 bp, Homo sapiens
tccatattcagaagtccctgctctgacactttgtgctatgtgatcttcgacaagccacgaacgtcgccacgcttctatttcctcacctgtaaaatgggaatgatgacatctgatgataagcaaccatggccaacttatctaacagaaatgaaggtccaatgccaatattggagaatgctttgtaaattccgaattgtagtgttcagtgagaaattgataacattttcttcttgtaaggactgtamttcatagatttttaatggctgtctcacatcgcaaccccaagataacacactgctgagcaaataggaggagctcaataaataattgtagaatgtgatcatcgttgttctcatctttacaaattccttattaatgccgttttgttgctgccagataactcattgtcttcccatgctgacattatataagtctgggacacacatgaacatgggaagacatcagaaagttacataactgaccagtagagaataaacatcagttacacataaaggttaagtgcattttagaggttagaaaaagtgatgagtgaataattgcgataggaaagtggtttgtgggaacagctataagatatagattgaggtaggtgggattggggaagct

SEQ ID NO: 89985 - DNA, 546 bp, Homo sapiens
catgaaaaagccagtctggaagagctacatattatatagcctcatttataggacattcttgaaaaggtaaaactgtaaagacaagaaacagatgagtgactgccagagcttctaggtagcaaggatgggatgttaataagtgaagcacagggaagttcttagggcagtgaaatrgttctgtatgatactgtaatgatggatacaagatactgtgtatttgtcaaaacccataaaaatatgcagtacaaagaatgaaccttaatgtatgcaaatttaagatgataataatttaggaggttcggaaatcccaagatgggatgtagaatgtgacactgaaactgtattacaaatgtttgcaacaacctcaccgaagaagatgcggcaaatctttcttagatcatgtttaaggcgtctctgagactaaaagcaaaaggaactgcctaatttagttgataacatttcccaactgggcaatagtaatgaaccaataacacacgtgcactgaaactgaacagtttagcaaacaatagtggtagatgcaagcca

SEQ ID NO: 89986 - DNA, 546 bp, Homo sapiens
catgaaaaagccagtctggaagagctacatattatatagcctcatttataggacattcttgaaaaggtaaaactgtaaagacaagaaacagatgagtgactgccagagcttctaggtagcaaggatgggatgttaataagtgaagcacagggaagttcttagggcagtgaaatagttctgtatgatactgtaatgatggatacaagatactgtgtatttgtcaaaacccataaaaatatgcagtacaaagaatgaaccttaatgtatgcaaatttaagatgataataatttaggaggttcggaaatcccaagatgggatgtagaatgtgacactgaaactgtattacaaatgtttgcaacaacctcaccgaagaagatgyggcaaatctttcttagatcatgtttaaggcgtctctgagactaaaagcaaaaggaactgcctaatttagttgataacatttcccaactgggcaatagtaatgaaccaataacacacgtgcactgaaactgaacagtttagcaaacaatagtggtagatgcaagcca

SEQ ID NO: 89987 - DNA, 546 bp, Homo sapiens
catgaaaaagccagtctggaagagctacatattatatagcctcatttataggacattcttgaaaaggtaaaactgtaaagacaagaaacagatgagtgactgccagagcttctaggtagcaaggatgggatgttaataagtgaagcacagggaagttcttagggcagtgaaatagttctgtatgatactgtaatgatggatacaagatactgtgtatttgtcaaaacccataaaaatatgcagtacaaagaatgaaccttaatgtatgcaaatttaagatgataataatttaggaggttcggaaatcccaagatgggatgtagaatgtgacactgaaactgtattacaaatgtttgcaacaacctcaccgaagaagatgcggcaaatctttcttagatcatgtttaaggcgtctctgagactaaaagcaaaaggaactgcctamtttagttgataacatttcccaactgggcaatagtaatgaaccaataacacacgtgcactgaaactgaacagtttagcaaacaatagtggtagatgcaagcca

SEQ ID NO: 89988 - DNA, 711 bp, Homo sapiens
gatcctaccaccccagctgcctcagagcacagagctgtgatttgcacttcttaaaaaaataatcagtgggttgtgcttggtgaaaaggagacatttcagaatctcgtttcttgaggattataaaaagtcgcacaatttcagataactatatgaatagtgcttcaattttcaaatcactttcacacattttcccatttaagtcctacatctcccccttcacacacactgtgcaaggagatgtgattttctccatttaacaaatgataaaaccagaaagaatgatgcaacctagttagaaagtagcagtataaaacttgaaggtaggtctactactatattattattagaaaggtaccagacttaaacaataacaaaaagaagtcatttttaagtatataatatatattttaagtatatattatattatttatatatatttaagtwagtatatatatatatttaagtatatattatattatatatatttaagtatatattataatattattccagtttatcaataaggacacaggcaccagagaccctcagtaatagtctaagttcagggccagagacagaattggcctgcagacaggcccttcataatgccagtgtcttctcacagctacttgactgattacatcgattgccacactgaggtgtccgtggaggcagaaggcgttcacatcccaaatcatgcttttccatttt

SEQ ID NO: 89989 - DNA, 1152 bp, Homo sapiens
tgaatttattttctaattatcttttttaatgccaatctctttgtgtatttgtttgttttgtttgcttttttgttgttgttgaattctttgtcctttcctagaccttatttcccagtcccccaattgagtctgtcctttttgctatcatcgtttcttctctgaagctatgaatggtagtatgttcgaaattttcttctgccctcagcrttgtttcactttcctatgtaccattcccctcatccccccattgtttatttttttctctcatgttggaggctttcctcaaatttctggtacaagagagtctatctagttatttatagttaggaatggagcactaaaaaggtggttggaagctgtgtgtgcatgtgtggggttggttgctgtggaacaagtgatgagcagagagcttttgaattgaactccttatatgttagcatatattggtgtcttcaggttcattgtcttcagagaaggatactaaccatctcctgcctgggatgtaagattggctgcttgtgttctagaactgagtgaaaaatccaggatgcagattttcatttgatccctctgttctcagcatagtactgcatctctaccctcctttttgcccagtttcttaattccgaagactttctggtttgattcctccagatactatagggtaaagaaggggtagctacctgaccacacagaataaaaatgagaacctaatttaggagtggcttaattgctctttatatatttttatcaacgaatcctcatcttcagctcattggttcacacctgtcctcaaaggtctctagttctcctattttctgagctcttccaaggttctgtgcaccaaatcactattcaattaatgttagttattaatactatggtattggtgttgtaatttattgccatacactgtgtagatattttggtttgaccttcttttctccctgcatggtcatttatcatgctcctgtttttaatcttcatatataaggggctgagatctagttgtggtggtagtcagaaaaatgatcccccaaaagatatctaggtcacaatcttagaatatgtgaatattatattttttgggaaagaagtctttgcagatgtgagtagattcatgattttgagattaggagattaccttggatt

SEQ ID NO: 89990 - DNA, 1152 bp, Homo sapiens
tgaatttattttctaattatcttttttaatgccaatctctttgtgtatttgtttgttttgtttgcttttttgttgttgttgaattctttgtcctttcctagaccttatttcccagtcccccaattgagtctgtcctttttgctatcatcgtttcttctctgaagctatgaatggtagtatgttcgaaattttcttctgccctcagcattgtttcactttcctatgtaccattcccctcatccccccattgtttatttttttctctcatgttggaggctttcctcaaatttctggtacaagagagtctatctagttatttatagttaggaatggagcactaaaaaggtggttggaagctgtgtgtgcatgtgtggggttggttgctgtggaacaagtgatgagcagagagcttttgaattgaactccttatatgttagcatatattggtgtcttcaggttcattgtcttcagagaaggatactaaccatctcctgcctgggatgtaagattggctgcttgtgttctagaactgagtgaaaaatccaggatgcagattttcatttgatccctctgttctcagcatagtactgcatctctaccctcctttttgcccagtttcttaattccgaagactttctggtttgattcctccagatactatagggtaaagaaggggtagctacctgaccacacagaataaaaatgagaacctaatttaggagtggcttaattgctctttatatatttttatcaacgaatcctcatcttcagctcattggttcacacctgtcctcaaaggtctctagttctcctattttctgagctcttccaaggttctgtgcaccaaatcactattcaattaatgttagttattaatactatggtattggtgttgtaatttattgycatacactgtgtagatattttggtttgaccttcttttctccctgcatggtcatttatcatgctcctgtttttaatcttcatatataaggggctgagatctagttgtggtggtagtcagaaaaatgatcccccaaaagatatctaggtcacaatcttagaatatgtgaatattatattttttgggaaagaagtctttgcagatgtgagtagattcatgattttgagattaggagattaccttggatt

SEQ ID NO: 89991 - DNA, 1876 bp, Homo sapiens
tgcctaaacttaaaaaaatgctgttagaataagtaatcaacacattaaacattcatattaaaattaataatgaactgtttattgattatctgctattttaaataattattcatgtatagttttaaaatgcagaaaatcatttttattgacaatgmtcaaattactataatgtctagttattacaattaaaattattcacattttacaatttaaatttgaaaaatggttaactttgtaggttgcaataggattacctatatattttacagaggagaaaacaaaaagaatcagcctactattgagaattaaatattggtatctcctctttctccacaacttatatgttagggttccttaacattttatcacaggtttttcttcttagcttctactttctttaaagtgcacttattttaaaagctttaattagcaccaatattttcatggctcataaatgttatctccagccttgaactttcctctgatctacagttcattcaacaggaattcttaggggtttcaaacatttctcaagctcaacctgtgtgagataaaaagtcaataatactcctttttcccaccaggaaatcagccttcatttattattctttgtttcagtaaatgacaccatcatttaccccccaaaaaaccttgaaatttcagagtcatccctaatttatttctctttctacatctccatattcaatccatcatcaatccaaatccaagtgactttctaaatatcttttgaatgtactgatttttttaatcttgcttgccttaacttcaccttgctcaggcttcagcaaagaatgctttaactgatctgttcaatcctcagtagctgaagttatattttcgaaatccaaatcatatttttctctcatcagaaaccactatcaccaacaaccccttttgactccatcacatactgaactttctgaacttgaaacccttttatatcttcatattattcttttaacaatgtgcaaataatgcaaacaagcaacagggccttaaataatctcactctaacctaattctatagcttaacatctttccaaattgctctttcatccctttgctcagatcagctgacatcttcatgcatctttaatttaacattcttcttcccatcataaagcctgagcagataccatttcttcagtctgaatggttttctttttcatcttactattcttaaactcttaattctttttatatttgcaatatacctcctcaagaaaacatttcttaacttcttaacttattaaattctttatgataaattcttcaagcaccatcaattctttgcacgttagttcaaatattcatatatttgcatgaattgcattttttgcaagacataaatcccataagaataggaaacaaatatctttttactcacaattttattccacgtgccaagcacagtatctgcatatagcatgtcattacaatgtatatgaataaatatctccactatagcactattaagttcaaatatatactttgaggagaaattgtttgttgaataagcactcacggaattctttgtgaaggaaatacaaagataaataagaaaccttgaatattttgtgatgatattaattatatcgacaaataatattgaaaactattgttcaaggttcatattgggtgtaaattgggtccattagtgcagagaagaacagtcattgcttatgtttcagtcaagaacaaagatgaatgagcattaattttagaatagatgttaagagttttagtactgtgtactataaaattaaataggaaaagagtatcatattattttgaaatcagggaaactatcctagagaaggtgttttcaatataaaacctatgcaaagagagaaaa

SEQ ID NO: 89992 - DNA, 1876 bp, Homo sapiens
tgcctaaacttaaaaaaatgctgttagaataagtaatcaacacattaaacattcatattaaaattaataatgaactgtttattgattatctgctattttaaataattattcatgtatagttttaaaatgcagaaaatcatttttattgacaatgatcaaattactataatgtctagttattacaattaaaattattcacattttacaatttaaatttgaaaaatggttaactttgtaggttgcaataggattacctatatattttacagaggagaaaacaaaaagaatcagcctactattgagaattaaatattggtatctcctctttctccacaacttatatgttagggttccttaacattttatcacaggtttttcttcttagcttctactttctttaaagtgcacttattttaaaagctttaattagcaccaatattttcatggctcataaatgttatctccagccttgaactttcctctgatctacagttcattcaacaggaattcttaggggtttcaaacatttctcaagctcaacctgtgtgagataaaaagtcaataatactcctttttcccaccaggaaatcagccttcatttattattctttgtttcagtaaatgacaccatcatttaccccccaaaaaaccttgaaatttcagagtcatccctaatttatttctctttctacatctccatattcaatccatcatcaatccaaatccaagtgactttctaaatatcttttgaatgtactgatttttttaatcttgcttgccttaacttcaccttgctcaggcttcagcaaagaatgctttaactgatctgttcaatcctcagtagctgaagttatattttcgaaatccaaatcatatttttctctcatcagaaaccactatcaccaacaaccccttttgactccatcacatactgaactttctgaacttgaaacccttttatatcttcatattattcttttaacaatgtgcaaataatgcaaacaagcaacagggccttaaataatctcactctaacctaattctatagcttaacatctttccaaattgctctttcatccctttgctcagatcagctgacatcttcatgcatctttaatttaacattcttcttcccatcataaagcctgagcagataccatttcttcagtctgaatggttttctttttcatcttactattcttaaactcttaattctttttatatttgcaatatacctcctcaagaaaacatttcttaacttcttaacttattaaattctttatgataaattcttcaagcaccatcaattctttgcacgttagttcaaatattcatatatttgcatgaattgcattttttgcaagacataaatcccataagaataggaaacaaatatctttttactcacaattttattccacgtgccaagcacagtatctgcatatagcatgtcattacaaygtatatgaataaatatctccactatagcactattaagttcaaatatatactttgaggagaaattgtttgttgaataagcactcacggaattctttgtgaaggaaatacaaagataaataagaaaccttgaatattttgtgatgatattaattatatcgacaaataatattgaaaactattgttcaaggttcatattgggtgtaaattgggtccattagtgcagagaagaacagtcattgcttatgtttcagtcaagaacaaagatgaatgagcattaattttagaatagatgttaagagttttagtactgtgtactataaaattaaataggaaaagagtatcatattattttgaaatcagggaaactatcctagagaaggtgttttcaatataaaacctatgcaaagagagaaaa

SEQ ID NO: 89993 - DNA, 996 bp, Homo sapiens
ttctcattgaggacagtgttcaggggataggggtcactatggtaatgagtacaaaagattcatggagactcaaaaaatgtaatccaaatagccacaaagggtataataccatatattaaaataggcacttgttggtaaaaacgattttacygaaaaattatatataacatagttgtgtttctttttgattttaattcatttaaattcaagagcagcaatcagaagacccgggatttatatcagagttcatggaagtgtgcattgtattcaaatgcacacacataaaactagcctgtgagaaccctggtgaagtaaaataaaagttattccatcatacacagaatttgaaatgattttggaaatatatcaccatactgaagaaaataaatcagaacataaaaattagaaaagataaactaagaaaatgtattattctgtatctcacttggaccccactgaacaagtataacaaagaacatcgtgaaagaatatttgcaaaagcatccctatttgcaaaaatctcaaagaaaattaacatacctatatttttgtgaaccttattagatcaatacctgtaaacatagcttctgacttgtgagttaactatattatttatttacaaatgagagacaaatagaaagaattccttgtgttgtcttccctaggcaaaacagaaaacccgtccagaagcagtaatctctataaacaaagagacaaataaaaataccaggtggaatatgcccttgatttgtgaaaatatcccaagcaatattgccataaaagtaaatgtatttttcatccaaaatgaaaaatcatattctttctagttaccctagccttagggacccacatacattgcatcattcttcatcttttattggtatgaaaaataggtagcacttaagttttacaatttttagtcgtgtctttttttatatcaacatatgtggtttgttttaggtaatacaaatacatcagtgagaaacaagatgaagc

SEQ ID NO: 89994 - DNA, 747 bp, Homo sapiens
atgaactcccataatgcccagaaacaatactctgcacccttcagtccaatcaagttgacacttaatattaaccatcacaacgtccccatatgtgactcaggctacatataaaacagtgatgagtagcagcaagttattttgactaaatctaccatttaatgtttatatgcaagtacacttcaaaaccattgacttttgttagctcaaaggtataaaaacaaacataaataaagataataaattgggttgtagtgttcattttatattctggatataagttctgatcagataatacggtttaaaaatattttcttccactctgtaaatcatgttttagtttataatttttatttatttatttatttttattatatttatttacttatttttgagacggagtctcactctattgcccaggctggagtgcaaaggcactatctcagcttcctacaacctctgcctcctgggttcagcctcccaagtatttgggattacagctgtgcaccaccacgcccagctaatgctttactttttaaatggtgccccttgaagcacaaacattttaaatttaagtacaatatatctctatttttccttttgttctgatgyatttgatgtaatacctaagaaaccattgccaaaccaaaggtcacacagatttatgtttttttctggtagttttacagttttatcacttatattaagatctttaatctattttctattaatttttgcatatattatgca

SEQ ID NO: 89995 - DNA, 747 bp, Homo sapiens
atgaactcccataatgcccagaaacaatactctgcacccttcagtccaatcaagttgacacttaatattaaccatcacaacgtccccatatgtgactcaggctacatataaaacagtgatgagtagcagcaagttattttgactaaatctaccatttaatgtttatatgcaagtacacttcaaaaccattgacttttgttagctcaaaggtataaaaacaaacataaataaagataataaattgggttgtagtgttcattttatattctggatataagttctgatcagataatacggtttaaaaatattttcttccactctgtaaatcatgttttagtttataatttttatttatttatttatttttattatatttatttacttatttttgagacggagtctcactctattgcccaggctggagtgcaaaggcactatctcagcttcctacaacctctgcctcctgggttcagcctcccaagtatttgggattacagctgtgcaccaccacgcccagctaatgctttactttttaaatggtgccccttgaagcacaaacattttaaatttaagtacaatatatctctatttttccttttgttctgatgcatttgatgtaatacctaagaaaccattgccaaaccaaaggtcacacagatttatgtttttttctggtrgttttacagttttatcacttatattaagatctttaatctattttctattaatttttgcatatattatgca

SEQ ID NO: 89996 - DNA, 762 bp, Homo sapiens
aaaatctttacgttaagattatgcatgatagatatttctacaattgtgtgagaaaatacgttatagcagttcttataaatgtggaattaatggattcctcaagatatttgtcacatttttcatgacagtcaactttttctggaaaagtaaaactaatgatggaggaagtaaattggcataaattcaaaattcatgggccctttcaaaaataccaaagttttggtgagtggcttcatctctaaatgacagtaagtggactgatagtcacacgtgaatgtctgagtagattttgcgtgctctaatgtggacattttatgaagaagctcatgactttgtgatcstttgtgctatggaggaggttggagaattttctgtatacataaagcatttctccttaactaagcttcaacaagttcattaaccaacatcagttgaactgatttttgagaagtgaacctcagggactaccaacggcttggagtgaaggcctagagctatgatcacgttctagtcagggtatgaatcagtgtggaaccacagctgaaacatcacgcattttaatagacccattgcatgaggattttatctcaataataaataaaattattaatagacgtgagctgtagatatccatgagaagccaaatggttagaagggcaactatcagttactcttaggatgcccttgcccaccaaaaatgtgagagtggggtgaggaaagagaaaaagagaggaagaaataaaagaaaaagagattggatcc

SEQ ID NO: 89997 - DNA, 762 bp, Homo sapiens
aaaatctttacgttaagattatgcatgatagatatttctacaattgtgtgagaaaatacgttatagcagttcttataaatgtggaattaatggattcctcaagatatttgtcacatttttcatgacagtcaactttttctggaaaagtaaaactaatgatggaggaagtaaattggcataaattcaaaattcatgggccctttcaaaaataccaaagttttggtgagtggcttcatctctaaatgacagtaagtggactgatagtcacacgtgaatgtctgagtagattttgcgtgctctaatgtggacattttatgaagaagctcatgactttgtgatcctttgtgctatggaggaggttggagaattttctgtatacataaagcatttctccttaactaagcttcaacaagttcattaaccaacatcagttgaactgatttttgagaagtgaacctcagggactaccaacggcttggagtgaaggcctagagctatgatcacgttctagtcagggtatgaatcagtgtggaaccacagctgaaacatcacgcattttaatagacccattgcrtgaggattttatctcaataataaataaaattattaatagacgtgagctgtagatatccatgagaagccaaatggttagaagggcaactatcagttactcttaggatgcccttgcccaccaaaaatgtgagagtggggtgaggaaagagaaaaagagaggaagaaataaaagaaaaagagattggatcc

SEQ ID NO: 89998 - DNA, 1085 bp, Homo sapiens
tttattggatttatatagtatcttttccctgaagagctcaaggttctatgtgaaaacttttaagcagcaaacattatttcaacataatgagcctgactctgtctcccacagaaagagagcagaatatcataaacttagccagaagagggccactaatcctaaataagccaaacccaatttatgaacgcagagtgtccaragaggggcatcgttcctggaaatagaagcaagactaggagcagaatgagaggacagcattttcatcgagagccatcatgtaaaagagaagcatcatcttttctttcaaataaagctcatctctcgcagtgtgtggaggaaaatgtgtggatgaggagatgctatgaaggaagaaaggggtctggatgggagagggagggctgtagcagcaattatgtaaagagagcagttccttctaaagacaattaacaggcaagagagataaagtgaaagttgaatgaagtcagtgacctttgagggtgaactagtaagtgggagattacggtaacttctggcctttacttaaacttgtcatttttcattatttaaatgcaatcatcaatggcaaatgggagaaattatcttagagtggttctccagaatacatatttctttacataagccttatgtcaaacacactagagtgataaagaaattaactggatcatacgtttaggctacagtttcataacttaagaaaaacacccacttgtgaataatttcatgattagtgcgtgtataatctaagtaagagcttcggcagcccagagacaaaagcatgaattttctccatgtttctttttagttcctagggcattggaatctatgtcataggattcatatacactaagtacatagaagacttcatcagattcaagattttagcccctttgtttctgcccctgtttgcacctgatgcaaaccaacgccggtttctgaagtttctggatcacctagtcacattgcccatatcaaaagatcctgttaaaaaaagttatattaagcttatatcattccagaacaagaaagtcttgtttaaaaatcccaggagagtgctaacagtgttg

SEQ ID NO: 89999 - DNA, 1538 bp, Homo sapiens
tttcatctgtatatgtgcacataaaccgtatctatctcatagtgtattgtaaggattaaacaaaataataactgtagactacttagagtaatgctgaatatgcagtgattgctccataaatggttacttattactattattgatgggagataagacagggagttgaagaaatagaaatacgaatggggcagagaaaaggaagaattaagagtatgagacagtatatgtagagggggtgggcaaggattaaaactggtggactccttcatctcctaccctcagagtgggagtgtctcccagggtatgtggagagacagtcagagtcatggtgtttccaaagtcatgatcagaaagttggcatcagagcataagactgtgaattttgactcagagaaaacttttccaacatggaacagtcataagtttgcacactcagactttccttatgtcggtgatttctgaggggaaatggggatttctccctgcatctctccactgcttctcagcctcttcaactgctctgaattccagggaaatgtgtaaagtgtagactcctaagcccaatactgaatgtaagggactacctctaccaggaacagcagcaggaggaattcatggtatatttttgtgctcagaaaaggtttgcagaataatccttaagaggcaaacagataattcagtaaaggtgkacagtatgtaaaaagtactcctggcttcacttttataaaaacaagctcccattcccctttcatggatccttgatgaaatgaatatctcactcctagtttccttttccagaacccagacaaccaacacctaagctcaaactcccaccaccttttctcctgtttatgttccttggacaattccctgacagaggagtcctgcccaggatctctgtgtggtaaagccatggctcttcctaataatgaatgaaaagcgagtgtgaaaaatagtagcattagctgatatctgttaaacacttactatattcaggtaccatggcaagtgttgtacatgcattatcatcattttgattctcaaaacaattctactgtattaatacctccccattttgaagctgaaacaagagtcagaggaggaatgtaacttcgtctaggtcacaaaacttgtaaacaattcactactagctgatttgacaactttatttcagtttcagtagatgaaagaagtgtatcctagagctaccttttatcttagcaggtattaaccttttgaagagcatcaaaaatttgaaagcaatgagtgaagaggtcaggtggagcagaaagaagaaccaatgggattgggattaaccttggaattagaaaaaccaatgtctatttccagctctaccaatttaggtagtgaaatttcaggtgaatttttaaacccctaaatcttaatttattatttttcttgcataatgggattaataacgtctatcttgctcatctcaatggttttcatatggatgacataagaatgtaggcataaacattgtagaatgttttgcaaattaagtggtatcaaatgct

SEQ ID NO: 90000 - DNA, 1184 bp, Homo sapiens
acattctgcttgctttatcaaaaatgttgtactctaacttactgtataataggctctatactttgctttcacccttcatcttatacctcaaccctaaaactataagattcttgaaaattatgtttgtttttcaatcattctcaacatcaatatctgctaatacaaagcaggtgctgcattactattaattaaatggaattaaattagtatttctctctatattaagccattttgcattgatacaaagaaatgcctgagactgggtaatttataaaggaaaggggcttaactggctcatggttctgcaggctgtacaggaagcatggtgctgacatctgctcagcttctgctgaagtctcagggaactttcaatcatggcagaagctgaagcaggagcaggtacatcacgtggagaaagcaggagcaagagatagagagagtaagagagaggtgcccacacttataatgacttgatctcatgagaactcactcactattgccaagacagcaccaagccccacctccagcactgaggattacaattcattatgaaatttgggtggggacaaatacccaaactacatcttatgatttttcatgcacaaattccatcagaaacccagaaattgatgtttaaaaaatgtgtatggagtgcttttctgttttgtamattattttagaaatagttgagttctcatctaaaatctttctttgacgtttgaaatagaggaaaagaagagagtcaggctgtaagatgggtcttccaggaggatggtaggaccagcagggtgataaaggaggacatgccatcccagagaatagcagtgctgtatgtgcactctaggatttgagaaacagaagcaacacaacctgcatctcggctctctgcttccatcttagaactgaatttaagtcatgacatggtaccatgtatgatggccatctttttactagtagttggccagatcaaccaacacattgctatcaaaaccatttccatggtctgggaagatgggaagcagaattgatgaacgttaagtttcattcatctggctcaatattgcatgaaaatgtgggtaaagtctgtgtcgagtctgtggatctaagaaacatatgaacccttcttttcatcttctgtaataacctcttgatataatccatttcctataatgtttatatgttaa

SEQ ID NO: 90001 - DNA, 1184 bp, Homo sapiens
acattctgcttgctttatcaaaaatgttgtactctaacttactgtataataggctctatactttgctttcacccttcatcttatacctcaaccctaaaactataagattcttgaaaattatgtttgtttttcaatcattctcaacatcaatatctgctaatacaaagcaggtgctgcattactattaattaaatggaattaaattagtatttctctctatattaagccattttgcattgatacaaagaaatgcctgagactgggtaatttataaaggaaaggggcttaactggctcatggttctgcaggctgtacaggaagcatggtgctgacatctgctcagcttctgctgaagtctcagggaactttcaatcatggcagaagctgaagcaggagcaggtacatcacgtggagaaagcaggagcaagagatagagagagtaagagagaggtgcccacacttataatgacttgatctcatgagaactcactcactattgccaagacagcaccaagccccacctccagcactgaggattacaattcattatgaaatttgggtggggacaaatacccaaactacatcttatgatttttcatgcacaaattccatcagaaacccagaaattgatgtttaaaaaatgtgtatggagtgcttttctgttttgtacattattttagaaatagttgagttctcatctaaaatctttctttgacgtttgaaatagaggaaaagaagagagtcaggctgtaagatgggtcttccaggaggatggtaggaccagcagggtgataaaggaggacatgccatcccagagaatagcagtgctgtatgtgcactctaggatttgagaaacagaagcaacacaacctgcatctcggctctctgcttccatcttagaactgaatttaagtcatgacatggtaccatgtatgatggccatctttttactagtagttggccagatcaaccaacacattgctatcaaaaccatttccatggtctgggaagatgggaagcagaattgatgaacgttaagtttcattcatctggctcaatattgcatgaaaatgtgggtaaagtctgtgtcgagtytgtggatctaagaaacatatgaacccttcttttcatcttctgtaataacctcttgatataatccatttcctataatgtttatatgttaa

SEQ ID NO: 90002 - DNA, 669 bp, Homo sapiens
ggcattgtaatttagtaaaatctcaaaaaaagaacaaataactggattttctccttctgatttttawataaaagagacacatgccaaaacaacactgtattattatgttttattgtaaggttttgtaatattaatacattttttcaatataatgttttataatttttattgtataatctaagagccattagataatttcaaatattttgaaactataacaataaagattattcagttgttcatagcatggctaagttcaaaaccaaggaaatgtaaatgcagttactcataaaatatagttagccaaaataatatatgttcattccctctctgtgagaccattgtgtctctattttttaatataatcaataaattatgattaaatataaatcaccacatgcttgtgtaataaacccactatggcaactaaaaaaattatgtgattacatttgttcttattttccctgttgcccaggctggagtgcagtggcacaatctcggctcactgcaacatctgcctcctgggttcaagtgattctcatgcctcagcctccaaagcagctggaactacaggcacacaccactacacctggctaatttttttgtatttttagtagagatggagtttcgccatattggccacgctggtctcaaactcctgacctcaag

SEQ ID NO: 90003 - DNA, 1426 bp, Homo sapiens
ttaaatgttaccaaatggtaaaaagtagaagtttagaattttactgatcaaatactttttgaaatggaaaatattgtagaaatcagtcttacggtctcagttgggaagggaagacttctaagtgtttcctcagggcttctatatcattagtaaaatttagaggtttaaaaatcaaccacatgccctggccgggctccttcttttacacaaaagagtttccacctgccctccacttgtttccagccatgaaagtctagacaaagactgtttcattccatgtattctggatttttcacattttcaatattcaagagacagaatcttaaaatatatcattaagaatgattgcctggaggttgccatcaacttaggctgaagctatttagtagtttgaggtctttaaaatgaacactatgaacaacaaaaagcagtgttaaaaatgtctttgaaatctataccaaataaatattttgataagctttctaggaaattacccaaagggaataatatatacttattttttagttaaacttaaagccttaatgacccctcaaaatgaaaacttaaaactctgcccctaacgtttcaccttactcgattaagttcatacgacaggactcgaaatattctaagactgagctgagtgcagtggctcacgcctgtagagagcttgggtctgttggcaggtgggggaggaaaaactaggtatgatcacctgcrtttctagctattagggagcaggtggcaggatccctggagtttaggatttacaggctccagtgagctatgatagcgccagtgttctccagccagggcaacagagagagaacctgtctttaaagaaggaaaagagaaagaagaaaataagtattctaagactaaattacctgaaattgaataccattttgtcttataaacattgtttttaaaataattataaagtataaatgccatagataatgatgtaaaataaagggttaacggtggattatctatatacacaaacgtacgtcccttaaaaaaagtgtaaagacaaaggaaaaagataaaacagtatgagagtaatttgatctagttgaaagatgaccagcaatgacattaagtcacaaaggaattgaacttgaaggaaacaatatacatttcttaacaattagcaattaaagcacacaataaaagtggcatcactttatcatctttcattgtatgaaaacactaataccaaacattaaggagtcacataaactattaataatgcacttaaaagaactgaagtgggagcataaacaaagatatctatggcagctcattcccgggtgctggctgatgcctctcatagggtctactgaaatcaattttagaaagaaattctttgctctctagtataatacatgtacttaaccacaggaaaccttttaaataaacaggg

SEQ ID NO: 90004 - DNA, 2685 bp, Homo sapiens
acgcctggccccaccatggtttaaagtcttcttcttcccgtgccacagagtccttgtgccgcgaggcccaatcactccccaacatctgtacgtcggacttggacaccccaccttcacgcccaccccaacttcacgcccagccaccttcacgccccgcctctgcagcccctgtcccgcctctggcacgcctcccactccaggagccttcacaagcgctgctccctctgcctggaaaggctttcctattctcccatccaagtactaaccaggcccgaccctgctgagcttccgagatcagaggagatggggtgcgctcaggatagtatggccatagacaaccctcccctattctgttcatctggccgcttcctgctcagcatttggggcttcatttaactggcagcttccttaaggaggccttccctgacccccttcccttcccattcaccccggcccacaatgcacattgattccctgaactcagggtactcctgaagtaccaatcatcacgttgcatcataattgttggtttccttggaggcacagggtcaggctccgcatgggcaggagaagtcttcagggtgtgtttgctggattaacgacaggtcgatgccaatacaggacacccctgcaggtgaggatccccctcctcaatctgatcctgagaagacgccttctccggccctttggtcccacccaccctgactctcccaggtgaaaagcagctgttggtgatatttgcatgactgtgccagctggaacttttactgtagggccgtttcctaagatcatttcctaagactctctcaycactctgatggggacaggaaactgctctgggcacagcacttgtgcgatctccagccacaaaaagccgttaatctggccaagagcagaggcttgcgggtgaagggagtggaggggctgctgaagatggagatggtgcttagttttttttgtgggtagaagagtgcagagaggcccctgctcatcccaggagaatgaagtaggctttttgttctaaagggccaggtctctaaaagcaacggattatattgttcaggctgcgtcagtggtgtttgtgttttcaaaagcaatagtgggacgggcgcagtggctcatgcctgtaatcctagcactttgggaggccgaggtgggtagatcatttgaggtcaggagttcaagaccagcctggctaacatggtgaaaccccatctctactaaaaatacaaaaattagccaggcatgatggcgggcacctgtagtcccaggtacttgggaggctgagacaggagaatctcttgaacccaggaggtggaggttgcagtgagccgagattgcaccactgcccttcagcctgggcgacagagtaagactctgtctcaaaaaaaaaaaaaaaaaagcaagagcagaaagctaccaggcagttgcagggggctccctaaagccagcttataaccaggaaccaaaaatagggcttggcacgaggaggggaagaggggtgtgtgtctcaatgaggggaatggcaacatctctttgtgctctacaggtttaaaaaacaaaatggccaaggctctccccaggtgtcgatggggtgggaggcatggcccaactcctgaagatgtcatggcacagtgggcagccaccatggggaatccggccgggatgacagagacagccctgcagcacggcactgctcatagtggggccaggccctggaggagtctcctgaagccacaaacatacatagtccgcaccctcccctgccccaaactcagcgtgtagcagatcaacctctgtactatcagccaagccaatacaacaagcacagtgattgtggactactccccaagaacaaaacatcgaagaacagccaagctagcacgctggctcacgcctgtaatcctagcacttttcaaggccgaggcaggcggatcccttgagcccaggagttcgagaccagccttggcaacatgatgaaaccctgtttctacaaaaggcacaaaaattagctaggcgttgtgggaggatcacttgagccaaggaggtagagtttgcagtgagccttgatcgcaccctgaactccagcatgggtaacagagcaagaccctgtctctaataaataaataaatgaaaataacagccattcatcagaacagccattcatcagaacagccattcatcccggctctcagcacctccaatctgcaccctgtactggtcagcccaagctattctagagagtgctaccccacaagtctccctaagcagtctgaccataattacagctaaagataggtgcctctgatacttcatatactgtgccaggggaatcccacaatttactcacctggcactggcaccaaccctcccagacgggcaccataactgcccccatcccactgctgaaaaacaggcatagagagactaagtaagtgctggggtttactcatccagtaagcaggagcacaggttcagaccccaacccctcctcacagccttccagggctccaccccgcccatggtctcaccacccttccggtcactgccacccacctgccccctcccgggcatcctccacactcctcactgtcccctcaatccctcccccaatactcttggcctctgttgggttttctcccttctttccctatcttccagggtacctgaccccaaaaagccctt

SEQ ID NO: 90005 - DNA, 2685 bp, Homo sapiens
acgcctggccccaccatggtttaaagtcttcttcttcccgtgccacagagtccttgtgccgcgaggcccaatcactccccaacatctgtacgtcggacttggacaccccaccttcacgcccaccccaacttcacgcccagccaccttcacgccccgcctctgcagcccctgtcccgcctctggcacgcctcccactccaggagccttcacaagcgctgctccctctgcctggaaaggctttcctattctcccatccaagtactaaccaggcccgaccctgctgagcttccgagatcagaggagatggggtgcgctcaggatagtatggccatagacaaccctcccctattctgttcatctggccgcttcctgctcagcatttggggcttcatttaactggcagcttccttaaggaggccttccctgacccccttcccttcccattcaccccggcccacaatgcacattgattccctgaactcagggtactcctgaagtaccaatcatcacgttgcatcataattgttggtttccttggaggcacagggtcaggctccgcatgggcaggagaagtcttcagggtgtgtttgctggattaacgacaggtcgatgccaatacaggacacccctgcaggtgaggatccccctcctcaatctgatcctgagaagacgccttctccggccctttggtcccacccaccctgactctcccaggtgaaaagcagctgttggtgatatttgcatgactgtgccagctggaacttttactgtagggccgtttcctaagatcatttcctaagactctctcaccactctgatggggacaggaaactgctctgggcacagcacttgtgcgatctccagccacaaaaagccgttaatctggccaagagcagaggcttgcgggtgaagggagtggaggggctgctgaagatggagatggtgcttagttttttttgtgggtagaagagtgcagagaggcccctgctcatcccaggagaatgaagtaggctttttgttctaaagggccaggtctctaaaagcaacggattatattgttcaggctgcgtcagtggtgtttgtgttttcaaaagcaatagtgggacgggcgcagtggctcatgcctgtaatcctagcactttgggaggccgaggtgggtagatcatttgaggtcaggagttcaagaccagcctggctaacatggtgaaaccccatctctactaaaaatacaaaaattagccaggcatgatggcgggcacctgtagtcccaggtacttgggaggctgagacaggagaatctcttgaacccaggaggtggaggttgcagtgagccgagattgcaccactgcccttcagcctgggcgacagagtaagactctgtctcaaaaaaaaaaaaaaaaaagcaagagcagaaagctaccaggcagttgcagggggctccctaaagccagcttataaccaggaaccaaaaatagggcttggcacgaggaggggaagaggggtgtgtgtctcaatgaggggaatggcaacatctctttgtgctctacaggtttaaaaaacaaaatggccaaggctctccccaggtgtcgatggggtgggaggcatggcccaactcctgaagatgtcatggcacagtgggcagccaccatggggaatccggccgggatgacagagacagccctgcagcacggcactgctcatagtggggccaggccctggaggagtctcctgaagccacaaacatacatagtccgcaccctcccctgccccaaactcagcgtgtagcagatcaacctctgtactatcagccaagccaatacaacaagcacagtgattgtggactactccccaagaacaaaacatcgaagaacagccaagctrgcacgctggctcacgcctgtaatcctagcacttttcaaggccgaggcaggcggatcccttgagcccaggagttcgagaccagccttggcaacatgatgaaaccctgtttctacaaaaggcacaaaaattagctaggcgttgtgggaggatcacttgagccaaggaggtagagtttgcagtgagccttgatcgcaccctgaactccagcatgggtaacagagcaagaccctgtctctaataaataaataaatgaaaataacagccattcatcagaacagccattcatcagaacagccattcatcccggctctcagcacctccaatctgcaccctgtactggtcagcccaagctattctagagagtgctaccccacaagtctccctaagcagtctgaccataattacagctaaagataggtgcctctgatacttcatatactgtgccaggggaatcccacaatttactcacctggcactggcaccaaccctcccagacgggcaccataactgcccccatcccactgctgaaaaacaggcatagagagactaagtaagtgctggggtttactcatccagtaagcaggagcacaggttcagaccccaacccctcctcacagccttccagggctccaccccgcccatggtctcaccacccttccggtcactgccacccacctgccccctcccgggcatcctccacactcctcactgtcccctcaatccctcccccaatactcttggcctctgttgggttttctcccttctttccctatcttccagggtacctgaccccaaaaagccctt

SEQ ID NO: 90006 - DNA, 546 bp, Homo sapiens
gtgatgagtgtatctgaagcaacaaggccaccaaaccacagctgccgccgggcactggctgacgctttaggagtctcccagagtggatgatgagcaagggccatgctctacatttcgtgtgatttgargtttttttaaatcatgtccccaaagcgatatgttctctcactagaccctccagaagaaaaaacaaaacaaaacagaatctaatatgtttaacacctaaccccaggtacctgtgaacgagaccttatttgaaaatagggttattgcagatttaattgagttacaatgtggtcatgctggaatagggcaggtcttcaattaaatatgtctggtgtccttataagaagagacacagaggccgggtgcggtggcgaggtggctcacacctgtaatcccaacactttgggaggccaaggcgggtggatcatctgaggtcaggagttcaagaccagcctggccaaaatggtgaaaccccatctctactaaaaatacaaaaattagccaggcgtggtggcgggcgcctgcaatcccagctactga

SEQ ID NO: 90007 - DNA, 664 bp, Homo sapiens
tgagtcagtgcctttgagtttagctgcacaaggaattggtaaacaatccccaacatgggcccttctggtgagctggagggagtcccttatttgatagaaagagtccttgatttgatgtcttttccaagaatcaaaacctcctagttgcaggccatgacctctgatgtcttcgtctcctgggtgctgactcttcaaagaatctttaatttagagtttttagtgagaagctgtataaggccttgcaatcatgaagaatgtcacctttagggtgagctggttcactgggctccttcctccaggcacatggggcttcctgcagttatttcaaagggagaaagctgaggttttccaaacaggtagaaggtaatttaagcaataccaatggaagagccttaggcaagacaaggttcaaagtttctgtaaactttgccatttgttcttgtatccattgtggcaggaaaataaggtctggaggcagggaacataaggccaattcacacttcagctataacaggaaatatcctctccatatggcatcactttacktcatcctcttcatttacacagggtgtaccccaagtagagggtatttaaactcacataaactcacaaaaactctgtaacagggcctttgagcccctatgctcaggcccactaccacact

SEQ ID NO: 90008 - DNA, 931 bp, Homo sapiens
attttcagcagcaggtttaaggctattgcgagtcattctcgattgaggttttctttctagccatccgcataatgcttctcactctcaaacacttcactctgcttatccctgcttttctgctcatgcagaatctgtttttaggataagaaatcattgtttcargctttgtacttccattcttattagtactggtttaacagaatttaaccagagcgagcagttgtgtgtttggcttctaggctattggtataaaacggctgatcgtgattaccaagtgcctcggaggacctcggtggcccccctcctttcccatcttgtgcttcctgctccatgattatagaacactaattataatcagaactggtgatgggtgagcaattaggcttttctggactgatgattgattgatggattgattgattgattgcgttggggaaaggcccttcctgcggaaggattgtagacacaaaggagtgtgctttcacaccagatcccagaaaattatgctgactagatccttgatgtagtacataagattacattatggtttgggtactttcatcacatgctgtggatagaattcaaaatgcaacctgacaagactgataggaaataaattcattaagtttttattgagttgttttttgtctcctcgggttgttgatcattctagtgagcacaatttcagcctttttgatgagttattccaaacattaagtactgtacggtttgaaaatcttagctaacaaaagcatttttggagtggctttataatttataagtcatctgcaagtctttttgcatttgttaatctccaatattatctgaaatttgttgagagcgtggcagttgaagaatagcctagcttactgagaaccatgcttctggcagactggaacataagcagctttcacccaggagagctaatgca

SEQ ID NO: 90009 - DNA, 931 bp, Homo sapiens
attttcagcagcaggtttaaggctattgcgagtcattctcgattgaggttttctttctagccatccgcataatgcttctcactctcaaacacttcactctgcttatccctgcttttctgctcatgcagaatctgtttttaggataagaaatcattgtttcaagctttgtacttccattcttattagtactggtttaacagaatttaaccagagcgagcagttgtgtgtttggcttctaggctattggtataaaacggctgatcgtgattaccaagtgcctcggaggacctcggtggcccccctcctttcccatcttgtgcttcctgctccatgattatagaacactaattataatcagaactggtgatgggtgagcarttaggcttttctggactgatgattgattgatggattgattgattgattgcgttggggaaaggcccttcctgcggaaggattgtagacacaaaggagtgtgctttcacaccagatcccagaaaattatgctgactagatccttgatgtagtacataagattacattatggtttgggtactttcatcacatgctgtggatagaattcaaaatgcaacctgacaagactgataggaaataaattcattaagtttttattgagttgttttttgtctcctcgggttgttgatcattctagtgagcacaatttcagcctttttgatgagttattccaaacattaagtactgtacggtttgaaaatcttagctaacaaaagcatttttggagtggctttataatttataagtcatctgcaagtctttttgcatttgttaatctccaatattatctgaaatttgttgagagcgtggcagttgaagaatagcctagcttactgagaaccatgcttctggcagactggaacataagcagctttcacccaggagagctaatgca

SEQ ID NO: 90010 - DNA, 1304 bp, Homo sapiens
aatgaatgttatgtagctagaagtttcctgtctgtgatcaattctaatggcttttgtgaagggaaatggttgtaaattattaccagttaattaaatgagtgtttctcttgagtcctttgtgtaggcttttatccaagcctgtttagaatcatggaacattacagctagaatatttttagacaactcttgttwcatggacaaggagacttaaccagtgatataagtacttgcctaactcctgcaaagtgatgccaaggaaaagcaaactttggctgagggtgtaggagtggctgtgctggggatccggtgggtacatcaagctaacagagtataatttctaagcagtgagcccttgtcatccatatgtcaccggtattccttggagccatcttggagtgcttttattttttacaaagtgctatcttgtaggactattctatagtaaatattacctttcctatttttataggtgaggaaattgaggtggtcagatgaccttatttagctcttagatcaactcagcagatatgtattgagtgtttacttggttcaaggaactctgcgaggctccttgggaacataatgtcagatcctgctggaatggaggttacagacttattgcaagtgatgagatatgtgtatgaaaatgtaagtaattgttcaaggtatagataagtgttaataatagttgagatgtgaattttgagaccggagggatcaatgtgaatatcaaatcctggcaccagtttcttccttctgctgctcatgaagctgtgtcatcttctgtgctcggtaacccatccaacctgtagccctaggagctcctctggggagtcttgagtaccttgcagttgtcccgaccctgggagtcattcaataaaggttcaaatgaatgaatagataggtgcggtgaagagagacaggttttccaagcagagaacacggcatgagcaaatgtgtggctgagtgatagagccaggagaggggcctgactaggacagcaggttttaaaaagtgatttttttcttctttttgtattttaactttctaaagtgacaatggaaggaagggaattttgaaaacaaagtttggatagattagtgggaaggcagcaaaaggggagcccaagtggtcctgaaagccaggtggagcagggtgttttattctgaagactctcggagaccagcggaggctttagagggggaagttgatgagatcagcactttagaaaaggctgctttgtttttggtggggtgttccatgactgcaggagaaaggatgagggaggaggcctgcagtgacag

SEQ ID NO: 90011 - DNA, 780 bp, Homo sapiens
ttgaatatgaaatgttgaatataatgaataaaagcattccccctctgccaagcaccatactatcctgattctgtttctatccctttgtccttcctctgtttccttcctgggctcttgtgttcttcactatcttagaagtgggcgcccattctcatagggcctttcatctgcagggacactctcagtggttaccttcaggccccatttttcctgtgagccctggttctgtgctgtctttcaaactcctctggctcagaccccagttgtcattttcctcccatatcagcactgtcttcactccatttctgtcattgccttcttctgaacactgaagcttgaacacacacattttccccacctacacattttgtctttcctactaacttaaaagcaatttgaagtgtgtgttctattgtgtacctgtgcacctctccctccccaacatggtgatatgtgagggtataaagtgaggcaaagaaaaggcaaaaagatgaagttcctgtcatttcccattttaacaagagttgcagagggtccccctaccccccatctcccacagcaactttgacattaagtgatcacttcaggggtggtatttgtggaagaggtttcacccacacttccatttccttaggagagctgaggaagggggttagccattgaaggatgaagatatgtaatcaatttaatgaggactgtcatttggggattttacaggaatttttgacwgcatttactttaggctacactatgtggaatcttcctttccctttgggtagt

SEQ ID NO: 90012 - DNA, 731 bp, Homo sapiens
accgctttcaggtgggcyacaggacgctccgatgccggtcgcttttgcctcctcccgctcctctgcctgctggggcgtctttacgatgtcagcctgcaaggatggagttcctggcaggaccatagctttccgtaagaaaccacttctcaaatggccaacaaagttgaaatcctggtttttgaaggtcagaatatcttggaatcttgtgaaataaatgccatcgctgcatacatgctggcacaaaatgatctcacgtgtgctcagtgtacctgcagcttgagtgcaaaggaacattctttcctttgtattactttctccattgttgttgtattaaatattagcgaagaagtgggagaggcagagagcagccaggcagcaaggtagtcatgtggccctggaattcatctttcagaattttcccaggcagggaactgcactgtgaccttcagcacaagagctctgagttctaattctggcttagctggcccacttgtctttaagaagttcccctgccttttattttgagataagcctctccacctaaatgtgtgttccttacttctggacctgttggccaacgtacctttagggagtgcccctccagctggcttcaacatgtggggtcgtagcggggctgcagcctgccctgtccagctctgatgcttcccagcgcctccagctcccctttcccttcctgaggcctcactgagcatttggctgagcccctgcca

SEQ ID NO: 90013 - DNA, 731 bp, Homo sapiens
accgctttcaggtgggccacaggacgctccgatgccggtcgcttttgcctcctcccgctcctctgcctgctggggcktctttacgatgtcagcctgcaaggatggagttcctggcaggaccatagctttccgtaagaaaccacttctcaaatggccaacaaagttgaaatcctggtttttgaaggtcagaatatcttggaatcttgtgaaataaatgccatcgctgcatacatgctggcacaaaatgatctcacgtgtgctcagtgtacctgcagcttgagtgcaaaggaacattctttcctttgtattactttctccattgttgttgtattaaatattagcgaagaagtgggagaggcagagagcagccaggcagcaaggtagtcatgtggccctggaattcatctttcagaattttcccaggcagggaactgcactgtgaccttcagcacaagagctctgagttctaattctggcttagctggcccacttgtctttaagaagttcccctgccttttattttgagataagcctctccacctaaatgtgtgttccttacttctggacctgttggccaacgtacctttagggagtgcccctccagctggcttcaacatgtggggtcgtagcggggctgcagcctgccctgtccagctctgatgcttcccagcgcctccagctcccctttcccttcctgaggcctcactgagcatttggctgagcccctgcca

SEQ ID NO: 90014 - DNA, 731 bp, Homo sapiens
accgctttcaggtgggccacaggacgctccgatgccggtcgcttttgcctcctcccgctcctctgcctgctggggcgtctttacgatgtcagcctgcaaggatggagttcctggcaggaccatagctttccrtaagaaaccacttctcaaatggccaacaaagttgaaatcctggtttttgaaggtcagaatatcttggaatcttgtgaaataaatgccatcgctgcatacatgctggcacaaaatgatctcacgtgtgctcagtgtacctgcagcttgagtgcaaaggaacattctttcctttgtattactttctccattgttgttgtattaaatattagcgaagaagtgggagaggcagagagcagccaggcagcaaggtagtcatgtggccctggaattcatctttcagaattttcccaggcagggaactgcactgtgaccttcagcacaagagctctgagttctaattctggcttagctggcccacttgtctttaagaagttcccctgccttttattttgagataagcctctccacctaaatgtgtgttccttacttctggacctgttggccaacgtacctttagggagtgcccctccagctggcttcaacatgtggggtcgtagcggggctgcagcctgccctgtccagctctgatgcttcccagcgcctccagctcccctttcccttcctgaggcctcactgagcatttggctgagcccctgcca

SEQ ID NO: 90015 - DNA, 731 bp, Homo sapiens
accgctttcaggtgggccacaggacgctccgatgccggtcgcttttgcctcctcccgctcctctgcctgctggggcgtctttacgatgtcagcctgcaaggatggagttcctggcaggaccatagctttccgtaagaaaccacttctcaaatggccaacaaagttgaaatcctggtttttgaaggtcagaatatcttggaatcttgtgaaataaatgccatcgctgcatacatgctggcacaaaatgatctcacgtgtgctcagtgtacctgcagcttgagtgcaaaggaacattctttcctttgtattactttctccattgttgttgtattaaatattagcgaagaagtgggagaggcagagagcagccaggcagcaaggtagtcatgtggccctggaattcatctttcagaattttcccaggcagggaactgcactgtgaccttcagcacaagagctctgagttctaattctggcttagctggcccacttgtctttaagaagttcccctgccttttattttgagataagcctctccacctaaatgtgtgttccttayttctggacctgttggccaacgtacctttagggagtgcccctccagctggcttcaacatgtggggtcgtagcggggctgcagcctgccctgtccagctctgatgcttcccagcgcctccagctcccctttcccttcctgaggcctcactgagcatttggctgagcccctgcca

SEQ ID NO: 90016 - DNA, 573 bp, Homo sapiens
caaacctgcacactcagcacatttcccagaacttaaagtaaaaaaaaaaaaaaaaaaaaaggagacgcataataaaaggcaaaactgctgtgtaaaggcacttccaatgtactgtgtagatatagaattgtagaatagatgagtgagatactaaaagggaaattagtaaatcatgagaaagatttgaastacatataattccatatagaaggaataaaaagcaatgtgaaagaaaaggtagactgcccatttaaatgaagtattatgaagaaaggcttgagataatgagaaaaatgttgtatttaaagagaacttgacaaagacttctctagaaaaatcagaagttctggtgtctcagatgattaaaattcaataagttaaggataggatgaataaaaataaaaccttaaatagacactttgtaaaaatcttgcattaaagagcaaaataaataataaaaaaaactgcagagaaaagacagaataagtatgaagtatatacactgatatttacagcaaactagaaaacagaaaagtagaagttaggaggtaatggaatgagggaatataacca

SEQ ID NO: 90017 - DNA, 1174 bp, Homo sapiens
catgtcaaacacttattctaatatggaaaatacagtgacttcgtggatatacaaaaacatcctcatttttgtgtaatcgtgtatcatatatgatcctaagtacgtaatactaaacatgagaaaaaatgcttgctaaaaacagaccaaaatgtagagggctgccactgtgtggtgtgatcggstgactttttgccttttaatttatattttgttggcacagaacattgttctcatgtgcccgaagagatttaaagatgatcttgagatgattagcctcctctcagagtcctgccggggtagataacagggaagattggggcaggtcagaggtgactctgggacgtttgtgcttggtgccctgctgcaagggacagcagctctgcagctccagcccactgtttgtcacaggtccttggtgactgtcttaccagttattttcaaattcaagataaaatggagatacagactttcacataaaactttctacatttaactaccagcaattacattttttgtcataaaacaaagggtaggtcaaacaaaacgtcttaagagtaaatctgtctacaatgtgttcaggaaacgaacacaggtcaggtttatgtggaagatatccagggcgtagcatatctgctggaagcatttcagtcatgagcacagctgggtattggccgtgaacctggtgtgcattgaatacacatccccgtggcccctacagtacattccctgtggatagtttattaggtttcctttattcccttcatctattcttccctttcctttcttccttcctctttttttgcctccctctctctcttcctgtctttattaaatatgtgggatgcagatttgatgaatatgtcaatcaaagatcaccaagaagtcttaaaacaggtaaaccacagaaaacagtcaggatcagaataagaacagtttagtggttctcaagctttttgttctcagaacttctttataatctaaaatgtgttgcgccccctgaaaagctttcacttttatgggataaaaataaatatttataaaatatatagtaaaaaatataaatatataaataaatttatgatttgtttatataaatatgtatataaaaccatatttatcatattaagatttgaaatggacaaatatttaaaatatttattagttaattttaaat

SEQ ID NO: 90018 - DNA, 1174 bp, Homo sapiens
catgtcaaacacttattctaatatggaaaatacagtgacttcgtggatatacaaaaacatcctcatttttgtgtaatcgtgtatcatatatgatcctaagtacgtaatactaaacatgagaaaaaatgcttgctaaaaacagaccaaaatgtagagggctgccactgtgtggtgtgatcggctgactttttgccttttaatttatattttgttggcacagaacattgttctcatgtgcccgaagagatttaaagatgatcttgagatgattagcctcctctcagagtcctgccggggtagataacagggaagattggggcaggtcagaggtgactctgggacgtttgtgcttggtgccctgctgcaagggacagcagctctgcagctccagcccactgtttgtcacaggtccttggtgactgtcttaccagttattttcaaattcaagataaaatggagatacagactttcacataaaactttctacatttaactaccagcaattacattttttgtcataaaacaaagggtaggtcaaacaaaacgtcttaagagtaaatctgtctacaatgtgttcaggaaacgaacacaggtcaggtttatgtggaagatatccagggcgtagcatatctgctggaagcatttcagtcatgagcacagctgggtattggccgtgaacctggtgtgcattgaatacacatccccgtggcccctacagtrcattccctgtggatagtttattaggtttcctttattcccttcatctattcttccctttcctttcttccttcctctttttttgcctccctctctctcttcctgtctttattaaatatgtgggatgcagatttgatgaatatgtcaatcaaagatcaccaagaagtcttaaaacaggtaaaccacagaaaacagtcaggatcagaataagaacagtttagtggttctcaagctttttgttctcagaacttctttataatctaaaatgtgttgcgccccctgaaaagctttcacttttatgggataaaaataaatatttataaaatatatagtaaaaaatataaatatataaataaatttatgatttgtttatataaatatgtatataaaaccatatttatcatattaagatttgaaatggacaaatatttaaaatatttattagttaattttaaat

SEQ ID NO: 90019 - DNA, 1836 bp, Homo sapiens
tttgagagtccatggggtcacaaaggagatgaaagagaaagtacaagagccagacataaggttggaaagaaccctgtccccagtgaaaggccaattttttctttcacagcatcatcttggaacaacctgctttctggattcttagctcacaagtttgaaaaggagccattccctgatctattttaattgcttatcttcaaaaactatctgaactaaggtaccctgtggctactaccttccaatttaggactcaggtttccaggaaaagaaaagagttacaactactaataaaagtcagtcaaagtaactgctcctctttgaaagtctcagctcttattttagatatgggggttcacatgcaggtgtgttacatgggtgtattacacccagctagtgagtattgtacccctgggtagtttttcaatgcatgcccctcccttctttgccccccgcagtccacagcgcctgttgttcccatgtgcacgtccatgtgtgctcaatgcatagcttggagctcccacctataactgagaacatgcagtgtttaaatcccactaatttctatgaaaaagtatttctgttgataaccctgcaggaagctctttattaatgtcttcatcctttaaacctacttagccctatgctgctttagtcacctgtacttttttaaaaaactatttttttctctcattctgacttacttatccttacatgcattgctatttcttcattcctaaggaagtacgcattcgatttaagcatctgtgctaagacatccttggaaattaaattctagtcttttttaatggggcaaaatggaaatataatctcaggtaatgctttccagttcagcttactgctggtttttgcagatggaattataaacatacttaatcagagggaaattccaataaactttagccacagtatattcgtgcctttgcatgggaagagttgatctctcctcaagctagctgcagcctgcgtcttctgagggaagagctgtcttcacttgcgtgggatgaatttgagagatcactggccttgccgtctgagagtgcggtccctgagctgggaggattctgccgagattaggtcatgcaatcagcctgaggtgccaccatgggggtgagctcaaattatagttttgggaccatgcctgagtttagtcagcaaaagtaattcacaccagagggggaatgtgcaagaggtcaataacagaatgagaaatcaggggcagggaaaatgcaggttgtgaaagacgatgaagtgatgattagaggcaggctagggtggcctaccaatggtgaagtcctgggagtgaagaagacgtttgcttcataaataaagmaagacttctgtgctgcaggagaatcaactgttgagaggggtgaatggatgcagagtagtttccctgttaccacgtccaaacagatgtttatttgctggtaactgccatttcaaaaataccaccggaatactcattatttaaatgtttttgttacaccacaactttggaaaacatctctaagccaggcatataagccaaggttacatagtatgtcaggaaaggtataaccattaaattaattaactgtgttttgtctatgatttttaagaaaaaaatctatattttctgcgagtagtgagcaatacttatcaattggttagtcacttgtgtctgcgagtttcatcaccagcatgatcggaaaggtatctcccctcagcttcatttgcaaggaggcctgagtcgctctcagcctccccatttttgtgctgcagcttctggggagcccctggcccacaaaacccagaacatcccctgccgacagggtg

SEQ ID NO: 90020 - DNA, 1427 bp, Homo sapiens
tataaaaatattaacaacaaataaaatttgtatgctcttcattcgttggtccatcttttgtcagtttaattcacaaattaagctgcagaacctaagaggatggaggaaaagttttcctttcttacaagatcatgcagcatctgcttcacttactgaggagccccgagccaccatgtataaaatctgaatacccgaagacccccgtactgtgaggaagcccgaccacatggagaggccacatgaaggttctcaaatcagaaccccagctgaggtcccagcctacaaccagtatcaaccaccagacatgtgagtaatgatgtttccagttgattccaaccaacagcctttgggtcacctccagcctttgaatctttgcatctgaaatgccacgcatgacagagcagatacaagcatttctgctgtgtcctgtccaagtctctgactgatagaatctgggcttgttctaggcacctgagtcttgaggttgtttgttacacagccttagtaacttgaacaacggttatgcaacacttgagctagaccttgaaagatgaatggggatttttgtctagcaaaactgtttggaaaaggcttaatattttaggagaaaagttaaaaggtaagtgtggttaacacatgggttgtgggagagaatcaggagatgagatgaaaaaagttgatgtaagaaagtgtgctgtatggtttggtgaaaattataatatatttgttcatcagcatagrcaattttcttccagaccactggctttgaaatgatgtatttttaaaattgcaaagtttataccatagaatttctggagccttctgaaatttcaattggagataaaacaggacttcaaaatgtaacttctcttaaattatgagctatggtttaactgatgagtaatttttagttttattgttggttaaaaacacactgtcattcccatgagtgctcgcatgcagttttagcatgtgtgtgtatgtctcttttattttttgttttgttttgttttgttttgttttgttttgtttgcggtgagcaggttggtatcagagttatgaatgagaagcattcttatcagaatatactggatactaatacattttgcatgtaattttctacagaggtaatgattttaatcaactttcaagatgaagcaccacatttgtcaaggcagaagacccaaatgtgcaattttttcttaggggaaaactggctataatgaatgtgctaaaatatgttagttatctactaacctcaatacgcaagaaagcactagatcatcagtttgcctggtaagggaaaaaacagcggctgcagcctgcccagctaaagaagaaagtggaatcagcagaacaagtggcctgtgaagatgccagcttgtgagaaatgcctggctgactgtgaacagggatattattaaatg

SEQ ID NO: 90021 - DNA, 1668 bp, Homo sapiens
ggagccctgcaatccttcaacacttctgcaattaatgagctttcagacacagggcaaaccatttaacgtctgtctctatgtcttcttatatgtaaaattagatttttaatatcagctttatttaccttaccgagttattcttctataacaagaacattaagagcctggcttgtattcgtttgagcgagagattgttggtgtgaaaagcattggttataggcagtttcttacttctacacacagtggattcctacacatgtgtttcaaagttgaataacaaagaataatgagggagacatttccagagaactaaaaatacattctaaaattcctagtagtggttaattatgtgctgcctccctcagacccatgaggcaggtgaggccttcaaatgcacgtagcacagggggccaccagccatcctggggatgggaaagatgacccgagcacctcctcttcccggcctgaccactcctctgcccactgctgcagcggccacagcatttccacgtctttaggaagatttgggtggctggaaaccgacatccagatatcgggaaaagcagctctatcttcttgccatctgtggtaaattgtaaatgtgaccccaaatgtttactgtttcctttttctccagcctttgccatgtaattttatagaggtcaccaagtttgactttgggcttagccctgtgaattagtctaggttctccagaaaaacagaaacaataggataggtgtgtatacatataaaataatattgttcataatattatttttatttatttatttttttgagacagatccttgctctgttgccaggctggcatgcagtggcatgatctctgttcacagcaacctccgcctgccgggttcaagtgattctcctgcctcagcctcccgagtagctgcgactacaggcgcccgccaccacgccccgttaatttttgtatttttagtacagacggggtttcaccatgtttgccaggatggtctcgatctcctgaccttgtaatccgcccgccttggtctcccaaaatgctgggattacaggtgtgagccactgcacccggcctataatactattttataaatatataccatatgaaattggctcacgtgattatgaaaacaraagtctcaagatagatatgcatttgcaaactgcagacctaggaaagctgatgggctaattctagtccaaatgctggtgggcttccaagggaaaatctgatgtttcagttcaggtccacaggcagaaacacgaaacacaaaacccaatgcctgggttcacagcagtccaagcagaaagagttccctctgacttgctccattcaggcctccagctgattggctgaggcccagccacatcgggtggggcgggggggacaacctgctatgctcagtctgccaatgtaaatgctaatctcatttgcaatcaccctcccagacacacccagaataatgttgaaacaaatttctgggcaccctgtggcccagtcaagttgacacatacaattaaccatcccaccatgagatttgctgtggccagtgggatgttcacagatgagatgccagcagagccttgaaagactctagacccgtcaggccacccaggtactcacttgggaatgcacgctgatggaggtgctttcgtggccactgtggc

SEQ ID NO: 90022 - DNA, 742 bp, Homo sapiens
taagaggtagctgctgcaagtctttcttaattcactggggaataatggcagcctctccaggccttctgtgtcaagacctcagtcctggtttgctgcaaagctcctcacccagccttgccagatagtcttgttttgctttcttcttctagtcttcaaatcccactctgattttgagattcttttgttaaagcccagcagcaaggatggtggagcgtgcattgggtgtttgggtggcaggacagctggtttctagtcttgggttggaaaataccaagtgatttggctttggggaaatgactcccctttttggtgtgagggattatttctagtaaattgtaatgaagagatttcatatcagtcaacagaagtggttctgagcatgatcactaagtgggagcgggagtcacaggkcctcaaggcttatctcctccagggcagttttatctctgccccaggaaggaagtacgtggtaatatatttcctgttctggctgctggttggaagttgtgagggtgattgccaaatgaattctctatatgtaatccagatatcaactggcatttcctgctcctgtgatctagataagagaggcctagcaagcaggccacttgccgtagatgccgagtttatggtccgcatcacttttttatgtaggctgaacctggcccacatgacgtctgcccagatataaaattccacctcttccttgatttccacctaaaatgtcactcacctgaggcaa

SEQ ID NO: 90023 - DNA, 742 bp, Homo sapiens
taagaggtagctgctgcaagtctttcttaattcactggggaataatggcagcctctccaggccttctgtgtcaagacctcagtcctggtttgctgcaaagctcctcacccagccttgccagatagtcttgttttgctttcttcttctagtcttcaaatcccactctgattttgagattcttttgttaaagcccagcagcaaggatggtggagcgtgcattgggtgtttgggtggcaggacagctggtttctagtcttgggttggaaaataccaagtgatttggctttggggaaatgactcccctttttggtgtgagggattatttctagtaaattgtaatgaagagatttcatatcagtcaacagaagtggttctgagcatgatcactaagtgggagcgggagtcacaggtcctcaaggcttatctcctccagggcagttttatctctgccccaggaaggaagtacgtggtaatatatttcctgktctggctgctggttggaagttgtgagggtgattgccaaatgaattctctatatgtaatccagatatcaactggcatttcctgctcctgtgatctagataagagaggcctagcaagcaggccacttgccgtagatgccgagtttatggtccgcatcacttttttatgtaggctgaacctggcccacatgacgtctgcccagatataaaattccacctcttccttgatttccacctaaaatgtcactcacctgaggcaa

SEQ ID NO: 90024 - DNA, 2509 bp, Homo sapiens
tgcatgaaacaccaagcataactgttatatcaataaatataaatgtaaatatgatatacacatatacaattaaccattactgaaggacttaaaaaagaatttgatcagatttccagaggagaggagcttgggatactcttttccctrcagtgaaacaaccgtttaactggtaaaaattataaaacacatttaaagtctctggaaattgacctaagggcagatgcaaattaataagcatttattcaagaaaatctcctaaatgttgataaaacagtggaagtctgtgtcctctgagccagagctagttcctattccctcctccagctccatgtcacaggagatcttctccacatcacatgaccacatatcacatgaccaggaacatgggaactccttttcagccccactcccagtcaaagacgtatgattacaccccaggtgatctcatccccagacaccacccctctaagtaaaggaaattaggatgccatctcacatcaaggggacagatgagatgtttcaacaatgttgatgtttgtacaactaggaagatatatgaaaaaataaagttagattcatttcccacatcacataccaaaataaattccaaatacgacaaaaattttaatgtgaataaaaataaaactatacaaaaacataaaataacattaaagaatttctttaaaacctggaagtgaggatgacctttttatttctgaaaatccagaatccataaagtattaacattttatcacatacaaattaaaaatttctacatggcaaaaaataaggtatttggatctaaagacatataacaaattggagggcagacatttgtaatcatatcacagataacgagtgaatctctctgtataggaagttttagaaatgaagaaggaaaagataaacaacagaaaaggattcaaagataaatagttctcagaaaaattcaaataattttttgatagatgtcaacctcagttataaaacgagaaaagcatttaaattaccatgaaataacatttttcacctttagattggcaagaactaaaatttttataatatatatcatcagtaaggctgtggagtgtaagcttttactacctctaccgagggcaattagtatctatcaaagttgcaaatacctgtaatatttgacagagcattcccactttggggtttatacaacatacttgaacatgtgtaaaataatgtatgcataagtgtactcatcaaagctattaactattaacaaaagattcaaaataattttattcttcaatcttggactagttaagtaaatttttgtctaagttcaatggaatgctatgtcttcattttaaaaatacataaagtctacatattgacttatatgaaatattatttagagaaaaaataaggtttaaaacagtgtgtttaataaactgcccttgctgtaaaaagagaaaacataaaggtatacatttatttttgcttgcatatgccaacagaaaccctagaagaacgcaaaagaaactaatgacatcagtagcctcatgatgtggccatgtttactgaaatggagacaattacgagattaggaggaagacttttcaatgtatacttttacattttttagatatttagccatgtgcattgatttcctacttcaaaatatacccaaattttaaaataaaagatataaaattcaagataatatagatcaaataatccattcaccctggcccagtcaccactccttcctctacacaaatacgcacctacagagaatttttgaaatcctctagagaaatacacacctacagagaagttttgcaaaaataaaaataaaaaagcaagaggcaaagcagtgtttattactagctgagatgcttttgcccccttaacccccacaggctgaaccacttggagaaattgtccagccttgcatagacacagaaatgggctcctctcttgaaagcaattctgaacctcagtgttacaccgggcccagaacacaaacacggggaagcagggagagaagaggaataacaatgcctccaaagactggggttaacctaggccttcccaagctggagaagtagatgagcaccaggctgccacagctagtagggtgcaggcactggcccctgaaattctcattctgtttctcccaagaaatgtctgaagggaggtcaatgtctgctcaatgatcttgcccttgcgctcagaataagaaacttctgatttttaccccttcgaggccccacctgtaaacaatgtaaaccaatcaggtatcacaaaacctgaacgctacgccttattttggggaaatgaactttattgctcttgatctacactcagctcttgtagacaagtgggagcgtgggagacacaaaagggtagagaaagagccctgtgcttaccagggaggctactgtggtgttttggaggctaagttcaggagtttatccagcacagaaggcaggggtttaatgcctcttatcaataaatatttacacatataacc

SEQ ID NO: 90025 - DNA, 2509 bp, Homo sapiens
tgcatgaaacaccaagcataactgttatatcaataaatataaatgtaaatatgatatacacatatacaattaaccattactgaaggacttaaaaaagaatttgatcagatttccagaggagaggagcttgggatactcttttccctgcagtgaaacaaccgtttaactggtaaaaattataaaacacatttaaagtctctggaaattgacctaagggcagatgcaaattaataagcatttattcaagaaaatctcctaaatgttgataaaacagtggaagtctgtgtcctctgagccagasctagttcctattccctcctccagctccatgtcacaggagatcttctccacatcacatgaccacatatcacatgaccaggaacatgggaactccttttcagccccactcccagtcaaagacgtatgattacaccccaggtgatctcatccccagacaccacccctctaagtaaaggaaattaggatgccatctcacatcaaggggacagatgagatgtttcaacaatgttgatgtttgtacaactaggaagatatatgaaaaaataaagttagattcatttcccacatcacataccaaaataaattccaaatacgacaaaaattttaatgtgaataaaaataaaactatacaaaaacataaaataacattaaagaatttctttaaaacctggaagtgaggatgacctttttatttctgaaaatccagaatccataaagtattaacattttatcacatacaaattaaaaatttctacatggcaaaaaataaggtatttggatctaaagacatataacaaattggagggcagacatttgtaatcatatcacagataacgagtgaatctctctgtataggaagttttagaaatgaagaaggaaaagataaacaacagaaaaggattcaaagataaatagttctcagaaaaattcaaataattttttgatagatgtcaacctcagttataaaacgagaaaagcatttaaattaccatgaaataacatttttcacctttagattggcaagaactaaaatttttataatatatatcatcagtaaggctgtggagtgtaagcttttactacctctaccgagggcaattagtatctatcaaagttgcaaatacctgtaatatttgacagagcattcccactttggggtttatacaacatacttgaacatgtgtaaaataatgtatgcataagtgtactcatcaaagctattaactattaacaaaagattcaaaataattttattcttcaatcttggactagttaagtaaatttttgtctaagttcaatggaatgctatgtcttcattttaaaaatacataaagtctacatattgacttatatgaaatattatttagagaaaaaataaggtttaaaacagtgtgtttaataaactgcccttgctgtaaaaagagaaaacataaaggtatacatttatttttgcttgcatatgccaacagaaaccctagaagaacgcaaaagaaactaatgacatcagtagcctcatgatgtggccatgtttactgaaatggagacaattacgagattaggaggaagacttttcaatgtatacttttacattttttagatatttagccatgtgcattgatttcctacttcaaaatatacccaaattttaaaataaaagatataaaattcaagataatatagatcaaataatccattcaccctggcccagtcaccactccttcctctacacaaatacgcacctacagagaatttttgaaatcctctagagaaatacacacctacagagaagttttgcaaaaataaaaataaaaaagcaagaggcaaagcagtgtttattactagctgagatgcttttgcccccttaacccccacaggctgaaccacttggagaaattgtccagccttgcatagacacagaaatgggctcctctcttgaaagcaattctgaacctcagtgttacaccgggcccagaacacaaacacggggaagcagggagagaagaggaataacaatgcctccaaagactggggttaacctaggccttcccaagctggagaagtagatgagcaccaggctgccacagctagtagggtgcaggcactggcccctgaaattctcattctgtttctcccaagaaatgtctgaagggaggtcaatgtctgctcaatgatcttgcccttgcgctcagaataagaaacttctgatttttaccccttcgaggccccacctgtaaacaatgtaaaccaatcaggtatcacaaaacctgaacgctacgccttattttggggaaatgaactttattgctcttgatctacactcagctcttgtagacaagtgggagcgtgggagacacaaaagggtagagaaagagccctgtgcttaccagggaggctactgtggtgttttggaggctaagttcaggagtttatccagcacagaaggcaggggtttaatgcctcttatcaataaatatttacacatataacc

SEQ ID NO: 90026 - DNA, 572 bp, Homo sapiens
aacatagagaagcgaggtgatgctggatgcagtgggtcacgcctgtaattccagcatgttgggaagccaaggcaggaggatcacttgaggccaggaattgcagaccagcctgggcaacacggtgtgatgtcgtcactccaaaaaataaataaaagattagctggatgtggtggtacgtgcctgtggtcccacctacttgggaggctgaggtgggaggatcatttcagcccaggagtcccaggctgcagtgagccatcatcaygctactgcaccccagcctgggcggcaaaacaagaccccatacctacaaaaagagaaagaaaaaagagaaaagtgaggtcatgcagtgcaggggccttcctgcaatcctagatcttgatgactcctggtgcttctgttgtcaggacactcattaaaactcaccccatgagcctctttttctaccaccgtcaccccctatgagcttccttttatgctaccatctgccacgataagcctgttttttccaccatcacacccatgagcttcttgagctcagggacatgtctcatttgacttggcacctatgtttg

SEQ ID NO: 90027 - DNA, 572 bp, Homo sapiens
aacatagagaagcgaggtgatgctggatgcagtgggtcacgcctgtaattccagcatgttgggaagccaaggcaggaggatcacttgaggccaggaattgcagaccagcctgggcaacacggtgtgatgtcgtcactccaaaaaataaataaaagattagctggatgtggtggtacgtgcctgtggtcccacctacttgggaggctgaggtgggaggatcatttcagcccaggagtcccaggctgcagtgagccatcatcacgctactgcaccccagcctgggcrgcaaaacaagaccccatacctacaaaaagagaaagaaaaaagagaaaagtgaggtcatgcagtgcaggggccttcctgcaatcctagatcttgatgactcctggtgcttctgttgtcaggacactcattaaaactcaccccatgagcctctttttctaccaccgtcaccccctatgagcttccttttatgctaccatctgccacgataagcctgttttttccaccatcacacccatgagcttcttgagctcagggacatgtctcatttgacttggcacctatgtttg

SEQ ID NO: 90028 - DNA, 572 bp, Homo sapiens
aacatagagaagcgaggtgatgctggatgcagtgggtcacgcctgtaattccagcatgttgggaagccaaggcaggaggatcacttgaggccaggaattgcagaccagcctgggcaacacggtgtgatgtcgtcactccaaaaaataaataaaagattagctggatgtggtggtacgtgcctgtggtcccacctacttgggaggctgaggtgggaggatcatttcagcccaggagtcccaggctgcagtgagccatcatcacgctactgcaccccagcctgggcggcaaaacaagaccccatacctacaaaaagagaaagaaaaaagagaaaagtgaggtcatgcagtgcaggggccttcctgcaatcctagatcttgatgactcctggtgcttctgttgtcaggacactcattaaaactcacyccatgagcctctttttctaccaccgtcaccccctatgagcttccttttatgctaccatctgccacgataagcctgttttttccaccatcacacccatgagcttcttgagctcagggacatgtctcatttgacttggcacctatgtttg

SEQ ID NO: 90029 - DNA, 878 bp, Homo sapiens
tgcatgggtgtacagctgtcatctatatgtgcatatctctacatgcaggatgtcaattcagatgttagaggcaggtcacagtggctcatgcctgtaaccccagcaatttgtgaggctgaggtggaagaatcccttatgcaggagttcaagaccagcctgggcaacatagtaatagtaagccctcgtctctacaagaaataaaaaataaaaaatttagcctggtacagtggtgtgcacctgcagtcctagtgacttgggaggctgaggagggaggatcgcatgagcccaaaaagttggaggttacagtgagctatgataatgccagtgcactctagcctgggcaacagagctacatcttgtcttaaaaaagattaaaaagtgttattgtctaagagatgggatgagatcatatattctttttatcattaaaaacttttgttttctaaatttcctatgaggaatatttatttctttataaacagtataaacaactagctttaaaaaatagtgtgtctagcctatgaagaaagaacaagtaataatcttcattctacagcaatggtaatttccccaagatcgttaactcttccaaacctgttttccctggatctcaaattggagcctagagaaggcatttttgctaaaggttagtttgccgcaagggctcagatcaatgaaatttttatcagcttgagtttggctgaaaggctggttttgggggtgtgtgggttggtgagagggcaaagtcttagcctgtacttataaataaataaatawatatatatatatttacataaatacattacacacgtatatattaacaaatatatattatttctgtacaatattttacatatatatgtaacttgataaacttt

SEQ ID NO: 90030 - DNA, 537 bp, Homo sapiens
tccttatagtacatgttttttcattaatcaaatgcttattctattagaagtcccaaacctttaagatggtgggacatttcatttttattgtcctgaagtggcattaaaatccacatggtcctcagcaggccactggtgaattcctcatgttcgaactcattccaccctctgtcttctctgatcctatctattttgtattactcttttagaagaattttttktgtgtgtgtgttcttgctgggatagatgctgaactgttagccaaaagcctgtttttttcttcccctgcctgtatttgaagtctggagccagtcgctgatgtcattctcaagcccatgtttttgcactgtggacctcatctcctttggcctcttctgctggctctgtcttaccatcagtgggcaaaattccatgttcccatttggttagccgagagcaaagcctgtccttgtcctctcccttgtctatggtgggtttcatcaaggaatctcttactgtatattttaatgaccaaaatgatgaaaatttgtcatttag

SEQ ID NO: 90031 - DNA, 537 bp, Homo sapiens
tccttatagtacatgttttttcattaatcaaatgcttattctattagaagtcccaaacctttaagatggtgggacatttcatttttattgtcctgaagtggcattaaaatccacatggtcctcagcaggccactggtgaattcctcatgttcgaactcattccaccctctgtcttctctgatcctatctattttgtattactcttttagaagaattttttgtgtgtgtgtgttcttgctgggatagatgctgaactgttagccaaaagcctgtttttttcttcccctgcctgtatttgaagtctggagccagtcgctgatgtcattctcaagcccatgtttttgcactgtggacctcatctcytttggcctcttctgctggctctgtcttaccatcagtgggcaaaattccatgttcccatttggttagccgagagcaaagcctgtccttgtcctctcccttgtctatggtgggtttcatcaaggaatctcttactgtatattttaatgaccaaaatgatgaaaatttgtcatttag

SEQ ID NO: 90032 - DNA, 1720 bp, Homo sapiens
tacaaatgtcacacatggaatcacccaggaagcttctttaaaaaatcctaatgtccaggctattctgtgtaataataaagtcaaaaactttaaaaatttatagtaaaaataaaaatccagaaagggtgttgttaaaaataatccacaagcctgtagagaaggtcttgaaggcaacaattatgaccacattagagaaatgcattcatgaaaacaagacccacagccattttaactctggtagtttctctgttctaaagactgtgtgatttagagggactagagtttgtttgtaacaagaaacaagtggaggccacagctacaggcaaatgcattggactaaatggccaggtgtttattcattttacctctatgtggtattttctatatctgctagtgaagattattggcgttaccacttgagagactctgagggtcaatgttttagtgtttttgatttctttgcagcactgaatgtaggcattgttatattcatggaacatgtagaaacacgtgcttcattaactaagtggagactcagtctactgaatattttttagttgttgttcatgatagtttaaaatataatggcttctaatgacttttagcgttagctatactattcaatcctttgttccccacactaaagcactttcaaagattgctttatattgcatttaaaagcttggttacctaagttgttaacaaaatatttctgtaagttaacatttttgttgttgatgctgagataataatgcccatgcatgcctaaaccgtggtttctttagctgagagcaagtccaatagcttttataatacttcaagacctatacacactttcgtagttataaatgaacatgatagaaaagttatttatttgagacaagtctaatagttgaagatttttaaaaaatagtagtgttttaagggtaatattgccttggcattgattctctgttcaatattttgaasagtaaaatatgataattcatgttacaaattaagagaagctaaacccactataaatgacaaggtaatttaaaaatgacttatttcagtaataaaacaggtttcgtctatctcttctatagtttagtcttatctgagaactcatctattttcctttactgcactgactggatgagctattgatgaagaaattgggaaacttttttgaaatcaccaacttttatatgtcttatgtcaagagtcggcttccattgtcttccaagaattatggtacacttcaaaagtcagagctagatagattcttttgtgaatggaggaactatcccaagattagcttgtgactgtgatgtttacatgcttcttgattccattgaatgccatcattagcttaaatactgtttgttggagccaatgaataaacttaaatgactctagtattagtagaatatagaaaggaataatagatattggcctaaatagcttcagaagaatgaatcctttgcccggagacaacagataagtagtctgcactgcttcctgagtgggcgccgtgtgttcatcaatgctttcctgaagtttatttgaaaactctacatctttaattggttgctttgttaatacactaataatacccattgtattagcacccatacatgtcattagtttattaaagtaacatcattaccatgaaataacctgatttatattttttcaaaacagtctttttaaagacatggaactaatattgaatgca

SEQ ID NO: 90033 - DNA, 1720 bp, Homo sapiens
tacaaatgtcacacatggaatcacccaggaagcttctttaaaaaatcctaatgtccaggctattctgtgtaataataaagtcaaaaactttaaaaatttatagtaaaaataaaaatccagaaagggtgttgttaaaaataatccacaagcctgtagagaaggtcttgaaggcaacaattatgaccacattagagaaatgcattcatgaaaacaagacccacagccattttaactctggtagtttctctgttctaaagactgtgtgatttagagggactagagtttgtttgtaacaagaaacaagtggaggccacagctacaggcaaatgcattggactaaatggccaggtgtttattcattttacctctatgtggtattttctatatctgctagtgaagattattggcgttaccacttgagagactctgagggtcaatgttttagtgtttttgatttctttgcagcactgaatgtaggcattgttatattcatggaacatgtagaaacacgtgcttcattaactaagtggagactcagtctactgaatattttttagttgttgttcatgatagtttaaaatataatggcttctaatgacttttagcgttagctatactattcaatcctttgttccccacactaaagcactttcaaagattgctttatattgcatttaaaagcttggttacctaagttgttaacaaaatatttctgtaagttaacatttttgttgttgatgctgagataataatgcccatgcatgcctaaaccgtggtttctttagctgagagcaagtccaatagcttttataatacttcaagacctatacacactttcgtagttataaatgaacatgatagaaaagttatttatttgagacaagtctaatagttgaagatttttaaaaaatagtagtgttttaagggtaatattgccttggcattgattctctgttcaatattttgaacagtaaaatatgataattcatgttacaaattaagagaagctaaacccactataaatgacaaggtaatttaaaaatgacttatttcagtaataaaacaggtttygtctatctcttctatagtttagtcttatctgagaactcatctattttcctttactgcactgactggatgagctattgatgaagaaattgggaaacttttttgaaatcaccaacttttatatgtcttatgtcaagagtcggcttccattgtcttccaagaattatggtacacttcaaaagtcagagctagatagattcttttgtgaatggaggaactatcccaagattagcttgtgactgtgatgtttacatgcttcttgattccattgaatgccatcattagcttaaatactgtttgttggagccaatgaataaacttaaatgactctagtattagtagaatatagaaaggaataatagatattggcctaaatagcttcagaagaatgaatcctttgcccggagacaacagataagtagtctgcactgcttcctgagtgggcgccgtgtgttcatcaatgctttcctgaagtttatttgaaaactctacatctttaattggttgctttgttaatacactaataatacccattgtattagcacccatacatgtcattagtttattaaagtaacatcattaccatgaaataacctgatttatattttttcaaaacagtctttttaaagacatggaactaatattgaatgca

SEQ ID NO: 90034 - DNA, 1720 bp, Homo sapiens
tacaaatgtcacacatggaatcacccaggaagcttctttaaaaaatcctaatgtccaggctattctgtgtaataataaagtcaaaaactttaaaaatttatagtaaaaataaaaatccagaaagggtgttgttaaaaataatccacaagcctgtagagaaggtcttgaaggcaacaattatgaccacattagagaaatgcattcatgaaaacaagacccacagccattttaactctggtagtttctctgttctaaagactgtgtgatttagagggactagagtttgtttgtaacaagaaacaagtggaggccacagctacaggcaaatgcattggactaaatggccaggtgtttattcattttacctctatgtggtattttctatatctgctagtgaagattattggcgttaccacttgagagactctgagggtcaatgttttagtgtttttgatttctttgcagcactgaatgtaggcattgttatattcatggaacatgtagaaacacgtgcttcattaactaagtggagactcagtctactgaatattttttagttgttgttcatgatagtttaaaatataatggcttctaatgacttttagcgttagctatactattcaatcctttgttccccacactaaagcactttcaaagattgctttatattgcatttaaaagcttggttacctaagttgttaacaaaatatttctgtaagttaacatttttgttgttgatgctgagataataatgcccatgcatgcctaaaccgtggtttctttagctgagagcaagtccaatagcttttataatacttcaagacctatacacactttcgtagttataaatgaacatgatagaaaagttatttatttgagacaagtctaatagttgaagatttttaaaaaatagtagtgttttaagggtaatattgccttggcattgattctctgttcaatattttgaacagtaaaatatgataattcatgttacaaattaagagaagctaaacccactataaatgacaaggtaatttaaaaatgacttatttcagtaataaaacaggtttcgtctatctcttctatagyttagtcttatctgagaactcatctattttcctttactgcactgactggatgagctattgatgaagaaattgggaaacttttttgaaatcaccaacttttatatgtcttatgtcaagagtcggcttccattgtcttccaagaattatggtacacttcaaaagtcagagctagatagattcttttgtgaatggaggaactatcccaagattagcttgtgactgtgatgtttacatgcttcttgattccattgaatgccatcattagcttaaatactgtttgttggagccaatgaataaacttaaatgactctagtattagtagaatatagaaaggaataatagatattggcctaaatagcttcagaagaatgaatcctttgcccggagacaacagataagtagtctgcactgcttcctgagtgggcgccgtgtgttcatcaatgctttcctgaagtttatttgaaaactctacatctttaattggttgctttgttaatacactaataatacccattgtattagcacccatacatgtcattagtttattaaagtaacatcattaccatgaaataacctgatttatattttttcaaaacagtctttttaaagacatggaactaatattgaatgca

SEQ ID NO: 90035 - DNA, 1720 bp, Homo sapiens
tacaaatgtcacacatggaatcacccaggaagcttctttaaaaaatcctaatgtccaggctattctgtgtaataataaagtcaaaaactttaaaaatttatagtaaaaataaaaatccagaaagggtgttgttaaaaataatccacaagcctgtagagaaggtcttgaaggcaacaattatgaccacattagagaaatgcattcatgaaaacaagacccacagccattttaactctggtagtttctctgttctaaagactgtgtgatttagagggactagagtttgtttgtaacaagaaacaagtggaggccacagctacaggcaaatgcattggactaaatggccaggtgtttattcattttacctctatgtggtattttctatatctgctagtgaagattattggcgttaccacttgagagactctgagggtcaatgttttagtgtttttgatttctttgcagcactgaatgtaggcattgttatattcatggaacatgtagaaacacgtgcttcattaactaagtggagactcagtctactgaatattttttagttgttgttcatgatagtttaaaatataatggcttctaatgacttttagcgttagctatactattcaatcctttgttccccacactaaagcactttcaaagattgctttatattgcatttaaaagcttggttacctaagttgttaacaaaatatttctgtaagttaacatttttgttgttgatgctgagataataatgcccatgcatgcctaaaccgtggtttctttagctgagagcaagtccaatagcttttataatacttcaagacctatacacactttcgtagttataaatgaacatgatagaaaagttatttatttgagacaagtctaatagttgaagatttttaaaaaatagtagtgttttaagggtaatattgccttggcattgattctctgttcaatattttgaacagtaaaatatgataattcatgttacaaattaagagaagctaaacccactataaatgacaaggtaatttaaaaatgacttatttcagtaataaaacaggtttcgtctatctcttctatagtttagtcttatctgagaactcatctattttcctttactgcactgactggatgagctattgatgaagaaattgggaaacttttttgaaatcaccaacttttatatgtcttatgtcaagagtcggcttccattgtcttccaagaattatggtacacttcaaaagtcagagctagatagattcttttgtgaatggaggaactatcccaagattagcttgtgactgtgatgtttacatgcttcttgattccattgaatgccatcattagcttaaatactgtttgttggagccaatgaataaacttaaatgactctagtattagtagaatatagaaaggaataatagatattrgcctaaatagcttcagaagaatgaatcctttgcccggagacaacagataagtagtctgcactgcttcctgagtgggcgccgtgtgttcatcaatgctttcctgaagtttatttgaaaactctacatctttaattggttgctttgttaatacactaataatacccattgtattagcacccatacatgtcattagtttattaaagtaacatcattaccatgaaataacctgatttatattttttcaaaacagtctttttaaagacatggaactaatattgaatgca

SEQ ID NO: 90036 - DNA, 692 bp, Homo sapiens
agagacatccatgtaatttagtgtctttcacaaggcagacaaaaagagcttaggagagagagacaaaggaaaatagaaacaaacaaaaggtgttaagcttctaaaaaacaggcactgtgttgggctttgaacatatagaatagcatgaattctcaccatgactacctgcagtagccagtattattcccacttcatggatgaaagattcaatcttagagagtttacgtaacttataacagyagaaaagcaagattttaattacaaatcctatgttctcttctctatactaaatgtatgaactcaagcaagttatttatcctctttattcttcatgttttaatgggcataataatggtttattcactagaatattttaagaattaaaaaagttaataattgtaaaaattctcacagaattttttttatgtttgttgaatatgaaagtatgataattacttttgttgagcaactatcagcatagcagatgtttaaactgtttctgcagagggatttgggcaagacaccttttattcttatacctgggttttattgtgaagttatatccagttaagcttgcaagaatttggagtgcagcctgcagttgtatgatggctgaggaatacaggaacattgtggttactgtaaacatgagagtaataactgcaaactaaggaataacagtatatcaatca

SEQ ID NO: 90037 - DNA, 704 bp, Homo sapiens
accaacagcttgcaccctcagtgtggaaagctacaagtgctcaacactagcccagcccatgagggcagctgtgggggaaagaccctgcaaagccacaggtgcagagctacccaaggccttgggagcccagccatcacacccctgtgttctggatgtgggatttggattgaaaagtgatgattggagctgtacaatggaatgactggcctgctgggtttttgacttgcatcagatctgtaagtctcatctgtattttgtgcttctttctggcaaagttttttcttttggctgggaattcatacccaatgcctgtacaatcatggtaccttgaaagtaattaacttactttgtatttcagaggctcagaggcagaagggactgcagccttgtgtcagataagactttgggctttggatattcagtaaaggctggaatgacttaagattttgggggactgtagagaaggcatcattgtattttgcagtgtgtcaaagatatgagatttgggggaactagggtcagaataatatgatttggttctgtgtccctaccgatactcacgtggaattgtaatggggaatrtgaaagttgggacctggtggaaggtgatttaatcatggtgaagcatgggtgttggaggtacgggtgtggggagaatggtggagattattttgggggtggggtcgaaagatgaggatggggat

SEQ ID NO: 90038 - DNA, 763 bp, Homo sapiens
acaggaggagtcacagagtcaccaagggctctcctggcccagggagcagtcaacaccatggactgaacacctgctgggctccaagccctgggccaggctgcccatgtggggccaggaggcagctcagagtgggaggcagagaagtgtgctcagagggcacctgtatctggatgtaatgtggtcctgagactggctgggaagtgcttccagggtatcatatgtgttatgcagttacttcctctccccagccttaccctgtaggaattctagtgactatgttgccaccatcttggagctccatgccctcatagtgtaatggcaccagcagatctgcctgtgcatggacttcctgtactacctcactcctgaggggagatgtttctgcagggcctatgacctggtgcacaactttagacaccatcatcctggagcagcactgcaccctcactagccagagtgttgacatcctcaaggccagggccacattcaagactttggacttcattgatgcacttgtgctgagcaaggtgggcatctctggtatcttaattcaggaggcagaatacagcttgagatcaggtgtctgatcaaagaacttgaacttgatctggagggctctggggagccatggaaggttctggataaaggagggwcagtcagccacgttttagaaatgactgtggaagtcttcctggaaggagtgaacaagagccaggagaccagggagggagcttgtggggcaggtctggagatggcaagggag

SEQ ID NO: 90039 - DNA, 1620 bp, Homo sapiens
atgacactgtgtcggtaaagtattgatttggaaaataaagtgagtcataggtaaaatgtatttaaaatgatagcccaaatgaaatatattatggaaagcaattccatatatatagcttgttcaatactttataatgtgaaatagaatacttagaacagcgacagtctttgatacaatcaaataaccaacaaatctgccaatttgggcttcctaaaattctcctgggggccaaaatcatccattttgtatggtcatgtagctatacagttaatgccaaagatctggggcttttttcctgcaattttttacttttggtgactgaawggaaatgccactcactactctttgcaaaaggaagattttcatggatatcttgctctttatgatttcaagaagcagataaatattcttcacgaactgttttaatgatatagcaatccagaataaagatttggtatcacaaagaagtgattctattctaaaatttcattttgaattttctggtcacagtgttgtagggaggcatggttaagtattaaaatgaagcacttgcttaaaccaaaggggatttcctaatcagaagtgaaagcctcctgatactctgctgcaggcgtgtgatactgcagcccttctctaagtgcatatctcacattcaaagtcatttctccatgcctgtcaagtgaactgaaccccctgattgtctgtctaggacagtgatccatttctaatgtatgaggctacagtttttgaactcataaactgtaaactgtattaaataaactgtctcctgattgatgagtgctgctcttataggctaatttctcatctaaacagtgatatgaaaattcttgctaaagggttggtgacaggactaaacgggggtaatagcagacttaatcaagaaagacaaatgggattcattaacaactggcactcagcagacagtcttcagagacttctcagcacaatctcattggtccaatcgaaaataattgtgtgctgcttttatcactgaatgcagaacaaggccaatgaaaaattctattgctgatattaagtagaattcaaattcggattgaattttgtgccaggcagcccatctctggatgagaggaatggagggggaaaaatcgtggctttcatgctgggattttttttctctgattgatcagttttcccatattgctcattccactccggtatcttaatcaactggatcttgccctaactggcagggatgtctatgccagaggcatctggtctctggctggcttaagaattggcacatggtttattttgtccaagcttgctgagctccacttccagtaatgcctgtcttattgagctgtttagatttggcttgtgcggtagagatgactaactctctaccagagcatgctccccttccgcagtacagagattttcctaggaagttccttctaaatcaggatctatgtttcccagtccccctgcatttacgtgagggaagtgtgactaagttgttgccagtggtttccaggccaaagaaatgcgtgccatttccagacctgtcatgtaatactttcacacttagtctttcaccctctatttttccgatctgtcagccagaattagaggatc

SEQ ID NO: 90040 - DNA, 1620 bp, Homo sapiens
atgacactgtgtcggtaaagtattgatttggaaaataaagtgagtcataggtaaaatgtatttaaaatgatagcccaaatgaaatatattatggaaagcaattccatatatatagcttgttcaatactttataatgtgaaatagaatacttagaacagcgacagtctttgatacaatcaaataaccaacaaatctgccaatttgggcttcctaaaattctcctgggggccaaaatcatccattttgtatggtcatgtagctatacagttaatgccaaagatctggggcttttttcctgcaattttttacttttggtgactgaatggaaatgccactcactactctttgcaaaaggaagattttcatggatatcttgctctttatgatttcaagaagcagataaatattcttcacgaactgttttaatgatatagcaatccagaataaagatttggtatcacaaagaagtgattctattctaaaatttcattttgaattttctggtcacagtgttgtagggaggcatggttaagtattaaaatgaagcacttgcttaaaccaaaggggatttcctaatcagaagtgaaagcctcctgatactctgctgcaggcgtgtgatactgcagcccttctctaagtgcatatctcacattcaaagtcatttctccatgcctgtcaagtgaactgaaccccctgattgtctgtctaggacagtgatccatttctaatgtatgaggctacagtttttgaactcataaactgtaaactgtattaaataaactgtctcctgattgatgagtgctgctcttataggctaatttctcatctaaacagtgatatgaaaattcttgctaaagggttggtgacaggactaaacgggggtaatagcagacttaatcaagaaagacaaatgggattcattaacaactggcactcagcagacagtcttcagagacttctcagcacaatctcattggtccaatcgaaaataattgtgtgctgcttttatcactgaatgcagaacaaggccaatgaaaaattctattgctgatatkaagtagaattcaaattcggattgaattttgtgccaggcagcccatctctggatgagaggaatggagggggaaaaatcgtggctttcatgctgggattttttttctctgattgatcagttttcccatattgctcattccactccggtatcttaatcaactggatcttgccctaactggcagggatgtctatgccagaggcatctggtctctggctggcttaagaattggcacatggtttattttgtccaagcttgctgagctccacttccagtaatgcctgtcttattgagctgtttagatttggcttgtgcggtagagatgactaactctctaccagagcatgctccccttccgcagtacagagattttcctaggaagttccttctaaatcaggatctatgtttcccagtccccctgcatttacgtgagggaagtgtgactaagttgttgccagtggtttccaggccaaagaaatgcgtgccatttccagacctgtcatgtaatactttcacacttagtctttcaccctctatttttccgatctgtcagccagaattagaggatc

SEQ ID NO: 90041 - DNA, 1097 bp, Homo sapiens
cccagcactttgggaggccaaggtgggagtgtggcttggggccaggagtttgagaccagtctgggcaacatagtgagattccatctctatttttttttttttaagtcagaagcctgtgattttggcactcagggaggctgaggtgggccatcacttgagcatggcaaagccccagctctaccaaaagaacataaagattggctgtgtgacatggtggcacgtgcctgtggtctcagctacttaagacgctgaggtgggagggtggcttgagcccgggggtgggaaattgccgtgggctgggatatcgggccactgccttycagttgtgcaacagaaccagaacctgtctgtctgtctctctaacacccacacccacacccacacccatgcacccacccaccatatatatatgtggtgtgtgtgtgtgtgtgtgtgtatatatatatcttaaatatgtagcttacatatatatagatataaatagacatgtagctttccaggacgtagacaaaatagactttgacagctgttaaagagtacaaagggcatacataaaaaaggcatggataatgagaatataatgttgtcctgagaattgtaaaatattaaatattacctaacagtataatatgagaaagatatgcgaggaatgagagctggagaagttttgaaagggaaaaccatgcagaatcttacatgttatactaggtttcaatgtagtcagcactgaatctggagtcaggttattttaagtcctacttctgcccctctctggtcatacacctttggatgagttactcagtctttctgtgcgttagttacctcatctgtaacacagacacaatgatagaatctatgccttatggtcaacatgaggatcaaatgaattaatatatatgagcttttagataagggtctatcctgtagcaagcactcagtaagtcatcatcaatcatcatcataatcaacatcattatcatcatcattgcaattattgttactattactatattaaacatcttgttaatggaggcatattgaaaggcgttgccccaattcaatgtgtctgtcttcagcataagctccccctgaacaaa

SEQ ID NO: 90042 - DNA, 720 bp, Homo sapiens
tccaaatgagcctttgtttatctgagttatatctgtcaccactgaccattttagaaattgaagttgagaaaaatttaaaccacaagaatatctacaagcacatatgtcatgaccatcggaaggaagatggcagcacatgccgcgtggcctctgggaaatgccactgtacgttcgtgacagaataagagcgggagaggcacgcgaggatagttttgaccgcctagatgccctgacagggtttcaaggacttgaagggctaccagatcacactttgagaactgccagtttacattatttgatgtcattattgaacatttaccaataccttgcagaaactcaagcaattggtgatgagttgtctgcaaacatagttttgagtgtgggctgtaggatcagccaaactcgatttgatcccccattctactgcttgctagctgtaaggttttgggcaagcctctcaggcactcactgcttggttttctaagtcaaattggggcttgtggggttattgaaggatatgcacacaactagcgttgcacctggcctgtgataggtattcagcaaatgatagctwtaatagaagaagaaacagaacagagaccacttttatgcagccggcctcccccattcctccctcccaagaaggacttttactgattactgtggtatgaaacacaagaattctcctcaggaaggacgactggaagaaacaaatagaac

SEQ ID NO: 90043 - DNA, 720 bp, Homo sapiens
tccaaatgagcctttgtttatctgagttatatctgtcaccactgaccattttagaaattgaagttgagaaaaatttaaaccacaagaatatctacaagcacatatgtcatgaccatcggaaggaagatggcagcacatgccgcgtggcctctgggaaatgccactgtacgttcgtgacagaataagagcgggagaggcacgcgaggatagttttgaccgcctagatgccctgacagggtttcaaggacttgaagggctaccagatcacactttgagaactgccagtttacattatttgatgtcattattgaacatttaccaataccttgcagaaactcaagcaattggtgatgagttgtctgcaaacatagttttgagtgtgggctgtaggatcagccaaactcgatttgatcccccattctactgcttgctagctgtaaggttttgggcaagcctctcaggcactcactgcttggttttctaagtcaaattggggcttgtggggttattgaaggatatgcacacaactagcgttgcacctggcctgtgataggtattcagcaaatgatagctataatagaagaagaaacagaacagagaccacttttatgcagccggcctcccccattcctycctcccaagaaggacttttactgattactgtggtatgaaacacaagaattctcctcaggaaggacgactggaagaaacaaatagaac

SEQ ID NO: 90044 - DNA, 908 bp, Homo sapiens
caacttctgcctctcaggttcaagcgattctcctgcctcagcctcctgagtagtgagtagctaggattacaggcgcccaacaccacgactggctaatttttgtatttctaatagagacggggtttcaccatgttggccaggctggtctggaacacctgatctcaggtgatccacccacctcagcttcccaaactgttgggattacaggcatgagctaccatgcccggccttttaccttttatacaggagaaggatccatttatttaacaagggacacagaccaaatctcatcatgtggctcacagggaggtgaagagagacacgtggaaggacagaatttcacaggaaggatctttcaaaaaacctcaaccagatagaaggacaaatctggaggtgttcaggcctcatccctacatgggcaggcagagctggctgtgggtacagtggggagcagaaaaatggacttgcagtaggaaatccccgtgggctgggggcaggaggcctggtcctggtctaaggactgcggagttaggagtagcctgggtaaaatagagagggtgggctgacctccagggcctccagcttgtcatttcctcaggaagccccagctgctggtgcctgggctgtctcctcttgcggctccacacacgtgtccttctcgaagtcattgtgggtggtcactgtgacagtctgctggggcttcccctgtgcctcctgggtctcgttaccaaaaagtaacctagctctggcacaragtggacactcagcaaatattcatgagggtgatggaggggagcagaggaaaaagggggaaagatggaaaaaggaggaggggagagaaaggagtgaaaaacaattgaaggaaggagagatgtgagagaggatgtgaggacaggatggagggatgg

SEQ ID NO: 90045 - DNA, 1122 bp, Homo sapiens
ctcccacttcaggatggtgatttcctctgcaaaaggttgaaggaaggaggaagagaaggaagaaggaagctttaaatatactttaaagcttatttttaatgagattgttcaaagtaattatttaggctgggcacagtggctcatgcctgtaatcccagcactttgggaggccaaggcgggtgtatcacctgaggtcaggagctcaagaccagcctggccaacatggtgaaaccccatctctattaaaaatacaaaaaaattagccgggcgcggtagcaggcgcctgtaatcccagctactcaggagactgaggcaggagaattgtttgaacctgaacatgggaggcagaggttgcagtgagcaaagattgctccactgcactgcagcctgggcaacacgagcgaaactctgtctcaaaagataaaaaataataataacaataataattttgtaaaaactaaataattatagagaagtaggaaggaggtgcttcacgtaaaattcataccaaggagaggagttagtccttgaaagattacagaggaggggggacataccagtcaggtgaaacactcactgaatttatgtagtaacaagagttcttccatttctcttttttacattacatctgattttaaaacaagttggaagcactttaaaacagatggcccttttacaattgacctattaaataagaataaaagatcagcactacagagtgaagacacctgtaacagaagatccaggctggaagaggcacagagtggcagctccgagtcatgttaaaagcacaggatctaagagagactacctggatttgaacccaggctccactgctaaccagctgccacctgcacaagccaagtgcctccataaaccccagctttctcatctggaaaataaggatcacattggctgctacttagtggggcagctttaaggattaaataatggaagtatgtaaagtgcttasttagcacattgaaagaggcctagtaattactcaataaatgttagctgttataattactatttttattaaagaagttgagtataaaccttaactctaagctttctacaagctagactaagcaaaaaggtaactcaagtagttacacagat

SEQ ID NO: 90046 - DNA, 1122 bp, Homo sapiens
ctcccacttcaggatggtgatttcctctgcaaaaggttgaaggaaggaggaagagaaggaagaaggaagctttaaatatactttaaagcttatttttaatgagattgttcaaagtaattatttaggctgggcacagtggctcatgcctgtaatcccagcactttgggaggccaaggcgggtgtatcacctgaggtcaggagctcaagaccagcctggccaacatggtgaaaccccatctctattaaaaatacaaaaaaattagccgggcgcggtagcaggcgcctgtaatcccagctactcaggagactgaggcaggagaattgtttgaacctgaacatgggaggcagaggttgcagtgagcaaagattgctccactgcactgcagcctgggcaacacgagcgaaactctgtctcaaaagataaaaaataataataacaataataattttgtaaaaactaaataattatagagaagtaggaaggaggtgcttcacgtaaaattcataccaaggagaggagttagtccttgaaagattacagaggaggggggacataccagtcaggtgaaacactcactgaatttatgtagtaacaagagttcttccatttctcttttttacattacatctgattttaaaacaagttggaagcactttaaaacagatggcccttttacaattgacctattaaataagaataaaagatcagcactacagagtgaagacacctgtaacagaagatccaggctggaagaggcacagagtggcagctccgagtcatgttaaaagcacaggatctaagagagactacctggatttgaacccaggctccactgctaaccagctgccacctgcacaagccaagtgcctccataaaccccagctttctcatctggaaaataaggatcacattggctgctacttagtggggcagctttaaggattaaataatggaagtatgtaaagtgcttacttagcacattgaaagaggcctagtaattactcaataaatgttagctrttataattactatttttattaaagaagttgagtataaaccttaactctaagctttctacaagctagactaagcaaaaaggtaactcaagtagttacacagat

SEQ ID NO: 90047 - DNA, 612 bp, Homo sapiens
ttcatgttcctgtagtcctcttttcctaaataaagaccatgcaaatctacactgactctgagcttgcctcagtgagttcatcagatgcccagacacgtctgtaagcccagcttctgctcagtctggagcctccactacatgtgaaatgttacataatgagataaacaataaatactaggtcttcacaccagtggagaagacgtcccaggcagtacagagtggagaagaatttcaaggttgaatggtatctttgtgcccaggtttctgggctgttcatttcctccatgacgtgcaagagacaacaggaacaaaaagaccagcccacaaccctagagactggctttggacaacagaagaatcttcccactgttgcatttctggttataaaggctggttagggaagaaaatatctgagaatgtgattccaccaggaggaattgcgattccaaaacttccacgtatactttatcttgcaaaggagtggaaaaccaacgctgacggtctgaaggaggttcaaacagaggattcagttgagacyatggtcctccatcaccacagaccttcagaacatgctgtgcagggtggtactgcgggtggcccttcaggggacaa

SEQ ID NO: 90048 - DNA, 1534 bp, Homo sapiens
cactgcctttatgagctgtaacattcactgcaaaggtctgcagtttgactcctgaagccagcaagactacgaacccaccgggaggaaggaacaaccccagaygcgctgccttaagagctgtcacactcaccgggaaggtctgtagagtcactcctgaagttagtgagaccacaaacccaccaggaggaggaaactccgaacacagctgaacattagaaggaacatagtccagacatgccacctttaagaattgtaacactcaccgtgagggtcggcggcttcattaagtcagtgagaccaagaacacaccaattccgaacacacttacagaatttctgtgtgactgggtggggatggtcattgctattttacacatgaaaaacgaagacttgtggaggataaacaacctgctagagtcgcacaattcagtccagtgctgctaccgtcccggtttcgttacgaggagtccccgcatggaaagcaaggctctccttctctcctaagaacccccatctaccttcagggccagtcctgccctcccttgggaagaagctgcttcggcatgtttctgagctcctcatcgtgtgaaaagcatccactagcgctggctggatggaggctgaggctcgttttcacctgcatgagaggatagctgcctccaaggaccgggaggatgcgtgctgcacgtggtgcctgggccacaggcacgctgaggcagctcccagtttctacttcactcccagcaaacacgggcaaaagccctatcacagtgtattttcttcttcccctgcctcccatatgctcaacatacctaccttttgtcttgttttagaggaaaataagattgtataacccaagactacttgttagagtctgccttccagagctcttccaagccaaccttggtgaatgggagtgacaagataccaagtgaataatgttaccaaagtcctaaagggaagaggggactctccacagtcttcccttagtgagttatcaagttcatcaccagctcactgctcttctggaaaatcagcaaaattgctgtaaatgtactttaaaatacttaaaatgtctttctaagcaataaaatatcactacttagaaagtaagtgtctttgtgctgttattgagaagtaaataaacaggcagtttgatagaaataagatttacacataggtagtaactagacctcacatttgggtattgcttttttcctacttccttttcatcatagatactaggattatagatttaatttattatacctaaaataagccttgcaacaggaaatattcattaaggatttaaatgccttcatatgctttcctactgttcacctgcttgatctgaggccacgcctttctatttcagaaagaaggaataaaaaaaccacttaccctctaagatatttaatttaagatcatttgaattgtattagttttagaaaggggacttttactctgtttccaaaaaccgagtgagtgcagagaatgtgtccactgagtgagatcacacagaagggagagactgg

SEQ ID NO: 90049 - DNA, 735 bp, Homo sapiens
agaccctttaaaatcctttgggtaatcccagagagttactctacaagaaaatatcaagtcccgttacctggaggctgccatctgagcagaatttggcacaagcttagcacaatgcctcacacctaaaagtctgaaagtgttgcttgactgactgatggaattgcttcactcacgtttacaaaagcaaagggcctaacaactaacaaaaaaatctaacatctcaattacgaaatgggcaaaggacatttttccaaagaagatatacaactggctgataacacataaaaggatgttcaatgtcactggtcattagggagatgcaagtcaaaatcacaatgagatgccacttcacactcattaggacagttattcttttttttaaaaaaaaaaagcagaaaataacaagtgttggtgaggccatgragaaactggaacccttgtgcattgctggtgagaatataaaatggtgaggcctctgtggaaaaagtataatgattcctcagaaaactaaacacagaattaccatatgatccaacaattgcacctctgggtatatacccaaaacaagtgaaagcaggaacttgaacagatatttctatacccatgtatgtgcataacagcattattcacataaacctaaaagtaactcaagtgcccattggctgatgagtggataaataaaatgtggcatatccatgcagtggaacattattcagccttaaaaaggaaggaaat

SEQ ID NO: 90050 - DNA, 800 bp, Homo sapiens
cattcgtgccagcttcaggaagaaggcgtttactggcatctaaactcatgctttctcatctttcttcattctaattttctgtctagtgaaacaatattgctagccatatgatttccagcattcaaacaaggccccacatggggattttgttactagtttccttagagaagttttacagtttctcaggaaaaaagaccaaaccgttaaacatctatttcttctgttaaaaaaaaaatcccatttagtattataagtaataatatgtttattatagacaaattgaacttgcaaaaataagtaggtatatagggagaaagctaacacctgctatggtttggatgcacccttcaaaaytcatagtgaaatttcattgccattgtgatggtattaagaggtgggaccattaggagatgattaggtcatgaggtctctgccttcaggcacagattaatgctattatcacaggagtgggtttgttattgcaggagtagacccctgatgaaaggatgaagttcagctaggcatggtggctcacgcctgtaatcctagcactttgggaggccaaagcgggaggatcatttgagctcaggaattcgagaccagcctgggcaacatagtgagaccttgtctctacagaaattttttaaaaaattagccaggcaggatggtacacgcttaatagtcccagctaatccgggggctgaggtgggaggatcacctgagcctgggaggtcaaggggcagtgaaccactgactctggactgggtgacagagtaagtaagacaccatctcaaaaaaaa

SEQ ID NO: 90051 - DNA, 800 bp, Homo sapiens
cattcgtgccagcttcaggaagaaggcgtttactggcatctaaactcatgctttctcatctttcttcattctaattttctgtctagtgaaacaatattgctagccatatgatttccagcattcaaacaaggccccacatggggattttgttactagtttccttagagaagttttacagtttctcaggaaaaaagaccaaaccgttaaacatctatttcttctgttaaaaaaaaaatcccatttagtattataagtaataatatgtttattatagacaaattgaacttgcaaaaataagtaggtatatagggagaaagctaacacctgctatggtttggatgcacccttcaaaactcatagtgaaatttcattgccattgtgatggtattaagaggtgggaccrttaggagatgattaggtcatgaggtctctgccttcaggcacagattaatgctattatcacaggagtgggtttgttattgcaggagtagacccctgatgaaaggatgaagttcagctaggcatggtggctcacgcctgtaatcctagcactttgggaggccaaagcgggaggatcatttgagctcaggaattcgagaccagcctgggcaacatagtgagaccttgtctctacagaaattttttaaaaaattagccaggcaggatggtacacgcttaatagtcccagctaatccgggggctgaggtgggaggatcacctgagcctgggaggtcaaggggcagtgaaccactgactctggactgggtgacagagtaagtaagacaccatctcaaaaaaaa

SEQ ID NO: 90052 - DNA, 800 bp, Homo sapiens
cattcgtgccagcttcaggaagaaggcgtttactggcatctaaactcatgctttctcatctttcttcattctaattttctgtctagtgaaacaatattgctagccatatgatttccagcattcaaacaaggccccacatggggattttgttactagtttccttagagaagttttacagtttctcaggaaaaaagaccaaaccgttaaacatctatttcttctgttaaaaaaaaaatcccatttagtattataagtaataatatgtttattatagacaaattgaacttgcaaaaataagtaggtatatagggagaaagctaacacctgctatggtttggatgcacccttcaaaactcatagtgaaatttcattgccattgtgatggtattaagaggtgggaccattaggagatgattaggtcatgaggtctctgccttcaggcacagattaatgctattatcacaggagtgggyttgttattgcaggagtagacccctgatgaaaggatgaagttcagctaggcatggtggctcacgcctgtaatcctagcactttgggaggccaaagcgggaggatcatttgagctcaggaattcgagaccagcctgggcaacatagtgagaccttgtctctacagaaattttttaaaaaattagccaggcaggatggtacacgcttaatagtcccagctaatccgggggctgaggtgggaggatcacctgagcctgggaggtcaaggggcagtgaaccactgactctggactgggtgacagagtaagtaagacaccatctcaaaaaaaa

SEQ ID NO: 90053 - DNA, 514 bp, Homo sapiens
cactatattattgttaactatagtcaccctactgtgcaaaggaatgttagaacttattcttcctgtataactctaactttatgggatttttatcttacgattccaagttccctttcctttttacttgatcctacttctgtttctttctaacttgatcccaattctttctccccctttctctttttttaggggcggggtgtgatggcgagtggtgatggtatgtttgatcatctgatgtacatggttgagtctgttctattcctcagttcatgccccaccactcttactagtaccaggaaracaagacacctctgctgtttcactcattttactttctttatcttcattccccagttctactcttcttcctgtttcatgcccctcctcgcaccaccacccaagcatactttccagtttgcctgaaatatgtccctaaatgtgcagagttcttacagagttggtagcggaattccactgtgtgtgtgtgtgtgtgtgtgtgtgtgtgtgtgtgttt

SEQ ID NO: 90054 - DNA, 514 bp, Homo sapiens
cactatattattgttaactatagtcaccctactgtgcaaaggaatgttagaacttattcttcctgtataactctaactttatgggatttttatcttacgattccaagttccctttcctttttacttgatcctacttctgtttctttctaacttgatcccaattctttctccccctttctctttttttaggggcggggtgtgatggcgagtggtgatggtatgtttgatcatctgatgtacatggttgagtctgttctattcctcagttcatgccccaccactcttactagtaccaggaagacaagacacctctgctktttcactcattttactttctttatcttcattccccagttctactcttcttcctgtttcatgcccctcctcgcaccaccacccaagcatactttccagtttgcctgaaatatgtccctaaatgtgcagagttcttacagagttggtagcggaattccactgtgtgtgtgtgtgtgtgtgtgtgtgtgtgtgtgtgttt

SEQ ID NO: 90055 - DNA, 702 bp, Homo sapiens
tttgcagaaaccactaagttttgtgtgttatattctttataaaactattacataactaaaacagaaatgttaagagttgttttttataaatgatgacaggaattgacagaaaactaacccacacaattaatacataattgtggaatacattaatatataattatggtaaatggcagcaatgaattattttatctgtttaaaactgtgacgatgtacacaccgattacacagaaatacaagtcacttcatcctaatgaggacatctaatgttttctgactactraagacaaccatgaagtgtctgatagtgcttcctagcaagcaaattctatatttgacatagtgctaaataaaaagctttactggttctcctttatgtgattatccagaaatatactgtttaagagaaagacatttattactgaacgtatttaacaaacagattactggagaagttatccacaaagtggcctgtaatttgagccctggaaaactttcaaaattacttgaggaaatcaaaagaactacaaaggaaataagttgctaaatttcaaaattagcctgcatttagggcaatatgaagtcagcaataccaacacctctgtgccattacacatgttcctgtcatcaccctgacgatgttctttccccacctccgcttttccacattttaccaaccatgcttgtctcttcttggaattt

SEQ ID NO: 90056 - DNA, 702 bp, Homo sapiens
tttgcagaaaccactaagttttgtgtgttatattctttataaaactattacataactaaaacagaaatgttaagagttgttttttataaatgatgacaggaattgacagaaaactaacccacacaattaatacataattgtggaatacattaatatataattatggtaaatggcagcaatgaattattttatctgtttaaaactgtgacgatgtacacaccgattacacagaaatacaagtcacttcatcctaatgaggacatctaatgttttctgactactaaagacaaccatgaagtgtctgatagtgcttcctagcaagcaaattctatatttgacatagtgctaaataaaaagctttactggttctcctttatgtgattatccagaaatatactgtttaagagaaagacatttattactgaacgtatttaacaaacagattactggagaagttatccacaaagtggcctgtaatttgagccctggaaaactttcaaaattacttgaggaaatcaaaagaactacaaaggaaataagttgytaaatttcaaaattagcctgcatttagggcaatatgaagtcagcaataccaacacctctgtgccattacacatgttcctgtcatcaccctgacgatgttctttccccacctccgcttttccacattttaccaaccatgcttgtctcttcttggaattt

SEQ ID NO: 90057 - DNA, 470 bp, Homo sapiens
tgttgaccaggctggacttgaactcctgacmtaaggtgatctgcccgcctcagcctcccaaagtgctggaattacaggcgtgagccactgtgcccagccaatttttttttttaaacttgtaaaatgtctactagaaaacaaaaatcataacttcttttagtgtctactagagtactgaagattacatatgtggattgtattctatatctcttggacaaagctgttctacattatcatgtcagtggctctcacactgaattggtaccatgatcttacctgtagtttccacccaatctttctggaaattgaaaggtggcggggagtgggaagttttgaatgtcataaaattggaagaatgccactttcctttatcacccagaagctagagatgttaaaagtccttagcgtatgagtcagtcccaaacaacgaactgctctatccacaatctcaggtgtgccccaactggaaa

SEQ ID NO: 90058 - DNA, 470 bp, Homo sapiens
tgttgaccaggctggacttgaactcctgacataaggtgatctgcccgcctcagcctcccaaagtgctggaattacaggcgtgagccactgtgcccagccaatttttttttttaaacttgtaaaatgtctactagaaaacaaaaatcataacttcttttagtgtctactagagtactgaagattacatatgtggattgtattctatatctcttggacaaagctgttctacaytatcatgtcagtggctctcacactgaattggtaccatgatcttacctgtagtttccacccaatctttctggaaattgaaaggtggcggggagtgggaagttttgaatgtcataaaattggaagaatgccactttcctttatcacccagaagctagagatgttaaaagtccttagcgtatgagtcagtcccaaacaacgaactgctctatccacaatctcaggtgtgccccaactggaaa

SEQ ID NO: 90059 - DNA, 553 bp, Homo sapiens
ctttgggtgctaccgaatcattaagtgttcattaaatcaaaccaaatgatatgaaatgatgctcaggaaaagaaatgccaacctgtaacaaatkctaaagacaaccttaaaattctgaaatgctttgagtaaagggaggaaaaaacataatatacacgagtatgtaaaatcacagcaacatgttaaaagatttaaaccacagacgaagaatttaaaggctaacattatgagttttgattcagcagaataaagaaacactgacaataacaaacatcaacacctgaaactttccccattatcctaatacattttcactgtaagtgttccattaaagaacgtctttaaaacaatcttcaaagttcgactccctataactaattcaattaataaaattatcaatacaattgaataatagtttataacagcgtggtggttcctcaggcacatatagcccatctttaatacatattatgaataatttccttatgagacatctcagtaatattgagtataacaccaattgcatttaaacataaatgtcataagctggatg

SEQ ID NO: 90060 - DNA, 1192 bp, Homo sapiens
catattttcatatttctttttaatgagcatgtaccatattccagacactccattaagtgctaataggtacaaaagaaatgtatgataatatataatcacttgagttgtaataaaggtagaatataatttgaagtgaagccaaatggcattgatctgccttcatctatttccaggtaaatttgcatttctagttaaaatttcttttgtagagagaacttggaggttcataaggaggtttggatactaccccagtattctatatagtatgatgtaagtttctgcggtagattgtccagttgttcaggtgggggggttggggaggaaaatttagaagatgctattcattacattacactaacactcttctgttaatatgtggagaattgttcattctttcccattggtattgatttaaaataagaaatcaccatacacagtcagacccatgaccaatcagttttctcccctgtagcttcatgatggggttgcctctttaacgtagttcactcgtatcttaatttctttaagctactacttgtttctttgaatccatttcggtttgccattcagacatttctttttttcttttctgagacggagtctcgctctgtcgcccaggctggagtgcactggtgcgatcttggctcactgcaagctccgcctcccgagttcacgccattctcctgcctcagcctcccgagtagctgggactacaggcgccygccaccacgcccggctaatttttttgtatttttttttttagtagagacggggtttcactgtgttagccaggatggtctcgatctcctgaccttgtgatccgcccacctcaccctcccaaagtgctgggatgacaggtggaagccactgcgcccggccccagtcatttcttaaaacttgatgaagttttaaaaaattttagtcttgcggattataggtttaacacctgccatatgaaatagcaattgattcattttctttatattatttgtatttgtctcaggttttaataaaatactcctgtgtgtactgttgccaggatgagatggacaaatggtgttataaaattcttggcaactaggattccatagattatttagtttatgtttctagactgaaactccatattatttttatatagtactctccattctcatgatgaataaagtgtaagtagttgtcatctttaaca

SEQ ID NO: 90061 - DNA, 1672 bp, Homo sapiens
gccatttggatcccatccctttgggtttttatggaggcttcattacatagacatgattgattatatcattgtccattgattataaattcaacttttagcccatttttttctctctggagttcaggggctggggctaaaagttccaaccctcttatcacatgttcctctgtcaactagtccccagcttgaagcttttcaggagcccagcaagatttgcttcactacaagagatgttccaatcaggccagaaaattccaagggatgtagaagttttgtaccaggaatcagggtgaaggagcacatattagaacaaaacattatctgagcacctctatttacaagggtattggttgctcaataactgggacagagaccaaacattaaaatagaagattcttctagcactcctgtagctcaggaaattacaaagttttaggagctctgtgtcaactactcaggacagagaccaatatatatatttattgttatttcacaagccccaaactaaaaacaaaatattcttcaatgttcgaatgattaaacaaattgtgtagttattatgcaactttgaggatcaacaaagtaataccacatgtaataccatcagtcaatttcaaaaacttaatattgagcaaaagawtcccgacacgaaacagattatattgtaggttggtgtgaggaaaaaaaggcagaaacaattgatgacattagaaatcaggataataatattatctatgaaggagattcctattgacctaaagtttgtattcttccaaaattcacaggttgaagactgaatccccaatgtgtggggtattctgaggtggcgactttgggagataattgggtcttgaagttggagcccttatgaatgagattagagcttttataagtgaagagagcagagcttgctctctttgtgtgtcatgtgaagatacaaagagaatacagccatctattaagacagagcagggccttcaccaagaatccatctacactgacaacctgatctcagatttccagtcacaggaactgtgaggaataattcttttttttttttttttaagacagagtcttgctctgtcacccaggctggagtgcaatagtgcagtcttgactcactgcaacctcctcctcccgggttcaagtgattttcatgcctcagcctcctgagtagctgggactataggcacatgccaccatagcctgctaatttttgtatttttagtagagacggggtttcactatgttggccaggctggtctcaaactcctgacctcatgatccgaccacctcagcctcccaaagtgctggaattacaggtgtgagccactgcccccggctgagaaataatttttgttgttgttgaagccacccaatgtatggtaatcctagaaaatatgaaatgtttgtggattgatatatatgaaagaaaccaattttccccaaatttatctgaaggtatattatatcaccgcaatattctacaggcattttggtttgtttctaatctttataaatttaaaaatggctttccttttgagacatagcttttggctggccactgggccttagaaactaaatatttgactatgggccatcaagttaccagacagcctgagatgtccataatgaactgggtgatatctgacctactaagccataattggga

SEQ ID NO: 90062 - DNA, 1010 bp, Homo sapiens
aaagcacagattgctggaccatctcagagtttcttttttatttttgagaccaagtctccctctgtcgcccaggctggagtgcagcggcgcaatcttggctcaccgcaacctccgccacctgagttcaaatgattcttctgcctcagcctcctgagtagctgggactacaggtgcctgccaccatatcatagctaatttttgtatttttagtagagacggggtttcaccacgttggccaggctggtcttgaactcctgatctcaggagatccacccacctcggtttcccaaaatgctgggattacaggtatgaagttcatacgaaagattcacttatccaattgttgctcttacattgttgactatacaaaaaaatacagcaacaaagaaaagacaaataacatgtttgaaacatttatgatttttcttactaccatgggcaaaatgcaagtcaaagagagaaaagagaggcattgcaatttgttagagggttggtggagacaatagagatagagaaagcaatcagccattctgactttctggggccacggtgaattttcagaagaaaaatatcagctttcatcaactaatgaagagagttcatcaataaacaagaaaacaatttttgttaaatgattggccctttaaggtcagggattatatttcatttgtccacacgcctgcagcatttagaaaatttcrtaaaatcacatacactgaccatgagtaaaagatgtttaagccattttaattcaatagacacatggtcttctcctcaatacaaatatacacacacaaaaaaactcattacaaagccctacactccacttactgaaaaaaagcagagcaaattctatttctaagttaattatttaaacagaaataatactaaataacttgtattttaagagaatactggattattttgtaataggtttattgaggccatcaaactgtactaatcttgataggttggtagatttttctttactggatatgtatgactccaat

SEQ ID NO: 90063 - DNA, 1010 bp, Homo sapiens
aaagcacagattgctggaccatctcagagtttcttttttatttttgagaccaagtctccctctgtcgcccaggctggagtgcagcggcgcaatcttggctcaccgcaacctccgccacctgagttcaaatgattcttctgcctcagcctcctgagtagctgggactacaggtgcctgccaccatatcatagctaatttttgtatttttagtagagacggggtttcaccacgttggccaggctggtcttgaactcctgatctcaggagatccacccacctcggtttcccaaaatgctgggattacaggtatgaagttcatacgaaagattcacttatccaattgttgctcttacattgttgactatacaaaaaaatacagcaacaaagaaaagacaaataacatgtttgaaacatttatgatttttcttactaccatgggcaaaatgcaagtcaaagagagaaaagagaggcattgcaatttgttagagggttggtggagacaatagagatagagaaagcaatcagccattctgactttctggggccacggtgaattttcagaagaaaaatatcagctttcatcaactaatgaagagagttcatcaataaacaagaaaacaatttttgttaaatgattggccctttaaggtcagggattatatttcatttgtccacacgcctgcagcatttagaaaatttcataaaatcacatacactgaccatgagtaaaagatgtttaagccattttaattcaatagacacatggtcttctcctcaatacaaatatacacacacaaaaaaactcattacaaagccctacactccacttactgaaaaaaagcagagcaaattcyatttctaagttaattatttaaacagaaataatactaaataacttgtattttaagagaatactggattattttgtaataggtttattgaggccatcaaactgtactaatcttgataggttggtagatttttctttactggatatgtatgactccaat

SEQ ID NO: 90064 - DNA, 1310 bp, Homo sapiens
tgcatgtcaaaaattttcaaaataaataatgaaatcccactttgttaaaaagtcttaccatttactaataagctcatataagagaaatccagagaaacaggaaaacaaacaagaatttgcttacaaagtctctggtgagcattcttgtcagcaggaatacgtatcacgtacaaggtcatgatgctgtttatgttaggttaaatgcactaattaatactttcttttgactctacctaagggaaatagaagtagaaagtgttagcaagccagagatttataagattgtgtttagcgacaggtgttctgctgtatcccctttacccccacccctcaatattcaacttctagtgatcttcccattgtttccatgtggtttactggaaatgtaacattttgcaatgtctgttgaaggggtaatatttgcatccaagtcctaatgtttatgcccagcagtgtagtatggagagacctttattaataaaacatttatgttttctttgtctcttacttgctcttttcctagggatggaggttggagtgagaaggaaaactgcctgactaatgattttrgaaggagaaactaggcatggtgccttgctctttctctttcccttaagacgttgctgaccattgagagcatgaaatctaatgtaaacgactttcttatacagataaagccatattttccatactaactttgttcataataaaggtaatatttttatccttacaactttattatatgtcattatattttcaactggatggacactcagatagaaaaaataggatgatatttatttagctctttgaacactcaaaatttgttgcattgatctgtctgcctcaagaaataggcaaagaaagtaaaatttatagaataaaatacaaatggagtggttgaggtttttcatgtggctcagtcttgaacctgagtatattattgggaagctgtgatgttggtggcttataaaggcttaaattggatcatatgactgggtttgctttatgttttcaggctacaaattctgaacaactggcacccaatcaacagactgtatactgacaagtctaaagccaagaatgtagattttacatactcacatactactgaatcacacttatatgtaagcaacagcaaatactgggttctagaaacaatttgttttagagtatgtgcaatataggcctaaaatggagtgtttattaaatgttgtgggtattcagtccattgctgaaatgattttgcctgccctattaaatattttctaccttataaaaaatgaggcaaataaaaaactttgaatgca

SEQ ID NO: 90065 - DNA, 2182 bp, Homo sapiens
  misc_feature (1)...(2182): n = A,T,C or G
tgcatgatagtatcccacaaatccattgccaattcttttgcttactgttgcattttatgttcagaatctatgaatatttactcaagcactacttttaatttgccacgcggttttagagaagtaacttaattatcttgattcactttattaattagcaaaatggtaatacaagctgcaaacttttattaggtttaaaatgtatggtagatccaaataaatccaggaccgagctcgaattcgtaaacagtgaattttnnnnnnnnnnnnnnnnnnnnnnnnnnnnnnnnnnnnnnnnnnnnnnnnnnnnnnnnnnnnnnnnnnnnnnnnnnnnnnnnnnnnnnnnnnnnnnnnnnnntatgtgagagtgccactgaatgagaaatcctctcaatagaaagcaaaggtaaagagcttgaaaaatcctctcatcctttgtaggtaaaatctccagagcagtggtttgagcagatgggaaatttgtactccctgtgctatatctgttcagttgataaaaagagaactttgatctctgagactgtcaatacagttctttttaagaaaaatttgcttaaagcaaacagtaaaagtagcaaagcagttattaaaattccaccccaattggctatgctcccagttcccaaacccaaaacataatgcccactgattactcagattatgtttaagacatttttctgcatgggtttgaagttcggcactataaatagccaatctagttgagaaaattacaaatttttcttttcaaattctaatcatattagatgagttaaataagtttcagcaaaaatccttgcagtgacattgctattgatataagccctaagtagtaaattctgagctgcatccagccactagagttttgtggataactgtaaaatagtaccgttaagcttaaaaccactgcctgtcaatcatttgaaaagtacactgatctgtataattcctgtacattttttaaagtttgatgttaatctattcattgaggcagtccttaaaaaaactcttttagtctttgaaatctggtttttttttaatgagatgcatacttacctgagattttcaaacaaattagcaatatgcaatgagaaaaacccagctctacccattacaggtatttattttacagtcttgttagctgtaactgtgtagtaaacacattcggttttaccattccaatttttgcaatttaaagaagataagaagttcaaactacattctgtaatctctgttgcaactgggatgataggtatgaataaattaatttacttctttgagttatagaaggcagaagtaaagcaaaagccaccttgttgtttcagctagaaagaagccacaaaaagtgggtgctttaggatgcttaaaggcatctagactcagcatttcaggctctaacaacatatgtgcaagaatctgtaggcagacttggctgtggggactgtggaaactaaagtaggatcctcatctctgaagtgcagtaacagttgcagtgaaccctgagtttctctcatccatacttgcaatatttctaagtcccctgtattaaattcctttcgtggggaacacctaaagtggtttcttttattaaatcctgactgcaaacmtactaatggagagtacatttaatttagaatcacttcccaaagatatttaggcataaagagaaaattaaagacagcagatatatgtctttgaagaaggaatgaaacagtaaaaggtatagagaatcagttatgttccagggaaaaaaattttccctgtaactacaaaaattttatatgtggtttaaagatatagcatggtgcttgtcccaaaacttataatcatgccatttcagagggaaagaattatagtataaagctatttaaatccatgaataaactgatctagagggtagtaggattggctcaatattatatggttagtgtcacaagcgtgaataaaatgtacattctgacttttcttaaacctcactattaactccacaaaaatccccaactttaggagtttcagctcattttagctgaaaaagtggaagggattggcaaagagcattaaaattcattaacttacttaatattaaaataatattaatattaaaatattacatttctaccaggggagaggcactttaacagatgctttattaggaaataagaaaaactga

SEQ ID NO: 90066 - DNA, 648 bp, Homo sapiens
cttgtacctttgttgggcaactctgtctttggattatctattttgtaaacgatcatttgggcttatcactgggggccaaggcggcaacacaacaacattctttgttgtctatttttgaaataaataatatatgtacagtcaccattcactgcagacaaggaatgtgacgattggtcactaattatggtatacatttattatttatacagtgatttgtagattgaagagttagcagcaaarttcagactatatgtgattatttacagttatttcagtcatggtaaccgaaatgtgaaccatggtagatgggggactggtgttatttaactaaactttgggaactaaaaggtgtgcatatagaaccacacagataaggactattatctctgtatctactcatcagtttgaatatttggaaaaataacagacaaatttctgaaaaaacataaaaagctataattggcataagaaatgatagaaaattgtgtaagccaataggcatgaaagaaagtttaagctatattcaaaactctagggcccaaatgtttttacaatcatgcaaagcaccttgttttcttgtggtaacaagaaatacaaaaatacggtaatcatagttttctacggaactagccaagagtgttggatcca

SEQ ID NO: 90067 - DNA, 471 bp, Homo sapiens
aggccaaggcaggaggatcacttgaggccaggagttcaagatcagcttaggcaacacagtgaaattctatctctataaagattttaaaaattagctgggcatggtggcacctaaagtcccaactactcrggaggcagaggcaggagaactgcctgagcctaggaggtcaaggcttcagtgagccatgatggtatcactgcactccagcctgggtcacagagccaggccttgtctcctaaaaatttttttaaagattaaaaataaaaagaccaataatagtacaacgttgtacgggagtccagatgagtgagaatcaggaaaagaattttacagagtgtgactctaagctgaattaaaaaaaaaaaaaagcacacatcaatcagatgcaggatagggaggaagagcatccgggagcctcccgggagagggactgcatgcgtcagggcaggaaggctgggagtggcagaacag

SEQ ID NO: 90068 - DNA, 626 bp, Homo sapiens
ccctgtgacagctcccagaatgtctctcttccttctccaggtctggctgctttctctctctgacgcgggtcacccctcctcccaagcctcacaaacctgctaggtgtccctgggtctgcttattctttttttgttgttattgagatgragtcttgctctgtctcccaggctggagtgcagtggcacgacctcagctcactgcaacttctgcctcctgggttcaagcgattctcctacttcagcctcccgagtagctgagattacaggtgcccaccaccacaccagctaatttttgtatttttagtagagacgggatttcgccatgttggccaggatggtcttgaactcctgacctcaagtgatctgcctgcctcaacctcccaaagtgctgagattacaggcgtgagccactgcacccacccgggtctgcttattctacccttctctctggttccacccctgctgcagtggacaagctgtgccgaggttgtctcccaagaaaaaaccatgttccccaacttgacagatgtcagggaggtggtgacagaccagttcctatgcagtgggacccaggaggatgagagtccctgcaagggtgagtccctcaccatgcctggattcccaag

SEQ ID NO: 90069 - DNA, 457 bp, Homo sapiens
tttaccaccccaggatctaaaagyataaaggttatcattttctctatccatggccaatctcttttttaaaaaatcctgagtctgataggctaagagcgatctattctttaatttttcacataatactaacaattttgaacatttgtttcacattctcactgttaaaatgatttcttcctatttggtttatctcttcttgtcacttggcctttgtactggatgctgtgaagcactatccggacccccctttcacagctgatgcattcattctctcactgtcagtggctgaaagatctcagctgagtcactctctgggaactggattcagcagaagagagctgcctagcccaaaatcatgcccctctctctccagggcagcctgaacctaatggctgatcaatgttgtatggtggggagtataaaggcgtggccccctggcctcaaggtggggcaacat

SEQ ID NO: 90070 - DNA, 457 bp, Homo sapiens
tttaccaccccaggatctaaaagcataaaggttatcattttctctatccatggccaatctcttttttaaaaaatcctgagtctgataggctaagagcgatctattctttaatttttcacataatactaacaattttgaacatttgtttcacattctcactgttaaaatgatttcttcctatttggtttatctcttcttgtcacttggcctttgtactggatgctgtgaagcactatccggacccccctttcacagctgatgcattcattctctcactgtcagtggctgaaagatctcagctgagtcactctctgggaactggattcagcagaagagagctgcctagcccaaaatcatgcccctctctctccagggcagcctgaacctaatggctgatcaatgttgtatggtggggagtataaaggcktggccccctggcctcaaggtggggcaacat

SEQ ID NO: 90071 - DNA, 1012 bp, Homo sapiens
attctcaggcctctcccgacccgcccgaatggttgtgtttgaaggggacctctctccccacctcccacacgagtgcaagggtcgggaaagaaaaagctcacctgctccaccgaaaaataaagagcacggtcgggcgatgtggttcccaagccaggaagtacgcctgcgcacgcggccgccaggaactacatttcccagcatcttctgcaaagcgccctcttgagctgcgtctttcaccggtgtctttctaatgctttgcgggttgcgaacgtgcgtcgtttccatcgttgtttacatgaaaagaagaaaaaaggaaaagattttttcttttgctataaacaactgtaaatccaaagagatgcaaagtttgcgttaacaacaccccagacacaaaagtaatacctattcactacattaatagatgatttataaataactctttattcaacagataaaaaaccaaactacccagatggattcattgcagaaatatttattaacgcagtgattaatattttttagcattctaaaagtaaatctctgatttatagctagcttctttgttatgagtgtgtgttgaggggacggtggcgggggggcggggcgggcagagacagggggcagagagagagacagcgagcaagcaccagagagattccatccaagaatgaggtcatacttttggggtaratttttttctagcttttttcttcctgttaggaacttaggttatgatcccttcagtgctaccaaaaatagtatactgatgaacatccttgtagagtaatctgttcactcctccacatctgttcttgacaaaaacgtccgaaaaacgaatataatgaagagggaatatgtatatctaacttttttcttaaacaaacgaatatagatagatagacagattgtagataacagagaatagaggtaaggaaaaagaacaaaattagtcagataaaagttcactccaagatactccctattatatatttaaatatgtaatttctatgca

SEQ ID NO: 90072 - DNA, 1012 bp, Homo sapiens
attctcaggcctctcccgacccgcccgaatggttgtgtttgaaggggacctctctccccacctcccacacgagtgcaagggtcgggaaagaaaaagctcacctgctccaccgaaaaataaagagcacggtcgggcgatgtggttcccaagccaggaagtacgcctgcgcacgcggccgccaggaactacatttcccagcatcttctgcaaagcgccctcttgagctgcgtctttcaccggtgtctttctaatgctttgcgggttgcgaacgtgcgtcgtttccatcgttgtttacatgaaaagaagaaaaaaggaaaagattttttcttttgctataaacaactgtaaatccaaagagatgcaaagtttgcgttaacaacaccccagacacaaaagtaatacctattcactacattaatagatgatttataaataactctttattcaacagataaaaaaccaaactacccagatggattcattgcagaaatatttattaacgcagtgattaatattttttagcattctaaaagtaaatctctgatttatagctagcttctttgttatgagtgtgtgttgaggggacggtggcgggggggcggggcgggcagagacagggggcagagagagagacagcgagcaagcaccagagagattccatccaagaatgaggtcatacttttggggtagatttttttctagcttttttcttcctgttaggaacttaggttatgatcccttcagtgctaccaaaaatagtatactgatgaacatccttgtagagtaatctgttcactcctccacatctgttcttgacaaaaacgtccgaaaaacgaatayaatgaagagggaatatgtatatctaacttttttcttaaacaaacgaatatagatagatagacagattgtagataacagagaatagaggtaaggaaaaagaacaaaattagtcagataaaagttcactccaagatactccctattatatatttaaatatgtaatttctatgca

SEQ ID NO: 90073 - DNA, 558 bp, Homo sapiens
actcccataatccaatcagctcccaccaggccctacctccaatactgtgaatcacatttcaatatgagatttgcaagagacaaacatccaaagcatatcaatacctaagtaagggttgtgatgcagctactgtcctctggtttgtactgagatatcgagttgacccatttgtgaaccaagtttcaaccttttcttcccctccatcagctgtcataagaggttccccatgtggctggtgctgaaggagaagcactggacaacatgrgatctggaccacctgcttttgtggcttgcttgttccttctgaccctacatgtgccctatcccactggtgtaccacttccatcttatagattgctgctgggcccacccaaacttatgatgtggtagtctgaaagaaaacttctcataatggatagttctggttgcatgatcatctgatgtctcttgctcacttgcttcatattcaccaggacccaacaaggatggtggagaaactgctttctgaatagtgtacagtcatccctccatataggtgcaggattggttcccagaatc

SEQ ID NO: 90074 - DNA, 555 bp, Homo sapiens
ccagatgcagtggctcacacctrtaatcccagtgccaaggcagaaggatcactcgaggctaggagttcaagaccagtctgggcaacttagtaagaccccacatctacaaaagaatatatatatattagtcaggcatagtggcgcatgcctgtagtcccaggtacttgggagtttgaggcagggggattgcctgagcccaggagttcgaggctactgtgagctttgatcgcaccactccagctgggcaacagagtgagactgtctctctcgcgctctcaaaaaaagtagtaggtaattctaaatgagaatccaaacatgactatgccattatattcaaacccaaatctaagaacttggattttgttttgctgttttttgttttttttgagacagggtctcactttgtcacccaggctggaatgcagtggcataatcacggctcactgcagccttgacctactgggctcaagcgagcctcccacctcagcccccaccccaggtagctgggactacaggcatgtagtagtcccagtaggctaaattttttgtattttt

SEQ ID NO: 90075 - DNA, 856 bp, Homo sapiens
tgagcagtgagggcaagcagaggtcactttcattgccatcttaattctggctggtttcagctggcttctttactacattctgttttatcagcagtgtctttgggacttgtgtcttgagaaacaagtcctgccaacttcctatctcacaagtgcagagccatttaccagaaagaatggcttagaattgagcagtagagagatctggcaactctttgggctttatatctactaaaactcggaagaaagcacaaatgtaggtgtaaaaaaatgtttttgaagcgtactcagcaattttcttcaaattgcatttgcttttaatgtggcagtgtcatcctcaaagtcccaggatgagctacttgtctcacactgaacagagtcttattcaggataagctgcctcctggcaacgacctcaacaacaaagaaagtcttctatgaattgaaaatgccaagtttactttttaatatgcttcaccaacgaacaaataaaattatgatactgttttgtgatatcacatggaccaaggacaattctttacctcttactattcctgtgaaaactagatttccaagactcattttatttataaaataattataataataataacastagtattagcactagcactgttgacaggaatagtatcaatagtactatgtatcaaaaacctccattttgtacttgattaattgtagcaattattctccccattttattgttgaaaacactgaatagtaacaaaatcaagggacttgccagagattacccagctaggaagtggtaaagcaaagtttgaggctaactctgaagacctcacttttcctgctacagcatttccttatgcccatagttt

SEQ ID NO: 90076 - DNA, 689 bp, Homo sapiens
tgtgtagaaaaygttgacaatcttcactcactctgcttcccatcacctctcacccttccacctttatcaaagacagaaggaaaaagaaaagaaaaaggagtgacgtaaagggtgatataaatgtcattataggctgtttaggatagggatggatgtgtgccttcaaaaaatgtaggagtgtacgcaatttcatccttccctggaatcgcagcacactgcatatgtgtccctgcacatttattgatgcagacaaaccgtcctcatggacttaactacagttcatatttcaatttctaggctatttcattcattctccaaaaactgagtagacaagagctgtaatgaacaggctggtgcattgtagtaggtctccacagttcagacaattcaaaagccagtgaaattaataaaaggtacatcaaagtgtgctttttccatctgttagagaaatgggaaattatgtaacacctagtgcagagactgtaataagacagcactaagtgacagactttctttgcaagtttatgatcacctctgggtacccattatggaccttaatgaattcttcttaaaccatcattttcgctggacgcttcttggagcagctctcaggttgagacacaggcagagcgtccgccctggtcctcactccagtcctgcatcccttttgtatggtactcattctgaag

SEQ ID NO: 90077 - DNA, 772 bp, Homo sapiens
tcgtttctaaaaaaaaaaaaacaaactttacaaagacattctgggaacattagagaaatgtgatatggacttggtattgttgtaattttcttaggtgtgatcatgtactatggttatgtaaggcaatgtccctattgttagggatgcctgctgaaacttttgggtgtaaaatgctgcctattttgcaatgtgtggatggaaagacggatgtgtgaaccgagctacataaagccaaggcagcaaaacagtgaggcaccttgttccctgtactattcttccaatactttctcaatatttgatgattctcataataaaaaaatttttaaaaaaattttttgaagcacagctctggacccaacatcacaagctcaaatcctggctgccgcttcctagctgtgagccctgggacagcgactctggcctgtgtttcagcttcctcaccagtaaaacggggtaagaatcayggcgcctcctccaggcagtgaggatcaaattcgtcaacacatgtggggtacttagggaagtccctggcacgtggtcgtgccccatatatactgatttttgttaaagcgggggatgagcctgcagttgaaggcatccctctcccgggcacccggcccctctgcgtcccctcatgggtgcacacgcacctgtttgaggatgttctgctccctcatcagcttctgccgttcccggttgggcttagtgaccatgatgtccaggacattctgcccattgttggggacatcgctgacaaagaacaccaggtctt

SEQ ID NO: 90078 - DNA, 3793 bp, Homo sapiens
cctagacccttggtcacattctggctgcacacatagtgtcagacacctgtcacaaacatacaggctgacacccacattcacaaccacaatcacacacaaacgtgcacacaacaggcacacccccatggacaccctggtgatcacaagaaagaggctgttctaaatactttacatagattagctcaagtaacctacaacgatccaagagggaagtactattactgcctgatttcacagatggggaaaccaaggcgccaggggacgttaggtaacttgcccaagttacaccattaggagtggcagagccaagatttgaatccagacaacgtggctccagactccatgctgatggccaccatgctgtaaacacacccatggcacagctactcaggccacacagcaacagacacacacacagtcagacgcacagccacacaggtggccccagggccactcattcacccggggacacacatgcacagagggcaatgcctgctggcagccctcacccagcaccagcccagcctcttaggcagggagaggggcaggcgggagagaggcaggccagcctcacctggatcacactgccatacttcacgacatccccatgcaccttcttgttctccgtgtcattttgcttctgctccatctgcgccgcatgctgcacagacacacacagaagtgaagggtgggctcagaagctgctcctagaggaagacataccccagccccacacatgcacgcacacatgcacacaaacacacacacacacacacagtcaccctggactccaggaccccttggacccctgccccagctcttggtgctgcacccagagtgctgcactctgagtgcagaaggcagcctgaggtctcacagcacacacagcccagggagccaaatccctaaccctccccagccacctcccctggagagggcatgccagcaggaccttgagcatcccccgcaatccccttacccccccaggaacctaaagctgtgtgtgtctcaccacccacccccacctcaccagactcccaatgccccagacacgggacccttgtcccagtccaaacgctggcaggggctgcttggtgccatttcctggctcccaccaccacccccactcctctgcaaccttccctcccaaaactgtgtgcattcagcccactgcctccaggcagccctccctgagtggtcacatcccagtctgatggatccactgctggtggccttgaggatttggtttgcatcccattagagacagctttttaggctcttctgtcctctgttagactggaagctgcctaaggataggtgccctgcctccttaccagattaggggttcctggagggcaggagccctgtcccctccatcagactggcactctctgagagcagtggtctctgtcctttcctcctcctcagtcctttactgagaccgaggcgaaggtggcagcaggagagccttgccatggaccatgtgactttccacaaagcaacagcatgtggctgtgtgaccgcttgcggttctgattatgtggctctgcataggtgaatgccctccccccaggccagatccccagctcagcctctacctgctggcagcaggaaggaagcctgttgcagcccccattccaggaagagagctgaggtattaatactagagctcaggcagcccacctgcagctccctctctccagcccagtccacagctataaggcgcagcccaatgtccccattctagacccacctcctctaggcgtggggcttagaggaaggggacagagagaagcaaggtttgtatgacaaggggtggggcaacagggcccagggcccaggctacaaagttcttgaccacagccaaagcctcccactctctttgtggtttggggaacggggttgggaccccgagatctgcccaggatgtgaactgagccactgcccacaaggggctcatgagcgaccaccacattccagcatcatggcacgatccacatgtctgaggaagccagggtgagtcagagacctgggggccatctaggctctactgcagacttacaggatggtcagaccatggacagaccagtcccatctaagggccccaggctccaactctataaaacaaggggagaggttaagactagatccagggctcccaaattgggttccccagagccactgtctccaggagccactgggaactccatggacagctgtacaggttgttcactgctctatggtgtcgacattccactctctgagccatgcaccctggcacagggctgtgccagcctggaggaaggggcactttcttctcattgacacaacagagttacacagactggtgggtcactgggaagggatcctactccccccacatcccctccttcacagcaattcacaccaatctcttgcgtattggaatttatttttttatttttattttttattaattttttgtagagatagggtcttgctatgttgcccaagctgctctcaaactcctggcctcaagcaatcctcctgccttggcctcccaaagtgctggaattacaggtgtgaactgtcacgcccatacgagttttagaaaccactcagctcagccacagagcccctactggctccgacaagcagcaccgctgcttgtgtacccaggttcctggtacatgtgcacagatgcacgcctgcacacacacacatacctgcagcttctgcagcaacaccacatcagcgatcttctccttgtcctgcttagtctgcttggccttccagtactgcttctgggccgagtagcggttcatggggcacaccttgaagaggcagtctgtggtggggcaggttgggggtgaggggaatgattcatctggggctcagggccctccctggagaaaaccccagcctgcagctcttctctcccaacccttccccacccccgttccccgctgcaggtagagaggaagcggttggaagaacctcacagaatttggagcatcctggaatatgctgagtagaatggggaggctcagaggcaggtttgagagcagtgcatctcacttggtggggtggacacgtgccctcttcccctaggagatttaccagaggctgctggggcctcacccttatgccatgtctgtgcccagcttttgtgagtattggcagctaacagctcacatctgcatcctctttagctaattgccttggctgatggaaaccatcttgcacacagatgcctgggaaatgacatacccctcttcccaggggcagcccctatccagtgactgacacaggcatagaacagcccagcctctggaggggacagtccgaggaacagctcacaatcctgagctccccgaggggtcaggctgaggcgcatcttccactgaaaccacacccttgctcagcttcttctcctgccctatacaaagaggaagagrctccctcactgtgttctcctgagaacttcctcaagaattcacccatcttaggctctgcttctaggaatctgacctaagacaaggcaaatccaaattccagaaacatgttctctagtacaatttttattttggcaagtagataaaacaagtgtcattcccataagcctaagctgcaggaagggtgtccaatttttctgcttatccaaaggaggcaggagttggaaaagcctgttcgaaagcttggtaggaggggagggaggattctgggtgctggtgaggggctggtgtgggtgactgggcctgtgtgacaatagcctgggctgggctgggaagcagtgagctccccatcacaggag

SEQ ID NO: 90079 - DNA, 538 bp, Homo sapiens
  misc_feature (1)...(538): n = A,T,C or G
ctatgtaactacagtgttgtgatcacaccaattaatagtttcctaatagcattcagggcccaatccatagtcagatgtgcccattgtcctcagtggtgtgatcagagttcactgtaacctcgaactcctgagctcaagcaatcctcctgtcttggcctcccaaagtgctgggattacagccactgggcccaggttgtctgtgtttgaccgaccattggtttctttttttttttttttgagatggagtttccctcttgtagcccaggctagagtgcaatggtgcaatctcggctcactgcagcctctgcctcccgggttcgagtgattctcctgcctcagcctccagagtagctgggattaccagtgccagccaccacrcccagctaatttttgtatttttagtagagacgggtttcaccatgttgggcaggctggtcttgaactcctaacctcaggtgatctgcccgcctcagcctcccaaagtgtgggattacaggcgtgagccaccacgccgggcctgaccttggtttntttaaat

SEQ ID NO: 90080 - DNA, 876 bp, Homo sapiens
cagctgctacagaatcactaacacagccatgagttgcatctgcagctgggactcaaacctgtgtgggcctttgactgatcagaaacgattgccctaggtgatgacaactccgaaagagaaaactctttcctcctttgctggctcctcttacactaacaatcaagcaagtgaatgttacgctctctcacctccccaaggatggagccgctgactgctcaactgtaagctcctcagtggtgaaggccaggttatggccttcctccatagatcctgcaatttcccaaacatggtaagctctcaaatcaattctcaccactcaggacacacaaatattcctttctcactcttcacaacttctcttcatctagttctgctacatctgaaactatattcaaattatctttgtctcatgagccacaaccaattatttacttatccattcagacatttactgagtgtttttttatgggccaagaactagctagacactsgtaggggagagagggaaagataaaaatggcatcatctctattttcaggaagctcatactaaaaatatgcagggagtacagctttagaaagttcacgggtttgtagaattgggactagataagattcttgccttaaagatctttacactttgggccagtgaagaccaccatgaataatgtgagggccctgggtatcgtataacctgggccagacactccccaggctgccagccaatcagcagtacagtcacaatgatgccactgggcgtgctcctgctcctttaggtgggctggcttggctctgtttcgggctaagctgaaaaaaaaaaaacccatgttccttctgtaacaagtcttggccaagtttcacaagtcatttcttcaga

SEQ ID NO: 90081 - DNA, 876 bp, Homo sapiens
cagctgctacagaatcactaacacagccatgagttgcatctgcagctgggactcaaacctgtgtgggcctttgactgatcagaaacgattgccctaggtgatgacaactccgaaagagaaaactctttcctcctttgctggctcctcttacactaacaatcaagcaagtgaatgttacgctctctcacctccccaaggatggagccgctgactgctcaactgtaagctcctcagtggtgaaggccaggttatggccttcctccatagatcctgcaatttcccaaacatggtaagctctcaaatcaattctcaccactcaggacacacaaatattcctttctcactcttcacaacttctcttcatctagttctgctacatctgaaactatattcaaattatctttgtctcatgagccacaaccaattatttacttatccattcagacatttactgagtgtttttttatgggccaagaactagctagacactcgtaggggagrgagggaaagataaaaatggcatcatctctattttcaggaagctcatactaaaaatatgcagggagtacagctttagaaagttcacgggtttgtagaattgggactagataagattcttgccttaaagatctttacactttgggccagtgaagaccaccatgaataatgtgagggccctgggtatcgtataacctgggccagacactccccaggctgccagccaatcagcagtacagtcacaatgatgccactgggcgtgctcctgctcctttaggtgggctggcttggctctgtttcgggctaagctgaaaaaaaaaaaacccatgttccttctgtaacaagtcttggccaagtttcacaagtcatttcttcaga

SEQ ID NO: 90082 - DNA, 667 bp, Homo sapiens
aagctacgatcaatttaagcagaatatccacagcctatttcctgttctcattgataccaagagtgtaacaaaggatatctggaaggtaatgaatagaactgctttgggttaagaactgctttttccataccagtaacacttagctttctcttgtggggtttttttcttgtgtttttttgttttttttgttttkttttgttttgttttgttttgtttgagagggagtcttgctctcaaagccaggctggagtgcaatggcgcgatctcagctcactgcaacctttgactcccttgttcaagcgattctcctgcctcagcctcctgagtagctgggattacaggtgcgcaccaccatgccctgctaatttttttgtatttttagtaaagacggggtttcaccatgttagccaggatcgtcttgatctcctgacctcatgatccacccgcctcggcctcccaaagtgctgggattacaggggtgagccactgcgcccggcctgccacttgtgttttttaaagttgttccttgattgcttttctctcttcaaaccagtatcagtttccttttgtattttggcacctgtgcatcattgtattagcttatatatgacttattccctttctctccctccagtttccacattttgacttatttgtgtagagtttt

SEQ ID NO: 90083 - DNA, 667 bp, Homo sapiens
aagctacgatcaatttaagcagaatatccacagcctatttcctgttctcattgataccaagagtgtaacaaaggatatctggaaggtaatgaatagaactgctttgggttaagaactgctttttccataccagtaacacttagctttctcttgtggggtttttttcttgtgtttttttgttttttttgttttgktttgttttgttttgttttgtttgagagggagtcttgctctcaaagccaggctggagtgcaatggcgcgatctcagctcactgcaacctttgactcccttgttcaagcgattctcctgcctcagcctcctgagtagctgggattacaggtgcgcaccaccatgccctgctaatttttttgtatttttagtaaagacggggtttcaccatgttagccaggatcgtcttgatctcctgacctcatgatccacccgcctcggcctcccaaagtgctgggattacaggggtgagccactgcgcccggcctgccacttgtgttttttaaagttgttccttgattgcttttctctcttcaaaccagtatcagtttccttttgtattttggcacctgtgcatcattgtattagcttatatatgacttattccctttctctccctccagtttccacattttgacttatttgtgtagagtttt

SEQ ID NO: 90084 - DNA, 1094 bp, Homo sapiens
ttagaactcatattaagatgtgagactgatagtatgctagaaccatagtgaactctcattctgtgtatgttcacagaggaacacactgaagaataaggaccatgagtgattacatgaatctcatctttcaggaaccagcatattatggggctcagtgtagtataaggtcctgccttcattactgagagagatttcttttctaaaactcctaagtctacccagctcatggyttttcaagcccatttagaacacttttcaggagatatggctgccagagtgtttaaagctaatttccaaccactagattatgataaccagactgtcactgtactccttaaatcaaacaaaacctataaaactattgccatcagatttttaattgcccccgtaattttacctgactccatacaagtatttcgttaggcagaaggaagtagagtttttaaaatcccataatccactgtagccctccaaaatatactgtaatatgccatgtatcagaatgttgaatgttaaaagaaatatatatgtgtgtgcgtatatatatatttgtgtatatatacatatatatacatacatatatatacacaaatatatatatatatatacacacaaatgtatatatatgtatttgtttgtttgtttccatgtccctcttcactggccaatgagagaagatcagattaattctcttatacaaaagtatgctgaaaataatttttttgtagagtatatatatatatatatatatatatatacatgtatatatatataaatatatatatatatttagctgattgtttccatgtccctcttcacccgccaatgagagaagatcagattaattctcttatacaaaagaattctgaaaataattttttttttgtagagcaaaagtcagtctcctttttacaataacaaatgtaacatgttactcatggaaaaataatataattgccttcacaaaaagggccattttttttatttctccactctctgctatcattttaaaaatacttgatgaatttctggctacacagagaagaatagcctggctcaatgttatggtttaaattgaaaggacaaggctagga

SEQ ID NO: 90085 - DNA, 1094 bp, Homo sapiens
ttagaactcatattaagatgtgagactgatagtatgctagaaccatagtgaactctcattctgtgtatgttcacagaggaacacactgaagaataaggaccatgagtgattacatgaatctcatctttcaggaaccagcatattatggggctcagtgtagtataaggtcctgccttcattactgagagagatttcttttctaaaactcctaagtctacccagctcatggcttttcaagcccatttagaacacttttcaggagatatggctgccagagtgtttaaagctaatttccaaccactagattatgataaccagactgtcactgtactccttaaatcaaacaaaacctataaaactattgccatcagatttttaattgcccccrtaattttacctgactccatacaagtatttcgttaggcagaaggaagtagagtttttaaaatcccataatccactgtagccctccaaaatatactgtaatatgccatgtatcagaatgttgaatgttaaaagaaatatatatgtgtgtgcgtatatatatatttgtgtatatatacatatatatacatacatatatatacacaaatatatatatatatatacacacaaatgtatatatatgtatttgtttgtttgtttccatgtccctcttcactggccaatgagagaagatcagattaattctcttatacaaaagtatgctgaaaataatttttttgtagagtatatatatatatatatatatatatatacatgtatatatatataaatatatatatatatttagctgattgtttccatgtccctcttcacccgccaatgagagaagatcagattaattctcttatacaaaagaattctgaaaataattttttttttgtagagcaaaagtcagtctcctttttacaataacaaatgtaacatgttactcatggaaaaataatataattgccttcacaaaaagggccattttttttatttctccactctctgctatcattttaaaaatacttgatgaatttctggctacacagagaagaatagcctggctcaatgttatggtttaaattgaaaggacaaggctagga

SEQ ID NO: 90086 - DNA, 748 bp, Homo sapiens
acccgcctgtcacagttttttaaaaggaacatacatttgctgacactcctcccaataaaaggtgaagtctatcttccctaaccttgaacctgggcaggcttgtgattgctttagccaaccacgtatggtagcagcaatgctctgtctcgaggctagctcataaaaggtctttcagcttctgtcttctgtctcttactctccagatgtcttgttagaatgctacctcctggacccagctgccaggctctgagaagctcaagtcacatggggaggccacgtgtaggtgacctggtcaacagtctcagccaaagccaactctcaagtagtcccctgtgggtgccagacatgtagatcaagaagcttctggttgatttcaactgccagctgcttgcatcacccccagctgaggtcccagatgtggtgaaaaagcagccaccctccctgtgctggttggaattccctactcagagaattcatgtgcctaataaaatggtttttgtttaagrccaccacgtttggagttgtttgttatgaagcagtagacggtcagatacctggaatactactttgagagctgttgtgcgggttaaatgacacaatgtattatctacctggctcacaattgcattaagaaatactggtttcaaggtgcatgcaagacattcaggtagatgtcttaaattgtagcagcagcagtagcagccatagccactaacattcctgagcacatctgatatgcccagtgcta

SEQ ID NO: 90087 - DNA, 675 bp, Homo sapiens
tgcattcatactaccacttacactagtaaatctactattacttctgatgattatgggtgtttttctataaagtagattttctattttatggtgtatagtgtattttttgactgtggcaaaatatacattacrtaaaatacatgattttaactatttttaagtgtacagtttagtggcattaaatacatttgcattgttgtgcaaccatcaccatcagccatctccagaactttttcatgatcccaaactgtactcattaaataatacttccccatgccccttcctccagtccctggtaaccaccatactacttcctgtctctctgaattggatgactctaggtacctcgtttaaatgaaatcctacaattttggtcctattgtgtctggcttatttcacttagcgtaatgtcctcgaggttcatccatgttgtagcatttgtcagaattttcttcctcttgaaggctgaagagcagtccgttgtatgtacataccgcattttgtttatccattcatccattgatagacacttgagttgcttccacatttttgctattgcgcataatgctgccatgaacatgggtgagtacaaatatgattgttttgtttatgtggtgtttttaactttgcaaaatgtttttgttgctataatatcataacccctctgagatagat

SEQ ID NO: 90088 - DNA, 753 bp, Homo sapiens
aatggtaatttcctgtttccatcattccttccacatttagtagctggaattctactggaaggaagacctgtccttcccctgccccctttatttatttatccaattgtttatttatattaccatggacccatgggttcttattttattctatggtttataacaaacacacacacatttactcactgaytcatcaaatatttacagcactcctagcacatgtcaaacactcttctggacttttggatttcgctgttgagcatgatgtcttggccaagacagcttttactctccttggagaaatgtcccctcctccctgagctggcacaggcatctcccttgtctgtgtcctgtgcaagtgcttgcatgggtccatgcactcagtcatctccctgtttctgaatctctctggctggcccggaggaccctgagggcaggggcccacactgtggatctcgaagacacagcactgatcttcgaagacactcagctcttgcttgggcctgggtgagctagtgagggaaggggtaaaggaatgaacaaacaggctagtgctcagatgcaaatcattatattttaacattgtctaagaagttcaaagtttaacctttgtttgtccttgagagaaagccagctgtctgttatattggttttctatccagactggatatagaagaaaaaggaaagaattcaatatgcctccaagatttctggctatgagccattggtagaaggaggtgcacacacttgggctgg

SEQ ID NO: 90089 - DNA, 753 bp, Homo sapiens
aatggtaatttcctgtttccatcattccttccacatttagtagctggaattctactggaaggaagacctgtccttcccctgccccctttatttatttatccaattgtttatttatattaccatggacccatgggttcttattttattctatggtttataacaaacacacacacatttactcactgattcatcaaatatttacagcactcctagcacatgtcaaacactcttctggacttttggatttcgctgttgagmatgatgtcttggccaagacagcttttactctccttggagaaatgtcccctcctccctgagctggcacaggcatctcccttgtctgtgtcctgtgcaagtgcttgcatgggtccatgcactcagtcatctccctgtttctgaatctctctggctggcccggaggaccctgagggcaggggcccacactgtggatctcgaagacacagcactgatcttcgaagacactcagctcttgcttgggcctgggtgagctagtgagggaaggggtaaaggaatgaacaaacaggctagtgctcagatgcaaatcattatattttaacattgtctaagaagttcaaagtttaacctttgtttgtccttgagagaaagccagctgtctgttatattggttttctatccagactggatatagaagaaaaaggaaagaattcaatatgcctccaagatttctggctatgagccattggtagaaggaggtgcacacacttgggctgg

SEQ ID NO: 90090 - DNA, 753 bp, Homo sapiens
aatggtaatttcctgtttccatcattccttccacatttagtagctggaattctactggaaggaagacctgtccttcccctgccccctttatttatttatccaattgtttatttatattaccatggacccatgggttcttattttattctatggtttataacaaacacacacacatttactcactgattcatcaaatatttacagcactcctagcacatgtcaaacactcttctggacttttggatttcgctgttgagcatgatgtcttggccaagacagcttttactctccttggagaaatgtcccctcctccctgagctggcacaggcatctcccttgtctgtgtcctgtgcaagtgcttgcatgggtccatgcactcagtcatctccctgtttctgaatctctctggctggcccggaggaccctgagggcaggggcccacactgtggatctcgaagacacagcactgatcttcgaagacactcagctcttgcttgggcctgggtgagctagtgagggaaggggtaaaggaatgaacaaacaggctagtgctcagatgcaaatcattatattttaacattgtctaagaagttcaaagtttaacctttgtttgtccttgagagaaagccagctgtctgttatattggttttctatccagactggatatagaagaaaaaggaaagaattcaatatgcctccaagatttctggctatragccattggtagaaggaggtgcacacacttgggctgg

SEQ ID NO: 90091 - DNA, 1253 bp, Homo sapiens
acaggcatagagacacacactgacaccagaattagactatatttgtaaattacaatgaaaaatgtattgcagacacaatatgatattgccaaatttcgtggcaagatacagtaggggaagtagttcatttgaataaaaggaaagaaatataaaggtaatttgtggttattacagagaggttgttgaacagagtggttaagagtaagggccccagagccggacagggcaaacaccatctctgcactagctagtaaatgacttgggcaaggtatttaacctctctgtttttgcatttcagcatcttcaaaatagaggtaaaaatagtacctactactgagaattgaatgattcaatactgtatagcacttagaccagcacctgtcatacaataagttcttaataaatgtgagctgacatcatcataattagctactggttaaacctcttattcccactttgcaagggagtcatattcttttcattttaatctgaatttaaaagtccatttccataaaaaagtttctttacagtttattagcaaatagtaaacattttcttctttaagtaatttgaagaaggtaaaatttttatgagcaatttctttagaattttttttaaaactgatttttcactatttttttactgaagtaaacaattcttgaaggtaaaaatgcgttcacaagatgaacttcaagacaacaagtactctaattttagagtaaagagctctggaatatggtccataatatatgtgtaaacaaatgtataagstgttattttgtgatggaagtattaatcacacctttcatttactctgtcatttaacgaatttttattgagccccttctgtatgtcagatctgatgctaagcactggagatacagtgacaaataagtcctctaaactttcaagaaatcagtagtcgaacttttgggaaacacataaatgctttttgttgttgttgttttgagacagaatctcactgtcacccaggctggagtgcagtggcgcaatctcagctcactgcaaccttcgcctccctggttcaagcaattctcctgccttagcctcccgagtagccgggattacaggtgtgcgccaccacccctggctaatttttgtatttttagtaaagatggggtttcaccatgttggtcaggctagtctcaaactcctgacctcgtgatctgcctgcctcagcctcccaaagtgctgggattacaggtgtgagtcaccacgcccgacctaaatgc

SEQ ID NO: 90092 - DNA, 1253 bp, Homo sapiens
acaggcatagagacacacactgacaccagaattagactatatttgtaaattacaatgaaaaatgtattgcagacacaatatgatattgccaaatttcgtggcaagatacagtaggggaagtagttcatttgaataaaaggaaagaaatataaaggtaatttgtggttattacagagaggttgttgaacagagtggttaagagtaagggccccagagccggacagggcaaacaccatctctgcactagctagtaaatgacttgggcaaggtatttaacctctctgtttttgcatttcagcatcttcaaaatagaggtaaaaatagtacctactactgagaattgaatgattcaatactgtatagcacttagaccagcacctgtcatacaataagttcttaataaatgtgagctgacatcatcataattagctactggttaaacctcttattcccactttgcaagggagtcatattcttttcattttaatctgaatttaaaagtccatttccataaaaaagtttctttacagtttattagcaaatagtaaacattttcttctttaagtaatttgaagaaggtaaaatttttatgagcaatttctttagaattttttttaaaactgatttttcactatttttttactgaagtaaacaattcttgaaggtaaaaatgcgttcacaagatgaacttcaagacaacaagtactctaattttagagtaaagagctctggaatatggtccataatatatgtgtaaacaaatgtataaggtgttattttgtgatggaagtattaatcacacctttcatttactctgtcatttaacgaatttttattgagccccttctgtatgtcagatctgatgctaagcactggagatacagtgacaaataagtcctctaaactttcaagaaatcagtagtcgaacttttgggaaacacataawtgctttttgttgttgttgttttgagacagaatctcactgtcacccaggctggagtgcagtggcgcaatctcagctcactgcaaccttcgcctccctggttcaagcaattctcctgccttagcctcccgagtagccgggattacaggtgtgcgccaccacccctggctaatttttgtatttttagtaaagatggggtttcaccatgttggtcaggctagtctcaaactcctgacctcgtgatctgcctgcctcagcctcccaaagtgctgggattacaggtgtgagtcaccacgcccgacctaaatgc

SEQ ID NO: 90093 - DNA, 1253 bp, Homo sapiens
acaggcatagagacacacactgacaccagaattagactatatttgtaaattacaatgaaaaatgtattgcagacacaatatgatattgccaaatttcgtggcaagatacagtaggggaagtagttcatttgaataaaaggaaagaaatataaaggtaatttgtggttattacagagaggttgttgaacagagtggttaagagtaagggccccagagccggacagggcaaacaccatctctgcactagctagtaaatgacttgggcaaggtatttaacctctctgtttttgcatttcagcatcttcaaaatagaggtaaaaatagtacctactactgagaattgaatgattcaatactgtatagcacttagaccagcacctgtcatacaataagttcttaataaatgtgagctgacatcatcataattagctactggttaaacctcttattcccactttgcaagggagtcatattcttttcattttaatctgaatttaaaagtccatttccataaaaaagtttctttacagtttattagcaaatagtaaacattttcttctttaagtaatttgaagaaggtaaaatttttatgagcaatttctttagaattttttttaaaactgatttttcactatttttttactgaagtaaacaattcttgaaggtaaaaatgcgttcacaagatgaacttcaagacaacaagtactctaattttagagtaaagagctctggaatatggtccataatatatgtgtaaacaaatgtataaggtgttattttgtgatggaagtattaatcacacctttcatttactctgtcatttaacgaatttttattgagccccttctgtatgtcagatctgatgctaagcactggagatacagtgacaaataagtcctctaaactttcaagaaatcagtagtcgaacttttgggaaacacataaatgctttttgttgttgttgttttgaracagaatctcactgtcacccaggctggagtgcagtggcgcaatctcagctcactgcaaccttcgcctccctggttcaagcaattctcctgccttagcctcccgagtagccgggattacaggtgtgcgccaccacccctggctaatttttgtatttttagtaaagatggggtttcaccatgttggtcaggctagtctcaaactcctgacctcgtgatctgcctgcctcagcctcccaaagtgctgggattacaggtgtgagtcaccacgcccgacctaaatgc

SEQ ID NO: 90094 - DNA, 1253 bp, Homo sapiens
acaggcatagagacacacactgacaccagaattagactatatttgtaaattacaatgaaaaatgtattgcagacacaatatgatattgccaaatttcgtggcaagatacagtaggggaagtagttcatttgaataaaaggaaagaaatataaaggtaatttgtggttattacagagaggttgttgaacagagtggttaagagtaagggccccagagccggacagggcaaacaccatctctgcactagctagtaaatgacttgggcaaggtatttaacctctctgtttttgcatttcagcatcttcaaaatagaggtaaaaatagtacctactactgagaattgaatgattcaatactgtatagcacttagaccagcacctgtcatacaataagttcttaataaatgtgagctgacatcatcataattagctactggttaaacctcttattcccactttgcaagggagtcatattcttttcattttaatctgaatttaaaagtccatttccataaaaaagtttctttacagtttattagcaaatagtaaacattttcttctttaagtaatttgaagaaggtaaaatttttatgagcaatttctttagaattttttttaaaactgatttttcactatttttttactgaagtaaacaattcttgaaggtaaaaatgcgttcacaagatgaacttcaagacaacaagtactctaattttagagtaaagagctctggaatatggtccataatatatgtgtaaacaaatgtataaggtgttattttgtgatggaagtattaatcacacctttcatttactctgtcatttaacgaatttttattgagccccttctgtatgtcagatctgatgctaagcactggagatacagtgacaaataagtcctctaaactttcaagaaatcagtagtcgaacttttgggaaacacataaatgctttttgttgttgttgttttgagacagaatctcactgtcacccaggctggagtgcagtggcgcaatctcagctcactgcaaccttcgcctccctggttcaagcaattctcctgccttagcctsccgagtagccgggattacaggtgtgcgccaccacccctggctaatttttgtatttttagtaaagatggggtttcaccatgttggtcaggctagtctcaaactcctgacctcgtgatctgcctgcctcagcctcccaaagtgctgggattacaggtgtgagtcaccacgcccgacctaaatgc

SEQ ID NO: 90095 - DNA, 1253 bp, Homo sapiens
acaggcatagagacacacactgacaccagaattagactatatttgtaaattacaatgaaaaatgtattgcagacacaatatgatattgccaaatttcgtggcaagatacagtaggggaagtagttcatttgaataaaaggaaagaaatataaaggtaatttgtggttattacagagaggttgttgaacagagtggttaagagtaagggccccagagccggacagggcaaacaccatctctgcactagctagtaaatgacttgggcaaggtatttaacctctctgtttttgcatttcagcatcttcaaaatagaggtaaaaatagtacctactactgagaattgaatgattcaatactgtatagcacttagaccagcacctgtcatacaataagttcttaataaatgtgagctgacatcatcataattagctactggttaaacctcttattcccactttgcaagggagtcatattcttttcattttaatctgaatttaaaagtccatttccataaaaaagtttctttacagtttattagcaaatagtaaacattttcttctttaagtaatttgaagaaggtaaaatttttatgagcaatttctttagaattttttttaaaactgatttttcactatttttttactgaagtaaacaattcttgaaggtaaaaatgcgttcacaagatgaacttcaagacaacaagtactctaattttagagtaaagagctctggaatatggtccataatatatgtgtaaacaaatgtataaggtgttattttgtgatggaagtattaatcacacctttcatttactctgtcatttaacgaatttttattgagccccttctgtatgtcagatctgatgctaagcactggagatacagtgacaaataagtcctctaaactttcaagaaatcagtagtcgaacttttgggaaacacataaatgctttttgttgttgttgttttgagacagaatctcactgtcacccaggctggagtgcagtggcgcaatctcagctcactgcaaccttcgcctccctggttcaagcaattctcctgccttagcctcccgagtagccgggattacaggtgtgcgccaccacccctggctaatttttgtatttttagtaaagatggggtttcaccatgttggtcaggctagtctcaaactcctgacctcgtgatctgccygcctcagcctcccaaagtgctgggattacaggtgtgagtcaccacgcccgacctaaatgc

SEQ ID NO: 90096 - DNA, 535 bp, Homo sapiens
atctggtactacctaatatggtagcaacatgtgtttatggaacccttaaaatatgttgaaattgagatattctgtaagtgtaaaacacacactgaatttcagagacatagtgtgaaaaaatgtactatcctgcgaataatgtttatattgatcacatgttaaaaatcacattttagacatattaagttaaacataatccaccataatatctgtggaaatgaaaaggaaaagttaaatagaatatattgttgaaattaattttacttgttcatttttacttttaaaaatgtgtctatcagaaagtttaaaattacgtatgtggctcaccttactctcctttggagagtgctactctacacagtcyttctccttcttctctttcttctcctacacagttgtctccttcaggcaacagctctaatttttatttgtggagtggctctagtcctaatggtagaatatatgagtaagcgcagcacattacactggcgattgcttcaggagtgagccttgattcaatctcatccatcagaca

SEQ ID NO: 90097 - DNA, 651 bp, Homo sapiens
aaggcggaaaaataacagggaagactccttctacctcttaagtttgtcattagatttcaggaaaatcttctcacgtcaggaactgcaggaaaacagttgcaatgcccatggctacygacaacaccaaagagataattcctgagggaactctctaaagaggcccatttggaggctgatgcaagtttcccatcttcacatatgaccattaaaggcatatatatgtaaatgtttgaatcagctttacttttaagagccaaaaacttgtaacaatacaaatgtccattaagagtgcaatagataataaaatatggcatggtcatataatggactactacacaagaactaaaaaatgaaatactgccacatacagcaaatggataagtcttacagacaacatactgaacaaaagaagccaaacaatgcaaaaaccatacataactgtgtgagacaatttacatgaattccaaaagcaggcaaagctaaactgttagaaatcacaattgtggttacctcaggtgggtattgattgacaaatgacatgaagaaaacctctgggatgatgaaaatgttctgtgtctttatcagggtgttggtcacacagatacttgcatatgtaaatattcaccaagctgtaaacttaataataatgca

SEQ ID NO: 90098 - DNA, 607 bp, Homo sapiens
ttcaaaacatttaaaaagaagacacatgatctcatctggactgctgcttgatcttgtttgatattcttcagcactctactttttataacgggtcaatagcagacgggckgtaactgatctccttatttcagagctgaaaacacaaggcactttgcgttgggtgcagttctattctgttatgctactcccgtttgtcagtaggtaaaaacttttcccattccccagaaggcagtacttctatgaatagttgctttagacaagcattcattgttcaaagggtttgattcctcactgagcaaaagctacagcattataaagatgccagttgaaatttttttaagcttgaattttttaaagctagaaaggaaccctcactgttggggaagtcatgaaagaaaaccccttttcacaagccctggaacaagtggattaagagagtaagagtaaaagtgcaaagactgggaacctggctttattccaaaaaaaaaaaaaaaaaagccagaaaaaagccacagttagaagtaattgaacactttggaaatccctttgaagacctaatgcagtagaattttttgaaatgaataaaagctaaatgcataataatttc

SEQ ID NO: 90099 - DNA, 607 bp, Homo sapiens
ttcaaaacatttaaaaagaagacacatgatctcatctggactgctgcttgatcttgtttgatattcttcagcactctactttttataacgggtcaatagcagacgggcggtaactgatctccttatttcagagctgaaaacacaaggcactttgcgttgggtgcagttctattctgttatgctactcccgtttgtcagtaggtaaaaacttttcccattccccagaaggcagtacttctatgaatagttgctttagacaagcattcattgttcaaagggtttgattcctcactgagcaaaagctacagcattataaagatgccagttkaaatttttttaagcttgaattttttaaagctagaaaggaaccctcactgttggggaagtcatgaaagaaaaccccttttcacaagccctggaacaagtggattaagagagtaagagtaaaagtgcaaagactgggaacctggctttattccaaaaaaaaaaaaaaaaaagccagaaaaaagccacagttagaagtaattgaacactttggaaatccctttgaagacctaatgcagtagaattttttgaaatgaataaaagctaaatgcataataatttc

SEQ ID NO: 90100 - DNA, 575 bp, Homo sapiens
caggatgttcctggtttaaggttgcttataaaacatcaatccagaatctgtggatttatggaaaatgagaaatataaaagctggctgacaatttaaggtgtattaggccaytcttgccttgctataaacaccagaggctgggtaattcttaagaaaataggtttaattggctcacggttctgtatgttttacaggaagtatggtgccaacatctgctcagcttctggggaggcctcaggaagcttacaatcatggcagaaggcaaagggggaacaagcgcatcacatggcaaaagcaggaacaagggagagagtatggggggcacactttacaacaatcagatctcatgtgaactcagagtgaaagctcggttattaccaagggaatagctcaagccattcaggggcattcgggggcatgatccagacacctcccaccaggacccacctccaacactggggattacatttcaacatgagatttaggcacagacaaatatcctaactctatcatggggtatgaaatgtaaatatttaataacttatgcttcactgttttgtgagatagatgaaggc

SEQ ID NO: 90101 - DNA, 575 bp, Homo sapiens
caggatgttcctggtttaaggttgcttataaaacatcaatccagaatctgtggatttatggaaaatgagaaatataaaagctggctgacaatttaaggtgtattaggccattcttgccttgctataaacaccagaggctgggtaattcttaagaaaataggtttaattggctcacggttctgtatgttttacaggaagtatggtgccaacatctgctcagcttctggggaggcctcaggaagcttacaatcatggcagaaggcaaagggggaacaagcgcatcacatggcaaaagcaggaacaagggagagagtatggggggcacactttacaacaatcagatctcatgtgaactcagagtgaaagctcrgttattaccaagggaatagctcaagccattcaggggcattcgggggcatgatccagacacctcccaccaggacccacctccaacactggggattacatttcaacatgagatttaggcacagacaaatatcctaactctatcatggggtatgaaatgtaaatatttaataacttatgcttcactgttttgtgagatagatgaaggc

SEQ ID NO: 90102 - DNA, 2274 bp, Homo sapiens
ccagaaggttcagttttctggtgagggctgctytctgattgcaagatgataccttgttgctgcatcctccagaggggagaaacactgtgtcttcacagggaggaaagtggaagggcaagaaaagttagtgctgtgtggaagcctcttttttaagggccataagggctatctgtaaccctgttcatgagggaggagccctctgggtctaataagctattaaaggttccacctcttatcctatcacattggccattaagtttcaacatctgaattttggaggggacacattcaaaccacagtaggctgaaagtagtgtgatttgtgatgtgcccattctcaataacaaattaggccactagtatcacctagttccaagctatctcatgtctcacttggaccactgcaatagcttcccaagtgtcctctctgctgcacttcttgccctcctaataaattcaatagccacacagcagccagagtattttaacataagtcagttcatgtcagtctccttgcacttcccatttaaatggatttaaaataaaatcccaagtccttaccataatctacaaggccatagataatccggtccttagataccttcctcgccacctctcctgccactctgcctcatagctccatgtactctagccctactatgtctcgataacaccttgtacttccctgcttctgggcctttgtatttgccctttcctttgcattggacactcttgtcctagatattcatatgccttgctccccaacttgctcaagttttaccccctcagagaccacaccctttcaaaaatagcaactttcaatactatttaaccccttaacctgtgtgttgactacttgacatattctatgttgcttattgtttgtctccctaaatagaatccaagttccatgcaggcagaaaagttgtctgtcttgttcattctttatccatacctcctaaagttttgcctggcatataatagggctcaataaatatttattaaatgaaattctgctataacaccagaaattatatcattagagagtcatttattttagtcttagagtgttttgatcttagagaaccctctgcaaagatccttgggagagctcacaatttagtcattatcagcgtatactctgggagaggaacatttagaaaaaagtacttaatggagattgaacttgggatttagagcagagaagggcaggtttccaggggtgaaaaaggaaatttaaggggaagttgggtttgtaccaaagatgactttgcttatagtgagaagatactcaaacctttcttacttgaggaagctcacagcttctgaatctctctttctggctgtgaaaagaaatttcctcttttgggtctcccttgaagattatcatttttggatgttgctaagagcatccttggagtcagagtctctatatatagcaaatcatcaaatgttagggctagaagtaatcttggtgatttggtttcttaaaactatttattttataacatgagttaaacatttatcacaaaaacaggaagatagagaaaaggctttagtttttgtaggtcattgcaaggaagaatttcgcttatctccagtgctataattttgactttggtataaagtattcatcaagtgtcatcatcgaaagtattagtggttatgacaaacaaggcaaacctcctgagaactttagaacaaagcccagcatggatgttctgccagcataaatgcagttcagctggcagagcagaggattatctatgtttttatgtattatatattacatatttatatattagggtctcctcaacccataactggaaaggtcattctaatttatccaaatacagtagataaaagctgccatttaacaaggtgtatgctagaaatagaaatattttttgtcttttccattgtacacaccaaaactaggattgaatgcttattcctttgcaggcagtctttgcttggttccttcattggcttaatacagcaatcagtcatgcattacttttgtctcagagattagttctcatgggtaagaaattctcagagatgaaagttttgagatcagccaaaagaaaaggcaattggagctgatcctcaggcacattaaacagaatggcaaaacttgagtagattttctagtgtacattttgagccagaacttaggccacagaaataggagaacctgagtttaggatttttcctggaaggaaattagacaattagctggagatacccaagtatctctgataaaaatggatcc

SEQ ID NO: 90103 - DNA, 2274 bp, Homo sapiens
ccagaaggttcagttttctggtgagggctgctttctgattgcaagatgataccttgttgctgcatcctccagaggggagaaacactgtgtcttcacagggaggaaagtggaagggcaagaaaagttagtgctgtgtggaagcctcttttttaagggccataagggctatctgtaaccctgttcatgagggaggagccctctgggtctaataagctattaaaggttccacctcttatcctatcacattggccattaagtttcaacatctgaattttggaggggacacattcaaaccacagtaggctgaaagtagtgtgatttgtgatgtgcccattctcaataacaaattaggccactagtatcacctagttccaagctatctcatgtctcacttggaccactgcaatagcttcccaagtgtcctctctgctgcacttcttgccctcctaataaattcaatagccacacagcagccagagtattttaacataagtcagttcatgtcagtctccttgcacttcccatttaaatggatttaaaataaaatcccaagtccttaccataatctacaaggccatagataatccggtccttagataccttcctcgccacctctcctgccactctgcctcatagctccatgtactctagccctactatgtctcgataacaccttgtacttccctgcttctgggcctttgtatttgccctttcctttgcattggacactcttgtcctagatattcatatgccttgctccccaacttgctcaagttttaccccctcagagaccacaccctttcaaaaatagcaactttcaatactatttaaccccttaacctgtgtgttgactacttgacatattctatgttgcttattgtttgtctccctaaatagaatccaagttccatgcaggcagaaaagttgtctgtcttgttcattctttatccatacctcctaaagttttgcctggcatataatagggctcaataaatatttattaaatgaaattctgctataacaccagaaattatatcattagagagtcatttattttagtcttagagtgttttgatcttagagaaccctctgcaaagatccttgggagagctcacaatttagtcattatcagcgtatactctgggagaggaacatttagaaaaaagtacttaatggagattgaacttgggatttagagcagagaagggcaggtttccaggggtgaaaaaggaaatttaaggggaagttgggtttgtaccaaagatgactttgcttatagtgagaagatactcaaacctttcttacttgaggaagctcacagcttctgaatctctctttctggctgtgaaaagaaatttcctcttttgggtctcccttgaagattatcatttttggatgttgctaagagcatccttggagtcagagtctctatatatagcaaatcatcaaatgttagggctagaagtaatcttggtgatttggtttcttaaaactatttattttataacatgagttaaacatttatcacaaaaacaggaagatagagaaaaggctttagtttttgtaggtcattgcaaggaagaatttcgcttatctccagtgctataattttgactttggtataaagtattcatcaagtgtcatcatcgaaagtattagtggttatgacaaacaaggcaaacctcctgagaactttagaacaaagcccagcatggatgttctgccagcataaatgcagttcagctggcagrgcagaggattatctatgtttttatgtattatatattacatatttatatattagggtctcctcaacccataactggaaaggtcattctaatttatccaaatacagtagataaaagctgccatttaacaaggtgtatgctagaaatagaaatattttttgtcttttccattgtacacaccaaaactaggattgaatgcttattcctttgcaggcagtctttgcttggttccttcattggcttaatacagcaatcagtcatgcattacttttgtctcagagattagttctcatgggtaagaaattctcagagatgaaagttttgagatcagccaaaagaaaaggcaattggagctgatcctcaggcacattaaacagaatggcaaaacttgagtagattttctagtgtacattttgagccagaacttaggccacagaaataggagaacctgagtttaggatttttcctggaaggaaattagacaattagctggagatacccaagtatctctgataaaaatggatcc

SEQ ID NO: 90104 - DNA, 1738 bp, Homo sapiens
gtacagaatgaaaagttcaggaaagagcaactttacagtggagaaaagctaaaaatattatttcaggcaggtgatgaaaggtatcccatcaacagggataagccacactgatagtaaatacttcagatatgacataatgaaaatggcacattacttctctggtctttctctcccaaacctataaccctagactaaycatgagaaaacacataagaaaaatctcaactgggggacattgcacaaaatacctgatcagtaccccccaaaattgtcatcaaaaacaagaaaatttataatcaagagttgcttaatagctaggtatggtggcatacacctatagtcacagctacttgggaggctgaggtgaaaggctcacttgagcccaggaggtcgaggctgcagtgacctgtgatcacaccgctgcacaccagtctgggtgacgggaagacactgtctcaaagacaagagacagagacacagacagaaacagagagagagagagagacagagacagagagagagaggagttgcccatgaagacatgactattaaatataatgtgatgagcagggcacagtggctcatgcctataatcccagcgctttgggaggccaagtggggaggactgcttgaggccaggagtttgagaccagctgggcaacttagtgagaccccatctctacaaaaaatttaaatacatatatgtatacacgtacatatatagatatatatttatatgtatgaaatattttggagcaaaacaacgacaggtaaaaacaaaggaaatgtgaaagcgtatggacttcagttacttataatgaattaacattgtttattaactgcaaccaatgaatgacactaatgttaggtggtaataaagaaccagagtagaactaggataagttaagagtagggattcaggcttgaaaatctattcctaagtgaacatagggaaatgagaatcatatacattattgtttagtaaatacagctcttcaaaatgacgcatacatatttcttaaagctctagctaaagacaaagaaactgaatataagaaagatgattttttacatgttaaaagacaatacataattttattttactaggagcaaagacaataaggagattaagaataactccaaaaccagattcctccttacctcacattctgagtaggattccacctttcagaaggcagttctccactctgtgggtcatctacaggcggatgaagaatcgaaatgcatacatctccattctacaagacacaaacattacattcagtaaatactcaaaaagtgatgtacaaaaagggacatcggttctaaagtttcctttattcctagaaactgtttcttcatcaaaggagaaaacaattctgctttttatgttcaacatcaaagataaataataattaagcattttaaaagtatttattttgaccaatctccaaggtatattttctagtgagaagacttactattcctatagaacaatcctgatgaaacaaacgatccctatgtttacttaggaacattaaaatataatatttatttcgaccaatctccaaggtatattttctagtgagaagacttactattcctatagtacaatcctgataaaaaattgactggggctgggcgcggtgtctcacgcctgtaatcctagcacttgggaggccaaggcgggtggaccacctgaggtcaggagtttgagaccagcatggcgaaaccccat

SEQ ID NO: 90105 - DNA, 1738 bp, Homo sapiens
gtacagaatgaaaagttcaggaaagagcaactttacagtggagaaaagctaaaaatattatttcaggcaggtgatgaaaggtatcccatcaacagggataagccacactgatagtaaatacttcagatatgacataatgaaaatggcacattacttctctggtctttctctcccaaacctataaccctagactaatcatgagaaaacacataagaaaaatctcaactgggggacattgcacaaaatacctgatcagtaccccccaaaattgtcatcaaaaacaagaaaatttataatcaagagttgcttaatagctaggtatggtggcatacacctatagtcacagctacttgggaggctgaggtgaaaggctcacttgagcccaggaggtcgaggctgcagtgacctgtgatcacaccgctgcacaccagtctgggtgacgggaagacactgtctcaaagacaagagacagagacacagacagaaacagagagagagasagagacagagacagagagagagaggagttgcccatgaagacatgactattaaatataatgtgatgagcagggcacagtggctcatgcctataatcccagcgctttgggaggccaagtggggaggactgcttgaggccaggagtttgagaccagctgggcaacttagtgagaccccatctctacaaaaaatttaaatacatatatgtatacacgtacatatatagatatatatttatatgtatgaaatattttggagcaaaacaacgacaggtaaaaacaaaggaaatgtgaaagcgtatggacttcagttacttataatgaattaacattgtttattaactgcaaccaatgaatgacactaatgttaggtggtaataaagaaccagagtagaactaggataagttaagagtagggattcaggcttgaaaatctattcctaagtgaacatagggaaatgagaatcatatacattattgtttagtaaatacagctcttcaaaatgacgcatacatatttcttaaagctctagctaaagacaaagaaactgaatataagaaagatgattttttacatgttaaaagacaatacataattttattttactaggagcaaagacaataaggagattaagaataactccaaaaccagattcctccttacctcacattctgagtaggattccacctttcagaaggcagttctccactctgtgggtcatctacaggcggatgaagaatcgaaatgcatacatctccattctacaagacacaaacattacattcagtaaatactcaaaaagtgatgtacaaaaagggacatcggttctaaagtttcctttattcctagaaactgtttcttcatcaaaggagaaaacaattctgctttttatgttcaacatcaaagataaataataattaagcattttaaaagtatttattttgaccaatctccaaggtatattttctagtgagaagacttactattcctatagaacaatcctgatgaaacaaacgatccctatgtttacttaggaacattaaaatataatatttatttcgaccaatctccaaggtatattttctagtgagaagacttactattcctatagtacaatcctgataaaaaattgactggggctgggcgcggtgtctcacgcctgtaatcctagcacttgggaggccaaggcgggtggaccacctgaggtcaggagtttgagaccagcatggcgaaaccccat

SEQ ID NO: 90106 - DNA, 1738 bp, Homo sapiens
gtacagaatgaaaagttcaggaaagagcaactttacagtggagaaaagctaaaaatattatttcaggcaggtgatgaaaggtatcccatcaacagggataagccacactgatagtaaatacttcagatatgacataatgaaaatggcacattacttctctggtctttctctcccaaacctataaccctagactaatcatgagaaaacacataagaaaaatctcaactgggggacattgcacaaaatacctgatcagtaccccccaaaattgtcatcaaaaacaagaaaatttataatcaagagttgcttaatagctaggtatggtggcatacacctatagtcacagctacttgggaggctgaggtgaaaggctcacttgagcccaggaggtcgaggctgcagtgacctgtgatcacaccgctgcacaccagtctgggtgacgggaagacactgtctcaaagacaagagacagagacacagacagaaacagagagagagagagagacagagacagagagagagaggagttgcccatgaagacatgactattaaatataatgtgatgagcagggcacagtggctcatgcctataatcccagcgctttgggaggccaagtggggaggactgcttgaggccaggagtttgagaccagctgggcaacttagtgagaccccatctctacaaaaaatttaaatacatatatgtatacacgtacatatatagatatatatttatatgtatgaaatattttggagcaaaacaacgacaggtaaaaacaaaggaaatgtgaaagcgtatggacttcagttasttataatgaattaacattgtttattaactgcaaccaatgaatgacactaatgttaggtggtaataaagaaccagagtagaactaggataagttaagagtagggattcaggcttgaaaatctattcctaagtgaacatagggaaatgagaatcatatacattattgtttagtaaatacagctcttcaaaatgacgcatacatatttcttaaagctctagctaaagacaaagaaactgaatataagaaagatgattttttacatgttaaaagacaatacataattttattttactaggagcaaagacaataaggagattaagaataactccaaaaccagattcctccttacctcacattctgagtaggattccacctttcagaaggcagttctccactctgtgggtcatctacaggcggatgaagaatcgaaatgcatacatctccattctacaagacacaaacattacattcagtaaatactcaaaaagtgatgtacaaaaagggacatcggttctaaagtttcctttattcctagaaactgtttcttcatcaaaggagaaaacaattctgctttttatgttcaacatcaaagataaataataattaagcattttaaaagtatttattttgaccaatctccaaggtatattttctagtgagaagacttactattcctatagaacaatcctgatgaaacaaacgatccctatgtttacttaggaacattaaaatataatatttatttcgaccaatctccaaggtatattttctagtgagaagacttactattcctatagtacaatcctgataaaaaattgactggggctgggcgcggtgtctcacgcctgtaatcctagcacttgggaggccaaggcgggtggaccacctgaggtcaggagtttgagaccagcatggcgaaaccccat

SEQ ID NO: 90107 - DNA, 1738 bp, Homo sapiens
gtacagaatgaaaagttcaggaaagagcaactttacagtggagaaaagctaaaaatattatttcaggcaggtgatgaaaggtatcccatcaacagggataagccacactgatagtaaatacttcagatatgacataatgaaaatggcacattacttctctggtctttctctcccaaacctataaccctagactaatcatgagaaaacacataagaaaaatctcaactgggggacattgcacaaaatacctgatcagtaccccccaaaattgtcatcaaaaacaagaaaatttataatcaagagttgcttaatagctaggtatggtggcatacacctatagtcacagctacttgggaggctgaggtgaaaggctcacttgagcccaggaggtcgaggctgcagtgacctgtgatcacaccgctgcacaccagtctgggtgacgggaagacactgtctcaaagacaagagacagagacacagacagaaacagagagagagagagagacagagacagagagagagaggagttgcccatgaagacatgactattaaatataatgtgatgagcagggcacagtggctcatgcctataatcccagcgctttgggaggccaagtggggaggactgcttgaggccaggagtttgagaccagctgggcaacttagtgagaccccatctctacaaaaaatttaaatacatatatgtatacacgtacatatatagatatatatttatatgtatgaaatattttggagcaaaacaacgacaggtaaaaacaaaggaaatgtgaaagcgtatggacttcagttacttataatgaattaacattgtttattaactgcaaccartgaatgacactaatgttaggtggtaataaagaaccagagtagaactaggataagttaagagtagggattcaggcttgaaaatctattcctaagtgaacatagggaaatgagaatcatatacattattgtttagtaaatacagctcttcaaaatgacgcatacatatttcttaaagctctagctaaagacaaagaaactgaatataagaaagatgattttttacatgttaaaagacaatacataattttattttactaggagcaaagacaataaggagattaagaataactccaaaaccagattcctccttacctcacattctgagtaggattccacctttcagaaggcagttctccactctgtgggtcatctacaggcggatgaagaatcgaaatgcatacatctccattctacaagacacaaacattacattcagtaaatactcaaaaagtgatgtacaaaaagggacatcggttctaaagtttcctttattcctagaaactgtttcttcatcaaaggagaaaacaattctgctttttatgttcaacatcaaagataaataataattaagcattttaaaagtatttattttgaccaatctccaaggtatattttctagtgagaagacttactattcctatagaacaatcctgatgaaacaaacgatccctatgtttacttaggaacattaaaatataatatttatttcgaccaatctccaaggtatattttctagtgagaagacttactattcctatagtacaatcctgataaaaaattgactggggctgggcgcggtgtctcacgcctgtaatcctagcacttgggaggccaaggcgggtggaccacctgaggtcaggagtttgagaccagcatggcgaaaccccat

SEQ ID NO: 90108 - DNA, 544 bp, Homo sapiens
gtcagatgcttygctccaatatcactctaggaactgttcctttttctgcttcttacttcactcagtaatctcctttatacaagtttttctcgtgtatagaatcaggccttggatcagttatcatatctttatagcttcctttaatcagaatagtttcttagcctttctatgtcttacatgacattgaatttttttgctgactaatctttaccatacctcctttctaaatagaatgttcctctttttgtctgtctgatgttttcttataattagattcaagttatgctttcccatctggaatacaacataaatgatgctgcatccttctcatggtattatatgtaaaggtgcattaagttcatctgcccctatttgtggaattagttttgattacctgcaccaagtgctcccttattcttccactgtatagtatttttttattgctactaataaggaatcagtggggaaatactttaagaccaaagaaatattcaattcttcatcaaaatttctatctcagattcaacatttattattgattctt

SEQ ID NO: 90109 - DNA, 761 bp, Homo sapiens
aacacacacaaatatatacacatataactgaacatacatgtatacgtgaatattttagaaatcaacagtccattctacttcctcctattccaacccattcccatgtgttaattcttggcatccccattttacatayttttctctattttataaatttatttgcataaagctcacacatttcttatcccaggtatccatttcctttgtttcccttttctcctacttcagaaccatgtgccttgatagtctcttagttctctgagcttcactgtactcatttgtgaaataggcatgaaaataattcccacttttagagatgttgtgaagagtaaatgacacagagactttaacacaatatctgatgcggaaagaatttaataactgattagtcagaaaaaaaagagaagctgtatactcaaaattcttggtggtaatagtcgtgatagtagtagcaatagaattaaaactttcctttatttaaaaaatcaatctattctactgattacgtatatacttaggcctgacttcatagcataacaatccatttcaaatgtattcaattttaagtttattcaaaaatcactcactaagcttaatattttctaggtgttggatttaaacatataaataatacacaccacttgcctttgagtagtttataatagaatatgcagatgcaaacagacgaaatagttatgaagacaaattactataaaggaaatatgctgcacagaaggatggggatcagggagattgtgtta

SEQ ID NO: 90110 - DNA, 617 bp, Homo sapiens
caaggtgagtcatgctatgcataggcggtgcagctaaacaaggaggttagtggatggattcacaaaaagaggaggacatagcatcttattatacatggcagcttccatccaaataatgtcarcgtaaacagagctccttgtttctcatgcttagcatgaactatatgaataataagctaagtagctcctattttctttgaaaactgaattcatcggaattaaaactattgttattttaagttaaataaaaccaatttgaacatgtttttcctgcatcaaaagcttgaattattcattttatgtttagattctccatgatattttcttagggtaacttttagaatatgaatttataaatgaatattgagatataaaaccatgaaattgaaaatattaacaaatcattgcaagcaagaagtatcaactactaataatcacaagaaagctaaaaagaaatatggggttatcgttgtttttcatcttctttttaaattgcctcataaacaatatgtaaatgtgctaaaactcctttaaaaatgttttataatgagaatatactccaatgcagagcatatagctagaatttatctcttgaaagtatgaattttgtatagctc

SEQ ID NO: 90111 - DNA, 879 bp, Homo sapiens
tttatgcacattataggtgtacataaagaagaaagagagctagaatatgaaatcagacccagtaggaatttagagacacaagactttgggcagagcagaaatatctcttggggagaatttatagtaattaaattaaattatttaataaagtaattattgctgtatgatgtaaaatgtaaactatcttcttcatttctctccgaaagcttctgtaaaatatgcaacaatcacatatgctcagaggactagatttgcaaaaaagcacttgtctctctgaagataagtgttaaagaaaagtcaaacaaaaaccgaggctgtcagaaaggaccatcacacagaaagattacaccaacaaaacataaaccaaaggactctgaaattatggcaggaaaattaaacagagcttcttccattgtcatgtatcagaaaacgttaatattttctagaatggccttttcttccacatgagatttcattaaaaaaaatacaaaaatacaaaactggatattaggccgggtgctgtggctcatgcctataatcccagcactttgggaggctgaggcaggtggttcacgaggtcagkcgttcaagaccactctggccaacatagtgaaacccggtgtctactaaaaatacaaaaaactagccgggcatggtgccaggcacctgtaatcccagctattcggggggctgaggcaggagaatctcttgaacctgtaaggcagaggttgcagtgagccgagatcgcgccactgcactgcactccagtccaggcgacagtgcgagactccatcttaaaaaaaataaaaaaagaaaaagaaaataaaataaactggatattagtaattgcttaagcagagaatatacttgcatgaaata

SEQ ID NO: 90112 - DNA, 879 bp, Homo sapiens
tttatgcacattataggtgtacataaagaagaaagagagctagaatatgaaatcagacccagtaggaatttagagacacaagactttgggcagagcagaaatatctcttggggagaatttatagtaattaaattaaattatttaataaagtaattattgctgtatgatgtaaaatgtaaactatcttcttcatttctctccgaaagcttctgtaaaatatgcaacaatcacatatgctcagaggactagatttgcaaaaaagcacttgtctctctgaagataagtgttaaagaaaagtcaaacaaaaaccgaggctgtcagaaaggaccatcacacagaaagattacaccaacaaaacataaaccaaaggactctgaaattatggcaggaaaattaaacagagcttcttccattgtcatgtatcagaaaacgttaatattttctagaatggccttttcttccacatgagatttcattaaaaaaaatacaaaaatacaaaactggatattaggccgggtgctgtggctcatgcctataatcccagcactttgggaggctgaggcaggtggttcacgaggtcaggcgttcaagaccactctggccaacatagtgaaacccggtgtctactaaaaatacaaaaaactagccgggcatggtgccaggcayctgtaatcccagctattcggggggctgaggcaggagaatctcttgaacctgtaaggcagaggttgcagtgagccgagatcgcgccactgcactgcactccagtccaggcgacagtgcgagactccatcttaaaaaaaataaaaaaagaaaaagaaaataaaataaactggatattagtaattgcttaagcagagaatatacttgcatgaaata

SEQ ID NO: 90113 - DNA, 741 bp, Homo sapiens
tatcaaaagttccagtgtatatgtaattagaatcccagaatgagaagtgagtcaatagtgtggtataaaatagtgcaatacaaaaaatatttgaagagatgatagtacagttttcccaaactaatgacacataccacataagaaatccaataagctcactaagcagaatgaataccctgcaacacacatacagtcagacatattgtattcacactgagaaaaaacaaaatttcaaagtcaaccagagaaaaagacacattatatacagaagaagaaagatgagtcaaagcagacttctcatcagaattaggtaaggttacagtgttaacagaataaactgtcaacccagattcctmtgtccttcaaaatatccttcaaaatgaaagaaagcaaatataagtgatcttattactcttcatttcactgccaacatttaaaaatcaatggaaatgaagataaggctctggtctcaaccacattgatctgaactgacaactgcgataaataagcagtgtgtcttgatttatgaatttgtctgtgatgtttgagttttgtttaatcctaatacatggtatagctttggtggtttttaagggtggtgtacttggtacctatatcagccaaggttttctagagaaacagaaccagtggaatggacaggtgtgtgtgtgtttatgtctgtgggtatatgtatatttatgagtggatggaatcaagagatttatttcaaggaattggatc

SEQ ID NO: 90114 - DNA, 801 bp, Homo sapiens
aggtggtagcaggtagtgggtgagggtaggacttgagtatatcgtgtatcatttggggcctctttgtggggagagattggaagtgagtcacaagcatgagtatagaaattggggaacaggtagtaaaataattaccgtcattcgatgatatgattgtatacctagaaaactttatgggagcaattgaaacaacatgacgaacaataagcatgttcattttaacatacagaaatattagcatatgggaatagcctacatagatgcgaacagccaccaattagaagatatcgtggaaggaaagatctcatttgcagtagcattaaacaaagataaaattcctagctataaatgatataatttttctatttaaaaaataaatataacacatgtatgatttttcctagaaaaagacatgagaaacagaaaagcataccatgttctttttatgattgaaaagacttagcatcataaaggagtcagctttctctaagttaaactgtaaatgtaatgtgatacttatacaaaagataatatttttagtaagataagcctattataaatttatggaaaaatagtaaagtatagcccaggaaaatataaggaaggataataaggaaaactagccctaatatrtatttaaaaacattaaaaaatctttgatatttaacatagtgtattactagttcatgaagaaacagattaatagtttaacataagatacaagtgtatttcaaatcactaaaacaaaatagataataaatggttttgggaaagatggatagtctgcttggaaaaaaggtt

SEQ ID NO: 90115 - DNA, 630 bp, Homo sapiens
tctcccatccccaccctcctgtcttaacttgtctagaaattaaccatggctgagcccctcccatgtcctgggcaccactgacccccatagccactgtgatgagtggggmtcatgacaacaggctccaaacgtggaaattgaggctcagggatgggatattacttcccaagttcacacaggcaggggatgataatcaggaattaaataaaagtcacctcccaacccaatgtccgaaatcagagctcaaacctaacgtaattgctccaaaaaccttaaacgtggattaaggcacagaggaaggcccaggaagtgaggggcactgagaaggcaggaatgacttagaggtttgttctcaggggtggggggtggatgctgctgcaaaaagaaaggaaggaaagacggagggaaggaaggagggaagaaggaaggagggagagagggagggaggaagaggacggaaggaaggaaggaaaaaaataggaagtttggtagaaaggaagagactgttcttgaagggacaagaaagggactgtttggcagaaaggaaacacacactccagggacagaaaaacatatgttttattctctttattccctgcatctctcttgtgttctcactgccacatgcag

SEQ ID NO: 90116 - DNA, 630 bp, Homo sapiens
tctcccatccccaccctcctgtcttaacttgtctagaaattaaccatggctgagcccctcccatgtcctgggcaccactgacccccatagccactgtgatgagtggggctcatgacaacaggctccaaacgtggaaattgaggctcagggatgggatattacttcccaagktcacacaggcaggggatgataatcaggaattaaataaaagtcacctcccaacccaatgtccgaaatcagagctcaaacctaacgtaattgctccaaaaaccttaaacgtggattaaggcacagaggaaggcccaggaagtgaggggcactgagaaggcaggaatgacttagaggtttgttctcaggggtggggggtggatgctgctgcaaaaagaaaggaaggaaagacggagggaaggaaggagggaagaaggaaggagggagagagggagggaggaagaggacggaaggaaggaaggaaaaaaataggaagtttggtagaaaggaagagactgttcttgaagggacaagaaagggactgtttggcagaaaggaaacacacactccagggacagaaaaacatatgttttattctctttattccctgcatctctcttgtgttctcactgccacatgcag

SEQ ID NO: 90117 - DNA, 630 bp, Homo sapiens
tctcccatccccaccctcctgtcttaacttgtctagaaattaaccatggctgagcccctcccatgtcctgggcaccactgacccccatagccactgtgatgagtggggctcatgacaacaggctccaaacgtggaaattgaggctcagggatgggatattacttcccaagttcacacaggcaggggatgataatcaggaattaaataaaagtcacctcccaacccaatgtccgaaatcagagctcaaacctaacgtaattgctccaaaaaccttaaacgtggattaaggcacagaggaaggcccaggaagtgaggggcactgagaaggcaggaatgacttagaggtttgttctcaggggtggggggtggatgctgctgcaaaaagaaaggaaggaaagacrgagggaaggaaggagggaagaaggaaggagggagagagggagggaggaagaggacggaaggaaggaaggaaaaaaataggaagtttggtagaaaggaagagactgttcttgaagggacaagaaagggactgtttggcagaaaggaaacacacactccagggacagaaaaacatatgttttattctctttattccctgcatctctcttgtgttctcactgccacatgcag

SEQ ID NO: 90118 - DNA, 823 bp, Homo sapiens
tttttttttttcttgagatggagtctcgctctttttcccaggctggagtgcagtggtgcaatctctgctcactgcaacctccacctcccaggctgaagcaattctcctgcctcagcctccccagtagctgggaccacaggtgtgcaccaccatgcccggctcatttttatatatttttttagtagagatgaggcttcaccatgttagccaggctggtctcgaactcctgacctcaggcaatccgcccgcctcagcctcccaaagtgctgggattataggcatgaaccaccacgccaggcctgtatatttcaaaatagctgagagaggacttttaatgttcctaacatagagaaatgataaatgctccaggtgatggacaccccaatactctggcctgaacattacatgttacacgcatgtaacaaaatttcacgtgtacctcatagatatgtacaaatatgtatccattttcttaatttaatttttttttttaaagaagggtgtcagaaagccaaaattagatgctgcacagcaaggtttgagttaagggcagtgctggaaaacagaacaaacccttgtgaycatgcctctcagccaggtcagggacccattcctgcagtcaacagctgggaaggcgtggaacctgggagggggcagcctggggaggggaaaaggccgcttggaggtggaggggaggcctcctcgctcaccacccaatggcagagatgaggcgttggaggagcagagaggaaaagtccctgtgccgcagcagctctctgccagtgcgcatgcgcacatgtccgtgaagcaccgcgctggggtt

SEQ ID NO: 90119 - DNA, 1131 bp, Homo sapiens
atccataatcaattaaatattttcttttgtttgacttccctgtttgtattatagaaatctccttcttgcattcctttgatggaactcacaaaccacttcctctttggagctgcctaattcatgaatccctgtttgctcaaactctttaaaaattttactgtgctttggtttacctttttaaccctgcaatgtgtatcaaagggtgcttagcacatagtgaatggagatattagtagttcttctctgatgctttccaagttcggcgaaatcttgaggctctccactcacatttgcaaatgctaaacrctcctgtggtggagagagcaggggggctggtgtgtggacaccctctgaggtgttctcactggccactggctccttttgttgtctccctttcaattcagtaccagaacatcccttcaccggcaactttcgagtgggcctgctgaaacaatcaaggcagtgcctccacttaactttgagaaggtagtgtgtgagagatttagaataagcagctctggaactactcccagtttactcttataattacatacacaaaaaaatcaaaacctcagtttatttgtccaaaaatggggatagtattcttgtcctacatgatgagtgtactaatccttccagccagcattcacctggggctctgtgctccaggcagggtgagggttaggactgcatgtaggtgctgccttcacacccggagcaggctggagcgagtggtgtgaagcctcccaaccccacggctgggggcaaaggctgtgctaaggcacccggacatggagctggcctggcctgaggactcagagtggaaagacaggaaagacactggctgcgctgaagcgctgggacccgggaaggggcgtctaggcaagagcgcctgtgaacaggatttgtaagctgctcttggtgacttttggacagacactcttacttgctttactgctcccctttgtcttctgccccctttccctaaaagtatttccaaatgtgtgatgcccaccaggttcctgggcagtgcagtgggatgtctgcttggtttctgctgatcctcacagagcctggtgacttcttcctcccaggtctgtggatcaacactgtctccctggcctctaccca

SEQ ID NO: 90120 - DNA, 1131 bp, Homo sapiens
atccataatcaattaaatattttcttttgtttgacttccctgtttgtattatagaaatctccttcttgcattcctttgatggaactcacaaaccacttcctctttggagctgcctaattcatgaatccctgtttgctcaaactctttaaaaattttactgtgctttggtttacctttttaaccctgcaatgtgtatcaaagggtgcttagcacatagtgaatggagatattagtagttcttctctgatgctttccaagttcggcgaaatcttgaggctctccactcacatttgcaaatgctaaacgctcctgtggtggagagagcaggggggctggtgtgtggacaccctctgaggtgttctcactggccactggctccttttgttgtctccctttcaattcagtaccagaacatcccttcaccggcaactttcgagtgggcctgctgaaacaatcaaggcagtgyctccacttaactttgagaaggtagtgtgtgagagatttagaataagcagctctggaactactcccagtttactcttataattacatacacaaaaaaatcaaaacctcagtttatttgtccaaaaatggggatagtattcttgtcctacatgatgagtgtactaatccttccagccagcattcacctggggctctgtgctccaggcagggtgagggttaggactgcatgtaggtgctgccttcacacccggagcaggctggagcgagtggtgtgaagcctcccaaccccacggctgggggcaaaggctgtgctaaggcacccggacatggagctggcctggcctgaggactcagagtggaaagacaggaaagacactggctgcgctgaagcgctgggacccgggaaggggcgtctaggcaagagcgcctgtgaacaggatttgtaagctgctcttggtgacttttggacagacactcttacttgctttactgctcccctttgtcttctgccccctttccctaaaagtatttccaaatgtgtgatgcccaccaggttcctgggcagtgcagtgggatgtctgcttggtttctgctgatcctcacagagcctggtgacttcttcctcccaggtctgtggatcaacactgtctccctggcctctaccca

SEQ ID NO: 90121 - DNA, 685 bp, Homo sapiens
atcccatcaaccaccaaccagtctaaacattttttggtaaataccaggcgtcataggctagcaggctgtgtatgtgtgaactcgtttattcaggatatgtggtctccatcttttttttattttttttattttttttgagacggagtcttgctctgtcactcaggctggagtgcagcgccacaatctcggctcactgcaagcttcgcctcccgggctcacgccattctcctgcctcagtctcctgagtagctaggactacaggtgcccgccaccacgcccggctaattttttttttattattattattttgagacggagtctcgctctgtcrcccaggctggagtgcagtggcgctatctcagctcactgcaagctctgtctcccgggttcccgccattctccttcctcagcctcccgagcagctgggactacaggagcctgccaccatgcccggctaattttttttgtatttttagtagagtcggggtttcactgtgttagccaggatggtctcgattgcctgaccttgtgatccgcctcggcctcccaaagtgctgggattacaggcgtgagccactgcgcccggccggtctccatcttttaaacttggtcacttcacaccgtgcacttgttatcatcctctaaacatttgagctcataaccccggaagttttaatatggatcc

SEQ ID NO: 90122 - DNA, 672 bp, Homo sapiens
ttcaaatattcttatttaaagaataaaaataagactaaaaacaaaaaactttacaaaaatcacttgtatttctatttaaaagccaaaaaaaggaaacaaattaaaggtgccatttacaactacaaagtagaagatgcctgggaatgaatataataaaagatatacaaagtggccrggcacagcggctcactcctgtaatcccagcactttgggaggccgaggtggctggattaccgaggtcagcggttcgagaccagcctggccaacatgctgaaaccctgtctctactaaaaatataaaaattagcccggtgtggtggcacctgcctgtaatcccagctacttgggaggctgaagcaggagaatcacttgaacccgggaggcggaggttgcagtgagctgagatggtgccattgtactccagcttgagcaacagagtgagactccatctcaaaaaaataaataaataaaatacaagactgaactcttctacttaacagctgtgaacttgagccagttaatttctctgagcctgtttctcatctacaatatggcaataatagtagtacttaatagaatggtgaaaatgaaatgagataagtagcatttaacagtgtgccaagtccacagtaaaactctcaataaaaattagcccctacctcatcaacatcat

SEQ ID NO: 90123 - DNA, 1001 bp, Homo sapiens
agccaaagcaaagagagaaagaaaaacagttctgaggttcttaagaggtgcaaggcctgcagctttggagggaagaacaacagagayggaaaaatggggataatcttgattcggttttaaaaagaacctcaaataactccttaaaagatcaaagaattatcaggtatggtcttaaggtgcccatcctggtgctgaaatgtacctctgcagttacttaacactgcctggcaggtgtgccatgatgctctgaagacctaggggcacctggcctcaaagtccacccaggcctctgtctgaagacccaccatgactgtacctccttcctagggagagtgtatgattatatcactgggtgaatggaggatccaagagcaggttgtgattaaggtgtgatggtgcagaagtctggggccctgggactgggtgaggctggagggtgagggtttgggccgagactgagaacaagcatgcactaaattcacaggcatggcacagtgccagttggatgctgtggatggctggtgggatggagtgccaattgtggcactactgcgccatgtccgggatgtgagcctcgtctctctggtacacattaggcacccaaagtgtgactgggccacagagtccctggaatctccagactgtcctgacaacaggctcaaagtctccttcttccctgagagcactgcatgttcatctttgttttgtaaacaactatatgacatttgaaaaaagtccctgaatgagtggaggaattaatgattgaacgagtaaatgccatgattatcacggtccaaatcccatccttccttcacatcccattcagggtcacttcctttaggaagccctccctgaattcttctgccctttccttctcaggactctcgcagtgctggctgtgcaatcaacatgtaaatacttccctaggtgctaagaattggtatgtctttctcatgttttctcttgttcctcactccaactggacaacagagtcatttctt

SEQ ID NO: 90124 - DNA, 728 bp, Homo sapiens
ccaggcctggcctcttttcttttttctggaaatgctattgttataattttaaggtactgaggattaattatttgttactttgttctgtgttctgtgaaattttttagactttggctttcaatccatcgcttaattttttttaaatggaaatctttttttatttttcttaactattttatatgatatatattttttcatagcttactaatttttttatggttgtaccactttctttaatttctccagggctaaaaattagagttytgtttggttttgtttaatttctcctgtgctttaaattttgtgttctccagaacagtttgctttaattatttttttagtctgctgaggttttctttttctttttcctttttttttttttttgcctgtgtttattaaattgcttttatcttcaaaaaggtaagtttacctaggaagtgttgtttatgatttctttgttgtggtctatctaggtagttccctttcttggaaggcctttcttctaaatgaaatggctaagtgactcccctatccacatgagatgagctccttggaaatgaggcctactgtactggggataggaagccagctggaaggatgtcgcctatcatctcaggaacaacatacagagtactttactttgtgatgtcaacatccaccatcttttagtttcccccaaggcattattttcatatttaatagaatgttttattgtaaggtaaattcca

SEQ ID NO: 90125 - DNA, 728 bp, Homo sapiens
ccaggcctggcctcttttcttttttctggaaatgctattgttataattttaaggtactgaggattaattatttgttactttgttctgtgttctgtgaaattttttagactttggctttcaatccatcgcttaattttttttaaatggaaatctttttttatttttcttaactattttatatgatatatattttttcatagcttactaatttttttatggttgtaccactttctttaatttctccagggctaaaaattagagttttgtttggttttgtttaatttctcctgtgctttaaattttgtgttctccagaacagtttgctttawttatttttttagtctgctgaggttttctttttctttttcctttttttttttttttgcctgtgtttattaaattgcttttatcttcaaaaaggtaagtttacctaggaagtgttgtttatgatttctttgttgtggtctatctaggtagttccctttcttggaaggcctttcttctaaatgaaatggctaagtgactcccctatccacatgagatgagctccttggaaatgaggcctactgtactggggataggaagccagctggaaggatgtcgcctatcatctcaggaacaacatacagagtactttactttgtgatgtcaacatccaccatcttttagtttcccccaaggcattattttcatatttaatagaatgttttattgtaaggtaaattcca

SEQ ID NO: 90126 - DNA, 728 bp, Homo sapiens
ccaggcctggcctcttttcttttttctggaaatgctattgttataattttaaggtactgaggattaattatttgttactttgttctgtgttctgtgaaattttttagactttggctttcaatccatcgcttaattttttttaaatggaaatctttttttatttttcttaactattttatatgatatatattttttcatagcttactaatttttttatggttgtaccactttctttaatttctccagggctaaaaattagagttttgtttggttttgtttaatttctcctgtgctttaaattttgtgttctccagaacagtttgctttaattwtttttttagtctgctgaggttttctttttctttttcctttttttttttttttgcctgtgtttattaaattgcttttatcttcaaaaaggtaagtttacctaggaagtgttgtttatgatttctttgttgtggtctatctaggtagttccctttcttggaaggcctttcttctaaatgaaatggctaagtgactcccctatccacatgagatgagctccttggaaatgaggcctactgtactggggataggaagccagctggaaggatgtcgcctatcatctcaggaacaacatacagagtactttactttgtgatgtcaacatccaccatcttttagtttcccccaaggcattattttcatatttaatagaatgttttattgtaaggtaaattcca

SEQ ID NO: 90127 - DNA, 728 bp, Homo sapiens
ccaggcctggcctcttttcttttttctggaaatgctattgttataattttaaggtactgaggattaattatttgttactttgttctgtgttctgtgaaattttttagactttggctttcaatccatcgcttaattttttttaaatggaaatctttttttatttttcttaactattttatatgatatatattttttcatagcttactaatttttttatggttgtaccactttctttaatttctccagggctaaaaattagagttttgtttggttttgtttaatttctcctgtgctttaaattttgtgttctccagaacagtttgctttaattatttttttagtctgytgaggttttctttttctttttcctttttttttttttttgcctgtgtttattaaattgcttttatcttcaaaaaggtaagtttacctaggaagtgttgtttatgatttctttgttgtggtctatctaggtagttccctttcttggaaggcctttcttctaaatgaaatggctaagtgactcccctatccacatgagatgagctccttggaaatgaggcctactgtactggggataggaagccagctggaaggatgtcgcctatcatctcaggaacaacatacagagtactttactttgtgatgtcaacatccaccatcttttagtttcccccaaggcattattttcatatttaatagaatgttttattgtaaggtaaattcca

SEQ ID NO: 90128 - DNA, 728 bp, Homo sapiens
ccaggcctggcctcttttcttttttctggaaatgctattgttataattttaaggtactgaggattaattatttgttactttgttctgtgttctgtgaaattttttagactttggctttcaatccatcgcttaattttttttaaatggaaatctttttttatttttcttaactattttatatgatatatattttttcatagcttactaatttttttatggttgtaccactttctttaatttctccagggctaaaaattagagttttgtttggttttgtttaatttctcctgtgctttaaattttgtgttctccagaacagtttgctttaattatttttttagtctgctgaggttttctttttctttttcctttttttttttttttgcctgtgtttattaaattgcttttatcttcaaaaaggtaagtttacctaggaagtgttgtttatgatttctttgttgtggtctatctakgtagttccctttcttggaaggcctttcttctaaatgaaatggctaagtgactcccctatccacatgagatgagctccttggaaatgaggcctactgtactggggataggaagccagctggaaggatgtcgcctatcatctcaggaacaacatacagagtactttactttgtgatgtcaacatccaccatcttttagtttcccccaaggcattattttcatatttaatagaatgttttattgtaaggtaaattcca

SEQ ID NO: 90129 - DNA, 728 bp, Homo sapiens
ccaggcctggcctcttttcttttttctggaaatgctattgttataattttaaggtactgaggattaattatttgttactttgttctgtgttctgtgaaattttttagactttggctttcaatccatcgcttaattttttttaaatggaaatctttttttatttttcttaactattttatatgatatatattttttcatagcttactaatttttttatggttgtaccactttctttaatttctccagggctaaaaattagagttttgtttggttttgtttaatttctcctgtgctttaaattttgtgttctccagaacagtttgctttaattatttttttagtctgctgaggttttctttttctttttcctttttttttttttttgcctgtgtttattaaattgcttttatcttcaaaaaggtaagtttacctaggaagtgttgtttatgatttctttgttgtggtctatctaggtagttccctttcttggaaggcctttcttctaaatgaaatggctaagtgactcccctatccacatgagatgagctccttggaaatgaggcctactgtactggggataggaagccagctggaaggatgtcscctatcatctcaggaacaacatacagagtactttactttgtgatgtcaacatccaccatcttttagtttcccccaaggcattattttcatatttaatagaatgttttattgtaaggtaaattcca

SEQ ID NO: 90130 - DNA, 1178 bp, Homo sapiens
gcatagcacacaaaggtcaagaatatcctggtgaaggaacaaactgttgggcaaaaagcctgctcaaggggcagtatgacttagttgaaagaccacatggttgttataaaagtccatgtggctgaaaccagaggctggggtagagtgggtattataacttacaagaggcgggtaatcacygaggtaggcagggctactaacttattaccaccttattatgtgatacatttccacttccaaaagtattttctcatcgtattctcacatttttcataggtgcagagagaaagaaatgccataataaaacaatttattaggagttcaagttattgcccaaatcttacaacaaatatgacaggattgaattccagactcaggcattttatcttaggtcaagctaaagattgttttgattgaatatcttgtagtttttttctcttgatcatgggcaatcatagtttattgttaatctaaaactaaacaacagatatataaagtagcttggtttttagtttgaactgataaataagatatttttatcctggtctttttgactagcccttctaacttcatgataagtattaaggagtagaacctgtagcacatattcatatgttcaataaaattcctttgaatatcaatttttaaaaatttatttcaacttattttgttgattttgcaacagtttatattgttttatatgttctaagaacccaagaaacataattctttatggcctgtaattctgaatctgtccctgtataatgacttatgtacatgtggcattgacattgtcccaaattacattaaaaaattgttaatttatgaaatttctttaagaagtcacaaaagcatcttgagatattttataaaaggatatacaggcatatctaattgttttgcatgttattgtgctttgcaatattgtgtttatacaaattgaaggtttgcatcaaccttgtatcaagacattctattattgtaattttcctaagagtatatgctcattttatgtttctctatcacattttggtaattcaaggaatagttttgagttttgtgtcttattacttaagaaattcattttgtaagactatagctgccatagataatgattcctctgatgaatttggacaaagttaatttgaaaccttctggaaaggattcatcattctaaa

SEQ ID NO: 90131 - DNA, 2161 bp, Homo sapiens
tggagttcattggtctaaccctgtcaatttacagataaggaaagtgaggtccccaggggctaagccattggactgccatgcaccgtggttgatggggaggcaggggcctgagcactctgcttggagccccctctgctttctgctctttttggctgatcagtgtgtttgcagtcagcatgccggcatcactccccaagactggcggcccagcgtcaggctcgaacaccctatgagaactgtggcagtgacagtgcgggtttttgtggacttcatccccggacacagtgagaagctcttggctaagacacagggctgatttactcacactgtgagggaataagctgggaatggaagagtctggctgtgtcagtatagccaaatacgaatcccagaatagatgggtatgaatagaccactgacaaaatcttcagatttagcatctagcagtagctgacagtgagtactttctctggaatatggatattgaaaaactacctttaaaaaaatttttaactgttatttaggtcattttctggcactgaaggagctgaggggcttcagatgactagaagaaaaaagaaacaagttcaatttagacttcctacaaacatgttagataaaaccaacacagatgtgtccccctcctgctgcagagactcaaggtagactctgataaaaaaaaaacacacagctgatcaygtaataggcgaagagagaaaacaaaagtagtgccgttgggaccaacacactctttagtggccgttcctgggtctgggtacttgttgggtttggtcctagattgcacccagggctgggaactggaatgctcacgtccagagatagatgtggttttggcctaacaaaggtgtgggagctagaatttggatccttgcataaagtttagagcctgaagatctgattgtaccctaaaaggggactggaaattacaataccaggccatgcatgggtatgggctccaagtttattttatctcagtcatacaggaaccaaaagtagaagccctgccataaaaacagttgcagcccattgaagtcctgaaggccttgggtggcagcaggtgcagaactgtcctgtaggcatgcctccaccacccagtgtgtaggagatttggagataaaacaacccccacggaggataagatcacactagaaaaataagcacataaacaaatctaccaccatggtgagaagaggggtcaagaaataaacagtagaatcaaagtctctaacaatctgaaataattgaagaacctgaaggtggatataaagtacgggcacaactcattttattgcacttcactttattgtgctttgaaggtactgtggtttttacacattgaagatttgtggcaaccttgcattgaacaagtctgtttggtgccattgtcccaaaagcatatcctcatctcatgcttctgtgtcagcattttaaaacaacaaagtatttttaaattaaggtgtgtacatatttttaggcagaatgttgttgcacacttaatagactacaagcatattgtaaacaaaacttgtatatgcactgagaaaccaaaaaatttgtgtgactcactttattgcagtgttctgcaaccaagcctgccatgtctctgaagtatcctgtagttattttataaaatgattaaagaagaaatagagccatagtaagaaaggaagacagtttgaaaaaaaattggaaggtttttttaaaaagaactaaaagtgcatgatatgttcattgaagtttttttaaaaagtcatcagattagacacagttaaagacagaattagtgaattagaagatagagctggataaatcccccaagcacagcaagagagataaaaagatggatagtataaaagtgtaattaggagtcatagaggaaagaatgagaatgcccattaggaaatccagaaggaaggactttagagaatgttttgagtagaatagttgaaaagataatggctgagaattttccagaattgaagaaaggcatatgtggtcaaacaattttgaagtagaataacaagcaagggaaattatccatcagatatcaagatatattacaaagctgtgaccattaagacaatgtgttaattggcctaagtgtagactaaccaatgaaataaaattgagatctttaaac

SEQ ID NO: 90132 - DNA, 628 bp, Homo sapiens
gttggttttgtaaaatctgtgtatgtgaaccttcacttttgtgatgcacagtcttgtgggttttgagaactgcctgggatcttgcctccactgccctastgctgcacagagaattccgtgcccttggaattctgctgtgctttccctttgcagtagccacactgtcctttgccagtgcggatgtgcttcccatcccttcccaatgccacgtgggtgggatctacatgacggggccttgttgggctggctccttccacttagacctgcccctgttgtcgcatgaattaacagcatgatccttttgagccctgggcagtattccatggcatggatgcaccagtgtttatccattcccagactgaaggacatcttgattgcctccagtttctgaaggttatgagtaaagctgctataaacattggacaggtttctgtgtgaaaataagtcttaagttctctgggataaatgagtccagtttggggctgtgacttgcatgggctatgggggcttttatagctttggggaacattctgaggcagaagagaagtgttgagttggagaggagacaccccacccaaccactgccctgcttggcttccctggtcctgagtgagcttgcccctcccgg

SEQ ID NO: 90133 - DNA, 921 bp, Homo sapiens
catgtgaaactgatttacatattaaagtastgaaaaaggaccttgtaataatcaagcttgaattcttttattttaaagttggaagctgaaggtgttcctgaagtatctgaaaaatatgaaattagctctgttcccacttttctgtttttcaaggtaaggataaaggtggtacaagagattatccatttgtagggtgccatggggctacctattttgtttctttaccctctctctaatccccgaatattaggtgtttggctgtttctggccctccacctttcttctgatagtctcatttttgcaccgatgctgagaaagaagaccatgccagctgcttgccagcatcttagaaaagtagcatggactgtgtagggccagcagccagaatcagagcttcttgatcaaaattcagatatgtggctgtggaaccccagtgttccctgagttggttaaattggttgtttagagcatgtgcctggacataatggaatctctggctggttctggtttgatgaatgacttttaggaagcaggtgcacacctgtgcttccaggcacccatgggtgtcatcgtagttccccaaatacctcatttatacttagtaatagattcattccagccaatgtgggggcagtcttttttgtattatgttagactgacctgatttgactttgagatgttgcagtgttttctcagtgtgtttctgagaaaagaaaaaaattatgtatttctaaaattgagatgcagtgcaggcaattggcaatgagggtttctttttttacatctccggtaatactgttgtcccctttaaaaatctgctataacaatgtcattattatggaatgctgcatgtattctaaataactttttaaactttagaattctcagaaaatcgaccgattagatggtgcacatgcccca

SEQ ID NO: 90134 - DNA, 921 bp, Homo sapiens
catgtgaaactgatttacatattaaagtagtgaaaaaggaccttgtaataatcaagcttgaattcttttattttaaagttggaagctgaaggtgttcctgaagtatctgaaaaatatgaaattagctctgttcccacttttctgtttttcaaggtaaggataaaggtggtacaagagattatccatttgtagggtgccatggggctacctattttgtttctttaccctctctctaatccccgaatattaggtgtttggctgtttctggccctccacctttcttctgatagtctcatttttgcaccgatgctgagaaagaagaccatgccagctgcttgccagcatcttagaaaagtagcatggactgtgtagggccagcagccagaatcagagcttcttgatcaaaattcagatatgtggctgtggaaccccagtgttccctgagttggttaaattggttgtttagagcatgtgcctggacataatggaatctctggctggttctggtttgatgaatgacttttaggaagcaggtgcacacctgtgcttccaggcacccatgggtgtcatcgtagttccccaaatacctcatttatacttagtaatagattcattccagccamtgtgggggcagtcttttttgtattatgttagactgacctgatttgactttgagatgttgcagtgttttctcagtgtgtttctgagaaaagaaaaaaattatgtatttctaaaattgagatgcagtgcaggcaattggcaatgagggtttctttttttacatctccggtaatactgttgtcccctttaaaaatctgctataacaatgtcattattatggaatgctgcatgtattctaaataactttttaaactttagaattctcagaaaatcgaccgattagatggtgcacatgcccca

SEQ ID NO: 90135 - DNA, 2561 bp, Homo sapiens
aagatatttcaggggaatatattataggtagtttttaatttttctcaaatatcctagttgctaaacagtacagaaagctgaggggcacatattaaggtccattacctggatctgagaggtagcacaagttaaattgcagtgctcctagttttgatgtgctcagtggtgaagctgtcaggtaagaacattgccattgatttttgtggttaaaaacaaaagcacttatttggagatatacagcacatgttctatagggtttgtcagatatttttgtttatttctcatttcatgattgtatcttttaaaaatcatgtattctaactgtagcttcaaataaattactttcaagtaatctttgatatacttcaaagatctattgaaaatagttaaatagtacaggttgaatacaatttcagggacataaaaagaatatagggccaggcacagtggctcacacctgtaatcccagcactttgggaggctgaggtgagtggatcacttgaggtcaggagttcgagaccagcttggcgaacatggtgaaaccccgcctctactaaaaatacaaaaattagccgggtgcggtggcgcacgcctataatcccagccactcaggaggctgaggcctggagaatcacttgagcccaggaggtggaggtttcagtgagctgaaaccacgccactgcactccaacctgggtgacagtgagactctgtctcaaaaaaaagatgtggttgtcgtctttagattactatgacattttatagaagcaagtatagtcagtttattgtaattgtaacttcaagcctgttcctttcttcacccctgccctgggccatacagtgggggctkgcttgtttttggtcatttttgattttcccctttctttgtcgaccctctgctgcgggtccacagtgagacacacacagtccatccctctctagcagtaccaggttcctcaggtgtcttctgagccgacacactgggcctgactcagctcgtgtctttggtggaacatcttggtaacttggctttctgtcccatatctgtctaatctccattgtattgaaagcaccctgttgtcgcagagagcaggaggatgctttgggagagcatgacctcccagctctggacttgctaagcgtgattggccctaggatgagtgaggccatccaggacctcagcttcgcttaacacgagcagaccatgctcttgctgggcgccaaatgtatgtggagaaaactcctttttactttttctcatttcttatcttttcctttagtagccaaaatacacatgcatgagtggttgagaaccaagtgtatattgaggtttgaaaggtaccctttatgaataacttttaggaagtatactggctgttaggactccacatacatacacttgggcccagtgcttcctggatcctttatgaatagttgtataactcattgtttttatcacagtattaagagatctgccacctttagttcaacttgaacaaagacttacattggggtttttaaaaagcattaggtttacattggggtctttttttgttcttctttcaaacattccttttttggtaattgcttctgatttatcccgtcatttagtttttttgactgttccctgtaccatagacagtttccttgggaacttgtttactaaataaacaagatttccctatgatggtttcagttttatggaaagtccagttttttttacatgtagcattttctttggccacctttgggaattgcacctgtaccctcaggcaccctgcaaggatttaggcatacatgcttgctaatacctgaccacctaacggtgaaatcgctctgagtggatacagttggatattcatgcagtgatttttcattttttgtacaagtaatgttcattgtatggtataaagccacaaagctttcattggccttttgtacattaaaaacagcaccctctctgaaataagtttaagtgtggaaagcatgtctcttgctaaggtggagggagctggcagcgtggttgttatccggctgctgagccctccagcctccgtccacgagcactactacatcctgctgcacgggcagcttccaggaggttaagaagcagcagcctggggtgggttagacattagaagtgggtaagagtgttcagttaatgaaggctcgtgcagatgggggtgtgggtctgatccaggggttggcaagttgcagctggctgcccatttttgtaaataaagttatattggcacatagccacatcccttcatttatacattgtctgtggctgcttttatgctgacagttgcagcagagagcagaactgagcagttgcagcagagactgtctggcctgtaaagcctgaagtgtttagtgtctgactctttaagaagaagtttgcccacccctggtctaacccaatattgtccggagaaaaatccagataaagtcatatgttggaatgactaattctgtgtagtaccagacagattaagaagtaaaatcatttccattggtctgtagtacattttgttagcagtgaaacggttttcttgatta

SEQ ID NO: 90136 - DNA, 823 bp, Homo sapiens
ggatcccatgtcacattctccactctgagctgggtagcaaggccccacccaaaccacaaggaccaaggatggcgttgaagtggaaggagagatttcccccaattgaccgtttttagaagtacagtggacaggctgatgaaccactttccaaaaacagtgtccttttcaattaatgaatggtagacctatggctctgaagcctgtctgtctccaaagtcctgcccttacccgttatactgcctggcctctcttgtttcgggctgttttcaatgaggtactcaattatgtgtcccacaaatggggcaccagggggtagaagacaaacaagaaagtccctaagtacatggaactcagaaaaattcatctcctcatactaagaaaaaggattctcttgaatataatttctgagaacaggaaagtggctgagataggaggatcagtctaaatgttagtaaacaggatttatagacttggcctggagagaggcactaaaatgccctcatcttttcaagatgggctgaactcaggtccctcccagagcatatcttaagcacctggtctcacacagtgcctgacaaatgggccagaggcattgggctatttaaaaattaggcaaactgggtgtagtggtgcgtgcctgtaatcccagctaccagggaggctgagcaggagaaatgcttgagtctaggagttcaagcccagcctgggcaagatatatagcaagacctcatctytaaaaaataataattaaatttttaaaatcacagttaggtaatagtgagcttttcacacatcagagtaaaaaaaatcatattatttaatg

SEQ ID NO: 90137 - DNA, 742 bp, Homo sapiens
aggttgactttgccaccatgacctagccacgaacacgatgggaagaaggctgtggagtggggctgtgggcagtgcctcccggggccctgaatgaagcaagcttggagagggagctggtgtgtgggtctgagtggcttctttaatgtcagcatgcgcctatgaggtgctgacgtagccttattgcctctttgagagttggcttcccatagggacatcctagacactggaagatttttgcatcggcatcttcagtccatcaaatactgtccttgaaatcccactgtcctcagttggtgatggacaggggacagacatttgtggtctcatgctgagggtcttaggaaggcaagaggtggataaaagagtcagggattgagggccgggcacggtggctcacacctgtaatcccagcactttgggaggccgagacaggcagatcaccctaggtcaggagtttgagaccagcctgcccaatatggcaaaaccccgtctccattaaaaatacaaaaaattagctgggtgtggtggcgggcacctgtaatcctagctagtcgagaggctgaggcaggagaattgcatgaacctgggaggtggaggttgcagtgaactgagatcatgccactgcactccagcctgggagacaagagcaaaactccgtctcccccccgccmaaaaaaaaaaaaaaaaaaaaaaaaaaaaaaaagaaaagaaaagaaaaaagagtcagggcttgaaagtgaga

SEQ ID NO: 90138 - DNA, 739 bp, Homo sapiens
gatccatctgagatgaggaagaaacctcgtcccctctccatgccccttcagaatggaaggctagaactccggtagatgttattcttcctctcrctgaattgagtaattgttttccgtagtaaatgtgattgacttgtgtttgttcactggattccttaatctcaaaaagaatggcatccattttgcaggcaatgatgctgacggaagttatttttttttttttaaacttcctcgggagttttgccaacttgcgatggctacttccttctcattatcggcacctccttcccagcacccaacaatatcatctagcagaaatagctctgctaagaatcactgatttaacgagtagactgtccttcagccattgaatgcgaagtgtttaataatcaatcagagatcgggttcacttaggtttacggggttgaaagggagacaaaaacccttcaccatcacttctcagccagtcctggagccgctctccacttccctcctgatgacaggtttctgggtttaaatcatgcccccagggaatggatgtgaaactgtggtcctgcagtttgctgtcagtgcctgggtatcctgtaaaagacagctttgcagtttcatttattggaggggcaaagttgactgccaaataattgggttgagactcccccaactcccccttacttttcttgggattgtagggaccacttctccccataaacatattaaattgcagccttccagaggaaag

SEQ ID NO: 90139 - DNA, 739 bp, Homo sapiens
gatccatctgagatgaggaagaaacctcgtcccctctccatgccccttcagaatggaaggctagaactccggtagatgttattcttcctctcgctgaattgagtaattgttttccgtagtaaatgtgattgacttgtgtttgttcactggattccttaatctcaaaaagaatggcatccattttgcaggcaatgatgctgacggaagttrtttttttttttttaaacttcctcgggagttttgccaacttgcgatggctacttccttctcattatcggcacctccttcccagcacccaacaatatcatctagcagaaatagctctgctaagaatcactgatttaacgagtagactgtccttcagccattgaatgcgaagtgtttaataatcaatcagagatcgggttcacttaggtttacggggttgaaagggagacaaaaacccttcaccatcacttctcagccagtcctggagccgctctccacttccctcctgatgacaggtttctgggtttaaatcatgcccccagggaatggatgtgaaactgtggtcctgcagtttgctgtcagtgcctgggtatcctgtaaaagacagctttgcagtttcatttattggaggggcaaagttgactgccaaataattgggttgagactcccccaactcccccttacttttcttgggattgtagggaccacttctccccataaacatattaaattgcagccttccagaggaaag

SEQ ID NO: 90140 - DNA, 1004 bp, Homo sapiens
gcacacgcgtatatttctagtaattatccacaggaagtagtgagtccacaatgccaagaatttctccttttcagtggctatttgtgatgagaagcaatgtgcattccactgcattctagcatcagattatgggaggggaatgtsgtcatcgaaggcatgtcctctttcctataaagatttcattcaaatagagttctgcatctgatagtaaaaacaaacaaacaaacaaacaaacaaaaaaacagaggacaatttcttcgccaatgaaaatggccccctatgaaggcataggagcctatttcaaataaggattaggaaaaattcaacaagggaaatgatgctttgagtatgttaacttgcaaaaggaagaaccctatttcctcttttctaagaggaagacaactacttttgctttgatcagagtgccgcttgagtggccagaactgacaaggttggcagaagcgatgagctgagaattaagggcagcgtctgggcctgtgggaggtgccatatgtgggctcacatccactgaaccttgatctcctttgcacacctccatgtaatttataaatcagcagtattcactctgccaagaggaagtctacaaaaaagagatgtgcttggcgctcctggaaatgcttttactttggggaaaaagcagagtgtacactttgaatggaaataagcaggctgaagccacagaggccatttatatgcagcaccgggatgcagacaggagagcggagccctccttaaaggcgcagatcgctgagaaggctcatctctctccatgcttaagaggcctgactaggcttgggtcttgtttgataaccagggcataacatttaaacatacttacaaaaattcttccataaaatcaattcataaaaacttctaactctgaagcaaagtgttaaaataggtactgggttacccgcaaggattgttgtcagaataaaatgaaaggacctaaaaagttagcataccagttgaagccattctta

SEQ ID NO: 90141 - DNA, 1004 bp, Homo sapiens
gcacacgcgtatatttctagtaattatccacaggaagtagtgagtccacaatgccaagaatttctccttttcagtggctatttgtgatgagaagcaatgtgcattccactgcattctagcatcagattatgggaggggaatgtggtcatcgaaggcatgtcctctttcctataaagatttcattcaaatagagttctgcatctgatagtaaaaacaaacaaacaaacaaacaaacaaaaaaacagaggacaatttcttcgccaatgaaaatgsccccctatgaaggcataggagcctatttcaaataaggattaggaaaaattcaacaagggaaatgatgctttgagtatgttaacttgcaaaaggaagaaccctatttcctcttttctaagaggaagacaactacttttgctttgatcagagtgccgcttgagtggccagaactgacaaggttggcagaagcgatgagctgagaattaagggcagcgtctgggcctgtgggaggtgccatatgtgggctcacatccactgaaccttgatctcctttgcacacctccatgtaatttataaatcagcagtattcactctgccaagaggaagtctacaaaaaagagatgtgcttggcgctcctggaaatgcttttactttggggaaaaagcagagtgtacactttgaatggaaataagcaggctgaagccacagaggccatttatatgcagcaccgggatgcagacaggagagcggagccctccttaaaggcgcagatcgctgagaaggctcatctctctccatgcttaagaggcctgactaggcttgggtcttgtttgataaccagggcataacatttaaacatacttacaaaaattcttccataaaatcaattcataaaaacttctaactctgaagcaaagtgttaaaataggtactgggttacccgcaaggattgttgtcagaataaaatgaaaggacctaaaaagttagcataccagttgaagccattctta

SEQ ID NO: 90142 - DNA, 1004 bp, Homo sapiens
gcacacgcgtatatttctagtaattatccacaggaagtagtgagtccacaatgccaagaatttctccttttcagtggctatttgtgatgagaagcaatgtgcattccactgcattctagcatcagattatgggaggggaatgtggtcatcgaaggcatgtcctctttcctataaagatttcattcaaatagagttctgcatctgatagtaaaaacaaacaaacaaacaaacaaacaaaaaaacagaggacaatttcttcgccaatgaaaatggccccctatgaaggcataggagcctatttcaaataaggattaggaaaaattcaacaagggaaatgatgctttgagtatgttaacttgcaaaaggaagaaccctatttcctcttttctaagaggaagacaactacttttgctttgatcagagtgccgcttgagtggccagaactgacaaggttggcagaagcgatgagctgagaattaagggcagcgtctgggcctgtgggaggtgccatatgtgggctcacatccactgaaccttgatctcctttgcacacctccatgtaatttataaatcagcagtattcactctgccaagaggaagtctacaaaaaagagatgtgcttggcgctcctggaaatgcttttactttggggaaaaagcagagtgtacactttgaatggaaataagcaggctgaagccacagaggccatttatatgcagcaccgsgatgcagacaggagagcggagccctccttaaaggcgcagatcgctgagaaggctcatctctctccatgcttaagaggcctgactaggcttgggtcttgtttgataaccagggcataacatttaaacatacttacaaaaattcttccataaaatcaattcataaaaacttctaactctgaagcaaagtgttaaaataggtactgggttacccgcaaggattgttgtcagaataaaatgaaaggacctaaaaagttagcataccagttgaagccattctta

SEQ ID NO: 90143 - DNA, 1004 bp, Homo sapiens
gcacacgcgtatatttctagtaattatccacaggaagtagtgagtccacaatgccaagaatttctccttttcagtggctatttgtgatgagaagcaatgtgcattccactgcattctagcatcagattatgggaggggaatgtggtcatcgaaggcatgtcctctttcctataaagatttcattcaaatagagttctgcatctgatagtaaaaacaaacaaacaaacaaacaaacaaaaaaacagaggacaatttcttcgccaatgaaaatggccccctatgaaggcataggagcctatttcaaataaggattaggaaaaattcaacaagggaaatgatgctttgagtatgttaacttgcaaaaggaagaaccctatttcctcttttctaagaggaagacaactacttttgctttgatcagagtgccgcttgagtggccagaactgacaaggttggcagaagcgatgagctgagaattaagggcagcgtctgggcctgtgggaggtgccatatgtgggctcacatccactgaaccttgatctcctttgcacacctccatgtaatttataaatcagcagtattcactctgccaagaggaagtctacaaaaaagagatgtgcttggcgctcctggaaatgcttttactttggggaaaaagcagagtgtacactttgaatggaaataagcaggctgaagccacagaggccatttatatgcagcaccgggatgcagacaggagagyggagccctccttaaaggcgcagatcgctgagaaggctcatctctctccatgcttaagaggcctgactaggcttgggtcttgtttgataaccagggcataacatttaaacatacttacaaaaattcttccataaaatcaattcataaaaacttctaactctgaagcaaagtgttaaaataggtactgggttacccgcaaggattgttgtcagaataaaatgaaaggacctaaaaagttagcataccagttgaagccattctta

SEQ ID NO: 90144 - DNA, 1814 bp, Homo sapiens
ctgcacatgtattctgaaacttaaaattaaaattttgagggctaggcatggtggcttacscctgtaatcccagcactttgggaagccgagatgggtggatcatgaggtcaggagatggagaccgtcctggctaacacagtgaaatcccatctctactaaaaatacaaaaaattagctgggcgtggtggcacgtgcctatagtcccagctacttgggagggtgaggcaggagaattgcttgaaccctggaggcggaggttgcagtgagctgagatcgtgccactgcactccagcctgggcgacagagcgagactgtgtctcaaaaaatatttaaattttgaaaaaaaaatgcaaggcagtgcagcctgagtggatagggaaatgggacaagctgaacctgggatgggagtaacaagtaaatgagagaagaaatgagaatgatgagttcccaccagctccttggctgctttcttatccagatatttctctgttcctagcattttaattttttctttatttgtatattatttagaagaggaattttagaggaatgggatagagtgtaatatagaatcatcatatttgatgcatgctaactactttggcaaaagatttgtaaaaggctgagagtttgactgttggctaaagtgagatgggggattagtagggaatgaaaattgttcaggctctttgctcatcattggaacgaattggatgtgttgtggacctacggaaacactcaaattcagtcatctccctgttgggaataggtttgaggaaccactggccaacctgttaaatgaacaacatcggacagtgaaggagctatttgaacagctgaagatgaagaaatcttcagccaaacagctgcaggaagtagagaaggttaaaccccagagtgagaaagttcatcagactctgattctggacccagcacagaggaagagactccagcagcagatgcagcaggtaggacttttcttggtcatgttaacattggatttttttttttgagacagagtctggctctgtctcccagcctggagtgcagtggcccgatatcggctcacttcaacctctgctttctgggctcaagcatttctcctgcctcagcctcccaagtagctgggattacaggcatccaccaccacacccagctaatttttgtatttttagtagagacagggtttcaccatattggccaggctggtctcgaactcctgaccttgtgatccgcccgcctcggcctcctaaagtgctgggattacaggcgtgagccactgcgccctgctgttaatactggattataccaaggcctaactctgaggccagaaattaacagctttgtaaaagtcagagatagttaccttaccacctcctaaaaccatagtatcttcacatcattaggagctcgagaagtcatcatgttcatgccttatggctcaaggaagagagcacacaaggacactaatggtattcagaaatatagatttcaaagagtccttagtaatctattctgaaatttaacaaccttcactgtgagaagtaggtttgtttttcctttttctaacctcagtccctctggattgaggttaagcttcctctggttctgtcattttgttcaagggaacatgtctgagagatttatgccaagatcctatgttattttcatactcctttcagaaagcaaaatatatgtgataaagttgcaaacatcttggttattgtctctctgggggctgggttacggtggctcacacctgtaatcccagcactttgggaggctgaggtgggaggattgcttgagccagggag

SEQ ID NO: 90145 - DNA, 538 bp, Homo sapiens
ctcttctccttggttctctcccaacctcctcaccctggtaaaaacaagggcagaagaaaactgaatgctgtccttagggagcaccatcaggcccccatcgggctcaggggatagcaggaggctccagttgaygctcagggtgctgtggggggtgttggtggccaccattaccactgccagaggccccaggctgctccacacatagtgcagtgtggaattggtgcccactgcccgtatatgaagcaggttctgcagggggcccagccagttagggatgacctccagagacacctggaacatggagtagtggagggttgagggaacaggaccaaggagagacacaggcaaaagagaagcttgaggggaggggggcttggaaagtgctggacaaaggatgggattttggggactagacaagaggaatgtgtgcgggagctgagggaaccctggggtaaggggcagtggggacaggatgaaaaggggtagggtagagggtacagccaggactcccctgaccctggtgggcgggtcagggcac

SEQ ID NO: 90146 - DNA, 538 bp, Homo sapiens
ctcttctccttggttctctcccaacctcctcaccctggtaaaaacaagggcagaagaaaactgaatgctgtccttagggagcaccatcaggcccccatcgggctcaggggatagcaggaggctccagttgacgctcagggtgctgkggggggtgttggtggccaccattaccactgccagaggccccaggctgctccacacatagtgcagtgtggaattggtgcccactgcccgtatatgaagcaggttctgcagggggcccagccagttagggatgacctccagagacacctggaacatggagtagtggagggttgagggaacaggaccaaggagagacacaggcaaaagagaagcttgaggggaggggggcttggaaagtgctggacaaaggatgggattttggggactagacaagaggaatgtgtgcgggagctgagggaaccctggggtaaggggcagtggggacaggatgaaaaggggtagggtagagggtacagccaggactcccctgaccctggtgggcgggtcagggcac

SEQ ID NO: 90147 - DNA, 522 bp, Homo sapiens
tcatttagcctgtgaccacaccctgttgactaggctccatgggggctgctgggaaatgaggggagctgtgtggttctctccctccctgcctccaccattgcgtagaggctaaggctgggcaggcgtccttccctgccacgcaggttaagcccggacagccaagttgtctagctaggtgcctcattgtagggggaggtgctaatgtgtctttcactgccagaatttaccaggggctgagagctcccagctggaggagcccggcaggaacaagggccatctgcagtgcttgctcaaggtcagttgctyagccaggctttccccggggaagctgctcacaccactcttccactttctgacactgcccctgctgcaggaaggccttccaggcacatgatctgtgcacacaggagcagccacagttgcatcagctgaggcaagaccctgctgccagggcattgccccatcctgcattccccacaggaggcaggcagcactgtttaccttggcaggggctggaaggca

SEQ ID NO: 90148 - DNA, 587 bp, Homo sapiens
gggttggggacccctgacatatatacaaggtaattctgggcaacactggttgtaaaaacaaaatattggaacaacatttaagtccaataaaattctggttatatgaattatggtagacccaaataatggaacactttgcagtgtgaaacaacaaaacaatgaagctcttttgatgtgatacagatttctagaatctattaagtaaaaaaagtaagatgcagaagtatgcaaagtgtgccatatgttgtataaaatggtagagataaataaaaaaawatatatatatttcatacaaaaagacataaggaaattactagttaaaggttgccacttggagaaaggggaaggaactagacagacgagaaaatttttcattgaatttcacagaattttttttttttttttgagacataatcttgctctgtctcccaggctggagtgcagtggcatgatctcggctcactgcaacctccacttcccgggttcaagtgattttcctgcctcagcctcccaagtagttgggattacagacgtgcaccaccacacccggctaatttttatatttttagtagagatgaaatttcatc

SEQ ID NO: 90149 - DNA, 715 bp, Homo sapiens
aattcattgttacttctaggaaaggaaattcccagacctactaccatamtactactctacgtaggttattttatttgtatgtaaacacaagctgagattttttttctgcatctataaaatgaagatgtgaccaggcctctcatacagagacactgagggtaatgagactaataatccctttgatggtggcaggcaaagttttcacaatcaaaatcaacaaaaatagcggaatcttaggcttgcagggataatatttcttttcttattgtcaggcttttgcttcttctatataaataagaaaggttcagcatattaatcccagatattctgcacccagagggaaacgttgtgcttatttcaataggaatttgacctttgctttaggtgaaaccatcagagctcttggatgagaagctcatctttctggtccctggaacattgttcatgtacacttgactacatttcatctctgtccttaaaccttaagtgggggtcaataaacacagttgtttgacttggatagtacaactcttatattcttagtgacattataattacttaacaattctcctatgactttagagcctaataaaatccgttgactatacataaaagaataaaataaagtatacctctcaggtaggcctgtcagaaagatgcaggcttaaatttacactgcagcagttacaaagctcagagataaaggtattagggt

SEQ ID NO: 90150 - DNA, 647 bp, Homo sapiens
tgcatccaaaaactaactaatcctgaccattttttaccctagaaatttaaattttacctgaactaaaataaagtagctggtctttaaaaagagaaactcagatacttccttggttttctgtttgaacggttaatgaacaaaactaattgagatgagttgtataggacaatacaatattcctcagcagcaatttaagataattaataggctgggcgtggtggctcacgcctgtaataccagcrttttgggaggccgaggtggagggatcacaaggtcaagagatcgagaccatcctagccaacatggtgaaactccatctctactaaaaaatacaaaaaatattagctggacgtggtggcgcacacctgtagtcccagctactcaagtggctgaggcaggagaatctcttgaacccaggaggtagaggttgcaatgagccaagattgcaccattgcactccagcctggcaagactccatctcaaaaaaaaaaaaaaaaaaaaagagggggtggggaagagaattaacagcagtaagtcacaccagttataagactttgattcaaaaatctcttacagaaaaaattaagaaagaatagaaaatgaatcaacagattcatgttcaaaatgtgctttacccagaccaaggg

SEQ ID NO: 90151 - DNA, 694 bp, Homo sapiens
aaaagtcaaagtagcattttttataaatcacaggttttatgacattcactaaaatgttcttttggaaggtctttattaatatggtaaaggcagggagagaaagatttttcttgggtcatagaaaaatattcagaagtattttgctagattttataatttttttctcatttaagcttcaaaaatttaatattttcaacttaaattttaaatacaaatttaaatatagttttagataatctatgatgtatttatttagcaaaarctattattcaatattttatgaattttcttcctcacaaatttgattaattgataaattaaaccatatttttaatgttttcttctcctatagtagaaataaaaaccttaatctgtattttagcatttaaagtagaaggagtttcaggatttctgtaggatatctgtttaacatttaacagtgagaaaggtattttcagtgagattaaatgaccacttcaaggccaaacagctagttagagacagataatgtgaaattgagtcttttgattctaatttttgggttatttccattactctacaattgaaaaaaatacatacaattgtacatataatttgtatgaatttataattcacgaaaatctcaaaaatacgattttgagattttgaattgtaatttgatatgctcactcctaaaagttgaaaatgcacttta

SEQ ID NO: 90152 - DNA, 631 bp, Homo sapiens
tacttgagactctctgaaggaggcttgtaaaaatgagcaggatagaaaataaaaacaaaacaacaaacaaacaaaaacagcaccagccccaacaacaaaaacaaaactggatataggaggaagaagcagaaaactggatacacaggagaaaacaaaaatataaacagaagtctataatttgtcccacttggaaattcttaaattacttgaagaatttataaaggcaggtaagtttgctgaatggtgttgtgcctctacaacataagctccaaattaacttatatgtttcctgagackcacccattggcaaaagttaagaaacttaatcaaagttgaggattgaactatagttatcactggagatgccactaaatttaaacaagtaccctaaatatgggaattgcactaaaataaaggtacctccccttactcttatggaggtgattatcacatataaaatacaggcaaataaatataccttatcttaaccatcagaattactttctggcctaaatactccatggtcataacagatattgtctaaaaatatcccatagtagacatggatgctctgaaccaattaatgacaaattaaagtaaatcaaatcaaatctttgacatgtacaagtag

SEQ ID NO: 90153 - DNA, 1353 bp, Homo sapiens
ttaaattattttaaaggttctattagtactatgaatatgatacaccttaattatatttcattcattcaacaaatatttgaatgcctactatttgctggataaaatacatcaaacattctttttaagataagagatgtccccagattcatttacttcccacccaataaagaacccagtatctatagcggtaaatgggtgagcaaacactctaactgggagaactctgagcttggatttcaatgccaacgcaacctggaaataagacctcttgaactagaagtaatcaggactcaaaactgagatcctgcacatgagccaggaccttcaaaaggctatatccttcgtttaaaagaggaggcaaaggggtagagattagaacaagttggcctattggtaaaaagaagacaaagaagcttctctgcttcagactagcatttgagtggaaacaaaagccctataagtttcgggttcacatttatattctgattatttcaggaatcctcaagtcaagaaattaacataagtgtactgggctgatgaatgctaaacttcccttgagaaacacatcctcaacctatacagtacaaagttcgtccagaatgaagccccactgagaataatattgttcacaatccaaaattacaaaatacacttgagtgaatgacagcagacatagtaaactacagtattagactttgaggaacttcagtaaaacttggataaaaattatcagaataagtctgtataaaatcaargaatcaaaaacacaagaaaagacattccaaaaaagaacaggcagatttggaagagaaccaaatagaacttatgtaaattaaaaaaatacagaaattttacagcggataagttaaagtgaagaattgacacaagttaaaaaaaatttggtgaaaatatttgtctaaagaaattgccaaaaaggcagcacagaaaggtaaagaaatgataaatgtaaagagacattaagagtggaacaagagagttcagcatttatttatcttaatttgttttttgagacagagtctcgctctgtcacccaggctggagtgcagtggtgtgatctcaactcactgcaccctccgcctcccaggttcaagcgagtctcctgcctcaccctccagaatagctgggactacaggcatgcgccaccatacccagctagtttttgtatttttagtagagacgggattttaccgtgttgaccaggctggtctcaaactcctggcctcaaatgatccgcttgccttggcctcccaaagtgctgggattacaggcatgagccactgtacccagcctaatttttttatttttaatttttgtgggtgcatagtagatgca

SEQ ID NO: 90154 - DNA, 838 bp, Homo sapiens
tactatgaaattatgtccgttctacttttttgttgtttataatgtcctttcttttatgacattccaatgatagaagatggtattttcttttctactcggcaaaatgaaaaaacatgggcggccgggcacggtggctcacgcctgtaatcccagcactttgggaggccgaggcaggcggatcacgaggtcaggagatcgagaccatcctggctagcatggtgaagccacatctctactaaaaatacagaaaaaattagccgggcgtggtggcaggctcctgtagtcccagctacttgggaggctgaggcaggagaatggcgtgaacccgggaggcggagcttgcagtgagccgagttcgcaccactgcactccagcctgagtgacagagcgagactctgtctcaaaaaacaaaaacaaacaaacaaacaacaacaacaacaaaaaacatgggcacctaaaactattccagttttgtgcgtatgtgaatgaaacattactgtgtttttaaatccagaagcttgggaataaccagttcatagaacatctacttggtgtaatgctcaatttagaccgtttcctgagctcagtggtgctgtctgttgacatmattataaattactttctattcactcaattgtttattttttcacccattcgaccaatcctttcttaatgtctggtgtggtctggatgttgcatcttaggtctggggccacgaaaataagtcccttctcagaagtgctccttgttaagtggcagacatgtttatataagaaagtaacaatatgtgtgaataattacatatttattcaggttctactgtatacataatgcattt

SEQ ID NO: 90155 - DNA, 980 bp, Homo sapiens
ctaacttgttctgtgaaaatgctaaaaagtagcagatgatgacttatgatctggtagttaattgcttgctaacggcaacattagttaccattcaacttcatggccctaggaggtatgttgcaacagtatttaacattactgtaatccatttgtttctttcaaagtgcaatgagctttctgtaccagtcgtacataaagggacagaatctgttctatggctcagaatctgtttttataaacaatggttcccaattagagtaacttaggaagaggagctagaatatgcaggttttgttgtctaattcatactcagattttcccttcccttgactgtcttcaacctctccatatttactaggtccttctgatgagcatttaaatgtcaggattctcacatttaaaaataactttctactttaaattattctctggtcatgccctattttctcttcagaccaaaygtctccattgagtggtttgaatatcctgattttctcactgtccactctctctcctcaggaacgtcaatcctattcctgcccccaacctgacaagattctttgctaaagttactgatgacctccacttactaaaatacatgatcataatttcattttattagatctgcatattagtcagagttcttacttgcaaataccagaaactaatactggataataaaggcagaacagacattgaaaacacatttggtagctcatataatcacagataaacctggagaatcaggtttggaaaatgagcagaattaaagtgatgtcaggaagccagaatttgaacactacagcgtgtactacatctgctgttggacattgaacactattactgatgcaaccgtcatccctggaaactgggagctgttgatgttactgccactgccaccacaacagactctccactgtccccgcctctgtgtatcactaaatccccatttgaagatgaatataactaattgatcaggc

SEQ ID NO: 90156 - DNA, 980 bp, Homo sapiens
ctaacttgttctgtgaaaatgctaaaaagtagcagatgatgacttatgatctggtagttaattgcttgctaacggcaacattagttaccattcaacttcatggccctaggaggtatgttgcaacagtatttaacattactgtaatccatttgtttctttcaaagtgcaatgagctttctgtaccagtcgtacataaagggacagaatctgttctatggctcagaatctgtttttataaacaatggttcccaattagagtaacttaggaagaggagctagaatatgcaggttttgttgtctaattcatactcagattttcccttcccttgactgtcttcaacctctccatatttactaggtccttctgatgagcatttaaatgtcaggattctcacatttaaaaataactttctactttaaattattctctggtcatgccctattttctcttcagaccaaacgtctccattgagtggtttgaatatcctgattttctcactgtccactctctctcctcaggaacgtcaatcctattcctgcccccaacctgacaagattctttgctaaagttactgatgacctccacttactaaaatacatgawcataatttcattttattagatctgcatattagtcagagttcttacttgcaaataccagaaactaatactggataataaaggcagaacagacattgaaaacacatttggtagctcatataatcacagataaacctggagaatcaggtttggaaaatgagcagaattaaagtgatgtcaggaagccagaatttgaacactacagcgtgtactacatctgctgttggacattgaacactattactgatgcaaccgtcatccctggaaactgggagctgttgatgttactgccactgccaccacaacagactctccactgtccccgcctctgtgtatcactaaatccccatttgaagatgaatataactaattgatcaggc

SEQ ID NO: 90157 - DNA, 848 bp, Homo sapiens
tagccattactgtgagctaataatcaagtggagatatctaaataatacagaacaaaataaaaattgcagaaatgtactagcaatgggtacctttgttccctgaggctaataaatgtcaggccaatagaaaggccttcaatatttgtttattattttgaacaaaaggaatgggtcacaatcaaaccagagaagggaacaatttattttggcaggcgaatctgggaaaggtctcatggaagaaatgttactgaccttgaagaatgagtaattttgattgggggagagggagaagcagcatgggcaggagacagggaagcgtgtaagtgcacggcacatccaagagagccaggagagtgcagcgaagtgcaggcttcatagaaagccaacggaggacgatgaggatgggaagggaagttggagcccatcaccaaagcattaaattccatagaatggagttggcattctattttccggataataaggaggttttttaagggcagaatgatatattcacttcactatttttggaaaatgattccgaggatagtgtgaaggatggattaggagatgaagctggaaataggaccatcagctaggaagctcatgtgytgtcagtgaaagataatgaaggcctcattaagacaggtgctgaggaagtaacagggcattctgaggggccattgaccactcacagggagaagaattcataattgtctatgaagaataggggaaaattaaggatgggatcaaagaagaactgacggctctagccatggtgacttgggagatgataggttctgggttccctggagaaactggagcttctggaaagtctcatgctttcattt

SEQ ID NO: 90158 - DNA, 1168 bp, Homo sapiens
ttgagtattaatttttgagccctttccctgtattttgccttaatgtgtgtgatttagcaaaaagcctccagatgacactacggcccttgctcctctctttggcccaccactagaatcagcttttgatgaacagaagacagaaggtaggaaaagaaactccatatattatagatttgttttttcttttattaaagtacaactcttctagattaaatgtatgtattttgaggtatatttttaatatattattttcgtgggaaagaaaagtttcaatctaggtgtgctgtcaagaacagaagtttagtttgaaaatctctattattttaggatttgaaactttacttccagaaatatctaatagctaagaagctcattcttcaaaacaagtcagtaaaaattactgcaagtctacacaaatcccggtcatggagtaaacactctgggaaccagaccatcatcatttgaggtgtcaacagaatcacaaatggagacagaccttcatacatccgtcattgtcgctgtcgttggggtgtggcctccctgaccatctttgctctttcccacctcataatgaaggcatcaattggattgctcacaacagtcattgtttgctggctcaagacccaggaatgaccttgaatcatttagaaacttagaaataaggccaggtgtggtggttcactccctcaatcccagcactttgggatgctgagataggattgcttgagcccaggagttcgagaccagcctggacaacatayggagacccccatctctacaaaaaaatttttaaaattagccgggcatggtggtgcatgcctgtaggcccagctgctcgggaggctgaggtgggaggttcacttaagcccaggaagtcaaggctgcagtgagctgtgatcacaccattgcactccagcccgagcagcacagcaagaccccacctcaaataaaataaaataaaataaaatgctactgaagaaatatctttatttctgccattatttttgagtttacttattaaatatttattcctagagttaaacatttaacatttttaaattaaccatgtttttggatggctgtaaataccgtgtactttactgacataaaatcagctctctataaaatggatcttatctatccctgaaatgtgtttatgtctaatgca

SEQ ID NO: 90159 - DNA, 1013 bp, Homo sapiens
aagaatgtgacagtttctcccaccagcagttgcatagtctggtagatgactgttaattttccaagagagttgatgagttgtccaggggcattcacatctttggcccttttaagcctgtagattagtgcttctcaaacttttttttcattatccctctttccttgcccagagagcctctgttagaccttgtttttccctaattgctccccaagtcgaattctaatatcatagaggtactgtacatctggtcatgtgctatatgtatatttgtgtgctttatatatttaacaagtaagatttctttcaccttccccaaagaaccaatttttatcccctttggggtgatacttctgctttgagaatgcatgccatgcctgcagctagatctcggatcacaacttcctaggatgtaggggcaaacatctttaacacagggtagggtttaagaatacaatggaagttagacctggttttcagtcccagctcccctacttactatagagcaaattaccttgagcaagttatttaatttcactaaggtttaatttaaaagagtgtacctcaragagatgttttgagattagaagacatgaggcatgtaatgtgtttagcacagcggccatcgtatacaagtgctttacataaattagcttttgatatatttattcatattcttcatagtgccatgctatagctgcctgtttccaatgcttgatcaaactctcaccactgtctatgtgaaagtgtttaaaatttggctgtatgagtcttcatactaagacaaagaaaatcctaagtttttagactgaggaaatcaatttgagcaagtgtacattcacttttctttcatttgtattatgactttgtcttctgtcttatgttcatatttaacaatagtatttttgttgaatacatgtgttctgacttggataataaaaagcaagtataatattctcatcttctgagtcaaacattttaggaagttaattcaattgggcattaattttggatga

SEQ ID NO: 90160 - DNA, 981 bp, Homo sapiens
ttatcttcggtttatgaagatatcaatggtaatattttcccaaccactagtcaaattgtttctacacagaatttttggttgaaagtcattatttcagaattttaaggcattattctttttctagctttagtggttattggtgagaagtctgatattactctgatttacagttgtttgtacataatctagattttccctatctactagaaacccttctttatctctggctttctgaaatttcatattatatgtccctttcctttatagtatagggcacatagtggtgcctcaatctgaacacatattttatctatagatataaataacaataataactcctaacttttactgagtgactgctaagtgagccctctatagtaagcagtatgacatggcaactcagaaaagttgtgccagcyaccaacagccaattgaagggagattcaaatatttactgagacttttttggggtgttgctatatctgagtgaattaatcattggggagacaattttgctggatgttaagtatactgcaaagtgcaaaactgggaaaaagaatggaaagcactccagttcagtcatgtgtaacatatttttaataaattgtcattcaactgaagtgactggtctttctgagtaaagctttttgatcataagtcaaaattactagggagttaacggtacttctctagaataaccttctgaattatccaaaataagcatttaaacacaggcacttaatgctgagtaattaatgtctgtctggataacccagcagctaatgaggtggggtgtagcaggggcatactgagtcactggagagccccagagggctggctgtgaaaatagccctgaacttgccagggtttttggtaatagctggaaaatttttataggtgattcattattgacttcttgcctaaagatatattggctgtagacaagttttcgtgtgccctattatattgcaggtacaaatg

SEQ ID NO: 90161 - DNA, 634 bp, Homo sapiens
tgaaagagaaacacaacgtaccataacctgtgtatacagcaaaagcagtatctaagtagtactaagaggaaagtccatagaaataaatgcgggcatcaaaacagaaaaatttcaaataaacaacctaacaatatacctcaaggaactagaaaagcaagagcaaaccaaacccaaaattagtacaaagaaagaaataataaagatcagaggagaaatactacacgaaatagagactagaaaaaatacaaaagatcggtgaaatagaaagttggttttctgaaaagataaccattagctagactaagaaaaaaacagagaaaacccaaataaatataatttatccatgcttttttaaaagagtgtttcctgtgtcattaatgtgtatacattttcaatttgtatctatttactgcaatttgtactcattaggcaaaaattcctagtaaatattcccaacatttctataatactggtcataacaagtaaaaatactttcatcctcaaccattaaggtattagccctttctttagagaaacacagctaattgtaattcarttgccaggggcgtttattcaaaggtaaaagaacacttatggaaatcattgactattacttcatactaagaggtacccc

SEQ ID NO: 90162 - DNA, 730 bp, Homo sapiens
cccacccatggctttgctgcatcagcaaaaactctgatgaactaaagtcctcctccaaaaagacctagaggaaatatccaaatgaacagatcacttaacaatatgtagattatttaacagtaaaacaggcgattgccagagtaaatattttccatacsctacacaagccttaaaacattgaagttaaagctgaaaacattgacattaaagttggtttctatggatgtcaactacaactctgacagcaccattaataattcacatttcttagtttcttttggaatccagtcaactcctttctctagtttcaagaacccctaactccaagcacaactgtctgtgcttcaggtttcaactgcaaatagctagtttgtcagtacatgtcacattcattttttaattttctgtttagttacttaccaggctacacacaatatctgtctcaacattaacattattcataaccattttacctccccctcctcttgtgaacatgagaattattttaacacaccaaagagttaaaacagagacccagtcaattttaggtgtttggtaacaccctgccattttgtacaagaagtggctgtgaaccagagtctatttcagtggccaaattccatagtagaagtgagcttaaaaatactcaaggtcctaatgtgcttccagtctagaaggaccacatttgtaaggcattcctttggatcttgagtgatcataagcccctgga

SEQ ID NO: 90163 - DNA, 1923 bp, Homo sapiens
catactgagcatttttctgagctgaggaataaaacagaattcaaatgttaaacacaccttaccggagaataatttccaaacaaaatggcagtgtgaaaagaagttcaaacaataaatgttttgtctattgttaaaacaaaatggtaaatatcagaaacaaatcacaccgcattcattcagaagtacatatgtaaggcaaaacattccctgatataaagctatacatttaaaaacatgtgagctgggccaggcacggtggctcacgcctgtaatcccagcactttgggaggctgaggtgggcggatcacgaggtcaggagatcaagaccatcctggctaacacggtgaaaccccgtctgtactaaaaatacaaaaaaattagccaggtgtggtggcaggcgcctgtagtcccagctacttgggaggctgaggcagaagaatggcatgaagccgggaggcagagtttgcagtgagccgagatcgtgccactgcgctccagcctgggcaacagagcgagattctgtctcaaaacaaaaaacaaaaaacaaaaacaaaagcaaaaactatgtgagctgctaataaattcactcaaatttatatataaatatttactgtagaatagaattcaacagaaagtgatccatttgggctccattcaaaaaaaggcaaaactgctgacctactctgagttctttcacataaaagcagagacatcaagttcaccattaataagagaacaaacaaattaaaacaccaccactcagaatccccacttctgcttctcaacctcactgtgcactttcccaggacatagtgccwatcttataagccttctctgtatgtagagaaaattacttcttggaacagaagcaaggaggggagtggtaatcagatttttggtttggagcacacagcagcaagaagaatgtatgggaaggagatgaatctaaccttagtttctctcagacttcacggtagtgtctccaatcccagcccagctctcttctgcctgacccccaccttcttcaccctacagccacactgatcttccttctttcctgctctcacctcagggactttgcacatgctgatctgtctgcctggaacagcacttctcccacatgcatggctcagcttatttattttcagcctcaagttccaaatgaaaaatctcccatctcagaaaagaattccttaaattctcatctctattagccctctcctatatactttcatggttcttggttactacacacacccagagctcctttactttcctctgcacaacagacactgacctttcattacatctgcaaaggcagcacagcatggagcacagagacagtgtagaatgggaaagaacatggtctctggagcccgacagcctggctctgaatctcagctctgtactcagaagctgtagagccttgaggaagttgcttaacccctgtgcctcagtttcctcctctgaaaagtgggtagaattaaaaaatacctacatcatagggctattgtgaaaattatgcaagttcatatacaaagagcccatgaaacagccccaggaaaataataatagcaaacacttacagtggttactattttatcattaagtgtccatcttccccatcaagtgacaggctctctgaagcagggcccataggtagttgctacggtttgagttacttgtctcctccaaaactcatttgaaatttaatccccaatgtgacagtattgagagggagggcctttaaaaggtgattgggtcatgaggtctctgccctcataaatggattaatccactcatagatttatgggttatcaagggaatggctctagtggctttttaagaagaggaagagagacttgagctagtatgctcaccccccttaccatgtgatgccctgcactgccttgggactccaca

SEQ ID NO: 90164 - DNA, 2190 bp, Homo sapiens
ataacacataacacatacatatctcataagccagtcatggcagtgacatcccatcacctttgccatattttgttcagaagatcaagtcccaggtcccgctggtgctcagcgggaggggattatacaaggcatgagcatcgctatgctgctttgatcaaaaagggctgtggtatcactccaccacactccagcctgggcgacagagccagaccttgtttcaaaacaacaacaacaacaacaacmaccaccaccacccagctgtgagaaggattaccaagaacccttaccgatgaaaaacaacacagtgtgtaaggaaatgagggaaggaaccacgattcactagatgccagagcaggcagctgggcctcagcgctgacctctcccctccccctccgctgtgtccatcgcagtccgccggccccctcccagcgtctctcgaccccttccccccttccctgtactccagccgcggctgattcctgctgtctgggtggggtccctgtaaggctcaggcggctgactggggaggcgatcccaggaggcacagtggggaggggatagcagggcggaaagaggctgaatcacaaggaggcgggggcggcggctcggtcccagggccatctcagggaccgtgtcggggggtgctgactctgcccatcaaggggagccggacatttatccgccaaagcccgtccctcgcggtgagggtcgctcctgggtgtgggacccctggcttcccgcgctgccctgcccggggctggtctcgtcccaggaccctggagagcggccccaggaggcgtggaggaggggagagagccgagggaagtggtcatggagcaggtgaacgcacaggggcttcggctggagcgccctcctgggaagagcccctcctctgcaaggacctgccgcagcttaaccagcctgcgctgctgtcgccagcgccagttttaaatagccaaaccctactcacttcatccagcaacgcacccccaacttcacgctaaatgcataatttgctgcaaattaaacttaatgggactagagtaattatgttgactttttcaagtagttagagataaatacatgattagatatttcagaatataacctttcattgttttccccaagggagccaggggaaggaggcggaggcctgagttagagaagacgctgaaaaagtgggagggaggactcagaaacccgtttgaagaggctcttagaccccaccgccggtggaatccaggccagccacctggaagggccacttgggcaaaatataggcaaagctttaaaaatacccatacctgctaacctgagaagaccacagatctaccccaaggaataatcagagatggagaccaaaatctatgggtagggccggccatcccagtataatttataatggtcaaacttacatgggagccatcaaaatgcctaacaacctgaggattagctacctcagttacagaacaaccataaggtggaaagtcgtgcagccattagaaaggacacagtcagaaagtaattcacactgagaaaatactgataaaataagagcgagagaaaaaagcaacatataggcctggatatacattctaaatctaccaagaaaaagaaatcccagaagaaagtaagcaaaaaatactagcaattattaatctctgcttgatgagatgaagagggatttggattttctcttctctttttttatgttttaagaaaattctgcaagaagcagaatattaaagtatgtttaactatttttaaagcagattaagtacaaagggaacccccacccttaggggacttattggagggagttctgtgggtggagcgccaatgtcaggctctctctgcccacatttaagtctcctagttgctggttgtaggagagcctgtcggtggtctgcacagaatctagtcaccccttctttagtaataaggggccagtgctgttggggatggctttgtgtccaaagctttccttgcagatggggatggacaatgaaatgtgagtggagatggtggttgcagcttccgggaaaattcattgatgggaatttattcaattgacagaagtccccttttcctttcctttccctccctttttcctgcctggaatgcagctctagtgggctgaaactccagtagccatcgtaccatcagagcggacctttagtgataaagtca

SEQ ID NO: 90165 - DNA, 2190 bp, Homo sapiens
ataacacataacacatacatatctcataagccagtcatggcagtgacatcccatcacctttgccatattttgttcagaagatcaagtcccaggtcccgctggtgctcagcgggaggggattatacaaggcatgagcatcgctatgctgctttgatcaaaaagggctgtggtatcactccaccacactccagcctgggcgacagagccagaccttgtttcaaaacaacaacaacaacaacaacaaccaccaccacccagctgtgagaaggattaccaagaacccttaccgatgaaaaacaacacagtgtgtaaggaaatgagggaaggaaccacgattcactagatgccagagcaggcagctgggcctcagcgctgacctctcccctccccctccgctgtgtccatcgcagtccgccggccccctcccagcgtctctcgaccccttccccccttccctgtactccagccgcggctgattcctgctgtctgggtggggtccctgtaaggctcaggcggctgactggggaggcgatcccaggaggcacagtggggaggggatagcagggcggaaagaggctgaatcacaaggaggcgggggcggcggctcggtcccagggccatctcagggaccgtgtcggggggtgctgactctgcccatcaaggggagccgracatttatccgccaaagcccgtccctcgcggtgagggtcgctcctgggtgtgggacccctggcttcccgcgctgccctgcccggggctggtctcgtcccaggaccctggagagcggccccaggaggcgtggaggaggggagagagccgagggaagtggtcatggagcaggtgaacgcacaggggcttcggctggagcgccctcctgggaagagcccctcctctgcaaggacctgccgcagcttaaccagcctgcgctgctgtcgccagcgccagttttaaatagccaaaccctactcacttcatccagcaacgcacccccaacttcacgctaaatgcataatttgctgcaaattaaacttaatgggactagagtaattatgttgactttttcaagtagttagagataaatacatgattagatatttcagaatataacctttcattgttttccccaagggagccaggggaaggaggcggaggcctgagttagagaagacgctgaaaaagtgggagggaggactcagaaacccgtttgaagaggctcttagaccccaccgccggtggaatccaggccagccacctggaagggccacttgggcaaaatataggcaaagctttaaaaatacccatacctgctaacctgagaagaccacagatctaccccaaggaataatcagagatggagaccaaaatctatgggtagggccggccatcccagtataatttataatggtcaaacttacatgggagccatcaaaatgcctaacaacctgaggattagctacctcagttacagaacaaccataaggtggaaagtcgtgcagccattagaaaggacacagtcagaaagtaattcacactgagaaaatactgataaaataagagcgagagaaaaaagcaacatataggcctggatatacattctaaatctaccaagaaaaagaaatcccagaagaaagtaagcaaaaaatactagcaattattaatctctgcttgatgagatgaagagggatttggattttctcttctctttttttatgttttaagaaaattctgcaagaagcagaatattaaagtatgtttaactatttttaaagcagattaagtacaaagggaacccccacccttaggggacttattggagggagttctgtgggtggagcgccaatgtcaggctctctctgcccacatttaagtctcctagttgctggttgtaggagagcctgtcggtggtctgcacagaatctagtcaccccttctttagtaataaggggccagtgctgttggggatggctttgtgtccaaagctttccttgcagatggggatggacaatgaaatgtgagtggagatggtggttgcagcttccgggaaaattcattgatgggaatttattcaattgacagaagtccccttttcctttcctttccctccctttttcctgcctggaatgcagctctagtgggctgaaactccagtagccatcgtaccatcagagcggacctttagtgataaagtca

SEQ ID NO: 90166 - DNA, 2190 bp, Homo sapiens
ataacacataacacatacatatctcataagccagtcatggcagtgacatcccatcacctttgccatattttgttcagaagatcaagtcccaggtcccgctggtgctcagcgggaggggattatacaaggcatgagcatcgctatgctgctttgatcaaaaagggctgtggtatcactccaccacactccagcctgggcgacagagccagaccttgtttcaaaacaacaacaacaacaacaacaaccaccaccacccagctgtgagaaggattaccaagaacccttaccgatgaaaaacaacacagtgtgtaaggaaatgagggaaggaaccacgattcactagatgccagagcaggcagctgggcctcagcgctgacctctcccctccccctccgctgtgtccatcgcagtccgccggccccctcccagcgtctctcgaccccttccccccttccctgtactccagccgcggctgattcctgctgtctgggtggggtccctgtaaggctcaggcggctgactggggaggcgatcccaggaggcacagtggggaggggatagcagggcggaaagaggctgaatcacaaggaggcgggggcggcggctcggtcccagggccatctcagggaccgtgtcggggggtgctgactctgcccatcaaggggagccggacatttatccgccraagcccgtccctcgcggtgagggtcgctcctgggtgtgggacccctggcttcccgcgctgccctgcccggggctggtctcgtcccaggaccctggagagcggccccaggaggcgtggaggaggggagagagccgagggaagtggtcatggagcaggtgaacgcacaggggcttcggctggagcgccctcctgggaagagcccctcctctgcaaggacctgccgcagcttaaccagcctgcgctgctgtcgccagcgccagttttaaatagccaaaccctactcacttcatccagcaacgcacccccaacttcacgctaaatgcataatttgctgcaaattaaacttaatgggactagagtaattatgttgactttttcaagtagttagagataaatacatgattagatatttcagaatataacctttcattgttttccccaagggagccaggggaaggaggcggaggcctgagttagagaagacgctgaaaaagtgggagggaggactcagaaacccgtttgaagaggctcttagaccccaccgccggtggaatccaggccagccacctggaagggccacttgggcaaaatataggcaaagctttaaaaatacccatacctgctaacctgagaagaccacagatctaccccaaggaataatcagagatggagaccaaaatctatgggtagggccggccatcccagtataatttataatggtcaaacttacatgggagccatcaaaatgcctaacaacctgaggattagctacctcagttacagaacaaccataaggtggaaagtcgtgcagccattagaaaggacacagtcagaaagtaattcacactgagaaaatactgataaaataagagcgagagaaaaaagcaacatataggcctggatatacattctaaatctaccaagaaaaagaaatcccagaagaaagtaagcaaaaaatactagcaattattaatctctgcttgatgagatgaagagggatttggattttctcttctctttttttatgttttaagaaaattctgcaagaagcagaatattaaagtatgtttaactatttttaaagcagattaagtacaaagggaacccccacccttaggggacttattggagggagttctgtgggtggagcgccaatgtcaggctctctctgcccacatttaagtctcctagttgctggttgtaggagagcctgtcggtggtctgcacagaatctagtcaccccttctttagtaataaggggccagtgctgttggggatggctttgtgtccaaagctttccttgcagatggggatggacaatgaaatgtgagtggagatggtggttgcagcttccgggaaaattcattgatgggaatttattcaattgacagaagtccccttttcctttcctttccctccctttttcctgcctggaatgcagctctagtgggctgaaactccagtagccatcgtaccatcagagcggacctttagtgataaagtca

SEQ ID NO: 90167 - DNA, 2190 bp, Homo sapiens
ataacacataacacatacatatctcataagccagtcatggcagtgacatcccatcacctttgccatattttgttcagaagatcaagtcccaggtcccgctggtgctcagcgggaggggattatacaaggcatgagcatcgctatgctgctttgatcaaaaagggctgtggtatcactccaccacactccagcctgggcgacagagccagaccttgtttcaaaacaacaacaacaacaacaacaaccaccaccacccagctgtgagaaggattaccaagaacccttaccgatgaaaaacaacacagtgtgtaaggaaatgagggaaggaaccacgattcactagatgccagagcaggcagctgggcctcagcgctgacctctcccctccccctccgctgtgtccatcgcagtccgccggccccctcccagcgtctctcgaccccttccccccttccctgtactccagccgcggctgattcctgctgtctgggtggggtccctgtaaggctcaggcggctgactggggaggcgatcccaggaggcacagtggggaggggatagcagggcggaaagaggctgaatcacaaggaggcgggggcggcggctcggtcccagggccatctcagggaccgtgtcggggggtgctgactctgcccatcaaggggagccggacatttatccgccaaagcccgtccctcgcggtgagggkcgctcctgggtgtgggacccctggcttcccgcgctgccctgcccggggctggtctcgtcccaggaccctggagagcggccccaggaggcgtggaggaggggagagagccgagggaagtggtcatggagcaggtgaacgcacaggggcttcggctggagcgccctcctgggaagagcccctcctctgcaaggacctgccgcagcttaaccagcctgcgctgctgtcgccagcgccagttttaaatagccaaaccctactcacttcatccagcaacgcacccccaacttcacgctaaatgcataatttgctgcaaattaaacttaatgggactagagtaattatgttgactttttcaagtagttagagataaatacatgattagatatttcagaatataacctttcattgttttccccaagggagccaggggaaggaggcggaggcctgagttagagaagacgctgaaaaagtgggagggaggactcagaaacccgtttgaagaggctcttagaccccaccgccggtggaatccaggccagccacctggaagggccacttgggcaaaatataggcaaagctttaaaaatacccatacctgctaacctgagaagaccacagatctaccccaaggaataatcagagatggagaccaaaatctatgggtagggccggccatcccagtataatttataatggtcaaacttacatgggagccatcaaaatgcctaacaacctgaggattagctacctcagttacagaacaaccataaggtggaaagtcgtgcagccattagaaaggacacagtcagaaagtaattcacactgagaaaatactgataaaataagagcgagagaaaaaagcaacatataggcctggatatacattctaaatctaccaagaaaaagaaatcccagaagaaagtaagcaaaaaatactagcaattattaatctctgcttgatgagatgaagagggatttggattttctcttctctttttttatgttttaagaaaattctgcaagaagcagaatattaaagtatgtttaactatttttaaagcagattaagtacaaagggaacccccacccttaggggacttattggagggagttctgtgggtggagcgccaatgtcaggctctctctgcccacatttaagtctcctagttgctggttgtaggagagcctgtcggtggtctgcacagaatctagtcaccccttctttagtaataaggggccagtgctgttggggatggctttgtgtccaaagctttccttgcagatggggatggacaatgaaatgtgagtggagatggtggttgcagcttccgggaaaattcattgatgggaatttattcaattgacagaagtccccttttcctttcctttccctccctttttcctgcctggaatgcagctctagtgggctgaaactccagtagccatcgtaccatcagagcggacctttagtgataaagtca

SEQ ID NO: 90168 - DNA, 2190 bp, Homo sapiens
ataacacataacacatacatatctcataagccagtcatggcagtgacatcccatcacctttgccatattttgttcagaagatcaagtcccaggtcccgctggtgctcagcgggaggggattatacaaggcatgagcatcgctatgctgctttgatcaaaaagggctgtggtatcactccaccacactccagcctgggcgacagagccagaccttgtttcaaaacaacaacaacaacaacaacaaccaccaccacccagctgtgagaaggattaccaagaacccttaccgatgaaaaacaacacagtgtgtaaggaaatgagggaaggaaccacgattcactagatgccagagcaggcagctgggcctcagcgctgacctctcccctccccctccgctgtgtccatcgcagtccgccggccccctcccagcgtctctcgaccccttccccccttccctgtactccagccgcggctgattcctgctgtctgggtggggtccctgtaaggctcaggcggctgactggggaggcgatcccaggaggcacagtggggaggggatagcagggcggaaagaggctgaatcacaaggaggcgggggcggcggctcggtcccagggccatctcagggaccgtgtcggggggtgctgactctgcccatcaaggggagccggacatttatccgccaaagcccgtccctcgcggtgagggtcgctcctgggtgtgggacccctggcttcccgcgctgccctgcccgrggctggtctcgtcccaggaccctggagagcggccccaggaggcgtggaggaggggagagagccgagggaagtggtcatggagcaggtgaacgcacaggggcttcggctggagcgccctcctgggaagagcccctcctctgcaaggacctgccgcagcttaaccagcctgcgctgctgtcgccagcgccagttttaaatagccaaaccctactcacttcatccagcaacgcacccccaacttcacgctaaatgcataatttgctgcaaattaaacttaatgggactagagtaattatgttgactttttcaagtagttagagataaatacatgattagatatttcagaatataacctttcattgttttccccaagggagccaggggaaggaggcggaggcctgagttagagaagacgctgaaaaagtgggagggaggactcagaaacccgtttgaagaggctcttagaccccaccgccggtggaatccaggccagccacctggaagggccacttgggcaaaatataggcaaagctttaaaaatacccatacctgctaacctgagaagaccacagatctaccccaaggaataatcagagatggagaccaaaatctatgggtagggccggccatcccagtataatttataatggtcaaacttacatgggagccatcaaaatgcctaacaacctgaggattagctacctcagttacagaacaaccataaggtggaaagtcgtgcagccattagaaaggacacagtcagaaagtaattcacactgagaaaatactgataaaataagagcgagagaaaaaagcaacatataggcctggatatacattctaaatctaccaagaaaaagaaatcccagaagaaagtaagcaaaaaatactagcaattattaatctctgcttgatgagatgaagagggatttggattttctcttctctttttttatgttttaagaaaattctgcaagaagcagaatattaaagtatgtttaactatttttaaagcagattaagtacaaagggaacccccacccttaggggacttattggagggagttctgtgggtggagcgccaatgtcaggctctctctgcccacatttaagtctcctagttgctggttgtaggagagcctgtcggtggtctgcacagaatctagtcaccccttctttagtaataaggggccagtgctgttggggatggctttgtgtccaaagctttccttgcagatggggatggacaatgaaatgtgagtggagatggtggttgcagcttccgggaaaattcattgatgggaatttattcaattgacagaagtccccttttcctttcctttccctccctttttcctgcctggaatgcagctctagtgggctgaaactccagtagccatcgtaccatcagagcggacctttagtgataaagtca

SEQ ID NO: 90169 - DNA, 1333 bp, Homo sapiens
tttacaaactttcaggggaaggagggtggctggctgcacctgcagctgagaggccgaggtgatttactctgccaggaaatgtctgtctctcaggagggatcaaccaggccctcctccttgaagctgggatttactgaggcttctgtttcccagggagctgcatggtggctttgtgggtgctggggtgagggtgagggtacaaccaaggtggaaggagccatggggattcacatgcagtaaagagcaaacctagacggtgtggtcgggatgaagaggttaaacttaagtgtcactggaggcctaggactgattcctgccccaccacggccaggcttgtgtgaccctgggagcttgacacatagtaggggctcaggaaagttgagttctcccccagctcatctgaggtctccctttccctgccctggccacttcttccaggtccccccccaactccttgccctaggctttcctccaagccccctgcctgcatacgtctgtctgtcctcagggagagcagaagcctgcccgtctcaggttccgtcttcactgcaattcaggagagagagcactgggggcccatgagcaggactggcctggccactgcatgccaggacaccaggaacgggtgcttcatatgtccagggatagttaaaggggcagctacttccctcctgatgagtttggaaagggctcttggcagagtaaagggactctggggcctgaatttctattatgatctaagggatcagcaaaattcttgagcctatctgatttctaataaggaatgagggagcctggtctcattagggcaggtgacccagggtcttactgggcaggggcaagggctggggttggatccttgtgagtagtgggtaggaggcagctcccctccctctgaagggaactccagkctacctgggcctctcaggttgggaccccaagacaacctcgtccattctcagagttgctattgcatcctgtagggtgcatgtcgagaggagggggactcgagtcagatctcccagaacccagtggggacatcagagaccttggctggtcctggcaaatcccggtagcctctctgtctcctgagcctgagtgctcttacctgtaaagtgggagtggtgatctctccttcacttggctattttctgagataagtaatgtgaggaaagcccttgtacagtgtgtgacacatattaggtcttccacagaggatcgctgtgatcatgtggaaacatattgcagctccatgaggggtaaagttaggcaaagtgtggatttgagagctggctgctggatttagtctctgcctagcctgtaccagcattgt

SEQ ID NO: 90170 - DNA, 575 bp, Homo sapiens
cactgtccttcattgtctaatgttcagtgtcttggtcttggcacgttattcttgaacctcaatttccttatccataaaaggagaataatagcaataactatctgaccccaccagaattgttgtgagattgaatgagataatctaagtcaataattgggacaattattgggacaacaatgctcagtctacaataagtgctaaatatatattattatatcactactaaaacagctattattcaataacaatgactgaggaaatacataatgaacaaagactgccatgaaggagtcatttgacagataagactcagccacagcatagagaggttaagaaacttgtccaagactatataactattaaatagtaagcagtggarcaaggatttgaattcagatcatctcgttccagagtcagttttctcgttcctggtcacaatgtatgattgcaagagcaaatttcctttatcatccagataattccatttagaagacagggaaccgagtgatcccaggagtctgaagagaaaagccatctagcagctctggtagctgtccatggtgctaaacccatat

SEQ ID NO: 90171 - DNA, 754 bp, Homo sapiens
ccatgaaatactatgcagccataaaaagtgaagagttcatgtcctttgtagggacatgtatgaaactggaaaccatcattctcagcaaactatcgcaaggacaaaaaaccaaacaccacatgttctcactcataggtgggaattgaacaatgggaacacatggacacaggaaggggaacatcacgcttcggggactgttgtgaggtggggggaagcaggagggatagcattaggagatatatgtaatgctaaatgacgagttaatgggtgcagcacaccaacatggcacacatatacatatgtaacaaacctgcacattgtgcacatgtaccctaaaatttaaaatataataataataaaattaaaaaaaataggcttcccaagaggctaagatttgctgcaactccagtttgtggtcaaatgcagaccagcagagtacagacggcattgttggcccaggagaaggcaacaatacagggagatgccacattttttatcaacctcctaacaattatctcaatgaatattcaaattggtgattgaagtactygtttctccaagcaggtgataggcaaaattggaaaagttgccttgcttgtataaataattgtgtgctcagattgaatttgagggtatacagatgcagcctccagtggaaaatattctaagaacaggatgtgggtagaggatgcaattatggaacttcatatcttcaccacctttctcttctttcttcctattttgactagtcttg

SEQ ID NO: 90172 - DNA, 754 bp, Homo sapiens
ccatgaaatactatgcagccataaaaagtgaagagttcatgtcctttgtagggacatgtatgaaactggaaaccatcattctcagcaaactatcgcaaggacaaaaaaccaaacaccacatgttctcactcataggtgggaattgaacaatgggaacacatggacacaggaaggggaacatcacgcttcggggactgttgtgaggtggggggaagcaggagggatagcattaggagatatatgtaatgctaaatgacgagttaatgggtgcagcacaccaacatggcacacatatacatatgtaacaaacctgcacattgtgcacatgtaccctaaaatttaaaatataataataataaaattaaaaaaaataggcttcccaagaggctaagatttgctgcaactccagtttgtggtcaaatgcagaccagcagagtacagacggcattgttggcccaggagaaggcaacaatacagggagatgccacattttttatcaacctcctaacaattatctcaatgaatattcaaattggtgattgaagtacttgtttctccaagcaggtgataggcaaaattggaaaagttgccttgcttgtataaataattgtgtgctcagattgaatttgagggtatacagrtgcagcctccagtggaaaatattctaagaacaggatgtgggtagaggatgcaattatggaacttcatatcttcaccacctttctcttctttcttcctattttgactagtcttg

SEQ ID NO: 90173 - DNA, 742 bp, Homo sapiens
gaggtttggggacatcaaatcagcctccactcccaacatccccaagccccccagtcactgctcatcagcagcacaagtggggcatcgggaagactgcccgtttcttcccccattccctctcagggaacctacgctggctgayaatgaactgctccatgctctctttctgctggttgtcgatcttcagatgctcagctgtgctctgaaggagccactcctgtttggatactttggttctcagttctagaagttccctttctgtcgattctctctggataagaggaacagactcttactgaacaggcagaaggcataaagcaccccgtgctttgtggctctttccagttcaaagaaggattctacaatcttctcaactcccctgaactggatttcctccttcacagcctcgaatacctccagctgaggacagtttaggatgaggccattaggtaggaatattgagactctggaattccccatgcagactagcacaggcctacacacctgtagcttaagagaaccttgcttcaggctggtataaaactcccagttctgaagaggaccttgctttagtcctgatatcagttctgtcactctcccttcacaggtaagattgagagttcagaaatgttctgttgggagagagagatctggactcaggaaagtttgcaagtttgtaaatatttgtgccaatatgaagatagcaaaacaccctctccctggaattagcatagttggatcc

SEQ ID NO: 90174 - DNA, 742 bp, Homo sapiens
gaggtttggggacatcaaatcagcctccactcccaacatccccaagccccccagtcactgctcatcagcagcacaagtggggcatcgggaagactgcccgtttcttcccccattccctctcagggaacctacgctggctgacratgaactgctccatgctctctttctgctggttgtcgatcttcagatgctcagctgtgctctgaaggagccactcctgtttggatactttggttctcagttctagaagttccctttctgtcgattctctctggataagaggaacagactcttactgaacaggcagaaggcataaagcaccccgtgctttgtggctctttccagttcaaagaaggattctacaatcttctcaactcccctgaactggatttcctccttcacagcctcgaatacctccagctgaggacagtttaggatgaggccattaggtaggaatattgagactctggaattccccatgcagactagcacaggcctacacacctgtagcttaagagaaccttgcttcaggctggtataaaactcccagttctgaagaggaccttgctttagtcctgatatcagttctgtcactctcccttcacaggtaagattgagagttcagaaatgttctgttgggagagagagatctggactcaggaaagtttgcaagtttgtaaatatttgtgccaatatgaagatagcaaaacaccctctccctggaattagcatagttggatcc

SEQ ID NO: 90175 - DNA, 821 bp, Homo sapiens
tagaaactttgcccaatggacaagactcctggaactgcaatccccccagcctggggatattgttcactctgaaacctttacgggtccaaaagtgaagaaaggggcagccaaaaaggagagaaaactttcaatgacacagctgctggagctgatacycgccctgcagagcttagggctggaaaacagggctctactgttctctcttgatgactcacatgtttttttaggcagggaagttaagccctggttctccacacactcactaagtaaatggtcagagaaattctctgtggcacatccactgtcaggtcagcctccaggcccttctccaaagtgtggcctccctacgggctctaccctgtcaagggtcagtccagggctcagctaagttcaacagggaacccaaaaggctcttgccaagtgggggcttcatggcttgagagggtaagacaaggtgaaagaggtatggacacaaataaatgatttctttcctccagcagacatattccctcccctcccctcctggtaaacgtcccccgttcactcatagccttgtttatttagcctcatccccactctcatcccaattcccagccaccacaaaagccagagttttggatcagaactttagagttgaaagggagagtttaaaaaacattaaattcaataaaccattctgcagatgagaaatgtggggctctccaaaagttgtaaaatataaccacagcagagcccaagaaagatgtgactcgcaatacaacgctcatacaccaagagactaagaaagcttggcctctttcctgtcttagctccagttctaa

SEQ ID NO: 90176 - DNA, 821 bp, Homo sapiens
tagaaactttgcccaatggacaagactcctggaactgcaatccccccagcctggggatattgttcactctgaaacctttacgggtccaaaagtgaagaaaggggcagccaaaaaggagagaaaactttcaatgacacagctgctggagctgatactygccctgcagagcttagggctggaaaacagggctctactgttctctcttgatgactcacatgtttttttaggcagggaagttaagccctggttctccacacactcactaagtaaatggtcagagaaattctctgtggcacatccactgtcaggtcagcctccaggcccttctccaaagtgtggcctccctacgggctctaccctgtcaagggtcagtccagggctcagctaagttcaacagggaacccaaaaggctcttgccaagtgggggcttcatggcttgagagggtaagacaaggtgaaagaggtatggacacaaataaatgatttctttcctccagcagacatattccctcccctcccctcctggtaaacgtcccccgttcactcatagccttgtttatttagcctcatccccactctcatcccaattcccagccaccacaaaagccagagttttggatcagaactttagagttgaaagggagagtttaaaaaacattaaattcaataaaccattctgcagatgagaaatgtggggctctccaaaagttgtaaaatataaccacagcagagcccaagaaagatgtgactcgcaatacaacgctcatacaccaagagactaagaaagcttggcctctttcctgtcttagctccagttctaa

SEQ ID NO: 90177 - DNA, 707 bp, Homo sapiens
ggatcttgctcttgctgtatcaccccagttggagtgcagtggcaccatcatggctcactgcagcctcaacctcccgggctcaaaggatcttcccagcttggcctccagagtagctggaaccacaggcatgcaccttacaccttgctaattaaaaaaaaaaaaaaaaatttgtagagacagggtctcactacattacccaggctggtcttgaattcctgggctcaagcgcccctcctgccttggcctcccaaagtgctgagattacaagtgtgagccaccacacccgacaacagctattgtttaccaggcacctacaatgacaccttctctgtagctcttcccactgtcccccaagcagagacgagctggcacctctgcctacagtgcattctatttcctttcattccttcacagtgtattgtgatgtattggtgtctgtgtctccactgtgcaagtacaagaagtatgcgaaggaaaaattggccaggagtagtggcacatgttgataatcccagctgcttgggaggctgaggtgggaggatcacctgagtgagccccaraggttggggctatggtgagctgcgatcacaccagtgcagtccatcctgggcaaagcaagactctatctcaaaaaaataaaaaataaaaaataaaaataaagaattatgtgaaacacaaaaagaaaaacctcaacaaatgtttgttca

SEQ ID NO: 90178 - DNA, 745 bp, Homo sapiens
cattatttttttcactctgcaggaaaaaattggaccacaaacacaaaattggacttacaaacacatcgttactgggtataaggttggagaagatacaataatcatttcagcaccaagcttccgctgtgattttacagtgatttcacctttctcccaaagcttctagacaacagtcataccttaggcccacaggctccaaaggtagccaattaaaatcctggtaagcagaagagtctggcctcttagtcaaataatgaatcagcatctcaaagatgagtgggagaggtgatctcccatgctacttctcagttgggcagtgaattgtaggtaataagcacatggctcccaaggcaggctkattgctaaaccccttctgctgctcacaaactctaggaccttggacaaaggtacttaacaactttgtgcctccatttcttcatctgtaaaatggaattaaagctgtattctcaccccaaattaaatgtggcacacttagaagagtgttgctaactgtactattgtttgcaaaggtgcatataatcaagaaagaagaaactggcagatgctctggataatgtgaagaacaaacacacccaatggactaacttttaacaatgctcaaattctggggtatcagtgtgcacatttctcacatgacagtcataaagcaggctggcttttataatgcctgcgatttaggctagggatgatagaatcattctttaattaacctgctgctaccaga

SEQ ID NO: 90179 - DNA, 1391 bp, Homo sapiens
ccctttttgtcttccattattattgtaaagttcctggggccttctcagaagcagagcagatgccagtgtcatgcttcctgtacagcctatggaacccagagccaattaaacctcttttctttataaattacccagtctcaggtatctttctttctctcttttatttttttttttttttgatacagagtctcactctgttgcccaggctggagtgcagtggcgtgatctcagcgcactgcaaccttcacctcctgggttcaagtgattctcctgcttcagcctcccgagtagctgggattacagtcgtgtgccccatgccaggctaatttttgtatatttagtagagatgggatttcaccaagttggacaggctggtctcaaacccctgacctcaggtgatccacctgcttcagcatcccaaagtgctgggattacaggcataagccaccatgcctgggcctcaggtatttctttatagcagtatgagaatgtactaatacagaaggcttaagtgacaaagagttttaagttttcaagtgtataaaaatattcttccttcatcttcatagagagaaaatttaaaatggaactgatacagaaactgtatattttcaaatacacttagttaaaaaagaaattcacaatagtcaagaagtggaagcaacccacatgtttatagacagatgaatggttaaacaaaatgtggtatatatgtaaaatggaatattatatgggaaataggagggaaatcaagtcacatgctacaacatgaatgatccttaagaacattatataaaatgaaataagccagtcaccaaaaaaaccagtactgcatggttccatgcagtagtgcagcatctaaagtagtcaatttcataaaaacagaaaggagaatggtagttaccaagagagaaatgaggggacaggggaatggggagttgtttaatgtgtatggagttttagttctgcaagatgaaaaaacttctgaagatctattttataacaatgcaaatatgcttcatactactgaactgtacacttaagaatggttaagatgctaaattttacattaattttttataacaattwaaaaaaaaagcaaaacctaaggtatgtttctgacttatttacatttaattcatcactcatttggagagaaatcagaggtccatgaaaccctggccttcactcctttaattagcctctagctctttcttcttagacacaaaatcttctattttgacaggattaagtgaacaggaatacatgaaaggaaaggtttaaattttccttgaaattgagactctgactcccagaaggccaacgaggttctaaacttgaaatgtgcacttgacaatcactattaataactaagatatacctccagacaa

SEQ ID NO: 90180 - DNA, 1614 bp, Homo sapiens
agtgtagcttaactggcatttggatataagaatctggaagactgaagagaagtcttagctaaagatgtatgtttgggagtcatcactcaataaatgggatttaaaatcctccatcatttctcaagccattcttctctccactctgtaagtctaatcattcacctatcttcattgattctacttgcaaattagttctctaatcttttccacagctgctgtcatctcttatattagtagcctcaaattgtctcaccatattcagttttacccacttccaaaacattctctacactgcagccagaattatccttactatatcagttttctagggctgctgtaacaaagtattagaaactgagtggcttaaataactgcattctattgtctcccagttctggaatctatagtttgagatcaatgtgttggcagaactatgctacctctgaaggtactagggaagaatctattccaggcctctctgctaacttctggtagttccgtgatctgtggaaacataaccccagtcttcacatagcattcttcctgtgtgaatttmtatctttccgcatgatatttttaaaaataaggacacaagtcttattggtttaggggctcactctgctacagtatgacctcatcttactaatcttactcatcctactacatcttacatctgcaataacctaatttccaaataagttcacatcctgaggtaacaggattgatacttcaacataaaaattatggagggacataattcaaccactatattttttaaatgttaataggatcctgtcatttcctcttaaaatggttccccactgtcttcaggataatatccaaaatgtcttaacatggtttactaagtgcttcatattctggtccctaggtcctctcttgtttcatgtcttgcagctctccttcttcctaccctactctcagaaatactcagcaataaatgtaaaattacaattgcaatatgtattttaataacctgatgccagtacagactctaatagtggatttgatctattcaggaagatcagaaggtgcttcttcaagggaatgatgattgatctaagaggtaaaagatctaaataggtggaaacagaagagaagagcatcccagacagaagacgcagtttgtcctctatgtttgaaggatgaaccaaaggaagataagagcaacatggtatgagatgaggttggagtggcagggaggtccagatgaagcagagacctgtgggccatattcagaggagtttagagatggcacagaagaatcccggagactcttacccagggaaataaggcaataaaatctgcatttcaaaaaatcaccatggtaactgtagaggagtgaagaacagagtggaggaggcaaatgtggatgggggtagcctagtttttgcagaaatctaggtaagcaagggacagtggtgtcctatatgaggaaatgatctatctctaagtagattttagatacattaggaggtaaaaactagaggcttggaaatggattttttataaggagtaagggagaagaagctgtcaagggtgacttccagaattttgacttaatacagggaaggctgcaaagtcattcattaaaat

SEQ ID NO: 90181 - DNA, 968 bp, Homo sapiens
tttttgacttaagaaactgagtgaatggcaataccatttataggaacgaggaggaatgtagaacagatgtgaagaaaaaaattcagttttgagcctgtacctaattctgataattattatacatccacatggaaatatcaagcaggtaatggaatatacaagtcagaggctcatggtacgagtcagggctggaggtataaagttatacagaaggagttaaagcaatgtaattagattaggtcattcaggaataaaatgcagatagagaagaaaaagagctcaagctctttagcactccagcaattagagattggccggaggtaaaaaaaaaaaaaaaaaaaaaggaaaccaaaaagtttgaaaataaccagtgagacagagggaaagcaggagggacaggcacagttctgaatgccttactatcttatttcatttaatcctatgagcccaataatattctcaataaaaaaaaaaaggaggaaatagtcaagttggacagacggtattgaaaagcagagtcagccaaaaacacagaacaatgtgttgacaatgttgaccactgatgatgtcaacaagggtatttcagtgttgaaacaataacttattgtttaaacagaaactatatttacttacaaattagaaaacaccaaatgactattaaggagaaaaataaaatgaactaatcaatggtggtattcaaacagcattataacatttttctcaaccttttcttttttyattattgtccctctaaggagcctggttaagacaattttatcctacttataccccctcccacatgaaatttgatactgcagttaaactcgttatctacttaggtactatggcccttcggatggccacaaacatttataatatcaaaagccttttgaccttcccccaccccaacctcctcaacatgaattttcacatcccaggggatgagacaatatctgtaattataatta

SEQ ID NO: 90182 - DNA, 968 bp, Homo sapiens
tttttgacttaagaaactgagtgaatggcaataccatttataggaacgaggaggaatgtagaacagatgtgaagaaaaaaattcagttttgagcctgtacctaattctgataattattatacatccacatggaaatatcaagcaggtaatggaatatacaagtcagaggctcatggtacgagtcagggctggaggtataaagttatacagaaggagttaaagcaatgtaattagattaggtcattcaggaataaaatgcagatagagaagaaaaagagctcaagctctttagcactccagcaattagagattggccggaggtaaaaaaaaaaaaaaaaaaaaaggaaaccaaaaagtttgaaaataaccagtgagacagagggaaagcaggagggacaggcacagttctgaatgccttactatcttatttcatttaatcctatgagcccaataatattctcaataaaaaaaaaaaggaggaaatagtcaagttggacagacggtattgaaaagcagagtcagccaaaaacacagaacaatgtgttgacaatgttgaccactgatgatgtcaacaagggtatttcagtgttgaaacaataacttattgtttaaacagaaactatatttacttacaaattagaaaacaccaaatgactattaaggagaaaaataaaatgaactaatcaatggtggtattcaaacagcattataacatttttctcaaccttttcttttttcwttattgtccctctaaggagcctggttaagacaattttatcctacttataccccctcccacatgaaatttgatactgcagttaaactcgttatctacttaggtactatggcccttcggatggccacaaacatttataatatcaaaagccttttgaccttcccccaccccaacctcctcaacatgaattttcacatcccaggggatgagacaatatctgtaattataatta

SEQ ID NO: 90183 - DNA, 573 bp, Homo sapiens
tgagtacaccagccttcccgcaccttgatgtgttcaacccagaagctctctgaaccccatcattttagggtttttatggtggtgttatttcataggcacagttgattaaatcactgatccttggtgattgactcaatctccagcccatctcccctccctggaggcagtggggaaagctggacattccaaccttctaatcatgccttggtctttctggccaccagcccccatcctgaaactgtctaggagctcccagccatcagtcaactcattagcctacaaaagacactcttatcactycagaaattccaaaggctgtaggagctcttgtttcagaatgtgaggacagagaccaaacatgtattttcaattgtatcataccatgtcatggaaagagatagtggagagcatgaatgacttcagtcctaaagccactgtcagtcctatgagccaccttagctcataaggtagagcatgtaaccagcaattaggatgagcaagttgaattttaagtcctgatagtgtccctggagcacacttctggaatggctgggactgagcttgtgctagtat

SEQ ID NO: 90184 - DNA, 655 bp, Homo sapiens
aacttgttcaatgtgccctgcccttcctattcattatctctacaacctccttctaaaataagtatcaattaaaagtattttccaaatgagcaaaaggaggcccggagaggttaaataattcatcaggagacacgcagctggagatgaacaggaggaggatttgaatgggaagccatctcagtgtgctctctctactacctcccatgagcaaacacagtgacaagtgaactcaatgaatatcattttccggtgattctgtgacctttgagtacctgcatcctcctaccttaaccaactttgccagcctccttcactgccctacctgatcgacagtaatttccagctctcttccttcccccatgctcagcccaacacccagccctggctttctcaccttcctgggaccycctgcgttccacggtagtgaacagagacacacgacagccattccgtggatctacagtgactgttctcctggacacagagccaacgtggctactgaaggaaagaggccagtcctaagttcaggatctgtgacggcctggaaaatgtactctgtccccccacaacctcccgctacaacctccccctaaaagaaaaactttctacaggtgatgttgagattgccacaggctttggtcctcacagactgcaa

SEQ ID NO: 90185 - DNA, 1196 bp, Homo sapiens
ctgcacagcgaggacatgtgggtttcattcttgtattcttgtaaagttaacaatacaacttatggggaatttaatagctggaaagttgtatcagtcctctataagccctgggtgaatctttgagtagcaaatgaataaaacagtatggcaaagggagtctaatcactagttaagcccttgctaaaaytgccaactcactaagaaggtagtctttttacatttttaaaggacttgttaacaagtgagctgatgatacattggccctgggggaggacatcagtttcttctttgcttgtgtgaaagagttctataaaaatgaaatgcatgaccgacaacttcttactttttcaaacagaggtattattctgcagtggtatcactggggcatagcaatggcaggaagagcttaggactcggagtcctaaaccactaagctcgtagctaggatgatcacaaaaaacaggtaaaaaacattgttaacaatggtcttcaaccttgatgtccagcttctggtctgtacagggggagttccatgatctactcttcccctggagtcacacagtccactggggagagatgcccaaggcagaccttccctccccaactcttcaggctctccaagtcctctctccaagtttgttttgcttacgcctgtttcctttcatttaccactttccctttcaggccagggtcaaaggaacctaatgtgaaaatgtttcagtcttttgatgaagtattccagaacacagaactccttatcatacagaacatcaagttcctttaagatatgggttgctatctccaattcattttgggaagaggtgaggtattaaatatttatattaattaaatagaattatcctaaaataacataagttggcttacccctgggcaggaagtctcatttacaagtgagcacacccacctgttgatacccagggccatcatgtctgccaagcaaaataaactccttcatgaacagacaggagccacgctgttccctctgtgcccagtcaccagaacaaggctcttaaatcccaaagatcgatcaggcttttttttttttttttttttttgacagttttgcttttgtcacccaggctggaatgcaaatggtgcgatcacagctcactgtaacctctgcctcctgggttcaatcgattctcctgcctcagtctcccgagtagcggattaca

SEQ ID NO: 90186 - DNA, 2515 bp, Homo sapiens
catagtgccaagagcgctgatgaaatacaaagcagcataaagagctagagagcagtggtggctgctgtctggacagggggatcaggacaggcctctctgagagatgatgttttggcagaaatttgcatgaagtgaggcagtgaactgtgcaattgtcaggcagggggaactgcaagtgcaaaggccctgagacagaaatgtgcctggtgtgttcmaggaccagccagagggccagagggttgaagttggtaagtgaggtgagagtggtagggaacagggtgggagagggagccagaggccagatcctatagggctttgagggccataaaaaggactggattttattctgagtgaagaggcaacccatttgagagctttgtgcaggaaaaggacatgaatctcataaagacttctttgcaagaggcttttgaaaagtatttttattttggatacttttttgctgatgtttcctccctggtcccaaagaagggatgtggctgtgtgtggcatctatgaagtggagatcaattcaggaagagtaaatagaaaaagaagaaaacacaatgggtagagaaaggaggaagagaagaaaagctggaggttggtcctgtggcaggcaagatggcccaagtagcatctttaccaagaatcttcaagtagactttgtgcctccagtgaggaatgatagggctttctgccagactttcttttacaagagccaatgatctcagaccctcccctctccttcactcctcataggaccctcacagcccctcccactgctccagcaattctgactcagccttgtagtggaagcctgcaggtctcaggtttggtttcttggcaggggtcaggatcagataaaaccgaatggcttttctgaattgcccaacctctatctaatgggaaaagaagtccctaaatcacaaaatgcatctctgaagctttgaaagcctctaaaaactccaatgcttgttgctacgtcagagcagatatgaggctcttaaattgagcagctgctgaaagatgaatcactatgaatttggcaggggaatggaaagatcacgagcagctcagcaatacagtggccccatctagagatggtcacccaggactacatggaatgagcacccatggttccaggggttgagcctggggttctggtctgatatcgtcctgcttgtttttccaggtcactgaagcaggagctgtcaccaggtataatcagccagcactcaccgggacatgaaggaacgcctttgcttctgtcttcctcatggtatttccctccaggggcaggcgctcaatcttcccagtctgggcaaagagtaaatgggtcccaggaggcaaggggatcacggcggtaggcaccgcaggtccttggtgaatcgggggagccactgtactcagacctgcatggcagagggggtcagtgagggaggcccgtgtgcaccaggaacacacagatgcacacacacacacccccacacacatgcacgcatgcacacacatacacacacccacacatcaggtcacatcaccttcatggcaccacaaactgccacagccacacaatgcccattttatagctgaaagcaccagaattagaaagccctcagtcaatcaaagagcactgatgaagaaggtaatacacagcattaaaagtcacgtgaaaaaaaatggcttggcctccctcttttttttgagacggagtcttgctctgtcacccaggccagagtgcaatggtgcgatcttggctcactgcaacctctgcctgcctggttcaagagattcttgtgcctcagcctcctgagtaactgggattacaggcatgcaccaccatacccagttaatttttgtatttttagcagagatggggtttcaccatgttggccaggctggtctcgaactcctgacctcaagtggtctgcccacctaggtctcccaaagtgctgggattacaggtgtgagccactgtgcccggccggcctccctcttaatagaaaagctttggctacccatgctctgctttaggcactggtgctagaggaaggaaccaaataagagcagcaccagcagcaccagcggtagcacaacagcgaaaacagcatccctgaactccctgcccacagggagccaggttctagtgcaaactattgagcttttccatgctggaggagcctgtcagaatgagttgccccatacagtgcactctgtcccagtgccacagggatgggagagcctggggcctgacaagcaagaacatgacgtttatgggcttccaagaacaaaatcatggccaggggctccttttccctcagaatcaggcttgccttcctatctcctgacctcaacccctcgccgggctccttgattcacttgatgagacaatgtcccaggagggacacacaactgtgctgcaaagcaaggagggctaagagggctgattgggtgtctggagacctgagccctgtcctggcccctctactcactcgctgtgtgcacagggcatgca

SEQ ID NO: 90187 - DNA, 794 bp, Homo sapiens
tgcaaaactgctttcttcttttgtccctccagccctagataaggcactcactttctacagttgctaatctcttgcttcatctcctcttcactgttttagttcttcttataccttaaaactaattccctacattaaattttctctattgaagtactttgcaygtgttttgctttcctggctgcacttgactggtgagtttctctatcccttgtcttctataatcatatttctatagctctgtgtgtatgtgggtgtgtgtttaatttattgaaagcatcctgtactataactatttgttccctttatagtattaactagaaatttctatctataactacttacattaataacagtttatgcccttttacctgtttattgtctgccttccctgatagcctgtaagctctatgaagtcaagcatttcacatattttattcattgatgtatttgcaacactcaatagatgactgacttgcgggtaatcatattaaataaatgagtgaaaacattaatgaatccccattttacatataaacacactcaagcctaaagaggtgaaataatgtttagatcatctgattttgtgctgccaggtagctcagtgaactgcctcctttatgccacctgctttttttctatggatttagaattgtggcccagatttcctatggtagcagccatcttatttcaccttggatctcccaatcccattgtccctgtttctccagcaccactgtgtacctgctctaaacatagcctgctgttgtgtcatccctgtcatactaggctgttta

SEQ ID NO: 90188 - DNA, 1292 bp, Homo sapiens
cctgggagcaggataaatggcagcctattcctgtcacattattcttctagcagatgggatttcatccagatagtattttttttcctaagcaagggaaaaaattcctacttttgttcataccataggtgcaatttacactaaattggaaaagaacagggatgcctcagccttttatttttaaaaagttttaattgaaaaataacaattatcatatatatttattgcatgcaactggttgttttgaagtgtgtatacattgtgaaatggctaaattgagctaaattaacatatgcattacctcaaatacttatcatttgtgtggtgagagcacttaaaatctactttcagcgatgttcaagaatacaatacattgtcagtagctatagtcatcacgttgtataatagatctcttgaacttattattcctaactgaaatttgtatgctttgactaacatcaaagagagatgttgggcagatagtgttaagccttattttagacaccttgaaatgactgaaaacaatagaagctatgtgggtagaaagctaactttcaactttccctaatcctgagaattgtagacaaagtctaatgaattaatagagacccaagtcattccagactaggaacacatgggaaattgccaatggatagttggatcctctcattacagaaacctaactctgagatagtcattgaaatgtctaatcaccaatctgatttttttttaaataagaagactttaaaacagttctacaaaatctatatgaggttgtgtgcacagagtttattgtagggatgcygtcagtaatagtacctataagggagtgagggaggcaggatggggcagaaggagaagttgaactataattcagtcacaacagagactttatctgatcccttgggaggctctgaacctgatatgacccttcagagctttccaaaattgagataagggggtgtgccttgtaccactcgatagaccaatcattggatatgagctgccaaagaaagtgggtataaccttgtgtaaggcagctcccttaggctgaaggcaaatcctggggagggactcagctgcagttcttccccaggcagtgctcccggtagctgtgagagtaagctggtagcttgatcctcattggggaccttggcagtgtgcaacagcatccactccataatcaaatgccaaaatgaataccaaacaaaggcattctggttttgaaagtagcatgcagttagcccagaaaatacagtagtatgaaattcgatggagtagttccctggctaaat

SEQ ID NO: 90189 - DNA, 1477 bp, Homo sapiens
gtgaaaaaaaatgttaaaccaaaaactaccttaggaaaaaatacttaagtaaaaagaaataacattttttaaggacaaagaaatacataatacatttcacgcattttttaaaatttattttgagatggagtcttgatctgtcacccattctggagtgcagtggcacgatgttggctcactgtaacctctgcctcccaggctcaagcaattctcctgcctcagcctcccgagtagctgggattacaggcgcgtgctatcacatcaggctaatttttagtattttcagtaaaggcgaggtttcaccacgttggccaggctggtctcgaactcctgacctcaagtgatccttgcgcctcagcctcccaaagtgctgggattacaggcatgagccactgcacccagccgtcatgcataacaaaataacagaggaatacaggagtgtatttttttcaaactaatgtaaacatagttaagttcacatgtcgtggatatttgacaggggattaggtattgcagaagggagaaatagaggcagatatagacttaaaaaagaagacagcagatgcatagaattggagaccagataattagaaatgcctcaaggaaaaatgaccactttccccatttttcctactcctgcttacctggtttccagcatctctttgatccagtttccctgagttgttagctacttctgccaagcccaaagagctataggcctctgtgagcccatcctgtccctcataggctgggcaatgattcattcccatcggtttcaacataccttggggtacttacttctttccttgggaagacttgtttctccttcatctatttctgatgagcctgtgataactgaatttggcctaatctttcaaatctgtgtatataattcatgtgggacaatgaataagaaaaaatatcacattttcttcttataagattttaaaaaatcattgatacacacttttggcsattatatttgacaaaattgctaaagatatatttaaccaaaaacactcttatagcatatgaaatagtatatttgatttatgtattaacatcattagcactttcaattgatcatgaggtcctgtatgaaatggctatgtattacataaacttgtgtttttagggtctagcataaggcctggaataaaggaggcactgaatatagtttttaagttaatgaagttacagaaacacgaataccacatgatctcacttgtggaatgtatgtaggtggaatctaaaaagttgaactcatagaagcatagagtaaaatggaagttaccaggggctgggggttggggtgtgaatgggattggggagatgctggacaaaggatacaaaatttctgttagaagaaattaacccaagagctctattgtacaatatggtgactataattaatgacaatatatttcatatttgaaaattgagaaagagtagattttaagtgttctcaccaaaaaaa

SEQ ID NO: 90190 - DNA, 1130 bp, Homo sapiens
cattcatactgccaatgctgttgcctacgttcagcagacaagtagaaagggttccagaaaactggcaaagacacgttgaaaaatcctagtaaatattttatttacactctgagccagtgccaaggaattttttaagaaaatacatacaatatcaagttttcatgtatactcagataataggattatacttgagctgtggaaatcttttcctggaattaaattaagcaagaactagttttgattgatccagatatgacagttgctgagaagttacatgcagaaagccttgcagagggagtcagaagcttcagccaagctgtatctatcttgccatgtcaaccccaaaaggagcaaaggaattgaaaagggcctgcagaagtattggagtgactttatcctaacagaatctgtgctccttctttcacctacatggcaaggttttcccctgctatcatgaaatcttcttgggtaattggagtaccaagagctaaaaaagagttgagcaaatcaaacagcagataacctcttacaagcatagacattcagaaatgtctgaaaagatacaggargagtttgcatccctaaaaacacgcatttttttaacatttaaaaaagaaaaatcttaaagcaatgtaggatggaagagtacctgtcaaaagctaagaaatctgacttcctagtggtggtgggatttgtccaaagcagttgctcttccccaggcaagaaatcatcagcatgacacagagtgagtacccacaggcccttctgatactggtcatttggccaattttgtggaagttggagctcggctctgagagccaatatcaagacagcaacctggactcttgttcaccacctttcctacagaagctggagaaactgaattagagagggagagacaatctgcagaatctcatgcacttgtcccaagaagggttactgaagactctactggcttggtggttcaacatggaggtgttttggccaatgcttgcaaattatgatgctctatctaattgtctggtcaactctgtgttccctgccttgcatttcagttgcttgactgactccatcttgaagaatctcttgggatttagtggtaggcagtggctccacaacttcaaaaagct

SEQ ID NO: 90191 - DNA, 1842 bp, Homo sapiens
cttctgttcttgaagggccaaattgtcttttttattagccatctctatacccggctgttgtctttactgtctcataaaattagcctgacagccaaggaaagcgaaggcagacgcatggcctgaatttattagcctgaatctgattccccaaacagcaacctggaagaaattctgcctatcactcactcagatttcttttttctcactcactcagtcgtcagcagaaaatgccgtattgttgcagaagggaagctcacgcctggggcagcctcctcttctataaaacgtgtatatgtgaggggtaggaggtgggcagagggtggactagatcagtgcttcccaaaatctgtctgaacctcaatcagctgtttaaaaatacggattcctgggtcccgtctctaatgtgctaagtgagaggctattcaggtagaacccagaaatctgaatttttgaaagctccccttgatggttttgctaatcagtcaagattgggcatcatggatctaccaggttactttggtctggaacattgtagattctggaagcccagctcctcccctaaaccatagttgtcagtcccatctctgtataaaaactagaaatcattttctaacaacccagagaagctctacactcaaaggagtttgtttgcctaaaatggcttcaaaattttctcctccccacggatcagttggcatcagggacaacaaacacaccatggccgtgtctatccgaggtgtggcctgaagcttaggagcactggcatcacctgggaacttgttagaaatgctgattctggggccccattccacacctcctgaatcacaatctccacttgaccaggatccctgggcgacccgaacatggtagacccatsatggccaatcttgactgattagcaaaaccatcaaggggagctttcaaaaattcagatttctgggttctacctaaatagcctctcacttagcatattagagacgggacccaggaatctgtatttttaaaaagctgattgaggttcagacagattttgggaagcactgatctagtccaccctctgcccacctcctgcccctcacacacacacacagtctgagacagtgctggtgtcgattactgcttctcaactgggctgcgtgtgagaatcatctggagagtttttaaaactactgatgcttgaatcccaagcccggggatcagggaggattttatattccccaggtgactcttaacgagcagcaaagcaacaacaggataaatggtttaaaattaaaaggcaaatgagctttggggaaggaatgtggagggggttgtggcgaggggttctgtatctcatcactgatttggctttcttccttcattaaatggataaaatcataaaacagagaaagaaacaaacatttcttccacaaacagaactggccctgaaaccctcctgaaactggcagacaggaggaaagcaaggcggaggatgctaggatatgaactgtctcactgtcatgagaccatttccagtttttcttggagcctgagcagatgaggcagcactttcggggacaggctcatctctcccctgccttggagcggggcattcccaagtcacagacactgtgcgagtacaccccatgacagggaacctctctctccctctaacgggaaagtgcttcttctgctctggctgaagcagattctctttctgtcggaagctaagtatgcattgtatagctattgggatataataaccatccattttggaaaaataacaaaaggcttttatgaaactccaattctgtgaactttgacaaaacttgattcccaattatatcaagactctcacaaacc

SEQ ID NO: 90192 - DNA, 1842 bp, Homo sapiens
cttctgttcttgaagggccaaattgtcttttttattagccatctctatacccggctgttgtctttactgtctcataaaattagcctgacagccaaggaaagcgaaggcagacgcatggcctgaatttattagcctgaatctgattccccaaacagcaacctggaagaaattctgcctatcactcactcagatttcttttttctcactcactcagtcgtcagcagaaaatgccgtattgttgcagaagggaagctcacgcctggggcagcctcctcttctataaaacgtgtatatgtgaggggtaggaggtgggcagagggtggactagatcagtgcttcccaaaatctgtctgaacctcaatcagctgtttaaaaatacggattcctgggtcccgtctctaatgtgctaagtgagaggctattcaggtagaacccagaaatctgaatttttgaaagctccccttgatggttttgctaatcagtcaagattgggcatcatggatctaccaggttactttggtctggaacattgtagattctggaagcccagctcctcccctaaaccatagttgtcagtcccatctctgtataaaaactagaaatcattttctaacaacccagagaagctctacactcaaaggagtttgtttgcctaaaatggcttcaaaattttctcctccccacggatcagttggcatcagggacaacaaacacaccatggccgtgtctatccgaggtgtggcctgaagcttaggagcactggcatcacctgggaacttgttagaaatgctgattctggggccccattccacacctcctgaatcacaatctccacttgaccaggatccctgggcgacccgaacatggtagacccatcatggccaatcttgactgattagcaaaaccatcaaggggagctttcaaaaattcagatttctgggttctacctaaatagcctctcacttagcayattagagacgggacccaggaatctgtatttttaaaaagctgattgaggttcagacagattttgggaagcactgatctagtccaccctctgcccacctcctgcccctcacacacacacacagtctgagacagtgctggtgtcgattactgcttctcaactgggctgcgtgtgagaatcatctggagagtttttaaaactactgatgcttgaatcccaagcccggggatcagggaggattttatattccccaggtgactcttaacgagcagcaaagcaacaacaggataaatggtttaaaattaaaaggcaaatgagctttggggaaggaatgtggagggggttgtggcgaggggttctgtatctcatcactgatttggctttcttccttcattaaatggataaaatcataaaacagagaaagaaacaaacatttcttccacaaacagaactggccctgaaaccctcctgaaactggcagacaggaggaaagcaaggcggaggatgctaggatatgaactgtctcactgtcatgagaccatttccagtttttcttggagcctgagcagatgaggcagcactttcggggacaggctcatctctcccctgccttggagcggggcattcccaagtcacagacactgtgcgagtacaccccatgacagggaacctctctctccctctaacgggaaagtgcttcttctgctctggctgaagcagattctctttctgtcggaagctaagtatgcattgtatagctattgggatataataaccatccattttggaaaaataacaaaaggcttttatgaaactccaattctgtgaactttgacaaaacttgattcccaattatatcaagactctcacaaacc

SEQ ID NO: 90193 - DNA, 3130 bp, Homo sapiens
ggtcgcagtgagccgagatcacaccactgcactccggcctggactacagagcgagattccggaaaaaaaaaaaaaaaaaaaaaaagccagatattctgtcatttgcagaagcatggatgaatctagaggacattatgctaagtaaaataagccaggcacagaaagaaaaatacatattctttcttaaatgtggaatctaaaataattgaattcatagaggtagagagcacaatgacggttatgagaagatgagaggtgggggaaatgggaagatggtcaatgggagtaacttatcctgaaatacaaatcaaccattccatctgtgattagaaagattatcccaatacaaaagaaatgagtgtcagttccaatgcaatttactttgctctccatgagatctggtcatcaggatgcttaaaactatctccagcccagtggtaaaccctgaccatattcagggtatacgtataccctgccaaccatgaggagtaacatgagaagaaatcaatctctcttgctttctcatttcattaccaactgccaagctctcctctgtgccatatttcccttagactttgtccttcattgtcatgtccctatgactaagtttccttctaggattgagctcctgccaacttttattagtttccctccaagttaccagaatgcataccttctgcctaagtatagaacattttcaacaaatatgcctgatagccattgcttcccaggtttgttttatcatctacccaataatgtttgtttgtttctgttgttgttgttttctgatttgaacaaactattgctgtttatttggaatgaggacctaggttgctgactcattcgctatggtatctatacttcattctgaatatataacattcgtacttgtaaatagatctctactccaaatggcagttcaatcttagggactggatccagaacagcacctagacctaagcttatttatttgaacatttcctatcatgagccatatgtcagaaattttagtttaggaagctgtggtagctgaatgctttcctgtagcccaggactattattctctagaacttggctgagcatgagaagaaaaatagaacaagcagatgggctttgccttcgggtatggcagcacacttcattctttagagtataagcttgctgctcatgacactacggcagagcagagcctaagaggccacatagagatgaaaattgctgccttggcctcattattcaaagtctcactacccagaatacaagcttagaaaggattcttcactattttattcctattcttgcctgtcaggagatattgttgagcctgtacaccatgtgaaacatcatttaaagttctatggaggatatatgaaaatatttggaaaacagaaccactctcaacccccacaaaaaaaaactgaaaaaagaaataaaatgtttattttttctatgcaaagcaaatatgaagtctcccctctcattcaacagtatttctgcctcaaaaaataaataaaacataatcaaaacactttaaattcactctaacatgtaacaaaactgtcactggagatctcctgatttgagaaatcatagggtctgcaaaaccacagactaaatataatgctagacatttatgtaaaatatttcagcaacaatatgagttgtattattaggatgaacaatgatggccttatggttaaataagcatatctgaataccttatttctcaaacacactgaaaatatgggttctgcaaatggtatccctctttctccctaaacctagagcagtgcccaagagaacagaatacagggccaagttttatgtatttaaattctgttctcccacttaaaggttctgttactataaaaaaaaaaaacgcagtacttgttctatgcttcagttaccttctatatcataacaagataatgattgcatctattcaaggagttaccaagaaaataaaacaaatttatataagaaaacatgaaggctagtgtctgccaaatattaagtacttaatgagttattattatcataactctctctatattaatcaataaatattcatttaaacatgaagccataccagaggttatgtagtgggttaataactgtatcgctttcctatccataagggagtccttgagaaacagcagtttgagggagtgaagagtagaagaagatactaaaattagagagaaaggctaatatttaattaacacttaaaatgtgtcagaacttctgcatgcattatctgattttgccctcaaaccaactcttgtaactagcccaggtctgcacaaccaggaatggcagaacagaaattagaacaagttcttctcttatcaatgaatatgatgctcttgaggaaaagcaagaggagacagaaagaaatccggtattttaaacataggattatatagccaaaactaatttaccaagtttattatacaattgctcaaagtttcgctttgcccatataggcattatctacccttttaattctccccattgttgataaaaccataagttgaatcaaaaagaacctcactgtttgaatattatttagtaygtcaatgttttattttgtatattggtaaattatttggttattttctgtttctaatagtttttaaataattttgaattatagaatgtggtctattaatatagaatttttaaaatacattttgtgtattgaccttttaaaacaagaggaggcttccttaaagtgtcttttcactgttgttaaatataccagcacataaaatgttaatggaaatactgccttttaatgttaggtagtgacctttattataaatgaatttatctctagagtatatttttcaaagttaaaagaaaccaattaaaatgttctaacactgaagaagcaataaacctcaaaaaatatctgaatatggaatatagttcttaatttactgtctcttcacatgcaacatacccagaaggtgtgctattgacttactattgtgtttcttgataagaagcttataaagtgtctgcttaacttttccttttcaaattaacaagataatacgagcatgtaggtaagccattggcaagggatagaggatagccatttaaaaacagaaaatatatattattg

SEQ ID NO: 90194 - DNA, 3130 bp, Homo sapiens
ggtcgcagtgagccgagatcacaccactgcactccggcctggactacagagcgagattccggaaaaaaaaaaaaaaaaaaaaaaagccagatattctgtcatttgcagaagcatggatgaatctagaggacattatgctaagtaaaataagccaggcacagaaagaaaaatacatattctttcttaaatgtggaatctaaaataattgaattcatagaggtagagagcacaatgacggttatgagaagatgagaggtgggggaaatgggaagatggtcaatgggagtaacttatcctgaaatacaaatcaaccattccatctgtgattagaaagattatcccaatacaaaagaaatgagtgtcagttccaatgcaatttactttgctctccatgagatctggtcatcaggatgcttaaaactatctccagcccagtggtaaaccctgaccatattcagggtatacgtataccctgccaaccatgaggagtaacatgagaagaaatcaatctctcttgctttctcatttcattaccaactgccaagctctcctctgtgccatatttcccttagactttgtccttcattgtcatgtccctatgactaagtttccttctaggattgagctcctgccaacttttattagtttccctccaagttaccagaatgcataccttctgcctaagtatagaacattttcaacaaatatgcctgatagccattgcttcccaggtttgttttatcatctacccaataatgtttgtttgtttctgttgttgttgttttctgatttgaacaaactattgctgtttatttggaatgaggacctaggttgctgactcattcgctatggtatctatacttcattctgaatatataacattcgtacttgtaaatagatctctactccaaatggcagttcaatcttagggactggatccagaacagcacctagacctaagcttatttatttgaacatttcctatcatgagccatatgtcagaaattttagtttaggaagctgtggtagctgaatgctttcctgtagcccaggactattattctctagaacttggctgagcatgagaagaaaaatagaacaagcagatgggctttgccttcgggtatggcagcacacttcattctttagagtataagcttgctgctcatgacactacggcagagcagagcctaagaggccacatagagatgaaaattgctgccttggcctcattattcaaagtctcactacccagaatacaagcttagaaaggattcttcactattttattcctattcttgcctgtcaggagatattgttgagcctgtacaccatgtgaaacatcatttaaagttctatggaggatatatgaaaatatttggaaaacagaaccactctcaacccccacaaaaaaaaactgaaaaaagaaataaaatgtttattttttctatgcaaagcaaatatgaagtctcccctctcattcaacagtatttctgcctcaaaaaataaataaaacataatcaaaacactttaaattcactctaacatgtaacaaaactgtcactggagatctcctgatttgagaaatcatagggtctgcaaaaccacagactaaatataatgctagacatttatgtaaaatatttcagcaacaatatgagttgtattattaggatgaacaatgatggccttatggttaaataagcatatctgaataccttatttctcaaacacactgaaaatatgggttctgcaaatggtatccctctttctccctaaacctagagcagtgcccaagagaacagaatacagggccaagttttatgtatttaaattctgttctcccacttaaaggttctgttactataaaaaaaaaaaacgcagtacttgttctatgcttcagttaccttctatatcataacaagataatgattgcatctattcaaggagttaccaagaaaataaaacaaatttatataagaaaacatgaaggctagtgtctgccaaatattaagtacttaatgagttattattatcataactctctctatattaatcaataaatattcatttaaacatgaagccataccagaggttatgtagtgggttaataactgtatcgctttcctatccataagggagtccttgagaaacagcagtttgagggagtgaagagtagaagaagatactaaaattagagagaaaggctaatatttaattaacacttaaaatgtgtcagaacttctgcatgcattatctgattttgccctcaaaccaactcttgtaactagcccaggtctgcacaaccaggaatggcagaacagaaattagaacaagttcttctcttatcaatgaatatgatgctcttgaggaaaagcaagaggagacagaaagaaatccggtattttaaacataggattatatagccaaaactaatttaccaagtttattatacaattgctcaaagtttcgctttgcccatataggcattatctacccttttaattctccccattgttgataaaaccataagttgaatcaaaaagaacctcactgtttgaatattatttagtacgtcaatgttttattttgtatattggtaaattatttggttattttctgtttctaatagtttttaaataattttgaattatagaatgtggtctattaatatagaatttttaaaatacattttgtgtattgaccttttaaaacragaggaggcttccttaaagtgtcttttcactgttgttaaatataccagcacataaaatgttaatggaaatactgccttttaatgttaggtagtgacctttattataaatgaatttatctctagagtatatttttcaaagttaaaagaaaccaattaaaatgttctaacactgaagaagcaataaacctcaaaaaatatctgaatatggaatatagttcttaatttactgtctcttcacatgcaacatacccagaaggtgtgctattgacttactattgtgtttcttgataagaagcttataaagtgtctgcttaacttttccttttcaaattaacaagataatacgagcatgtaggtaagccattggcaagggatagaggatagccatttaaaaacagaaaatatatattattg

SEQ ID NO: 90195 - DNA, 3130 bp, Homo sapiens
ggtcgcagtgagccgagatcacaccactgcactccggcctggactacagagcgagattccggaaaaaaaaaaaaaaaaaaaaaaagccagatattctgtcatttgcagaagcatggatgaatctagaggacattatgctaagtaaaataagccaggcacagaaagaaaaatacatattctttcttaaatgtggaatctaaaataattgaattcatagaggtagagagcacaatgacggttatgagaagatgagaggtgggggaaatgggaagatggtcaatgggagtaacttatcctgaaatacaaatcaaccattccatctgtgattagaaagattatcccaatacaaaagaaatgagtgtcagttccaatgcaatttactttgctctccatgagatctggtcatcaggatgcttaaaactatctccagcccagtggtaaaccctgaccatattcagggtatacgtataccctgccaaccatgaggagtaacatgagaagaaatcaatctctcttgctttctcatttcattaccaactgccaagctctcctctgtgccatatttcccttagactttgtccttcattgtcatgtccctatgactaagtttccttctaggattgagctcctgccaacttttattagtttccctccaagttaccagaatgcataccttctgcctaagtatagaacattttcaacaaatatgcctgatagccattgcttcccaggtttgttttatcatctacccaataatgtttgtttgtttctgttgttgttgttttctgatttgaacaaactattgctgtttatttggaatgaggacctaggttgctgactcattcgctatggtatctatacttcattctgaatatataacattcgtacttgtaaatagatctctactccaaatggcagttcaatcttagggactggatccagaacagcacctagacctaagcttatttatttgaacatttcctatcatgagccatatgtcagaaattttagtttaggaagctgtggtagctgaatgctttcctgtagcccaggactattattctctagaacttggctgagcatgagaagaaaaatagaacaagcagatgggctttgccttcgggtatggcagcacacttcattctttagagtataagcttgctgctcatgacactacggcagagcagagcctaagaggccacatagagatgaaaattgctgccttggcctcattattcaaagtctcactacccagaatacaagcttagaaaggattcttcactattttattcctattcttgcctgtcaggagatattgttgagcctgtacaccatgtgaaacatcatttaaagttctatggaggatatatgaaaatatttggaaaacagaaccactctcaacccccacaaaaaaaaactgaaaaaagaaataaaatgtttattttttctatgcaaagcaaatatgaagtctcccctctcattcaacagtatttctgcctcaaaaaataaataaaacataatcaaaacactttaaattcactctaacatgtaacaaaactgtcactggagatctcctgatttgagaaatcatagggtctgcaaaaccacagactaaatataatgctagacatttatgtaaaatatttcagcaacaatatgagttgtattattaggatgaacaatgatggccttatggttaaataagcatatctgaataccttatttctcaaacacactgaaaatatgggttctgcaaatggtatccctctttctccctaaacctagagcagtgcccaagagaacagaatacagggccaagttttatgtatttaaattctgttctcccacttaaaggttctgttactataaaaaaaaaaaacgcagtacttgttctatgcttcagttaccttctatatcataacaagataatgattgcatctattcaaggagttaccaagaaaataaaacaaatttatataagaaaacatgaaggctagtgtctgccaaatattaagtacttaatgagttattattatcataactctctctatattaatcaataaatattcatttaaacatgaagccataccagaggttatgtagtgggttaataactgtatcgctttcctatccataagggagtccttgagaaacagcagtttgagggagtgaagagtagaagaagatactaaaattagagagaaaggctaatatttaattaacacttaaaatgtgtcagaacttctgcatgcattatctgattttgccctcaaaccaactcttgtaactagcccaggtctgcacaaccaggaatggcagaacagaaattagaacaagttcttctcttatcaatgaatatgatgctcttgaggaaaagcaagaggagacagaaagaaatccggtattttaaacataggattatatagccaaaactaatttaccaagtttattatacaattgctcaaagtttcgctttgcccatataggcattatctacccttttaattctccccattgttgataaaaccataagttgaatcaaaaagaacctcactgtttgaatattatttagtacgtcaatgttttattttgtatattggtaaattatttggttattttctgtttctaatagtttttaaataattttgaattatagaatgtggtctattaatatagaatttttaaaatacattttgtgtattgaccttttaaaacaagaggaggcttccttaaagtgtcttttcactgttgttaaatataccagcacataaaatgttaatggaaatactgccttttaatgttaggtagtgacctttattataaatgaatttatctctagagtatatttttcaaagttaaaagaaaccaattaaaatgttctaacactgaagragcaataaacctcaaaaaatatctgaatatggaatatagttcttaatttactgtctcttcacatgcaacatacccagaaggtgtgctattgacttactattgtgtttcttgataagaagcttataaagtgtctgcttaacttttccttttcaaattaacaagataatacgagcatgtaggtaagccattggcaagggatagaggatagccatttaaaaacagaaaatatatattattg

SEQ ID NO: 90196 - DNA, 706 bp, Homo sapiens
ccttgaggccaggagttggagaccagtctgggcaagatagcaagccccagtctctttaaaaaaaaaattatatgtatatatttatacacatacacacacacacatatatatatacacacacccctattaaagatgcatcrcaaatttgactctgtttccagtaagtgaaaaaagtagtatctgaaccacaacgaggtaccattttacacacctattaggatggctatttaaaaaatgaaaatatgccctgtgaaaacccgggagctcaaaagaaaaaaaaaaaccgttggcaaaatatgtggaaaaactggaacccttgtacattgctgctgggagtggaaaatggtgtagcctctgtgagaaacagttcagtggtctttaaaaatgttaattgtagaattaccatgtaacccagcaattccacttctagacatatactcaaagcagtaactcagatacttgtacatcaatgttcacagcagcattactcatgatagccaacatgtgggaacaacccatatgaccaacaggtgaatggataagtaaaatgtggtatatactacatatacaacggaatactattcagccataaaaaagtaaaagtataatgctacaaaatagatgaaccttgaaaacatgctaagtaaaataagccagacacatagtatggttccacttatatgagatatctagaacaggcaaattc

SEQ ID NO: 90197 - DNA, 583 bp, Homo sapiens
aagcctgaaaatcattctagtcatatagttgtttcagtttaaaaaatatagtgaagaaaaatatttaaaaatcagaaataatgtatctgataaggaacacayatttagaatatgtaaagaactcttgcaactcaattataaaaagacaatccaatttaaaaataggcgaaggatctaaataagacatttctctgaagaagctataaatggccaataagcatatgaaaacatgctcaatatcattagccaccaggaatgtacatcaaaaccataatgagatactacttaatcgaaaaaataaataataaatgttagtaagaatgtggataaatcaaaacactcatacacagctggtgggaatgtaaactggtactgctactttggaaaacagtagggcagttcctcaaatagttaaacatacagttaccatatgacccagtaattccattactacgcatatactcagaccaatgaaaacatacgtttatatggaaacttgtaaatgaatgctcaaaataatattatttatgatagccaaaaagtgggaataaagcaaatatctatcaactgatgaatggataaa

SEQ ID NO: 90198 - DNA, 626 bp, Homo sapiens
  misc_feature (1)...(626): n = A,T,C or G
tcttactattcccttaattaatgtaraatcttagtagtgtttctctcttttttttnnnnnnnnnnnnnnnnnnnnnnnnnnnnnnnnnnnnnnnnnnnnnnnnnnnnnnnnnnnnnnnnnnnnnnnnnnnnnnnnnnnnnnnnnnnnnnnnnnnngaaatatatacaatcagcttgtactatactctctatattcttagagacagggtctcactgtattgcccaggctggagtgaggtgactattcacaggcacaatcccactgctgatcagcacagcagtttttacctgcttcatttccagcctgggacagttcacccctccttaggcaacctggtgtccccatgctcccaggaggtcaccatactgatgccaaacatagtgcagacacctgactggcatgcatattacagccaagaactcctggtctaagcagtgctcccacctcagcctcctgaatagctgggactataggcgtgcaccaccgcatctggcagtgttctctcttttcctagatactggtaatttgagtcttcttttctcttgatcagtctcaaaagaaaacagctgggtgtggtggtgcacgcctgtaatcccagcactttgggaggccgagacaggtggatc

SEQ ID NO: 90199 - DNA, 546 bp, Homo sapiens
cagtgaatatcgggtaagcagcaatgtgctacataggtaatgtggtttcttctttcatggtgttgctcaggatggtttgagctttgaggtgtgtagtcatatactaaggcaagatattactgaaggaaaatagcttatacagagaaatttaagttaaaaaacttaaatttaaaatttctgtgtttttaaaaaataaattttattgccgagggaactaaaaaatctaatatgtaaaagaaattatgttaacttttttgttttaaaaattaaagatggttgcgttattgtaagataaaggaaaaaaataytttgattcactaatcatttcctaatattttctaatgtatgttttagttttcttaaatattttatcagttggagaatggaatgttttgtgggaacgcatggattgttcaactgcaagaaggaaagaactggaattttgtttttatttggtttttagtgtttatttaatgacctggtatctttaaacaatttatcttctatattcttcagttacttgtagatagtttcatgtatagtgaa

SEQ ID NO: 90200 - DNA, 587 bp, Homo sapiens
gaatctgagagatggaggctgcagtgagccaagatcatgccactgcacttctgcctgggtgacacagcaagactccatctcaaaaaaaagaaaagaaaagaaaatgtgtagcactatatgaatgtaagytggatgtactattttatttcatatctaaataaaaattacccttattccacacccaaacttcctatattaagatgctaaactcacttgttattttgaaagatcatcatttttgataattagctatacaaagtaatgttttacagtatgaaatgttttcaaataccaattttttagaaactcatctttgatttaatgggatgtatttaactttaaagaatctaatctcaatcctacccccaaacatatagaacagaattttattttggaagtaaaatactaaaatatgtatggatactaaatgtatctgtaggcagaccactcctagttctccacttgtgctaatctagatatgcctttaaatcagtcattgaaacattctagtatgtctgacataatcactaatgttacctttgaacactgggtgttctactctgtatcagctatgcttacaaatgcta

SEQ ID NO: 90201 - DNA, 589 bp, Homo sapiens
tttttttaatattcttgagacagggtctcactctgttgcccaggctggagtgcagtgacacaatctcagctcactgcagcccctgcctcctgggttcaagcagttctcctgcctcagcctcctgagtagctgggattacatgcccacaccaccatgcctggctaacttttgtatttttagtagagttggggttccaccatgttggccaggccggtcttgaactcctgayctcaagtgatctgtccccctcagtctcccaaagtactgggattacaggtgtgagccactgcacccagcataagtaagcattttcttgattgaataagtaagggtattttttttccatgtgataaagcccatctaaaaataacgttgtgtaaaaataaactattagaaggtatatgaaagtgtagttgggtacaaggaatatatggaaccagggattcagcatcaccaggacctccatctctcctaatccctggttgaatcctgttgcatctcttcaattttttcttttccacaaccactaatttaatttaggttctgatcataatacaggtgaatgtgtagtgaatgatagcagtggatt

SEQ ID NO: 90202 - DNA, 730 bp, Homo sapiens
aactgattgaccatattaagataaacaagagacagggctgatttgggatgaagatggtacaaatagtgtaatgggaaagtgctgcaacacaacccatagcaatagtgagtgacaacagccttcatgcaggcaaaaagaccaaagggtaacagtgcacaaaataaaaagcatgagtcaaccatttgttcacagatcttttcagtaagatgtatttgcatgtaatgggatatcaaagaatcataagaaagaaagacctaaggaagaagatgcaaaggaaaatgctttgttaacaataacaacaataataatagctaacacttatcgaacattcattctgtgccagattgtgtgctaagctctttmaaaataaaaataacatgagctcatttgagtcaagattattaaaatcaaggaaacatttcaatggataacattcctccatgcccacagctcttgttgtcaaagtgttattttaaccctcttttaggctaagcctgagtgtgcagaaccagaggctactcatgtctactaagaacaaatttagactagagtttatcccacgtatcatttttaccagttgttaagtggagttggaaatccataatcctaacaatgttgcttagaaactacaaatcagcaaagaacaacactctaaaaggacattaggaccacaacaatttgacaagttctgcaaagacatagtccagtgcactctgaataaatgcattag

SEQ ID NO: 90203 - DNA, 499 bp, Homo sapiens
tggctctgtgtgcccacccaaatcccatcttgaattgcaatccccaygtgtcaagggagggacctggtgggaggtgattgcatcatgaggtggtttcccccaggctgttctcgtgatagtgagggagttctcacaagatctcatggtttcaaaagcgacagtttctcctgcacactcactctctcctgccaccatgtaagacgtgccttgcttccccttcaccttctgccatgactgtaagtttcttgaggtctcccagccatgcggaaatgtgagtcaattaaacctctttactttataaattacccagtctcaggtattctttacagcagtgtgaaaacggactaatacagagaatcttacaccattttcagaatttgtgctaggtgattaaaggagtgatttgttttaaatcccataagtcctttaaattcttaaagtgtttgaaattagattttatgtcatttgtatcaaatttaatattagcaccaaacagctt

SEQ ID NO: 90204 - DNA, 1257 bp, Homo sapiens
ttttcttcccagaaatagagtctcgatctatttccattcttataaattataaacctccactgcctgttgctgaggctttaactgcacagaagcagagttctcggcttgtcaggcattaataatggctctgcctgtctgcccttcagctgagacattaaactgaggtcttatccacttacctctagtggctgctcaagtggagttaaagatcgcaccatgcttttcagaaagaggatggggcaacctcagagccttgaccttcattttcaaaacatgtaatatacaaggatgggagtaagttattactttatatctgaaggtgctaacttgattttaatggtctatggaatcctcagaatcaaaacaatgattttagaatttcactttaggatattttgaaattatgaaacatactgtaattttattttgtaaagtcataaagagaatagtcatatctgtaatatgatgagaaataacttttctattatagctaaatttaaattgtccacatagcatgtctttcaagaatccattacctaagtaacatagatttggggaggtagcaaagtagctctcattgatttgagaccaggtctacatttcatgtaccaggttgcaccaggagtttagaagcaggtagaatggtctgagataggtgggaacgttctcttgttgcatcaagtaatttttattagttgcgtaatacctgaagcaaatattctaatttaacctttgctccagtacataatattgtccagtataaaagcaactggaatagataaattgcatttaagagttaaagtgatcatgtggtatttgagatctcacttattgrgagtgatctcacttatatgtggaatctaagagtcaagtttataaaaacagaggagaaatatggttgatagggtggagggcagagcaggggataagtggtgaaatgcgatactgtttgtcaaagaatacaaaatttcagtaagacagaagaaatatattcacaaaatctcttgtacaataagatgactatagtggatagtaatttattgtatagctgaaaattgctaagaatacattttaagtgttctcaccacaaaaattgattaagtatctgaggttaatggacatattaattatcttattttagccattccacgatgtggacatatatccaaacattatgttgtacatcataaatatatacaatatttatttgtcaatctaaaaataaatatttatttttaattgaaaaaggaattacaa

SEQ ID NO: 90205 - DNA, 709 bp, Homo sapiens
tggtcatgctggtcttgacctcctgacctcataatctgcccgccttggcctcccaaagtgctggggttacaagtgtgagccatcgcgcctggcctaaaatttcttcttagttctttttgtccacagagactatcctacaaagaatatacaatcaaggtgttgagtttaaggaacttgaaataattatttctctggtgtttatattatcaattaaatatagttaggtccatttgatgtgttttcaacttcagggttcacttttttctcatttaattttattttttggtaagatacarcataagagagtcacatggtgataagacagaatcagtaatagaatgtagccctttaatgccaccagaaatccagagagagaaataagctagggttttattcagtagcagagtaatctccatccagggtctgcttgaagccctagtccctctctgacaccacaaggtccccttggctacctgtcaagcctcctggggactccactggaaacatctcagccgtagacagcaatcttcctctcacactgcagtttcaagatgatctggtattctgctgggaaattttgcatggtgttctcaaaccaatatttgtcatcccagtaatgggaccaccttttgcaattgtcttccccaaaaccaaacaaggatacctgagagattggataagacaaaagatggtggtggtgtaacgggct

SEQ ID NO: 90206 - DNA, 718 bp, Homo sapiens
tttttaaagtttttgtagagtggggtcttgctgtgttgcccaggctggtcttagactcctggcctcatgtgatcctcctcggtctcccaaagtgctgtgattacaggtgtgagccattgtgcccagcccaatttttaattaaaaaatggaatgatggaatgcacattactttgcatcttttcccccttaaaaatacattcttagtatacctaaaggagtaaatctacctcattcttttgaaaagtggcctaatattccatagaatgggtgtatcgtgatttattcaatttatttaatgtatcagtgggcattctggctggttccagatttttgccattgaacaatctcatgcatacatctttatgatgtggtgcacttaaaatctttaagagacagattcaatatcttaaggtgtaacaaccacccagatcatggtacttttatccttatattaaaatttttttctgttaaccttggatagctgcttacatattttttctttttyaaaatttttctattaaccttgacatggtgcttttacttcctaaagtggaattcctgtatgaaagcctatgagcttttatatcttactcattgcagctgcattactgtgggagctgtccctctagagacactgggctgcaatgggaagtgtcagggagagcttaagctccatatcacttgagtctaaacctggagggatagagcgtgtccgtga

SEQ ID NO: 90207 - DNA, 615 bp, Homo sapiens
tgcaagtccagagcacaccagattaggcatgggatcaaagtctcattgtgccaggggtgaggaggcaacacaccaaggttgtaaattggggcattgaaagttgttgcagtgtgcggtcaggccacagctatagaccacccagaccacagcccagcggtccacccattgctacttcccagtggaagagggccaagggtcgggatcagagtgccaaggaccaaaggctgtggagtcggtgtcagggtgacaagctagggtcaaatcagagttgaatcagagactctgggtgggaatggaggttactgtggtctaggcctaattaactcagtaattaggccagaaagcaaaggtttcacacctcgggtccaaaatcccaagattcaaggttgggtcagagtagggaactgggggacggaagtgagggctggaggcaggggcggaggtgagggcyggaggcaggggctgagggtggggaaggctaagcattgtaataccaaggaagtcattggcagagatgcggtcatagtcccagacctgcaggaccagcactgcaggctgccggaactccgcctcctccagggcaaagggtccagacctgcgccggacgctcacctc

SEQ ID NO: 90208 - DNA, 664 bp, Homo sapiens
atattgttaaccctcttttttttttttttttttacaaatgaggaaaccaaggttcatggaattaagttacttgcccaaggcctctaactctaagtgacagaactgaaattttgaaagtgtgcagccttcagagctgagtgaccatgggtggagagtgtttgtgaactctcaagtatgatagatgccttgtaccctttggggcaagaatgaacagtaccagtttgcagcttgttatggttgcggttggaggtgggtggctgggggagagtgttttccaaggaggcagctgaacagatcctgtggttaggatgggtgacctgatcacatccccagagtctgggtgggaaaatgcaggagggtccacagtctgaaagagagccctagggcaggttgtggtggtagaggaaactcctagcgtgtcaatccaaacagtccattgggagcccaggccttcagtaggaggggcattgtggctcagatgacatgaacctctctgactgggctaaggcagagagaagctccagttcggtcagaactttccaagaaaccagggacaygcagcccaggaaataatacctgtgggagtcagccccacctgtgacccattcatcttatctatctgcccttgggtttctggccccccagtttctacactgctctccct

SEQ ID NO: 90209 - DNA, 847 bp, Homo sapiens
cttcagcccaggaatttgaggctgcggtgagctatgattgcaccactgtactccagcctgggtgacagagctagatcctttctctaaaaataataataataataggataatattagcaatttcatatggttcaacctaatgttttgggatagggattcaacaaagtgtgagggggcctttgagacctcataaactcccactgcatgcaaaagcccggctcagccctcaccatactaggagagaaaaggctcctcagttcccttggagtaacttggatctacattattgtaggtagagttgttggcagaaatcctgggataagagaatagtttcctggaagatctgtgcctccaaccagcagagagggattgagcttcattgaactcaacagagccaacatttcatagcaccatggtgagttggtcacacagccttggcaaaaaggctgaaaaggagggtgtaatagtatggggaaaggttgtattcccctggttcgtaggctaggaagaggcctggagtactggtgccaccaaacctttattggtgccattctattctccctactttatgcactttccttactgcctagtacaggctctgcaaactcaagtatcttcggttgttcaggaggtaatgtaaattagtaagcygagttttcctctttaatgctactataacagaaacaatagcacagttgcaatgataaatgacaactgaaatatgctatcattgtgagggagagaatcggtgtgtgcataggggaggccatgatgaactggagagcacatgccctgtctaaagggggcaggcactatacaactgtgcagagcacacgccctgtctaaag

SEQ ID NO: 90210 - DNA, 494 bp, Homo sapiens
gtttctggaaggactatcgccaaaccatttccaaaaaatgagaccgtactgtttcttaagacatcatgaggagatttcccactgggttatgaatgaggcagaaaaacattaaagacaggaagttggcattctgtttttaaaatatcagttatgggccccggtgcattggctcacacctgtaatcccagaactttgggaggccaggtgggtggatcacttgaggccaggagttcaagaccagcctggccaacatggtgaagccctgtctctacaacaaatacaaaaattagccaggtgtggtggcgggcgcctgtaatcccagctattagggaggctgaggcatgagaatcgcttgagtccgggaggccgaggttgcagttagccaagatcaggccactgcactccagcctgggcaacagagcaagaccctgtctcaaacacacacacacacacacacacacacacacayacacacacacacacacacacacaca

SEQ ID NO: 90211 - DNA, 729 bp, Homo sapiens
ttttaagcacaggcttaaaacctgagaagcactgtaaaaagtaacaaatatgtctgtgataatatttaataagcagatgttataaaaattaccataacattatataaaattatagtttactaaacaatgaaataacattaaattttgaaaaattaattcaaagtgaggtaaaagaaaaaatacacacattccctctcctctatcatttcagttatgtgcaaataaatctactaaccaactattaaaaagatcttggctcctttttctcagcctgcttaaaaatagtaacctgttttcagtaattcaggatagtggtcctggaaatggatgcctaatctgaatttaaaatttcaaaataatgtgctttwaaaaaagtaatagtaggctgggcgcggtgctcatgcctgtaatcccagcactttgggaggctgaggcgggcggatcacgaggtcaggagatcaaggtcatcctggctaacacggtgaaaccccgtctctactaaaaatacaaaaaaaaaaaaaaaaaaaaaaattagccgggcatggtggcgggcgcctgtagtcccagctactcaggaggctgaggcaggaaaatggcgtgaacccgggaggcggagcttgcagtgagctgagattgagccactgcactccagcccgggcgacacagcaagactccatctcaaaaaaaaaaaaaaagtaatggtattgttagcgtatctcctaccctacc

SEQ ID NO: 90212 - DNA, 729 bp, Homo sapiens
ttttaagcacaggcttaaaacctgagaagcactgtaaaaagtaacaaatatgtctgtgataatatttaataagcagatgttataaaaattaccataacattatataaaattatagtttactaaacaatgaaataacattaaattttgaaaaattaattcaaagtgaggtaaaagaaaaaatacacacattccctctcctctatcatttcagttatgtgcaaataaatctactaaccaactattaaaaagatcttggctcctttttctcagcctgcttaaaaatagtaacctgttttcagtaattcaggatagtggtcctggaaatggatgcctaatctgaatttaaaatttcaaaataatgtgcttttaaaaaagtaatagtaggctgggcgcggtgctcatgcctgtaatcccagcactttgggaggctgaggcgggcggatcacgaggtcaggagatcaaggtcatcctggctaacacggtgaaaccccgtctctactaaaaatmcaaaaaaaaaaaaaaaaaaaaaaattagccgggcatggtggcgggcgcctgtagtcccagctactcaggaggctgaggcaggaaaatggcgtgaacccgggaggcggagcttgcagtgagctgagattgagccactgcactccagcccgggcgacacagcaagactccatctcaaaaaaaaaaaaaaagtaatggtattgttagcgtatctcctaccctacc

SEQ ID NO: 90213 - DNA, 826 bp, Homo sapiens
aggttaaattttagaattgttgccaattttagaggattatttatcaaatttatttaattatacatttcaagatttggaagaattccaagttttctctagcgaaaaattttaaataacttttaaattggcaacaatggaccaactttttattgatattgtcatgtcctgatgctggacagaataagaagtagtatttctagaaactgttcagccagcaatttatacccagatgtgactttgcacaccatgattcccattaaatacaaacaaaatatatcttcaattcaactgtcccttaattgcacctcatactaaaaacggaaagttacagtaaagagaaaatggtcttattgccaactgcagttaaaataccttgctattgcaaagtgtacgaaacttatgactgcatgaatatatggtcagggcccttcccaggccttgaaaggagtctgtgtaaggggccctgaagcataagcttcattagcttcatctaaaattcctgcttctcatttcttttcattgtttgtcttcctttcccactcaaactccsgtcacttctctgcttccactccctacattctgactattagctccatcacgatattgaaattgctctcttgaatgcattgacattcaactgcttttcctcaattctggtccaacttgatcttatcacatactaggccattgatcacatgctccttgaaactcctccttccttttgttttctggtgactccttagttccctatttgtcttgtagccttgcagccttccttctttgccctttcctggcttgtctttctctttcacctcccaccttatat

SEQ ID NO: 90214 - DNA, 826 bp, Homo sapiens
aggttaaattttagaattgttgccaattttagaggattatttatcaaatttatttaattatacatttcaagatttggaagaattccaagttttctctagcgaaaaattttaaataacttttaaattggcaacaatggaccaactttttattgatattgtcatgtcctgatgctggacagaataagaagtagtatttctagaaactgttcagccagcaatttatacccagatgtgactttgcacaccatgattcccattaaatacaaacaaaatatatcttcaattcaactgtcccttaattgcacctcatactaaaaacggaaagttacagtaaagagaaaatggtcttattgccaactgcagttaaaataccttgctattgcaaagtgtacgaaacttatgactgcatgaatatatggtcagggcccttcccaggccttgaaaggagtctgtgtaaggggccctgaagcataagcttcattagcttcatctaaaattcctgcttctcatttcttttcattgtttgtcttcctttcccactcaaactcccgtcacttctctgcttccactccctacattctgactattagctccatcaygatattgaaattgctctcttgaatgcattgacattcaactgcttttcctcaattctggtccaacttgatcttatcacatactaggccattgatcacatgctccttgaaactcctccttccttttgttttctggtgactccttagttccctatttgtcttgtagccttgcagccttccttctttgccctttcctggcttgtctttctctttcacctcccaccttatat

SEQ ID NO: 90215 - DNA, 1559 bp, Homo sapiens
agaactggaatactattacttgtaagagaagttgcatatggcaatatgtaatctacaataaaaatttaacagagcattttaatttctgttacgcccatcagttaatttttacatgctgataaaaaaaaatgacaaatatatcttttgaaaggtacttttgaattaaaaaaggtacaaagtggcaggttgccgtggctcacgcctgtaatctcagcactttgggaggctgaggcaggcggatcatgtggtccagagattgagaccatcctggccaacacggtgaaactctgtctctattaaaactacaaaaaktatctgggccgtggtggcacatgcgtgtagtcccagcttttgggaggctgaggcaggagaatcacttgaacccgggaggcggatgttgcagtgagctgagaccgcgccactgcactccagcctcgtgacagagcaagactctgtctcaaaaacaaacaaacaaacaaacaaacaaacaaaaaaaagccacaaagtatccaatttaaagaaaataccgcttggtttagcttgaaaagccaaactttattcatagtttacttcttgcctagggataagagaaaaataaatgcttcagaatggcttgtaatctttgattttacatagaacagaaagaaaaaaatgcaatggcttttgttcctaggtctcatataaatgtccgacttgttaacaacaatccataaatacaaattaataggcaggcatggtgttcaactattcctatcaaagcctacacacacacacacacacacacacacacacacacacacagacacacaaagttaagataagtttaatactgttgtagaattaacagtgaaaaaatggaggcattttctaaactataggattaatatatagaagaatatcatcatggaagaaagtaaaataaataaaatttttaaatagtttcactattttgaataatgaattatgcattggaaaacaaactttgagaatgtgatgcaacatgataaatttaaaacattaatacaattcattaaataaaggtttattgataggttctcttgcacaccaacatgctagatcccagaaacatatggatggacattgaaaaaaccttttcccttaagtagtttataatttgatgaggaaaatagtcatatatcccctttaaaaaatcaaatcagatattaacactgttcttataacaatagatgataatgaaatttaaatgatttggaagtgacctttgaactttatggtttagaaagatgtcaaaaggcacaaagcaggaaggaaggagaaagtaccatgagacaacagtgaggagtactcaaaagagcaagtatgtagaatgcacttaacttctgaaaacccagatttaaacatctttgtaaggagtgttcagtggaactgttgaaaacataatttggggataaagttaatgtaaacataaaaatatagcgtagtttaaaatacaattatatgagtgaaattattgtatctttattttagaaaaataactctagaaacctcatggaggacagattatatcagaggaaggc

SEQ ID NO: 90216 - DNA, 1042 bp, Homo sapiens
agatttgagaaactgcctcaagttccaatgcttttttaatttgaagcaccattgttgtgattacaaatttgctgggttccaacaccacaattttgcttcctttatcagtgagtgttttgttcctaagaaaatgtgtttgcaattaatggaatcttgtgcctttaagytgctttggccacaggcctgtaatttgctttctttgctttacctccaggcttttgtttgtcctttctgtttgcctctaaggaagctgaaatggatgcaagttgtcttgccgtcccaggatctttttgaacatctgtgtagtcatctgatcatccatttcctcctcccactcacaaaaccccacagagacagaacttgcccaggtttgcacatatggttgatgttcacagcttgaaagtgtccaagctatttaagtttgattttaattttaatgaaagctcatagttttgcccagagatgaaagcaaggtgttagaaatccccagatttccaggtcattagatcacttaacagttcacccacggctgattcgttttcagtagagcagtgttttaatgagcataattcaaaaatatccaccttaaaattttagagggtccgaaatgtactttaggtgtctggtttcgagagttcctttgaactttgaaaattccattttagtggattatatggttaccaaatagtttctaaaaacaatcagaaaagcattttatggaaacatccaattagagaaacagtttttaatattcactgcccatagctgaaggaagaattctcaagctgggatgctgaccgctgaaattgtgactaatcttttgagctctacctggcttgttaggtaatatctggaaggggatttgggaattgtaaaaagataaaaggattttgaggatgattgaactcatacttttcatatcttcagggcctatctagcatacaccgtggtccataaaaggtttccagtaaatttatttgaaacagaattaaacttggaaatgaaataatagttcatgatatagttaactggaacacgatta

SEQ ID NO: 90217 - DNA, 707 bp, Homo sapiens
agaccccaagagagggtccttggatctcacgcaagaaagaattgaaggcgagtctgtaaagggacagcaagtttattaagaaagtagaggaataaaagaatgrctactccatagacagcagccccaagggctattggttgcccgtttttatggttattcttgataatatgctaaataaagggtgaatttttcgtgcttcccctttttagaccatataggctaacttcctgacattgccatggcatctgtcactgttatggcgctgatgtgagtgtaacagtgaggatgaccagaggttactctcattgccatcttggttttggtgggttttagccagcttctttactgcaaactgttttatcagcaaggtctttatgacgtgtactttgtgctgacctcctatctcatcctgtgacttacaatgccataaatgtctgggaatgcagcccagtctcagcctcactttacccagctcctattcaagatggagttgctctggttcaaacgcctctgacatgagtgagacatttatttaaactttgtgtgtgtgtcacaggttgtgatgtaaaatatatattttttactctgagtccgacttacttgaaggcccagatgggaaacagaaagacaacttatgctattgagggtaatacaactaaaggaagaatatggaagttgcaaaagacatattgcagttcagtgaaaga

SEQ ID NO: 90218 - DNA, 764 bp, Homo sapiens
taacatctgtagtcaaggaggtccaatgtttttaggagtaaaaataaatcccaatttcttccactttggaagctcgtagayggcaggctttgtaggagaagttatttcaactgggtttaaaagttttggtacggttttgccggatagaaatagatgggcaaatacacagaggttgagaagtccaagtcagtgatgctgagggcccaggaccatctgtgtttggagacagcaggtgggagtgcagagatgatgctagaaaacttcccgaatacatgttatgatgctaggcgtttattctgataggtgtattttacttctgacagatctctgcaaaatctccagctcctgcctttctgggctttcagaatccaggaccatatgggacccatggacagtgcaggcagggcaggaggcctctccgggtgctgagctgccccgccatgggccacaagctgtgcttctcagcaccaatggttgtgtcactctcattggtggtgctggctttaggaggatgttggggactctttttgactctccttgtctagatgcccacattctttgttaaggagccatctcctttgctggggtcccctctgccctctctgttctaggatggtgggactatctgataaactaagttttccagggcagcccaggagggaaggcagcacatggctgcacggaaccttctctggagacacagaatgaagacctacagccatgcaacctccctttactcaggtctttccaatagagaaactatt

SEQ ID NO: 90219 - DNA, 764 bp, Homo sapiens
taacatctgtagtcaaggaggtccaatgtttttaggagtaaaaataaatcccaatttcttccactttggaagctcgtagacggcaggctttgtaggagaagttatttcaactgggtttaaaagttttggtacggttttgccggatagaaatagatgggcaaatacacagaggttgagaagtccaagtcagtgatgctgagggcccaggaccatctgtgtttggagacagcaggygggagtgcagagatgatgctagaaaacttcccgaatacatgttatgatgctaggcgtttattctgataggtgtattttacttctgacagatctctgcaaaatctccagctcctgcctttctgggctttcagaatccaggaccatatgggacccatggacagtgcaggcagggcaggaggcctctccgggtgctgagctgccccgccatgggccacaagctgtgcttctcagcaccaatggttgtgtcactctcattggtggtgctggctttaggaggatgttggggactctttttgactctccttgtctagatgcccacattctttgttaaggagccatctcctttgctggggtcccctctgccctctctgttctaggatggtgggactatctgataaactaagttttccagggcagcccaggagggaaggcagcacatggctgcacggaaccttctctggagacacagaatgaagacctacagccatgcaacctccctttactcaggtctttccaatagagaaactatt

SEQ ID NO: 90220 - DNA, 643 bp, Homo sapiens
ccactaatggttctggacaaacattgcaytccctctgtaatgtcgagcacacagatgaaaatcaccaggagaatgagaagatagcacagttcaaaaggaggaagcactctgaggaatcaggggaaatattttcctataaaatatagtttctgaaagagatgggaaaattttgagaacacttctgatctgtgtttccaataaacttcaaatgagcatttcttctatgaaattcgagtagagaaccataaagaaaaaaaacaaacagggtagggaaggctgtgagatgatttaaaaaatgttcatttcagaaatggaaacggggaaggggagagcaaaatggacctttcagtaaaaaaggttttataagagagaagtcaaatttgacatcacagaagtcagaggaagaggataagagaaggttaattagagaaaatataggaaaagcatgggctgagatatatttaatttataaatattaggcattccagagaaagaacctccaaaagtggagctatcattaaagaactatttggtggaaattttcccaagttaaagaaagactcttcagaaatctagataaaataatgaagggcttttttttgcctagacttaccctgataatttattttaatttcaagaaaaa

SEQ ID NO: 90221 - DNA, 2417 bp, Homo sapiens
  misc_feature (1)...(2417): n = A,T,C or G
tatacacacatcttaatttcccaagatatgcctatttttaataagattattttttattttaacttgtaattattcttatattgaaatggaaataatggatttttaaggaatgccttctttctctacaaaacttttttcttttaaatatttaactcagataccttagaggtgttcagaatatttgagtgaataaatagaaaatttgcgtttcaaattgctaaaaattatacataatcttacatagtaagtgttgttctgaagaaccagcccaacattgttgtgtcttggtttccatctgtaaagtataggtcactttcagattataaacacatgtttaatcttattcttaaaatttgtttctgccgggcgcagtggctcacgccagcactttgagaggccgaggcgggtggatcacgaggtcagtagatcgagaccatcctgcatgctgtctaacacggtgaaatcccatctctactaaaaatacaaaaaattagccaggcgtagtggcgggtgcctgtagtcccagttactggggaggctgaggctggagaatgacgtgaacccaggaggcggagcttgtagtgagctgagactgcgccactgccctccagcctgagtgacagagcgacactccatctcaaaaaaaagtttattaaaaaaaaaaaaaacaggcatcaggctggatttgtccacttctgtatttcaaaatgcatttttttaatttaaagacattgaagtatcaaccacccaaagtttacaacacataatgtcgtaatttcccgcagtattcattagatccttccatttagcacttatgttaaacgacagacccacacagggatccaaagggtcttcattataaacaaagctataccagtcctcctaactttantttgtcattcttcgaaaattgaacatgaaggttttttgctccttgtctcaaactggtgatcaagactctaaagcaggtgccctctagccccaagttttttgggcctagctgttcatctacagggtgctggcccctcattctgctaaacgttaatctgaacacagtccgtgcccactttacatggaaaaaatggagtatctggctagttttgtttttatttattattattattattattattttttgaggtggagtcttgctctgtcgcccaggctggagtgcaatggcacgatctcggctcactgcaacctccgcctcccgggttcatgccattctcctgcctcagcctcccaagtagctgggactataggcacccaccaccacgccaggctaaattttttgtattttgagcagagacagggtttcaccatgttagccaggatggtctccatctcctgacctcgtgatccacccgcctcrgcctcccaacgtgctgggattacaggtatgagccaccgcacccggccagtatctggctagttattccctataacctcacctcaccgtgatgagtttgtgaaaagggggtccttgaaatagttgcttggggtgaaaagaaagcaaacggctctacactgcattgcatgcattctcatgtaaagcagggaaaattccagattaaagcagtttttaaattatggaaatatattttgttggtttgtaataataaaaacaggtttttacctcatttttttttcactgcatttaagttttccttttaaggataactagaagttcattagatacttaagagagtttccttagccctcaaagcattttgtgttttttaggaaccgactttattaacaaatgtattacatccaagaggctatacctatttacttcacacaccttttcataggtcaaaggttctcaagtaaatagttacatacgaagatttaaagatatgctcttcctccggtcgtaatggcttccaccttgaatcccagcacttttggaggccgttgcgggtgggtccctgggtcggaatattaagcccaagcaaacgaactcggccaaaccctaactactctaaaaagactgaaaaataagcctggcgtggggttgggcgccgttactctctgttactcatgaggctgagacaggaaaatggcgacaacccggaaggcggagcgtgcagtgagctgagattgcagcactgcactccagcctgggccacggagtgagactctgcctgaaaaaaaaaaaaaaaaaaaaaaaaaggtgcctctaccctgaggcttctcattcaataggtctggagtgggatggatatatctgtaatttttttcaaaagtgtgatggctgattctgctgcataaccctgtataaaagctatttcctttaaacaacaacaacaacaaaaaactattagcataattagtatattatatgctgtaactgccaagtaaaaaaattctgttaaactttattttaattttaaacattagttttagaaagtttc

SEQ ID NO: 90222 - DNA, 894 bp, Homo sapiens
catgtctctgtgtctaaacttctttttataaggacactagttctgatggattagggcccaccctaatgacctcatcttaacgtggtcatctgcaaaggccctacttccttccaaataaagwcacattcacaggttctgggggttaggagttcaacattttttgtggggacacagttcactccctaacaccatggcttctcaattggtctttcctaggacctggtgttaggtggtctcacccttgttttacaaaggaggaggtcgaggctctgaaagcctaacagctcgtcagggccaccagctagtcagaacttgtttcctgagcctcagcctccaaatccaggctcctcccttccctctgcagcgcctcagttagccaggagagcatggccagttccttcctgtctccgccctagccctgggggcagccccaagccctaccggctccccgcttgccccctccccgctcggtagcctggggctgagcaggtagctgagcaggctcctctgaatgatcattttgtgtctggttcacgtgccccctcccctcagaatcctctcttctcctctagcctggcaggatgctttcctggaaccccagtaaccttgcccttgtagaacttctcggaggtactgagtggaggtgtggggcaccgggtggtattgttttcaaaatgaaacgattataggatttgggtggaagccaaatgcagacttctgggaatgcagcctgggtccaggatgagtggccctgctggaggatacgcccaggaaggggagcggggtagagtggcaggaggctaagaggcatggaggtctcactgtgcatcgtgtccctgtcccccactcaggtggagccccagcaaactcaaaatgtcacacaaatgcttacaa

SEQ ID NO: 90223 - DNA, 1566 bp, Homo sapiens
gccggcccaggaggctcccccagggtgtctcctgggacttgcgagcctgagcactactctggaaaggctgcctctgctgcagatcgacaaggtggactttgacactgaaatactccctggataaggttataggacacaaggctttaagcctgggtcccactttgcttcctaacctcccctaccactgcctccccatcatgtgtccttagcccttcctgccagggtgctcatccctcccttcactcctccaggaagccttccagaactgcacatcccaaacgtccacccatcagccgcctcactctgacagttgtgcagcctcacacagcacatcacattccccagccagaatgggatgtgctgcccaggtctgtgacccctatctctgtgtagcctccgtgcccctaagctcacaagggtggatcagagtgtttccttctccatgcctccacagagaggccagtggagtggggcaggcaatttacttccactggggcctgagcaagccctgtgtgttgggccctgatcttcaggggacatgagggtggctgagagctggtcctaggtaacaagtcacgggttggaaggacccccatacgtgactctaagacaagggggttgggaaagaagggaacgcgttaactccaggtttgggggcgttgggtctgggggaaaaggtgctgacaatgacaactgctggtgaatgaggcaagcaggacatggctttgaggaacacagaactgcaccaatgaatgaagggtagggaggaggggccaggaggggtgaatcggaagcatgtgtggagaacagacggaggctgagtgtccaggggaagaggccacgtctgaagccagggcacagtggctttgaaggcccaacggtttgaaggttattgcacaggccctgggcacaggtaaggggacgctgtatctttggtggctgtgggcacgggggtggtgacgcagggacaaggctgaggaccagagtggggcagggtattccgcactctcatgccgtgaaacagggcctgcctgtgccaacgctgcccctggcccaccacactcacgcagcagcaggccgtgacggtgatctggatggtgttgcggcccggctggcacacgtgcttcaggtgcaggggcttgtgggaggtcttgttgtcgccgcgctcaatggtgaggggcgtggcgttcacgctgacctgcaccgaggcgggccagttggtgttcatctgccggtcctcgtggtggtagcacttgaactgcagctccaggtcagacctaggtggggaacgrgggtgctcagggcagctctgccagggggctgtccatggcctccgtgaccccgagccaggtcacacacctctaaacacaccacaacctccgagatcctcaggaccccatccctgaccccaatgattcccccagcctgagttctcctctcccattctgtatactccctctacacccaaactgcccccaagacccccgcacaccaatcattcccatcacaccccacagctctagctcccatctccctggaatgtcctccctgtaggggtcaactcct

SEQ ID NO: 90224 - DNA, 1566 bp, Homo sapiens
gccggcccaggaggctcccccagggtgtctcctgggacttgcgagcctgagcactactctggaaaggctgcctctgctgcagatcgacaaggtggactttgacactgaaatactccctggataaggttataggacacaaggctttaagcctgggtcccactttgcttcctaacctcccctaccactgcctccccatcatgtgtccttagcccttcctgccagggtgctcatccctcccttcactcctccaggaagccttccagaactgcacatcccaaacgtccacccatcagccgcctcactctgacagttgtgcagcctcacacagcacatcacattccccagccagaatgggatgtgctgcccaggtctgtgacccctatctctgtgtagcctccgtgcccctaagctcacaagggtggatcagagtgtttccttctccatgcctccacagagaggccagtggagtggggcaggcaatttacttccactggggcctgagcaagccctgtgtgttgggccctgatcttcaggggacatgagggtggctgagagctggtcctaggtaacaagtcacgggttggaaggacccccatacgtgactctaagacaagggggttgggaaagaagggaacgcgttaactccaggtttgggggcgttgggtctgggggaaaaggtgctgacaatgacaactgctggtgaatgaggcaagcaggacatggctttgaggaacacagaactgcaccaatgaatgaagggtagggaggaggggccaggaggggtgaatcggaagcatgtgtggagaacagacggaggctgagtgtccaggggaagaggccacgtctgaagccagggcacagtggctttgaaggcccaacggtttgaaggttattgcacaggccctgggcacaggtaaggggacgctgtatctttggtggctgtgggcacgggggtggtgacgcagggacaaggctgaggaccagagtggggcagggtattccgcactctcatgccgtgaaacagggcctgcctgtgccaacgctgcccctggcccaccacactcacgcagcagcaggccgtgacggtgatctggatggtgttgcggcccggctggcacacgtgcttcaggtgcaggggcttgtgggaggtcttgttgtcgccgcgctcaatggtgaggggcgtggcgttcacgctgacctgcaccgaggcgggccagttggtgttcatctgccggtcctcgtggtggtagcacttgaactgcagctccaggtcagacctaggtggggaacgggggtgctcagggcagctctgccagggggctgtccatggcctccgtgaccccgagccaggtcacacacctctaaacacaccacaacctccgagatcctcaggaccccatccctgaccccaatgattcccccagcctgagttctcctctcccattctgkatactccctctacacccaaactgcccccaagacccccgcacaccaatcattcccatcacaccccacagctctagctcccatctccctggaatgtcctccctgtaggggtcaactcct

SEQ ID NO: 90225 - DNA, 754 bp, Homo sapiens
tcctcctcaccaggccycctccctcctcagtacagaaggtcacctgcctggcccggcatcctgatgctcccttgattctccccaggccgggccttagcattgccccacccccaccttccatgccagcccgaggggacttggcgggcagcactgaaatgtcagcctcctcatcacctagcagtcccacgcctgctggcaacgtgggcaccaagcaccaggcagtcgccatgtcgaggtccccaagagccttctgcctgtctcagctcctgtccatgcttgaagaaagccatatggcctcagctgacccgtgagcagccagtcactgttgaaataatcgaatagggaatgctggagcccagggcccagagaggggaggacccaccccaagtcctagcgaggcagggccagagtccagaagagagcccgaatgcctgctgccttctcgcgcccttcctgtcttcctgaggctggcctcacagctgtgggctcccaccctcatgctattggcaaagtcaaaacgcagagagagcagcaggtccaggaggccttggagcttccgcaggatgtcctgagacaggtcgtcagaactcaggagagtggtgagaactggaagaactgccaccactgaggaagaggccagctttccttagggatgagtggctggtggctgtcaatcagaaaacacagactggctgctcataggccagatgtggcccacagacacctgagattggaccactcaatgttttttttt

SEQ ID NO: 90226 - DNA, 608 bp, Homo sapiens
cagatgtctggtggtccttaggagatcctttatatttgttgctgaaggactgtagattagtataggtagttcatgtgtgtttcctttgtagttaggcaggtctatttgctctgaatgtgagggctgactctagcctttgtgtgcagagattcttctctttggtacatgcaggtagggagcaagcaagtacatctggaactccaccaccttcaaaggaaagtagggcacttaaaagtatttccctcctagctggagatgactttcctttctaccctctggctctaccctcaggatttcctttttatctgctgggtctacatcagatattactttgcagtgctttcttgccccaacttcatacctttggctgtcccttagaaaatcattcataagttcagaaaaccattcttagaattcaaattgctctatacacatcttagaaaggaaagagctacttaaccaaaatgtcccaaggacatctttccagttaaccaccaagaggagggatgtccctgctctttaattcatcccaccccacctccaaggctcagcccagaccactgtttmaaagctcactcttgtcctccatatgtgctaattcctagctt

SEQ ID NO: 90227 - DNA, 2057 bp, Homo sapiens
ggctgctagttctatgatcctgatgtttactttttcaatgcatgtttgattctgttcagagaaaatacctggtaagccctaatggaaaccatctgttagaaaaagaaggagacagaatcgtggagctctgttgacttccctcgtcttaccagcaaagagaagaggtgtagtaattcttaaaaaggaagaaagaagagagatcaaagtgggagaaggaaaaataaaaagaaaaaggactaagcactttcttctttcctctgagagactgcggtggctctcccacctttccggagactcgtcagcacctgcctggtggacagcaccacatctttaaattctaaggttctaacccctttattcccaaattctggagttcactaacaaagtggttttcattctttaaaaaatgaaatgaaaccaaagagggacacacagagggcttccaaaataaaatgctagatcttaaattgggtgcttggtttatgaattattttgtattgatcaactttccattataaaataaatgaattaaaaatatatatcacaataaaacaaaaagaagagccattctcatttaaagagaggccttatctccagagaaataattagaggctatcatctatcaatcctaaagggttttagtaaaaaccgttactgctgcctccgaggtataaggtaagctgaggtaagcaagcagggtagtggcaaagatcatgtgtgagaacaagaatgtgaagaggaaaatagaagggatctagatattcgatgaagtccagaaaggctggctttgatatgaacagcagcatttcaatcagcctcatgagaagctccacaatgcagaagtcaaagaatgtgatcttgcctttgagcagagtctgatgaaaattcctagagtaggactcagattcccccatagttttgtatttaggttatgagaatgagactaagaaccagattgtcactaacagaaagcaaaatctcagcataattttcattgtgtggagttcagaaatgcatttgaactgcaggcttcatcatttgtatctctgaccatttgcttttatgcctggaggaaggtccaggcagccactaactgctcaaatccttccattctggacttgctcttcctctgtcagttctcatccttactttctttttgagtgttctagatggcattaatcaacattcatcagtggtttggttacactgaattatcttagttcccttcccccattacttcatcttcccctgaccttcctccttctcctggactcattaacactcattcctggcattcagtagatgttgattgagcatttactatgtgttagttactgttccaggtgctggggacaaatgggtgaaccacatatacatggcttctgcattgatgcacggtatggtatggtggggaaggagaaggtagatgttaaacagccttctacagaggttartacatattttggtccatgccatataggggagatgtggtgctatgagagacaatatcaggggtgacctactcaaaatagagtggtcaggaaactcagctctgaggagatggcatttaaattgcgtcctgagtaatgagagggaaccaggcaagtgaaagagaggaaagcgtgttccatgcagaaagtaaagtatgtgcaaaggccaggagaagaagactttggcactggaagaccttaaagaaagctggtgacacaccccagacacatacagtggtgttaacagataaaaacaatggttgatttgtccacatatagaatactttgtgcagatctgggcacactactcttaaggtgctggcatgaacaagtgctcatgattggttgttcagtcttgaatgtatggcatgactctacatatacaatgcaccagttaggattctcagttgcaagtgctagaatgtccaatcagaactttcttaagcaaaatagatattattagttgacatatctgaaaagtccatgaccagggataccctcaggcctggctgtaccaatggttcaatgttttagactggcattgtccactagagagaaaatatgagc

SEQ ID NO: 90228 - DNA, 542 bp, Homo sapiens
ctgtcttgtgatctggaggaccattccacactgcagcgcattttagagtgtcagggtcggattgcatgtgtctgtacacccctctccagcctgggtaccaatctgactctgcccttgctggcgaggtgactttgggcaagttccttagtctcttaacgtgtctctgtttcctattccataacgagagatgataacattagtaacacacacctgacagtgttgctgtgagcactaactgactgttattatatatacatatatatataattttaaaatatagtatatatatacacacataaacggagagagagagagagagagagaaagaaagtgagctaaaacatatggcttagagtaagtatccrgaagtgtgaacttctattatcagatctctgaacttctgctttctgctcttccccattattcctcaaccctgtctgccccagacctctctccctgccccgcacaccttcacctcccctccacactccactctctttccctattgtccatttcctctgactctggaactgaataaattg

SEQ ID NO: 90229 - DNA, 376 bp, Homo sapiens
ttgccattagaaatccaacctttcattgtaaagcatgaagtctctaagtatgtcctgctaaaaattaaatgcctggagaactttcagtctggacaagatggcatagatccagttctccctgctccaacccactaagtggaactataaacccatgaaatactgcaggagacatccaaatgagtactatgtggtaagaaggttgtasgaaaaacgtaaactggtttgtgatctcaggaatgaagaaacaacataccacctgggcatcttatgccccctatcccacaaatgaagaaggtgacccagacccagcatttcctaacctccttacctagaaacaaaagacagcccaagtgggatcattcattatatggatcca

SEQ ID NO: 90230 - DNA, 376 bp, Homo sapiens
ttgccattagaaatccaacctttcattgtaaagcatgaagtctctaagtatgtcctgctaaaaattaaatgcctggagaactttcagtctggacaagatggcatagatccagttctccctgctccaacccactaagtggaactataaacccatgaaatactgcaggagacatccaaatgagtactatgtggtaagaaggttgtaggaaaaacgtaaactggtttgtgatctcaggaatgaagaaacaacataccacctgggcatcttatgccccctatcccacaamtgaagaaggtgacccagacccagcatttcctaacctccttacctagaaacaaaagacagcccaagtgggatcattcattatatggatcca

SEQ ID NO: 90231 - DNA, 938 bp, Homo sapiens
agaagtcatccctaaaaacttcagatgacaaacggggaccgctactgtaggtcactgctgacctcactcactgctcccctgcctgggcatccacacacagctgtgtagaggctctggctcctgggaggacacctcccagcggaagcacagacctgcctgtcctgccgctgttctctctctcctctctctctttctctgactccttctctcttagtccctccctctctctccttctctctgcctctctttctctagtcctttaggaatttgcccctggaccctccaggctggttcatattctggtgtttagccaccaacactgcccctattaccaycctacttgataagctctgtgctgtctccttccctgtgattttccttaacaaactgtattaggaacacctcgcaggaactcaggtcctcacagctgtgtcactgcacctagcacctaatgcttcctgggggcatttcttcaatgacgcaggggagaaggcaaagtgaccctgagcgcatgggcttccgtgccttctcctgcagaaccccacccacaccgatgggtgacgctcctctgcgggcctcacagggagggacaggcgtggcatggtcctcaccatctcccgtaaattcgtgtaaaaccaccccgatggaatggacagatggagcacatgcccagtcttgaatcataagccctacagacaatcccaagagatcaaaatccctgaagtctaaaatcctgaacaactaaaaccccccaaatcacaatcacaggatatagttgcatggcgttaggagggactattaccttgttattcttctttattcagaatattatgaattccaatggaatctccaaaccataatgacagacttgaattttggtgcgatcaacgtttctacaggtgaatttcaaggtatttccaataaaatttatttcgttt

SEQ ID NO: 90232 - DNA, 2391 bp, Homo sapiens
agacggtctagctcagatgctctgcaggagacgaaactgagacccagagagctggggtcgcacgtccagtcctcgtggtgcccacggaggcccagagtgtgggaatcctcctgcagcaattccggctcgtggtctagtgatgttcccatctcccagctcctacgggaggaagtaaaatgaggtgttcatgaatttcccttttctcctgtgaatatgctctcaggctacaagattctcttggttttctaaaggttatgttgataagtgtctctttttcaacattttaatttgcatgtatatatgtgtatatatatgaatcttaatccatggctaggctcctaaagacagcagttttctgtcaacaatatttaaataaactcaagcagcttctactctccctctatatgacagaaatgcattaaaaatctttgtattatggcattttgcattcatatattcagtagcaataacaattttccttcacagacacagaaggtttatgctttctctaccaaaattttcagactttgccgggtaggacttcataatcataatgataaaacaatctccctgctgtagtccatggcacaaatcctcctggagacagtttgtgagccttgaggagggactctcattccaacaaatagtgacaatttttgctaaataaaatattgcctttatttcattgagctgggaatgccctaagcatgagatgttgctgtctttcctcatcaggcacctggagccccactgatggctgtctgtgtgcctttctgtggcccagtgacgactggcccttagggttggggcccaatggttttcctcccatgggctcaccacagtgtcaggcagctgaggactttgctaacatgtcctgtcctcgttcacagagtccttggctccgtcattgtgtctgtctaggacgtgcatggatggcttaggaagagaaggcagacaatggacagaaccagacaaggggccaagcacagggctggaaagtcactcagacagatgagcctgtacctgggtctcctgatgtgtgtgctsgagggtctgggaaccgaggctgacatgcctggtgtcaggttaatttccttctgtgtttaatatcctaccccaaaatacatctttcaagactttattattattatcattctaggacttttgttgatgggacatctctgtatgatcttatgtggctcattaagggattcctatttatgactttagccacagggcaggggtatcaccttccttttcattctctgattactcactcacccactgagaactgctgtgattacatccggtgccccataggaggtcagggccacagttaagggatgggggaagtaaagtcaggggaagaggaaaaagacggatccgtaagacatgggacgtggcatagaattgtttaggaaatcccagtcttcctgaaaacttaggttgtttttaatgacacatttattggagacaagccgagtgaactgaaggaacctcttttcttctgcctccattttttttttttttttttgagatggagtcttgctctgtctccaggctggagcacagtggtgcgatctcggctcactgcaaccaccaactccctggttcaagcgattctcctgcctcagcccccagagtagctgggattacaggcacctgccaccacgcctggctaatttctgtatttttagtagagactaggtttcatcatgttggccaggctggtctcaaactcctgaccttgtgatctacctgccttggcctcccaaagtgctgggattacagctgtgatcttcctccaatttttgtggctactgcacaaatatggatttagatgacaaatatcatgtattaaaaaatcatgagacttggtccttccaggagtttaaaaagatgccgttttgaataagactcgaaggcacagctgggggttgggatgaggtcaccatgctgttgccaaagtgatgtctgaagttttaaaacggcacatcagtgatggagctgccagacttagcaaataaaaatacaggttacccagttaaatgtgaatctcagataaatcacacatgattttttttgtgctataagtatatcccatgcaatatttgggatatacttatactaaaatattatttattatttatctaaaattcaatgtaactgggctcttggcaatcctaccgatgactattttatataagcagaaacacaaaccatgaaacgtgtttagagtaacgtcttacccagagccaggtcgtctgagccccagtccctaggaggtgcctctgctctgtcgctcttcaccggcaggtcacccctggacccgttggctttgctggcttaggggtggggtgtgtgtgggtcaggaggcaggaggctggagta

SEQ ID NO: 90233 - DNA, 2391 bp, Homo sapiens
agacggtctagctcagatgctctgcaggagacgaaactgagacccagagagctggggtcgcacgtccagtcctcgtggtgcccacggaggcccagagtgtgggaatcctcctgcagcaattccggctcgtggtctagtgatgttcccatctcccagctcctacgggaggaagtaaaatgaggtgttcatgaatttcccttttctcctgtgaatatgctctcaggctacaagattctcttggttttctaaaggttatgttgataagtgtctctttttcaacattttaatttgcatgtatatatgtgtatatatatgaatcttaatccatggctaggctcctaaagacagcagttttctgtcaacaatatttaaataaactcaagcagcttctactctccctctatatgacagaaatgcattaaaaatctttgtattatggcattttgcattcatatattcagtagcaataacaattttccttcacagacacagaaggtttatgctttctctaccaaaattttcagactttgccgggtaggacttcataatcataatgataaaacaatctccctgctgtagtccatggcacaaatcctcctggagacagtttgtgagccttgaggagggactctcattccaacaaatagtgacaatttttgctaaataaaatattgcctttatttcattgagctgggaatgccctaagcatgagatgttgctgtctttcctcatcaggcacctggagccccactgatggctgtctgtgtgcctttctgtggcccagtgacgactggcccttagggttggggcccaatggttttcctcccatgggctcaccacagtgtcaggcagctgaggactttgctaacatgtcctgtcctcgttcacagagtccttggctccgtcattgtgtctgtctaggacgtgcatggatggcttaggaagagaaggcagacaatggacagaaccagacaaggggccaagcacagggctggaaagtcactcagacagatgagcctgtacctgggtctcctgatgtgtgtgctggagggtctgggaaccgaggctgacatgcctggtgtcaggttaatttccttctgtgtttaatatcctaccccaaaatacatctttcaagactttattattattatcattctaggacttttgttgatgggacatctctgtatgatcttatgtggctcattaagggattcctatttatgactttagccacagggcaggggtatcaccttccttttcattctctgattactcactcacccactgagaactgctgtgattacatccggtgccccataggaggtcagggccacagttaagggatgggggaagtaaagtcaggggaagaggaaaaagacggatccgtaagacatgggacgtggcatagaattgtttaggaaatcccagtcttcctgaaaacttaggttgtttttaatgacacatttattggagacaagccgagtgaactgaaggaacctcttttcttctgcctccattttttttttttttttttgagatggagtcttgctctgtcyccaggctggagcacagtggtgcgatctcggctcactgcaaccaccaactccctggttcaagcgattctcctgcctcagcccccagagtagctgggattacaggcacctgccaccacgcctggctaatttctgtatttttagtagagactaggtttcatcatgttggccaggctggtctcaaactcctgaccttgtgatctacctgccttggcctcccaaagtgctgggattacagctgtgatcttcctccaatttttgtggctactgcacaaatatggatttagatgacaaatatcatgtattaaaaaatcatgagacttggtccttccaggagtttaaaaagatgccgttttgaataagactcgaaggcacagctgggggttgggatgaggtcaccatgctgttgccaaagtgatgtctgaagttttaaaacggcacatcagtgatggagctgccagacttagcaaataaaaatacaggttacccagttaaatgtgaatctcagataaatcacacatgattttttttgtgctataagtatatcccatgcaatatttgggatatacttatactaaaatattatttattatttatctaaaattcaatgtaactgggctcttggcaatcctaccgatgactattttatataagcagaaacacaaaccatgaaacgtgtttagagtaacgtcttacccagagccaggtcgtctgagccccagtccctaggaggtgcctctgctctgtcgctcttcaccggcaggtcacccctggacccgttggctttgctggcttaggggtggggtgtgtgtgggtcaggaggcaggaggctggagta

SEQ ID NO: 90234 - DNA, 2391 bp, Homo sapiens
agacggtctagctcagatgctctgcaggagacgaaactgagacccagagagctggggtcgcacgtccagtcctcgtggtgcccacggaggcccagagtgtgggaatcctcctgcagcaattccggctcgtggtctagtgatgttcccatctcccagctcctacgggaggaagtaaaatgaggtgttcatgaatttcccttttctcctgtgaatatgctctcaggctacaagattctcttggttttctaaaggttatgttgataagtgtctctttttcaacattttaatttgcatgtatatatgtgtatatatatgaatcttaatccatggctaggctcctaaagacagcagttttctgtcaacaatatttaaataaactcaagcagcttctactctccctctatatgacagaaatgcattaaaaatctttgtattatggcattttgcattcatatattcagtagcaataacaattttccttcacagacacagaaggtttatgctttctctaccaaaattttcagactttgccgggtaggacttcataatcataatgataaaacaatctccctgctgtagtccatggcacaaatcctcctggagacagtttgtgagccttgaggagggactctcattccaacaaatagtgacaatttttgctaaataaaatattgcctttatttcattgagctgggaatgccctaagcatgagatgttgctgtctttcctcatcaggcacctggagccccactgatggctgtctgtgtgcctttctgtggcccagtgacgactggcccttagggttggggcccaatggttttcctcccatgggctcaccacagtgtcaggcagctgaggactttgctaacatgtcctgtcctcgttcacagagtccttggctccgtcattgtgtctgtctaggacgtgcatggatggcttaggaagagaaggcagacaatggacagaaccagacaaggggccaagcacagggctggaaagtcactcagacagatgagcctgtacctgggtctcctgatgtgtgtgctggagggtctgggaaccgaggctgacatgcctggtgtcaggttaatttccttctgtgtttaatatcctaccccaaaatacatctttcaagactttattattattatcattctaggacttttgttgatgggacatctctgtatgatcttatgtggctcattaagggattcctatttatgactttagccacagggcaggggtatcaccttccttttcattctctgattactcactcacccactgagaactgctgtgattacatccggtgccccataggaggtcagggccacagttaagggatgggggaagtaaagtcaggggaagaggaaaaagacggatccgtaagacatgggacgtggcatagaattgtttaggaaatcccagtcttcctgaaaacttaggttgtttttaatgacacatttattggagacaagccgagtgaactgaaggaacctcttttcttctgcctccattttttttttttttttttgagatggagtcttgctctgtctccaggctggagcacagtggtgcgatctcggctcactgcaaccaccaactccctggttcaagcgattctcctgcctcagcccccmgagtagctgggattacaggcacctgccaccacgcctggctaatttctgtatttttagtagagactaggtttcatcatgttggccaggctggtctcaaactcctgaccttgtgatctacctgccttggcctcccaaagtgctgggattacagctgtgatcttcctccaatttttgtggctactgcacaaatatggatttagatgacaaatatcatgtattaaaaaatcatgagacttggtccttccaggagtttaaaaagatgccgttttgaataagactcgaaggcacagctgggggttgggatgaggtcaccatgctgttgccaaagtgatgtctgaagttttaaaacggcacatcagtgatggagctgccagacttagcaaataaaaatacaggttacccagttaaatgtgaatctcagataaatcacacatgattttttttgtgctataagtatatcccatgcaatatttgggatatacttatactaaaatattatttattatttatctaaaattcaatgtaactgggctcttggcaatcctaccgatgactattttatataagcagaaacacaaaccatgaaacgtgtttagagtaacgtcttacccagagccaggtcgtctgagccccagtccctaggaggtgcctctgctctgtcgctcttcaccggcaggtcacccctggacccgttggctttgctggcttaggggtggggtgtgtgtgggtcaggaggcaggaggctggagta

SEQ ID NO: 90235 - DNA, 2391 bp, Homo sapiens
agacggtctagctcagatgctctgcaggagacgaaactgagacccagagagctggggtcgcacgtccagtcctcgtggtgcccacggaggcccagagtgtgggaatcctcctgcagcaattccggctcgtggtctagtgatgttcccatctcccagctcctacgggaggaagtaaaatgaggtgttcatgaatttcccttttctcctgtgaatatgctctcaggctacaagattctcttggttttctaaaggttatgttgataagtgtctctttttcaacattttaatttgcatgtatatatgtgtatatatatgaatcttaatccatggctaggctcctaaagacagcagttttctgtcaacaatatttaaataaactcaagcagcttctactctccctctatatgacagaaatgcattaaaaatctttgtattatggcattttgcattcatatattcagtagcaataacaattttccttcacagacacagaaggtttatgctttctctaccaaaattttcagactttgccgggtaggacttcataatcataatgataaaacaatctccctgctgtagtccatggcacaaatcctcctggagacagtttgtgagccttgaggagggactctcattccaacaaatagtgacaatttttgctaaataaaatattgcctttatttcattgagctgggaatgccctaagcatgagatgttgctgtctttcctcatcaggcacctggagccccactgatggctgtctgtgtgcctttctgtggcccagtgacgactggcccttagggttggggcccaatggttttcctcccatgggctcaccacagtgtcaggcagctgaggactttgctaacatgtcctgtcctcgttcacagagtccttggctccgtcattgtgtctgtctaggacgtgcatggatggcttaggaagagaaggcagacaatggacagaaccagacaaggggccaagcacagggctggaaagtcactcagacagatgagcctgtacctgggtctcctgatgtgtgtgctggagggtctgggaaccgaggctgacatgcctggtgtcaggttaatttccttctgtgtttaatatcctaccccaaaatacatctttcaagactttattattattatcattctaggacttttgttgatgggacatctctgtatgatcttatgtggctcattaagggattcctatttatgactttagccacagggcaggggtatcaccttccttttcattctctgattactcactcacccactgagaactgctgtgattacatccggtgccccataggaggtcagggccacagttaagggatgggggaagtaaagtcaggggaagaggaaaaagacggatccgtaagacatgggacgtggcatagaattgtttaggaaatcccagtcttcctgaaaacttaggttgtttttaatgacacatttattggagacaagccgagtgaactgaaggaacctcttttcttctgcctccattttttttttttttttttgagatggagtcttgctctgtctccaggctggagcacagtggtgcgatctcggctcactgcaaccaccaactccctggttcaagcgattctcctgcctcagcccccagagtagctgggattacaggcacctgccaccacgccyggctaatttctgtatttttagtagagactaggtttcatcatgttggccaggctggtctcaaactcctgaccttgtgatctacctgccttggcctcccaaagtgctgggattacagctgtgatcttcctccaatttttgtggctactgcacaaatatggatttagatgacaaatatcatgtattaaaaaatcatgagacttggtccttccaggagtttaaaaagatgccgttttgaataagactcgaaggcacagctgggggttgggatgaggtcaccatgctgttgccaaagtgatgtctgaagttttaaaacggcacatcagtgatggagctgccagacttagcaaataaaaatacaggttacccagttaaatgtgaatctcagataaatcacacatgattttttttgtgctataagtatatcccatgcaatatttgggatatacttatactaaaatattatttattatttatctaaaattcaatgtaactgggctcttggcaatcctaccgatgactattttatataagcagaaacacaaaccatgaaacgtgtttagagtaacgtcttacccagagccaggtcgtctgagccccagtccctaggaggtgcctctgctctgtcgctcttcaccggcaggtcacccctggacccgttggctttgctggcttaggggtggggtgtgtgtgggtcaggaggcaggaggctggagta

SEQ ID NO: 90236 - DNA, 654 bp, Homo sapiens
tggatccatcctgtgtttcagggtggggttttactcttctgctgagagtgtggccttttctgatcccggctttaggagagcaggacttcctgttgaagcccccacattcccatgtctccaaactttaagagatcatgaaattccagttcacctttccttggtttagctggcatccttgggacgaaagctgggctgtgcttggccaccccctctgtgttacaggcttatggtctaccctgataatcgctctctatcacatccgctagtcagtcatttttaaataggcttcttagagttccttccgcgttctgttactctcaccgggaaagctgatctgagcaacgtgccgtgccccagcactgagaagctctctgcttagccccagaacctcactgctgctctttcctgtcttcttcttaaaaacaatgattgtgagtctctatctctcagaagaccattttctgtattttacaatgagatttcaagaaagagaagagataggttggtgttatccactgtctttgcgtaaatcccagcccctgtgtttgccctgcaccgtgatgttctcctcctggccaagaaaaacatgtggggggagaycacataataaagtgggggattgccagctgaacagagactcagaaagaaagcact

SEQ ID NO: 90237 - DNA, 636 bp, Homo sapiens
  misc_feature (1)...(636): n = A,T,C or G
gnnnnnnnnnnnnnnnnnnnnnnnnnnnnnnnnnnnnnnnnnnnnnnnnnnnnnnnnnnnnnnnnnnnnnnnnnnnnnnnnnnnnnnnnnnnnnnnnnnnncaattctgtctttaaaattgtgatattttgtctgtcatgggtttttgtactaactttggtttttaaaaacatattgcattaaaatgtagttggcctttaccttcatgactgaaattttgtggccagggaggcggcttgctggcctccccacactcgagctcctgtgtgaatagagtctgtgggttgtctttggggttcgcctgactccccagacactctcctgcttctccatctctcaatggtggcagcagcaggctctgaggtagatgcagacgccagaggttttatttgcacagggccagggacacggcagataggaagtgagcagaagtctcrtggcctctttatatatgatatttatcatctaaatccatatctgcacggtagcaacaaaaatttggggaaggggaaaagaagtttcttcagttaatttgacttgtccctaagaagggagtcatcaaaagacaatatatattttcaggaagatggcagtttcctaaacaatcccgtgccacgtcctgtgtctaatggatcc

SEQ ID NO: 90238 - DNA, 636 bp, Homo sapiens
  misc_feature (1)...(636): n = A,T,C or G
gnnnnnnnnnnnnnnnnnnnnnnnnnnnnnnnnnnnnnnnnnnnnnnnnnnnnnnnnnnnnnnnnnnnnnnnnnnnnnnnnnnnnnnnnnnnnnnnnnnnncaattctgtctttaaaattgtgatattttgtctgtcatgggtttttgtactaactttggtttttaaaaacatattgcattaaaatgtagttggcctttaccttcatgactgaaattttgtggccagggaggcggcttgctggcctccccacactcgagctcctgtgtgaatagagtctgtgggttgtctttggggttcgcctgactccccagacactctcctgcttctccatctctcaatggtggcagcagcaggctctgaggtagatgcagacgccagaggttttatttgcacagggccagggacacggcagataggaagtgagcagaagtctcgtggcctctttatatatgatatttatcatctaaatccatatctgcacggtagcaacaaaaatttggggaaggggaaaagaagtttcttcagttaatttgacttgtccctaagaagggagtcatcaaaagacaatatatattttcaggaagatggcagtttcctaaacaatcccgygccacgtcctgtgtctaatggatcc

SEQ ID NO: 90239 - DNA, 748 bp, Homo sapiens
tctggggatccagggaaaagtacaacagagtccctgcccattaggagtccttgttttagaggagacaaacaaccaaagaaacaattacagctgggcttgcgaaaggcaccatggagctgctgactcccacagtagcccaggggggttcccagggaacagacacccagcctccctgtcccccgcccagacactgagggtggggaccctggaaggcatgagaccaagggctccctaaggacacgcagcaattgtctcttcagactgccctggaaataatggggacaggaattctgcaaaagcctccccaaggctgggaagatcggctttgcaagtgggttccttgagagctgggaccatgtctccttctcattagacaaatcgctgaacaaaamtgacgggtgcaaaaacactttgcaaactggaaagctttggatgaagttgggagcttggaagcagagatggtcgtcactagactgggagcctcctgaaggcaagggctgtgcctcctccgtctgactggaggcccctgttttaattctgtagtcccagaagcttctgcatctggggcatgcttagtgaaccctcttcctccagttacatggatgctccagaattaaggctgagctgatgcacctgaaccccttctgtctcttacaaagaaaatcctagctgtactctgacatctgagatcataattttaaaccatttattaaaccccttactatatatatcacatagtgtataaggg

SEQ ID NO: 90240 - DNA, 1981 bp, Homo sapiens
tgcattaccctacatatttattttttgtatatgatgagaacatttaaaatctgctctcttagcaattttcaaggacacgatacattgttgtttactatagtcaccacgtcgtactataacaaaatcttatcatcttggagttagaaggaagccgggtgctctggttctcaaacttgtctgcacagggatcacttggagagctttcaaaagcaccaggctgcacttcagaccaattagatcggaatccatgagagtgggatctacatatctgtactctttaaattccccggatcacagtggctcacgtctgtaatcccaacacttcgggaggccgagagcgggaggcttcagttcaggagttcaagaccagcctgggcaatatggcaaaaccccatctctacaaaaaaatacaaaaattagctgggcatggtggtgtgtgcctgtaatcccagctactcaggagactgagttgggagaattgttcaagcccaggaggttgaggctgcaatgagccaagattgcacctctgcactccagcctgggcaacagagcaagactctgtctctaaataagtaaataaatccccccggggtgactctggcatgtaatcaagcttcagcagtgttctagaacgacttcctacccaatacaggaatcacaatcattgattcattcaataagtatatataaagcacctactcagtgcctgaaaccagggctgtctcagaatctgtttgttggttttctagccttttcttggatacttgaagtgatggcgaactcactgccacatgaggcagaactctgcccaagatctggtttgcagtggtgtgtagagaggagagatgggttgagaacgggcagctgagatgcattgggtcctactatgtgccagcaatggtgtgggaaatttcacaggaactgcttctctgaamttttacacacttctatccagtgagataggagatacaatcacagtattgcagatgaggaaactgaggctcagagaggataaggggcccatccaagaccactcagtttgtgtgtggcagagcaaggtccacatcccagggtgtcactttttgtggggagttggggctggttgggggagagggaacacaggtcaggcaggggatcccatccggggatcatgcccagatgtccagaaagagtgcactgcattaggctgaagtgcggtgatgcagtcaaagctcactgcagccttgaccttctggactcaagtgatcctcccacctcagcctcctgagtagctgagagcacaggcatgcactactacacctggctatttttttaatatagttttgtagggacagggtctcactatgttactcaggctggtctcgaactcctggcctcaaacaatcctcctgcctcagcctcccaaagtgccctgttaggaagttaatatggaggttgacttactaacctccacattctggacacatgcttccccctcttggccctgagctgggagagattctaacaaacttaatttccccagagaattggggacctgagtcacccctccagaaagtggcacttacatataaaaggaccaagctgagcagagtaatgctcagcctgaggactgactgatggtgacagtgaggtcctgtgggcagggaagacccatcctgggcattctcaaatcctagcccagaggtaacgccctggatgggtcacctatgtggcagtaacagcagctgccattttttgcacacctactgtgtgccaggcgctttccctccatgaccccagccctcacagcaaccctgcaaagccagattatgatgctatttttccagacagaaacaaaacagagacaaatctgtcttctgatcctgggttcctctccaccaagaccagcgtttttcaagctgcaggttgtgacccatgagcgggatgtggagtcaatgtagggggccctgagcaatgttttttaatgaaatcaaatggggta

SEQ ID NO: 90241 - DNA, 1981 bp, Homo sapiens
tgcattaccctacatatttattttttgtatatgatgagaacatttaaaatctgctctcttagcaattttcaaggacacgatacattgttgtttactatagtcaccacgtcgtactataacaaaatcttatcatcttggagttagaaggaagccgggtgctctggttctcaaacttgtctgcacagggatcacttggagagctttcaaaagcaccaggctgcacttcagaccaattagatcggaatccatgagagtgggatctacatatctgtactctttaaattccccggatcacagtggctcacgtctgtaatcccaacacttcgggaggccgagagcgggaggcttcagttcaggagttcaagaccagcctgggcaatatggcaaaaccccatctctacaaaaaaatacaaaaattagctgggcatggtggtgtgtgcctgtaatcccagctactcaggagactgagttgggagaattgttcaagcccaggaggttgaggctgcaatgagccaagattgcacctctgcactccagcctgggcaacagagcaagactctgtctctaaataagtaaataaatccccccggggtgactctggcatgtaatcaagcttcagcagtgttctagaacgacttcctacccaatacaggaatcacaatcattgattcattcaataagtatatataaagcacctactcagtgcctgaaaccagggctgtctcagaatctgtttgttggttttctagccttttcttggatacttgaagtgatggcgaactcactgccacatgaggcagaactctgcccaagatctggtttgcagtggtgtgtagagaggagagatgggttgagaacgggcagctgagatgcattgggtcctactatgtgccagcaatggtgtgggaaatttcacaggaactgcttctctgaacttttacacacttctatccagtgagataggagatacaatcacagtattgcagatgaggaaactgaggctcagagaggataaggggcccatccaagaccactcagtttgtgtgtggcagagcaaggtccacatcccagggtgtcactttttgtggggagttggggctggttgggggagagggaacacaggtcaggcaggggatcccatccggggatcatgcccagatgtccagaaagagtgcactgcattaggctgaagtgcggtgatgcagtcaaagctcactgcagccttgaccttctggactcaagtgatcctcccacctcagcctcctgagtagctgagagcacaggcatgcactacyacacctggctatttttttaatatagttttgtagggacagggtctcactatgttactcaggctggtctcgaactcctggcctcaaacaatcctcctgcctcagcctcccaaagtgccctgttaggaagttaatatggaggttgacttactaacctccacattctggacacatgcttccccctcttggccctgagctgggagagattctaacaaacttaatttccccagagaattggggacctgagtcacccctccagaaagtggcacttacatataaaaggaccaagctgagcagagtaatgctcagcctgaggactgactgatggtgacagtgaggtcctgtgggcagggaagacccatcctgggcattctcaaatcctagcccagaggtaacgccctggatgggtcacctatgtggcagtaacagcagctgccattttttgcacacctactgtgtgccaggcgctttccctccatgaccccagccctcacagcaaccctgcaaagccagattatgatgctatttttccagacagaaacaaaacagagacaaatctgtcttctgatcctgggttcctctccaccaagaccagcgtttttcaagctgcaggttgtgacccatgagcgggatgtggagtcaatgtagggggccctgagcaatgttttttaatgaaatcaaatggggta

SEQ ID NO: 90242 - DNA, 1998 bp, Homo sapiens
  misc_feature (1)...(1998): n = A,T,C or G
cttgccgtgtgtttatttccatgttatttctgcctaaatgaggagtaggatgctgtttcctgacctgtggatttgggacaaacccctaacgattccatccctgaaccatggtgacttaaggttagatcccaaaccagagggtctctaagtcgacaaaggctgcaagcccaaaaannnnnnnnnnnnnnnnnnnnnnnnnnnnnnnnnnnnnnnnnnnnnnnnnnnnnnnnnnnnnnnnnnnnnnnnnnnnnnnnnnnnnnnnnnnnnnnnnnnntctaggttagtccaataccaaagtggctaagagaaagtagnagatagttagccctgctctgccaccattnctgtgtgacttgggcattcactccccttctatgtgcagctctcanncttaaaatggaggtagtgctacttcacatagcgtgggagaagccgtgnaaacgtnagtaaaacaggctctgtgaccaagggtgggtatttttgcggaaacacggggctgtttctccagaaccacacgtggtgagcccacatcctagaccacacctcttaggtggtgtccagatattgtganaagtgttggtgggcaccccgatctgcctctcatggtaggaatcacagactctttctttctgagaggacagaatgtgatcaggggaaattcattcatccattcatctctatgttctgtagttcactctttcattcattcattcattcattcatcattcattcatcatcattcatcaagctctgactatttgccagtcactgttttagatgcttgtttgtgtctgagaaattcaacctagagaagaacttactgtactctggactcagagatgggggtagtgggtggaagtggccaaactgacccagacttcagtcctgcctgggaaaacagtcctcataggagaatgttggaatcggataggtgtgggtctctgccattacttacctctctgtgtgacctagggcagattacttagcctttctgagtctctgctcctctgtaagatgtgaaaagcaatggtgatcccctgccagggtttctgtgaggactgaatctaaatcggggcagccccaagtgtctgagtttggactctataaatgatgcctgtaaagtggaggttaaggtcacaggaatcagatgagctgtgttgaatctcagctctgccacttgttggccaaggggactttggtaagtcacttggcctgccctgcctcagtttcctcttctgtcagatggggctcataggtattgtgaggattcrattgttaaaaatgtagatcatgtagcacaaaccctggcacatggtagacctcaatcaatggtggccagtggtattaaatattcctcgtgatacctgcgggcccagccatgaaggagcttagacttccttcataaacttctcacggaggtgtgtgctgctgaggtatgcaagatgagctttggattttatgtgcatacatatttaaaaatggaatttttctataacttatagatacataaatctatacattttgagagtgaataaaaggttggggaacaactactctctgggtggaagagcccctcaccccctgcccctgccccataaagaatgtgggtaggattctgcggccttggacaaagactctggccacatggaaaacggggactcatcttggagcctgggatttctttctatggaatgaggctgggtgtcccgcaccccttgctcagttggccccaccggaatttctagattcctaagtcactggtggagtagatacctctcctcgccccttgagtttcctgggatgggtttggtctctgtttgggtgccttgttgtggggtttccatggggctgtctgagcttggtgattgcactgatctcgggggcaacacccctgctaccaaagccatctttgaggaggctgcagccttccttcccgggagaggtggagggaggaggaggaggaggaggtaggcactccctgagcggtgtagcagtaac

SEQ ID NO: 90243 - DNA, 1998 bp, Homo sapiens
  misc_feature (1)...(1998): n = A,T,C or G
cttgccgtgtgtttatttccatgttatttctgcctaaatgaggagtaggatgctgtttcctgacctgtggatttgggacaaacccctaacgattccatccctgaaccatggtgacttaaggttagatcccaaaccagagggtctctaagtcgacaaaggctgcaagcccaaaaannnnnnnnnnnnnnnnnnnnnnnnnnnnnnnnnnnnnnnnnnnnnnnnnnnnnnnnnnnnnnnnnnnnnnnnnnnnnnnnnnnnnnnnnnnnnnnnnnnntctaggttagtccaataccaaagtggctaagagaaagtagnagatagttagccctgctctgccaccattnctgtgtgacttgggcattcactccccttctatgtgcagctctcanncttaaaatggaggtagtgctacttcacatagcgtgggagaagccgtgnaaacgtnagtaaaacaggctctgtgaccaagggtgggtatttttgcggaaacacggggctgtttctccagaaccacacgtggtgagcccacatcctagaccacacctcttaggtggtgtccagatattgtganaagtgttggtgggcaccccgatctgcctctcatggtaggaatcacagactctttctttctgagaggacagaatgtgatcaggggaaattcattcatccattcatctctatgttctgtagttcactctttcattcattcattcattcattcatcattcattcatcatcattcatcaagctctgactatttgccagtcactgttttagatgcttgtttgtgtctgagaaattcaacctagagaagaacttactgtactctggactcagagatgggggtagtgggtggaagtggccaaactgacccagacttcagtcctgcctgggaaaacagtcctcataggagaatgttggaatcggataggtgtgggtctctgccattacttacctctctgtgtgacctagggcagattacttagcctttctgagtctctgctcctctgtaagatgtgaaaagcaatggtgatcccctgccagggtttctgtgaggactgaatctaaatcggggcagccccaagtgtctgagtttggactctataaatgatgcctgtaaagtggaggttaaggtcacaggaatcagatgagctgtgttgaatctcagctctgccacttgttggccaaggggactttggtaagtcacttggcctgccctgcctcagtttcctcttctgtcagatggggctcataggtattgtgaggattcaattgttaaaaatgtagatcatgtagcacaaaccctggcacatggtagacctcaatcaatggtggccagtggtattaaatattcctcgtgatacctgcgggcycagccatgaaggagcttagacttccttcataaacttctcacggaggtgtgtgctgctgaggtatgcaagatgagctttggattttatgtgcatacatatttaaaaatggaatttttctataacttatagatacataaatctatacattttgagagtgaataaaaggttggggaacaactactctctgggtggaagagcccctcaccccctgcccctgccccataaagaatgtgggtaggattctgcggccttggacaaagactctggccacatggaaaacggggactcatcttggagcctgggatttctttctatggaatgaggctgggtgtcccgcaccccttgctcagttggccccaccggaatttctagattcctaagtcactggtggagtagatacctctcctcgccccttgagtttcctgggatgggtttggtctctgtttgggtgccttgttgtggggtttccatggggctgtctgagcttggtgattgcactgatctcgggggcaacacccctgctaccaaagccatctttgaggaggctgcagccttccttcccgggagaggtggagggaggaggaggaggaggaggtaggcactccctgagcggtgtagcagtaac

SEQ ID NO: 90244 - DNA, 570 bp, Homo sapiens
aaaaaaaaaaaaaaaaaaaactacacacgtttaaagtgtgcggtctgatgagttttgaaacaaatatacacacatgaaaccttcacaacaatcaatataacgaccctattcattccccgccaaactttaatcctgcctctttgtttcctgcctctcgtccccctctgcccttccctctgcaactgstaatctcttttctgtcgccatagataagttttcattttatagtattttatataactggaataatttgggggagagggggtctggcttgttccactcactacaagtattttgagattcacctatgttgttgtgtaaatcaatagttcgtctccctggacctgaccatcacttttcccaacaagaaaggagaaaaaaaaagtttgttccattttactgctgagtgtgctccattgtatggatatatgacaatttgtatattcattcacatgttgatggacatttggggggttgttttcagcttggtgccattacaaatgaaattgctatgaccatttgtctataaaagtcttttaaacatttcctttttttttttttttttttgga

SEQ ID NO: 90245 - DNA, 904 bp, Homo sapiens
taacattgtagattccccaacctaagccctctgaaatcaccctatgatgaggctcagagtcaacaaaccctatccatgccttcagagcattcagtgtttktagattaacactgaatagacagtaatcaagaatactagatattggatgaacgcctccaaaatggaagacagagatcaaaacaaacaaaaaggaatttgagggaagcataagcatgtacaggaagaactccaaaataaattatgctcagagagctaagagaggatactgcatctgtgaaacaagaatagcatgctatgaaagataacacttaggaaataaaacgtgtgaattttatggtatgtaaattaaacgtcaatacagctattttaaaaatggagtgatgctttcgaatttctgaagaaaaattatttccaccacagaaagagctaaactatcattttaagtttgttgataaatacattttctaatatatacatatattatatattttatatatatatatatataaaatttgctccccaggtaccctattctcatgaagattctgaaaattttttaaaaagaaataagattatagaacaaagacaaaaggaattcccagggcaacagtgaagtgtgatctcaagaagacagctgcgcaccaaacacaaagggcataactcaaccagactgaaacagtgagaatcaagagacagatctcatgaagactgtcactgagattcctgcagccattactgtttttgtttttggagatggagtctcactctgtcgcccaagctgggtgcagtggcgcgatcttggctcactgcaacctctgcctcctgggttctcctgtctcagcctcccgagtagctgggactacagatgcacaccaccatgcccggctaattttttgtattttag

SEQ ID NO: 90246 - DNA, 904 bp, Homo sapiens
taacattgtagattccccaacctaagccctctgaaatcaccctatgatgaggctcagagtcaacaaaccctatccatgccttcagagcattcagtgtttttagattaacactgaatagacagtaatcaagaatactagatattggatgaacgcctccaaaatggaagacagagatcaaaacaaacaaaarggaatttgagggaagcataagcatgtacaggaagaactccaaaataaattatgctcagagagctaagagaggatactgcatctgtgaaacaagaatagcatgctatgaaagataacacttaggaaataaaacgtgtgaattttatggtatgtaaattaaacgtcaatacagctattttaaaaatggagtgatgctttcgaatttctgaagaaaaattatttccaccacagaaagagctaaactatcattttaagtttgttgataaatacattttctaatatatacatatattatatattttatatatatatatatataaaatttgctccccaggtaccctattctcatgaagattctgaaaattttttaaaaagaaataagattatagaacaaagacaaaaggaattcccagggcaacagtgaagtgtgatctcaagaagacagctgcgcaccaaacacaaagggcataactcaaccagactgaaacagtgagaatcaagagacagatctcatgaagactgtcactgagattcctgcagccattactgtttttgtttttggagatggagtctcactctgtcgcccaagctgggtgcagtggcgcgatcttggctcactgcaacctctgcctcctgggttctcctgtctcagcctcccgagtagctgggactacagatgcacaccaccatgcccggctaattttttgtattttag

SEQ ID NO: 90247 - DNA, 904 bp, Homo sapiens
taacattgtagattccccaacctaagccctctgaaatcaccctatgatgaggctcagagtcaacaaaccctatccatgccttcagagcattcagtgtttttagattaacactgaatagacagtaatcaagaatactagatattggatgaacgcctccaaaatggaagacagagatcaaaacaaacaaaaaggaatttgagggaagcataagcatgtacaggaagaactccaaaataaattatgctcagagagctaagagaggatactgcatctgtgaaacaagaatagcatgctatgaaagataacacttaggaaataaaacgtgtgaattttatggtatgtaaattaaacgtcaatacagctattttaaaaatggagtgatgctttcgaatttctgaagaaaaattatttccaccacagaaagagctaaactatcattttaagtttgttgataaatacattttctaatatatacatatattatatattttatatatatatatatataaaatttgctccccaggtaccctattctcatgaagattctgaaaattttttaaaaagaaataagattatagaacaaagacaaaaggaattcccagggcaacagtgaagtgtgatctcaagaagacagctgcgcaccaaacacaaagggcataactcaaccagactgaaacagtgagaatcaagagacagatctcatgaagactgtcactgagattcctgcagccattactgtttttgtttttggagatggagtctcactctgtcgcccaagctgggtgcagtggcgcgatcttggctyactgcaacctctgcctcctgggttctcctgtctcagcctcccgagtagctgggactacagatgcacaccaccatgcccggctaattttttgtattttag

SEQ ID NO: 90248 - DNA, 487 bp, Homo sapiens
gtttgagaccaccctgaccaacatggagaaaccctgtctctactaaaaattcaaaattagccgggtacagtggcgcatgcctgtagtctcagctacttgggaggctgaggcaggagaattgcttgaacccagaaggcagaggttgtggtgagccgagatcacgccattgaactccagcctgggcaacaagagcaaaactctgtctcaaaaaaaaaaaaaaaaaaaaaagagagattcaagtctacctcagttaagtgggggcaagaacccagcattttctggaacaataaaaacatcaagctgactggatacccagagcgattttctacatggcacaaagtttctattttttccctcccttttcaattttgttttactgaaactactgaaaacartatcaagcctcttctagagtaaattttacaacaaaaatttgattcacctattcattttttagttcaaagcaaatttcaatgattctctgcca

SEQ ID NO: 90249 - DNA, 527 bp, Homo sapiens
tgctccgtcccgtgtctctgctccgtcccgtgtcyctgccccgtcccgtgtctctgccccgtcccccatgtctccactccatcccatgtccctgctcatcccccatgtccccaggcctgcctggtgtcctgcttccagcagctgatggtggagacctgctcctgtggctactacctccaccctctgccggcgggggctgagtactgcagctctgcccggcaccctgcctggggtgagtcctgctcgctgcctcccactctgtcagccattagccggggggtcacagcgagcctcacacatgcctctgacccctccccaaggacactgcttctaccgcctctaccaggacctggagacccaccggctcccctgtacctcccgctgccccaggccctgcaggtgagacgggggtgttggggtcgcggccagggatcattgccccaggtagcgtggcaggtgacacccggctgtctcttccagggagtctgcattcaagctctccactgggacctccaggtggccttccg

SEQ ID NO: 90250 - DNA, 527 bp, Homo sapiens
tgctccgtcccgtgtctctgctccgtcccgtgtctctgcyccgtcccgtgtctctgccccgtcccccatgtctccactccatcccatgtccctgctcatcccccatgtccccaggcctgcctggtgtcctgcttccagcagctgatggtggagacctgctcctgtggctactacctccaccctctgccggcgggggctgagtactgcagctctgcccggcaccctgcctggggtgagtcctgctcgctgcctcccactctgtcagccattagccggggggtcacagcgagcctcacacatgcctctgacccctccccaaggacactgcttctaccgcctctaccaggacctggagacccaccggctcccctgtacctcccgctgccccaggccctgcaggtgagacgggggtgttggggtcgcggccagggatcattgccccaggtagcgtggcaggtgacacccggctgtctcttccagggagtctgcattcaagctctccactgggacctccaggtggccttccg

SEQ ID NO: 90251 - DNA, 527 bp, Homo sapiens
tgctccgtcccgtgtctctgctccgtcccgtgtctctgccccstcccgtgtctctgccccgtcccccatgtctccactccatcccatgtccctgctcatcccccatgtccccaggcctgcctggtgtcctgcttccagcagctgatggtggagacctgctcctgtggctactacctccaccctctgccggcgggggctgagtactgcagctctgcccggcaccctgcctggggtgagtcctgctcgctgcctcccactctgtcagccattagccggggggtcacagcgagcctcacacatgcctctgacccctccccaaggacactgcttctaccgcctctaccaggacctggagacccaccggctcccctgtacctcccgctgccccaggccctgcaggtgagacgggggtgttggggtcgcggccagggatcattgccccaggtagcgtggcaggtgacacccggctgtctcttccagggagtctgcattcaagctctccactgggacctccaggtggccttccg

SEQ ID NO: 90252 - DNA, 527 bp, Homo sapiens
tgctccgtcccgtgtctctgctccgtcccgtgtctctgccccgtcccgtgtctctgccccgtcccccatgtctccrctccatcccatgtccctgctcatcccccatgtccccaggcctgcctggtgtcctgcttccagcagctgatggtggagacctgctcctgtggctactacctccaccctctgccggcgggggctgagtactgcagctctgcccggcaccctgcctggggtgagtcctgctcgctgcctcccactctgtcagccattagccggggggtcacagcgagcctcacacatgcctctgacccctccccaaggacactgcttctaccgcctctaccaggacctggagacccaccggctcccctgtacctcccgctgccccaggccctgcaggtgagacgggggtgttggggtcgcggccagggatcattgccccaggtagcgtggcaggtgacacccggctgtctcttccagggagtctgcattcaagctctccactgggacctccaggtggccttccg

SEQ ID NO: 90253 - DNA, 527 bp, Homo sapiens
tgctccgtcccgtgtctctgctccgtcccgtgtctctgccccgtcccgtgtctctgccccgtcccccatgtctccactccatcccatgtccctgctcatcccccatgtccccaggcctgcctggtgtcctgcttccagcagctgatggtggagacctgctcctgtggctactacctccaccctctgccggcgggggctgagtactgcagctctgcccggcaccctgcctggggtgagtcctgctcgctgcctcccactctgtcagccattagccggggggtcacagcgagcctcacacatgcctctgacccctccccaaggacactgcttctaccgcctctaccaggacctggagacccaccggctcccctgtacctcccgctgccccaggccctgcaggtgagacgggggtgttggggtcgsggccagggatcattgccccaggtagcgtggcaggtgacacccggctgtctcttccagggagtctgcattcaagctctccactgggacctccaggtggccttccg

SEQ ID NO: 90254 - DNA, 588 bp, Homo sapiens
gctctcaaaggatctggttacctgctgactgcttgtctggctcaaagagtgtcaattttgggatataattttatgggatctgatgaactgagaaatgtcaytgaagacataaagttaagtcctttagaagctataagcacgggctgggaggactcagttcattgccacattagagtataatggttgccctccctgtctttagaatcaaacatcttgggttctaatgcaatatctgcccttgttaactaagagccctcaggcaagttaattaacctctcagagctttttttttataccctgacaggatttgtgtctttgggttgtttagggattaaatgagattaaaatatacatgcaatctgaataagcattacctacggattgtaatcaaatcagaactttgtttttgtttcctactagccctttaacatttattcagtgagagaagtttcctactcttccactgtatgaaaattcttataagcaggtcataggagttattttttattgtttagtattagaaaattctagggtcactttgagttacaatatgcagttcttaatcagaaattcaaacgtcaagtacat

SEQ ID NO: 90255 - DNA, 588 bp, Homo sapiens
gctctcaaaggatctggttacctgctgactgcttgtctggctcaaagagtgtcaattttgggatataattttatgggatctgatgaactgagaaatgtcattgaagacataaagttaagtcctttagaagctataagcacgggctgggaggactcagttcattgccacattagagtataatggttgccctccctgtctttagaatcaaacatcttgggttctaatgcaatatctgcccttgttaactaagagccctcaggcaagttaattaacctctcagagctttttttttataccctgacaggatttgtgtctttgggttgtttagggattaaatgagattaaaatatacatgcaatctgaataagcattacctacggattgtaatcaaatcagamctttgtttttgtttcctactagccctttaacatttattcagtgagagaagtttcctactcttccactgtatgaaaattcttataagcaggtcataggagttattttttattgtttagtattagaaaattctagggtcactttgagttacaatatgcagttcttaatcagaaattcaaacgtcaagtacat

SEQ ID NO: 90256 - DNA, 2208 bp, Homo sapiens
tgagaattggaatatctgaaataattgggacttaaaacagtttgggttctgaaggcaaacgctgacggagaatcctttaatgaacattaatctttttagaagcgctccatggggagccgtcgctgaccttcagaactgtttatcttgcaaagaaatgctgggatgtaaactacccccactccatcagcctccacaccttacctccccctcacctcccaacactctaattctgttagagggatgggggaagagagaaacgaatttaaataaaaactcaaaaaaggaaagggctaaccgaaaaatgagccaaccaaattttaagttcaacaacaagcattctggaggattctggggttttaaattcggaggctccttaaatattctgccgcagttgggggaggagcgatggacccctaggtctccggaggctacacgtgttccccgatcccgtttccagggggagcccttccttcctattgcgctggtcgtgctcctggcccgcgtgcccaggaagggcgcagcggagtcgcgtgcccgtccgggcggaggacgccgtctccgcgcggcggtgccgggcccctgcttccggaacgctaattttagggttcgccggcccccctttcttttcacccgctttccgtgcgagccgctgcgcagcagtctgcgcttcgagtgcgctgtgttttaaggaggccccggcgcttgccccttgggctcgggggcttgggtgcgcaggtgggggctggcacgcagcccgttgggcaggtttcgcgcagcgaccctccccacgccggagctaagttctttgggtgagacgtgcaacaacgcaggccccaaagctctctgcgcgcagcgccgcggggcttggccttctccagtcctcgggagtcagccaccgtctctggcttgttataggattcccacctcgtggtgggcaatgatatatacatattcaacattagaaaaagaaggaaaaaaaaaccccactcacaatctaatgccaatggagagaatggtattttaatctacgaaactgtaatgaaggctcttaaacaatcccactttccataattgaggctttcaaaagggccaggtagctggtggtgtttgtattaacatctcataggctctggatcattcacagccacgtattgatctatgtggttttgacgtttaaattttaatgaagcagccttagtggggaagaaaacagctatgcatgtgcctggtaagggggaagaggacctgttcactcctgtttctaagccagcatcttaagagtaggtattacctgtgtgtgaaatcaaagtattttaaaattaactctaggaagaatgttggattttcctgtgttgttttcagtggttggagaaagggtttctggagagaaaaaaaaaattgcttatttgccaagtcatgctaggccatggacatgatttagaaaaaaaattaaagctgcttgaattggaggcycaggttaaggttaatattcaacattgtttgaaatggaaacactcctggtttctcagtgtatcagtgtgttttaagctcagatccccagcctttttctaaggagagttggtatttagaatttttttttttttttttgagatggagtcacgccctgtcgcccaggttggagtgcaatggtgcgatctcggcccactgcaacctctgcctcccaggttcaagcgattctcctgcctcagcctcccgagtagctgggattacaggcccatgccaccacgcccggttaatttttgtatttttagtagagatggggtttcaccatcttggccaggctggtctcgaactcctgacctcaggtgatccacccgcctcggcctcccaaagtgctggagttacaggtatgagccaccgtgcctggccggtatttagaatttttgttttactttgtactgggaagagccttgggttgggagtcaagattggtaggctctggcttgttcagttataactcatttgtgacctaggacaggactctatttctttgggtctcagtttctttatcgctaaaatggagagctattagactagattcctgtttttcagattgtgagtggtgagaaagcaacttagtgagtcttaggcaacattttagatcgatgaaatagaacagaaactgtcagaaatcattgcacatagcagaggtaactactgtttcctgaaacttctgttatagatatt

SEQ ID NO: 90257 - DNA, 2208 bp, Homo sapiens
tgagaattggaatatctgaaataattgggacttaaaacagtttgggttctgaaggcaaacgctgacggagaatcctttaatgaacattaatctttttagaagcgctccatggggagccgtcgctgaccttcagaactgtttatcttgcaaagaaatgctgggatgtaaactacccccactccatcagcctccacaccttacctccccctcacctcccaacactctaattctgttagagggatgggggaagagagaaacgaatttaaataaaaactcaaaaaaggaaagggctaaccgaaaaatgagccaaccaaattttaagttcaacaacaagcattctggaggattctggggttttaaattcggaggctccttaaatattctgccgcagttgggggaggagcgatggacccctaggtctccggaggctacacgtgttccccgatcccgtttccagggggagcccttccttcctattgcgctggtcgtgctcctggcccgcgtgcccaggaagggcgcagcggagtcgcgtgcccgtccgggcggaggacgccgtctccgcgcggcggtgccgggcccctgcttccggaacgctaattttagggttcgccggcccccctttcttttcacccgctttccgtgcgagccgctgcgcagcagtctgcgcttcgagtgcgctgtgttttaaggaggccccggcgcttgccccttgggctcgggggcttgggtgcgcaggtgggggctggcacgcagcccgttgggcaggtttcgcgcagcgaccctccccacgccggagctaagttctttgggtgagacgtgcaacaacgcaggccccaaagctctctgcgcgcagcgccgcggggcttggccttctccagtcctcgggagtcagccaccgtctctggcttgttataggattcccacctcgtggtgggcaatgatatatacatattcaacattagaaaaagaaggaaaaaaaaaccccactcacaatctaatgccaatggagagaatggtattttaatctacgaaactgtaatgaaggctcttaaacaatcccactttccataattgaggctttcaaaagggccaggtagctggtggtgtttgtattaacatctcataggctctggatcattcacagccacgtattgatctatgtggttttgacgtttaaattttaatgaagcagccttagtggggaagaaaacagctatgcatgtgcctggtaagggggaagaggacctgttcactcctgtttctaagccagcatcttaagagtaggtattacctgtgtgtgaaatcaaagtattttaaaattaactctaggaagaatgttggattttcctgtgttgttttcagtggttggagaaagggtttctggagagaaaaaaaaaattgcttatttgccaagtcatgctaggccatggacatgatttagaaaaaaaattaaagctgcttgaattggaggcccaggttaaggttaatattcaacattgtttgaaatggaaacactcctggtttctcagtgtatcagtgtgttttaagctcagatccccagcctttttctaaggagagttggtatttagaatttttttttttttttttgagatggagtcacgccctgtcgcccaggttggagtgcaatggtgcgatctcggcccactgcaacctctgcctcccaggttcaagcgattctcctgcctcagcctcccgagtagctgggattacaggcccatgccaccacgcccggttaatttttgtatttttagtagagatggggtttcaccatsttggccaggctggtctcgaactcctgacctcaggtgatccacccgcctcggcctcccaaagtgctggagttacaggtatgagccaccgtgcctggccggtatttagaatttttgttttactttgtactgggaagagccttgggttgggagtcaagattggtaggctctggcttgttcagttataactcatttgtgacctaggacaggactctatttctttgggtctcagtttctttatcgctaaaatggagagctattagactagattcctgtttttcagattgtgagtggtgagaaagcaacttagtgagtcttaggcaacattttagatcgatgaaatagaacagaaactgtcagaaatcattgcacatagcagaggtaactactgtttcctgaaacttctgttatagatatt

SEQ ID NO: 90258 - DNA, 1274 bp, Homo sapiens
actcctgggtatctgttcttgcaaatatccttagattaatgcagagcagacatcaggccaaggtctgccttttttgttctccagcagtgcttttgggtttgactgtttccttttatgttttaagcttttaacaaatataataggaggcagcaaaatgttgtcagtggaacacaggctttggagtgagacagacctagggaagagcctggctgtatgacctaaatttttgtgttgggtcctgctgtgggctgaatatttgtgtcccctcctttcccagattcgtatgctgaaacctaatccttaatgtggtaatatttggaggtagggcctttgggaggtgattaggttgtgatggcagagccatcgtgaacgagattagtgcctttataaaagagggccccagagaacttgcttgtctctttcaccatgggaggatacagggagaagatggccttctacgaataaagaagtgggccctcactaggtaccaaatctgcaggcaccttgatcttggactttctcgtctccagaactgtgaggaatacatttctgttcttaataagccactcaatttatagtaccttgttacagcagcccaaatggtctaagacaagttctcactttgctcctctgtaaaaaggggataatcaaacttacctggcaacataattgtgaagattaagtaagataatggacataaagcttgtagtctagttcccagggatcaaagggtgcttaataagtgatggctattgctgttatcatcttgctgcacttcaatgcaattgaaattggtttaaaagtgaatagaaackgttggtttcttgatggattcaattcagttcaattaagtgtccttttttagatggcttaccctggtaagtgtcatgctgaatacttgatacagatagaaattaagcactctcttctcgctaagctcttcttgtgcattctcaattttgcgttgcagctttcaacaaaagcatcccctcacccttcccagtgattctaaatttctttatctactcatttgaaggttagtttgactttcaagccttttgagatctgagcatcattcacctttgcggtctcacctctcacccctctctaatataccacccagttctgtgaggaaacaccataatatcttggctctagtatgtaccattgccactgcctgatacacattcctctccatttcagagtcttcctccttcctcctgtgtagtggagacgcaatactcatctgtcagtgttggatgaggatttatgca

SEQ ID NO: 90259 - DNA, 1274 bp, Homo sapiens
actcctgggtatctgttcttgcaaatatccttagattaatgcagagcagacatcaggccaaggtctgccttttttgttctccagcagtgcttttgggtttgactgtttccttttatgttttaagcttttaacaaatataataggaggcagcaaaatgttgtcagtggaacacaggctttggagtgagacagacctagggaagagcctggctgtatgacctaaatttttgtgttgggtcctgctgtgggctgaatatttgtgtcccctcctttcccagattcgtatgctgaaacctaatccttaatgtggtaatatttggaggtagggcctttgggaggtgattaggttgtgatggcagagccatcgtgaacgagattagtgcctttataaaagagggccccagagaacttgcttgtctctttcaccatgggaggatacagggagaagatggccttctacgaataaagaagtgggccctcactaggtaccaaatctgcaggcaccttgatcttggactttctcgtctccagaactgtgaggaatacatttctgttcttaataagccactcaatttatagtaccttgttacagcagcccaaatggtctaagacaagttctcactttgctcctctgtaaaaaggggataatcaaacttacctggcaacataattgtgaagattaagtaagataatggacataaagcttgtagtctagttcccagggatcaaagggtgcttaataagtgatggctattgctgttatcatcttgctgcacttcaatgcaattgaaattggtttaaaagtgaatagaaacggttggtttcttgayggattcaattcagttcaattaagtgtccttttttagatggcttaccctggtaagtgtcatgctgaatacttgatacagatagaaattaagcactctcttctcgctaagctcttcttgtgcattctcaattttgcgttgcagctttcaacaaaagcatcccctcacccttcccagtgattctaaatttctttatctactcatttgaaggttagtttgactttcaagccttttgagatctgagcatcattcacctttgcggtctcacctctcacccctctctaatataccacccagttctgtgaggaaacaccataatatcttggctctagtatgtaccattgccactgcctgatacacattcctctccatttcagagtcttcctccttcctcctgtgtagtggagacgcaatactcatctgtcagtgttggatgaggatttatgca

SEQ ID NO: 90260 - DNA, 929 bp, Homo sapiens
actgaagaaggctgatgtcccaagaactgcagttggtgccaagtgttggttgaattcttgagagcaagaactgcagttggtgccaagttgctgcccatctcctccctgtccccagcatattagatcatcttgagtattgatgctggagctgagacagttaccactgtgatgaagctgggtctgaagtcttagaataagtcaaatgtagaaggatgttccttcctggcaagcccctagcctgcttggagtgaggggggcacacaggctcttggagggctgttggcagcmtttgcctgcctctcccaggccagctgagaaacttgtgtggctgtgaactgtgatgaatcacgcaagaggaaggaggtctctacagctgttgaggaaggacatatcaaacttgaatagcatagcacttggctctttattttatgtaacatatttttaattgtaaaactaatgaatgtggccgggcacggtggctcatgcctgtaatcccagcacattgggaggccgaggctggcggatcactttaggtcaggacttcaagaccagcctcaccaacatggcgaaaccccatctctactaaaaatacaaaaattagctgggcatggtggcgggcacctgtaatcccagcttatcgggaggccgacgcaggtgaatcacttgaacctgggaggcagaggttgcagtgagctgagatcgcaccactatactctggcctgggcgatagagcgagactcagtctcaaaaaaaaaaaaaaaaaaaaaacaaaacctaatgaatgtaacttgcagaaaatttagaaaatataatcataaaaacaaacaaaaatcactcatcattttcccagatataattaaatataattactataactgttttgaaaatgtagtggataaaagcctggactctagaatagcctgcatggg

SEQ ID NO: 90261 - DNA, 1428 bp, Homo sapiens
attttaatgttataattatagcatatgcaaaaatgcatagtttatatactgcattcaaatattttaatatacttatcttctttatgtaaatacctgtgcattaagttctataaataaaattgtaatatagagtgaataacatttcaacatagaaaaatatatgtatatgcaaatctatagatatataygtatgcatgtattttcctgattgaactttatatactaccctccattttgactgaaacagtgaaataactagcatgttgcctctctgaagccgaaagcaatttccttttctaattttagttatgcaaagcctatgggcatcatcagcatttagtaattagttttataattactgctgttttgctcactgtcattcaatttttcttacaacatggtctgggattgaaacatcccacatccacagctgtgtaaattgctatccatttataaggcaaaaaaagtaacattccacatacatcattattcagtcaagaatgtgttgctggtacttaggtgatgccttgagtgcataagctgcccactgaagtgccaagaaaaatggcattccaaattccaggaaatgctgtttaacaaagtaggagaaaacatgagagctacagtaaaattacatcaatgagcatgatgaaatatcagaaatctaaagaatgtggcgtcaagacaagtctttaaagtgttaagtaaccacactccatttctatagtaaagattcaatgaacacatacctatgtatccacggttgctctgttgtgttaaaaacatgacgtttcttcaaaaaggcaaccatagcctatgaaagacttaatcataatatattaagtttttcctaaaagccactgaaaacataaacaaaaatctcattttttagataattcagtttgatttttgtaatgtaaaatcaaaactgtaactgtaaaattgtaactgtaaaatcaaaacactgatttatctttcataaagactgaaaattttaaagctaagacaggttcagtataatgtcgctgtggtcaatgtgaacttaaacagcttctccaacaaactgagagcactgtttgaatatatctttgaatatatgaatttttccacattttcttaagacctgtggaaaatcgagacaaaatgattttactttgccatgtcacagactaaaatgtcgaagccagacctgggaatgtccatcagccaaggtcacagggagttgacttcaaagccagccacaagtctcagggcatctctgccttgagaaaatgcactaacatcctccaggctagggttgttctttagtttaataagcaactcacactgcacctgatattcgatgctctcacaaatgctttccaaattttttatatcagtaagtcttgtttctacaaataaattacaaacgtttcatgaagagaaatg

SEQ ID NO: 90262 - DNA, 1188 bp, Homo sapiens
gattttgtgaacctctcacctatagcgtatgaacaagtctctgaaaacagagtgtgaaattcaaacacctttgtccttaaaacaagctctgtctgccaaaaatgctctcttctgtgaacttttggcaccgatagggcagaacacaatatcctttgcattcagctgccaaagacatgaaactgggtccaaaagggagaagccaggtaaattgtttaggcctatgacctaacattctccttggcataaaaagattcattcttcagccttccaataagtgtagccaattggaaaggcgataaattcattattgtgcaacactgtgaataattcagataaacaacttccaatacttaaaatcctgttttctcattctttaatttttaaggcaagcaaataaaggctattgaggaacaatctgtctcaaaatctctgaaaaattaccactgacttatttaaattttatcttaacacaaattaaaccagaaaggaaaagacaaagtaaccccaaatatctatatttttcagttgagtatgatgactgtttttatcataacccacagtaattctgtaaagatatacaggaatattcatcttatcrcttcctgaagattgggaaatgatagcatttcaatgtaaaaaagttttacggtattaaaaaagttgcagatataatcttctcctgtaacaatactaagtcctgaactgagctgaagctctagggtgattcaagagtcaataggtctgacatgtactgactgtcttctatacaatgaaaatctggtaggtactggggatgcaatgccacatgtgtaggaagtttataatctggtaaggaaataaaagacaattacacaaataaatgttacaacacaccacacggtaagtgctataagagaggcacaaagcaatcactcaagatggacatttgtgtcttcaaataataggactccaattctctttaatagtccctgtcttcattcaagcattcatttattcattcaaaaaacacttattacccaggtcagtgataagaaaaactcatacagtgagaagcagaagagacagaggccgtgaccttctgaaatcttcctttctgtggaagagacagcattaaagaatgacacaataagagaaataataaagatactaataatagtcataactgacatttattcagtacttactata

SEQ ID NO: 90263 - DNA, 2322 bp, Homo sapiens
agcccctcagttgcaaattcctttaatttttctatttgaagttattgctatatatttctgtaatgatccctaatgccttcacctaatgtacaacttgttttctacagcttttggaccacaatccaagaaattttctttgatggactagaatcatctggaatgcccgtggcttctccccttccttggacactatatcatgtcaccaagaagcagctttaaagcttgtaaacctctaggaaaaaaggccacataagatagaaactacattcttacaaaagcttccacttttctattatttgcatagtctgattaaatgctcagcccttgtcaccttttctacaaactacggacaagtttacaataggtataaatgccctttcttactatttactattgcagtcataatgttattttaccagtgactgttaattattttattattagtcattgactggcacttacacattcattagatagcaattattagagtttagttgggaagttacagtagttggcttaaccaatgccttcttacacacttatgactatgaacagaatgctgccaaattctgaccggtcctaacgactcagtgatgtacatttaaaaagggaaaagccttgctaatatcttctgaataaaatattttatttatcaagtttcatgtctcatatagtgcctaaatcccttcataactgtcagatgtgccttaagataaagcccctcttgtgtttttatgtagtgtatgtgtgcatatccttgccttcataagagattctgattcttggtgcctataatacaatttattatatatttgttggcttactgctatgttgctaccaattatatgatgataacatgagtaacactggagtgggaatttttgtgttactactggacagaatacagatagaagtcttctttcataagtcatatgtactttattaacaaataataatcccacctatctaatcacagtcatagaccaattaatttaagagtaataactggaaattaaactttggtactatgatattagttgtgcagtttggacaaacacttaagactcaatttcttatgtgcaaaatacccacttcacatggttcatatgagaattaaacaggaaaaccaagaagtatctaataaaatgtatgcagcataacaggtatcagtaaatattagttatttccctgtccccaatttgcttctaaagtcactaccatctggctttgaacactgatgattcagtcaaattgtcctaattaaggtatccaatcatcttgtcaattttccatttctgtggcacaagacatttactatcaactgtacttgccttcatgaacatgtttccttggtttctaaggctctttcccctcacacttgaacttcccgtcttctcaccatccctcactcctgagggatccatctacgtgcttatagtcccacagcacttggtgcctcttgatgatttcagccatcaatctcaatttccatctctaacctctcttctgagctcaagaccaaacttgtagtctcattattttctcattaagtgaacaggtatgtatggtttaaaatataagacttctagtctcttcctacaagtacacagacaactcgaaaatccaaaatcatctggatactcattcccttckctctgcctcactacccttgcctccctaagtttgtctcttcagcactcagaagcccaagctagaacaaccagaggcactcaactttagcctcttttattgcccacattaaactagtcaccaagcatttggagtccacacacctcctttcatctccacttccattgcctaatccaaggtcttcatgcaagttacctggaccaccaaggtaacctccatatctgcttcccagactccctttcccaccagcttccaatccaattgctacattgtttacagtttaaatgaatacatgaaccacttaaataatggctctttcttctctgtggtttcagctcctaaggacagcccttctcaatcacctgttcagccccatctccagacacagttgacatttgccaccaattataattttcctaaagaaccagctctccacatgacttgtcccactttctctatcagataaagtataattgatcctgcaagcttcggctcaaagattacgttcccagtttactcctcagtgcataacacagtttattgtggccctttttaacaccccttccttaccaactaagccagagattttgtgttaatcatgcccataataggcatttatcaaatattggcagactaacttacattcctctgtgtgggcatgcacacgcaaac

SEQ ID NO: 90264 - DNA, 1749 bp, Homo sapiens
ctttttgcacaaacagcataaagattccaaaacatacaatgtgattacaaaattagaatggtgatatttccataaagtatcattgatttcaaaggaatctcagatgtcatagaaataacaatgattaatcatgcttaattttacttaatttatgcaatcacatatttatttcacattcagggaaaggaaaaataatcttgcaattcaaagactattcctcttcaccttcattcgctttctcaacatcttcacttgtgttggcaaattctgcctggctctaaggatagttccattactgctgagacagtgggtctaagtctacaaatgagactaartaaggggggagagtaacttatttttaaggagatttaagaggacagtcaactgaaaaggaaattatttccattaaacagaagtaaaacaaatcctccattatggtctgccgtacgcataaagaaggaattggccatttaagaaactgcattaaatgaattatggataccttatcagttataattgctataccagaaaaaacgttaacacatacagactgcttagcaaacagtagcacttctgtcatttagggaaaaaataacatcctaaattaaaagtgacaaaactacatgttacacactattagggagccatgctaaacacagatggtatgatctgttgcttaatcatgaaactgtgagtaaaatatattgatctcagttcaaggagttaaaaacacccagtcaaatctttaaaatatctttgaaaattatcgcaaattctctttttgccaagctagtcattcatatattattatagcaaacaaagtaactaatatctttactttttaaagataaaatcttctacctctgaacatgggatcctttatacatactcacttctacatctcctattatgaatgtgcttgctctgcccaaaatgtactagttattcactactgccataactgtgttggattctaaaactactacaattgggaacaaccaaatagactaaaatgtgtggaagatacaaactatccttggcaactgacacaggaatttttcaataacagacatttctttacaagcacataaacttaatagcacgctttaatgtttcagtgagtataaaaatgacaaaaaagatctacttatgaggaacaggcaccttcaaccagtgatgaaaatggagcttctttaattcagaaaaccaccgcagtttttggatatgctatcaatattcacatgtgttagagaagtctctgaaagtgcttagctatcattgtccagatggctttttcatacactgacaatggttgataaaccccatagttatttctctctttcccttaatgccctattttcattatttgttagaaaagagatacattaataaatttcttactcttagactcacagaattctaaaatgagaagcacgctacagattatttgtttcaatcagtgagtggagcccagagctgcagtaacttttccaccaccacatccagggagtcctctgcagaagagagactggaaatcttggcccctggtttctgctgtggggcttttctccaggttacaaaaacctggaaaaaaatcctgtggaaaattcgtaatgggactgaaattagttggaatgaggtcaaaagtgacaaaaagagattgtcagtatatgaaaagagcatatggaggatgatggctaaccattttccagttttgatgaaaacactcatgaagccatttctgatacg

SEQ ID NO: 90265 - DNA, 1163 bp, Homo sapiens
tgcttcaacattaagtggaggcagggtggtggtggtactctctctccacccattcatttctccaaagtaaatcaagtactagtatgtggtgaaaaatctaaaaagtattgaaggataaataacaaatccttacataacaaatctcatgcctgagatatgatatgcttctaacaaagtcaccacaggcactatttagtgggagacagtaaggcaagcattacatttcgaaaagttctcccaaatgtttccgccatatcccccaggtttgagagtcactgtactacatgattcaaatgtatttttgttcctaggtcattttctgtctggctcacaaaccaggtagtattaaatgtatattaatatgcatatttacattagtaaaagaatattgttaagtagcttttttgtctgtcttaagtagataaagcagttcttaactagatgggcccatgagaattgcttgtaaaatcaataataataatattaaaaatacatgctgggaccatatccccagatttttgcagtagctcagggctctagcggcttgttttatataagttctgtaggcaattctgattccagcttttatttatttattttttttgagacggagtcttgctctgtcgcccaggctggagtgcagtgccacaatctcagctcactgcaacctctgcctcctgggctcaagcgattcccctgcctcagcctccggagtagctgggattgcgggcgcccgccaccacacccagctaagtttttgtatttttagtagagacagggtttcaccgtattagccaggatagtcacgatctcctgacctagtgatctgccctcctcggcctcccaaagtgctgggattacaggtgtgagccactgcacctagcctccagcttcttgataatcactagyttagggaagggagagaatgaagggtagcaagaatgacttatttttctaatggtaggtagttccatattggaactgggtagccattggctgcatatgaagtgtgaaaaagtggtttgcatttcattacaacaataacaaagtaaacctaactctccacattaagatactgatcatttcactgacatgagaatttaggacttactgatttactgtatgccttgtatcaagaagtaattaacagacttagaaatctg

SEQ ID NO: 90266 - DNA, 1163 bp, Homo sapiens
tgcttcaacattaagtggaggcagggtggtggtggtactctctctccacccattcatttctccaaagtaaatcaagtactagtatgtggtgaaaaatctaaaaagtattgaaggataaataacaaatccttacataacaaatctcatgcctgagatatgatatgcttctaacaaagtcaccacaggcactatttagtgggagacagtaaggcaagcattacatttcgaaaagttctcccaaatgtttccgccatatcccccaggtttgagagtcactgtactacatgattcaaatgtatttttgttcctaggtcattttctgtctggctcacaaaccaggtagtattaaatgtatattaatatgcatatttacattagtaaaagaatattgttaagtagcttttttgtctgtcttaagtagataaagcagttcttaactagatgggcccatgagaattgcttgtaaaatcaataataataatattaaaaatacatgctgggaccatatccccagatttttgcagtagctcagggctctagcggcttgttttatataagttctgtaggcaattctgattccagcttttatttatttattttttttgagacggagtcttgctctgtcgcccaggctggagtgcagtgccacaatctcagctcactgcaacctctgcctcctgggctcaagcgattcccctgcctcagcctccggagtagctgggattgcgggcgcccgccaccacacccagctaagtttttgtatttttagtagagacagggtttcaccgtattagccaggatagtcacgatctcctgacctagtgatctgccctcctcggcctcccaaagtgctgggattacaggtgtgagccactgcacctagcctccagcttcttgataatcactagtttagggaagggagagaatgaagggtagcaagaatgacttatttttctaatggtaggtagttccatattggaactgggtagccattggctgcatatgaagtgtgaaaaagtggtttkcatttcattacaacaataacaaagtaaacctaactctccacattaagatactgatcatttcactgacatgagaatttaggacttactgatttactgtatgccttgtatcaagaagtaattaacagacttagaaatctg

SEQ ID NO: 90267 - DNA, 676 bp, Homo sapiens
ttttttttatgggcagatactccaccaccttggtgacatctctcaaaccaaatatatcagaatctctgtgggtctaggaaatggttttaagcagtagtcacttgtttcaaaatcattactgataattttgaagaagtgtggtgatgggggtatgcaagagttcactcttgcaagagagtgtgcaagaagttaatgtgagagtggaaatgacaaccatttcagttataatggttgggaggtgaggaagtacaaataagaaatacagaaaacttttcctggatattttactgcagcaaggagaataatagcgatcaatagatagaataatagctggtaaatacacagaataatagctggtagatagaaaggaaatggcagacccaaggagtatttttagcttcatttttaaaaagggaaagctattacagcattattttaaaagtggctgaaatgatttcgtatttcagatcatttataattatttataattatcattcactaatttgcccttcagcagagtatcacttcaaaacttcctaaagaccygactgagccccctcaaacaggcaaagcaatgttttcccaacttccagaaaattagctctttctttggtgctggctttatatcacactacctatcttattttgaaactaacagtatctccatatcaagtca

SEQ ID NO: 90268 - DNA, 676 bp, Homo sapiens
ttttttttatgggcagatactccaccaccttggtgacatctctcaaaccaaatatatcagaatctctgtgggtctaggaaatggttttaagcagtagtcacttgtttcaaaatcattactgataattttgaagaagtgtggtgatgggggtatgcaagagttcactcttgcaagagagtgtgcaagaagttaatgtgagagtggaaatgacaaccatttcagttataatggttgggaggtgaggaagtacaaataagaaatacagaaaacttttcctggatattttactgcagcaaggagaataatagcgatcaatagatagaataatagctggtaaatacacagaataatagctggtagatagaaaggaaatggcagacccaaggagtatttttagcttcatttttaaaaagggaaagctattacagcattattttaaaagtggctgaaatgatttcgtatttcagatcatttataattatttataattatcattcactaatttgcccttcagcagagtatcacttcaaaacttcctaaagacccgactgagccccctcaaacaggcaaagcaatgttttcccaacttccagaaaattagytctttctttggtgctggctttatatcacactacctatcttattttgaaactaacagtatctccatatcaagtca

SEQ ID NO: 90269 - DNA, 676 bp, Homo sapiens
ttttttttatgggcagatactccaccaccttggtgacatctctcaaaccaaatatatcagaatctctgtgggtctaggaaatggttttaagcagtagtcacttgtttcaaaatcattactgataattttgaagaagtgtggtgatgggggtatgcaagagttcactcttgcaagagagtgtgcaagaagttaatgtgagagtggaaatgacaaccatttcagttataatggttgggaggtgaggaagtacaaataagaaatacagaaaacttttcctggatattttactgcagcaaggagaataatagcgatcaatagatagaataatagctggtaaatacacagaataatagctggtagatagaaaggaaatggcagacccaaggagtatttttagcttcatttttaaaaagggaaagctattacagcattattttaaaagtggctgaaatgatttcgtatttcagatcatttataattatttataattatcattcactaatttgcccttcagcagagtatcacttcaaaacttcctaaagacccgactgagccccctcaaacaggcaaagcaatgttttcccaacttccagaaaattagctctttctttggtgctggctttatatcacactacctatcttattttgaaackaacagtatctccatatcaagtca

SEQ ID NO: 90270 - DNA, 1186 bp, Homo sapiens
gcattttttatagttcatccttaagtctgtgtttatacaccaaacactttttaatttcagattttgcatcatttatctttatattaatcttagttatttgctatgcacactgtgccctctaattcttattttatcattgttttttatgcttcattctggtacatgagtattcaatttggatttttatgtgtacccttataatttaatgactgatttgggtaagcaatagagctactccttcttcaaaatacagttctatgggagggaatcactctcttcctgctcaattctgatcaaatccagaaaataccacctatacatttgtaagaggttgtatgggctgaaaaaatatatatatttttagacaactttagtactaatggatctaccagggtttatagatgtacaatttagactgttcagggtctagaaggatttccaaaatatgttgtctgccaggcacggtggctcacacctgtaatctcggcactttgggaggctgaagcaggaggatcacttgagctcaggagtttgagaccagcctcggcaacatggcgtaacctatttctacaaaaaatacaaaaattagccaggcgtggtggtgcatgcctgtagtctcagctactcagggaagctgagatgggagaatagcttgagcccaagaggcagaggttgcaatgagctgagatcgcatcactggactccagcctgggtgatacggccagaccttcttgtctaatatatacacacacacacacacacacacacacacacacacacacacacacacgccatatatatacatacatatacacacacayatacacatacatacacacaccatatatatacatacatatacacacacatatgtacacatacatacacacacatacacacacaaacacacatatatatatagtcaagagaaaaacataaggtatatagctatgaactcactatgtttatgctaacatgtacatgtgagggagtgggggcagggagtatgtctgtgtctgtgacttgtctgtgtctatctgcccatctgtgtgtgtcaatgtgtagaataaacacaagaaactggttgagtgctgtctgtgggaatgggcctaatggggtgaggaacaggagcagaaagaacaattattttcattctatatttttgtacattttgaattttgaacca

SEQ ID NO: 90271 - DNA, 1186 bp, Homo sapiens
gcattttttatagttcatccttaagtctgtgtttatacaccaaacactttttaatttcagattttgcatcatttatctttatattaatcttagttatttgctatgcacactgtgccctctaattcttattttatcattgttttttatgcttcattctggtacatgagtattcaatttggatttttatgtgtacccttataatttaatgactgatttgggtaagcaatagagctactccttcttcaaaatacagttctatgggagggaatcactctcttcctgctcaattctgatcaaatccagaaaataccacctatacatttgtaagaggttgtatgggctgaaaaaatatatatatttttagacaactttagtactaatggatctaccagggtttatagatgtacaatttagactgttcagggtctagaaggatttccaaaatatgttgtctgccaggcacggtggctcacacctgtaatctcggcactttgggaggctgaagcaggaggatcacttgagctcaggagtttgagaccagcctcggcaacatggcgtaacctatttctacaaaaaatacaaaaattagccaggcgtggtggtgcatgcctgtagtctcagctactcagggaagctgagatgggagaatagcttgagcccaagaggcagaggttgcaatgagctgagatcgcatcactggactccagcctgggtgatacggccagaccttcttgtctaatatatacacacacacacacacacacacacacacacacacacacacacacacgccatatatatacatacatatacacacacatatacacatacatrcacacaccatatatatacatacatatacacacacatatgtacacatacatacacacacatacacacacaaacacacatatatatatagtcaagagaaaaacataaggtatatagctatgaactcactatgtttatgctaacatgtacatgtgagggagtgggggcagggagtatgtctgtgtctgtgacttgtctgtgtctatctgcccatctgtgtgtgtcaatgtgtagaataaacacaagaaactggttgagtgctgtctgtgggaatgggcctaatggggtgaggaacaggagcagaaagaacaattattttcattctatatttttgtacattttgaattttgaacca

SEQ ID NO: 90272 - DNA, 618 bp, Homo sapiens
agtgaatgtaggagcacttgtcaaaatgtaagatgcaaaaattcaaagagaaaagaagaatataacatgctacctttttggaagatgtcatgacactaatattacaatatttctattaaaatattaatttttaccctctctccaactgtattaatcattccacaattgtgaaggatgtactatctcaaagggagagagagacatggttcaactgtataagctttttggagtaataagaagttgaacacaataacttcatatttcaactgtgagggttttcttttaaatctggttataaataatttgatatggcacccccttagaattcatgaagggatggctctgcagggctagtgaagctgcatggtaagtctgttgcatagaagtctatagagcaggctcttcccagaaaggaacaacgcgcctctgatcgttgccaattgactcttctctgcctttctctgccctattcattgtgccatcagtattcacttattgtcaacaacatgctgatgttacccagccctttcttctgacctcattctgaaccttataaagtgtratccagcttaatcaactcagagattaagagctgtagtctatacttgtttttggaat

SEQ ID NO: 90273 - DNA, 1194 bp, Homo sapiens
taaacaagacagttggatcaaacttattttcctgataaaactggaatctgttcacatggctaaattttatttgccctgatgagcaaagcagtttccagggcactttgattttaaaagacctctttccttttttttctttagccagtaacctgaaactagtaataccatgaacagtaagttttatttcaacaccagcagaaaagtcagcagattcagagtagtcaggaaggaaaaataggcaaagaacttagaagactacatggtaactctttaaggacagaagaagaaagagggattgactgaaaatgttttacatgtgccatttttcttcaggttttctagtttatggagttgctttgttctaattgagtgtgcaggagtctggagatctcataaggcttctgctgtagccatcacagtctttgacctctgttaagccaaatattgctacacagaccaaaaatacagacagaccaacaaaaatcagaaccagactagattatcttagtggctgtagctttttagtattgccttaattctttgggacttaaacatacaccagatttgggactctgaactgaccagaatcccccttgggtaggactcaaatccacaatcctagacaaggttgggactctcatccataatcctaaaccacagggtgggacttgaacccacagtcgttatgatgagttcaaagacaattaaaagtacaggggcatattaacaaggtactcaccagaaagatgtctaatccagaagcaatttattttcccaaaagagaagtgccaagggagcctgaagtgccatggtggagaagaaggaaccctatagtcgagcctctggacaccctggtctaggtggccactcaggatcagkgcagggggcctgcacaccactaggggcaacagtaccttggacaggctgttcgtctcacctggggttctagtttgttaacaagcaaaaggggctcactgcccaatgtgctagaagccaacactgacaccaaatttttgaaaaaaagaaaagctttatattaaaagtcacctctgaaggagacaggagtcaagctcaaatttgtctctttctgctggcattaaggcagtacttttattagaaaaggttcagggggtggattctgagattagtaggtgatttgtgcaaggaaaagggaggtctggaaagtccttgggc

SEQ ID NO: 90274 - DNA, 507 bp, Homo sapiens
tgcaggttttgaccgcacatttccagctaccacgaggtgggaatgttagacagagtggaaggggcccacacaaacatggagagaccccttttctgctctcagcacagacctctgcaaacaatgatttccttgttctaagggtcctcctgtccctggctaaaagatgccctagagtaaactccagaaacccatccagtcacataaccattaagagataaaccacaggccaggcgtggtggctcacgcctgtaatctcagcactttgggaggctgakgcgggcagatcacgaggtcaggagtttgagaccagcttgaccaacatggtgaaaccccgtctctactaaaaatacaaaaattagccaggtgtggtggcaagcacctgtaatcccagctactcaggaagctgaggcaggagaatcgcttgaacccaggaggcggaggttgcagtgagccgagatcatgccactgcactccagcctgggagacaggagtgaaactccatctcaa

SEQ ID NO: 90275 - DNA, 1266 bp, Homo sapiens
aaagaaagagcaaaaaatgcaatttcaatcctcattttgtttctaaaacgctaaatgcattagcaacttatacttcactactagaaaattaaaataagcccatagcttaatacctaggtgatgggttgacaggtacagcaaaccaccatggcacacgtttacctatgtaacaagcctacacatcctgcacgtgtaccccagaacttaaaaataaattaaaaaaaaaaaagtccttcagtaacattagaacaaaaaagcctatggtcataaactaggtccaaaactattaaccataataactacacaatactacttttaaagatacttacttcaaatcttttttaagcaccaaattaaagccaatacacctgaagctttttacatttcaggactaagaatatgaggggatatattctccaccatgcggctcgtccatcccaatgctaccacagtacctatagcatcttctggcggcaggtcgactgtgtctgtgtagaggtactggagaaaggcacgatacactgggtaagaaaactgatcgatttctatcacttccttcatgtcttcattccaatacgactggaacatggatcgaaaatgctcacacctaaaacagcaaagcaaaagtcttatttgttcagcagcaatttttaaaaaagaaaaaaaaattacctaattaagttgataaaatcagataaacagaagtatccttgggccgggcgtggtggctcatgcctgtaatcccagcactttgggaggccaagcgggtagatcacctgagrtcaggagttcgagaccagcctgaccaacatggataaaccccgtctctactaaaaatacaaaattagctgggcatggtggtgcatgcctataatcccagctactcaggaggctgaggcaggagaatcgcttgaacccgggaggtggaggttgtggcgagccgagattgcgcttctgcactctagcctggcaacaagagcaaaactccgtctcaaaaaaaaaaaaaaagtaagtatattaactactatctgggcctgaacacaccaggatcacagacctttagttagcacccaaaaaacattccacatgcaagtggtttttgtacatgccttttacatacactcactttcattttttgtaactcctattaaatactaataggtatacatagagcctggaagtacctagcacttccactactgtttccatttgatggtccccaagatttttttgctcctttgttttttttaaaatgatgtacagaaa

SEQ ID NO: 90276 - DNA, 954 bp, Homo sapiens
atgtttattgtgcacttaatttttattattgttacactgtaatatgtaatgaaataattacacaactcaccataatgtagaatcagtgggagtcctgagcttgttttcctacaactggacggccccatctgggggtgatgggagacagtgacagatcatctaggcattagattctcataaggagctcgcaacctgtatccctcgcatgtgcagttcacaatagggcttacgcttctttgagaatctaataccgctgctgatctgatgggaggtggagctcaggcggtaatgtgagtgatggggagcagctgtaaatacagatgaagcttcgctcactgccactcacctcctgccgtgcaacccagttaataacaggccacggaccagtacaggcatatggcctggggtgtggggacccctgatctaggaggatatagtcaatgaccatattttttccaaacttaacatttaaattgttaggacatttgttctgaaaagaatgcctgtgccattttaagatataagaactgggggaagccttttataacaagtccaggttaagtagtatatacaaatctgaagatrtgtacagaagtgcttcagctgggtatgccatacatgtgcaattctggccaaatagtcccattcagtgaaccaattattttccaatcacaatactcactgcaaaaaaaaaaaaatactgtattatacctaaagaacatggcaaaaataaagtgaaagggagtattcaattggtttcactttaaggcaagcttaactcttcctaagcacccttgcctccatgcccatgactggtcacctaattgggacaactccacctgtctgacacacctaagcatgacgttttagaaaattaaccttcaatatcaattgctgaacaacccaaacaccttaactgccaagaactacattaattttcaagcacagagcatc

SEQ ID NO: 90277 - DNA, 954 bp, Homo sapiens
atgtttattgtgcacttaatttttattattgttacactgtaatatgtaatgaaataattacacaactcaccataatgtagaatcagtgggagtcctgagcttgttttcctacaactggacggccccatctgggggtgatgggagacagtgacagatcatctaggcattagattctcataaggagctcgcaacctgtatccctcgcatgtgcagttcacaatagggcttacgcttctttgagaatctaataccgctgctgatctgatgggaggtggagctcaggcggtaatgtgagtgatggggagcagctgtaaatacagatgaagcttcgctcactgccactcacctcctgccgtgcaacccagttaataacaggccacggaccagtacaggcatatggcctggggtgtggggacccctgatctaggaggatatagtcaatgaccatattttttccaaacttaacatttaaattgttaggacatttgttctgaaaagaatgcctgtgccattttaagatataagaactgggggaagccttttataacaagtccaggttaagtagtatatacaaatctgaagatgtgtacagaagtgcttcagctgggtatgccatacatgtgcaattctggccaaatagtcccattcagtgaaccaattattttccaatcacaatactcactgcaaaaaaaaaaaaatactgtattatacctaaagaacatggcaaaaataaagtgaaagggagtattcaattggtttcactttaaggcaagcttaactcttcctaagcacccttgcctccatgcccatgactggtcacctaattgggacaactccacctgtctgacacacctaagcatgacgttttagaaaattaaccttcartatcaattgctgaacaacccaaacaccttaactgccaagaactacattaattttcaagcacagagcatc

SEQ ID NO: 90278 - DNA, 718 bp, Homo sapiens
aaagaatttctygacagtctttatagctgtggcttaataaagcacctagaagtagaacagagtcaaaggggatgacacttgttgactccattagtctaaagactccttatgatatcagctttgaggcttttcaaaacgaatctagtacatatagcctatgatgattgacacttgatgaaagaggcctaactgctaaatacttttgcctgacctggaaagtaaagacatcttccttgtttttttaaggaatttgtttcctcggagtctgtcactccagaagataatgatggatttaaaccaccccgagagcatctgaactctaaaaccaagggagcacaaagtaggctttgtttcttctgtgaatgcctacctcttctgcctgtttctctgtctcttgctcaatacctgtagctcattttcttagattccataataaacatgctgcatttgtcagaaaggttacaacttgtctacataagagatcagcaaaatatcgtgtgtgggccaaatctggccctctacctgttcagtatggcatgtgagctaagaatgatatttatgtttttaaatagttgaaaaaaatcagaaggtgataatattttgacacttgaaaattatatgaaattacaattttagtgtccagaaataaagttttggccaggtgcagtagctcacgcccgtaatcttagcactttgggaagccaaggcaggagggctg

SEQ ID NO: 90279 - DNA, 455 bp, Homo sapiens
tagtaactattaatatgtctcatatcttttgtagtgtgtattttatctacagtgtaatttttaaaaaatgcttttctattactaatatatgtagatcagtaattgaacagactaatgtgttattttatatttcatatatttgcacagtrtcttatgaacagatttaaacctaatgattttactcattgatacttgtgtgggatttactatccagtccagtgcttatttgccaagagctgttcagcctatgcttgaaaccattctaatgaaggacaaccctcaggcagtttattctgcctttgggaggcctctgattatttaaaaaaaaaaaagcctatctctattttaagccaaaacctatttggctgcttctgcttactggctttagttacattccttggaggatatattggacaaatgtaaaactggctttagttacattccttggaggatat

SEQ ID NO: 90280 - DNA, 2377 bp, Homo sapiens
tgccttcagaaatgggggcaatgggagcccggcctcaggaccttgtctggatgaggggcattgttctctgagtgcccacgtgggcagagaaagtgcatgtggatgttggtgggctgtggagccccctcactgcccatgccagtggggtccaaggccaacctcgtggcactgggaaaggctggatctctcaggatctctgctaaggctgcgctctttggacatgggggccagctgggaacttgttctctgaaggatgagtgctcaggcctcatccctcaccttctgggctcaggcaagccgctggcccagatcctatgccaacaaggctggggagctgcctctgttcccttctggggcagacctgactccttcagctgctccgagttggcccagaggcaagggtctgtcttcccctggatgtcacagcttttatgagaaacaagctggccactcaccatggatggagacaggctgaaggggacctgcagtcaggctatgctggaagggggactcatagcactgggggtgctgggcagccagggggtgccaggacgacaggtgactcaaccaggcgactggtcccagcctttcccttgacccctaggctgcaggtccctccaggacaacactggagcatgtcctcccagtgaacctcactagagggatgtgcgctctgaaaacacttggcaggacttgctctgagggttttagagccgtttctgtggatgctgtgaccttgagtcactttggatcctcccagcctccctcctagtgctgatcccctaaatggggctctgctccggataccatccttaccccaggcggcagcctgggcctgggccctggcccgggatgggctgcagaacagctcccctgtgtcctaaggcccagagcagcaagaagtgctgctttctggccacctcctccccctcctcatctaggcctgggtctgggtgtgctgcaggccaggattcagggctttacccaggctgtggacaagaggrgtgatgagagctgagcacacttatctgagcaacggcatgaatttcagggcacctggctatgggccctcaggcaccttggaaagagtgggaagagccctggggcaccccattaggcaccccacaaccaatacacagccacagtggtcaatccaatggcccctggggaaactgagggcccaagagaaagatttaagatggcttattgggaagccaagtcctctctcctgggaccctgtggtgggtacaagctaggatagggaccctagctttatactaggactagatttatgcttctctgaaacactcagtcccagggccagcccccaggaggactgagccccttccagtaacactgagccccttccaggccaggcccaggtcccagggctctgggctgcaaggacaaggcagcctgatgaaagagtccctgcccggcgtgggggcggggcccaggacccagcccacctcggtcggtccctcctctctttctcatgcctcagttgcagccaaggccttctgcttggccaccccaggctggatgctgtggactcctggtcccctcccctcttgcccagcccgcagccaaggccaggccctcaggtgaagcagaagactggtcccagggtccctccccagaattccaccccatgagcctttccaccctctccagaggtacctgggcttgacactgtgcccacctgctccatagcagtggcttcccagggcagatcctctgagacatggccctcaaactctctcccatctctactgctgcccctcccacagcctccttccctgcattctcgtggtttatgcctcagcccactggctgtgttcttttagctcctggcacctcaccccttcctgccatcatgttcttcagctccctgaggagcctctggggtcccacggtcctggaatcactgagtgccgtgggagtgcagggtccagtgcgggagtcagagcccagtgcacatagggagcacagccctgcagggggagctgcatcaggccaggacacccccacacccaaacactcacatcatctgggccctcctgggggcctgatggcaatagaggtggcctgtctgccttgggcaacccctcccagtcacccttagttctggcaggagtcccctggcctcagccccactcatcccaggaggataaaatgaggtgacacccttctgggacactgcagaggtcaagcccagtaccatgagaattagtggctgctgggagtcatggcagctggatggtggctggacgaaatccccagggatggtcctcagatcctcttccagggacccccaccctatttatgacctgtgctaaagctcatgataccccgttttccagaggctgaggccagt

SEQ ID NO: 90281 - DNA, 1090 bp, Homo sapiens
ttcactgagaaaccatgttttgtgtgttgctctaccaggcacagtgctaggctgcagggattctgggatggtggcaggaaacagaagtattcgagaacaagggttccaatacyagctctcaggtgctgtgggactttactcgccaggtgcctttggctaagccacccactttcctaggtcctcagtgttctccttgaccaataataaagatggaatagacaatctcaaaattactttccaactctgaatattcttggatgtcctaattctaagccaagtgggctctgtggaaatctgctctcattggccgaggagtccaatccaccaccgcacgggtccagaataaagtgaccacgctacattagacaaatggcgttggcaatgccgtgcctttttatggaaagtggttttggatgtttgtgatgcaaggagacatgaggatattccatattagcatcagtggttcaagtgacttggagagtatgttaacaacaggctttatggatggaaggagccaacacatttctccatgaaaagtcctctaaaatggtagagctcatggttatgatagaaagatgggatgaagggcacccctcagaatttcacagatgttgaaacagttgaatagaggaagtgagtcagtttgtatcaaatgaataaataggaaaagttaaaactagaagtgatgaaggaatagaacaaagtgtccagaacagcctcagtgaatatctactatatgtccaccttcaagtgcattaggacccatttagagatgctttggaagttttggaaaggggtggacaggcaaaggttacacatctggttaaccacgtagatctgcatttcggcttttcaagtagcaaaaggataaacttacctttaggcttgttattccatttccatacaagacatatgatggattagatgctcaccttacatgctcccatggacctctgtccttctgtcctaagtgtcactgttaattatatgtttgactgtttcttctcttctgcaatgtaaattccatgttgtgtgaattgcctactgctgcacccacagagcccagcacagtgtctagcacataggaggg

SEQ ID NO: 90282 - DNA, 1090 bp, Homo sapiens
ttcactgagaaaccatgttttgtgtgttgctctaccaggcacagtgctaggctgcagggattctgggatggtggcaggaaacagaagtattcgagaacaagggttccaataccagctctcaggtgctgtgggactttactcgccaggtgcctttggctaagccacccactttcctaggtcctcagtgttctccttgaccaataataaagatggaatagacaatctcaaaattactttccaactctgaatattcttggatgtcctaattctaagccaagtgggctctgtggaaatctgctctcattggccgaggagtccaatccaccaccgcacgggtccagaataaagtgaccacgctacattagacaaatggcgttggcaatgccgtgcctttttatggaaagtggttttggatgtttgtgatgcaaggagacatgaggatattccatattagcatcagtggttcaagtgacttggagagtatgttaacaacaggctttatggatggaaggagccaacacatttctccatgaaaagtcctctaaaatggtagagctcatggttatgatagaaagatgggatgaagggcacccctcagaatttcacagatgttgaaacagttgaatagaggaagtgagtcagtttgtatcaaatgaataaataggaaaagttaaaactagaagtgatgaaggaatagaacaaagtgtccagaacagcctcagtgaatatctactatatgtccaccttcaagtgcattaggacccatttagagatgctttggaagttttggaaaggggtggacaggcaaaggttacacatctggttaaccacgtagatctgcatttcggcttttcaagtagcaaaaggataaacttacctttagrcttgttattccatttccatacaagacatatgatggattagatgctcaccttacatgctcccatggacctctgtccttctgtcctaagtgtcactgttaattatatgtttgactgtttcttctcttctgcaatgtaaattccatgttgtgtgaattgcctactgctgcacccacagagcccagcacagtgtctagcacataggaggg

SEQ ID NO: 90283 - DNA, 976 bp, Homo sapiens
tgaagtggacaatctcacttcttcttgtggactcagagttgccattgtcactgacatttgttccacagacgctcacaaggggccatctgttccctgttctgactgacaaaataatagctattgaatagaatgtgttctgttattccaaagatatgaatatgtgttcaataactatcagcactatacagcactctgggtttttattgttgctgcagatgctgtttttgttgagtacttatattgctttttttctctttcttgctgtttgagtaccaagtattacttcttgctgcttttagtgcatttgtttctgtttcctctctctctcaatttgattttctaaaaagaaagagctaaccttgttagatttgtttgtgtgtgtgtctatatacatttcaatttatatctatttatataaagtaagagcagcttgtttctgagtgagggcatattggatgttcccggaagaaaaaaaaagtgtgctctttgtatgactaattgtggctgtgtaaagtttttgtttgcttacgatatgctttctattctgtattagaatgtggagactcaatgtttttgtcccctagaagygcatgggttgaatcctaacccctaatatgatgatgggagttaggtcctttgagtggtgactaggtcatgagggtggagccttcaggaatgggattagtgctcttgtagaaaggcttcaatcccattttatatatatataaatttaacatttaattttaaaattacagttaatagagttccctggccccttctatgttgagacatggtgaaaaggcagcctctatcaaccagaaagcagactcttttcagccagtaagttttctgacaccttgatcttggacttcccaactgtgagaaataaatttctgttgtttacaagccaccagtttatggtattttgtaagaacagcgtgaatgaattgagagagttgagattgctggataagta

SEQ ID NO: 90284 - DNA, 712 bp, Homo sapiens
accctcatcagtaattctaatttcacccttgccttgtgatcctgctctgcccttttgccttgtgatcttttattgccctttgaagcatgtgatctctgtgacccactccctattcgtacacccctccgcttttgaaatccctaataaaaacttgctggttttgcggctcggggtcgccatcacagtcctaccaatatgtgatgacacccccggaggaccagctgtaaaatttctctctttgtactctttctgcttatttctcagaccggccaatacttagggaaaatagaaaagaacctacattgaaatattggggactggttcacctgatgttaactgacttattacccatcctggcagaaacggccacttaaataagagtctaatgactcctctcaaatctagaatgacttggtgggaaagtgggagataaggagcttatgaatagcaaaatcaagtgggattttgagtttacttgtccctgttctacccaagaggttggtgagcgggagggagacaaggttttgcaaaaagayggtggacagaaagacctggagaaagaaaagatggtgaggaaaaagtttttgggtagatggacgggggaaaagagggtgacaagcaggttaggggaaagaagacggcgagtgggaagttggtggggaggctttgtaaaaagacggtggggataactttggggggtagtggaggaaaa

SEQ ID NO: 90285 - DNA, 1901 bp, Homo sapiens
ccgttgtgcccagcatgacaacattttagtcactgatgcctcgcctacaggacagcagccccatgacattataataccacatttctatgccttttctacatttgggtgtgtttagatgcacgaatacttaccattgtgttacagctgcctacagtactcagtacagtaacgtgtgcaggtttgttgcctgggagcaataggctacaacgtgcagcctcgctgtttggtgggctacattatctaggtttgtgtgagtacgctccgtgttgttcacacagcaacaacatcgcctacatttctcagaatgtagccccattagtaagaaatgcatgactagacctaagaaggtgttggtggtcacagtaacgtttaaaatgtaacatgctgtaatgcaacttaagcagtacatgcaatatctaggaggcctgtatagggagtctgtaatatacatgcaatgataccaacctcaggctactaaaaacacgaaactgatgggctgtgaagggagtggatgatctgtttgtcagcaaggcatgtgcaccacatgtgtaaatatcctgaagaaagtacctcaagtgtctgtcatgcagccaacagacagtatctgcagggccctttacaaaccaggaagagggaaatcggattctttccatttgcagacattttcagactcgttctttctttcttttttgagacagagtcttgctctgtcgcccaggctggagtgcagtagcacaatctcagctcactgcaccctctgcctccccggttcaagcaattctcctgcctcagcctctcaagtagctgggattacaggtgcccaccaccacgcccagctaatttttgtatttttagtagagatagggtttcactgtgtggccaggctggtctcgaactcctgaccttgtgatccacccaccttggcctcccaaagtgctgggattacaagtgtgagccaccatgccaggcctttcagattctttctgaaccatctggggaagtcacagtattgataatggccatgaatttatgagaaactgttaagtataatagatattaaaaaatagaaagttgatttttagttggtaacaaaagactaaaatctttaatgcactctagttccttgaaatytgataatgctgacgagtcagtttccggagccaaatttccccgcttgactcatcctcacaagaaatcagatatccttgttataagaggagagcatcaacacaaaacaaaaacagcacggatgggctgcctcatgctgtataggattcgagacccaggagccatagcttaggggccactgtccctggtcaggcacacagacaggaaaggaggagggacccagctggcatgtggctggagcagcacccaggacacagcatggcagctggccaggtctcagccctggacaagaatccacaagaggcgaaggcattttctgtgctgtgcctcagccagaagttccaatgcagggatgtggaggcattttctaaaacttgcctttgtcttgctccaagtgcaggcaccatgcataatgctgacgagcatggtctgtgactcccgcgctggcaggactttatggccaaggtgcctcatgccacccaccacgtgtggtagtggcagtcatttgtgtaacactcagacacccaaataaaggggcaagcatcctaaactggtgcagctttactgtcctgggaggccttacccacttctcaaaagaatgtgctatttgctgacttcagtactaaaatatctgagttgtgttacctgagggttttccagctgtttttgcaggtgagtgtactgtgagctaagcaggctatagacccatatctgccatccaccagctgggtagctgtgggagcacctctttccttctccggatttcccccacc

SEQ ID NO: 90286 - DNA, 1901 bp, Homo sapiens
ccgttgtgcccagcatgacaacattttagtcactgatgcctcgcctacaggacagcagccccatgacattataataccacatttctatgccttttctacatttgggtgtgtttagatgcacgaatacttaccattgtgttacagctgcctacagtactcagtacagtaacgtgtgcaggtttgttgcctgggagcaataggctacaacgtgcagcctcgctgtttggtgggctacattatctaggtttgtgtgagtacgctccgtgttgttcacacagcaacaacatcgcctacatttctcagaatgtagccccattagtaagaaatgcatgactagacctaagaaggtgttggtggtcacagtaacgtttaaaatgtaacatgctgtaatgcaacttaagcagtacatgcaatatctaggaggcctgtatagggagtctgtaatatacatgcaatgataccaacctcaggctactaaaaacacgaaactgatgggctgtgaagggagtggatgatctgtttgtcagcaaggcatgtgcaccacatgtgtaaatatcctgaagaaagtacctcaagtgtctgtcatgcagccaacagacagtatctgcagggccctttacaaaccaggaagagggaaatcggattctttccatttgcagacattttcagactcgttctttctttcttttttgagacagagtcttgctctgtcgcccaggctggagtgcagtagcacaatctcagctcactgcaccctctgcctccccggttcaagcaattctcctgcctcagcctctcaagtagctgggattacaggtgcccaccaccacgcccagctaatttttgtatttttagtagagatagggtttcactgtgtggccaggctggtctcgaactcctgaccttgtgatccacccaccttggcctcccaaagtgctgggattacaagtgtgagccaccatgccaggcctttcagattctttctgaaccatctggggaagtcacagtattgataatggccatgaatttatgagaaactgttaagtataatagatattaaaaaatagaaagttgatttttagttggtaacaaaagactaaaatctttaatgcactctagttccttgaaatctgataatgctgacgagtcagtttccggagccaaatttccccgcttgactcatcctcacaagaaatcaratatccttgttataagaggagagcatcaacacaaaacaaaaacagcacggatgggctgcctcatgctgtataggattcgagacccaggagccatagcttaggggccactgtccctggtcaggcacacagacaggaaaggaggagggacccagctggcatgtggctggagcagcacccaggacacagcatggcagctggccaggtctcagccctggacaagaatccacaagaggcgaaggcattttctgtgctgtgcctcagccagaagttccaatgcagggatgtggaggcattttctaaaacttgcctttgtcttgctccaagtgcaggcaccatgcataatgctgacgagcatggtctgtgactcccgcgctggcaggactttatggccaaggtgcctcatgccacccaccacgtgtggtagtggcagtcatttgtgtaacactcagacacccaaataaaggggcaagcatcctaaactggtgcagctttactgtcctgggaggccttacccacttctcaaaagaatgtgctatttgctgacttcagtactaaaatatctgagttgtgttacctgagggttttccagctgtttttgcaggtgagtgtactgtgagctaagcaggctatagacccatatctgccatccaccagctgggtagctgtgggagcacctctttccttctccggatttcccccacc

SEQ ID NO: 90287 - DNA, 630 bp, Homo sapiens
ttgcccagcctgcagtggggacctggtgtggcaytgagtggctgtgagtgctcagtgtcccccatctcatgctaagcacagcgaagtagggggagattgcgtagtgtgctgatggagcagttgcctccacctggctgcgtgtccctccgtcatgtgacaggtgagccctgccatccagcctgtgacttcctcaggaagtcagtgccaggggaaacgtgggaaagggaaatcaggagactggagcaactttttggctattagagcttatttggcttttatcatgtatcaacaatcatctttttactaaacagaaaagaagaaggcaatggtgtttttctgtagcaagtcactatttatggaagaggagaccctttatctgcatcgcaattctgaagattccactttgttccagtcattgttgtgggcacactttcaacatttgattaagagccataagggtggcttcctccacccacagaaaaattcctctaaggaatcatgagaccgtcgacatttagcagctgtttaaaagactgtttagactcctgggatgatgatggggaattcctggaattatggtcttgggcaagaagggaactcaagtaggaaagtcagcaatctaaatttcaa

SEQ ID NO: 90288 - DNA, 630 bp, Homo sapiens
ttgcccagcctgcagtggggacctggtgtggcattgagtggctgtgagtgctcagtgtcccccatctcatgctaagcacagcgaagtagggggagattgcgtagtgtgctgatggagcagtygcctccacctggctgcgtgtccctccgtcatgtgacaggtgagccctgccatccagcctgtgacttcctcaggaagtcagtgccaggggaaacgtgggaaagggaaatcaggagactggagcaactttttggctattagagcttatttggcttttatcatgtatcaacaatcatctttttactaaacagaaaagaagaaggcaatggtgtttttctgtagcaagtcactatttatggaagaggagaccctttatctgcatcgcaattctgaagattccactttgttccagtcattgttgtgggcacactttcaacatttgattaagagccataagggtggcttcctccacccacagaaaaattcctctaaggaatcatgagaccgtcgacatttagcagctgtttaaaagactgtttagactcctgggatgatgatggggaattcctggaattatggtcttgggcaagaagggaactcaagtaggaaagtcagcaatctaaatttcaa

SEQ ID NO: 90289 - DNA, 970 bp, Homo sapiens
tcttcccctccccctgtctcaccctcctcctagcctctaacctacctccctcagtcttttcaggtgcaagtgaaaaacactaagtatttagctacggttcctgctaattgctttgtcacatgtcaaatgtgttttcttctctgccccactgagtcacctatcttttttaaaaaggctattcttttctttcctcccagttcttcaactgccttctaatacgatcttactgtgaaacgagcattccgacatgccgctgtcacgacattagaagtaatagtcaccggccctctacacatcctcattgcctaaaagcacaacaacaagacttcagatttcttgcccacagcttgctctcctttctccatattgacaaattatcctcattaggattcataaacacattaaaacttttaaaaatgtataataatataggattcmttttcctagaggtggaagagagtgccgagatataagtgaaacgcagctaacattcccatgtaacatcacaatattttctactgaacataaaagagaaaaaaaatgcaatttcttaatcctgatctctggttagaatattagtaacatttgccacacataaatactgcaacccaatcatgcaggtaaaaaggcttctgcttagataactgcagtttaaatgggtgcaaggctccaggcagctacctacttgagtaggactggtcagttctcaggctctaatcttatctgcattaggctgcacagtagctgatgcccgcgattagttccggcagagtgatgcaggtagggatgcagatacagccgagtaggtgagctctgccccaaccgtctacccaattacaagcatctttcgcctacactgaggacacatctaaacacagaatttacgattgtgcatgcgaaactttacacttacgttagttgcctcaacctttcccctttcccagtatgctgcagttaggaatgatttgtt

SEQ ID NO: 90290 - DNA, 1098 bp, Homo sapiens
agctttttgagaattatgcggtgctagataggatgcaagcctggggattgtgaggctgatcsaagatacatggtacagccatcggtgatttactggaagctcacttgagtggcataattgttctcttgaactgaaggctgtataaaacttgttatctagaacatggaaaacatgaaaaaacatatttgtaaagactagttgcagaagtatattaaggtacagtagaaatggaggccacatactttaaggttcatctaatattagacaatgttaacaacatgttttctatgagcaagctcagtatccagagttcacgtagccatggaaggcagagctcaacattatagcattgtggggtagaacaaagcttcagccagagaacagactcaagactgatattggagtgaaactagaattctaagacaccacgagttctgattacaaagttaccactgtgagagaagtagaaaactgacctgggagcaaacggattcctacatgttcattcatgaggttttaatgtaggagcaggtgtgagccaagaaggctaaagtgttcatcagtaacactgtcagtcaaggaatcagtcctagagcatcaatagttctagggggggggaggctgagggaagcatgtccagagaaaataagttgaaaagctaaagggtgggagaagatgatcaattcttgtcgttttcttttgcttaaactaaggatgaccaacataataaaagttgaaatgagaaatgaaggaagttttctaatttaacagaaatggtatagggaaatatgcagaacaattatactaaacataggatttttttagaccaagaataaacaatttaaagtggagtgaccaaaatgaaattatgatatactttgtaattcttacagaattagagaggatatgctaatcatcatgtagggaccactgtatgtgagatgtaaaagaagacactgatatgaatatgtcaggaaatttagggctgtttccaacatgtaaattgcaattagaggcaagactaataaagattttgtataagtgatataggaatagtctgtttataagtaacggctggcttagaactattaggaacta

SEQ ID NO: 90291 - DNA, 1181 bp, Homo sapiens
gttaactgagtggtgtgtttaagaacacagtggggcagggccaggaccaagtacaagatcaggttgagtcttgcattgtcaagtacgagactggctagcacagtcagtgaggtcttttggctatcactggtgcattttatttcattcagtccttttctcatagctctcttctgcttagctatttgccaaggcaaaaatagagggctctaaggaaggttacattccagagcacactgacttctattcatacagggggtggcggaaggctgttcctgggattttcagggtgacgataaggttgtgccctagaagtgtgaattcccggagaccctgggaggccccaacccccagcagaccccctcctcagaggctggtcgacagccagcatgcccgcccagtrcctggcgagaggtcagggcgcattgccggatgggggagcagaggacgccggagtccaccgtccgcccttcattctggctggtgtcgggtcacaggtggccggatcccgttacccagcccaggacgttcggtttcattgaagaatacctttccctttctgtttccttgtgccgcagatgatttacatggacgatggagtgtcatcttttgtccagatcagaggctccgttccgctgttctgggaacagccagggcttcaggtaggtcatgaaaaaacttaaatgtccccttgtgatgttgtccgccctgcccttcccttcaatagctggggaagatttcttttaacacgttcgtttcatggcatagtttccagtctttttcctcagccctgttgtgttgagctgagctatcaaagtgtgcacacgtgtgtgcatatgcatgcgtgcgtgtgtgtagaaaacacagacaccactttgttgtttctggtcgtcaaggatgctgtgtgaaaccgctgactcgggaacggtgctgcggtgcctgctgagtgggtgccgcgaagtgagcttgggtagcactgcctgaggttagaccctgagttcggtgtactgaggacgtttctgagagccgtgactctcatggagggcttcaggaaggctctgtggctgcgtaggtctggcacccggtgctgcctgttgtggggccacgtgagacttccacagctttcccgtgatttctaaaaataccccttgccgtccaaagcagggctctggtcagtgccagag

SEQ ID NO: 90292 - DNA, 875 bp, Homo sapiens
  misc_feature (1)...(875): n = A,T,C or G
tctcagatgtgctggcccatcacatgactgaagccaaaggacacaggggtcaggcaaatttccgtgaaggattggaaaaaatctgttgtatgggtagatcttgatggactgtgaagcctggcaaggaatggaggtaaatccccaaatctcaaagctggaagggatcccagaagccaacgggtccaaacttcgcagagaaggagtccccacctctctgttctacctctayccaaaactcagggctgggcgcggtgactcacgcctgtaatcccagcactttgggaggccaaggcaggcagatcacctgaggttaggagtttgagaccagcctggccaacatggcaaaaccccgtctctactaaaaatacaaaaattagccaggcatggtggcacgcgcctgtaatcccagctacttgagaggctgagacagaagaatcacttgaacctgggaggtggaggttgcagtgagccaagatagtgccattgcactccagcctgggtgacaagagtgaaattctgtctcaaaacaaaaaacaaacaaaaaacaaaacaaaacaaaaaacaactcagccacctctgcccacacaattcctaatagcacgagctagctgtctttatagggtagcgagtcgaattcgtataaacagtgcatagttgttcncaaaagnnnnnnnnnnnnnnnnnnnnnnnnnnnnnnnnnnnnnnnnnnnnnnnnnnnnnnnnnnnnnnnnnnnnnnnnnnnnnnnnnnnnnnnnnnnnnnnnnnnngctcagctattagtcgtcttctcctccaagtctgggacccagtagactcatcaccatctggctcatcctttcaggaaagtgcccaaaaggagtctgaaagggcacagg

SEQ ID NO: 90293 - DNA, 875 bp, Homo sapiens
  misc_feature (1)...(875): n = A,T,C or G
tctcagatgtgctggcccatcacatgactgaagccaaaggacacaggggtcaggcaaatttccgtgaaggattggaaaaaatctgttgtatgggtagatcttgatggactgtgaagcctggcaaggaatggaggtaaatccccaaatctcaaagctggaagggatcccagaagccaacgggtccaaacttcgcagagaaggagtccccacctctctgttctacctctacccaaaactcagggctgggcgcggtgactcacgcctgtaatcccagcactttgggaggccaaggcaggcagatcacctgaggttaggagtttgagaccagcctggccaacatggcaaaaccccgtctctactaaaaatacaaaaattagccaggcatggtggcacgcgcctgtaatcccagctacttgagaggctgagrcagaagaatcacttgaacctgggaggtggaggttgcagtgagccaagatagtgccattgcactccagcctgggtgacaagagtgaaattctgtctcaaaacaaaaaacaaacaaaaaacaaaacaaaacaaaaaacaactcagccacctctgcccacacaattcctaatagcacgagctagctgtctttatagggtagcgagtcgaattcgtataaacagtgcatagttgttcncaaaagnnnnnnnnnnnnnnnnnnnnnnnnnnnnnnnnnnnnnnnnnnnnnnnnnnnnnnnnnnnnnnnnnnnnnnnnnnnnnnnnnnnnnnnnnnnnnnnnnnnngctcagctattagtcgtcttctcctccaagtctgggacccagtagactcatcaccatctggctcatcctttcaggaaagtgcccaaaaggagtctgaaagggcacagg

SEQ ID NO: 90294 - DNA, 1152 bp, Homo sapiens
aggggagagaaaatacagtaattctatgatgtttttattttaaaaacctagagttaaagccttaattatctgcttgttgattgaaaacagtatgtgcacattaaatattttacggaagagtatgactgctgaatgtatctacagaattagtctcttctcaagggtactcattctaactcaaccatggtgttttgaggctgcaaagagttcttggaaaagaagatgggaccaaatttgaagctgattctctgggccaagggaatgggctagggaaacatactggttaaagacaactcaaaaagaggagggcagaaattaaggcacagtgtctgaaggctagcaatttgatgaagattgtggggacagttaacactagatatttatcttctattccacaaacctttggaaggcacagtattcacagtgttctaggtatggtgaaaacttggatctaggaaagatatctaccttcactctaatggtttatagtctagaaaggaaagacaagcattcgaataaataaaagatatgaaaccgtgcagtgtgatggcaaatggaggaagatggctcagtgggacttttgggaagatgtacgcattaagagggaatagaagaggcttcatagagaatgcagagggaaatctgatgggatgtgggcttcatgaaatcagccaagatatttgtatataaaagctctacttaccaggatataccaatcttagattaagcaaataaggtggaaggaattgagctgtaatattcaccccaaagcactgcaaaaggggacttagaggtcagtcaacagtatgggacgagggaggcactggataatctgcagaatgtgttygtggatagttagatttcagaaactgagattggccaaaggaaaatattacgtatcaagggatctcccggggattattcgaaacaaaatttctcagcatcagttgtacaatagaatcacccggtgagctcttgcacacgtattttcataaccgagtccaactcccagagcttcaggggaggggcataggcatgttataagggttctcaaagggattctaacatgcaatcaagtagaatcactgatttagaatagttggtcagaaggatgaagaggacagcaaggaagatccacaaatataccaactg

SEQ ID NO: 90295 - DNA, 1470 bp, Homo sapiens
caggtctttccaaaatttaggcctgaaatctttgggtgtgtgaagctctgacccccagattccctgctcggggacacctcctgcatctcccccttgagattgaccctggaaagtcaaagctgagctggcagctgaggagcaagtggctccagaattcaaaagagaagagccctctccccagccccatgagctggtgcctgagtgggcgcctccccgcatctcctgctcttcctccccatctgccgggtgccaggcacagtgtgctgaaggccagcccagccggttcatgccacccactttacagaagaagaaactgaggcatgggagagccaaatggctggtctctggctctccagagcagcggggcagggatgtcacctggaagccctttgctccaggcactgcattgctgtagggactgggggcatcccggccttcccattcagggaacgtgttggggttcggggagccacagggatgggcagctccaaatggggtctccccagtttcaaaggggctcatgccagtgtcccaggaaatcccgtccctgagcggggatctctaccatgccccaggacggtggaaatcaacaacacggatgccgagggcaggctggtgctggcagatggcgtgtcctatgcttgcaaggacctgggggccgacatcatcctggacatggccaccctgaccggggctcaggtgagtgctccctggatccaccccttagctgtagtcccagggaaccccaccccactcttgacctcaaggtggggaaggcagcgcgtgggggctgccgtcaggaagttttcataactgggcacgaggaggcaggaggagctgcccrtcaagcttggtgtgggcagtaccgaggcccaggctggatgcagagccgggaaccgcctcctgtgtgcttcatggccatggtcctttctgcctgtgttttttctttttttctcaaccgtctcttttctggctcccttatttctctgtctgcctcccggtccctcttttgccttgggtgtttctctcctgccgtcccgtccacacgcttcccgggttcctgcccgcccagggcattgccacagggaagtaccacgccgcggtgctcaccaacagcgctgagtgggaggccgcctgtgtgaaggcgggcaggaagtgtggggacctggtgcacccgctggtctactgccccgagctgcacttcagcgagttcacctcagctgtggcggacatgaagaactcagtggcggtaggtttggagcctcgaacctggagcctgccacatgggtggagccgggcaggcggagccctgccttcagggtgctggtgcacccagggagctggggccccccagaagcagccacagtgcagacgagggcttgagaggcaggcgtcagggcacaggagtcatcccagacagcgtgggccactcactggcttccctgccacacagccaagggtttctccccc

SEQ ID NO: 90296 - DNA, 742 bp, Homo sapiens
gggatccaagtactggggaaggagttggggaacaacaagctgaggcatctgtaccttctcccgacacttktgccccaggctgcagggggaaagtggaggagaacagaggagaaggtcccttccaggcccagtccaggctttgggagcacagggtgccagccaggggaggagagggagctttggagatctggaaaagccggcagagaggaagagctttaaggagagctgaaggtttgtgaccattgaagtggagggagggaagcaatgactgaggggcaatgagtgggctccgtgctcagcatgaactcagtatgggttattctatgttttctcattttaatgcattattttttttcgaagttccatactcttattacaaagtttaggtaatatgagagaagcaggtggcaagcacttgtctctccagatctgcttcctaatagagaggctggccggttcagggcttgacatttctgctcagattagtttttgagatatgatctaactgcctgttacttttttggtgggagttggaaagtatttcaaatactaatgtaagaaggccacttccttttttcacgttgggattataaatcatttgaaactgtttggggacaatgcattttacagacactctatctggccaggtacaaattgaacatttaagctcaagttcaaatgtctctcatccttgactttgatgtaaaaacatgtcatatttcactcgcggattgcatgtgaa

SEQ ID NO: 90297 - DNA, 1108 bp, Homo sapiens
gactgagtaatttatgcagagaagaggtttatttggctcgcagttttgcagactgtacaagaaacacaagaagcgtggcaccagcatctgcttctgatgaggcctcaggaagcttttactcatggcagaaggtgaaggggagtctgggtgtcacatggtgagagagggagcaagagagcaggggttggggaggttccagactctttttaacaaccagatcacaagagaactcattaccatggkaggacaccaagccatttcatgagcgattcacctctgtgatccaaacagctcccaccaggccccacttccaacactggggatcacattttaccatgagatttggagggaacaaacatccaaatcctatcaggtgtgaaatgcacatgataggagcattttctcattgagttcatgtggataaactcgggtccatcctgcaagtgttttgaaatcatttacagaagttcctcaagggcaggaattacatcctctgttcctggcatgatgcctggtagccaaaaggggctgtaaactgtgactttggggctgagaaggtgaattcccctacctgggatttgtcagtctctcaaaagagtcatgctgtggtcccatcccatggtaaagactgaacatattggatgggagagaggggtagacagggtgggagttgctggtattggatcttctgccatgccaaccacctcccttccttggcacatttctccagctgctgcattcaccagccaggatcctttggctgcaagcaatggaagctggctttggtcagccttaccaaaacatggatctgtggacagatgtggggtagctcggagaacacagaagggctaagggaccaggtgacagaaggactagacctgggtcaagtctgagaaatctctttgaggcatacattttggggtgagggcctactcactcttgtttcttgtctcagtcccctcaaggtaaaatttcccaggagggaagtgtgggcttgggccccacgctcactctctggcagagcaccttggtcatccattcctgagatggtgaccaagtgggcatgggatcctcgaggggaacttgaagtccagggcagaagagtggg

SEQ ID NO: 90298 - DNA, 1108 bp, Homo sapiens
gactgagtaatttatgcagagaagaggtttatttggctcgcagttttgcagactgtacaagaaacacaagaagcgtggcaccagcatctgcttctgatgaggcctcaggaagcttttactcatggcagaaggtgaaggggagtctgggtgtcacatggtgagagagggagcaagagagcaggggttggggaggttccagactctttttaacaaccagatcacaagagaactcattaccatggtaggacaccaagccatttcatgagcgattcacctctgtgatccaaacagctcccaccaggccccacttccaacactggggatcacattttaccatgagatttggagggaacaaacatccaaatcctatcaggtgtgaaatgcacatgataggagcattttctcattgagttcatgtggataaactcgggtccatcctgcaagtgttttgaaatcatttacagaagttcctcaagggcaggaattacatcctctgttcctggcatgatgcctggtagccaaaaggggctgwaaactgtgactttggggctgagaaggtgaattcccctacctgggatttgtcagtctctcaaaagagtcatgctgtggtcccatcccatggtaaagactgaacatattggatgggagagaggggtagacagggtgggagttgctggtattggatcttctgccatgccaaccacctcccttccttggcacatttctccagctgctgcattcaccagccaggatcctttggctgcaagcaatggaagctggctttggtcagccttaccaaaacatggatctgtggacagatgtggggtagctcggagaacacagaagggctaagggaccaggtgacagaaggactagacctgggtcaagtctgagaaatctctttgaggcatacattttggggtgagggcctactcactcttgtttcttgtctcagtcccctcaaggtaaaatttcccaggagggaagtgtgggcttgggccccacgctcactctctggcagagcaccttggtcatccattcctgagatggtgaccaagtgggcatgggatcctcgaggggaacttgaagtccagggcagaagagtggg

SEQ ID NO: 90299 - DNA, 1369 bp, Homo sapiens
tccagtctagtccctcctcccctcttttttgaggaacatcttcaccaatattcagagaaaaaacttggggaaatgttgctgaatagcaaatgaggatgattctgattgcttgggatttttggtgatttggagtccatataaacaggcagatattgcagaatgttaaatatgcccccttaaaagagataatccattttaaatggcaaataatattttgaggtgtgcatagaagaaaggtttagtggtaatatgagagcctcgggtgttgttgaatcctaatcttatcactatgtttattttagagaaatgtaatttcctgagarcaactcagggctaagttgcaaaacctggagaagaaggaagtccagcaacatttgttgctgtttttacattttggtcttatgtgaccttcaggtttcagcagcttatccatccagtgataaaagatgcttttttttttttttcgataacagcctcttttactttgcctgttaataacaaatgatttctaattaagaacctctttttgatcttgattttgggtgtacatttatcaataagtttaaaagaaaggtcttttgacttatgggatttgtgttttttacttttttcagctatgcatttgatcgtacttccctaaccatttccccaaatggaataatcaaatgaattttctttacctggtcttgtctcttcagatattatcatgttaagttgaatcctattcagagaaaatcttacaaatattgcagagttgttctacctcagctattctctgcatcctgtttgtattgctccaaatcttgtctaatttatttcttttccttaggcatgctaaaattacttattctataaaatggtaacttataagaaaacaccacacatttttgcatttggtcctggtgacttattttgccactacaaagaaatttaaaatgccctttaccactaaagagtctaattttgcctcttccctcatgttgaaaaatttcattctagtcttactactagttagatggtctacgtctgtggttcctgacatgcagaccatgtgcgtcatgagtttcttcttgagtccatgtgcccagtaagcagtatctgtaggttgactaaataatctcttgcacatgtatgggttagtattttaaaaatgtaagtagacacttaagattaaaataattcaaattaattaaaggcatcatcgaattcatagaggtatgtttttattaatacaaagaaaataaatataaatgctacctatattataggggtctaagaaatgttttgtttaactttaagttcagaggtgcatgtgcaggtttgttacacaggtcaacttgtgtgatgggggtttgttgtacagagtatt

SEQ ID NO: 90300 - DNA, 1369 bp, Homo sapiens
tccagtctagtccctcctcccctcttttttgaggaacatcttcaccaatattcagagaaaaaacttggggaaatgttgctgaatagcaaatgaggatgattctgattgcttgggatttttggtgatttggagtccatataaacaggcagatattgcagaatgttaaatatgcccccttaaaagagataatccattttaaatggcaaataatattttgaggtgtgcatagaagaaaggtttagtggtaatatgagagcctcgggtgttgttgaatcctaatcttatcactatgtttattttagagaaatgtaatttcctgagagcaactcagggctaagttgcaaaacctggagaagaaggaagtccagcaacatttgttgctgtttttacattttggtcttatgtgaccttcaggtttcagcagcttatccatccagtgataaaagatgcttttttttttttttcgataacagcctcttttactttgcctgttaataacaaatgatttctaattaagaacctctttttgatcttgattttgggtgtacatttatcaataagtttaaaagaaaggtcttttgacttatgggatttgtgttttttacttttttcagctatgcatttgatcgtacttccctaaccatttccccaaatggaataatcaaatgaattttctttacctggtcttgtctcttcagatattatcatgttaagttgaatcctattcagagaaaatcttacaaatattgcagagttgttctacctcagctattctctgcatcmtgtttgtattgctccaaatcttgtctaatttatttcttttccttaggcatgctaaaattacttattctataaaatggtaacttataagaaaacaccacacatttttgcatttggtcctggtgacttattttgccactacaaagaaatttaaaatgccctttaccactaaagagtctaattttgcctcttccctcatgttgaaaaatttcattctagtcttactactagttagatggtctacgtctgtggttcctgacatgcagaccatgtgcgtcatgagtttcttcttgagtccatgtgcccagtaagcagtatctgtaggttgactaaataatctcttgcacatgtatgggttagtattttaaaaatgtaagtagacacttaagattaaaataattcaaattaattaaaggcatcatcgaattcatagaggtatgtttttattaatacaaagaaaataaatataaatgctacctatattataggggtctaagaaatgttttgtttaactttaagttcagaggtgcatgtgcaggtttgttacacaggtcaacttgtgtgatgggggtttgttgtacagagtatt

SEQ ID NO: 90301 - DNA, 1369 bp, Homo sapiens
tccagtctagtccctcctcccctcttttttgaggaacatcttcaccaatattcagagaaaaaacttggggaaatgttgctgaatagcaaatgaggatgattctgattgcttgggatttttggtgatttggagtccatataaacaggcagatattgcagaatgttaaatatgcccccttaaaagagataatccattttaaatggcaaataatattttgaggtgtgcatagaagaaaggtttagtggtaatatgagagcctcgggtgttgttgaatcctaatcttatcactatgtttattttagagaaatgtaatttcctgagagcaactcagggctaagttgcaaaacctggagaagaaggaagtccagcaacatttgttgctgtttttacattttggtcttatgtgaccttcaggtttcagcagcttatccatccagtgataaaagatgcttttttttttttttcgataacagcctcttttactttgcctgttaataacaaatgatttctaattaagaacctctttttgatcttgattttgggtgtacatttatcaataagtttaaaagaaaggtcttttgacttatgggatttgtgttttttacttttttcagctatgcatttgatcgtacttccctaaccatttccccaaatggaataatcaaatgaattttctttacctggtcttgtctcttcagatattatcatgttaagttgaatcctattcagagaaaatcttacaaatattgcagagttgttctacctcagctattctctgcatcctgtttgtattgctccaaatcttgtctaatttatttcttttcyttaggcatgctaaaattacttattctataaaatggtaacttataagaaaacaccacacatttttgcatttggtcctggtgacttattttgccactacaaagaaatttaaaatgccctttaccactaaagagtctaattttgcctcttccctcatgttgaaaaatttcattctagtcttactactagttagatggtctacgtctgtggttcctgacatgcagaccatgtgcgtcatgagtttcttcttgagtccatgtgcccagtaagcagtatctgtaggttgactaaataatctcttgcacatgtatgggttagtattttaaaaatgtaagtagacacttaagattaaaataattcaaattaattaaaggcatcatcgaattcatagaggtatgtttttattaatacaaagaaaataaatataaatgctacctatattataggggtctaagaaatgttttgtttaactttaagttcagaggtgcatgtgcaggtttgttacacaggtcaacttgtgtgatgggggtttgttgtacagagtatt

SEQ ID NO: 90302 - DNA, 745 bp, Homo sapiens
gtattccatgatgtgtatgtaccatgttttctttatccagtctaccattgatgggcatttaggttgattccatgtctttgctattgtgaatggtgctgcaatgaacatacacaggcatgtgtctttataacagaatcatttatattcctttcggtatatagctggtaatgggatttctgggtcgaatgatatttctgtctttaggtctttgaggaatcaccacactgtcttccacagtggttgaactaatttacacccctgcctccaacagcatataagcattacttttctccaagaccttgctagcatctgtgttttttttttgactgtttaataatagccaaaaaatgttattttaaacttttattttaggtgttaaaaaaggtcctcatgttcaccctaagggattccacrttccttccatcttctagtaagatttttatcctattatagtatgtattgcccctacccataatgttaatccaacgcttcctcctatccctttcttgctttagaatttatacccataagggtgccacatggttttaaaaagtatagtgtgcacttactttaataatactagttcactcttttttgtttgtttttagagctaggatctcactccatcacccaagctggagtgcagtggcaagatcatagctcactgcagcctagaactcctgggctcaagcaagcttcttgccttggccctccaaagttctcagattacaggtgtgaaccacca

SEQ ID NO: 90303 - DNA, 653 bp, Homo sapiens
cccctggaagctttgaaacttgcaaaagccctacgtccacacccagaaaacttcctaggtctaacagacagaagaaaacaatgcagctcttatgggaaatttagcaaagccttagccagatgcttaacactcttgggactggagagagttggaccttccagcacacgggggtgccctgttgttttgactggaagttcttctcttaagatctggggtgctgtctgattgggccctttccctgggccaaagaggcagtcatggggaccatgcaatccctgtggctcctctgcacggtgggaagcagagcttcttctttgtatttagtggcagggtggcactgaaggatttggggtaagaaagtgctttgtaatatcctagaagaatcagtgagatctaaatggaggctgcctgcttgcattcaagacagcactccgaaacagttcctcctsgtgttttgtgtgttgttccagactttcacaagggataagcctccttgggcaagatgacatctcccttctcaccaagccaaccccaaccccaccctgctggggtggcagtgagttcacccattgaatcataggcacttgccttagagggtgaagcgctaccaccatctcagcctgcaaaagccatttcccagccatcgcctagga

SEQ ID NO: 90304 - DNA, 532 bp, Homo sapiens
ttatgaagaaataaacaatagtgataatcacaacatatccaataaaccactctcccataaaacttaatattctgtcattaagaacaatgatttgtacataacaaataagatataattaaccaatgactgaatgcatctttttttgtaatatcttagtttatgttctctaataatgacaatatttggtgaacttgtacatgtgctagttcttgttctaagtactttacatatgttaactcatttaatcctcctgataacctgtaaagtggatcctattttctttattgcatcaatatgtaagccaaggcactaaaggattatgtaatttaccaaggtcacatactcggtaggtggagaaatttgggcaatctgagccaaaaattcatgctctttaactaatgtatacacatgtaaacatacatatattatgttgcttttttttagactaacagcagtatcttttcygaaaaactaagattcccatctcagaatgaagtaacaatatgctaccccaaaatgtgccactttggca

SEQ ID NO: 90305 - DNA, 532 bp, Homo sapiens
ttatgaagaaataaacaatagtgataatcacaacatatccaataaaccactctcccataaaacttaatattctgtcattaagaacaatgatttgtacataacaaataagatataattaaccaatgactgaatgcatctttttttgtaatatcttagtttatgttctctaataatgacaatatttggtgaacttgtacatgtgctagttcttgttctaagtactttacatatgttaactcatttaatcctcctgataacctgtaaagtggatcctattttctttattgcatcaatatgtaagccaaggcactaaaggattatgtaatttaccaaggtcacatactcggtaggtggagaaatttgggcaatctgagccaaaaattcatgctctttaactaatgtatacacatgtaaacatacatatattatgttgcttttttttagactaacagcagtatcttttctgaaaaactaagattcccatctyagaatgaagtaacaatatgctaccccaaaatgtgccactttggca

SEQ ID NO: 90306 - DNA, 536 bp, Homo sapiens
caaaggacagaccagccacacaaagagggaggcaggcctgcccatcctcccggctttgtgcagatagatttggactcgtggtagtgtcatctttgaatgtgcattgcagtttcacawccatacctacctcaccaaataatcctagaatagtgaacttcaacacaaatgtcccctgcaatttcaggggcttaagtggtccctttatgtaacaggcaaaggattagggccagctgggaaaatccaagtgtttaaaacctgttcagcacttttgcagccaaagagtaagttgccaaacatttttctctcaaaagaaaacaggccactgaatactagaaaggggaattctggaaggaaagaaaaaatcaaagaagagaagagaagtgaagggacatcttgggaaaagtaaaatgatgttgaacttaaaggtttaggacattgagaaggtaaacttgaacatttttctttaaaataaaaacacatcaaaaagagaaacaatacaagatgattttaaaaagcaaaccaaggggaaattttta

SEQ ID NO: 90307 - DNA, 536 bp, Homo sapiens
caaaggacagaccagccacacaaagagggaggcaggcctgcccatcctcccggctttgtgcagatagatttggactcgtggtagtgtcatctttgaatgtgcattgcagtttcacaaccatacctacctcaccaaataatcctagaatagtgaacttcaacacaaatgtcccctgcaatttcaggggcttaagtggtccctttatgtaacaggcaaaggattagggccagctgggaaaatccaagtgtttaaaacctgttcagcacttttgcagccaaagagtaagttgccaaacattttyctctcaaaagaaaacaggccactgaatactagaaaggggaattctggaaggaaagaaaaaatcaaagaagagaagagaagtgaagggacatcttgggaaaagtaaaatgatgttgaacttaaaggtttaggacattgagaaggtaaacttgaacatttttctttaaaataaaaacacatcaaaaagagaaacaatacaagatgattttaaaaagcaaaccaaggggaaattttta

SEQ ID NO: 90308 - DNA, 829 bp, Homo sapiens
ctaatcaagaggtagttagctgtatgatggcacagagagaaggtgagctctgaggtgaatccaagacttttcagtgaccacagtttctcttggttagggcccctgactcagagcctcacttcatacagtggggaaggacctgtaggaaagacttacattcatgccacaaaaggcagtccattctgttcttgagtgtaacatctttctgtcttaaaaataatagtaattaaggccaacgcaggcagatcatttgaggtcaggaattcaagaccagcctggccaacatggcaaaaccccgtctctactaaaaatacaaaaaattagccgggcatggtggtgcacgcatgtaatttcagctgctcaggagtctgaggcatgagaatcgcttgaacccaggaagtggaggttgcagtgagctgagatcgtaccactgcaytccatcgtgggtgagagaatgagactctgtctcaaaaaaaacccccaaaaaaaaccccccaaaaaaaacccccccaaaaaacacaacaacaacaacaacaacgtaattagccaggtgcagtgggttgagtgcctctagtcccagctcctcaggaggctaagataggaggattgcttgagcccagcagttcaaggctatagtgtgctatgatcaagtctgtgaatagtcactgtactccaggttggtcaacatagcaagaccccatctaataatgattgcaagttgcagccaagtctcctgcaagttcaccttccatagtgtatctcaaatctgtctcctctttaccatcttcagcgccatctccatgcaagtctgcgggacatcatctcacaa

SEQ ID NO: 90309 - DNA, 829 bp, Homo sapiens
ctaatcaagaggtagttagctgtatgatggcacagagagaaggtgagctctgaggtgaatccaagacttttcagtgaccacagtttctcttggttagggcccctgactcagagcctcacttcatacagtggggaaggacctgtaggaaagacttacattcatgccacaaaaggcagtccattctgttcttgagtgtaacatctttctgtcttaaaaataatagtaattaaggccaacgcaggcagatcatttgaggtcaggaattcaagaccagcctggccaacatggcaaaaccccgtctctactaaaaatacaaaaaattagccgggcatggtggtgcacgcatgtaatttcagctgctcaggagtctgaggcatgagaatcgcttgaacccaggaagtggaggttgcagtgagctgagatcgtaccactgcattccatcgtgggtgagagaatgagactctgtctcaaaaaamacccccaaaaaaaaccccccaaaaaaaacccccccaaaaaacacaacaacaacaacaacaacgtaattagccaggtgcagtgggttgagtgcctctagtcccagctcctcaggaggctaagataggaggattgcttgagcccagcagttcaaggctatagtgtgctatgatcaagtctgtgaatagtcactgtactccaggttggtcaacatagcaagaccccatctaataatgattgcaagttgcagccaagtctcctgcaagttcaccttccatagtgtatctcaaatctgtctcctctttaccatcttcagcgccatctccatgcaagtctgcgggacatcatctcacaa

SEQ ID NO: 90310 - DNA, 852 bp, Homo sapiens
tacaaactaataatttttcagaactcagatgcactcgaaatttcaactgaaaagtgagttgagtatcagaaatggcatcagtactttgcacataacagatgtgcaaatatttgattgattcattgaaactgctgaaccagaaaactgtttctatggaggcaggaagttgaaatagggagagaaatataaagttatctttgaattaatgaggaagtgtagaggatacagggaggtataccaggtaagygatgtggtgctaatggtggtaatagtagtgtgataattttgatagagagacaggatgagattccatggaatgtctgacatttgagatgaatctaataagcagagttgtgaaatataaggtctgttccagaacagctgaataaagtgtggcacagctggagaatagaagatgtgaagaaagagaggcggcgctgagtagggaagtcagaccagattttatggagggccttgaactcctttctaacgtatttagattgcttttccaggcactatggagtcattcaaggtttttaagcaggacggtgaaatgaacagattgtgttttagaaaaccctggtcacacatagagaaagcattagcttagagagaccagagagaggaagctactgcaggaatccaggtgagaaatggtaagtctgacagagcggtggtggctgtgggacgtgtaaagacattttgagggttgaatttgcaggatttggtgactggctctgtatgagaaggggtaaagagaccagaagatgagctcttacctccaacatgctgggcattctagagtgaggtgataggtctttagtccacccatgcattccacaaatattcaca

SEQ ID NO: 90311 - DNA, 750 bp, Homo sapiens
atatgtatatatacatactagcttatgattattaaataaatggttaaaatagtcatcttcttttagagtaaaattcaattattcttatagcttcctcctgtagtaaggtgctacttaggattttccaagaagcagacaccaagttggaattagatgtgcaagaaatttaccaacaagatgcctgggagggaaaatagagaggaagctaggaagggctgtgacagctgatagtgccagctgttggtctgaactttgggagggagagagtgaaggaataaggggtggrtgaggagtcctaacttgagtgcagttgtaggtaagcctggcaaggctgatggggagccttgagtcaaagtgatcagtcagagaagcttgaggctcccagggacgggccagacttaggatcctgccgttgtcttagctattgatggggagcaaccgagtagggtgatgtgggggcgtgaggagctggccttgtgctaaggcaatggcgggtttcagagcgtagcactcggggccagcaatccatgtgcttgctgtagttgcagatctgagaagcatgtttttctggcagtcacagtatatcacctgaattccttgcccccccgattcttcccatcatttgtgtttagaaatagcaaaggattgtgaggagtgaggatgtgtgacacgaggatgaaagaaagcagcagggtcaggagagtggcaaatggggctttgtgaaggttgctgcagggcattagatggaga

SEQ ID NO: 90312 - DNA, 770 bp, Homo sapiens
aacaagttctagactatccttctattgttgttttaaaattatatatagcatatgtgtgttataaatacacatacaagtattccttctgtcctaaactataatacactatacattccttctccctctcttgatcttttcatttaagaattgtattagttcattctcacattgctataaagaaatacctgagattgggtaatttataaagaaaagaggtttaattggctcatggttccacaggcagctatacaggaagcatgatgctggcattggcttggcttctggggagacttcaggagacttacaatcatggcagaaggagaagggggagcaggcatctcacatagcgagtgcaggaacaaaaagaagggaggtgctacacacttttaaacaaccagatctcacgagaattcactatcatgagaacagcgccaagagaatggtgctaaactatccatgagaaatccacccccaagatccagtcacctcctgccagatgccacctccaacactggggattacaattcatcatgagatctgggcgaggacacatatccaaagtatatcaacaatacatctgtgtcaactccatagcagtacatagagataatctttatttctttgttcaggaacgtttatttctttgttcaaacaccttagcaytccattgcatggatatgccataatttatccaagcagtcctttgctgacatatgtttgactcttttaggtcttttgtttttacaaataatgccacgatgtagtatgca

SEQ ID NO: 90313 - DNA, 519 bp, Homo sapiens
gatcctcaccctgactagggctctggcagcaccatgcagcctcccaggatagtctggctcctgttggcagagcccctcctctttctcctatcttcagatcagtgctgtggagctctgaggctaggggattctggagtttccagctgctggtgaggggagagggcaggcagcagatcctggagagtgagatgtgatctgcaagcctsgagacatccctgcaccccagcaaaagccagggttgctggcctccttggtcctgacttcctctcctgtggatgtctggttctagcttcatggggaattggcactagaaaaactcaggcctttgtggatggaagccagagtttctgttgccagcatggagcccagggtgcccaggctgtccatccaggtgtgctgcccagctcccgtacctgagccaggagatgcccctggtcaggctggtgaggtgggcggggtgggggaggggcccatggatctcaggagcagactctggggctgtgggctcatgcacaatga

SEQ ID NO: 90314 - DNA, 707 bp, Homo sapiens
tccccagcaggatcaagcctaaacagcccacagtggtaacccccttagtcccatgtccttgagttggcttttcttcttcctggtatcaccccctccaggtcccactcaggcttcctgatatcgccttcccatatagccgtgctgygtagaggtcgtggcctcagccagcttctgggggaacacgcgccagggcggctgcgtatctatttcaaataacattataaggtaggatacttatttcataatgtgaacctttttcttaggaaaacttcaatttgagattgcatttcagagggtcaaaataaactgtgagttgaatctcggagattgtttctttgaaatactgagctttgacttgggaagttatgtgggatctttttttttttgtagacatggatctcactatatcgtccaggctggtctcaaactcctaggctcaagtgatcctcccacctcagcctcccaaagtgttgggattacagatgtgagacactgcacccagcctatgttggaacaaattgaatgacttacatttgtgaagtaccctttctccaaattcccacaagtgctggttcaggtgttttcttttcttttttttttttttttttttagatggagtttcacttttgttgcccaggctggagtgcagtggcacgatctcagctcaccgcaacctctgcctcccgggttcaagtgattctcctgcc

SEQ ID NO: 90315 - DNA, 800 bp, Homo sapiens
agggagagacttgatgaatttaaaattaaagtttgaaaagtgttattgactataagtgatcttcagctgtgcagttttcaacttgaggttgtcagaatgtaatattacacattatattacacacatctacagaatccaaattgtgatgttcctggagtattggaacaatacctatgactttttgtttctattgatttttaactcttctaataaccacttctttaagaaaagtcatacattatcactttggtgtatcagaaacaaattccttacgcaataaaagcatacttctttctcattcacctactgggatctagaaaccctgttaatgcaagaaaaaaatcccaaacctcaataaaataacactctgtttgtctgaagtgtggaaacacaacacatttcctctcaactggtggtcgcagatcgaccatcacagtgtatggatgtgtttggaggtgtaggaataggactgcactgaggctctagaaggccagcaggtggggcagactgaatggagggaggggactggcattcagtaactactggagcrtgggaagagtgaggtagactgtccatctggtgaaggtggctgcttccttgaggtttgttactttctgtaatgttaattccctcaacttttaaaatttgatttttagacaagttatacattcaaatgatttaaaattggaaaataataaaaaggtaaacagtgaagtctctccctttcccctgccttcatgcccccagtttacatctccagaaacctcagaggtttctcgtgtaaccttccagatgtattt

SEQ ID NO: 90316 - DNA, 800 bp, Homo sapiens
agggagagacttgatgaatttaaaattaaagtttgaaaagtgttattgactataagtgatcttcagctgtgcagttttcaacttgaggttgtcagaatgtaatattacacattatattacacacatctacagaatccaaattgtgatgttcctggagtattggaacaatacctatgactttttgtttctattgatttttaactcttctaataaccacttctttaagaaaagtcatacattatcactttggtgtatcagaaacaaattccttacgcaataaaagcatacttctttctcattcacctactgggatctagaaaccctgttaatgcaagaaaaaaatcccaaacctcaataaaataacactctgtttgtctgaagtgtggaaacacaacacatttcctctcaactggtggtcgcagatcgaccatcacagtgtatggatgtgtttggaggtgtaggaataggactgcactgaggctctagaaggccagcaggtggggcagactgaatggagggaggggactggcattcagtaactactggagcatgggaagagtgaggtagactgtccatctggtgaaggtggctgcttccttgaggtttgttactttctgtaatgttaattccctcaacttttaaaatttgatttttagacaagttatacattcaaatgatttaaaattggaaaataataaaaaggtaaacagtgaagtctctccctttcccctgccttcatgcccccagtttacatctccagaaacctcagaggtttytcgtgtaaccttccagatgtattt

SEQ ID NO: 90317 - DNA, 583 bp, Homo sapiens
tgccaggcctcgccctgctttttttttttttgcaaacgagcaagccaatagccacttgattttgatggaaacatttaaatggatgaaattgcagtctaaactggtgcaagaaataccttattctttagactatattgtttagggtgccagttttcaatgcagtataaattaataaattcttctgggcacgtcataggaatctggaaatggcattctcccataactctttccctgcactctcttaccctttcttctctctaaaatgtgttactattgattcaatgagagattagacattyagacaacttcctgtccaacattaacagggttaactacaagagaaacatccatgttgtttctgtttaatacttttgcaattagatttgcataccattgacgcctgctcccaggggtgtatttgtgatatagagaaggtaagacaaaaatgaggccagctctctggcaagttcctatgtaacctactttgccctctcttgcttacaacatttgttttcctaccctgtaaatcagatgaaaaccaggaaaaacaagagtaggcaataatggtgcttactctggctgg

SEQ ID NO: 90318 - DNA, 1061 bp, Homo sapiens
  misc_feature (1)...(1061): n = A,T,C or G
agcacctgagacttgcagtcccttttccacctcgactattattattcctttgccctctccttttattaccaactcctatggcctcacccttggctgctaggggtccaactctcaacctaaattccaaacacactttatgaataaattattctatctgtccagctctctccttccctgattctattttnnnnnnnnnnnnnnnnnnnnnnnnnnnnnnnnnnnnnnnnnnnnnnnnnnnnnnnnnnnnnnnnnnnnnnnnnnnnnnnnnnnnnnnnnnnnnnnnnnnntctaaagcaccctttcttccctggtctccaatgtatcgactgcccgtggattcatttctttcctcaacacaggagaactcagtcctcattagctgaaccttttccttgttagaattgctcttcccccatactcccttgaacaaactttaaacacaaatgaaatcaactacccatgttttccacactgatacctgggtcgtttggtgctgctggagaaaaaacatagagcttggctgaggctgagttggctagccatctgccaaagatttgcggtgccttttcawggtatcaatgtattgctgtgaatcagctttctggccaagttctacattttccagcaactcctttgcacctatattaggccatatcactgaagatgtccactcaaatggaaccacgccacttccagacgggacactaagaatgccttctgtaattctccagtcctttctttttctctccttgccaactggctacagagtatccatcataagaccctgaggtcccacagatgatagtgccacaaaaaggaaagagcctgggtggctgaaggaacatgaggaatgttacctaacaaccaggaacagctatgttggaatcaacaggaagagggcagggcatggtgtcacatgcctatagtcccagctactgggaaggcagaggtaggaggattccttgagtccaggagttcgagaccagcctgagcaacataacaaggacctgtctttaattaaaaaaaaaaaaaatatatatatatatatacacacacacata

SEQ ID NO: 90319 - DNA, 1061 bp, Homo sapiens
  misc_feature (1)...(1061): n = A,T,C or G
agcacctgagacttgcagtcccttttccacctcgactattattattcctttgccctctccttttattaccaactcctatggcctcacccttggctgctaggggtccaactctcaacctaaattccaaacacactttatgaataaattattctatctgtccagctctctccttccctgattctattttnnnnnnnnnnnnnnnnnnnnnnnnnnnnnnnnnnnnnnnnnnnnnnnnnnnnnnnnnnnnnnnnnnnnnnnnnnnnnnnnnnnnnnnnnnnnnnnnnnnntctaaagcaccctttcttccctggtctccaatgtatcgactgcccgtggattcatttctttcctcaacacaggagaactcagtcctcattagctgaaccttttccttgttagaattgctcttcccccatactcccttgaacaaactttaaacacaaatgaaatcaactacccatgttttccacactgatacctgggtcgtttggtgctgctggagaaaaaacatagagcttggctgaggctgagttggctagccatctgccaaagatttgcggtgccttttcaaggtatcaatgtattgctgtgaatcagctttctggccaagttctacattttccagcaactcctttgcacctatattaggccatatcactgaagatgtccactcaaatggaaccacgccacttccagacgggacactaagaatgccttctgtaattctccagtcctttctttttctctccttgccaactggctacagagtatccatcataagaccctgaggtcccacagatgatagtgccacaaaaaggaaagagcctgggtggctgaaggaacatgaggaatgttacctaacaaccaggaacagctatgttggaatcaacaggaagagggcagggcatggtgtcacatgcctatagtcccagctactgggaaggcagaggtaggaggattccttgagtccaggagttcgagaccagcctgagcaacataacaaggacctgtctttaattaaaaaaaaaaaawatatatatatatatatacacacacacata

SEQ ID NO: 90320 - DNA, 843 bp, Homo sapiens
tttatataaaaactggtattgtttttaaaaagtatgaatcattttttataattatstttttgtttcttttacaattcaggtatactactttgagtagtttttcagatttttagtgtatctgaaaacagtaatttagttattttaattatgtaactcaaggaaatataactttaagattagttttcaattcaactggttaatcatgaacatttggggaacacttttgccatgccgaatgaggaaaacaattattatttaaaacagatggtttgattgaattcaagtaataatttacatactcagaatcaaattacataattatttcaacaatcatgtatttttatgaatttcaatatattgtttatagctatctgtgctctaaagcaaaacagcatgttttagacaatgcaacaagatttttaaagttacttattgatataacatattaacttttgcctttaattcaataacccaacaagattttaaaccatcaagaatgggtatggttagagagtcacatattgaagagataacagcagagcatcctctgtatgtgcttagtgcattgctagctaaggcactaaggaggaatgcttaagcccaggaatttgaggttacagtgagctgtgatcgcaccactgtactctagcctgggtgacagagcaacaccctgtctctaaaagggaaaaaaaatgatataaccctcacttgtaagtacccatttgaaacaatctccatgataaattattaaattaaaaaagcaaggtgctgaagaattggtaaagcaggccatcagcgcatttaaaaattgtatgtatgtgctatgtacataagataatatgc

SEQ ID NO: 90321 - DNA, 1996 bp, Homo sapiens
gccctctcaccccattgttcctgacccggttctctgtgtgtttgtatgtaatattttggttgagggctgttcttacacagaatgtggtcagaagcttgccagcctgatgaatatgctaagaaaataaaatttaaaagtattaacaaggccgggcgcggtggctcatgcctgtaatcccagcactttgggaggccgaggcgggcggatcacgaggtcaggagatcgagaccatcccggctaaaacggtgaaacccggtctctactaaaaatacaaaaaattagccgggcgtagtggcgggcgcctgtagtcccagctacttgggaggctgaggcaggagaatggcatgaacccgggaggcggagcttgcagtgagccgagatcctgccactgcactccagcctgggcgacagagcgagactccgtctcaaaaaaaaaaaaaaaaaaaaaaaaagtattaacaaaatataaatagaagaatcaatgttcaatggaaacagagctttatttaaagcactgtgatctgtacaagttaatttttctcctctaaaattttaatatggcagcaatagggatccttatgccagatcatcagactcactggggtgaaaccctgtacagcaagatagtcattgtatctgcattataacattagtatttagtggaatctgataactttgaggcatctataatgcaataatgaggatagtaacaaatgagctaaattaagtacagaatgtttttatttactatgtaattttaatttttttgacatccagaatactttgtaatcttaagcaattctttaaatgttggttaaaattctaattgttggtgttcatattttcgacaggctttatactttagaaggaaaacttgttgagagtggagcagagttggagaatgggcagttttatgtggctgttggcagagataagtttaagaaactgccttacagtgagttactttttgacaagtcaacgatgagaaggccttttgggtaagtcttactccttaccactcctcatgctttagttaccacttgaaatagcattgggtcttttgctgaccaccattatattttatgtaattgataatcttatttattacttagaatggaaagcatatatggtatacattgatctttgtttttattgccatgatgggagactgaaagctattgaacaaaaatataatttctgggaagttatgaaagactacatggtttttttttagcatgcatgaaatttataagtaaatgcaaaaatttattattgtgaagaagatacagggcaatgagcttctctacagcaaacattattagaagtttttgtgtcttaatagttgctagaccaaataacttttcagttggtttggatagaaacatccaagagtgttaaaaaactcataatattttatacttgttttaataataactgtaaaatataaaaacaacataatcccacttatgcaaatagagaggatgggtgtacagttaattcatgtaaaattttaaggattatatttttaattacaatataccgtaaacagtttttctccatgaaatgtcatatatttgtgaaagatgctttatttcagcctaggagatacactgcggagtcactcaagaagagctctgggccgggcgcggtggctcacgcctgtaatcccagcactctgggaggccgaggcgggcggatcacgaggtcaggagatcgagaccatcccggctaaaacggtgaaaccccgtctctactaaaaatacaaaaaattagcygggcgtagtggcgggcgcctgtagtcccagctacttgggaggctgaggcaggagaatggcgtgaacccgggaggcggagcttgcagtgagctgagatcccgccactgcactccagcctgggcgacagagcgagactccgtctcaaaaaaaaaaaaaaaaaaaaaaaaaagaagagctctggcccgtgctgcaggatctctcggcttgctcatggtgcccag

SEQ ID NO: 90322 - DNA, 1003 bp, Homo sapiens
cgtgacacatactatagcactgttcataataaagatccttatgagagatacagctttaattttaacaaacgtataacacaatattataatgtacacatatttaaatattttaatggaaaaaatattttcttcttttaaaacccagacttttacgaactttactatttataataaataaattgaataaatttcagaaratagtgaactccacaaaaatacatttttcaactgtcttcagcaacctagccagtcatactgtgttacattggtattaacatgaaacataatgctcgatgaactgaagtttttggatatttattcacataaacagccaaaataacttttattggaaaccctcaaagatatagattttccaactctcttaaatagaaaatactaagcataggcaaaacttttcttgataacagtgtcatcagaactcctgtatctgaaaggtgccaggttccttaactctatttgcttgtacacttaactaccccagacactgggctttcatgtgttcctgccacccctagaacagcctctcttctcaatgcaggtgaatgttcgtatgcctctgatgtgccgccatatttccccgcaatctttggaagtcaatctgaggctagacctaggcctctgctacagagtaatgttcatgagttttgtgacagctacttcctctaaggaaaggtttttgctcacttctagatttatagctgtattcaagatagagtcaggcatgcacaatgtctgactttccagaaagtgaaatgctaatacatcgaatcacttcgaataagaagagtccatcttcactttgtgcacttgccccatgtcctctgtttactcgcaaaacttcctgtaaaagactgccaggaagctcagggtcaaatttcacactaattcatagcaaccaattattcatgtatttagttactccctatctggtttcataaaggttttatgaccactaagcctttatgcttaccatatctgggtt

SEQ ID NO: 90323 - DNA, 1003 bp, Homo sapiens
cgtgacacatactatagcactgttcataataaagatccttatgagagatacagctttaattttaacaaacgtataacacaatattataatgtacacatatttaaatattttaatggaaaaaatattttcttcttttaaaacccagacttttacgaactttactatttataataaataaattgaataaatttcagaaaatagtgaactccacaaaaatacatttttcaactgtcttcagcaacctagccagtcatactgtgttacattggtattaacatgaaacataatgctcratgaactgaagtttttggatatttattcacataaacagccaaaataacttttattggaaaccctcaaagatatagattttccaactctcttaaatagaaaatactaagcataggcaaaacttttcttgataacagtgtcatcagaactcctgtatctgaaaggtgccaggttccttaactctatttgcttgtacacttaactaccccagacactgggctttcatgtgttcctgccacccctagaacagcctctcttctcaatgcaggtgaatgttcgtatgcctctgatgtgccgccatatttccccgcaatctttggaagtcaatctgaggctagacctaggcctctgctacagagtaatgttcatgagttttgtgacagctacttcctctaaggaaaggtttttgctcacttctagatttatagctgtattcaagatagagtcaggcatgcacaatgtctgactttccagaaagtgaaatgctaatacatcgaatcacttcgaataagaagagtccatcttcactttgtgcacttgccccatgtcctctgtttactcgcaaaacttcctgtaaaagactgccaggaagctcagggtcaaatttcacactaattcatagcaaccaattattcatgtatttagttactccctatctggtttcataaaggttttatgaccactaagcctttatgcttaccatatctgggtt

SEQ ID NO: 90324 - DNA, 680 bp, Homo sapiens
ccgctatgcactttagcttctcctctgaacaaatcacttcattacaggtgtagcaggagactgggtaaacagcaccagcactgtgtggtgaatgctctctcttccatgccttttcagagatacgtttgaatatattttagatacgactgaggcacagaagctttctttagatgaaattatgcccaggcaaaagctagctctcatctacttgctggtcaaacagaaaagagactgagccactctggtgtcctttccatttgtcagtcacaayaaacatgttccttccttgggagctgtcttcctggagtgctctccccgcagatagtcacgtagctcccttctcacttcatccaggccttccccaccacaaacagcaaacccatcactctttgttcactcacttgctgttttcttcttcatagctcctatcatctttggtattaaattatgtcacattatatgttaagtttatccatatgaacttctttgtagtttgccttccctgctagagtataagcatgaaactgtgctttattcatcatattattcaggcacgtacaatgtagtgtgggctaaataaatacctgtgaaaaaaagtagggcaagaggaaaaggaaggaaagaaaaaaatcaaagaaggaaaagagaatgagagggagggcagggaagaaaatggatcc

SEQ ID NO: 90325 - DNA, 658 bp, Homo sapiens
tatagactacccagtgtaaggtattttgttataaggtattttgttatagacagactaagacacattcatccatacacgaggaaaaggcagggtccttggttaaagtagaaggtcacatgctgactggtaaacatggagggagtgctgaagtgatccttgtcattttgttgccatcacagcaaagattggttcaggtaagaatcccaatagatgctaaatctgaggggaaattgtaatgaggagcaggatatttgggtggtcttaaagtgtctctcttcaaactcattattttgcaaaggagaaaatagtaactatttacagttggagaaataggacaacactcctactgtgtgaggaaaactggtgtcaccagggaggggcagatagacatcgtgtgcctccagatgtggctgtctgagaagcacacaatatcacatatgcaatatcctggccaggaatgcagaacttaaatctaatcatgaggaaacatcagacaaattcaaaatacaaagactcctgtttataaaaagtatggggactctrtcttcaaatctgtcactgtcacaaagggcaaaaaaaaaaaattttttaaaggctatggcaatgttttagagattaaagaaacatgacaactaagtgcagtatctgtccctaaact

SEQ ID NO: 90326 - DNA, 2199 bp, Homo sapiens
gttggctcatctaaaggtagatagaataaacagaaggaagaaatttgaatatgtaattggattagaagataaaggtcagactatcaggagtagtaaaatcaaagttaatggaaagcgttgtcctaccaacctgtagggaggaaaagaaaaagtacttatgtctcagaagcattcattcaactccagaggaccaagtccaccagtaagagtcaccttttcaaaggattacattcatacattcagtttttttcttacatttcaaattgttgacaaataaaacccaagataatgttgcacctttgagccctcgggtaatctcttttttaatgttagtattttacttctatgaagagagtcacaaatatctgataaacacattctaaagaagaccataaatatagatagcactggggtctctttacaatttcttaatgactcytctggacattagtgtgatacatcaagagaaaaattcagagactaaattcaagtttaatgacaaaatgagaacattctcagtgggaatttaaaactgaacactgatactcaaagcataaataaacgaaaaacaatcagaagaaaatctccaaactgccttcgttatccccaggtgacctggtaagaacatttttttctgagatttggtaattgctcaaaaattgtatcctttttctccctaccctactatcttttagaaaagatgagtctgaacaataagatgtatcttatataaaatgctgggagttaaatatggattaagtccaattaagacctcttaaaaaaccaccaacacttttgagtgaccacgactataagaagtctttctttttctggtacatattaaaaaacaaaaacaaacaaaaaaaaggaacattcacacaaacaggttaatgaaacccagaagaaacaggatgaaagaatgaccagcagagatgaaagctaacagcagcataaaaaagaaaaccctctaaaaggtcagagagtgaagtgagaaaaggaaaaaaaaacagtgttagttcaagacaggccagctggaagcaaatgtttttggatttttatactacagacttacaaaacagtccagccaatgcatgatggaagccactaattttaaagcaaatgtattttgtttaggagatgctgtgagaacccaatgtccaacaaaggaaatatttgcattgccaatttgagtatacctaaagtgacatcacttagtttaaacctcccactgtgaggttaaagaaattgactagaaatgtatctgaattaaaaatggagagttctgagaataccccatcagtagcattgtgagaaaatattattgactgttttgaatcatcaccgagggaaaggatattttcattttgtaagaagtttgtaattttttttactatgagatgaaatctaagaactatattagaagcaagcaaaatagctttcacaacttactgagtaaaacctaaacaatatttttatgacaaaagtatatctatatattattaataggattggttaaacctaaaaatgaagaccaactctgtttcataatgttttcttatttttttaaggtgtctactttcacaaaattttcagaattcatatatttggtttttcatcgttctccaatacggaaaactgactcacgtttcaatcttcttaaatgtaactttctttcttctagaagatggtcctaataagaatgcttcttgaaatatagacaagaataagatgttatcttagctctaacactcaggcaaaatccagcccctgtgagatccaggatatcatccctcagtctcatattaaaaaacagttctaaatctggcttggcctgaatcgttgctttgtgtgtctgtatcttttaaattataagctttccagattttatgtaacccaacgtgttgcatatgaatattgctttctattacatctagcatgtgttcaacctcagtactcaaattaaattgaccaccaccatggatcagtcactcattaactctgctcattacctctgcagcaccttcaaggagagatcacttattccttcagatttttttttccctgatccagttcattagattccatactacctacaacctacccaattaggtaattaaagggtgaagtccagatacacgtctggaaacatttctggggcaacagagtagaggctggtgccctagggatgagcgccctaca

SEQ ID NO: 90327 - DNA, 675 bp, Homo sapiens
atcaagctgtccctaggagtttctttctttctctagcataatcatmgttctcatccagctacggcaggcactttgctatgttgccatggggattacactgaagataatcacttgtgaacatttgcagatccagacagcccactagggcctgatgttgctttgccccgtcaatctgaatatgctcattaaagactcagccacttggctcttgattttagtcctaatgctgaccctcttcctcacagccatgagtctttgaacaaatcttttctgaacctgtttcctcagctgaaaatggggtgggagaatgtgtggttggtacagatgatgactaactccaaaattaattccaggtgctatgatactgctgcactcatccaaagggacacttctctatcatgactcaattaccatgcaattaaaaaaatttcaaagtacctattaaatgatgcccagatgcccagcaataataaaattatatcccaatccaatagctgggtttttaacaagagaataatccgtatacaactcaggttgtggggtggtatgaggttgagatagcctactttctttttaaatcaacccagagtttgcttaaaacaaacaagaacttaacttaggttatttgaaagttcattcaaaaaagcaaactccgatgaagaaaaaccacaatga

SEQ ID NO: 90328 - DNA, 675 bp, Homo sapiens
atcaagctgtccctaggagtttctttctttctctagcataatcatagttctcatccagctacggcaggcactttgctatgttgccatggggattacactgaagataatcacttgtgaacatttgcagatccagacagcccactagggcctgatgttgctttgccccgtcaatctgaatatgctcattaaagactcagccacttggctcttgattttagtcctaatgctgaccctcttcctcacagccatgagtctttgaacaaatcttttctgaacctgtttcctcagctgaaaatggggtgggagaatgtgtggttggtacagatgatgactaactccaaaattaattccaggtgctatgatactgctgcactcatccaaagggacacttctctatcatgactcaattaccatgcaattaaaaaaatttcaaagtacctattaaatgatgcccagatgcccagcaataataaaattatatcccaatccaatagctgggtttttaacaagagaataatccrtatacaactcaggttgtggggtggtatgaggttgagatagcctactttctttttaaatcaacccagagtttgcttaaaacaaacaagaacttaacttaggttatttgaaagttcattcaaaaaagcaaactccgatgaagaaaaaccacaatga

SEQ ID NO: 90329 - DNA, 2845 bp, Homo sapiens
agtaaggattctaagaatatatttgttcatttgaacaatttgagggctcagatcaatatatgctcaattttatgtattttttccactcattccaaaaacatggagttcagaactacatgctgagtatttgaggcagagagggttatgaaatgtggctcctgggttccaacagccccagtctaatacacaagattcaaagtttaatactagctcaagactctccttcgccgagaagctcttcccagaccacccctacatcctgtgtccatgaagaaaactgggccttacatatgctgccagcatttctgtctaccacacccagggaagcaggtaggccaggtgtttttccccttcttatagacttcaacaggttaaataactcagggtcagcatcttaataaataactaaaccagtaagagaagaaaaaacttctgattcttagagcatattttcactattgtggttttatgcccaaagtttgaggatacattttccaggtcagttaatctttagtatattattgtctatttataattaacttctgctttttttttttactttgtatctttttttttttttttttaattgagacggagtcaccctgttgcccaggctggagtgtaatggcacaatctcagctcagtgcaacctccacctcccaggttcaagtgatcctcctgcctcagccccgctactagctgggattacaggcacgcgccaccatgcccagctaatttttgtatttttagtaaagacagggtttcgccatgttgccaggctggtgacctgacctcgtgatccgcccgcctcggcctcccaaagtgctgggattacaggtgtgagccaccgtgcctggcgtttactttgtatcttttatggttagtacatggggttaaaagtaaggccatcctcctttagaactctgagtattaaatctatgacatcaacacagaataagtaagattggtgattggcagaaatcatctggacacaatggtcagggcccacatgtgtcgatgtgcaggctgggcactgggcaaccttacacagtcccagtcaggtgcacaacctacagaccacaactggcagccttgggagtgattttctctcaggtcagggaaggaagacaaaccctggaaatcaaatctaggctctaccgagtataaacaaaggctgaatattatcaagagtgctgagatgtctgaaagaagaatgtgtggctgaaggagatgggcctcagctccaatcctgccttcatgactagaaggtaaatgccttttttaccaagcaagaccaggctcacattcttttgatcccctatattttgcccaataggctctgcagttcatgacctgcaatcaatgttcaatgatttattttctctactggtgctttgcaagaggcaaattttatttgggctaataataatcacaaaataaatacaagaatcccctttcacttataaagtactagaaaaataccagaaaactgctattaaaacacccagctggcatggggttggagctccatgtccacattttaaacgtgaatggctcttaagaaagacagttttacccagtatgcatggtctgataagtaatttaaagtaatctgaaacgcttctgaggaaagttccttctaaagagagaaaaaaaacaaaagttacaagttatgacacagctttaagtaaccatgtaatacatacaattcagagtgttaaaagacatatcttgtccaccatacctctggctgtttgcctcttcgtggtatggcaggcatttttgttgaattttccttgaacagcctgtcagtgagaacccactgagaatacaggaaaattttatcaaacatttcctccaactcatacttggcttcagaaggaaagaaaaaaaaacacaacaaaaaaaaaaaaacacagggggaaagagtaattgcattttcaatcatggttattcagctgcaacttctagagtcaaggctagttaattcttatttgccgacatacaggtcttaaccaagttcacatttcacccactacaaaaaaaaaaaaaaaaaggcaagaactgtgtgggctcattaagccctcattacttttcagacatgacacagtgtaatttgtgaaatgatctaacttcactgaacccaagaggtgaggccaggacattggctcaccacttgatttttacctttctcttcatcatgacttagtcaaatctgattctgagactatcttttcaaatcataaaaattagctatattggccaggcgcggtggctcatgcctgtaatcccagaactttgggaggccaaggcgggcagatcacaaggtcaggagatcaagcccatgctggttaactcagtgaaaccccgtctctactaaaaatacaaaaaaatagccaggcttggtggcgggcacctgtagtcccagctactgaggaggctgaggcaggagaarggtgtgaacctgggaggtggagcttgcagtgagctgagatcgtgccactgcactccagcctgggtggcaaagtgagactccatctcaaaaaaaaaaaaaaagttagctatatcatctcaggaaagaaaaaaaaaggttccataatccattcaaatcaaacacacattcagtgcttatttaagcacatagctctttgcttagccttttagagaatgcatataagatatagttcctgccttcaaggggcattcattttctttaggaaggcaacacacataaaaatgggcacgcacaaacagagagtgaaataacaatcgaaggcagtgtagactgagaggcagtatgggtggaaaagagggcagattctgaaccagattgttttgattcaaa

SEQ ID NO: 90330 - DNA, 1226 bp, Homo sapiens
gagacggagtgtcagtctgtctccaaggctggagtgtaatggcacaattttagctccatgcaacctccccctcccggttcaagtgattctcctgcctcagactcccaagtagctgggattacaggcgtgtgccaccatgcctgtctaatttttgtatttttagtagagatggggtttcaccatgttggctagactggtcttgaactcctgatgtcaggtgatccaccagcttcagcctcccacagtgctgggattacaggtatgagccactgtgcccggccaagaccctttttttaaaatctcagaattytgcctgccaccgcccatattaaaggatgctcctgccagtagagagctggtaaggatgaaaaactggaaacaatgtagaaatggttaaatacattgtgaatgcttatatagactatgtacatctatactatggaatattggactgagttgtaaaattgaacgaaatagatcaagatgacataataactagcacaaaaaaggcaagtttcagaataatatatacagtgggatcccgtgtatgtattaacaaataaatgctagcttcctgtctctacctttgtcctctgaaatcctctattctgctgccagagaggccttttcaaaattcagatctgatcaggccaccagcctctgcacccaccctgcccccccgcaggcttaaaatccaaccttggattcccgtcattcttaggataaagcctaacaggtctttatcctggcctgggatgcggccctagctggtccctgctgccccgagctccagccacagctctctgggtccacagttctccctctaccactgagccttaccagcaacttctctgctgaaatgctctctagtcacccccctttcaccaggccaacttgattcatgctttcaatctcaattctagctgggcacagtggctcacacctctaatccccaacattttgggaggctgaggctggaggataacttaaggccggtattcaagaccagcctgggtaacatagtaggaccctgtctcttgaaaaaaaaaaaaagaagaagaggaagaggaagaagaagaagaaagaagaagaagaagaagaagaagaagaagaagaagaagaagaagaagaagaagaagaagaagaaaagaaagaaaacaaaatctcaattcaaatgacactctcctatctcaaatcccatctgcccacagaccagccagatagcc

SEQ ID NO: 90331 - DNA, 1226 bp, Homo sapiens
gagacggagtgtcagtctgtctccaaggctggagtgtaatggcacaattttagctccatgcaacctccccctcccggttcaagtgattctcctgcctcagactcccaagtagctgggattacaggcgtgtgccaccatgcctgtctaatttttgtatttttagtagagatggggtttcaccatgttggctagactggtcttgaactcctgatgtcaggtgatccaccagcttcagcctcccacagtgctgggattacaggtatgagccactgtgcccggccaagaccctttttttaaaatctcagaattctgcctgccaccgcccatattaaaggatgctcctgccagtagagagctggtaaggatgaaaaactggaaacaatgtagaaatggttaaatacattgtgaatgcttatatrgactatgtacatctatactatggaatattggactgagttgtaaaattgaacgaaatagatcaagatgacataataactagcacaaaaaaggcaagtttcagaataatatatacagtgggatcccgtgtatgtattaacaaataaatgctagcttcctgtctctacctttgtcctctgaaatcctctattctgctgccagagaggccttttcaaaattcagatctgatcaggccaccagcctctgcacccaccctgcccccccgcaggcttaaaatccaaccttggattcccgtcattcttaggataaagcctaacaggtctttatcctggcctgggatgcggccctagctggtccctgctgccccgagctccagccacagctctctgggtccacagttctccctctaccactgagccttaccagcaacttctctgctgaaatgctctctagtcacccccctttcaccaggccaacttgattcatgctttcaatctcaattctagctgggcacagtggctcacacctctaatccccaacattttgggaggctgaggctggaggataacttaaggccggtattcaagaccagcctgggtaacatagtaggaccctgtctcttgaaaaaaaaaaaaagaagaagaggaagaggaagaagaagaagaaagaagaagaagaagaagaagaagaagaagaagaagaagaagaagaagaagaagaagaagaagaaaagaaagaaaacaaaatctcaattcaaatgacactctcctatctcaaatcccatctgcccacagaccagccagatagcc

SEQ ID NO: 90332 - DNA, 1226 bp, Homo sapiens
gagacggagtgtcagtctgtctccaaggctggagtgtaatggcacaattttagctccatgcaacctccccctcccggttcaagtgattctcctgcctcagactcccaagtagctgggattacaggcgtgtgccaccatgcctgtctaatttttgtatttttagtagagatggggtttcaccatgttggctagactggtcttgaactcctgatgtcaggtgatccaccagcttcagcctcccacagtgctgggattacaggtatgagccactgtgcccggccaagaccctttttttaaaatctcagaattctgcctgccaccgcccatattaaaggatgctcctgccagtagagagctggtaaggatgaaaaactggaaacaatgtagaaatggttaaatacattgtgaatgcttatatagactatgtacatctatactatggaatattggactgagttgtaaaattgaacgaaatagatcaagatgacataataactagcacaaaaaaggcaagtttcagaataatatatacagtgggatcccgtgtatgtattaacaaataaatgctagcttcctgtctctacctttgtcctctgaaatcctctattctgctgccagagaggccttttcaaaattcagatctgatcaggccaccagcctctgcacccaccctgcccccccgcaggcttaaaatccaaccttggattcccgtcattcttaggataaagcctaacagrtctttatcctggcctgggatgcggccctagctggtccctgctgccccgagctccagccacagctctctgggtccacagttctccctctaccactgagccttaccagcaacttctctgctgaaatgctctctagtcacccccctttcaccaggccaacttgattcatgctttcaatctcaattctagctgggcacagtggctcacacctctaatccccaacattttgggaggctgaggctggaggataacttaaggccggtattcaagaccagcctgggtaacatagtaggaccctgtctcttgaaaaaaaaaaaaagaagaagaggaagaggaagaagaagaagaaagaagaagaagaagaagaagaagaagaagaagaagaagaagaagaagaagaagaagaagaagaaaagaaagaaaacaaaatctcaattcaaatgacactctcctatctcaaatcccatctgcccacagaccagccagatagcc

SEQ ID NO: 90333 - DNA, 1226 bp, Homo sapiens
gagacggagtgtcagtctgtctccaaggctggagtgtaatggcacaattttagctccatgcaacctccccctcccggttcaagtgattctcctgcctcagactcccaagtagctgggattacaggcgtgtgccaccatgcctgtctaatttttgtatttttagtagagatggggtttcaccatgttggctagactggtcttgaactcctgatgtcaggtgatccaccagcttcagcctcccacagtgctgggattacaggtatgagccactgtgcccggccaagaccctttttttaaaatctcagaattctgcctgccaccgcccatattaaaggatgctcctgccagtagagagctggtaaggatgaaaaactggaaacaatgtagaaatggttaaatacattgtgaatgcttatatagactatgtacatctatactatggaatattggactgagttgtaaaattgaacgaaatagatcaagatgacataataactagcacaaaaaaggcaagtttcagaataatatatacagtgggatcccgtgtatgtattaacaaataaatgctagcttcctgtctctacctttgtcctctgaaatcctctattctgctgccagagaggccttttcaaaattcagatctgatcaggccaccagcctctgcacccaccctgcccccccgcaggcttaaaatccaaccttggattcccgtcattcttaggataaagcctaacaggtctttatcctggcctgggatgcggccctagctggtccctgctgccccgagctccagccacagctctctgggtccacagttctccctctaccactgagccttaccagcracttctctgctgaaatgctctctagtcacccccctttcaccaggccaacttgattcatgctttcaatctcaattctagctgggcacagtggctcacacctctaatccccaacattttgggaggctgaggctggaggataacttaaggccggtattcaagaccagcctgggtaacatagtaggaccctgtctcttgaaaaaaaaaaaaagaagaagaggaagaggaagaagaagaagaaagaagaagaagaagaagaagaagaagaagaagaagaagaagaagaagaagaagaagaagaagaaaagaaagaaaacaaaatctcaattcaaatgacactctcctatctcaaatcccatctgcccacagaccagccagatagcc

SEQ ID NO: 90334 - DNA, 543 bp, Homo sapiens
cgaaaccttgtctctactaaatatacaaaacttagctgggcatggtggcacgcgcctgtagtcccagctactcgggaggctgaggcaggagaatcacttgaacccaggaggtggaggttgcagtgagccgagrtcgcgccactgcactccagtctggtgatagagcgagactctgtctcaaaaaaaaaaaaaaaaaaaaaatggactgctggcccaggagattctggtgcaacaactatgtggtgcggcctcttaatctgatgaggcaggttagggagccgctgggttaaagcacttggttggaacagtgctgagtcagcgtatcggttctaactaaagccaaggaatgactaacttacactctatgaggaaggaggacaatctgcaaaattacatatatatgtaattttattaatacatttacatttattaatgttaatttatatataaatatatattaaaaaattttttttgacagagtctcattctgtcacccaggtctggtctcgaactcgtggcctcaactgatccatccgcctcagt

SEQ ID NO: 90335 - DNA, 1023 bp, Homo sapiens
cctccatcccatccctgaggattgggctggtacccgcgtctctcggacaggtcagagcgggtcgccgggtggggtcgctgcaaaaaccctgccccggccgcagccggagaggcggagcctcgcggggagggggcgggaccgccgagacaggcctggaaactgctggaaatgccgcagtgccgccgccgcgccttccgccgcatgtcggcaaagagtccccgccagccccggccggcgccctccccctacgctgagctgcccctcagcgcgaaccctccgcccttcctctactcctgcgagagtcgggatctggggctacccaaggttgggtcccgaatgccagtccctctgtcgggacgcgagatgtgtagggcagatgctaggaagaagattgggtctgggagsggtggtccgcgtggttagctgcctccgctctttttcggtgtcccccccagtcccgcccttgggtgtggggacgcctgccccacaagtgtttagggaggtcagtgggttcctcgcccgtagagacaccgtttatgccaaatgagcactcctcatccccgctcttgatggagtcatgtcctagacgtgaaactatggggctgtgatcacaagcaaatgtgtgggcggatccgttgcttgggttcttccccgccccctctttttttcggaccatgacgtcaaggtgggctggtggcggcaggtgcggggttgacaatcatactcctttaaggcggagggatctacaggagggcggctgtactgtgcttcgccttatatagggcgacttggggcacgcagtagctctctcgagtcactccggcgcagtgttgggactgtctgggtatcggaaagcaagcctacgttgctcactattacgtataatccttttcttttcaaggtaaggctgagatctccgctaggcttctttccctttagtgctgtattcgtgttgtttttgtttttttctgtcctttagggagccttagtctagatgtcggggtggcttgtggataacgctct

SEQ ID NO: 90336 - DNA, 692 bp, Homo sapiens
atgtttgtattggaacaaaaattgtagttcattgaaatgaataaaccatgcaacttttaagctgcagaatcttgccaatgtgatcagaagaatttgttgttgttgttttttgagacagggtcttgctctgttgcctaggctggagtgtagtggtgtgatcacggctcactgcagcctcgatctcccatgcttaagagagcctctcacttcagcctctcgagtagctgggactataggcacgcaccaccattcctggctaatgtttattttttgtagagagraggtaccactacgttgcccaggctggtcttgaactcctggactcaagcaatcctcctgcctcagccttccaaagtgctgggattccaggcatgagccatgcctagctgatcagacaaatttgtattctgatttgtggcaaggtgtggagggctctgtgggctccacagatctaatgatccaacatagtgcatttttgtgccttcatcaactactgaagaatgaccctgtggaaatgtgaaacattgcctcagtcatgggtattttatactggtcacgtgcaaggagttttgaattaaaatgtatttgctgcaattcagaaagcgtaacattcaaaagtttttcctgcaaattgtctcacagccttaaggaacagctttatattttacagaaagcattttctttgtgaccct

SEQ ID NO: 90337 - DNA, 1115 bp, Homo sapiens
aaaaaaaaaaaaaatggaagaaaataattcagccgactgagaagaacctttttccagaaaacaagatccaagaaaagaaaaacataaaggccttttaaatatacctaaaacttgaatattcacttttaattaagctgagcgctctttaagaaattctttttaaatcccttgttacttgacttcagccacgccaagcagttaagatttttggcttttgaackttacaaagagtaacctcacaggtgaaaccaacgagccttaattaggttatgacttaaccgccagtgtacaaggtattttcaaaggagtgataggtagcttttgaaactgtcattgcaaaattgtgactgagaccgtgaaaaagatccaacccaaacaacttcattttgtttccagctcacaagctgtccttgccaatcactgggcgtaggctgaaccaactttgggaggagtcaggttcacagcctggctctaagagctggggctttacaagaaacttttccggagatgctttaaaaaatgaaaacttcccaaggaccccttttcctctctatctgcctaaaataatttcttaataactcctacaacaatactcgtcttccctgaatagcaatgttttccacgagaaccaaaaatgctggagaagagctgacttttgattatcaaatgaaaggttctggagatgtatcttcagattctattgaccacagcccagccaaaaagagggtcagaactgtatgtaaatgtggagctgtgacttgcagaggttacctcaactgaattttcaggaaatagggctgatgatcattataattttttccccctaaggttaacattttaaaaactacgtatttgggactcttattatcaaggttgtacctatgtcaatttacaattcatgtttcaagacatttgccaaatgcattactgatgcctctgaagagagggccactgggtcacatagactgatttgaagtctacctatttagtgcttagagaccaaacatggaaggcaaactatttacagcccagtatatatgtacttaagtctatgtgaacggagaaatgcctcctgcactgtttgaaagtgttaagctgataatgcaactaacaat

SEQ ID NO: 90338 - DNA, 1115 bp, Homo sapiens
aaaaaaaaaaaaaatggaagaaaataattcagccgactgagaagaacctttttccagaaaacaagatccaagaaaagaaaaacataaaggccttttaaatatacctaaaacttgaatattcacttttaattaagctgagcgctctttaagaaattctttttaaatcccttgttacttgacttcagccacgccaagcagttaagatttttggcttttgaactttacaaagagtaacctcacaggtgaaaccaacgagccttaattaggttatgacttaaccgccagtgtacaaggtattttcaaagsagtgataggtagcttttgaaactgtcattgcaaaattgtgactgagaccgtgaaaaagatccaacccaaacaacttcattttgtttccagctcacaagctgtccttgccaatcactgggcgtaggctgaaccaactttgggaggagtcaggttcacagcctggctctaagagctggggctttacaagaaacttttccggagatgctttaaaaaatgaaaacttcccaaggaccccttttcctctctatctgcctaaaataatttcttaataactcctacaacaatactcgtcttccctgaatagcaatgttttccacgagaaccaaaaatgctggagaagagctgacttttgattatcaaatgaaaggttctggagatgtatcttcagattctattgaccacagcccagccaaaaagagggtcagaactgtatgtaaatgtggagctgtgacttgcagaggttacctcaactgaattttcaggaaatagggctgatgatcattataattttttccccctaaggttaacattttaaaaactacgtatttgggactcttattatcaaggttgtacctatgtcaatttacaattcatgtttcaagacatttgccaaatgcattactgatgcctctgaagagagggccactgggtcacatagactgatttgaagtctacctatttagtgcttagagaccaaacatggaaggcaaactatttacagcccagtatatatgtacttaagtctatgtgaacggagaaatgcctcctgcactgtttgaaagtgttaagctgataatgcaactaacaat

SEQ ID NO: 90339 - DNA, 1115 bp, Homo sapiens
aaaaaaaaaaaaaatggaagaaaataattcagccgactgagaagaacctttttccagaaaacaagatccaagaaaagaaaaacataaaggccttttaaatatacctaaaacttgaatattcacttttaattaagctgagcgctctttaagaaattctttttaaatcccttgttacttgacttcagccacgccaagcagttaagatttttggcttttgaactttacaaagagtaacctcacaggtgaaaccaacgagccttaattaggttatgacttaaccgccagtgtacaaggtattttcaaaggagtgataggtagcttttgaaactgtcattgcaaaattgtgactgagacmgtgaaaaagatccaacccaaacaacttcattttgtttccagctcacaagctgtccttgccaatcactgggcgtaggctgaaccaactttgggaggagtcaggttcacagcctggctctaagagctggggctttacaagaaacttttccggagatgctttaaaaaatgaaaacttcccaaggaccccttttcctctctatctgcctaaaataatttcttaataactcctacaacaatactcgtcttccctgaatagcaatgttttccacgagaaccaaaaatgctggagaagagctgacttttgattatcaaatgaaaggttctggagatgtatcttcagattctattgaccacagcccagccaaaaagagggtcagaactgtatgtaaatgtggagctgtgacttgcagaggttacctcaactgaattttcaggaaatagggctgatgatcattataattttttccccctaaggttaacattttaaaaactacgtatttgggactcttattatcaaggttgtacctatgtcaatttacaattcatgtttcaagacatttgccaaatgcattactgatgcctctgaagagagggccactgggtcacatagactgatttgaagtctacctatttagtgcttagagaccaaacatggaaggcaaactatttacagcccagtatatatgtacttaagtctatgtgaacggagaaatgcctcctgcactgtttgaaagtgttaagctgataatgcaactaacaat

SEQ ID NO: 90340 - DNA, 1488 bp, Homo sapiens
aacgcataggttaaatgcccttagggtatcacagaggctgagcgagaggctttcgagctgctcccagatgatgagcgccagtgtatcaagtgcaagactacgtgtttcctgtcagccctggcctgctacgactgcccagacggccttgtctgcctttcccacatcaatgatctctgcaagtgctccagtagccggcagtacctgcggtgagcatggkcctttctggaggaagtggggcaagaaggaggatggagagctgggccagacatgctcttgcctgccctcttcctccaggtatcggtataccttggatgagcttcctgccatgctgcataagctgaaggttcgggctgagtcctttgacacctgggccaacaaagtgcgagtggccctggaggtggaggatgggcggaagcgcagtgagtgatgggggggatggagggactccacaggcaagttctattccctttcttctgtactctgacccccttcctctgcctctattcaatactgcctactctttgctgccctcatttttcttccaggccttgaagaactgagggcactagagtctgaagcccgtgagcggaggtttcctaatagtgagctgctgcagcaactaaagaactgcctgagtgaggcagaggcttgcgtgtcccgagctctgggactggtcagcggccaggaagctgggtatgacagcgtgaggagttagggcacacataaggtgctgaggatccagcaccgaggaaaagtgctgcaaggggtagactgtgaataccatttggcagaatggacatcagcaggaagctgccaggcacaagagtgtgagatggcctggaaggtgttgggggggacaaggagaccaggccacctaaaaaggagaggagagcctctgtgataagaaagctagaagtgtttattttttatcagtacctggaagtggcctgagagagaggctgaggggttttgtgggcagggaagagttgtgggaggcttacgggtaagaacaggacaaagatgtatagacctgatccctgctaacacagctttagagttcacagtagaggatggattgcaaagtgtagctcttattacaacccattagtttctaattctttcccctcataatatgaacatgctctataatttaaaaccttccctctaacctgggcaattggggcaaatttgaaatatgcgagatcaaggtggacaggtgtagtgaggaaaggtgttcagtcttagcatagacatggagggaaggcactgagtttggacctgaaacctcacatgtgatacttcatagcccccacagggtggctggtctacagatgaccctgactgagctccgggcctttctggaccagatgaacaacctgccttgcgccatgcaccagattggggatgtcaaggtgaggacgcttggagtgctgatgagggatcaaggggaccaggggacctgagcagcaggccatgcttggctccttt

SEQ ID NO: 90341 - DNA, 1083 bp, Homo sapiens
ccattgtattcctaactctacaaaggggtgctagtaaggagctatagctatagtaagagatctagtctttttccccatggcatctagtccttttccccatggtatcaaatatgcttgattaacttaagaagaaataaattttttttgagacagagtcttgctctgtcacccaggctggagtgtagtggcgcaatctctgcacactgcaacctccacctcttgagttcaagcaattctcctgcctcagcctcctgagtagctgggattacaggcctgtgccaccatgcctggctaatttttgtatttttagtagagacagggtttcaccatgttggccaggctggtcttgaactcctgaccttaggttatctgcccgcctcggcctcccaaagtgctggcattacaggcatgagccactgcacaaggcctgaaataaattcttaatataatcaatatgttttaatcacatgtgaatcaccatctttttttttctctaagaaataaaagcagtttttaattcaattatttatttatctagagacaaagtctcactctctcgcccaggctggagtgcagtggcatgatcatagctcactacagccttgacttcctgggttcaagggatcctcccacctcagcctcctgagtagcatggtatttttcctatcacctgtaaagaattgccaaagaaaaatagggggagggataggttctgattaatgaagattaccatgagttgtagtaaaccaggactcaaatttttgaataattcccccttgtggagttggtaagacaattagggactaaatgtggtgtatataatgaatagaaactatttttcttttttttttwaattatactgtaagttttagggtacaggtgcacaacatgcagctttgttacatatgtatacatgtgccatgttggtgtgctgcacccattaactcgtcatttaacattaggtatatctcctaatgctatccctcccccgtcccctgaccccacaacaggccccggtgtgtgatgttccccttcctgtgtccatgtgttctcattgttcaattcccacctatgagtgagaat

SEQ ID NO: 90342 - DNA, 743 bp, Homo sapiens
gctttcccatccctctgtccctcctcctgttcccctcccagtcactgccggggctttgtcctggctcagggaggcgagggctgagggcacaggctggcgggaagctggtgtgtgtgggggggggaggtgaccacacaactttgcaacttggcagtgaggagaagaggcccagccagcccactggaaaggcgtgtgtgtgtgtgtgtgtgtgcgtgtgtgtaagcctaacatcaagtctcaagctccctggaaatacagccttgattcattaggctccctcccctattgagctcctacttctaattcagcaaggtgcatgtataagaagctgcagcctggcgcggtgtcttacacctgtaaccccaacactttgggaggccgaggcgggtggatcacctgaggtcaggagttcaagaccagcctggccaacatggtgaaaccctgtctctacaaaaaatacaaaaattagccaggcatgatggtgtgcacctaccaaagactaggtagttgcatgggacatctcacaaggccaggtttaaagcaaagacaagccttggtcatttgtcccagctacttgggaggctgatgtgggaggattgcttgagcccaggacgtcgaggctgcagtragttgagattgtgctactgtgctccagcctgggcaacagaagctgcaagctacttcctgaactctggatagcaagttgccgtttctggaccagaggtccccatgggccttgtgga

SEQ ID NO: 90343 - DNA, 1055 bp, Homo sapiens
tgcatctctatgacaaaagggagatacccaggtggtggttgcaagacagcagagactggtttctgccattgtttttgtttgtttgcttcagaggaggaaaacagatgaaatgagtcatttgatggttatccttttagctaagtactttggctggcatggaggataaaaccttattattagaagcaaaaagagagagacaagcaaatttttttttctttttctttttctttttttttcttctttctttctttytttttttttttaacagagtcttgctctgtcaccaggctggaggcagtggcagaatctcggctcactgcaacctccgcctcccgggttcaagagattctcctgcctcagcctctcgagtagctgagactacaggtgcgcaccaccacgcccaactaatatttgtatttttagtagagatggggtttcaccatgttgaccaagatagtctcaatctcctgaccttgtgatctgcccacctcagcctcccaaaatgctgggattacaggcatgagccaccatgctggcctctttttggtttgttattgcagctgctaactggttgatttatggctgggcatctctttgtaatgagaactgtggacaaattaaatacattacaaatcttgcataagaaatgcttttggttgctactccatagaaggctggcaagagaagatctatatttgtgctgtccagtgcagtagctgctagcaacaagtgactatcgagcatttgaaatgtggctagtccgaatgaaatgtgttgtaagtccgaattacacacaagatttcacagacttcaaatgaaagataactcaatatgttttacatttattgcatgttgaaatgacaatattttggatatattttgttaaataaaatgtattattaaaaccagtgtcacctattttttaaaatgtattattgttttaaattttactttaagttctgggatacatgtgctgaccatgcaggttacataggtatacatgtgctatggtttgctgcacctatcaacctgtcatctatgttttaagccccaca

SEQ ID NO: 90344 - DNA, 636 bp, Homo sapiens
gttaaattttctataaataggatcacacaataagcatttttaaaagtctagcttctttccctcaacgttgtttgtgacattcaactatgttgttgagcagagcrttaattcatttattttcataacaatataaatgtcactggacaagcacatctactatcatgttgatggtttgggggtcattttcagttttggacaaggaaaaataatcctgaagtgatcattcttgtttatgacagtcacacattttccttgggtatacaccaagaaatggaattgcagatcacaatgcttgatttaaatgcttaatttaaattactatactataacgaatttacattgattaatgtaaatgtttaatttaaatagatgaggccaaaatgcttttcagtgtgcttgtaccaatttttactcccacaagcaaagtgttagagagttaattccagtgtttctatcattggcaacagttggtacttgctgttttcactacagctattctggtgaaagagtagtgttatatcactgtggttttaaacaggatttccctggttcctaataatattataaaatggataagtttactgcccagttgggtagcctcattataaaagtgccaattaaagcttcttagctatt

SEQ ID NO: 90345 - DNA, 636 bp, Homo sapiens
gttaaattttctataaataggatcacacaataagcatttttaaaagtctagcttctttccctcaacgttgtttgtgacattcaactatgttgttgagcagagcgttrattcatttattttcataacaatataaatgtcactggacaagcacatctactatcatgttgatggtttgggggtcattttcagttttggacaaggaaaaataatcctgaagtgatcattcttgtttatgacagtcacacattttccttgggtatacaccaagaaatggaattgcagatcacaatgcttgatttaaatgcttaatttaaattactatactataacgaatttacattgattaatgtaaatgtttaatttaaatagatgaggccaaaatgcttttcagtgtgcttgtaccaatttttactcccacaagcaaagtgttagagagttaattccagtgtttctatcattggcaacagttggtacttgctgttttcactacagctattctggtgaaagagtagtgttatatcactgtggttttaaacaggatttccctggttcctaataatattataaaatggataagtttactgcccagttgggtagcctcattataaaagtgccaattaaagcttcttagctatt

SEQ ID NO: 90346 - DNA, 537 bp, Homo sapiens
tagccttgaatgcaaaatggcacgggattcggagtaaattaagtgaaaagagaaatgttcagtagcaacagaagaaaattaatgctaataactcatttttaaaaagcaacatattggccaggcatggtggctcatgcctgtaatcccagcattttgggaggcagaggcgggtggatcacatgaggtcagaagttcgagaccagcctggacaacatggtgaaaccccgtttctattaaaaatacaaaaaacgagccgggcctggctggtgccaacctgtgatcccagatactcgggaggctgaggcaggagaatagcttgaacccaggaggcaggggttgcagtgagtcaatatggcgcyactgcactccagcctggggcacagagcgagactctgtctcagaaaaaaaaaaaagaaaaaagaatgcttatgcttaggatttaggctgaactaccatttaaataattgtctctattgtatcctttcattcttcctttcctaagattccacatagattttgtagagaagtccaaactca

SEQ ID NO: 90347 - DNA, 704 bp, Homo sapiens
ccagcagttatgtccaaagataataaatagccaaatatctcagggacaagygttcaccacacagacttgatggttctactagacaaaatctcaaaatgatcctagttacatgagatattcacaggcatatgtaagttttcgattacactaacggacaagatcaacagatcataaaaaggcaagacaatgagtaggtcaggctgactatgcaaaatgaaagcatccacttctgggaaggacaccaagtttcctaaatgaaagaagaaatggcaagatattaaaaattccatgacaaagcaaggaagaattaattttaacgaaggactttgtccagggcccatggcccatgactgcagcagcgtggactgtgctgccaggccctccatcctaagaatcagtcaagaacccagatcttgctccttcagttagcctgaggggggatttctttccttttagtcttggtaaaattactgcaagcccagaaaggacagtataacagaatatgtaggagaatataaaaataaatatgccagttttcaaagggaatgcttccagtttttgcccattcagtatgatattggctgtgggtttgtcacagatagctcttattattttgaaatacgtcccatcaatacctaatttattgagagtttttagcatgaagggttgttgaattttgtcaaaggccttttctgcatctattg

SEQ ID NO: 90348 - DNA, 739 bp, Homo sapiens
agcaacaagatgtcatcttaaaaacagagactgcacccttaccagacaccaaacatgctgttgccttgatcttggacttcccagcctccagaactgtgagaagtagattttttttctttataaattacctagtctcaggttttctgttatagcggcaaaaaaaatgaactaagataccaatagtttgctcaccagtctcctccaccaggctgcaagcacctttgggtaggtcctgggtctctatctctccctctgcagccccttctcagctcctacctaacacagggaggtgctcaaaaattccttgattctcaaaactctttgcaccactgtcagaagtcaakctgtgatcactgaggtctagacatggttgagtatgtctttccatattaaaaaaaaaaaaaaaaaaaaaagctgggagaatacatttgcatgactaataccaaaactctaataaatgaatacacagagggtcttgcacccatgttttcatccattccatttctgttgtctcccaaaggaactatttttttctaccttccagtgttgctttatacatatgcaagcaaatatgaatatatgcatattttcctctatttctgcttcttgctttttttccactgaacatatcctagcaatcttactacgtcagtaaaaagagagtgttccaattcctttttccaggggcgtagtatgccgttatgcacatgcggccactgcttttcttaactagtccttt

SEQ ID NO: 90349 - DNA, 1469 bp, Homo sapiens
acaaagaaaacagcccttcaaagggagcgggggggaagagagagagaaaaaaaagcaaaccacaaacacaacagccagcgatctgctctcacacacacacccctcacctaatcataaaaacatattccaaacaggttccacagctgtccttgggaggggtatttgaaatacatatccctgatacatccctgaaatgttaactgtcagatctctcaggaaatggctctgcctaaacagactttcctggacttccatttcatgaatgttgaaaacagaatttttatgagacaaagccaaacagaaccggtgacaattgttcttgaaattactttcctggtctcttccccagtatcctccctcccccacaccatcatccccacaccagccatgcctccctcactccccagagaccactcatgtcacttgtggaggctcagacgttgttgtttttattatgtggtgccaggcatataaggagaggcaagtgtatgtggggacaggctcaaccttggggatagcagcaaaatatagacgtttgagcccaaagatctgtgattgcgaaggcctagtgcttccagggctggtgagcttgtcactcaacctttctggcctcagtcttgtcatctgcatgatgggactaatggtgatccctgcccatggttgtggtgaggatttgaggagataatggatgtaaataggtagcgtgtcattagatccttgaggagggctttgaggacccttttcttactgagcctggaggcaaccacagaaggcttccctgccagcttcttgtacctgagccacattgccctaggatcactgctattctcgtctttaaaatgttttatttctcccaacttcttgacaaaaaaaaagaggtgggctcgataagaaagaagagagaagggaatgaaatgaaggagtttggtgcagttgacagggaagaaagagacagaaaacagacatgtgtcaagaggtttctctgtgtgagacactgagtgagacactttatgaaatttcagccagctctcccaacctccctgcaggaggtgggtgctcttagcctatattatagaagggaagccaaggctcagagttgaaagaatttgcctagaattatggagctgggattgaatccagacctatctcctcttggcccttctgttgtatctgcactggaaggtcaacacatttgggctctagtccctcctcttccactgatttgctgcgttagctcaggctaattatctcatgtctctgggcttttgtcctgtcacctgtaaaatgagcagtatggaccagagaatcccagtaataaggcttaatcatggggtagattgtgttattgtcaagatatttgaagaaaaattatacctcctgtcctaccgacagcaggctggcctrtgtgacttgctttagctgatacaatgtaaatggaagtgacatggacttggttcaagcagaagctt

SEQ ID NO: 90350 - DNA, 843 bp, Homo sapiens
ctttccagctctgacattctacaagttcattatttcctttcttctagatacctctggctagcagcccagactaaaaatggtctctgtgtaggatccttttaccgactttcttaccagggcttttcattcatcttcattctgtggtacaggataaatgtatgctctcagcgacttagacaactcttttcctccatttttcttcttaagcatttaaattaatgaaatctagcatgtaaagtgcttagcacaatgcctggctcataataatgtattcatttgtatatgtgcatgtatatattcccctaatatatcttcctctaactttctcctttaacctaaatatctgtgtcatttaaaacacttttcattttgtaaaatccagggccactcagcttgtcctttgtaagaaaaaggtttctctggattactcctaagtggctgacacgttcaggttcacagtaccatggactccagtcacttcaaggcacccagcaccatatcacattctgacaaaggctaggcccctgacttcagactgagcaaaggccccaggagcgtgtgtcttctgagatccagccctggctcagctcagatgggatgtgtgaagctgggatgctgatacaggaaggaatagcttgccttgaggccaagtgtattcaaaatctgacttgagctgttgagttgacaccttccaactctgctattccaagtgagaaaatacyccgtctcagatgggacttgctcctctgaatctgggctttcctcaaatttgcaaaaaaagaaaaaaagaaaaaagaaaaaaatgtgatctgggcctccacttaaccgtgttaacagggaaga

SEQ ID NO: 90351 - DNA, 571 bp, Homo sapiens
ggccccatatctgaacccagcctctgctcctgcctcagcttttctggaaggttttagaaatacattttagcactggagtagctgaaaggagacccttaaaatgagaaagatggcaaagaaaaagtgattcgttattaagaaagtgcccttttagctgatttcttagaaagatgtattctttgaaaatgaagtttatgttttataattaaagtctgtgagatagtagaacttttgatccattaatcattccgaccttcctgcttttgacttctgctcagctggcctttgttactcaacatamcaatatatccaattcctcccttctcagagatgctttcgaagtctggtttgtggatttctcttccttaggcagcctcttagatacttgtagttgcccaggccttgatgtttagcatttttctctccacgctgggtactttccctctttccccgggcaatctcattcaccccaaagacgtgaactatcatgtatgtcctctggtaacccagagatccgtatttagtcccatctcctcattgaagactgggaatgggtggtccattccttacg

SEQ ID NO: 90352 - DNA, 1258 bp, Homo sapiens
agaagttgttgccaagaaataggagaaaagtggcaataaagaaacagaatgggccgggcgcggtggctcacgcctgtaatcccagcactttgggagrccgaggcgggcggatcacgaggtcaggagatcgagaccatcccggctaaaacggtgaaaccccgtctctactaaaaatacaaaaaattagccgggcgtagtggcgggcgcctgtagtcccagctacttgggaggctgaggcaggagaatggcgtgaacccgggaggcagagcttgcagtgagccgagatcccgccactgcactccagcctgggcgacagagcgagactccgtctcaaaaaaaaaaaaaaaaaagaatgagcaaaaaccttttactactggcatgtagatgtctttcagatccagacaatatgtattttaaatgaggctttgatattgcacattgtgagagctgctcttgtatgacttcatgtcatgtttgcttaggcaaagcgatttttctgcttttctttctgggccaaactggctgcagcaaatcaaattgttctccctttctgtctctttcatacatcatcatttaaaatcaccaagaattcacattctggaacctgctgttgtcttcttgtacaatatcagttaatttctgaacagccttcatcgaaggagaacactttttacaggttaatcagggaaattgcactggctgacagcaacagcaaacttatccatgtcagtgatagtctcaggaatgtgtgtgtcattggcttctgcgtggaattatttgcaaaattgtagagctttgattcagctggaagaaaacttagaatacaaattcataaattatttatgcatgatgaggcaggaaaccaatgactttgtaaattttattctaagggattttgacctcagaaaactccccaaagcagccagcattcatttctgtgaaaaacactcatctctgtacttgaaaaagctaagcatttcctttgcttgttctttgcagctccttgaatgctagaacaaaagggtaaacacaaagcgtccagaagagctctgagaagaaaacatagaggcagcaaactgccctaattgatctactcacataaaatccaaaaacccagaggctatctttagtgcaagacatgtctgcacaaaaatgtttccagttactcaggaaaatcaaatcttctttatgcaaaatgtcttcaaggaacaagaagtatttcattaggattttaatggtgagggctcaagtgaaagga

SEQ ID NO: 90353 - DNA, 1513 bp, Homo sapiens
tggtagacatcaggtcccaagaggaccctagaacccaggagtacattaggccacattaacacgaaggccccagatgaatamcaggccaattgtggacatcaggcctgagaagggtcctcaggctccaggtggacatcaggcgccaggtgaacatccagcactcagatgaacgttaagcttcaggtagacatcatgcctcaggtgaactccaggccccagctaaacatcaggccccaggtggatgcccaggttccgggtgcacatctggccacagttggacattcaaccccaggtgaccatcaggccatgggtgaatacacggtttccaggtggacatcagatcaaaggggaacatcagtcctccagtggacatcaggcccaaggtgaacactgaactagaggtttacatcaggccacacgttgacacctagtcccaggtggacatcaggccccaggtggatacctaggctcccagtgaatttgacaccaggttgacattcaggcccccagtggtcatctggcctcatgtgaacactcagtccccaggtgcacatgatgtctcaactggacaccaaatccctagtttgatacccaaggcccaggtggacaccaggtccaaggctgacactcaagccttaaatgaataccaaagtctaggtgaataattcaacccaggtggtcattaggaccgagctgaataccagtccccaggttaacacaaggcccccggtgggcacctaggcaccagctggacatgaggccctatgtaaacacccggtctcaggtgaacaccatgccacagatggacatcaggtcctaggtggacacggggccacaggtggacatctagccgctgggcaacatccagccccaggtggacataaccgtttccatggataaaccattcccaggtggatatcaggcctcaagaggatagcagtcaccaggtagccatcaggcctcagatagacaccaaggtcccagatgtacagcaggccccaactgaaccccagactcatgtggacatcaggccacaggtagacaccaagccttaggtagatacctaacttcaggtggacatcagaccccaggtggacacccagtccccgggtgggcaatcaggccccaggcacacatcaggccttaagtggacacccaggccccaggttgatatccagctcccaggtgatcaccaagccccaggtagacgccaggccataggtgagcaacaggatgcagtaggtcatcaggccacagctggataccagtccccggtgaacacaaggccccagtgggacacagatctaaggcagacatcaggccccgggtggacgtacaggcctgaggtggaattcaccctgagggggacattcggccccaggtgcgcatcaggcctcaggtgaataaccagtccccaggtggacattagcctgcaggtcaaccacagtccccaggttgatacctgatctccaagtggctacccaatctgcagggtaacattaggcccctgtag

SEQ ID NO: 90354 - DNA, 1513 bp, Homo sapiens
tggtagacatcaggtcccaagaggaccctagaacccaggagtacattaggccacattaacacgaaggccccagatgaataccaggccaattgtggacatcaggcctgagaagggtcctcaggctccaggtggacatcaggygccaggtgaacatccagcactcagatgaacgttaagcttcaggtagacatcatgcctcaggtgaactccaggccccagctaaacatcaggccccaggtggatgcccaggttccgggtgcacatctggccacagttggacattcaaccccaggtgaccatcaggccatgggtgaatacacggtttccaggtggacatcagatcaaaggggaacatcagtcctccagtggacatcaggcccaaggtgaacactgaactagaggtttacatcaggccacacgttgacacctagtcccaggtggacatcaggccccaggtggatacctaggctcccagtgaatttgacaccaggttgacattcaggcccccagtggtcatctggcctcatgtgaacactcagtccccaggtgcacatgatgtctcaactggacaccaaatccctagtttgatacccaaggcccaggtggacaccaggtccaaggctgacactcaagccttaaatgaataccaaagtctaggtgaataattcaacccaggtggtcattaggaccgagctgaataccagtccccaggttaacacaaggcccccggtgggcacctaggcaccagctggacatgaggccctatgtaaacacccggtctcaggtgaacaccatgccacagatggacatcaggtcctaggtggacacggggccacaggtggacatctagccgctgggcaacatccagccccaggtggacataaccgtttccatggataaaccattcccaggtggatatcaggcctcaagaggatagcagtcaccaggtagccatcaggcctcagatagacaccaaggtcccagatgtacagcaggccccaactgaaccccagactcatgtggacatcaggccacaggtagacaccaagccttaggtagatacctaacttcaggtggacatcagaccccaggtggacacccagtccccgggtgggcaatcaggccccaggcacacatcaggccttaagtggacacccaggccccaggttgatatccagctcccaggtgatcaccaagccccaggtagacgccaggccataggtgagcaacaggatgcagtaggtcatcaggccacagctggataccagtccccggtgaacacaaggccccagtgggacacagatctaaggcagacatcaggccccgggtggacgtacaggcctgaggtggaattcaccctgagggggacattcggccccaggtgcgcatcaggcctcaggtgaataaccagtccccaggtggacattagcctgcaggtcaaccacagtccccaggttgatacctgatctccaagtggctacccaatctgcagggtaacattaggcccctgtag

SEQ ID NO: 90355 - DNA, 1513 bp, Homo sapiens
tggtagacatcaggtcccaagaggaccctagaacccaggagtacattaggccacattaacacgaaggccccagatgaataccaggccaattgtggacatcaggcctgagaagggtcctcaggctccaggtggacatcaggcgccaggtgaacatccagcactcagatgaacgttaagcttcaggtagacatcatgcctcaggtgaactccaggccccagctaaacatcaggccccaggtggatgcccaggttccgggtgcacatctggccacagttggacattcaaccccaggtgaccatcaggccatgggtgaatacacggtttccaggtggacatcagatcaaaggggaacatcagtcctccagtggacatcaggcccaaggtgracactgaactagaggtttacatcaggccacacgttgacacctagtcccaggtggacatcaggccccaggtggatacctaggctcccagtgaatttgacaccaggttgacattcaggcccccagtggtcatctggcctcatgtgaacactcagtccccaggtgcacatgatgtctcaactggacaccaaatccctagtttgatacccaaggcccaggtggacaccaggtccaaggctgacactcaagccttaaatgaataccaaagtctaggtgaataattcaacccaggtggtcattaggaccgagctgaataccagtccccaggttaacacaaggcccccggtgggcacctaggcaccagctggacatgaggccctatgtaaacacccggtctcaggtgaacaccatgccacagatggacatcaggtcctaggtggacacggggccacaggtggacatctagccgctgggcaacatccagccccaggtggacataaccgtttccatggataaaccattcccaggtggatatcaggcctcaagaggatagcagtcaccaggtagccatcaggcctcagatagacaccaaggtcccagatgtacagcaggccccaactgaaccccagactcatgtggacatcaggccacaggtagacaccaagccttaggtagatacctaacttcaggtggacatcagaccccaggtggacacccagtccccgggtgggcaatcaggccccaggcacacatcaggccttaagtggacacccaggccccaggttgatatccagctcccaggtgatcaccaagccccaggtagacgccaggccataggtgagcaacaggatgcagtaggtcatcaggccacagctggataccagtccccggtgaacacaaggccccagtgggacacagatctaaggcagacatcaggccccgggtggacgtacaggcctgaggtggaattcaccctgagggggacattcggccccaggtgcgcatcaggcctcaggtgaataaccagtccccaggtggacattagcctgcaggtcaaccacagtccccaggttgatacctgatctccaagtggctacccaatctgcagggtaacattaggcccctgtag

SEQ ID NO: 90356 - DNA, 1513 bp, Homo sapiens
tggtagacatcaggtcccaagaggaccctagaacccaggagtacattaggccacattaacacgaaggccccagatgaataccaggccaattgtggacatcaggcctgagaagggtcctcaggctccaggtggacatcaggcgccaggtgaacatccagcactcagatgaacgttaagcttcaggtagacatcatgcctcaggtgaactccaggccccagctaaacatcaggccccaggtggatgcccaggttccgggtgcacatctggccacagttggacattcaaccccaggtgaccatcaggccatgggtgaatacacggtttccaggtggacatcagatcaaaggggaacatcagtcctccagtggacatcaggcccaaggtgaacactgaactagaggtttacatcaggccacacgttgacacctagtcccaggtggacatcaggccccaggtggatacctaggctcccagtgaatttgacaccaggttgacattcaggcccccagtggtcatctggcctcatgtgaacactcagtccccaggtgcacatgatgtctcaactggacaccaaatccctagtttgatacccaaggcccaggtggacaccaggtccaaggctgacactcaagccttaaatgaataccaaagtctaggtgaataattcaacccaggtggtcattaggaccgagctgaataccagtccccaggttaacacaaggcccccggtgggcacctaggcaccagctggacatgaggccctatgtaaacacccggtctcaggtgaacaccatgccacagatggacatcaggtcctaggtggacacggggccacaggtggacatctagccgctgggcaacatccagccccaggtggacataaccgtttccatggataaaccattcccaggtggatatcaggcctcaagaggatagcagtcaccaggtagccatcaggcctcagatagacaccaaggtcccagatgtacagcaggccccaactgaaccccagactcatgtggacatcaggccacaggtagacaccaagccttaggtagatacctaacttcaggtggacatcagaccccaggtggacacccagtccccgggtgggcaatcaggccccaggcacacatcaggccttaagtggacacccaggccccaggttgatatccagctcccaggtgatcaccaagccccaggtagacgccaggccataggtgagcaacaggatgcagtaggtcatcaggccacagctggataccagtccccggtgaacacaaggccccagtgggacacagatctaaggcagacatcaggccccgggtggacgtacaggcctgaggtggaattcaccctgagggggacattcggccccaggtgygcatcaggcctcaggtgaataaccagtccccaggtggacattagcctgcaggtcaaccacagtccccaggttgatacctgatctccaagtggctacccaatctgcagggtaacattaggcccctgtag

SEQ ID NO: 90357 - DNA, 569 bp, Homo sapiens
ctcagctgatgttttctactgtgtttcttggagtcttgttctatacattcacagcttacaattagctagcaaccttggagtttgtatgaagatttttttaaagagactgtgatatagtttggatgttgtcctctttaaatctcatgttgaaatgtaaaccccaatgttggatgtgggtcccagagggaggtgtttgggtcatgggggcagatctcctatggcttggtgctgtccttgtggtagtgagtggaattccgatgttgtttaaaagtgtgtggcaggccrggcgcagtggctcacgcctgtaatcccagcactttgggaggccgaggccggcggatcacgaggtcaggagatcaagaccatcctagctaacacggtgaaaccccgtctctactaaaaatacaaaaaattagctgggcatggtggcgggcgcctgtagtcctagctactcgtgaggctgaggcaggagaatggcgcgaacctgggaggtggagcttgcagtgagccgagatcttgccacagctctccagcctgggtgacagagtgagactctgtctcaaaaaaaa

SEQ ID NO: 90358 - DNA, 1748 bp, Homo sapiens
ctctactaaaaatacaaaaaaaaaaaaaattagccgggcatggtggtaggcacctgtaatcccagctacttaggaggctgaggcaggagaattgcttgaacccaagaggcagaggttgcagtgagctgagatcgcgccactgcacttcagcctggtgacagagtgagactccgtctcaaaaagaaaaaaaaaagaaaggaaaaaaaagcctccaacagggtcacaaatacatgcagagttcttccagcagatgaacaactcaacctgkgcagccaccgggggtgaggaggtgaggagttgggagttgattctttccccttccagaacccagactcagggtcctcacttccaataaggtaaaggaaagtagaagccgaggcagcatagtgaaatcccatctctacaaaaaatacaaaaattagccagacatcgtggcacatgcctgtagtcccagatatttgtgggctgaggcacgaggattgcttgagccaataggtcaagactgcagtgagccatgattgtgccactgcactccagcctgggcaacagagcaaggcccttctcaaaaatgaaaataaataaataaataaagcagaggtcaagtgacctgcccaaggctcctcatcttacaggacgtgcaaagcacccgatgcaggatttggcacagagtatggactcagaaaagggtagctcttatttttaatgtgagaacttgtgtctgcccagcccattctcctttctcttgtaacatgatggctgccttcaaggacattatggtttgtttttctaaaatagattttaaacatgcattttcccagtttcttttacttttttttttttttttacttttttcccctttgtttcttttttttaaattttattattattatattttaagttttagggtacatgtgcacaacgtgcaagtttgttacatatgtatacatgtgccatgttggtgtgctgcagccatcaactcgtcatttagcattaggtatatctcctaatgctatccctccccccctccccccacccacaatgaccttttcaaatgattgaaagtcggttgaggatctctgattttttcatttgttgttttcattacatttaggggagggacaggaggtagagactaatgacaaaaattgattctttatattctctccaagctgtgtttagttcagcatttctaatctttaaatgggattcctttagctagcaagcaatgcaaatgttccaaatgtaattaatctcagaaatccatacagccacaaatcaagagtaccaactcattttgactacctagccactcttttaatatttccattaggacatattaggaagtcccatttttcaccaataagaaatgcggtgtgtttgatcagaaaacagttgtaggaggacctaggtacagtaaggccaaatggttcagagtgttcttttgctgcatagctctggggaatcgtggagattccttgctttatagtggaagaaaataacaactatattaaccatctggtaaaacttccaaactagtgttctctggagatcacaattgttaaagcttggttcaattcatcagttatttactgagcaccttctagatgcctgacaccatgctaggtcctttgcataaagtgtaacatagaatttctatggcagaggtatgcccagcatgccgtagaagcacagtgaagcagcacagagccacctctggggattcactttctgagggagcattagttaaa

SEQ ID NO: 90359 - DNA, 603 bp, Homo sapiens
caaagcacccaacataattaccataraaacaaaaaattcttctttttgttttacttgttattattgctatacataatgattaattgaaattatagcttcagagacaaatatagccaaaatgtttaactcattactaaacactggaagcagaactatgtgcataaactatgcaactgactagctataagtgtaattgtgccattagtatccatcagtttgtttcacagaaggtagagagaataataaccagtcaacaaggtggtggatggttaagaaagcttctagtcttcaagaaaatccaaagcatatctgcaacatttaaaaaaaattaaagggattaaattcataatcttcagaaatgtttctcataatctcttctgatacttcccatttctttcgtacattcggctcattttttcttcccatattgagtcatattttcttttccatcacccttttaccactctcagattttattttgaggtgtgtgtgtgtgtgtgtttctgtgtgtatatatgtgtgtgtgtgtatgtgcatgtgtattactttagccactttatattcttacctttttctccattttctcaagtctcacctccaatt

SEQ ID NO: 90360 - DNA, 623 bp, Homo sapiens
tgggcacctctgccttcatgggcctcttcctctataaaaatgacagaggagctattttgtgtcctgattctccttgcctgctcttatwtttgtaggacaaaaaagttggcagctgcagggcctgtctcctttgtgaatgtaaatggcttagtcactggtgggccctctttagtcaacggccctctccactacttcctgctcttttctccttgggaaaattagggactcaggaaatggagtcagatttatgtgagtgggaaaattgcaccatctgaggaagcgctgtgccagagggagccagagagggcagcacatcacatccctggggccaacctcccacctggcatcaaggaagaacagtcctacctccgaaggcgggtctcatgctgaagtcgtgctcgtccactctgagaagctgctgaggctttcccttccggatcttggtcacatcaaggttcttcttatataagtgactgtgaagacaagcaagaaactattttccatcggctcttcaatgcattgagtgagatgatttgggctattactccctgcaagatctacctgttaggtaccttttctccattctacttcttggcccaggggagaaggagggctgaaggacc

SEQ ID NO: 90361 - DNA, 623 bp, Homo sapiens
tgggcacctctgccttcatgggcctcttcctctataaaaatgacagaggagctattttgtgtcctgattctccttgcctgctcttatatttgtaggacaaaaaagttggcagctgcagggcctgtctcctttgtgaatgtaaatggcttagtcactggtgggccctctttagtcaacggccctctccactacttcctgcycttttctccttgggaaaattagggactcaggaaatggagtcagatttatgtgagtgggaaaattgcaccatctgaggaagcgctgtgccagagggagccagagagggcagcacatcacatccctggggccaacctcccacctggcatcaaggaagaacagtcctacctccgaaggcgggtctcatgctgaagtcgtgctcgtccactctgagaagctgctgaggctttcccttccggatcttggtcacatcaaggttcttcttatataagtgactgtgaagacaagcaagaaactattttccatcggctcttcaatgcattgagtgagatgatttgggctattactccctgcaagatctacctgttaggtaccttttctccattctacttcttggcccaggggagaaggagggctgaaggacc

SEQ ID NO: 90362 - DNA, 686 bp, Homo sapiens
ggatcccttgagcccaagaggtaacagtgagctatgattgtaccaatgtattccagcacaagcaacagaatgaggcccccctctaaaaaaaaaaaaaaaaaaagtttcaagtataagttgctttagggactttatatattttgctaggaccaactttgatgttcttaggaggctctgctttaaaaaaaaaaaaatctcattttctaatgccccacaagcatgcyttagggtgctaacccttgagatgcacgtaaaattatctacttggaatgatttggcataggggtagatttaggactcttaatttcctgttagtctaaagtaaacataagtgaaataatttcacagaaacaattacacagctaattgtaatgtctctccagccatccttttcccactgacctttaggggtcttcaggatgactcttcagccttgcagagcatgctggtggcaggctgagcttggcttaatcataaggtgggaacaagtggagtacatgaggcatgttatcaccagtgagaaggagatgtggaggtgacaaaagtgactaacaggattgagctccatggtggggttctgcgatttgttctattcactatggtcatggagcaataaagaactggtcctgaataagcattttaaatgcagcacaccagaccatcgcacagggccaaaagtccagaat

SEQ ID NO: 90363 - DNA, 686 bp, Homo sapiens
ggatcccttgagcccaagaggtaacagtgagctatgattgtaccaatgtattccagcacaagcaacagaatgaggcccccctctaaaaaaaaaaaaaaaaaaagtttcaagtataagttgctttagggactttatatattttgctaggaccaactttgatgttcttaggaggctctgctttaaaaaaaaaaaaatctcattttctaatgccccacaagcatgccttagggtgctaacccttgagatgcacgtaaaattatctacttggaatgatttggcataggggtagatttaggactcttaatttcctgttagtctaaagtaaacataagtgaaataatttcacagaaacaattacacagctaattgtaatgtctctccagccatccttttcccactgacctttaggggtcttcaggatgactcttcagccttgcagagcatgctggtggcaggctgagcttggcttaatcataaggtgggaacaagtggagtacatgaggcatgttwtcaccagtgagaaggagatgtggaggtgacaaaagtgactaacaggattgagctccatggtggggttctgcgatttgttctattcactatggtcatggagcaataaagaactggtcctgaataagcattttaaatgcagcacaccagaccatcgcacagggccaaaagtccagaat

SEQ ID NO: 90364 - DNA, 533 bp, Homo sapiens
agtatcatccatatacaacagtgctgtagatgctcattcatcagttagattaatcccagaatcctctggaattctgacaaagcagtaattaagagtgaraaattaagtaaaatagtcacacaattagtaaactgagatagaattccagtctcaaacaatctgagcccagattttgtgttcttaagcactcatttgtgctgcccagaaccaaaacgagaaaccagattgctggctcccagagtgttcctcccttcccacatgtcatgggtgaccatcatcctgtgaaactccacagcctggtcccaagactcttaatgttccatgagttatggctacaggtatattgcctcagattagtggtgcagagggcttatggggctgactggattctactcagggcaacaggtcaggatcaaatagcccaagaggacagttttgggcacattactgtcccttacctctctacacatgcaggtgcatctccaaatatgatgcctttgcaaatacactttatattcccagtatactgcaaa

SEQ ID NO: 90365 - DNA, 533 bp, Homo sapiens
agtatcatccatatacaacagtgctgtagatgctcattcatcagttagattaatcccagaatcctctggaattctgacaaagcagtaattaagagtgaaaaattaagtaaaatagtcacacaattagtaaactgagatagaattccagtctcaaacaatctgagcccagattttgtgttcttaascactcatttgtgctgcccagaaccaaaacgagaaaccagattgctggctcccagagtgttcctcccttcccacatgtcatgggtgaccatcatcctgtgaaactccacagcctggtcccaagactcttaatgttccatgagttatggctacaggtatattgcctcagattagtggtgcagagggcttatggggctgactggattctactcagggcaacaggtcaggatcaaatagcccaagaggacagttttgggcacattactgtcccttacctctctacacatgcaggtgcatctccaaatatgatgcctttgcaaatacactttatattcccagtatactgcaaa

SEQ ID NO: 90366 - DNA, 533 bp, Homo sapiens
agtatcatccatatacaacagtgctgtagatgctcattcatcagttagattaatcccagaatcctctggaattctgacaaagcagtaattaagagtgaaaaattaagtaaaatagtcacacaattagtaaactgagatagaattccagtctcaaacaatctgagcccagattttgtgttcttaagcactcatttgtgctgcccagaaccaaaasgagaaaccagattgctggctcccagagtgttcctcccttcccacatgtcatgggtgaccatcatcctgtgaaactccacagcctggtcccaagactcttaatgttccatgagttatggctacaggtatattgcctcagattagtggtgcagagggcttatggggctgactggattctactcagggcaacaggtcaggatcaaatagcccaagaggacagttttgggcacattactgtcccttacctctctacacatgcaggtgcatctccaaatatgatgcctttgcaaatacactttatattcccagtatactgcaaa

SEQ ID NO: 90367 - DNA, 1452 bp, Homo sapiens
cttagctcagccacgcagcatccttgttactgggctcagttccattatatgataaagttctgaagaggagcggttcttctttttgtgtctatggaataaattggatatttgcggtcttaggttctagctgtgttactttgccaggcaacagcatccctttgggccttagtttcccggtctttggtaagctatggtgatgttttatttaatttgctagatggcccttgggcttcaggctccctccccgccttgcctcctttccatttgcagtccaggcttggtcctattccaatgatgctattatatatgttttgtacctatctgatatttatcttgctcaggattacatttcagaagaactgttatcttaaagcagtatatttctgaattatgaatgagttcttgtcactgcaacctcttgttgagtatctgcctacaaacagcaatagtgaaaccattggttgcattcaagggaacttctgagacaacatattaataatgatactacttgataaattatggataaatgtcatcagattccaacacagataatacatcagcaggtaggaaaaggcatgaggcaggagttggactttcgaaaagatttggtgttggtgcaaggtttcagtaagaccataacagccaaatgaatttcagctggaccataaaccatctcattcaaaagtgcacatcagtcgtaataggaaaatcaagaatgaattcttctggcaaggaagtggagggatcctctccttcagtgcaaaggtgtgattccttgagccacaaagtcagaagctgatgatctgctatcttagaaaaaccccagagaggcagtttaatctactcaagatgtactctttctcctgcccactcacccccttggatatttatctccagggtagggaaggtcaacacagaaacaaatcaaggagagataagagagctatgtaactctatattcasttggatggttagtctccaaaggctggcagttagcagtgcagctagagcttggcaaaacaccaaaacagttagggcacagaacttgaaagccagaaggaactttaaacaattaccgtccaaccctttcactttacaaaagaaaaaaatgagcctcaagaagttaatgatttgccagctcacctggcaagaaagtcttagagctgagacaggaattcaggcctcttgtcttcaggtctagaattaggacagaatttagtcaagtgaaatacaggtgcaacacaagctgtggctctaatcaggattgcaaatcagcatttaggatcatgagccctatctgagggaaccctgattgcagcagcctctagccttgatccccagcccaagcttccttgaaactgtcttcttctggcctccacgataccactttttcgttctctgtcttctcttgaccactctcatccttattctccactggagactaaatctttt

SEQ ID NO: 90368 - DNA, 574 bp, Homo sapiens
caccttataatgataatcaggttagggctcactattaatgtgtacattggtgtgtgcatgtgtatattcatatgcgcatatgtacacacacgtatacctatatatatacacatatgtatacccatacacacacatatacacacggtcatacacctgtatacatatttatgtctgtctttctatctatctatctatctatctatttttctatctatctatcatctatctatttatctccaaaagctaatttgaatctaaggtatgctttgcaattgattacatcttagaatcaaggtaatatgtgagaaagcctggattagctcrattaagatgtttaaagagaaatctctttgttctatattctgtatactcacatacttttctacatagtggtcctgacatgttaataacttttaaaggagttttgctttcaccaagagtagcacttttacagctctttggtggagggacatgtggcctggcttcactgatctgcaaacaactccccctctgagtactattatcatccagacggttttcttactgagcagttatgaaggtttacgaccaagtt

SEQ ID NO: 90369 - DNA, 1329 bp, Homo sapiens
atgccacctcccagcctttccccagcatccatcttcttacattgctagctagataaccatctttattgcttgcctcctctttgctgtctcactttcccattccccaacccatgttttcctttaccttatcagtaaactacttggaccttactttggttttctgtggtkgccatgagaaattgacataacaaaaatgtattctcctacagttctagaggccagaactccttttgccagctttacaggagcatcgttgcttacctctcccagctgctagtgccttcacagatagcttggcttgtggcaggataacttcaatctctgcttccatcatcacattgccttctcctctcctatagtcaaagatccttctgtccccattttctaagggaaattgtcattggacttaaggtcccctaattaaagataatctcatttcaagaaccttagcttaattacatctcaaaggttctttttccaaataaggtcacattcacaggttctgagcagatgtatcttttggaggagaatgccattcaactcactgtagatctgaatccttgtctaagtgtatgcttctggagggaacccaaactatgacttttgggtcatgtaaaatgagtttagattgtttcagttagttaagagttcacaatttagtgactaagatccagacccatcctttcttctgtggatgctctcagaagactgctgtctgtacagagaaatggtttctatttcttagtctcaacttggcttctatccaattgaaataagtaatgaagcaaattttcattcttatctctaaatgtttacagtctttggagcatttctatagtaagaggagaagtgaacctcattactccagaaagaattacttttcttctttatctcttttttattttccatgacattctttcccaatatatagaagcatgtctgaatccagaatccccaacctctccttttaggcaggtcacttctcctaaagattaatgcaaatgaaggtcttgcacaaatatctctaatcagcgtcagacaaataccaatcaggttctttgtgctctggctcagtagggtgctattaagatgattgaaaaccagacctgtgcatcccgccagcactagtcctgccctgcgcagtcacatcatggtgatcttctccacttttcttagctgccagcccagtgtggttgatcatctggagaaaaacaatgcgtattgggactcaaactatggtgtggtacagattttgttttgaaaccccactttgaaaatatcctgtctgttgtatgtacagcaaagactgctgatcataattaatatgca

SEQ ID NO: 90370 - DNA, 1329 bp, Homo sapiens
atgccacctcccagcctttccccagcatccatcttcttacattgctagctagataaccatctttattgcttgcctcctctttgctgtctcactttcccattccccaacccatgttttcctttaccttatcagtaaactacttggaccttactttggttttctgtggtggccatgagaaattgacataacaaaaatgtattctcctacagttctagaggccagaactccttttgccagctttacaggagcatcgttgcttacctctcccagctgctagtgccttcacagatagcttggcttgtggcaggataacttcaatctctgcttccatcatcacattgccttctcctctcctatagtcaaagatccttctgtccccattttctaagggaaattgtcattggacttaaggtcccctaattaaagataatctcatttcaagaaccttagcttaattacatctcaaaggttctttttccaaataaggtcacattcacaggttctgagcrgatgtatcttttggaggagaatgccattcaactcactgtagatctgaatccttgtctaagtgtatgcttctggagggaacccaaactatgacttttgggtcatgtaaaatgagtttagattgtttcagttagttaagagttcacaatttagtgactaagatccagacccatcctttcttctgtggatgctctcagaagactgctgtctgtacagagaaatggtttctatttcttagtctcaacttggcttctatccaattgaaataagtaatgaagcaaattttcattcttatctctaaatgtttacagtctttggagcatttctatagtaagaggagaagtgaacctcattactccagaaagaattacttttcttctttatctcttttttattttccatgacattctttcccaatatatagaagcatgtctgaatccagaatccccaacctctccttttaggcaggtcacttctcctaaagattaatgcaaatgaaggtcttgcacaaatatctctaatcagcgtcagacaaataccaatcaggttctttgtgctctggctcagtagggtgctattaagatgattgaaaaccagacctgtgcatcccgccagcactagtcctgccctgcgcagtcacatcatggtgatcttctccacttttcttagctgccagcccagtgtggttgatcatctggagaaaaacaatgcgtattgggactcaaactatggtgtggtacagattttgttttgaaaccccactttgaaaatatcctgtctgttgtatgtacagcaaagactgctgatcataattaatatgca

SEQ ID NO: 90371 - DNA, 751 bp, Homo sapiens
tctgtagactaccataattatcactaagtcaaattactcaataattccagaccaatgcttccattgctatttgagggaagatactgatcacaaacgtgacagttcttctttggggacaggtcatatcaaggtgtcaatattaagatgaagcttccttgaaacttctctaatgttggagcgtgatgagctttagaaaaatggtgataagtaaaagggaccyacacttccctacgatattcaaaagatcttctgaaattagcagatattaaagagtcatgagcatgaagggtatagtctaacccaataccggctgcacagttaaatgtgcctaaaatgtgacatatatcggtggtatcaaaatttccagcaaaggaatagagaccccagtgctcgtgaaatcatgaattgcccacagtcaattccaggacgaaatttactcacatggaatgatattaatatttgctcagagtagactattagttctcaaaatattgtgaaagcaaatatgtcagaaacactagaggcaattctctgatcactgacacaatgttcatcttagtaaaggtatgatagaacctgaaattaattttgttaattctatatgtgaaacaaagatgaggtgtctaatatgagtcccagctgcagtgagttgagatataggcgggataatgaatcatctgatgtctaatgtacatcataatcattatatcactggcagagcacaggcagtgtctctcaacccaggtagcct

SEQ ID NO: 90372 - DNA, 1290 bp, Homo sapiens
agaagcagcaggaaactgacagatttaaaacagaaaagaagtattttctataatttatttggagctgtgaaagttatagaagtataatacttgccgtgaacactttcccaacagctgaaattaatttttatgcctaagcaagatactgcatggtggtgaaacatatacggttcaccgattttgaatattctattcaaaatatctcaaaagaaaaaaaagactatttgtgcagtcaactatttgaactaaaagaatgactgaagcatagaaaggagaataagcaaaaaagatgtttagacattgcataaatatggaatttgatttatttgtatacacttatgaagtacaagtgcaatcttgttacatgcatggattgcacagtcgtcaagtcagagcttttagggtatccatcacccgaataacatacatcatacccattaagtaatttttctcattatccacacccctcctaccacaaaaccctcctgagtctccattgtgtatcatggaatttgattttcttccacaaaatatgcaacttaaatttaggggctattaattttgtctatattgtatgctgttctttttttttttttttttttttttggagacagattctcactctgtcccccagactggagtacagtggcgtgatcttggctcactgcaagctccgcctcctgggttcacaccattctcctgcctcagcctcccaagtagctgggactacaggcaccygccaccatgcccggctaatttttttgtatttttagtagagacggggtttcaccgtgttagccaggatggtctcgatctcctgacctcgtgatctgcccaccttggcctcccaaagtgctgggattaccggcttgagccactgagcctggcctgtatgctgttctttaaactcatgaaatctctgagaaactaactagaaagggtctcaattctgaatttagaaatgtttctaattatatataccttgataccaatatattgtacattcatctggaatacctttgatatcctcattagctgagtaatatagaataggaatattaactaatagaagtcttccaaagacattatccaattctgctttcattcatttgaattgtttactttcaaaaagatcttaatccataatgtcaaattcttttatttgtatttgccccatcttttagaggatatctctatcggaggaagattttttggtatgtgcattttgtttatgctacatatgccaaatagatctcccaagatgaaactctgagctcatttggaagtaat

SEQ ID NO: 90373 - DNA, 1290 bp, Homo sapiens
agaagcagcaggaaactgacagatttaaaacagaaaagaagtattttctataatttatttggagctgtgaaagttatagaagtataatacttgccgtgaacactttcccaacagctgaaattaatttttatgcctaagcaagatactgcatggtggtgaaacatatacggttcaccgattttgaatattctattcaaaatatctcaaaagaaaaaaaagactatttgtgcagtcaactatttgaactaaaagaatgactgaagcatagaaaggagaataagcaaaaaagatgtttagacattgcataaatatggaatttgatttatttgtatacacttatgaagtacaagtgcaatcttgttacatgcatggattgcacagtcgtcaagtcagagcttttagggtatccatcacccgaataacatacatcatacccattaagtaatttttctcattatccacacccctcctaccacaaaaccctcctgagtctccattgtgtatcatggaatttgattttcttccacaaaatatgcaacttaaatttaggggctattaattttgtctatattgtatgctgttctttttttttttttttttttttttggagacagattctcactctgtcccccagactggagtacagtggcgtgatcttggctcactgcaagctccgcctcctgggttcacaccattctcctgcctcagcctcccaagtagctgggactacaggcacctgccaccaygcccggctaatttttttgtatttttagtagagacggggtttcaccgtgttagccaggatggtctcgatctcctgacctcgtgatctgcccaccttggcctcccaaagtgctgggattaccggcttgagccactgagcctggcctgtatgctgttctttaaactcatgaaatctctgagaaactaactagaaagggtctcaattctgaatttagaaatgtttctaattatatataccttgataccaatatattgtacattcatctggaatacctttgatatcctcattagctgagtaatatagaataggaatattaactaatagaagtcttccaaagacattatccaattctgctttcattcatttgaattgtttactttcaaaaagatcttaatccataatgtcaaattcttttatttgtatttgccccatcttttagaggatatctctatcggaggaagattttttggtatgtgcattttgtttatgctacatatgccaaatagatctcccaagatgaaactctgagctcatttggaagtaat

SEQ ID NO: 90374 - DNA, 1290 bp, Homo sapiens
agaagcagcaggaaactgacagatttaaaacagaaaagaagtattttctataatttatttggagctgtgaaagttatagaagtataatacttgccgtgaacactttcccaacagctgaaattaatttttatgcctaagcaagatactgcatggtggtgaaacatatacggttcaccgattttgaatattctattcaaaatatctcaaaagaaaaaaaagactatttgtgcagtcaactatttgaactaaaagaatgactgaagcatagaaaggagaataagcaaaaaagatgtttagacattgcataaatatggaatttgatttatttgtatacacttatgaagtacaagtgcaatcttgttacatgcatggattgcacagtcgtcaagtcagagcttttagggtatccatcacccgaataacatacatcatacccattaagtaatttttctcattatccacacccctcctaccacaaaaccctcctgagtctccattgtgtatcatggaatttgattttcttccacaaaatatgcaacttaaatttaggggctattaattttgtctatattgtatgctgttctttttttttttttttttttttttggagacagattctcactctgtcccccagactggagtacagtggcgtgatcttggctcactgcaagctccgcctcctgggttcacaccattctcctgcctcagcctcccaagtagctgggactacaggcacctgccaccatrcccggctaatttttttgtatttttagtagagacggggtttcaccgtgttagccaggatggtctcgatctcctgacctcgtgatctgcccaccttggcctcccaaagtgctgggattaccggcttgagccactgagcctggcctgtatgctgttctttaaactcatgaaatctctgagaaactaactagaaagggtctcaattctgaatttagaaatgtttctaattatatataccttgataccaatatattgtacattcatctggaatacctttgatatcctcattagctgagtaatatagaataggaatattaactaatagaagtcttccaaagacattatccaattctgctttcattcatttgaattgtttactttcaaaaagatcttaatccataatgtcaaattcttttatttgtatttgccccatcttttagaggatatctctatcggaggaagattttttggtatgtgcattttgtttatgctacatatgccaaatagatctcccaagatgaaactctgagctcatttggaagtaat

SEQ ID NO: 90375 - DNA, 1269 bp, Homo sapiens
tgcatgctctctgtgactctgcagaagaattctttctggcctcttccagctcctggtagctccaggcatttcttgatttatgacagcataattttaatctctgtctccacatggcctacttatctgtgtgtgcgtctctgtgtcctctcctcttcttaaaaggacatcaattattaggtttagggcccaccctaaatctaagatgatttcatctcgatatccttaattagttatgtctgcaaagatgctatttccaaatgaggtcacattctttttaagaaataaattttatttttttcagatacatggcatgcagtcaccaaatgaggtcacattctggggttctgagtggacgtgatttagaggaacactattcaacctcgtacagggaacaaacagaagaaataacatgtttgaagcagtagtgtgttggagctgactcaaacctgctatcaagagccaactgttaaattttcagcaattttgttatctggtagacattagtaacttgaaattgatcacagtgtgagtatttgcattgtggaaattgacaaatgccacaaatcatgtttgtttatttttcttctggagaacccattgttaaacatttaccagcacaccactggtttgaaggccttgtatctgaaaagacatgtgtctagcatggctggcctataaggaagtgtggactggaggggaagaacaggccaggacatgtaaggtcttgaagatctcagtaaggattttaggtttttttttttttttgagacagtgtcttgatctgtctcccaggctggagtgcagtggtgcgatcttggtttactgcaatctccacctcccaggcctagtgatcctcccacctcagcctcctgagtagctgggactacaggcacatgccaccaaggccatctaatttttttttttttttttggtagagatggagttttgtcatgttgcttaggctggcctggaactcctgggctcaaggtatctgcctacctcagctttctaaagtgctgggattacaggtgtgagccaccacacccagccaggattttagattttaacccaagtgcaactgagggatatctgagagttttaatcaggggagcggcaaggtcagatttgtgtcattggtctaattgtttatatgccaggctttccttgacagggattttatcttcattattttttgkttcttccatgaattttgcatagaataggtacttgataaatgctcattcatctaaatggggttttataaatact

SEQ ID NO: 90376 - DNA, 860 bp, Homo sapiens
cttccttcacaccagtctgtcaattaccccatcttcctttatttcgttgctaatatttatgcctctctagtgtcatcccacttgatgtatttaatatgttgttggcacgcatggcagttagctcaactttttagcagctgtattttgaatgaaaaccaacctcatgttccaagtcctcttgcttaattctagcaaattcctaaactgtatccaaatctagaagtctgacccctatgtggggtggttcttaggaaaacttatttagactgtattacaagtagttcggttctaacctcttaattttacatttgtacaaattgaggctcagagagatgacgttcttgagatggagagttactgataataaactaagttcaacagtgttttcatggtttggtccagaagttactataaaatcgtaaccacatccatggaaggaatatctagttactaataaaaataaatctaatggttgatacagtttctctaaatcctccctactctttattaaaacctatttaaccacatttatacatgtttatgtacaatgttatccaccccaataagtcctgggatcttgaggttaagagtcctggttctattcatctttgaatacamcccaacaacaaaaacagagattaattatactcatattttttctttatcatgctataaatccactttgcagttaatatctatgaaaattaatgaacatttaaaataaagtattcaacttaggaattgaatatatattatatatttattgaatgcgttttcatctctatttaagaaaaccagataattgcactagccaaaataaaaaaatttaaaatccacattaaaaagaaatgtattcaggg

SEQ ID NO: 90377 - DNA, 860 bp, Homo sapiens
cttccttcacaccagtctgtcaattaccccatcttcctttatttcgttgctaatatttatgcctctctagtgtcatcccacttgatgtatttaatatgttgttggcacgcatggcagttagctcaactttttagcagctgtattttgaatgaaaaccaacctcatgttccaagtcctcttgcttaattctagcaaattcctaaactgtatccaaatctagaagtctgacccctatgtggggtggttcttaggaaaacttatttagactgtattacaagtagttcggttctaacctcttaattttacatttgtacaaattgaggctcagagagatgacgttcttgagatggagagttactgataataaactaagttcaacagtgttttcatggtttggtccagaagttactataaaatcgtaaccacatccatggaaggaatatctagttactaataaaaataaatctaatggttgatacagtttctctaaatcctccctactctttattaaaacctatttaaccacatttatacatgtttatgtacaatgttatccaccccaataagtcctgggatcttgaggttaagagtcctggttctattcatctttgaatacaacccaacaacaaaaacagagattaattatactcatattttttctttatcatgctataaatccactttgcagttaatatctatgaaaattaatgaacatttaaaataaagtattcaacttaggaattgaatatatattatatatttattgaatgcgttttcatctctatttaagraaaccagataattgcactagccaaaataaaaaaatttaaaatccacattaaaaagaaatgtattcaggg

SEQ ID NO: 90378 - DNA, 737 bp, Homo sapiens
caaattgtgttcttctctttctgtaggaaatctttatatgaagycttaaagccatgttcttgagcaaaatcaactttttatgaatccaaaggccagtctgattctagacaaagctataactcatcaaaatcctcaagattttagaccacctcctcatgcataggacgatgctgacccaatggcaaactcattgcttgctggtcaggcccacatattttaaaataaagcaaaatggggccaggcacaatagctcacaactgtaatcccagcactttgggaagccgaggtgggtggatcacctgtggtcaggagttcgagaccagcctgaccaacatggtgaaaccctgtctctactaaaaatacaaaaattagccaggtgtggtggcacatgcatataatcccagctactcgggaggctgaggcaggagaatcgcttgaaccctggaggtggaggttgcagtgagctgagactgtgccactgcactccagcctggcaacagagcgagactccgtctcaatcaatcatcaatcaaaatgggatagacttcagcgggccaggaccaaggggaaagggttctatcttgtattgtctgtgggggaagggagataattctttcatttttcatggtgttgtcatctcttttcacagtttagaattaccttctgttctctggtgcaatgtagatgcaagaaatctgaattgctattctctgctttactggtttcttcataaataa

SEQ ID NO: 90379 - DNA, 737 bp, Homo sapiens
caaattgtgttcttctctttctgtaggaaatctttatatgaagtcttaaagccatgttcttgagcaaaatcaactttttatgaatccaaaggccagtctgattctagacaaagctataactcatcaaaatcctcaagattttagaccacctcctcatgcataggacgatrctgacccaatggcaaactcattgcttgctggtcaggcccacatattttaaaataaagcaaaatggggccaggcacaatagctcacaactgtaatcccagcactttgggaagccgaggtgggtggatcacctgtggtcaggagttcgagaccagcctgaccaacatggtgaaaccctgtctctactaaaaatacaaaaattagccaggtgtggtggcacatgcatataatcccagctactcgggaggctgaggcaggagaatcgcttgaaccctggaggtggaggttgcagtgagctgagactgtgccactgcactccagcctggcaacagagcgagactccgtctcaatcaatcatcaatcaaaatgggatagacttcagcgggccaggaccaaggggaaagggttctatcttgtattgtctgtgggggaagggagataattctttcatttttcatggtgttgtcatctcttttcacagtttagaattaccttctgttctctggtgcaatgtagatgcaagaaatctgaattgctattctctgctttactggtttcttcataaataa

SEQ ID NO: 90380 - DNA, 759 bp, Homo sapiens
caaaaaagaaaatgccactactttaaccaagtaggctaagttagcatcaccaacagtgggacaagtgacatcctgtcttcctgatgtgatgctctggaaaggacacaacatcaccagtaaagttttcctgctgaaaacattcaatcagtgtctcatgaagaaaaaatcacataagtgaaaattgagggaaattattcaaaagaaggactgtccacaactaaaaccaatgtgtgaccctttattaaattctagatcccagaaaaaaaaacaagagctataaaagacattgttggtatatggtgggaaatttgaatatcaactgtgtattagacaagggtgctcaatttcctgagaggaaaactgtcttgcagttttgtaggaaaacatctttggtcttaggaaacatgccgaaatatttagcagtaaagtgtcatgatgtctgcaactctcaaatggtttagcaagagaaatataaataagtaagtgtgagtgtgtgagtgtacgtttgcgcgtgtgtgtctcagtgttggggagagagatggggaagagcacatgaatctagaaaggaactgcatctctatgagatttttcctaatagcccataatcccagtttaattgtgaggagaaacatcaaacaatcccagactgagggacattctacaaggaacctraccagtcctccccaaaactgtaaaggtcatgaaagacagagacagttttgacaaatgtactatgatgatgtcagaagattaccaggg

SEQ ID NO: 90381 - DNA, 605 bp, Homo sapiens
attagcaatgtataagagcatctatttctctataatctgaccaatggagtatgttagcaaacttttgaacttttggcaatctcataggtaagaaataatatctctatgaagttttaatttgctaaatgtaattttctttttaccactgaaattagaataaagaggtataaattgttttattttgataattttctctttaatttagcatgacaatcatcataggtatacaagctacatccaggcttgattagcctgtggcgacaacccattactattttttttttttttttaatcacagggtcttgctctgttgcccacactggagtgcagtgttgtgattatggcttactgcagtcttgactcctggactcaagtgattctcccacttyagcctcccgagtagccaggacaacaggcacaaaccaccactcctggctaattttttatttctttgtacagatgggggtctcactatgttgtccaggtgagaactcctgagctaaagtgatcctcccaccttagtctcccaaagtgctgggattatgggggtaagccacctctgtgggctaacttttaatgcccaaactacagtagacatgcctgaa

SEQ ID NO: 90382 - DNA, 738 bp, Homo sapiens
agacagcctggaaagactcaaaacataatttcattattgcaggggggcagctggacagaggaagtgatagataactgctatcacagtaagcaaaataaaaattaaaacatcagtgaaggccaggtgcggtggctcatgcctgtaatcccagcactttgggaggccaaggcgggtggatcacctgaggtcaggaattcaagaccagcctggccaacatggtgaaaccccatctctactaaaaatcaaaatattarccgggtgtagtggcaggcacctgtaatcccagctactcgggaggctgaggcagaatcgcttgaacccaggaggtagaggttgcagtgggtcaagattgcaccattgcactctagcctgggcaacaagagcaaaaccccatctcaagaaaaaaaaaaaaaaaatcaatgaaaaggaatactcagccaacatagtttctgaaatgacatctacccactctctccttgcctagcttcctgatgtttccctccctctccaattttatacaagtcctgtaacttatttagggttaaactcagcttctatctcatttctagtattgacatgataatctaatataaacccaggctgagctgggtgctagtgttgcagaggtgggcagcaaaacagtttctgcactcaaagaatttgctccctaagtgggaggaagacacacgtgagctgacaatttataccatgtggtgacagctatgatagagatggcat

SEQ ID NO: 90383 - DNA, 633 bp, Homo sapiens
agtttatgataaaggtggttgcattagtcagggttcccagagaaacaaaccaataggagatagataggtggatattttaaggaatttgctcatgggacagtggaggcttggtgagtccaaaatctgatgggggtggtaagcagtctggagactcaggaaaaagctgcagtttgagtctgaagacagtttsgtgcagagccagaaagggctgatgttgcagatgaagtctgaaggctgtttgctgctgaattctctctcgcttgcagggaggtcagctttttgtgctcttcaggccttcggcagatcggatggggctcacccatatcagggaaatctcacccaaaaatatcctcacagaaatatccagaataaagattgaccacatatctgggcaccatggcccaaccaagctgacacataaaattaaccgtcacactagtggtatgattgctttatttagttgcaagagttgaaaataaaaaaaaaaattaaaaaggcatttggctgaggggcacggaagggcagcctatatttattgtgaagtaatgtgttcaactgtgagggttcatgtctgaagatagttctaaataaaaaaagatgatttttcttaattcccattgccccatttcagat

SEQ ID NO: 90384 - DNA, 714 bp, Homo sapiens
cctgagaagatgtttctgcactggccatttctaactatctagcatggactgaagtatcatggtagcaagggtgaaactatgttttcagattaaacaaaagaaatccatgataatattgtcccaccccgttaaatattttgctactgaaaaaaaagattttacctacaataaaacactcaggtgaaccttttttatgcaaaatggacagagtcttaacctaaaacacctaagtattatttaaatttcttattttattttattttattttattttatttttttgagacggagtctcgctctgtcacccaggctggagtgcagtggcctgatctcggctcactgcaagctccgcttcccgggttcacaccattctcctcctgcctcagcctcccaaatagctgggaccacaggcgcycgccaccgcgcccggctaattttttatatttttagtagagatggcgtttcaccgtgttagccaggatggtctcgatctcctgacctcgtgatccgcccgcctcggcctcccaaagtgctgggattacaggcgtgagccaacgcgcctggcccctatttaaatttcttatgcttcttatggataagtcaaaaaatatatctttgattctgaacttaatagagccatatggccaatcataaaaaaaaatacacctctctcaacatttttactgaggaggagcaggttgaggagcgtggatcc

SEQ ID NO: 90385 - DNA, 714 bp, Homo sapiens
cctgagaagatgtttctgcactggccatttctaactatctagcatggactgaagtatcatggtagcaagggtgaaactatgttttcagattaaacaaaagaaatccatgataatattgtcccaccccgttaaatattttgctactgaaaaaaaagattttacctacaataaaacactcaggtgaaccttttttatgcaaaatggacagagtcttaacctaaaacacctaagtattatttaaatttcttattttattttattttattttattttatttttttgagacggagtctcgctctgtcacccaggctggagtgcagtggcctgatctcggctcactgcaagctccgcttcccgggttcacaccattctcctcctgcctcagcctcccaaatagctgggaccacaggcgcccgccaccrcgcccggctaattttttatatttttagtagagatggcgtttcaccgtgttagccaggatggtctcgatctcctgacctcgtgatccgcccgcctcggcctcccaaagtgctgggattacaggcgtgagccaacgcgcctggcccctatttaaatttcttatgcttcttatggataagtcaaaaaatatatctttgattctgaacttaatagagccatatggccaatcataaaaaaaaatacacctctctcaacatttttactgaggaggagcaggttgaggagcgtggatcc

SEQ ID NO: 90386 - DNA, 714 bp, Homo sapiens
cctgagaagatgtttctgcactggccatttctaactatctagcatggactgaagtatcatggtagcaagggtgaaactatgttttcagattaaacaaaagaaatccatgataatattgtcccaccccgttaaatattttgctactgaaaaaaaagattttacctacaataaaacactcaggtgaaccttttttatgcaaaatggacagagtcttaacctaaaacacctaagtattatttaaatttcttattttattttattttattttattttatttttttgagacggagtctcgctctgtcacccaggctggagtgcagtggcctgatctcggctcactgcaagctccgcttcccgggttcacaccattctcctcctgcctcagcctcccaaatagctgggaccacaggcgcccgccaccgcrcccggctaattttttatatttttagtagagatggcgtttcaccgtgttagccaggatggtctcgatctcctgacctcgtgatccgcccgcctcggcctcccaaagtgctgggattacaggcgtgagccaacgcgcctggcccctatttaaatttcttatgcttcttatggataagtcaaaaaatatatctttgattctgaacttaatagagccatatggccaatcataaaaaaaaatacacctctctcaacatttttactgaggaggagcaggttgaggagcgtggatcc

SEQ ID NO: 90387 - DNA, 714 bp, Homo sapiens
cctgagaagatgtttctgcactggccatttctaactatctagcatggactgaagtatcatggtagcaagggtgaaactatgttttcagattaaacaaaagaaatccatgataatattgtcccaccccgttaaatattttgctactgaaaaaaaagattttacctacaataaaacactcaggtgaaccttttttatgcaaaatggacagagtcttaacctaaaacacctaagtattatttaaatttcttattttattttattttattttattttatttttttgagacggagtctcgctctgtcacccaggctggagtgcagtggcctgatctcggctcactgcaagctccgcttcccgggttcacaccattctcctcctgcctcagcctcccaaatagctgggaccacaggcgcccgccaccgcgccyggctaattttttatatttttagtagagatggcgtttcaccgtgttagccaggatggtctcgatctcctgacctcgtgatccgcccgcctcggcctcccaaagtgctgggattacaggcgtgagccaacgcgcctggcccctatttaaatttcttatgcttcttatggataagtcaaaaaatatatctttgattctgaacttaatagagccatatggccaatcataaaaaaaaatacacctctctcaacatttttactgaggaggagcaggttgaggagcgtggatcc

SEQ ID NO: 90388 - DNA, 985 bp, Homo sapiens
gcacacattacgatagctatgatccaaatgtcaaaggggaaaggtggattgagggagaaaatgggtgtgtgtgaaatagttgacgtgtacagtggactcagcactgagaaacaagaggaagagracttagtgaccacattttcttctagccatcatctcaaataacatttggaaaacgattttagtaattttacttttaagataaagcaaaatactgctaaatgccattctgtttcagtgggtgtaagctttactttataaacagagtatattgttctatattctgcactctgaaattcttaaatagttgatgtgtacagtggactgcagcactgagaaacaagaggagagaacttacgatgaccacgttttctttcatccataatctcaaataacatttggaaaacaattttagtaattttacttttaagataaagtaaaatactgctaaatgcaattctgtttctggtgggtgtaagctttactttataaacagagtgtattgttctatattctgcactctgaaattcctgcacttggtaatgagaagccatcagtgaaatttgcagctaaattaaacccctcaatcagcttctgactatgccagttagtctattataagaaagtatttctttttaacataatattatatatatatgctcttgcagatgtaggtcttaaaagtttgagaagtgcatgatttatgcatagtctttcaaaagagaaactttagtagcacttttgattcataaatgttttgtttttttcctaatactttaacagtagaacagagatatggatcatccccagtcattttttttcatttatgtatacagatgtaggtaaccccatttatttggaaagtgactgtgttgtatttagacagagcaaattgggaaacagaagtactataaatgtgaactgcatgtgctgtgtgtagctccactttggcatcctaataatagcagagtttctgaagcttagg

SEQ ID NO: 90389 - DNA, 985 bp, Homo sapiens
gcacacattacgatagctatgatccaaatgtcaaaggggaaaggtggattgagggagaaaatgggtgtgtgtgaaatagttgacgtgtacagtggactcagcactgagaaacaagaggaagagaacttagtgaccacattttcttctagccatcatcycaaataacatttggaaaacgattttagtaattttacttttaagataaagcaaaatactgctaaatgccattctgtttcagtgggtgtaagctttactttataaacagagtatattgttctatattctgcactctgaaattcttaaatagttgatgtgtacagtggactgcagcactgagaaacaagaggagagaacttacgatgaccacgttttctttcatccataatctcaaataacatttggaaaacaattttagtaattttacttttaagataaagtaaaatactgctaaatgcaattctgtttctggtgggtgtaagctttactttataaacagagtgtattgttctatattctgcactctgaaattcctgcacttggtaatgagaagccatcagtgaaatttgcagctaaattaaacccctcaatcagcttctgactatgccagttagtctattataagaaagtatttctttttaacataatattatatatatatgctcttgcagatgtaggtcttaaaagtttgagaagtgcatgatttatgcatagtctttcaaaagagaaactttagtagcacttttgattcataaatgttttgtttttttcctaatactttaacagtagaacagagatatggatcatccccagtcattttttttcatttatgtatacagatgtaggtaaccccatttatttggaaagtgactgtgttgtatttagacagagcaaattgggaaacagaagtactataaatgtgaactgcatgtgctgtgtgtagctccactttggcatcctaataatagcagagtttctgaagcttagg

SEQ ID NO: 90390 - DNA, 985 bp, Homo sapiens
gcacacattacgatagctatgatccaaatgtcaaaggggaaaggtggattgagggagaaaatgggtgtgtgtgaaatagttgacgtgtacagtggactcagcactgagaaacaagaggaagagaacttagtgaccacattttcttctagccatcatctcaaataacatttggaaaacgattttagtaattttacttttaagataaagcaaaatactgctaaatgcmattctgtttcagtgggtgtaagctttactttataaacagagtatattgttctatattctgcactctgaaattcttaaatagttgatgtgtacagtggactgcagcactgagaaacaagaggagagaacttacgatgaccacgttttctttcatccataatctcaaataacatttggaaaacaattttagtaattttacttttaagataaagtaaaatactgctaaatgcaattctgtttctggtgggtgtaagctttactttataaacagagtgtattgttctatattctgcactctgaaattcctgcacttggtaatgagaagccatcagtgaaatttgcagctaaattaaacccctcaatcagcttctgactatgccagttagtctattataagaaagtatttctttttaacataatattatatatatatgctcttgcagatgtaggtcttaaaagtttgagaagtgcatgatttatgcatagtctttcaaaagagaaactttagtagcacttttgattcataaatgttttgtttttttcctaatactttaacagtagaacagagatatggatcatccccagtcattttttttcatttatgtatacagatgtaggtaaccccatttatttggaaagtgactgtgttgtatttagacagagcaaattgggaaacagaagtactataaatgtgaactgcatgtgctgtgtgtagctccactttggcatcctaataatagcagagtttctgaagcttagg

SEQ ID NO: 90391 - DNA, 985 bp, Homo sapiens
gcacacattacgatagctatgatccaaatgtcaaaggggaaaggtggattgagggagaaaatgggtgtgtgtgaaatagttgacgtgtacagtggactcagcactgagaaacaagaggaagagaacttagtgaccacattttcttctagccatcatctcaaataacatttggaaaacgattttagtaattttacttttaagataaagcaaaatactgctaaatgccattctgtttcagtgggtgtaagctttactttataaacagagtatattgttctatattctgcactctgaaattcttaaatagttgatgtgtacagtggactgcagcactgagaaacaagaggagagaacttacgatgaccacgttttctttcatccataatctcaaataacatttggaaaacaattttagtaattttacttttaagataaagtaaaatactgctaaatgcaattctgtttctggtgggtgtaagctttactttataaacrgagtgtattgttctatattctgcactctgaaattcctgcacttggtaatgagaagccatcagtgaaatttgcagctaaattaaacccctcaatcagcttctgactatgccagttagtctattataagaaagtatttctttttaacataatattatatatatatgctcttgcagatgtaggtcttaaaagtttgagaagtgcatgatttatgcatagtctttcaaaagagaaactttagtagcacttttgattcataaatgttttgtttttttcctaatactttaacagtagaacagagatatggatcatccccagtcattttttttcatttatgtatacagatgtaggtaaccccatttatttggaaagtgactgtgttgtatttagacagagcaaattgggaaacagaagtactataaatgtgaactgcatgtgctgtgtgtagctccactttggcatcctaataatagcagagtttctgaagcttagg

SEQ ID NO: 90392 - DNA, 674 bp, Homo sapiens
caagaaaagtaacatttggtaaacaaatactccatgacggactgtagaaaaaacgaaaggaaaaaagagtggagtgcagtacattaaatagaaagggaagatggaagcgtttcaaaagtcactttgtgtcagaaagtggagtcaggaaaggtattattaggtgattatgtggtttctagaggcaaatttagagattcctctggactctaaattaatagtgtaaacaagcagagarcaagctttcaaataacataatttatttttttgagatctgaagcacatctaaacaacacaagctaactaaatagatgatgttcaggcaaggaagaaccaagtgatttctaaatatgttttctaacagcagtaggcttggcctgtaaaacaaacaaacaaaaagtttaaaaactgggggaagaaaaaaacaaaatataaatgatatagtaaaacatcttggttgaaaacaatagcatcaatgtctgatctttccgctcatctatgtatcgaattaagtttagaaatgcaatttgtgggttttgaattccagcagccagtagcagctctctaaagagggaaagtgatggtgccgaccgctccccaaagaatgcctttttggcaaatttaaaagtcagccttgacgtcaagtgactcctgagaaggctccgcattgagttctg

SEQ ID NO: 90393 - DNA, 866 bp, Homo sapiens
gagcaggtgccctcaattggggacttgatacagtttggccgtgtcctcacccaaatatcatcttgaattgtagctcccataattcccatgtgttttgagaaggacctgttgggagataattaagtgatggggccagtttcccccataatgtttttgtttggacactatgatcagagagaactgatgacttctacaacagtctgctcttcagctcaatattccaccaccaacagaccttgggttttggggagttaatggggcactcagatgattgctgatggaaactccaggggaagtaagggtggggaagaagtgtagcttgtaaaagatttcccatcttttagtcctaaactttcaactgggggaagaatattacattttaaatccaacccacagaaaggaaaattcatcaaaatctccaagccgaatgggatctgcgaccctttccatgaagactgatcagataggcctggcgcagctttctgctctgctcccaagagctgtgcaatgtgtggtccttgggccattcctgctgcataaatgtgcattctttgtattggaacccagagtgtaggaactagtcgctttgacagagaatgaggctggccctgcatccatgttagacattgctatccttttcttaaggtttcttcattgttacatagtacatcttgggaaakgaaacagaaagctaactgcagtgttaattcttggaactggcatgaaaacgaagaggagaagtgacacagcgaaagagcttacgtttgggaatcaaagacctggattcattttctacctctgtacttgcaggatttgtgcaagattttgaccaattacttaacgcatctgagccccaaggatcctga

SEQ ID NO: 90394 - DNA, 866 bp, Homo sapiens
gagcaggtgccctcaattggggacttgatacagtttggccgtgtcctcacccaaatatcatcttgaattgtagctcccataattcccatgtgttttgagaaggacctgttgggagataattaagtgatggggccagtttcccccataatgtttttgtttggacactatgatcagagagaactgatgacttctacaacagtctgctcttcagctcaatattccaccaccaacagaccttgggttttggggagttaatggggcactcagatgattgctgatggaaactccaggggaagtaagggtggggaagaagtgtagcttgtaaaagatttcccatcttttagtcctaaactttcaactgggggaagaatattacattttaaatccaacccacagaaaggaaaattcatcaaaatctccaagccgaatgggatctgcgaccctttccatgaagactgatcagataggcctggcgcagctttctgctctgctcccaagagctgtgcaatgtgtggtccttgggccattcctgctgcataaatgtgcattctttgtattggaacccagagtgtaggaactagtcgctttgacagagaatgaggctggccctgcatccatgttagacattgctatccttttcttaaggtttcttcattgttacatagtacatcttgggaaaggaaacagaaagctaactgcagtgttaattcttggaactggcatgaaaacgaagaggagaagtgacacagcgaaagagcttaygtttgggaatcaaagacctggattcattttctacctctgtacttgcaggatttgtgcaagattttgaccaattacttaacgcatctgagccccaaggatcctga

SEQ ID NO: 90395 - DNA, 977 bp, Homo sapiens
gggttttacaaatggctctttattctattagtttattaccgtggcctaactacctagccttgccaagcactggtgtccttatctgtaaagctgggatagcatggtacttactataaatggtgttagggggatcaaacgcagtcaagctcagttctcagcacatagaattaaaactgtgaataaatcattattgttattttattagtgacaagttttctaatcttgaaagaaaatataatgctttgattttacaatagtctgctggttacattctcttttttacacccagctcatgactgtactgtttgttccattttgcttatttcagtgaggtggttgggaacaagcctgcatctagatagcttatgttcgaatcmcagatgactgactgtatagctgtgttagttaaaggaagatggccacaataataaataaactccaaaatctcagcagatcccaactgtggaatgtatttcttgttcatatcgtgtccaaagcaagggctcttaattagcagggtgcttccctccaggcagtgattcagggacccaggctttttccctcttttcctctacattgtccacttgtggctatcaactcaccaaactctactacaccaaagtagcagatcagaatagcatatgaggcatttctcatgggggttttgttggcccaaacctggaagtggtacacattccttctccctacatcaagcagacagggcctcagtcctatgtcatgcctaactgtaagaggtcctttgaatactgctctgggctcagaaagatgaagaggtggagttggtgaccatcgagccactctgtctgatgaagttctctggaaaaatggaaatggtgcacgtcttactatccatagcacacaagcacacagagcaggagcctctcccatcatggctttgattaatttacttccctgagttttcacacctataaaatagggaatagcaaaagcatgca

SEQ ID NO: 90396 - DNA, 666 bp, Homo sapiens
actcttatttaactccatttggaaaaataatttcattttatgcacttctgtaacaatttatatttctattaggacaattatttacttaataaaccatggaaaacgttgttattgtctagcaaatattctggacattagaacatttacaaagccatttaaacaaataattaaatgactcaatctccaaaaagtcagggatgccacagaaagagggatgcacgcatgcatatatgtgtgtgtgtgtgcgtatgtgtagtgtgtgtgtatgtgcgtgtgtgtatgtgtgtatctgtatatgtgtgtatgtatgtgtatgtgtagcgtgcatgtgtgtgttgtgtatgtgcatgcgtatgtgtctgaatgtgtttgtatatatgtgtgtacacgygcatgtgtgtgtgtgtgtgtgtgtgtgtgtgaagtactactccttctgggaaaggtgagaagcctggcatgactgggtaattttattcaaagaggtggtggggtctagggtgctttggttgcttacctatggctgtgacctgctgagccctgtgtgtcctgctgagccatgcatcttcctgaagcagtgaagcaccactggaggcttagcattgggataaaaacaggagatcattcttagagataatttgaagggggaaaaatcttcagacaaaa

SEQ ID NO: 90397 - DNA, 666 bp, Homo sapiens
actcttatttaactccatttggaaaaataatttcattttatgcacttctgtaacaatttatatttctattaggacaattatttacttaataaaccatggaaaacgttgttattgtctagcaaatattctggacattagaacatttacaaagccatttaaacaaataattaaatgactcaatctccaaaaagtcagggatgccacagaaagagggatgcacgcatgcatatatgtgtgtgtgtgtgcgtatgtgtagtgtgtgtgtatgtgcgtgtgtgtatgtgtgtatctgtatatgtgtgtatgtatgtgtatgtgtagcgtgcatgtgtgtgttgtgtatgtgcatgcgtatgtgtctgaatgtgtttgtatatatgtgtgtacacgtgcatgtgtgtgtgtgtgtgtgtgtgtgtgtgaagtactactccttctgggaaaggtgagaagcctggcatgactgggtaattttattcaaagaggtggtggggtctagggtgctttggttgcttacctatggctgtgacctgctgagccctgtgtgtcctgctgagccatgcatcttcctgaagcagtgaagcaccactggaggcttagcattgggataaaaacaggagatcattcttagagataatttgaagggggmaaaatcttcagacaaaa

SEQ ID NO: 90398 - DNA, 522 bp, Homo sapiens
tgcttatgagattgtgggaaagggacaggactccccataaaaaataggtaaacctgattaaagggtaggctttagttaattaataaaaatcaaccttggtctattcatcagaacaaatgtaccacatgaagttaagttattattaataggggaagctgagtgtgtaatataggggaagtctctgtattgtctgtactttttctgcaaatttaaaacttttataattttaaaatctttatttaaattttttaattaaaaaaacaactacagagcaaaacagattcaggattatctaatttccttggtaaaacctggagtatcaaaatacacattttgattcagttgtaaaatatytcttctgttttataaaataacttacaccatctgctaagttccaaagtgcttaagaatgcaaactaaatcttaccacatctaaacactgtaattgccccaaagtttggaaatataacacctctatgaataacttgcctcttaattggctgatgaacatttattttgtca

SEQ ID NO: 90399 - DNA, 522 bp, Homo sapiens
tgcttatgagattgtgggaaagggacaggactccccataaaaaataggtaaacctgattaaagggtaggctttagttaattaataaaaatcaaccttggtctattcatcagaacaaatgtaccacatgaagttaagttattattaataggggaagctgagtgtgtaatataggggaagtctctgtattgtctgtactttttctgcaaatttaaaacttttataattttaaaatctttatttaaattttttaattaaaaaaacaactacagagcaaaacagattcaggattatctaatttccttggtaaaacctggagtatcaaaatacacattttgattcagttgtaaaatatctcttctgttttataaaataacttacaccatctgctaagttccaaagtgcttaagaatgcaractaaatcttaccacatctaaacactgtaattgccccaaagtttggaaatataacacctctatgaataacttgcctcttaattggctgatgaacatttattttgtca

SEQ ID NO: 90400 - DNA, 657 bp, Homo sapiens
attttaaatattacgattaatattaaacattcaatttaatctggggaaaaatctgatcctcttctctgtttgtgtaccctccccttgagcttctgtgatattggtcgggatcacagataagtgaagaactgatgtcagaatggtaggtcagttatatttcaaaraagacactgctagctggagaaaagcgtagttccagaaagtaggaagtgggtgcagcatccaagggcatggagggggaactcaggggatagagagaagagggggcaaagaggagaaatctgcagctcattgggaagcacccctcattcatcagagagaacgatgaatcactgagcagacttttctctaggaagcacagttctaccttctggaagtagccatggttttgtttgtttgtttcctgtgtcgtggctcagggaatcagagattcttatttaataataataattttaaaaagctttcaggatttggcacaatttctggttaaattagctagaaaaaggaaataccgaagaacaggggcctgctcattcccggcatgctgtgcgtctcctctggaaggactgggcgtgcccggcgtgctgtgcgtcccctccggaaggactgggcgtgcccggcgtgctgtgcgtctcctccggaaggactgggcgtgcc

SEQ ID NO: 90401 - DNA, 657 bp, Homo sapiens
attttaaatattacgattaatattaaacattcaatttaatctggggaaaaatctgatcctcttctctgtttgtgtaccctccccttgagcttctgtgatattggtcgggatcacagataagtgaagaactgatgtcagaatggtaggtcagttatatttcaaagaagacactgctagctggagaaaagcgtagttccagaaagtaggaagtgggtgcagcatccaagggcatggagggggaactcaggggatagagagaagagggggcaaagaggagaaatctgcagctcattgggaagcacccctcattcatcagagagaacgatgaatcactgagcagacttttctctaggaagcacagttctaccttctggaagtagccatggttttgtttgtttgtttcctgtgtygtggctcagggaatcagagattcttatttaataataataattttaaaaagctttcaggatttggcacaatttctggttaaattagctagaaaaaggaaataccgaagaacaggggcctgctcattcccggcatgctgtgcgtctcctctggaaggactgggcgtgcccggcgtgctgtgcgtcccctccggaaggactgggcgtgcccggcgtgctgtgcgtctcctccggaaggactgggcgtgcc

SEQ ID NO: 90402 - DNA, 657 bp, Homo sapiens
attttaaatattacgattaatattaaacattcaatttaatctggggaaaaatctgatcctcttctctgtttgtgtaccctccccttgagcttctgtgatattggtcgggatcacagataagtgaagaactgatgtcagaatggtaggtcagttatatttcaaagaagacactgctagctggagaaaagcgtagttccagaaagtaggaagtgggtgcagcatccaagggcatggagggggaactcaggggatagagagaagagggggcaaagaggagaaatctgcagctcattgggaagcacccctcattcatcagagagaacgatgaatcactgagcagacttttctctaggaagcacagttctaccttctggaagtagccatggttttgtttgtttgtttcctgtgtcgtggctcagggaatcagagattcttatttaataataataattttaaaaagctttcaggatttggcacaatttctggttaaattagctagaaaaaggaaataccgaagaacaggsgcctgctcattcccggcatgctgtgcgtctcctctggaaggactgggcgtgcccggcgtgctgtgcgtcccctccggaaggactgggcgtgcccggcgtgctgtgcgtctcctccggaaggactgggcgtgcc

SEQ ID NO: 90403 - DNA, 643 bp, Homo sapiens
ctatgatttcatctctgaccaaaccaatcagcactctcaactcactggccttccccgcccaccaaattatcctttacaactctgatccccgaatccagatcagggaatctgatctgagtcataataaaactccagtttcccacacagctggctgtgcatgaactactctttctctattgcaatttccctgtcttgataaattggctgagtccaggcaaccggcaaggtgaacccactgggcggctacattaccacggctcaaggcgttgtgcttggagcctacgtccatggaagaggaggactccgtcatggaattgtgaatcatgtcattttctggatcaacagagggtcacactgactacgcggccctatttttctggctttctgtctgtattgctggcttatcrggtttattttgttttgttctgttttactttgtattattgttatttgtattacaagaacttttctaattaggaagtaaattcaattaaggatactcaatgattttctgtatgtctcaaatagctggcacagttctttataaaccacaaatggcaaataaatataaatattctttttttttttttttttttttgagatggagtctcgctctcgcccaggctgtagtgcagtggcgcga

SEQ ID NO: 90404 - DNA, 643 bp, Homo sapiens
ctatgatttcatctctgaccaaaccaatcagcactctcaactcactggccttccccgcccaccaaattatcctttacaactctgatccccgaatccagatcagggaatctgatctgagtcataataaaactccagtttcccacacagctggctgtgcatgaactactctttctctattgcaatttccctgtcttgataaattggctgagtccaggcaaccggcaaggtgaacccactgggcggctacattaccacggctcaaggcgttgtgcttggagcctacgtccatggaagaggaggactccgtcatggaattgtgaatcatgtcattttctggatcaacagagggtcacactgactacgcggccctatttttctggctttctgtctgtattgctggcttatcaggtttattttgttttgttctgttttactttgtattattgttatttgtattacaagaacttttctaattagraagtaaattcaattaaggatactcaatgattttctgtatgtctcaaatagctggcacagttctttataaaccacaaatggcaaataaatataaatattctttttttttttttttttttttgagatggagtctcgctctcgcccaggctgtagtgcagtggcgcga

SEQ ID NO: 90405 - DNA, 639 bp, Homo sapiens
ataccccgaacatcggcatcatgaaatagacccacgaaacggacctgcacrtgtgctcccatacctaaaataaaagtgctgggggtggtggcccacgcctgtaatcctagcactttgggaggctggaggggcggatcacgtgaggccaggagtttgagaccagcctggccaacagagtgaaacctcatctctactaaagatacaacaattagccaggcatggtggcagccacctgtaatcccagctacttgggaggccaaggtggaagaatcacttgaacctgggaggcgaagcttgcagtgagccaagatcgcggcattgcactcaagcctgggcaacagaaaaaaaaagttaaaattttaaaaatagaattaaaataaataaatgataccacccatactttgtgtaataatcgaaacaaagtgtattgtcaaaaggaggaaaaggaaggaaaagaaacgagactaggaagatgggtagttggcctgtcatgcactgtcagcgggagcctcggccaatttaatggcagttccgagaacgagagaaacactcagtttttccaagttgaggtcagagaggaacagtctctccataccccacaccgttcagtcacttagctcagccaccgtgggaacagtg

SEQ ID NO: 90406 - DNA, 639 bp, Homo sapiens
ataccccgaacatcggcatcatgaaatagacccacgaaacggacctgcacgtgtgctcccatacctaaaataaaagtgctgggggtggtggcccacgcctgtaatcctagcactttgggaggctggaggggcggatcacgtgaggccaggagtttgagaccagcctggccaacagagtgaaacctcatctctactaaagatacaacaattagccaggcatggtggcagccacctgtaatcccagctacttgggaggccaaggtggaagaatcacttgaacctgggaggcgaagcttgcagtgagccaagatcgcggcattgcactcaagcctgggcaacagaaaraaaaagttaaaattttaaaaatagaattaaaataaataaatgataccacccatactttgtgtaataatcgaaacaaagtgtattgtcaaaaggaggaaaaggaaggaaaagaaacgagactaggaagatgggtagttggcctgtcatgcactgtcagcgggagcctcggccaatttaatggcagttccgagaacgagagaaacactcagtttttccaagttgaggtcagagaggaacagtctctccataccccacaccgttcagtcacttagctcagccaccgtgggaacagtg

SEQ ID NO: 90407 - DNA, 639 bp, Homo sapiens
ataccccgaacatcggcatcatgaaatagacccacgaaacggacctgcacgtgtgctcccatacctaaaataaaagtgctgggggtggtggcccacgcctgtaatcctagcactttgggaggctggaggggcggatcacgtgaggccaggagtttgagaccagcctggccaacagagtgaaacctcatctctactaaagatacaacaattagccaggcatggtggcagccacctgtaatcccagctacttgggaggccaaggtggaagaatcacttgaacctgggaggcgaagcttgcagtgagccaagatcgcggcattgcactcaagcctgggcaacagaaaaaaaaagttaaaattttwaaaatagaattaaaataaataaatgataccacccatactttgtgtaataatcgaaacaaagtgtattgtcaaaaggaggaaaaggaaggaaaagaaacgagactaggaagatgggtagttggcctgtcatgcactgtcagcgggagcctcggccaatttaatggcagttccgagaacgagagaaacactcagtttttccaagttgaggtcagagaggaacagtctctccataccccacaccgttcagtcacttagctcagccaccgtgggaacagtg

SEQ ID NO: 90408 - DNA, 1342 bp, Homo sapiens
ctgtgtgatcttaggcaggttaattaatatttatgagcttcagttttctcagctgtaaaatggaaaggataatgtccatgtcatgattttagcagagaagggcatgtgataacgccgcatttggacctttctgtgtaaacagagcagggcatttgttaagcatgacactttggtagactgttttgtgatttaatccttagacgtattttattctcatcaggctataatcttgaacatatttaactattatcaattctcatgaccttttcagtatagtaaccttatccaggagtaattatgtaaatgtaattatgaacatttgaaaattaaaaacaaatcatgggtgccagcctgcctttttattatttgcaatattatcaaagttcattggataaatgtgtgtactttaactttccatttttgatttatacatttctatcatataaatgagagtcagaaataagagaagctaatttcctccctttattggttaytatttggtgtgggagtggcagtggcctccattcaggaagcagcgcacgggagcctgatggaggctgggtggtctcagcccccagcaaggtctgtgcccggcgaaggggccgcctggccccagcgagcaccggctttgttggtaacttgcagagtctttatgtggttcattcagatcctgtgcaagaaatctaggtaaacacactccctctcttgcttggataaattaagattgttttgttttacatggcaaagggtacttccttttcttcctcactagtgaaaatacagtaaagtatcacctgtgttagtgaacaaatgcattagtagtggtattattaggataatggagcagccaacaacccagcacagaccctgggaactcagattaattgctacaatgtgcccactcaccactcgacttggtgtgagttgagggtgctgtagattctgttaagagaattttgtcaacctacaacagaagcaaacaaggcaagtaaatatcaaggagccaagagaaaggaaaactcagagtgtcctgagagaagagaaggtaagaatgacagaatgaatgtgtctgtaagactgacttgatttgggaaaccccgacccagacttgggtcagtgatgcggccactgaacttgcaaagtggggatgaaaggctgagaaaaatgaaaagcaaatgtagtcaacttcatgatgttacctaggatcagccctggctttgcgtctaaggctttcgggaaagacatggagcattaaaattaccaattatgagcacactttaaacccttccagaaggcctttatgattacacacatgcaggcaaactttctaattgctgctatg

SEQ ID NO: 90409 - DNA, 512 bp, Homo sapiens
tatttttagtagagacggggtttcaccatgttagccaggatggtctcaatctctcgamctcccgatccacctgcctcggcctcccaaagtgctgggattacaggcacgagccaccacgcctggtcggtcattttatatcctttctcattggagagagtaacgtcttgcccattttgcatgaagacaaacatggaattcttccatgatttttaaggctagaactagaaaatccactggggggaaaatatccagcctcaaatggagccctctgtaagtaataaatttattccctgttgtagtcaattctcctaaaacaaaagtgactgcagcaagcgatttttggtattgctcatatattgttaaaatatttcagctggcagacgctgtgtgaagagagacagtcgccggcctgacataagatttattagagaaagttggcacaaatatatttgtaggaagcaaaatatgtttgtagagattattccagatttacagtgattaataacggattg

SEQ ID NO: 90410 - DNA, 512 bp, Homo sapiens
tatttttagtagagacggggtttcaccatgttagccaggatggtctcaatctctcgacctcccgatccacctgcctcggcctcccaaagtgctgggattacaggcacgagccrccacgcctggtcggtcattttatatcctttctcattggagagagtaacgtcttgcccattttgcatgaagacaaacatggaattcttccatgatttttaaggctagaactagaaaatccactggggggaaaatatccagcctcaaatggagccctctgtaagtaataaatttattccctgttgtagtcaattctcctaaaacaaaagtgactgcagcaagcgatttttggtattgctcatatattgttaaaatatttcagctggcagacgctgtgtgaagagagacagtcgccggcctgacataagatttattagagaaagttggcacaaatatatttgtaggaagcaaaatatgtttgtagagattattccagatttacagtgattaataacggattg

SEQ ID NO: 90411 - DNA, 628 bp, Homo sapiens
  misc_feature (1)...(628): n = A,T,C or G
tgtgtgggaggcagcctgttttcacaagtccggatgcttttgctttccactcctccaccccagtgcaggaagttccttggcagggccaaagcctcctggttcagaattaagactcggatttaaacctaatgccaatttgcatatgaattacrggagatccgtcactgacagcagggtgcagtgggtggaggcatcagaaaaagagaagaggtttaaaacggggatgcaggactgcaagagtccagtggggaggaccgggtgtagggcaagggagggggctctgctgtttcctctctcgagcaggaaaaaccttccctgtgccttcctggcttggngggtagaccacactncccgnagtttttggacangaaaagaacccctgtaagcagctaagggctcagtctcctccgggtttcctaatgggctttgggcccaagtagaatttgatgggaagtaaagataaaggattttgaaggtggagagagacagaaagagagcagaaaacagggagagggggagtctctttgggcccctctgccctgttgacttgataagcaagcactttgtggcccagctctatttatttgcagttcatggctctcagttaaaaccacggagaccacctctg

SEQ ID NO: 90412 - DNA, 635 bp, Homo sapiens
cacattcagctctcacagcacctatgtgggaaatatgttgtcatcccattttatagatggaaaggtgaggcagagaggttaagtgatgtgcctggtgacagtgctgactctacatttgtttagcaatgtcgggatgtttcaagctttgaagcttgtgcctggaatgactctttaggggccaccatcaagcagggatgccaggtctctactccacaggcctgtcgtggttgcaaagggctttctccctccccttggaagatgctcaaggtacgcactcagacttgagggccctgcattggtccttggttgggtggcatttcctggcatgtctcttttcctataaatcaggagcatggctctgcttcaggcacagcttggggagcagggagttggggggactacctatgccccccatatcttcacatgcccatatagatgcctgcttaaaaccaggggctcccagcctccgtttcttcatatggctctccccagaaatagagacactgttcacttacgtcattgggagattcttcaaggtgagtgttgctgcagccaaggaagctttggctaggtggtgtccttacctacaaakttaccctccatgcagaaccgcctgaaggacttacctctgctcg

SEQ ID NO: 90413 - DNA, 950 bp, Homo sapiens
atcctccctgatcatttttccacgagcaaattccttcataatttgcaccagagtgtgccttggagtgtgtgaaggggaggggatatgcagggaggagccaccgtttgcggggcaggtagccctgggggacactagtctttgttttggcacccttcctcaaatttctgaaaagaaacacattctctaggctctttacattctagggaattgttggctaaagaggcaagcacctttgaaggcagtggacttctctgtggaatcctcatctgaatctaagactttgggacttcatgaatactgggccagtttggacacccaagagacctgtccccgtgtctcagagagtgttttgtggcagccccgattcgatcacaccattcaaaacgataaatatgaaaatcggtcatcagtcacaagtttccctgagattttacaagatccagtctagtttgggaattaatgaaccaacatgytaaccatgaaaattatttgcaagcacgcatctggcacaaggtaagggatgcccttctttcttgttgaggcctttgtagaaaaaccttcacagttaatatgcagagtctgttcctcaaccttcttctaataaattagtgtaacatcttgcatagctaaatcatgaaggggggactaagctccagaggccagttataaatgcacaaaaataatatagaactaggtacataaaatagaagcctatttcttcatctatactaatggattttaaacataaaaaataactgagaataagcaccaggcacattagaaatttaaattaggttgcaaagctccccatttcatacaaggtcagcttgcaataaatgattcaagggagcattccttaggaataaaactctcacctgcttttacattaaccgatgggctctacactttcagatgatgcttcacaacgtgttttgattggctgtttcctc

SEQ ID NO: 90414 - DNA, 1145 bp, Homo sapiens
ttttggatgggaaagctaggaactttaagtgattataggataaaaacaggtaagagagtgaggttgaacacctagtagaaataaggaatatttacaaattccggagaaagagaaagactgggatcgagagaaaaaaatgaatgagttgatttttggtaaaaggaagaaaatgccatctattgtaagaaaaaagagaattagtaattcatgatcttaataattaataaattgaataactgaaaattttagatttattaacactgaagtttaattatctcgagcttatcttcttttacttttatttattttttcctttcagaaatgcctttagactttgcccatgtactttgtatcaagcatgtttgtataaattatgttacttactctggaaaaaccgatttaactgatgaataatttcttaaagctcaagtcaagatttttcatttaagttccttgtcaataatgcaaatcttacagctctctaatatattaagaataacttgtttttactattattcatgaaactctctataaaattagtgatttgaaatagaagtaatggcattttatgcctcaaatagtagcaaaattgaagttacataccttagagtaaatattgcaagataagttaaattattataagatattagtaatatgagttattcttagtcagctggagctggagtgattaatttctcagctctagcagccctgaaaaaattttacgtaactactcatggaagaaaaaattgagtactcatctgaataaactacataatggtccattatttcagcatatatctcctttgttctatttgattttttttttttgagacagagtctcgctctgtcatccaggctggaatgcagtggtgtgatctctgctcactgcaacctctgcctcccgagttcaagcgattctcctgcctcagcctcccaagtagctgggactacaggtgcgtgccaccacactggctaatttttgtatttttcgtagagatggggtttcaccgtgttggccagaatggtctcgttctgttgacctcatgatccgcctgcctccacctcccaaagtgctgggattacaggtttgagccaccgcaccyggccttgattttatttatagaagcaacttaaaagtaaca

SEQ ID NO: 90415 - DNA, 1145 bp, Homo sapiens
ttttggatgggaaagctaggaactttaagtgattataggataaaaacaggtaagagagtgaggttgaacacctagtagaaataaggaatatttacaaattccggagaaagagaaagactgggatcgagagaaaaaaatgaatgagttgatttttggtaaaaggaagaaaatgccatctattgtaagaaaaaagagaattagtaattcatgatcttaataattaataaattgaataactgaaaattttagatttattaacactgaagtttaattatctcgagcttatcttcttttacttttatttattttttcctttcagaaatgcctttagactttgcccatgtactttgtatcaagcatgtttgtataaattatgttacttactctggaaaaaccgatttaactgatgaataatttcttaaagctcaagtcaagatttttcatttaagttccttgtcaataatgcaaatcttacagctctctaatatattaagaataacttgtttttactattattcatgaaactctctataaaattagtgatttgaaatagaagtaatggcattttatgcctcaaatagtagcaaaattgaagttacataccttagagtaaatattgcaagataagttaaattattataagatattagtaatatgagttattcttagtcagctggagctggagtgattaatttctcagctctagcagccctgaaaaaattttacgtaactactcatggaagaaaaaattgagtactcatctgaataaactacataatggtccattatttcagcatatatctcctttgttctatttgattttttttttttgagacagagtctcgctctgtcatccaggctggaatgcagtggtgtgatctctgctcactgcaacctctgcctcccgagttcaagcgattctcctgcctcagcctcccaagtagctgggactacaggtgcgtgccaccacactggctaatttttgtatttttcgtagagatggggtttcaccgtgttggccagaatggtctcgttctgttgacctcatgatccgcctgcctccacctcccaaagtgctgggattacaggtttgagccaccgcacctggccttgattttatttatagaarcaacttaaaagtaaca

SEQ ID NO: 90416 - DNA, 937 bp, Homo sapiens
tttgtgtaacagggcttcccaatccttttctcatatactttttcttaaaataattagagttaatattatttgtagagtacatattatgtaaattcatgtattttaccttagtagttttctagtgtgaggctttgggcttcaactattctaataaatatctctttaatagccaatggggaaaagtagatgtttccaagttattatctacattcaaaaaagaaaattactcattgttctctactaactaaagaacataratacacgtgaatcttcctagacccaacctatcaatttctagttgtttttctgagttatgaatgggtactggccatgacatggctgaataaccaagtacctgagaggagcaagtttgaaaacaataatgtctgtgaaagtggaatgagaatggaccaggggaaggcaccaaaagcactcggatcttggtgtatcctatcaccacccaccaaagagtaactactgcacagagccaccaaaaaccaaatggaaataatggtgcattaaaagtacaccagccagcatttgtcctcagccaccctatcctcctacagtgaacccttggtggctggtttggaggttatgaatgactgtactagcattgcatcccctcatgtgcttcttcttacatcgagactgataaaattattcccactgctgaatatctgacctgtccagtattggagactgccccaactctcaatatggtaccattctttgaagagaccatccacttgatgtctagttaattacttaaaacccctttcatcctggagaaggcaataactcatctttttgtgattcatacgtatattgcatgtggttttgcctcttctgcccacgatgcctctgccagggctttctgagtggctggaattctgcaaaacttccctttggaccaaaggatccttttgtagctaat

SEQ ID NO: 90417 - DNA, 937 bp, Homo sapiens
tttgtgtaacagggcttcccaatccttttctcatatactttttcttaaaataattagagttaatattatttgtagagtacatattatgtaaattcatgtattttaccttagtagttttctagtgtgaggctttgggcttcaactattctaataaatatctctttaatagccaatggggaaaagtagatgtttccaagttattatctacattcaaaaaagaaaattactcattgttctctactaactaaagaacataaatacacgtgaatcttcctagacccaacctatcaatttctagttgtttttctgagttatgaatgggtactggccatgacatggctgaataaccaagtacctgagaggagcaagtttgaaaacaataatgtctgtgaaagtggaatgagaatgkaccaggggaaggcaccaaaagcactcggatcttggtgtatcctatcaccacccaccaaagagtaactactgcacagagccaccaaaaaccaaatggaaataatggtgcattaaaagtacaccagccagcatttgtcctcagccaccctatcctcctacagtgaacccttggtggctggtttggaggttatgaatgactgtactagcattgcatcccctcatgtgcttcttcttacatcgagactgataaaattattcccactgctgaatatctgacctgtccagtattggagactgccccaactctcaatatggtaccattctttgaagagaccatccacttgatgtctagttaattacttaaaacccctttcatcctggagaaggcaataactcatctttttgtgattcatacgtatattgcatgtggttttgcctcttctgcccacgatgcctctgccagggctttctgagtggctggaattctgcaaaacttccctttggaccaaaggatccttttgtagctaat

SEQ ID NO: 90418 - DNA, 937 bp, Homo sapiens
tttgtgtaacagggcttcccaatccttttctcatatactttttcttaaaataattagagttaatattatttgtagagtacatattatgtaaattcatgtattttaccttagtagttttctagtgtgaggctttgggcttcaactattctaataaatatctctttaatagccaatggggaaaagtagatgtttccaagttattatctacattcaaaaaagaaaattactcattgttctctactaactaaagaacataaatacacgtgaatcttcctagacccaacctatcaatttctagttgtttttctgagttatgaatgggtactggccatgacatggctgaataaccaagtacctgagaggagcaagtttgaaaacaataatgtctgtgaaagtggaatgagaatggaccaggggaaggcaccaaaagcactcggatcttggtgtatcctatcaccacccaccaaagagtaactactgcacagagccaccaaaaaccaaatggaaataatggtgcattaaaagtacaccagccagcatttgtcctcagccaccctatcctcctacagtgaacccttggtggctggtttggaggttatgaatgactgtactagcattgcatcccctcatgtgcttcttcttmcatcgagactgataaaattattcccactgctgaatatctgacctgtccagtattggagactgccccaactctcaatatggtaccattctttgaagagaccatccacttgatgtctagttaattacttaaaacccctttcatcctggagaaggcaataactcatctttttgtgattcatacgtatattgcatgtggttttgcctcttctgcccacgatgcctctgccagggctttctgagtggctggaattctgcaaaacttccctttggaccaaaggatccttttgtagctaat

SEQ ID NO: 90419 - DNA, 937 bp, Homo sapiens
tttgtgtaacagggcttcccaatccttttctcatatactttttcttaaaataattagagttaatattatttgtagagtacatattatgtaaattcatgtattttaccttagtagttttctagtgtgaggctttgggcttcaactattctaataaatatctctttaatagccaatggggaaaagtagatgtttccaagttattatctacattcaaaaaagaaaattactcattgttctctactaactaaagaacataaatacacgtgaatcttcctagacccaacctatcaatttctagttgtttttctgagttatgaatgggtactggccatgacatggctgaataaccaagtacctgagaggagcaagtttgaaaacaataatgtctgtgaaagtggaatgagaatggaccaggggaaggcaccaaaagcactcggatcttggtgtatcctatcaccacccaccaaagagtaactactgcacagagccaccaaaaaccaaatggaaataatggtgcattaaaagtacaccagccagcatttgtcctcagccaccctatcctcctacagtgaacccttggtggctggtttggaggttatgaatgactgtactagcattgcatcccctcatgtgcttcttcttamatcgagactgataaaattattcccactgctgaatatctgacctgtccagtattggagactgccccaactctcaatatggtaccattctttgaagagaccatccacttgatgtctagttaattacttaaaacccctttcatcctggagaaggcaataactcatctttttgtgattcatacgtatattgcatgtggttttgcctcttctgcccacgatgcctctgccagggctttctgagtggctggaattctgcaaaacttccctttggaccaaaggatccttttgtagctaat

SEQ ID NO: 90420 - DNA, 523 bp, Homo sapiens
ggttcccttcgagactagtaatagctcatcactagaaattgatctgactgtagccaaatttatctaaggaaattgttataattttggtctagatagcatttctcttcagctgataccctagtctgagatccatgctatttgggctcacttcttttttcagggaacttcttgcaaagattgtcttgatgctgcatatcacaccaatttgtttcccaccaatgccagtttttaaatatctgtatatagttactaaaaaatttatttctcaaagtagtttttactttttactctctgagaactctgatttctgcctccacgttgtgctcctgtgttcaagtatgggttttaaacagtggttttctttggatacaagttaaaaataatccttccctcacaaagaagccagtaatgacattatagtttttaaacatcgctattaaacatacaatttgtttttaatgattatcacttttcagctaatagctcacaggctacataatatgmgttatgtcaactctaccca

SEQ ID NO: 90421 - DNA, 733 bp, Homo sapiens
agtccacctgtgtttttttttttctcattagttcattaaaattaaagcagcgttggctgggcctggtggataacacctacaatcccagcactttgggagactaaggaaggaaargaagggggattgtctgagcccaagagttcgagaccaacctgggcaacatggtgagctccacctcacccctgtctctattttaaaaaagaaagaaaattaaagcagtgtgacctgattaccatgcaatgaatgataaacacaacataagtgaaataatcctggtgtttgcaggtaggagactgccatccagatgtcagagaatgtatttacattattttatagattattatttaaatgaaaaccccaaaggtgatagatatgtctaaaagtacatcacaggacctcagcttaaacaactgagctaaatgacagtttactgcccattaattcatactcagataatcaggtagaccttgtttatatgtttgtcctgtctcataactagattttaattttctaaaaggcagaagcagatcttaaactcctttgtgctttcacatcctagcccaagaccttgtacatataacctccactaaaattccccatcagttgattactgagttaatgaatacctttcattgcatgttccctgttttctattttcccctatagtcagcactgttccccaatggcttattcctttccttttccttaccccaaaacctctccaccttaaaaa

SEQ ID NO: 90422 - DNA, 1043 bp, Homo sapiens
atttaattcttgtctttattaagagtaagtataaaacaaaattggctggcctgaattatggactaaaccacacattatttaagaaacagataacatgtacttaatgcatgtgacattaactacaaaaatatattgtcttgatactaattccaatgccacctcactaaggaatggtgaaatagggagatctcggaatggaatcgtgtctattctgttcttacatacatcttcaaccattattttactcttttagttctgcgactgatcttcctctgtattccacataagacagcttaaatatattaacatcattagacttagctattcacataaagtgtagatagttcttctatctgtctgcattcatgcaaaatgacagtgactataaaacacgatcaataatttaaaaaggacttcaatccctgtcacttgtttctgtatgtacctgcgaaatagaacatgaaagcataattttccactaagtgttattcctcataatgcttgttgcttgtgtatgaatatgtgcaagatatacacacacacacacacacacacayatatatatatatgcacacatatatacactatgcctctgtattagtctgttttcatggtgttgataaagacatacctgagactgggcaaagagacttactggacttacagttccacatggctggggaggcctcacaatcacagcagaaggagaaaggtatatctcacatggtggcagacaagagaatagagcttgtgcagggaaactcccctttttaaaaccatcagatctcatgagacttattcactatcacaggaatagtgcaggaaagacccacccccatgattcaattacctcccactgggtcctcccacaacacatgggaattgttggagttagaattcaagatgagatttgagtgggggcacagccaaaccgtatcagtctcaaagctgtgagtttggactatcctgatattttggtcggaataaagcaatttcaaatttcagtactacctgcgaaaaaaaaaatgtgactctacatgttt

SEQ ID NO: 90423 - DNA, 828 bp, Homo sapiens
gggatcctaagatatatcaggttatcttccgattaaaaagactcaatcggttaccaggagctgatattcttgtagacagcaagccccaaaccattattatctaaacattaaatatgtaacacaaattattatagactgtattatatcatttagatatttgatatcttactctcttctctcccccaacctaaaaatacgtatactgaacctccatcagtaaaaaagcctggggccaggcatggtggctcacgcctgtaatcccagcactttgggaggccgaggcgtgtggatcacttgaggtcaggagttgacaccagcctggccaacatgatgaaaccctgtctctactttaaatacaaaaattagttgcgcatggtggcacatggctgtaatcccagctactcgggaggctgaggcacgagaatcgcttgaacccgggaggcagaggttgcagtgagccaagatcaggccccttcactccagcctgggcaacagaacaagactctrtctcaaaaaataataagaagaaggagaagaaaccctttctcatcatttgcacatagtcatggaatgaagtatgaagggaagggaaccattaactcatttttcatatttctctccccaagcttttaaggcatgtcttgtgttggaggcattagatttccatagaagaaggtagctaagaaaactaatcttcctaattcatatgtgcaaccacaaatatttctaagagaaagaaaagaggccatgcagcatcaatgcaattgagactaccacggtagagtggaaccctttactccaattctccgtggaatatataatcaacct

SEQ ID NO: 90424 - DNA, 862 bp, Homo sapiens
ctctgagtttacagtggtgcagctcagtagctgtwtggctcatgggggctaggacatagcgtcagttccctcttaggaggaacacagccatatggactcgaggcagctccctcaactggaatcagtccctatgaaaactgcagaagtccccagtggtgaggactgtaggtgtccaaggtggttatgggggctgctggcttcttgcttaccttttccctgcaaggagaagttgctgctagttctcagtcgatcccaactgggagatagagtggtagaggtagagtgtttccttctgttctctaggtggccttcctgggtttcagtgcactataaaactatttttacatgctccagtgctctcttttggttattttcatcgaaatgtaattatttattcatggttttgactgtctttggggaggggataggtgctaggggcttctcagtggccattttgctgatgtcattctccccaaattgtctaattttatggggaaagggtggaggtcttaagtttatgtcattacaatggatgagctaatttcacttttttcatttctaagcaaaaaaaagggaaatttgaatttaatatgtcaagactcagaccacacactttgtgaaatataattgcaaaaatacctcctggcaaaattaccaagctagatttttaaaggccttttttccatcaatctcatatttcttcagagggtttatttagtgaatgagaaatgactttatgagaatgagatacgatggacaagttggtgattttgttgacagcagtgtagaatagcctcattagattaataagctgccacgtagaactcactgcataggtattttccccatggtcttcttattg

SEQ ID NO: 90425 - DNA, 776 bp, Homo sapiens
tcctcccatctcagcctcccaaagtgctgggattacaggcatgagccactgcgcttagccctgttcagatataattctaaactatgaaataaagtcaacaaaagcattgtctatgatacagtcacagctctctgtggaggtatgcctgctagtttggtgtgtatgtggtcacatgacttaccaaaggcgaccaaggggagctgagaatcagctaaaacctccagggtctgctgactgtttaaggtaagtgccagcccgttggtgggtgtcctgtcaccaaaaccacatcaacagaggctatttgtgggtgacttacccattaaggggtcaatctttgctctactatccgattgttttaaaygcagtttaatatctgataggagtcatcactcttcattactcttttttcctaaattttctttgatatctttatctgctgattcttccaaatatccttgaagataagtttgttctctcctcttcccagaaaattagctaattttaaaggggaaaaccccacatcttcacaacgaagagatatggctatcaccatcttaaccatctagcaaattgtagggcagcctgaatcatatgcctctgcaagccatacaatataaaatatacaatataaaatatgatctgggaagtgttcttgacaaagatgtttaacccaaacctaatcaagcctttttaggagatagagactagaagagcaagttaaaagtacactatgaagagctcatcaaacacaaccaggatagggaacaaaggattgg

SEQ ID NO: 90426 - DNA, 663 bp, Homo sapiens
gcatggtgtgggggttggggaggaggggagactgccttatttattgctggctgaaatattctctgcttgctcaaaatgcactgagtcctcaaccctgagttccctcctgcaacacatcccacggtatgagcagatgccatctgatcctctgtgtcagccagtggaattggagcttgaggaactagcacaaatatactracgttttggctcctacttttgctatgctacattttgtgtgtttgtctctgtcagtgagtcttacaacatctgtcagcatccctgaaatggtggcaggccaaattgttatcttgcaaggagggtaacatctcagacttttcatagctcttgagagatacactgattgacttaagccatcctttgctccaactcaaatccactgggaacacattgagaagcaggggaggtggtcctgcagaagaggatttacagatcccagaagaagggcaaatagaaggtgggcaggggaaaaaatgggaattatgccaatttgatatgaccctcacgtgccctacctgttaaacaaagatgcagtacctcttaattcaattccacactcaggcaattccactttcagttgtgttcactgggcccaggaccccatgaagactaacagaattccttaggactcaggcaaagtgccaa

SEQ ID NO: 90427 - DNA, 535 bp, Homo sapiens
attttaaccagttagattttcctgagcataaaacatgtgcaagtgagctcataaataaaaacctgcaaaactcacaacttaagcttgccataaacaagccaacaagaacactttcagcatccacttcacatggcgaggtcttagctaaaagatgtgatccctaaaagcactggtyttctcaaagaaatgccaacacagcagacacatcaagttcacctaactttgtaaataatccttagcataactgaagtagaacaactatgaagcccccttactgaactacacaaacctattattattagtcatgccagctctattttctgcagatatagccaaccatagcatagctagctcacggtacactctatagcagaagggaagtaaaatttaatgtagttttttaagtcagtgattcaggcaattcttggaataagttccacttgagaagatgtaactaagaggtcttattgaaagacactccccagctgttgacagctcaactttggaaattccctcttttttgccgattcctgac

SEQ ID NO: 90428 - DNA, 1842 bp, Homo sapiens
cctaaatctggtttagtgtaaggaattgttattcgtcacgcacagggtagcatttggaattcatttatctgagttctgttgccttgttttcagaatgcctaaggttggagtctccgatttcattctccaaagcaatgaagagacctcacaggttgaaatctgaatccatgggattctatacaatagctgaggtttggtccccagagaaaagtgagtaagaatacaggaaaaaaaaaaaaaacccaaaactaaacaaatctaaaaaacamacacacacacacacacacacacaaaataaaacaaaacaaaaacagagagcaacctattaatcctggaagaaaacacataacatcattttcattattaggatttcctttgtatttaccctcaatagagtcagccaacatgtttccgttcccatttaattcccaagtggcacttttggtgtccaggaaaagtgccaagctgagttgttcagaagatctaattactcctaatagaaatactacacaagagactgctttggttcttgctctgacatctcttgttctcttatttcctataaagattcatgtgaaaaaccaaagttgtatgtgctgtgcccaggaatgtcaaggaatgggaagctggggcaatcacatcccagtctcatcctggcaggagagaggatcctcaagaggcggtgcagggggaggaagcgccctagcataataagagctttgagtgcctgggacctgctccaaggggggtaaacaaggtgcagaggtgacctgagatttctcaaacttgcagatcattaggagggcatttcctttattatatgcttgaatttagaggaacaagccactcactctcccactccaccactgcagctccggatcaatcatatatttcctggttagttcctcatttttattaattttctaagcttcaggttcatacatctaaatgcccactaaatgtctagttcagtatgtcatcttcccaaacttgcttcttctcctttcatctttcttatctcatttatgttatcagcatcaccgccaacaccaaccacacaggctaaagattcagaaaatatcttatctccacactttccttcaagcccaactcctaccctagtatcatgtcacccattactaaattctggcaatttcactttttaaatatttcttgattcttcccaccacttttctctttttccattgctggtttatcatttcttgctgtatagtactgcttggtgcataatagacacttaaataatgtttggtttggggccgggcccagtgattcacgcctgtaatcccagtactttgggaggccaaggtgggcagatcacgaggtcaagagttcaagaccaggctggccaacatggtgaaaccccatctctactaagaatacaaaaaaattagctgggcgtggtggcacgtgcctgtaattccagctactcaggaggctgaggcagaagaatcacttgaacccaggaggcagaggttgtagtgagctgagatcgtgccactgcactccagcctgggcgacagagcaagacaccatcttgaaaaaaaataatgataatgtttgcttttgattgaatataaaatggatcttcccactaatttatactatagagaaaatgacttttttagattctttttttttaagagttaggctaaagaaggaaaactgaacaggattacttgagatattctgaaagaaagagtgttaaaaaggtacacacccccattttttctgcttttctcagcctggagtcacaaagcaatcattgggctactctacaaaatgccccactctcctgttgaaaaagcccttcagagctag

SEQ ID NO: 90429 - DNA, 2174 bp, Homo sapiens
ggtatgatagagctggcagaaatgtatatgaagtgggtaacactaagtaccatttaaaacatactttttaagtgcttcacatattttaccaatttaatctcattttacagataagaaattgagaccaaggaattaaacaggtttttccagatcagtgactccagcattctctaataatggccatagagaaccagtgaagaaaaccttgttttctttaaaggacttagcaccatgtgtgggacagaggaagtgctcatataattgttagttcccttacttgcccttgcctattatgggctgaaaaggagaaatccaggagctaaaaggatgggaatgccacagtggcatatttcactggggcactatcacaagccttacagttttgggggccataagcagttaacttgggatgttgtctcctgaaaattgttgcctataagctgtggctgactctgactcaggaatactcctgttttgaacaaaaatgatcaatccaaagtcaggagaccatgattcctcattaatggagtcctccacgaggcgccgtaccttaaaaagctgcccaactgttccttccagtggaaagatggtaggggctcagcattgcaatcctatgttcaaaatgaggacttgagctacggaatgcgttgctggatgagaagttctgcctatgctgacagttttaaaacaatactctatttttgattccaataccatatgatactagggaagccttgaaaaccagaaacatttttcacccaagtccacggcaaagttcaagaatgactccatggctaatacttaggttgcaaatcgataaatgagctcctctcggatccaatgaattgaattgaaaaataaaactataattacagtaggaagagtgcaataaaagatgaaaacccaggctccaagcccctatttttcttttgttcaaaacaccattattggtttcaaatatgcttgtctgtcaacaggggttagtatcctatttgcctaaaggcaagaggcttgatctgatggttttctagggccccttcctggtctaagaactctaatctaatgtggttttactaaacccagagctctccaaaatcatgactttcgtcttaattgcctgcaggaacctgggggttaccctcaagctctcactgaataaatgatacctaaagtaaatgctgaaaactgcctttcctatttatgaagtgcgtattcagaataatatttcttttttcttcaaatttgattaaagtagccattccattatgccttttcataagggagtcacattgaagtcataaaaatgttactggaatcattttcattccaacaaattagatattaatgagggtttatccttacaattgaagaaaggaactaattcattaggaaaatgagtaacacatatatatgcttatcaagggaccctaaaagaaatactttcatatgaaagatgtgtttttatatcctaaaattatttccaacatttggtatggagccaaggcaattcagtaactttgccatttatagcaaagtttaggccaagttgcggggcacacaaaaaagtatacttgcttgacaatttaagtccatagggccaatctgaatgtccaggcaggaagggactttgtctcaccgatattctgagctctttgaaaatgaaggagagtccctatatttccacaggtgtatagctcgcagagaacttacagggggaaaaaaaaaagccataagcaatgaaaaataaagttcagagaagaaacatctcagctcctaaaagagaaatcgaaaagawaaaagaaaaggacagtcactgatatacagacctatcttctcacttcacttgggaatatatgaagactagaagggagtgaaagtagctaaactagggaagagaaagaaggtgaatccattcaccatttgagaaaacatctgcctgccaagcatagacaattcagttgtggatccagaaaattcctttccccatcaaatttaagatgagacttttatttatttattattttattttatttttgagatagggtcttgctctgttatccaggctgcagtgtagtgctgcaatcatggctcactgcagcctcaaactcctgggctcaagtgatcctcctgccttagcctcctaaagggctgagattacaggtgtgagccaccac

SEQ ID NO: 90430 - DNA, 667 bp, Homo sapiens
ctgaattaattaaaattagagatgtaactatgtgggaagggagaaggagaggaggcaaagctgtaatgtagagagggaaatcctcacctgttgaaacaggaagtcaaaagataatgtctaaaatgaaccaaatttagcatactgcaaaataggcacacatattcagagatatgaagacaacttccagaagaaacaattgggttttctttgagatagggtcttgctctgtcacccaggctggagtgcagtggcacaatcattgcttactgcaacttcaacttcctaggctcaagtgatcctcctgcttcagctatctgagtagctgagactataggaacatgtcaccaygcctggctaatttttgtgtgttttgttttgttttgtaaagatggagttgcatcatgttcctaggcttgtctcaaattcctgggctcagacaatccacccacttcaagcctcccaaagtgctgtgattaaaggtgtgagccattgcgccttgccctagaagaaaaatctaaagagcttttctttagggtttatgaatagaagagaagtacaaccggggcaaggataatcatttttaatgatattaaatatatccatacactgtatatacatacacataacacacacgtatactacgcctccagcttctataacttttaaa

SEQ ID NO: 90431 - DNA, 679 bp, Homo sapiens
ttttctttttttgtaagtatcagtttggtgaaaagtatgtttttctgtagtcgctgttgtcaacagtttgattataatagtaccatatttttattttatatttatataaaataataatattagaatatcattcagtgcttatcctgttgttatctcatttccttcctctgcagctttgtgaggtaggtatttgtattcrtgtcacagataaggaatctaaggttaggttatattgctaaaatgtggcagaactgaagcctaaacacatatgctacatttatggttttccacaggctgcttgagacctaatgccctatgttttatatcatctacatcccccttttgtttattaattcagcaaatatttactgattgcccactgtatgtcagatattattctcggtcagggaaataagtcagtgtacaaagcagaagaaaattcctatccttatgcagtttacattcttgggagcaagggaagaacagtaaagaacgaaataagtagataaagtatgtggtatgttattagttaatacaagccatggagaaaactgaacagggaaggggataaggtatgtgggcatgtaggctggtgttggagttttagagagcattgtcggaaggctcacttagaatgtggaatgtgagcgtgctcttgacagacacaagcatgaggctg

SEQ ID NO: 90432 - DNA, 679 bp, Homo sapiens
ttttctttttttgtaagtatcagtttggtgaaaagtatgtttttctgtagtcgctgttgtcaacagtttgattataatagtaccatatttttattttatatttatataaaataataatattagaatatcattcagtgcttatcctgttgttatctcatttccttcctctgcagctttgtgaggtaggtatttgtattcgtgtcacagataaggaatctaaggttaggttatattgctaaaatgtggcagaactgaagcctaaacacatatgctacatttatggttttccacaggctgcttgagacctaatgccctatgttttatatcatctacatcccccttttgtttattaattcagcaaatatttactgattgcccactgtatgtcagatattattctcggtcagggaaataagtcagtgtacaaagcagaagaaaattcctatccttatgcagtttacattcttgggagcaagggaagaacagtaaagaacgaaataagtagataaagtatgtggtatgttattagttaatacaagccatggagaaaactgaacagggaaggggataaggtatgtgggcatgtaggctggtgttggagttttagagagcattgtcggarggctcacttagaatgtggaatgtgagcgtgctcttgacagacacaagcatgaggctg

SEQ ID NO: 90433 - DNA, 673 bp, Homo sapiens
ccagaacatacagcaccttctgtgctctatccatttgttccctggccataaggaaaggcaaattagtgtgctttcatgagctccatcaactttcattccttagaaatgcacactctgatggggcattggaactggctcaggcaccagagcggcaggacaccctgcaggcaagttcccagaatgtctgggggctgtgctggcctgggagaggcagagccaggtgcgatggagaagagctgaagagaagctttctaataaagtgggtgtaaatataagactggaaagaagctgtaagatagccagaataacagctgtatttattcctttatttctttacratgttttatttataagaattctttcttttattagtgaaagttacatttaattgctttaccaagtcattttccaactagtgttgtacatattaaatcacctgattataaaagatgtatggggtggagggagcaggtgttctgtgctcaaataattttggaaaatgggtgtagcattaaatgggtttctataaaggtaggactacgtataatttaatatgctaataactggaatccccaagaaaggtgtttacttgagtgaatttcctagacaatctgacctgcttttattgttggctcttctaccacaggcagggcctctgttcagtcaacacaag

SEQ ID NO: 90434 - DNA, 1275 bp, Homo sapiens
tgcacagggaacataaactcacaggacacctgcaggcaagggcaccctggaatccctgggaaccccggtcacaatggtctgcctggaagagatggacgagacggagcgaagggtgacaaaggcgatgcaggtactcacctgacggcttcggctgcctttgagcttctctcttcattactttcatctcattcactcatcatctgtgtggggtttccacctacccactcacaacccatccatccatccacccagcaacattcactggagcctgaccccattcatccatccacccatctgcccagcaacactcacggggtctgctccatgccagactctgtgccaggtgctggtggagagcacagggccagatcgccatgacccctgccctcctgggttctctcatctctgacaccgcaggacattttcagtagtatacaatgtcatggatcctcccacctcaggtgacaggtatgttggatttttggcaacacgaggccaatagagagatctgatcatgaattatttggcagcaagcayccagctgcagtgcaggtgagagctaataccatatcatgtcatgaagcaggagatgcggagtgacagatgacacatacagctgctgcttatgaatctatgacctaggcagggtctggggatctggggacagaatccatcctctgggagggagatttgccaaagcctggaagtctgagtgctttccataacaacaaccaatagacttggtttctgaatggggtaccattcttgaggcctggtcttgaccatagggtcacatatctaagacttatgcagaatgattcactgggttaagagcacagttcagtggcattagaaagaaaatatcaaaacttctatggacctttttacaaataagtttgtgtttctaacatgtctcactttatggcatttggtggcctgatagttttttgaatgggctggatgaagccaagggtcaccaggaagcaactttatttctttctaaccggcacatctgctctgtgaggtgtcttctcctggctcctcacatctccagctcattgagactgttccagtcccccggtagcaaatagcccagtccaaatgaatactaaaaccttacccttaatgaaatcaggtcttctgccctcacactgtgaccacagtggtgtgtgtgtgtgtgtgtgtgtgtgtgtgtatgtctgtgtctgtgtgtattttatttctgaatgtttaggattttcattttttaaatttttgttataaaatattacacat

SEQ ID NO: 90435 - DNA, 606 bp, Homo sapiens
tgaactaatttatacccccgccarcagtgtataagcattcctttttctctacaacctcaccagcatctgttatttttttgactttttactaataaccattgtgactggtgtacaatggtatctcattgtgattttgattttttagctttgattttaaagaactgatgaggtatttgtcctgggtgtcttggcccatggcactggccatgcctgattggtgttacgagtccatccacctggccacatacacagagcacccagacctcccctctcctgggcagccttggacacccagtccatgaacttcccttgcatctttgaaacccacaagcagcgatacttccttccccgactccacaagggaagatccagtttcagggagacccaagctatggagggcagtccctctgtgcatcttcctatccccctcacacctcctgccacacctgacagggcttggtggcagtgagacactgttttctctttgtccaggaacaacccctgcttttccagtgaaggtggggagtagaaatcaggcattaaagcttgcttgtgtatcacccagactttatgaatcggaggaaagacagaatcatttaagtgaaa

SEQ ID NO: 90436 - DNA, 606 bp, Homo sapiens
tgaactaatttatacccccgccaacagtgtataagcattcctttttctctacaacctcaccagcatctgttatttttttgactttttactaataaccattgtgactggtgtacaatggtatctcattgtgattttgattttttagctttgattttaaagaactgatgaggtatttgtcctgggtgtcttggcccatggcactggccaygcctgattggtgttacgagtccatccacctggccacatacacagagcacccagacctcccctctcctgggcagccttggacacccagtccatgaacttcccttgcatctttgaaacccacaagcagcgatacttccttccccgactccacaagggaagatccagtttcagggagacccaagctatggagggcagtccctctgtgcatcttcctatccccctcacacctcctgccacacctgacagggcttggtggcagtgagacactgttttctctttgtccaggaacaacccctgcttttccagtgaaggtggggagtagaaatcaggcattaaagcttgcttgtgtatcacccagactttatgaatcggaggaaagacagaatcatttaagtgaaa

SEQ ID NO: 90437 - DNA, 607 bp, Homo sapiens
ggatcacytgagcttgggagttcgagaccagcctgggctacattgtgaaaccccgtgtctactaaaaatacaaaagttagccaggcgcagtggcacatgcctgtagtcacagctactcaggaggctgaggcaggagaatcacttgaacctgggaggcagaggttgcagtgagccgacattgcgccactgcactccagtctgggcaacagagtgagactgttaaaaaaaaaaaaaaaaaagaataatggatgatattctggataagtaatctgagtgactcttcaacataatatatttcagttattacggtggcagatttgtgatccaattaactacccatccattaatctacaaagaattgttctgggaattatgtagacttggccaataacatagagaggcataccctaccacgtgatagcataatccatctatggctgtgtattttgggaactgggaatgattagtagttcagtgattgctccctgcctgaggtgcttagagccctgtgcacaggcagggccacgagggccctgggggaactggggaggctggggaggagaagtgcaggaggaaggaggtctgggaaaaagagaagcggcattcg

SEQ ID NO: 90438 - DNA, 1064 bp, Homo sapiens
ctcttagttgatgtttaatttaaaaaattcaaataaagtggagaatcattaaaaaatggtccatgcatcccttaattgttttattttaccttaaaatatataaacatatgttcattcactaatcatgttatgtaagacaggagtcagaaaactttttctgcaaaggccagataataaatacttttgggtttatgggccatatagtctctgctgtaacaactcaactctgcctctgtatttagggaaaactgccatagacaatttgtatattaatgggcagactgtcttaggaaaatgttatttacaaaaactgcagaagtgctggatttggcctgtagacccctgatgtatgagtttttcttgcataaatcgctcataatgcattgtctgcaatttgtagtttgatttctagatcaaatcaaaatgagaacttatcctcttatcaagcagtcttagggcagacccttagtttttatgacttttccctggtcctttctttatagctgtcctttgcaagcctctgtagagtctttccaagcattaggcttaggtttttatagaaagaactctctctattcacaatagtctttcattggcatttaggtgatagctatttatataatgatagtattaagtagaacttttataaataagtttggtaaccggcacaagcgagtcttggtgagctgtagttcacagtcaatagcggactgtagggagtagccctgagtgttcagtatgctgtgaaagggtttttgttgttgttggttttttttttttagggaacttatagaaatgctggcaatttcaagaaaccaaaagttgttacaggctggagaggaaaaccaggtaagtggcttctttttaaattagttaatttctctttgttttttaattaaaagaaaaaaacttgatttctgcaagtttcctctttatatttactttgtgtgggaacaggaatgttggatccttttaagttattaattaaaacttyaaaattggtattttctttgtatcatttacttaagataacagtgcgcttaagaagaatagttgcctgaggg

SEQ ID NO: 90439 - DNA, 582 bp, Homo sapiens
tggctttaatagacacagccctgaccagaggggtgtaaagccatcctgggatgtggggctggggggtggcaggaaggagagacatgggtgatggcagcagagacacaacaaataagagattttgaggccctgcccttgggtaggcctgaggccaaagggcacatagtgccataccttagagacccctaatttgagagagaaacatattctmtcctttggggagcccctaatctgaggcggggggtgcagcctgtcctgagggaaccccagtctgagagtggaacacagccctgctttcagggactcccagtctgagagagagagacatagccctgcttctgtgagcccacatctccaagaaaagacaaaatataaaactaaaacaaagcaagctactagtggtgggagggtggaagacatcaacgctgtagtgtaaatagctgtatgtccaacagagaaacctagagagagttccttcatcgctggcggtgagagggaggcatctcagcagagatggagcccctggccatgggcaggaagagacgtggggacaagcagcaggcagggacatgtggcagaagg

SEQ ID NO: 90440 - DNA, 532 bp, Homo sapiens
gaagttttcttttgtggtctgtgtgtctttaagacttgaaggctgtggggacctgactggggaaaattccaaccagtgggttcctttgaaatggaagtgacatctagtggtctgaaaaagaactgccaagttgaccccccccagccccaggctgcccctggggtcccttccctggccccaggtcactttcctgctgggccacaaccctgcttgagggcagtctaagtcctgacagtgggctyttggtggcagggtgactctcttggccctgcccaggctggaacccaggccaggtacctgcactcaggtccagacacagagaggccaggcccagggcagccagaagaggcccaaatatgccagggctgcaacatcgcgtccccaggtgaggtggaatccttgggtctcgtgtctgttgattctgaggagccctgtcctgagtcttccacagaagtcagagtgctgtgcaggcctcagtgctgaatcatcctgtggccaggctgctgttatgcaatgatcccgccgtgggtcc

SEQ ID NO: 90441 - DNA, 726 bp, Homo sapiens
gcaattctcctgcctcagcctccccagtagctgggaccacaggtgtgcaccaccatgcccggctcatttttatatatttttttagtagagatgaggcttcaccatgttagccaggctggtctcgaactcctgacctcaggcaatccgcccgcctcagcctcccaaagtgctgggattataggcatgaaccaccacgccaggcctgtatatttcaaaatagctgagagaggacttttaatgttcctaacatagagaaatgataaatgctccaggtgatggacaccccaatactctggcctgaacattacatgttacacgcatgtaacaaaatttcacgtgtacctcatagatatgtacaaatatgtatccattttcttaatttaatttttttttttaaagaagggtgtcagaaagccaaaattagatgctgcacagcaaggtttgagttaagggcagtgctggaaaacagaacaaacccttgtgaycatgcctctcagccaggtcagggacccattcctgcagtcaacagctgggaaggcgtggaacctgggagggggcagcctggggaggggaaaaggccgcttggaggtggaggggaggcctcctcgctcaccacccaatggcagagatgaggcgttggaggagcagagaggaaaagtccctgtgccgcagcagctctctgccagtgcgcatgcgcacatgtccgtgaagcaccgcgctggggtt

SEQ ID NO: 90442 - DNA, 648 bp, Homo sapiens
ccaatctgaggatggctttaccaagcgtgcacaagcccctccatgggagaaaaagaagtgatctcgattcagarggtggactctacttgagctccttaggcaggtgtgaaggtcgctagggcttgttctgactccataagcaaaagcagcagttctctgagagcctgacctcataaaaggatgggcgtggtgggagacagggctctccttccctcttccttctctttcactcattaatcttcctggacttttccaacttcctgcattcccaggagacaatacacctgatgtgcaagctcagagcttcttttgtttgattgggctttgattttgtttctaatacattttcctctgcaggaagaagtctaactccactaatttattctagggaaccatcaagtgacatccaacagtgtgcattcagcacagcaagagggctgcagacacagagcccaggccacaggctgtccagctcaccccaccacactgattacaggacagagcttctgccttccagctctgcgagaatgatggtgccaatgagatgggtggtcagggaaagcagagccacatggagggcatggcctgtgtaccctgcagaggccatggcagggcctggttctggctgctgcaactatatcacaaaca

SEQ ID NO: 90443 - DNA, 718 bp, Homo sapiens
gggatcccacaagtcaacctgaatccctggcttcagagagcaccactcactacccctctctccccagcccccacaactgggaacagctggcccctgagcgggtagctcagtgcaaagctatctggctgctgaatgaaggctgacctcatagctgcctgccatccctgcccataggagcttttcctgcctcagttctggctgccctaaacacctgtctctccctgggcccagagccttcactgtctctgtcagctgcataggactttgtagcatgtcacctcctggacttyacattccttcatggaaggctccaaacttcagtgctaaagtaatgggcactttgttacttatggggtctagggatagaagatgggagaggatctttagccttctataagtaaggggacgacacattttcacaaagagagatgtaggtatagaagttttgtttctggggacttggaagcaaaggtgtgcacacagtcagcccagaattgggacaacaaaaaagcctcagaccaacaaagacatgggatgcagctcaagaatgagtcccacaatatgagcagcaaatcagggtccctgaaaactcttctaggttgattcattcattcagaaggggccaggcaggagagggcaaactcagagattctctggctggagaagtcgctgctaatgactgtctagttcaagcaacatgccaggttgtgatggagaa

SEQ ID NO: 90444 - DNA, 1792 bp, Homo sapiens
cacacacacatacacagataataagcagttccaacaactgctgagcccatctatagaaaaccttcatctgttgttgggcttacatttcccctcgaccgcccagcatcagaatcctcgccccacagttggggactccactgctgttgagtcctgctcagcagggcagccaggccagatgcccgccctgcctgaactccggccagggaaccactgcaggtgctcacaggggtccagtgctccctgtggaggcagcatccaagatccaggctgctcatgggtggtgatatcccctgtcctggctgcatagcttcttccccttgttcctcactgtcttttaaacacagatatccacctgtgttgggggttatgacagcaacctgacaccccttccaatgaggtcgttccctgagtcaaagaggctacttctactctttgcaatcaagaactctggctttacgcttctacttgattataagcctctgccaggacctccctctaacctcctacacacaaaccaacgctatgaccttctaaccaacttggcgtcaatagaacaaatgaggtttaaagagctactggaactgaaggtaaggacagaggatgacccctgaaaatacacaagaatatcactttcattagacctaaggcagggttcctacaacccaaccccaaaaagaggcttgtttacctgcatagcttccacatggctctgactggtatttaagacaattaagtaaattgtcctttactttaagtcatgacgttggataaacagcatggtttcaaccaaatgtgactgacaaacatttaatgagagaaaactggtagagaaaagttaggtggcatggacacaaaagacaatgcctgttgatatatgcatgtctttaatcaacaaaataaaagcttagctgaccaagcattccaatttgaaaaaggtaatcctggttttttacataatcacagattttttttagctgaagtagaaatatacaaatctaaatcctttcagtgtagataaataggtaacaaagatcaaaaagtggtaagtaatttggctaaggacatagctagttcatgataagactaaggaccaaaggggtaacaacattcattctatgtgcctgttactctgccaggtatattatataaagtgtccattttaactctcatcacaaatctgtgacagatatattatactcattttataacacagagaatgacagtcagaagtaaaacgtcccatccacagagctcctaaaaggcagagtagagatccaaaactctatttattaatttctaaagttaatcttactcccttcctggctttagggtttggggaatggagaatgattctttgttgttgttgttgktggtggtggtggtggttctttgttgttgttgttgttggttctttgttgttgttgttgttgttgtcgttgttgagatggagtctcgccctgtcgcccaggctggagtgcagtggcgcaatcttggctcactgcaacctccgcctcctggcttcaagcaattatcctgcctcagcctcccaagtagctgggactacaagtgcatgccaccatgcccagctaatttttgtatttttagtacagacggggtttcggcatgttggccaggatggtctcaatctcttgacctcgtgatctgcctgcctcagcctcccaaagtgctgggattacaatcgtgagccaccgcgcccatccagaggatgattcttaactttttctgtgtaccctgtatgcctctgcagtttagccaaattgatggacccctt

SEQ ID NO: 90445 - DNA, 637 bp, Homo sapiens
gtgtgcccagtagataccacataaacactctgaggcttgattttggtttgaattgtgcagactaggagagagaaaataatacaaaactgtccccargcagaaagaacagcttcaccattttgctcaaaagtgagccagtaagtggaaagaaagggtcacaaaacaagcctgtatctcagtttcacaaagattgaataattttgatgtgagtaatactaaaaaggagacaatctcgttttagcctctatggttctttaaactggaaaggtatttttaaaaacaagcattctgtattcgcccttaaatgttgaattttcaattagagagtgtatccaggtaccatgaacaacagattgtgcatgtttttaaatactctgtgactcacaagtagaatcttgattactaaaaaataaattttaaaaaaggtaagattttggggtgggatgatgggcatattggttggaaggccaagaattgctggagagaggtagagtattggaaatgtatgccatctcttctcaattctaaattatcatttaatgtctaggtgacaaagttcagaaaaatatgaccctaattttttattcaagcaaatgttctttcccttatctaaaggagcaagaaggtgtccactctc

SEQ ID NO: 90446 - DNA, 637 bp, Homo sapiens
gtgtgcccagtagataccacataaacactctgaggcttgattttggtttgaattgtgcagactaggagagagaaaataatacaaaactgtccccaagcagaaagaacagcttcaccattttgctcaaaagtgagccagtaagtggaaagaaagggtcacaaaacaagcctgtatctcagtttcacaaagattgaataattttgatgtgagtaatactaaaaaggagacaatctcgttttagcctctatggttctttaaactggaaaggtatttttaaaaacaagcattctgtattcgcccttaaatgttgaattttcaattagagagygtatccaggtaccatgaacaacagattgtgcatgtttttaaatactctgtgactcacaagtagaatcttgattactaaaaaataaattttaaaaaaggtaagattttggggtgggatgatgggcatattggttggaaggccaagaattgctggagagaggtagagtattggaaatgtatgccatctcttctcaattctaaattatcatttaatgtctaggtgacaaagttcagaaaaatatgaccctaattttttattcaagcaaatgttctttcccttatctaaaggagcaagaaggtgtccactctc

SEQ ID NO: 90447 - DNA, 702 bp, Homo sapiens
tcttactgagataaactttaaagccaagttataggtgaagagaagaaaggcaatactcatttttctacttcaaaattgccacaaatgaaaaatttattttgtgtctacatcagattaaatagctgaataaaaacataaaaattaatgattatccagttttatctagtttttaacgtagatgcctgtttcattgtctacaaaatcttacccaattgtctgtcttgctgccaattaccatgtaagacccttggrcatagacagtgtactgccacttttttttttatgccatttaaccatatggttaaatcagtccactctggtttataagatacctgaaatacctgggtccttagcgaggtcaaccagtcattttggctaccatatcaactgattcagactggctgagatacaattccatgaactctgtggtgcacatatgttgttataactgaaaacatcagctgtcaagtggtctactctggtcattcagcgctagatgagaaagcatatacaaatcagccagttcacattgtcaccatggtgaccattccactaaatggaaatcctgacaaatgcaggtcataaggttgtgtgttgttttaaaagcatgagtaataaaacatatatttatataacagatttggtctcactgggagttgagttatgtccctgatgtgtggccagatgttttatatcactctc

SEQ ID NO: 90448 - DNA, 702 bp, Homo sapiens
tcttactgagataaactttaaagccaagttataggtgaagagaagaaaggcaatactcatttttctacttcaaaattgccacaaatgaaaaatttattttgtgtctacatcagattaaatagctgaataaaaacataaaaattaatgattatccagttttatctagtttttaacgtagatgcctgtttcattgtctacaaaatcttacccaattgtctgtcttgctgccaattaccatgtaagacccttggacatagacagtgtactgccacttttttttttatgccatttaaccatatggttaaatcagtccactctggtttataaratacctgaaatacctgggtccttagcgaggtcaaccagtcattttggctaccatatcaactgattcagactggctgagatacaattccatgaactctgtggtgcacatatgttgttataactgaaaacatcagctgtcaagtggtctactctggtcattcagcgctagatgagaaagcatatacaaatcagccagttcacattgtcaccatggtgaccattccactaaatggaaatcctgacaaatgcaggtcataaggttgtgtgttgttttaaaagcatgagtaataaaacatatatttatataacagatttggtctcactgggagttgagttatgtccctgatgtgtggccagatgttttatatcactctc

SEQ ID NO: 90449 - DNA, 662 bp, Homo sapiens
ccaaaggaatttgcactgtagtagaaaagggacatcttagaactatgctgggatcaaaactacatctttttcattccaaaagactttttaaggacaagtttctgttgtgccagacttcctacaaattcctgtgggcttgggcatcactaagggatggtcccataatgaagagggcactgagttttctttaagtctcatttgtcaagcctgaacagaagagagaatgtaggagtagaaataaatgaaaagaactctagtccctccaggctggtcaatgagacagcctttggccggggatagccagaactaagcagccagctgcagccactaaggtccagggctggggagatggaataccagctgtctttttctgtttgtattgctataaaggaatacctgaggctggataatttgtaaagaaaagagttggctcatctttccgcaggcaccagcatctgcttctggtgagggcctgaggctgtttccactcatggcaaaaggcaaaggggagccagcatgtgcagaaatcacacagtaagagaggaagcagaggagagggtgatgccaggctctttttaacaacccagtgctggtgggagctcacagagtaagaactcayccctccctcccagggaggacattaatctactcatatcatgagg

SEQ ID NO: 90450 - DNA, 1219 bp, Homo sapiens
aattttgaacacaaaaaaactttttgtcttgcagtaagtagccagtgaacatatttttgtttattttagaatttttttagaattatagaatacaagtttttcatgttctggacatctatcaccatttgacttcgactaaactgtaaatggtataggaaattgggctgattgcttattgatatctgtcatgacataccctgagattttctttcttgattaaacccttactatcacaaagctgtctgctaacttgcctctttcttctaaaaattgagtatggatactacaatggtagacagataacattgtacatttatccaaacccttcaaatgtataataaataccaagagtgaaccctaaggtcaaatatgaactttgagtgattacaatatgtcagtgtaggttcaccaattttaacaaaccactctggtggggaatgttgatgacagaggaggctatgcacgtgtggaaggcagggagtatatgggaaatctgtatctttctctcaacttttttgtgaacctgaaactgctctacaaaataaaatgttcctaaaaaatggatagagaaaaatgaatttcaatgtgtgaatgtttttgattaactatactcaaattaattggtgtgttattgcttcacgagaaacaatacatagggaaagaaaaaggcagacccaaaatatttttttaaattaaaatcastgtccaattcacaatcataaacaaatactgcaatactcaattaattgccttctttcaaaattctttccaaaagtttccacaaactagttgtcactgtataaaagaagttgctatatgtacaatggtaaccatgttatccttcatattatctgcataatgcatgcttaattcattcttgtgcaaaacataattggaatgtagcaaaatttagcctctccaaagcatcattattatatgaaatgcatacagtcaaagcatagatactgccacagtgggggaaaaaaggaagaaaataaagagaaaaatagaatttggttgctattatttgaggattgcatgaccactaaatccgtcataaatagttttaaataaactgtgtgacttacagaatcctagccttcctagtttgtgtccctactttatggccaaaaggtggcactgttccatttattatgagtttggcatctagtccatggtgctgtagtcagtcactctgtaatgttcactgaaactagca

SEQ ID NO: 90451 - DNA, 1219 bp, Homo sapiens
aattttgaacacaaaaaaactttttgtcttgcagtaagtagccagtgaacatatttttgtttattttagaatttttttagaattatagaatacaagtttttcatgttctggacatctatcaccatttgacttcgactaaactgtaaatggtataggaaattgggctgattgcttattgatatctgtcatgacataccctgagattttctttcttgattaaacccttactatcacaaagctgtctgctaacttgcctctttcttctaaaaattgagtatggatactacaatggtagacagataacattgtacatttatccaaacccttcaaatgtataataaataccaagagtgaaccctaaggtcaaatatgaactttgagtgattacaatatgtcagtgtaggttcaccaattttaacaaaccactctggtggggaatgttgatgacagaggaggctatgcacgtgtggaaggcagggagtatatgggaaatctgtatctttctctcaacttttttgtgaacctgaaactgctctacaaaataaaatgttcctaaaaaatggatagagaaaaatgaatttcaatgtgtgaatgtttttgattaactatactcaaattaattggtgtgttattgcttcacgagaaacaatacatagggaaagaaaaaggcagacccaaaatatttttttaaattaaaatcagtgtccaattcacaatcataaacaaatactgcaatactcaattaattgccttctttcaaaattctttccaaaagtttccacaaactagttgtcactgtataaaagaagttgctatatgtacaatggtaaccatgttatccttcatattatctgcataatgcatgcttaattcattcttgtgcaaaacataattggaatgtagcaaaatttagcctctccaaagcatcattattatatgaaatgcatacagtcaaagcatagatactgccacagtgggggaaaaaaggaagaaaataaagagaaaaawagaatttggttgctattatttgaggattgcatgaccactaaatccgtcataaatagttttaaataaactgtgtgacttacagaatcctagccttcctagtttgtgtccctactttatggccaaaaggtggcactgttccatttattatgagtttggcatctagtccatggtgctgtagtcagtcactctgtaatgttcactgaaactagca

SEQ ID NO: 90452 - DNA, 649 bp, Homo sapiens
tcattttccttccccagagttatccactattaccagtttgtgtgtgcccctctacagatagcatataatcatatacataaatattatataatggtatctatataaatatatatgaatataccatgttacacaamtaaaaatagaatatgctcatcacaccttgcatttttgccagagtgaagtttgtaaaatattaatctgattatgtcaatctcaaaaggttcaggtggcttcttattatcctcaaataaaattcaaattcccagatttgaaggtcctccatgctctggcttcaattgatgactatctgcattctcttctagtttcttgtcctcatgtgcccttcgcttagccacgcctagtgccttgctattccccatacaagcaatgctctcaattatccatatatttatgcatgcattccatgtgcataaaatattctttcaatatatatgcatttattgattgaatgaatcatcatggtcaactaatgactgcagtttgatgttctttctaaaatttagtttccttcctctctcttctatgcagttaactatcaattttcatagctatagatgtgtctgttttggacagcatccactgataccactaaaatacctatgtacttgaaggtaaggtaggtataatg

SEQ ID NO: 90453 - DNA, 649 bp, Homo sapiens
tcattttccttccccagagttatccactattaccagtttgtgtgtgcccctctacagatagcatataatcatatacataaatattatataatggtatctatataaatatatatgaatataccatgttacacaaataaaaatagaatatgctcatcacaccttgcatttttgccagagtgaagtttgtaaaatattaatctgattatgtcaatctcaaaaggttcaggtggcttcttattatcctcarataaaattcaaattcccagatttgaaggtcctccatgctctggcttcaattgatgactatctgcattctcttctagtttcttgtcctcatgtgcccttcgcttagccacgcctagtgccttgctattccccatacaagcaatgctctcaattatccatatatttatgcatgcattccatgtgcataaaatattctttcaatatatatgcatttattgattgaatgaatcatcatggtcaactaatgactgcagtttgatgttctttctaaaatttagtttccttcctctctcttctatgcagttaactatcaattttcatagctatagatgtgtctgttttggacagcatccactgataccactaaaatacctatgtacttgaaggtaaggtaggtataatg

SEQ ID NO: 90454 - DNA, 531 bp, Homo sapiens
ctttgggagcttgaggtgggaggatcacttgttgcccaggagtttgagatcagcctgggcaacatggtaaaaccccatctctacaaaaaatacaaaaaaattagcyaagatcacaccactgcactccagcctgggcaacagagactgtctcaacagaacaaaacaaaacacacaacactaagttgtatactttaaaagggtgaattgtctctcaatacagctattgtgactaccataatcttccaagtttgtcttgattcatttttaaagtataaaatgctgttttttataggttagaaacaaaatatatagcagactgttgtcacttcattctccaaatagttattatggaatcagatcaccacaggagttattcaaagcatcaggattgacacaggtaggaaattgtaatagtctctaatgaactgttctgctcttcattttaagtaaaacttgacttcttctgattatattcctttgatttttacaactactgttcttccattcagactgatcttttgaattatcttt

SEQ ID NO: 90455 - DNA, 531 bp, Homo sapiens
ctttgggagcttgaggtgggaggatcacttgttgcccaggagtttgagatcagcctgggcaacatggtaaaaccccatctctacaaaaaatacaaaaaaattagctaagatcacaccactgcactccagcctgggcaacagagactgtctcaacaraacaaaacaaaacacacaacactaagttgtatactttaaaagggtgaattgtctctcaatacagctattgtgactaccataatcttccaagtttgtcttgattcatttttaaagtataaaatgctgttttttataggttagaaacaaaatatatagcagactgttgtcacttcattctccaaatagttattatggaatcagatcaccacaggagttattcaaagcatcaggattgacacaggtaggaaattgtaatagtctctaatgaactgttctgctcttcattttaagtaaaacttgacttcttctgattatattcctttgatttttacaactactgttcttccattcagactgatcttttgaattatcttt

SEQ ID NO: 90456 - DNA, 531 bp, Homo sapiens
ctttgggagcttgaggtgggaggatcacttgttgcccaggagtttgagatcagcctgggcaacatggtaaaaccccatctctacaaaaaatacaaaaaaattagctaagatcacaccactgcactccagcctgggcaacagagactgtctcaacagaacaaaacaaaacacacaacactaagttgtatactttaaaagggtgaattgtctctcaatacagctattgtgactaccataatcttccaagtttgtcttgattcatttttaaagtataaaatgctgttttttataggttagaaacaaaatatatagcmgactgttgtcacttcattctccaaatagttattatggaatcagatcaccacaggagttattcaaagcatcaggattgacacaggtaggaaattgtaatagtctctaatgaactgttctgctcttcattttaagtaaaacttgacttcttctgattatattcctttgatttttacaactactgttcttccattcagactgatcttttgaattatcttt

SEQ ID NO: 90457 - DNA, 531 bp, Homo sapiens
ctttgggagcttgaggtgggaggatcacttgttgcccaggagtttgagatcagcctgggcaacatggtaaaaccccatctctacaaaaaatacaaaaaaattagctaagatcacaccactgcactccagcctgggcaacagagactgtctcaacagaacaaaacaaaacacacaacactaagttgtatactttaaaagggtgaattgtctctcaatacagctattgtgactaccataatcttccaagtttgtcttgattcatttttaaagtataaaatgctgttttttataggttagaaacaaaatatatagcagactgttgtcacttcattcyccaaatagttattatggaatcagatcaccacaggagttattcaaagcatcaggattgacacaggtaggaaattgtaatagtctctaatgaactgttctgctcttcattttaagtaaaacttgacttcttctgattatattcctttgatttttacaactactgttcttccattcagactgatcttttgaattatcttt

SEQ ID NO: 90458 - DNA, 531 bp, Homo sapiens
ctttgggagcttgaggtgggaggatcacttgttgcccaggagtttgagatcagcctgggcaacatggtaaaaccccatctctacaaaaaatacaaaaaaattagctaagatcacaccactgcactccagcctgggcaacagagactgtctcaacagaacaaaacaaaacacacaacactaagttgtatactttaaaagggtgaattgtctctcaatacagctattgtgactaccataatcttccaagtttgtcttgattcatttttaaagtataaaatgctgttttttataggttagaaacaaaatatatagcagactgttgtcacttcattctccaaatagttattatggaakcagatcaccacaggagttattcaaagcatcaggattgacacaggtaggaaattgtaatagtctctaatgaactgttctgctcttcattttaagtaaaacttgacttcttctgattatattcctttgatttttacaactactgttcttccattcagactgatcttttgaattatcttt

SEQ ID NO: 90459 - DNA, 905 bp, Homo sapiens
tgactcctcacagagccctctctctggacagatgacagttggagcttgagccaggggaggaagagaaaagggagggaattcgggtgcttttaaagagggattgcagcacacccaggcagtggattgttgttttgctggcatgcagcaggtagactctgaaacagcagtgggggtccttctctgccttgtcctgcttggcccagtggaagctgcatacctggggcactgtgctgggcagggaacrcatctctgggagaggctatagcccaatatcccctagccccaggcctagctccagcagcctatgtttggctttgaagatttaggaagaacaggacactatcaacctcctgggccaaccgggcatgtctaggtcctcctgtattgagtaccgtggtgatctgaacacaggaaaaccttgtcctttgcttctctttactgggccactcacatcacacattcattgtcttctgtccttggctggtacacttttattcccccaaacaaatataacattattgttttccctaattacaaaaaggacattaaaaaaatccaggcaacactgaaaacataaagaaaccttgtcgcagaacaatgggtagagtggagtttcatttttacttaaaaaaaaaaaaaagtatgactttgattatacatgctgaaaagaaagtcttaaagactgcatatcagatgttaacagcaaatgttaatagctgagaaatgggactgatgggaaaagagattttcatgttttactttatacatttctttgttgtttgactctcttataataagcctatgttactttgtaacttaaataaatatatgttgaaaacaaaaataaatattatgctgctgagacagccatttttatttggttactatccttctagatatgtctc

SEQ ID NO: 90460 - DNA, 748 bp, Homo sapiens
ttcctttcctccccctttaagcccttcctgtaagcctctgtgctcttctcctgcctgcagtctctctgtcttaggaggaaagttctgagaaactcctcattaagatggtagaagggctgtaatcccagcactttgggaggccgaggcaggcagaccatgaggtcaggagatcaagaccatcctggctaatacggtgaaatcccatctctactaaaaatacaawaaaattagccaggcacggtggcaggcgcctgtagtcccagctactcgggaggctgaggcagaatggtgtgaacccgggatgcagagcttgcagtaagccaagatcacaccactgcactccagcctgggcaacacagcgagactccgtctcaaaaaaaaaaaaaaaaaaaaaaagatggtagatgggttaaatgttaatccccagcctgggtgataggagaattttaaaaggagggctccaccaagaggcaatcctccaaagcaataagttaccaatgataaaattttttagcatcagataaaattggatttttaaaaagaggcctcttatctgtgcctctcaaattgtaccatgtagacaactgttttcctttgttgactccaaactcggctcctgtcccttatagggctgggcctgtaacaaagctgatgagcctccaaaacgtctaagctacagaatgacttactagtttggaaagcagtatttggggatctgatcaccagcaaaaccagctttaatcacacc

SEQ ID NO: 90461 - DNA, 1166 bp, Homo sapiens
atagttgttttttttcttgtcttacctttgcttttcatatcatggtaatactggtttcatagaatgaattagaaattatttcttttattttttggaagagtttgcgaaaagttgatattaattcttctctaaatctttggcagaatttaccagtggagtcatctggtggacctggactgtttgtattgtgtatgttgttggtgggggttaattacttattcattccttttacctgttgcattgtttcttgcttgcagaacatgcaggttgcttgtagaaacacacttacgtaaaaggagagagattctgggaagagtgggcctagcaggaatttggaaatttaggggtttctagttggctctacctgaagctgtgccttctcctctccccygtattatcacatctcagatgaagcagtcttccttctcctgcctgaatgaacactattgaggttaggaccaataactgaagccgtatcttggatggaaaaggtgtgtctgtgtgtgtatgtgtgtgttctgccttaccttaaatattgataaaaagtgaagaaagatacctcaactgttgagattccgagatcgtgaatgacagaccatagtgaactctggaacagccatttaaagaatgagatagctctccatatgctgagaagcagtgatctctgctgggtgctgtggctcatacttgtaatccccgcactttgggaggccgaggagggcggatcacgaggtcaggagatcgaggccatcctggctaacaccgtgaaatcccacctctactaaaaatacaaaaaattagccaggtgtggtggcacatgccagtaatcccagctactcaggaggctgaggcaggagaatcgcttgaacccaggaggcggaggttgcagtgagcagagatcgcgccactgcactgcagcctggcaacagagcgagactccatctcaaaaaaaaaaaaaaaaggtgatctcgtgctcacttcagcagcacatatactaaaattggaacgatacagagaagattagtatggcccctgcgcaaggatgacatgcaaattcgtgaagtgttccatattaaaaaaaaaaaggtgctgtctaagatatataattaagtgaaatctgcagaatagtgtgcttccatttgtgtaaggacaaaacatggaaggga

SEQ ID NO: 90462 - DNA, 606 bp, Homo sapiens
tccrtgtgctgaacgccggtcccatgggcccccttttttctttctctatactttgtctctgtgtctctttcttttccaagtctctcgttccacctaacgagaaaaacccacaggtgtggaggggcaacccaccccttcacactccagcctgggtgacagaatgagaccttgtcaaaaagaaaaaaaaaaagaaaaaaaattctgatcaggccgatgcttgcttgcacgtgctaaccactcactttttgcccaatattccttgttcccacaatataaactgctgatgtgctgtttcttggtcaagcaggaagaggtaactttgtggtcatgaaaaaaaattgcaggccaggcacagtggctcatgcctgtaatcccagcactttgggaggccgaggtgggtgaatcacccgaggtctggagttcaagaccagctgaccaatatggtgaaactccgtctctactaaaaatacaaaaaattagctggccatggtggcgcatgcctgtaatcccagctacttgggaggctgagataggagaatggcttgaacccgggaggcggaggttgcagtgagccaagatccccgccattgcactccagcctggaca

SEQ ID NO: 90463 - DNA, 606 bp, Homo sapiens
tccgtgtgctgaacgccggtcccatgggcccccttttttctttctctatactttgtctctgtgtctctttcttttccaagtctctcgttccacctaacgagaaaaacccacaggtgtggaggggcaacccaccccttcacactccagcctgggtgacagaatgagaccttgtcaaaaagaaaaaaaaaaagaaaaaaaattctgatcaggccgatgcttgctwgcacgtgctaaccactcactttttgcccaatattccttgttcccacaatataaactgctgatgtgctgtttcttggtcaagcaggaagaggtaactttgtggtcatgaaaaaaaattgcaggccaggcacagtggctcatgcctgtaatcccagcactttgggaggccgaggtgggtgaatcacccgaggtctggagttcaagaccagctgaccaatatggtgaaactccgtctctactaaaaatacaaaaaattagctggccatggtggcgcatgcctgtaatcccagctacttgggaggctgagataggagaatggcttgaacccgggaggcggaggttgcagtgagccaagatccccgccattgcactccagcctggaca

SEQ ID NO: 90464 - DNA, 555 bp, Homo sapiens
tggtggctcacgcctgtaatcctagcactttgagaggctgaggcgggcagatcacgaggtcaggagtttgagaccagcctgcccaacatggtgaagcaccatctctactaaaatacaaaaattagccgggcgtggtggcgggcatctgtaatcccagctacctaggaggctgaggcaggagaatagcttgaacccgggaggcagagattgcagtgaaccgagatcaygccattgcactctatcctggacaacagaacaagactttgtctcgggaaaaaaaaatgcttatctgattatcccattgaggacagcctctaacgccataccaaacattaagtgggtaacctcctgcttgatgctgagaattcctggcaacttctccccagtgcctttttccctaatgctttattctcggactggtcagagagtctttgaactcccataaactcctgtgtcattcttgtacacttaccacatctctctgcctctttggcatagtctgggagcagccaggaatcacctctcggctccacctccatagcaactgccctctca

SEQ ID NO: 90465 - DNA, 555 bp, Homo sapiens
tggtggctcacgcctgtaatcctagcactttgagaggctgaggcgggcagatcacgaggtcaggagtttgagaccagcctgcccaacatggtgaagcaccatctctactaaaatacaaaaattagccgggcgtggtggcgggcatctgtaatcccagctacctaggaggctgaggcaggagaatagcttgaacccgggaggcagagattgcagtgaaccgagatcatgccattgcactctatcctggacaacagaacaagactttgtctcgggaaaaaaaaatgcttatctgattatcccattgaggacagcctctaacgccataccaaacattaagtgggtarcctcctgcttgatgctgagaattcctggcaacttctccccagtgcctttttccctaatgctttattctcggactggtcagagagtctttgaactcccataaactcctgtgtcattcttgtacacttaccacatctctctgcctctttggcatagtctgggagcagccaggaatcacctctcggctccacctccatagcaactgccctctca

SEQ ID NO: 90466 - DNA, 2236 bp, Homo sapiens
atgtccctgagtgccagtcaatggggatgccacaaagatagaggagcgaactttcaccattttggtttttgcattgagttcctatctttagctatgttgaatatgaaacctctggtttgttaggtgtttcgtattagcttccaggaaaattctggtccccggactccatttatctctccaccctaggacaaggatccttatctcttaccatagagagccaaagcaagtactactgttacagaaacatcaggggctcrgtctaggtcctgctgcttgccacacagaaagccaatcattgagatgacagaagaaggctttaatcgggtgctgcagccaaggagataggaggagctcaggctcaaatccatctcccagaccaaccaaaactagtggtttatacagcaaggaataaatgtaacaatgtgtaagaaaacaggaactaggtggggaaggaagcaatcatgatgaacgaagggcctggagtctttttgtctggatggggtgatctggtgagtttcagttctttgatactttttttttttgagacagagtctcactctgttgcccaggctggagtgcagtggcacaatctcggctcactgcaacctccgccttctgggtttaagctattcttctgcctcagtctcctgagtagtttggattacaggcgcccgccaccacacctggctaatttttttgtatttttagtagagacggggtttcaccatgttggccaggctggtcttgaattcctgacctcaagtgatccacctgcctcggcctcccaaagtgccgggattataggcgtgagccaccgcgcctggcctgatactttttttgagaggcctgaaggtcatttcctgaggaaggaactcagataaaacaaatgtaagtttcaagctttaagaccagaagggtccatttctatgtgtgtatatatatatatttattttttttaaatgatctatgggacattgggtcggtttcactatctccacctccccatccagggcccacgtggtctctggtctctgcttctctcctgcaactgttccacactccggatctagaccattatcttctgcctgcttctcctttcctgcactctactccccaccggagatggcccagcccttacatctgaacatccagacctcactggcttctttctgtcctctgaaatcttaagttgtgcatgctccactcctatttgtcacctggaatttattgccttgtatggctggttccttccttagtgcatgtctctcatctcagggcacagggcagggccacagtttgatgcccaggtcagaacctggttctaccatatgtcaccttgtgatctcaaacaagttatttaatatctctgagccttggtttcctcatctataaaatgcatagaataatcaatgtactaattgtgtttttaaaaaataaaaataaaatgggtagaataatggtactcactgttctcacaaggatttttttttttttaaagataatgcaggtaaagtgcttaatagagtacctgatacacagtaagagctcccagtaccaatggttccaactctctcctcagtctagcaggggcttagtgagtagcagatgtgatgattgagtcagtcagtggttcttagacttccagatgatcagactcagatgaggagtttggggaaagattcctgcctcttccccctatgcaactgggtcagaatcccagagttgggtttgggaatctgagattctaattatcagccagctttgacacctgcaactgggtcagaatcccagggttgggtttgggaatctgagattcttattaccagccagctttgacacactcagggagactctaccaggctgggtgggccacctccagtgggaaatagggagaaaatgccgacatccacctcagttgggtctttccgcaagcagtcacaggaattccccctcactcaagtccttgttcagtatcgcttcctgggaaggtggctgtctccctccaagcccttcctagtccctcattgcacttttcactccctgatcctggagtgtgtgtttatttttcatcatctgtctctcccactgttcgatgagggcagagacttgtgcccctggcagtgtctaacacatagtatgtggcaagtacatttggcaaataaaagaatgaaccagtctctgttaacccttgctttcccatcacttcacaagatcttgggcagatttcagagctttc

SEQ ID NO: 90467 - DNA, 2236 bp, Homo sapiens
atgtccctgagtgccagtcaatggggatgccacaaagatagaggagcgaactttcaccattttggtttttgcattgagttcctatctttagctatgttgaatatgaaacctctggtttgttaggtgtttcgtattagcttccaggaaaattctggtccccggactccatttatctctccaccctaggacaaggatccttatctcttaccatagagagccaaagcaagtactactgttacagaaacatcaggggctcggtctaggtcctgctgcttgccacacagaaagccaatcattgagatgacagaagaaggctttaatcgggtgctgcagccaaggagataggaggagctcaggctcaaatccatctcccagaccaaccaaaactagkggtttatacagcaaggaataaatgtaacaatgtgtaagaaaacaggaactaggtggggaaggaagcaatcatgatgaacgaagggcctggagtctttttgtctggatggggtgatctggtgagtttcagttctttgatactttttttttttgagacagagtctcactctgttgcccaggctggagtgcagtggcacaatctcggctcactgcaacctccgccttctgggtttaagctattcttctgcctcagtctcctgagtagtttggattacaggcgcccgccaccacacctggctaatttttttgtatttttagtagagacggggtttcaccatgttggccaggctggtcttgaattcctgacctcaagtgatccacctgcctcggcctcccaaagtgccgggattataggcgtgagccaccgcgcctggcctgatactttttttgagaggcctgaaggtcatttcctgaggaaggaactcagataaaacaaatgtaagtttcaagctttaagaccagaagggtccatttctatgtgtgtatatatatatatttattttttttaaatgatctatgggacattgggtcggtttcactatctccacctccccatccagggcccacgtggtctctggtctctgcttctctcctgcaactgttccacactccggatctagaccattatcttctgcctgcttctcctttcctgcactctactccccaccggagatggcccagcccttacatctgaacatccagacctcactggcttctttctgtcctctgaaatcttaagttgtgcatgctccactcctatttgtcacctggaatttattgccttgtatggctggttccttccttagtgcatgtctctcatctcagggcacagggcagggccacagtttgatgcccaggtcagaacctggttctaccatatgtcaccttgtgatctcaaacaagttatttaatatctctgagccttggtttcctcatctataaaatgcatagaataatcaatgtactaattgtgtttttaaaaaataaaaataaaatgggtagaataatggtactcactgttctcacaaggatttttttttttttaaagataatgcaggtaaagtgcttaatagagtacctgatacacagtaagagctcccagtaccaatggttccaactctctcctcagtctagcaggggcttagtgagtagcagatgtgatgattgagtcagtcagtggttcttagacttccagatgatcagactcagatgaggagtttggggaaagattcctgcctcttccccctatgcaactgggtcagaatcccagagttgggtttgggaatctgagattctaattatcagccagctttgacacctgcaactgggtcagaatcccagggttgggtttgggaatctgagattcttattaccagccagctttgacacactcagggagactctaccaggctgggtgggccacctccagtgggaaatagggagaaaatgccgacatccacctcagttgggtctttccgcaagcagtcacaggaattccccctcactcaagtccttgttcagtatcgcttcctgggaaggtggctgtctccctccaagcccttcctagtccctcattgcacttttcactccctgatcctggagtgtgtgtttatttttcatcatctgtctctcccactgttcgatgagggcagagacttgtgcccctggcagtgtctaacacatagtatgtggcaagtacatttggcaaataaaagaatgaaccagtctctgttaacccttgctttcccatcacttcacaagatcttgggcagatttcagagctttc

SEQ ID NO: 90468 - DNA, 2236 bp, Homo sapiens
atgtccctgagtgccagtcaatggggatgccacaaagatagaggagcgaactttcaccattttggtttttgcattgagttcctatctttagctatgttgaatatgaaacctctggtttgttaggtgtttcgtattagcttccaggaaaattctggtccccggactccatttatctctccaccctaggacaaggatccttatctcttaccatagagagccaaagcaagtactactgttacagaaacatcaggggctcggtctaggtcctgctgcttgccacacagaaagccaatcattgagatgacagaagaaggctttaatcgggtgctgcagccaaggagataggaggagctcaggctcaaatccatctcccagaccaaccaaaactagtggtttatacagcaaggaataaatgtaacaatgtgtaagaaaacaggaactaggtggggaaggaagcaatcatgatgaacgaagggcctggagtctttttgtctggatggggtgatctggtgagtttcagttctttgatactttttttttttgagacagagtctcactctgttgcccaggctggagtgcagtggcacaatctcggctcactgcaacctccgccttctgggtttaagctattcttctgcctcagtctcctgagtagtttggattacaggygcccgccaccacacctggctaatttttttgtatttttagtagagacggggtttcaccatgttggccaggctggtcttgaattcctgacctcaagtgatccacctgcctcggcctcccaaagtgccgggattataggcgtgagccaccgcgcctggcctgatactttttttgagaggcctgaaggtcatttcctgaggaaggaactcagataaaacaaatgtaagtttcaagctttaagaccagaagggtccatttctatgtgtgtatatatatatatttattttttttaaatgatctatgggacattgggtcggtttcactatctccacctccccatccagggcccacgtggtctctggtctctgcttctctcctgcaactgttccacactccggatctagaccattatcttctgcctgcttctcctttcctgcactctactccccaccggagatggcccagcccttacatctgaacatccagacctcactggcttctttctgtcctctgaaatcttaagttgtgcatgctccactcctatttgtcacctggaatttattgccttgtatggctggttccttccttagtgcatgtctctcatctcagggcacagggcagggccacagtttgatgcccaggtcagaacctggttctaccatatgtcaccttgtgatctcaaacaagttatttaatatctctgagccttggtttcctcatctataaaatgcatagaataatcaatgtactaattgtgtttttaaaaaataaaaataaaatgggtagaataatggtactcactgttctcacaaggatttttttttttttaaagataatgcaggtaaagtgcttaatagagtacctgatacacagtaagagctcccagtaccaatggttccaactctctcctcagtctagcaggggcttagtgagtagcagatgtgatgattgagtcagtcagtggttcttagacttccagatgatcagactcagatgaggagtttggggaaagattcctgcctcttccccctatgcaactgggtcagaatcccagagttgggtttgggaatctgagattctaattatcagccagctttgacacctgcaactgggtcagaatcccagggttgggtttgggaatctgagattcttattaccagccagctttgacacactcagggagactctaccaggctgggtgggccacctccagtgggaaatagggagaaaatgccgacatccacctcagttgggtctttccgcaagcagtcacaggaattccccctcactcaagtccttgttcagtatcgcttcctgggaaggtggctgtctccctccaagcccttcctagtccctcattgcacttttcactccctgatcctggagtgtgtgtttatttttcatcatctgtctctcccactgttcgatgagggcagagacttgtgcccctggcagtgtctaacacatagtatgtggcaagtacatttggcaaataaaagaatgaaccagtctctgttaacccttgctttcccatcacttcacaagatcttgggcagatttcagagctttc

SEQ ID NO: 90469 - DNA, 2236 bp, Homo sapiens
atgtccctgagtgccagtcaatggggatgccacaaagatagaggagcgaactttcaccattttggtttttgcattgagttcctatctttagctatgttgaatatgaaacctctggtttgttaggtgtttcgtattagcttccaggaaaattctggtccccggactccatttatctctccaccctaggacaaggatccttatctcttaccatagagagccaaagcaagtactactgttacagaaacatcaggggctcggtctaggtcctgctgcttgccacacagaaagccaatcattgagatgacagaagaaggctttaatcgggtgctgcagccaaggagataggaggagctcaggctcaaatccatctcccagaccaaccaaaactagtggtttatacagcaaggaataaatgtaacaatgtgtaagaaaacaggaactaggtggggaaggaagcaatcatgatgaacgaagggcctggagtctttttgtctggatggggtgatctggtgagtttcagttctttgatactttttttttttgagacagagtctcactctgttgcccaggctggagtgcagtggcacaatctcggctcactgcaacctccgccttctgggtttaagctattcttctgcctcagtctcctgagtagtttggattacaggcgcccgccaccacacctggctaatttttttgtatttttagtagagacggggtttcaccatgttggccaggctggtcttgaattcctgacctcaagtgatccacctgcctcggcctcccaaagtgccgggattataggcgtgagccaccgcgcctggcctgatactttttttgagaggcctgaaggtcatttcctgaggaaggaactcagataaaacaaatgtaagtttcaagctttaagaccagaagggtccatttctatgtgtgtatatatatatatttatttttttwaaatgatctatgggacattgggtcggtttcactatctccacctccccatccagggcccacgtggtctctggtctctgcttctctcctgcaactgttccacactccggatctagaccattatcttctgcctgcttctcctttcctgcactctactccccaccggagatggcccagcccttacatctgaacatccagacctcactggcttctttctgtcctctgaaatcttaagttgtgcatgctccactcctatttgtcacctggaatttattgccttgtatggctggttccttccttagtgcatgtctctcatctcagggcacagggcagggccacagtttgatgcccaggtcagaacctggttctaccatatgtcaccttgtgatctcaaacaagttatttaatatctctgagccttggtttcctcatctataaaatgcatagaataatcaatgtactaattgtgtttttaaaaaataaaaataaaatgggtagaataatggtactcactgttctcacaaggatttttttttttttaaagataatgcaggtaaagtgcttaatagagtacctgatacacagtaagagctcccagtaccaatggttccaactctctcctcagtctagcaggggcttagtgagtagcagatgtgatgattgagtcagtcagtggttcttagacttccagatgatcagactcagatgaggagtttggggaaagattcctgcctcttccccctatgcaactgggtcagaatcccagagttgggtttgggaatctgagattctaattatcagccagctttgacacctgcaactgggtcagaatcccagggttgggtttgggaatctgagattcttattaccagccagctttgacacactcagggagactctaccaggctgggtgggccacctccagtgggaaatagggagaaaatgccgacatccacctcagttgggtctttccgcaagcagtcacaggaattccccctcactcaagtccttgttcagtatcgcttcctgggaaggtggctgtctccctccaagcccttcctagtccctcattgcacttttcactccctgatcctggagtgtgtgtttatttttcatcatctgtctctcccactgttcgatgagggcagagacttgtgcccctggcagtgtctaacacatagtatgtggcaagtacatttggcaaataaaagaatgaaccagtctctgttaacccttgctttcccatcacttcacaagatcttgggcagatttcagagctttc

SEQ ID NO: 90470 - DNA, 2236 bp, Homo sapiens
atgtccctgagtgccagtcaatggggatgccacaaagatagaggagcgaactttcaccattttggtttttgcattgagttcctatctttagctatgttgaatatgaaacctctggtttgttaggtgtttcgtattagcttccaggaaaattctggtccccggactccatttatctctccaccctaggacaaggatccttatctcttaccatagagagccaaagcaagtactactgttacagaaacatcaggggctcggtctaggtcctgctgcttgccacacagaaagccaatcattgagatgacagaagaaggctttaatcgggtgctgcagccaaggagataggaggagctcaggctcaaatccatctcccagaccaaccaaaactagtggtttatacagcaaggaataaatgtaacaatgtgtaagaaaacaggaactaggtggggaaggaagcaatcatgatgaacgaagggcctggagtctttttgtctggatggggtgatctggtgagtttcagttctttgatactttttttttttgagacagagtctcactctgttgcccaggctggagtgcagtggcacaatctcggctcactgcaacctccgccttctgggtttaagctattcttctgcctcagtctcctgagtagtttggattacaggcgcccgccaccacacctggctaatttttttgtatttttagtagagacggggtttcaccatgttggccaggctggtcttgaattcctgacctcaagtgatccacctgcctcggcctcccaaagtgccgggattataggcgtgagccaccgcgcctggcctgatactttttttgagaggcctgaaggtcatttcctgaggaaggaactcagataaaacaaatgtaagtttcaagctttaagaccagaagggtccatttctatgtgtgtatatatatatatttattttttttaaatgatctatgggacattgggtcggtttcactatctccacctccccatccagggcccacgtggtctctggtctctgcttctctcctgcaactgttccacactccggatctagaccattatcttctgcctgcttctcctttcctgcactctactccccaccggagatggcccagcccttacatctgaacatccagacctcactggcttctttctgtcctctgaaatcttaagttgtgcatgctccactcctatttgtcacctggaatttattgccttgtatggctggttccttccttagtgcatgtctctcatctcagggcacagggcagggccacagtttgatgcccaggtcagaacctggttctaccatatgtcaccttgtgatctcaaacaagttatttaatatctctgagccttggtttcctcatctataaaatgcatagaataatcaatgtactaattgtgtttttaaaaaataaaaataaaatgggtagaataatggtactcactgttctcacaaggatttttttttttttaaagataatgcaggtaaagtgcttaatagagtacctgatacacagtaagagctcccagtaccaatggttccaactctctcctcagtctagcaggggcttagtgagtagcagatgtgatgattgagtcagtcagtggttcttagacttccagatgatcagactcagatgaggagtttggggaaagattcctgcctcttccccctatgcaactgggtcagaatcccagagttgggtttgggaatctgagattctaattatcagccagctttgacacctgcaactgggtcagaatcccagggttgggtttgggaatctgagattcttattaccagccagctttgacacactcagggagactctaccaggctgggtgggccacctccagtgggaaatagggagaaartgccgacatccacctcagttgggtctttccgcaagcagtcacaggaattccccctcactcaagtccttgttcagtatcgcttcctgggaaggtggctgtctccctccaagcccttcctagtccctcattgcacttttcactccctgatcctggagtgtgtgtttatttttcatcatctgtctctcccactgttcgatgagggcagagacttgtgcccctggcagtgtctaacacatagtatgtggcaagtacatttggcaaataaaagaatgaaccagtctctgttaacccttgctttcccatcacttcacaagatcttgggcagatttcagagctttc

SEQ ID NO: 90471 - DNA, 519 bp, Homo sapiens
tgcattaaggagatacatgggggaaagtccacagtaagggctcacttcctttattattctcctctttcatttcctcttttattccaacackagtcttcatgaggctttccaaacttttgaccatgctttgatgccttggttgtttgaaggcatctgttactttaacataattttaacactggaagacagagtgtagatcacctagacaagttactgattttctgaagaagaaattgtagcacagagaggttgagtaattaatgcaagcttgcacagctattcttaggtcaagaagaggtggtcagtctgagttaaagctcacgactcccagttcagcaatgttttcacacatcacaccacgccacccgccaatcctgctgtaattagttgcacaaaaaatcaaatatttacagaaatataaataaatgaaaaaagttaccaatttactccccaatataaaacattttacctgcaatctatgtgtacatattgaatgatgtgtaacaatatcataatttt

SEQ ID NO: 90472 - DNA, 519 bp, Homo sapiens
tgcattaaggagatacatgggggaaagtccacagtaagggctcacttcctttattattctcctctttcatttcctcttttattccaacacgagtcttcatgaggctttccaaacttttgaccatgctttgatgccttggttgtttgaaggcatctgttactttaacataattttaacactggaagacagagtgtagatcacctagrcaagttactgattttctgaagaagaaattgtagcacagagaggttgagtaattaatgcaagcttgcacagctattcttaggtcaagaagaggtggtcagtctgagttaaagctcacgactcccagttcagcaatgttttcacacatcacaccacgccacccgccaatcctgctgtaattagttgcacaaaaaatcaaatatttacagaaatataaataaatgaaaaaagttaccaatttactccccaatataaaacattttacctgcaatctatgtgtacatattgaatgatgtgtaacaatatcataatttt

SEQ ID NO: 90473 - DNA, 634 bp, Homo sapiens
tcttgcgggagcaatttggtatctgctctgcgaggtttccttccagaaagaagtgaggacttcagatctagactttctgtctttccaggagggctggtcctatttagagctctgctctttcccccagaggacttctgcagtgtgcagattgacttggggaaactgaattgtggggaagaggaggggcggaagcagaggaggaagctgaggtgtctactctgcagcctgccttaaacaactttcttttcaccagggctatcccaagcctcccaaaaytcccagccctggtctgggccagttctcccagatattcatacacatacctctgccaaagcaatgatcatgtggtgccgtaatggcttttatgctctaatgtcttcctcaaccagactcaaatttccttgagtatgttttcctggcacctagcatgtacctgggggcatattagacactcaatagttgtctgttgagtgagtgaatgaatgaatgaagagctttttgagatattagctattatgacaactgaagttcagagaggttaagtcactttctcaaggtcacacagacgccacatggtgggaggtgacacttgagccctcctctgtctgctcgactccatgctatttccaccatg

SEQ ID NO: 90474 - DNA, 634 bp, Homo sapiens
tcttgcgggagcaatttggtatctgctctgcgaggtttccttccagaaagaagtgaggacttcagatctagactttctgtctttccaggagggctggtcctatttagagctctgctctttcccccagaggacttctgcagtgtgcagattgacttggggaaactgaattgtggggaagaggaggggcggaagcagaggaggaagctgaggtgtctactctgcagcctgccttaaacaactttcttttcaccagggctatcccaagcctcccaaaattcccagccctggtctgggccagttctcccagatattcatacacatacctctgccaaagcaatgatcatgtggtgccgtaatggcttttatgctctaatgtcttcctcaaccagactcaaatttccttgagtatgttttcctggcacctagcatgtacctgggggcatattagacactcaatagttgtctgttgagtgartgaatgaatgaatgaagagctttttgagatattagctattatgacaactgaagttcagagaggttaagtcactttctcaaggtcacacagacgccacatggtgggaggtgacacttgagccctcctctgtctgctcgactccatgctatttccaccatg

SEQ ID NO: 90475 - DNA, 1382 bp, Homo sapiens
ggtccatttctaggaaatgtccagaataggcaaatccatagggacacaaagtagatgagtgggtgccttgggcttggaggatggggagaaatggacagtgacaaggtactccccttgtggccctctgctcttttgcctactgaatcctagtctggattaatcacagatcacaagacagtctttgattaaaactcaatgaaactctggctgggcctagaggctcatgcctgtaatcccagaaatttgggaggctgaggtgggcggatcacctgaggtcaggagtttgagactaccctggccaacatggtgaaaccccatctctactaaaaatacaaaaattagccaggcgtggtggcaggcacctgtagtcccggctactcaggaggctgagggaggagaatcgctggaatccaggaggcagaggttgcagtgagccgagattgcgccactgcactccagcatggatgataaagtgaaactctgcctcaaaaaaaaagaactcgataagacttattatttaaaaggagctagcagtccaggataaaacagaggatccctaatttttagtggcatcccttgtccataaaaagctccccgacccttgtcagatggcactcccactagggccgtcttctcacatctgctctgggggtctctacagagggcaactcacttcttccagcctgtcagcaccaggccggctggggcagcggcacctcagggtgctgttcttctacctcggggatgggcaagcactctctcatagacacggctagtgaggagtctggccagtgatccattttgtaaatgggttttcaaaccttaaacataaactcaattatgtccttaaaaatacacatgtgcatgcctaaaaatacacacacacatacagaggaaattctctcagctgtgacttctactgctcattaaaggtaggactggggttggttttcagtcaaacgtgaggacggagagaggctgcagggcagagctcctctggctcttggccttcctgttcaaaggccagagaagagacacccatgacaaggctgtgctcgctccagggggtacagggaccccacgcagtgcagcasatgccagggtacacctttcagaaagattataagcattggcaaagagatttgcaaaatcccgtgcagcagaaacacctgttggaaaagctagagagaaagaattgggtggttgcatgaactattccactggccagggctctttttttttttttttttttcctgactcagggtcttgttctgttgcccaggctggagtgcagtgatgcgatcatagctcactgcagcctcgaattcctgggctcaagtaacccccccacctcagcctcacaggtagctgggactacaagc

SEQ ID NO: 90476 - DNA, 984 bp, Homo sapiens
cttattggaaattttaaactattcaataataaactattagtcttttagaatttctttttcctcaagtgttgataagtaactgaaagtctacaagcagacaagcagaattagtcggtggaacttcatttcttgctccatttttgtcctcagcagtagagggtggtgagatttcaacccagcctagcaggaccaataagtctggaaagaagtagctctagttcatattggcacctgctaattctagttctgaagaccatgggaaatctcttgcctatttagctcagtgatcatccaagatgggaaattcttgggctcagctgtgagggatcccaagtttatatgtamcactaatgtctcacaaatcaagaatccaagagaatcaagagactatagttcattccttatattaaattcttaggactgccaactgggtggctacagttttgggggctagaagtctgatatcaaggtgccaactggactggttccttctgaggaccacgagggcaggatctgttcaggcttgtagatggccttcttttccatgtgtcttcacattatcttcctctgtttgtatgtgtgtccaaatttcctcttctttttttttaatttagaaatttatactgtctacaagctttatatagctttagttaaaaaaaagcaaaaaaaaaaaaaaatcaaaacaaaaacagtgaagccaagacactcttccaaagtctggacccttccggccttccaaatacaagagctctggaagttgtatataccaaatttcctcttcttaaaatgtcaccagtcacattggattaaggcttaccctattaacaccattttaacttaatcacctctgtaaagaccctatctcctgatacagtcacattcggatgctcaggaagttagggtatcagtatcactatatgaatttgggagttgggggaggacacagtttagcccatgacagtcctgaatctcctttgctagatg

SEQ ID NO: 90477 - DNA, 984 bp, Homo sapiens
cttattggaaattttaaactattcaataataaactattagtcttttagaatttctttttcctcaagtgttgataagtaactgaaagtctacaagcagacaagcagaattagtcggtggaacttcatttcttgctccatttttgtcctcagcagtagagggtggtgagatttcaacccagcctagcaggaccaataagtctggaaagaagtagctctagttcatattggcacctgctaattctagttctgaagaccatgggaaatctcttgcctatttagctcagtgatcatccaagatgggaaattcttgggctcagctgtgagggatcccaagtttatatgtaacactaatgtctcacaaatcaagaatccaagagaatcaagagactatagttcattccttatattaaattcttaggactgccaactgggtggctacagttttgggggctagaagtctgatatcaaggtgccaactggactggttccttctgaggaccacgagggcaggatctgttcaggcttgtagatggccttcttttccatgtgtcttcacattatcttcctctgtttgtatgtgtgtccaaatttcctcttctttttttttaatttagaaatttatactgtctacaagctttatatagctttagttaaaaaaaagcaaaaaaaaaaaaaaatcaaaacaaaaacagtgaagccaagacactcttccaaagtctggacccttccggccttccaaatacaagagctctggaagttgtatataccaaatttcctcttcttaaaatgtcaccagtcacattggattaaggcttaccctattaacaccattttaacttaatcacctctgtaaagaccctatctcctgatacagtcayattcggatgctcaggaagttagggtatcagtatcactatatgaatttgggagttgggggaggacacagtttagcccatgacagtcctgaatctcctttgctagatg

SEQ ID NO: 90478 - DNA, 984 bp, Homo sapiens
cttattggaaattttaaactattcaataataaactattagtcttttagaatttctttttcctcaagtgttgataagtaactgaaagtctacaagcagacaagcagaattagtcggtggaacttcatttcttgctccatttttgtcctcagcagtagagggtggtgagatttcaacccagcctagcaggaccaataagtctggaaagaagtagctctagttcatattggcacctgctaattctagttctgaagaccatgggaaatctcttgcctatttagctcagtgatcatccaagatgggaaattcttgggctcagctgtgagggatcccaagtttatatgtaacactaatgtctcacaaatcaagaatccaagagaatcaagagactatagttcattccttatattaaattcttaggactgccaactgggtggctacagttttgggggctagaagtctgatatcaaggtgccaactggactggttccttctgaggaccacgagggcaggatctgttcaggcttgtagatggccttcttttccatgtgtcttcacattatcttcctctgtttgtatgtgtgtccaaatttcctcttctttttttttaatttagaaatttatactgtctacaagctttatatagctttagttaaaaaaaagcaaaaaaaaaaaaaaatcaaaacaaaaacagtgaagccaagacactcttccaaagtctggacccttccggccttccaaatacaagagctctggaagttgtatataccaaatttcctcttcttaaaatgtcaccagtcacattggattaaggcttaccctattaacaccattttaacttaatcacctctgtaaagaccctatctcctgatacagtcacattcggatgctcaggaagttagggtatcrgtatcactatatgaatttgggagttgggggaggacacagtttagcccatgacagtcctgaatctcctttgctagatg

SEQ ID NO: 90479 - DNA, 586 bp, Homo sapiens
tcctggcatttgattagagagtcaggactaaacaaatggctagcaaattatacagtcaagcacatgtaaccttttctgatcgaattgagtttagattttgtcctgatttttgataggaggatcaaaaccatggcatttatgctgttctcgccccatctctcaggttatgtagacttgttaaaaaaaaaaagkcatcattaacaattaaaagagagggagagtgagagagaacagccctagtgtgagactctcacattctctttccccatacttcattagggttattgctgcctacacttattactgtttaaaatcatcccaagatgagtagcctacattttaagggttcctgacaattatttggccagactctcatctgtcctgaatgctggcatcttctccttgtgaacgtctctctttgaagtcagcaggaatctggtctgtggtgagccacaagtcttcccttcctaggagccaaggctggcaaggcaccctgcggcagagccgggaaactcgctgacctcatttttttttttctgcttttttgtctcagtactcactttcttcccttccttatctctcctcc

SEQ ID NO: 90480 - DNA, 641 bp, Homo sapiens
acattgtctttcatcacatacttatgatgacatcttccataattaagtatgtcctgtgcttataggcttttgttgaaactactgccttaaactaaaggaaactacaaaatcctagttttattccacgtgtatctgaaaaagaacagcaagataatacatgccacagatgaagttaattatatgaatgtatgtgaaactaacaattacaatgaaaatttgatttggcaaccagatagatttggaaatctgaagacctatatttcgtaccatttttctaatcaaagatttaatttataggttgatkctttaggacaagtttttatagtgtctctgaaattttacaatctattttctaaaaggatcattccattagtaatgacaatagttttataaagttaatctgtgtaacgttaatttcataatattgataactcttagcatggttttattctgttccacttatcagaagaaatctagtactattaaaagtatcctatgcagatatatatatatatatatttatataaaaagatcataccagttttccacagagtattccacaggtttctattcctctcactgtattagattctgccagttgcagaaatttgtggcaaagatcttctggcaaaactacacat

SEQ ID NO: 90481 - DNA, 1208 bp, Homo sapiens
taacaccttagtcatcctttcactgagaaaggactttcttaagaacttagaatgcggaaagtccctttctccttttcctctttttgttttcaattgagatgaagatcacataacataacaattaaccattttaaagtatacartttcgtggcatttagcacattcacaatgttgtgcaatcgccacttccatctagtgccagaacattttcttcacctcaaaagaaaatccattaagcagtcactccccacccctccctctcctcagtccctggaaaccactaatctgatttctgtcttaatgagacgaactcttccagatattttatgtaaatagaatcatattctgtgtagccttgtgtgtccagtttcattcacggaaatgcgtttcttaactctaaaaacaatccagtaaagatgcaaattttaattactgcacagtcaggaaggtaatgcagtggcagctagttatgtctgatggcagcagtccaaggctttcaagatttcttcagcttctgaaggtgacatgaggaaaatgaaatgtacataatgcttgtcagacttctatttcctagagccagtaagctttggataaagatccagaatatggacgacatcagtaatagctctgatagatcacctcacagccttacctcatgttccgcccttaactgtcaataacagcaagtgttagaacaggtaagtttactgtgctggtttcctgtggagggtgggagtgaaaagaggtttgaggttgtcttattcttcagtctgggtgtattatcatcagtccatgcaagaacacttgaaaacattttttcatttatgtattttattcccagactccacttctattggcattcctaataggtagccattctaatgtatttaaaatgcacgtttctctttgtgtgtagtaatgtgaactatttattgctgtcttgtgtacctacatttttttttttttttttgagatggagtgttgctcttgttgcccaggctggagtgcagtggtgcgatctcggctcaccacaacctccacctcccaggttgattgtatgttaacatatctcatgatatttccactcaatatgatgttttgaagatcaatccatatatatgtacgtaaataagtcaataaacttttgtatattaacctgtatatataattcatatatttgtaagcatcatgtatatcacacacatgca

SEQ ID NO: 90482 - DNA, 1208 bp, Homo sapiens
taacaccttagtcatcctttcactgagaaaggactttcttaagaacttagaatgcggaaagtccctttctccttttcctctttttgttttcaattgagatgaagatcacataacataacaattaaccattttaaagtatacaatttcgtggcatttagcacattcacaatgttgtgcaatcgccacttccatctagtgccagaacattttcttcacctcaaaagaaaatccattaagcagtcactccccacccctccctctcctcagtccctggaaaccactaatctgatttctgtcttaatgagacgaactcttccagatattttatgtaaatagaatcatattctgtgtagccttgtgtgtccagtttcattcacggaaatgcgtttcttaactctaaaaacaatccagtaaagatgcaaattttaattactgcacagtcaggaaggtaatgcagtggcagctagttatgtctgatggcagcagtccaaggctttcaagatttcttcagcttctgaaggtgacatgaggaaaatgaaatgtacataatgcttgtcagacttctatttcctagagccagtaagctttggataaagatccagaatatggacgacatcagtaatagctctgatagatcacctcacagccttacctcatgttccgcccttaactgtcaataacagcaagtgttagaacaggtaagtttactgtgctggtttcctgtggrgggtgggagtgaaaagaggtttgaggttgtcttattcttcagtctgggtgtattatcatcagtccatgcaagaacacttgaaaacattttttcatttatgtattttattcccagactccacttctattggcattcctaataggtagccattctaatgtatttaaaatgcacgtttctctttgtgtgtagtaatgtgaactatttattgctgtcttgtgtacctacatttttttttttttttttgagatggagtgttgctcttgttgcccaggctggagtgcagtggtgcgatctcggctcaccacaacctccacctcccaggttgattgtatgttaacatatctcatgatatttccactcaatatgatgttttgaagatcaatccatatatatgtacgtaaataagtcaataaacttttgtatattaacctgtatatataattcatatatttgtaagcatcatgtatatcacacacatgca

SEQ ID NO: 90483 - DNA, 1208 bp, Homo sapiens
taacaccttagtcatcctttcactgagaaaggactttcttaagaacttagaatgcggaaagtccctttctccttttcctctttttgttttcaattgagatgaagatcacataacataacaattaaccattttaaagtatacaatttcgtggcatttagcacattcacaatgttgtgcaatcgccacttccatctagtgccagaacattttcttcacctcaaaagaaaatccattaagcagtcactccccacccctccctctcctcagtccctggaaaccactaatctgatttctgtcttaatgagacgaactcttccagatattttatgtaaatagaatcatattctgtgtagccttgtgtgtccagtttcattcacggaaatgcgtttcttaactctaaaaacaatccagtaaagatgcaaattttaattactgcacagtcaggaaggtaatgcagtggcagctagttatgtctgatggcagcagtccaaggctttcaagatttcttcagcttctgaaggtgacatgaggaaaatgaaatgtacataatgcttgtcagacttctatttcctagagccagtaagctttggataaagatccagaatatggacgacatcagtaatagctctgatagatcacctcacagccttacctcatgttccgcccttaactgtcaataacagcaagtgttagaacaggtaagtttactgtgctggtttcctgtggagggtgggagtgaaaagaggtttgaggttgtcttattcttcagtctgggtgtattatcatcagtccatgcaagaacacttgaaaacattttttcatttatgtattttattcccagactccacttctattggcattcctaataggwagccattctaatgtatttaaaatgcacgtttctctttgtgtgtagtaatgtgaactatttattgctgtcttgtgtacctacatttttttttttttttttgagatggagtgttgctcttgttgcccaggctggagtgcagtggtgcgatctcggctcaccacaacctccacctcccaggttgattgtatgttaacatatctcatgatatttccactcaatatgatgttttgaagatcaatccatatatatgtacgtaaataagtcaataaacttttgtatattaacctgtatatataattcatatatttgtaagcatcatgtatatcacacacatgca

SEQ ID NO: 90484 - DNA, 1208 bp, Homo sapiens
taacaccttagtcatcctttcactgagaaaggactttcttaagaacttagaatgcggaaagtccctttctccttttcctctttttgttttcaattgagatgaagatcacataacataacaattaaccattttaaagtatacaatttcgtggcatttagcacattcacaatgttgtgcaatcgccacttccatctagtgccagaacattttcttcacctcaaaagaaaatccattaagcagtcactccccacccctccctctcctcagtccctggaaaccactaatctgatttctgtcttaatgagacgaactcttccagatattttatgtaaatagaatcatattctgtgtagccttgtgtgtccagtttcattcacggaaatgcgtttcttaactctaaaaacaatccagtaaagatgcaaattttaattactgcacagtcaggaaggtaatgcagtggcagctagttatgtctgatggcagcagtccaaggctttcaagatttcttcagcttctgaaggtgacatgaggaaaatgaaatgtacataatgcttgtcagacttctatttcctagagccagtaagctttggataaagatccagaatatggacgacatcagtaatagctctgatagatcacctcacagccttacctcatgttccgcccttaactgtcaataacagcaagtgttagaacaggtaagtttactgtgctggtttcctgtggagggtgggagtgaaaagaggtttgaggttgtcttattcttcagtctgggtgtattatcatcagtccatgcaagaacacttgaaaacattttttcatttatgtattttattcccagactccacttctattggcattcctaataggtagccattctaatgtatttaaaatgcacgtttctctttgtgtgtagtaatgtgaactatttattgctgtcttgtgtacctacatttttttttttttttttgagatggagtsttgctcttgttgcccaggctggagtgcagtggtgcgatctcggctcaccacaacctccacctcccaggttgattgtatgttaacatatctcatgatatttccactcaatatgatgttttgaagatcaatccatatatatgtacgtaaataagtcaataaacttttgtatattaacctgtatatataattcatatatttgtaagcatcatgtatatcacacacatgca

SEQ ID NO: 90485 - DNA, 1994 bp, Homo sapiens
ccagtaaaaaaccaagcagtatttacagccagctattaagaatcttttcaaacactaattgcatatactcagaactgaatttgttgtttttcactctagaccaagctttggatttcatttctgaagtttgaattttctgagtcactagtaatgtccttgaggatgatagtctgaattttctctgcaagagtacaaagattggcttttttgagatctttaatcaatgtgtcatacgcttctttctttccatgaagttgatgccaattacgaagcagttgaactttctgttctgctgtgtcttggacattgtcattcttgatctcatctattttggcttcattgacaccattctttcgaacaaagcctttaacttgacttagtgtcatgactccagcaatagtggtgatatatttactcaagtcaacatctgaaaaatagaaaatagtctgaaaatttgtttttctaaatgaaattcccattagtgaaaaccatggttatttctctttttatagtacttcagaatatagctaagtcctaaaagtctatgaagagctgactaggggaatacagaaacaagacaaccttgagttctaactccaaatcctgccatatacccagtaatttgttaaataacctgggccacaatacataacatttctgtatcttcttttctcatttataaattaagaggattggaaaagatcacctataacatctcttatggatccaatgatcaatgacccacaaatctaaaagtataagcaaagagtttatgatcatcttatctctaaatcacagatcaaagaacmactgaatggaatcatgtatgttgttatagagttgggtacactgataatacctgagtctacagtacactttaacctctagatctttttaggcaggagttctgtaatacatctagctgattatgaaggaaaagtttcttaagcctcagactattgtgtcttattgttacttgattatttttaactatgagtattcattataaatttaaacaaactgcctgataaatgctttatgctgagcaggtagaattgtatgagaaataacaagatcccataatatgtcactgaaattagtaacattattttactctgaaattggcctattactctaaaggatgccatctctatgaaataaaatgataaaagccttaccagataaatttattgccactgtttcctagaaagcaaaaaatggaagcagagaaagacaaataaaaatatatctttagaatattctaaatgtgaacttctaatttttccttaattcagaaagaagtacaatcagttgcttgatgtataaaattaggaagctagattaagtgattaagaaggttacttttaccattcaatttttattctgaaaggttccggccttgccagaaactaagcaatattgtcttagtttttaaaggcaagaaacctaaagaattcataaaataggttgaggttatttttcatatagacttattaaaataaataataaatataactactctaaaattttcttccctgtaactattcttattcttaataccagaaaatggctcaaattgaaattttttttaccatattaatttaaagaatcctaactcccactgagccctggccccaaataagaaaataattccattaagtgcaactggtttcttttctcggtgtatttcttgctatctgaaatatattgataccatgttgggaaaagatatggtgagacataaggtcaaccggcagccagagaaagttaagctgtgcccttatgacaaactttaagagcaatctctttgctcaggcttggatactgaacccatgcctggtaaaggctgtttctctgcagggataacaacaacacggaacatggaggttggccaagttcttttttcagctcattttcagcacactctcaattccctcctttgttgattcttacggtttttgtgtacaagtttacttttaatttgggtaccatat

SEQ ID NO: 90486 - DNA, 1994 bp, Homo sapiens
ccagtaaaaaaccaagcagtatttacagccagctattaagaatcttttcaaacactaattgcatatactcagaactgaatttgttgtttttcactctagaccaagctttggatttcatttctgaagtttgaattttctgagtcactagtaatgtccttgaggatgatagtctgaattttctctgcaagagtacaaagattggcttttttgagatctttaatcaatgtgtcatacgcttctttctttccatgaagttgatgccaattacgaagcagttgaactttctgttctgctgtgtcttggacattgtcattcttgatctcatctattttggcttcattgacaccattctttcgaacaaagcctttaacttgacttagtgtcatgactccagcaatagtggtgatatatttactcaagtcaacatctgaaaaatagaaaatagtctgaaaatttgtttttctaaatgaaattcccattagtgaaaaccatggttatttctctttttatagtacttcagaatatagctaagtcctaaaagtctatgaagagctgactaggggaatacagaaacaagacaaccttgagttctaactccaaatcctgccatatacccagtaatttgttaaataacctgggccacaatacataacatttctgtatcttcttttctcatttataaattaagaggattggaaaagatcacctataacatctcttatggatccaatgatcaatgacccacaaatctaaaagtataagcaaagagtttatgatcatcttatctctaaatcacagatcaaagaacaactgaatggaatcatgtatgttgttatagagttgggtacactgataatacctgagtctacagtacactttaacctctagatctttttaggcaggagttctgtaatacatctagctgattatgaaggaaaagtttcttaagcctcagactattgtgtcttattgttacttgattatttttaactatgagtaytcattataaatttaaacaaactgcctgataaatgctttatgctgagcaggtagaattgtatgagaaataacaagatcccataatatgtcactgaaattagtaacattattttactctgaaattggcctattactctaaaggatgccatctctatgaaataaaatgataaaagccttaccagataaatttattgccactgtttcctagaaagcaaaaaatggaagcagagaaagacaaataaaaatatatctttagaatattctaaatgtgaacttctaatttttccttaattcagaaagaagtacaatcagttgcttgatgtataaaattaggaagctagattaagtgattaagaaggttacttttaccattcaatttttattctgaaaggttccggccttgccagaaactaagcaatattgtcttagtttttaaaggcaagaaacctaaagaattcataaaataggttgaggttatttttcatatagacttattaaaataaataataaatataactactctaaaattttcttccctgtaactattcttattcttaataccagaaaatggctcaaattgaaattttttttaccatattaatttaaagaatcctaactcccactgagccctggccccaaataagaaaataattccattaagtgcaactggtttcttttctcggtgtatttcttgctatctgaaatatattgataccatgttgggaaaagatatggtgagacataaggtcaaccggcagccagagaaagttaagctgtgcccttatgacaaactttaagagcaatctctttgctcaggcttggatactgaacccatgcctggtaaaggctgtttctctgcagggataacaacaacacggaacatggaggttggccaagttcttttttcagctcattttcagcacactctcaattccctcctttgttgattcttacggtttttgtgtacaagtttacttttaatttgggtaccatat

SEQ ID NO: 90487 - DNA, 818 bp, Homo sapiens
ttaaagtcaatgtgagatagaagaatctgtatgtctctgagcacaattacagtgcttaaatatcccaaatgtattttcagctaaacaaccgctaaaggcaaggcaaactttcttcttcaactgaactgaagaaacagataattgttctgagaagggaaaattgaatacttctaagttactgaaagttggtgtgaccctgtagttgatgaatgacttaaagggatttttctagactaattatgataatatctaattttggcttttctactgactctactaagtcacctttgtataacatgtgtccccatagtattttaagttaagaaggagaaataattaaaaacaagcaattaggccgaggaagaggaggcagtgaagtacaagtttttaaagtgttccctgcaatgtgtttcctgggaatgcctttgcttcttgtgttctctttttgcatagggagatctcaatgaatagtgaagaattrcttctgatttttggccaattctgctgctgcagagaacacctgttcataggaaggatgagaataccactcaatgccccaaaactgttgctcagaaactagctgaggaataatttcatttgttcttatcagtcagctctcaaggctgcattcaggggcaagaaattaacaatacataaatctaccaaagtggtagctttttataggtaagaatgaggcaaatctttgtgaactacttcccaagttatttcaatctgcagtttgaacaaagcaagaacttaccccaaacaattagtggaattggcaaaagaagaagacaaagccaccccaagttagatct

SEQ ID NO: 90488 - DNA, 1819 bp, Homo sapiens
  misc_feature (1)...(1819): n = A,T,C or G
gatccttacgtccagggctagtcagaagccagcgagtttgagtcgcagctgttggrgaagtccctctggaatggtttcgacaggtaggatctggctgctgcatttgccgtccctctggcccaccgctgtccactgtacagagaaggcatctctttctaccttcaaatcagcatctggtttctgttcacaggagcaacgcgatgcacgacaacccccgcgccttcgtcagtggctctaactcctgtcacagccttgttccttctccctgtctcgctctttagccgtttctcgtagggatggtgtccaggtggctcggacaccctggtcgccgttctctgggggtagatgagtttatgaagaccaaattggatatgagcaaaagcactcttggtaaaattgtattcaatcaatccctagatgagtattttttttaactatccaggcccaccccagatgtctgaatagatttcttctgatcttggctactctgtgatttggccttcactccttgatttacccagcagagtcaatgacattccccaatacacacacacacacacacacacacacacacacacacacacacacagctttctgaggaggagtacacagaagggaacacgatccagtctcaacactggcgatgacagaccgtcccattctctcatatgaaccctacacattgatccagcccagcctggaggtttcctaacatctcgtcagcagctagcatcgctgtccaaaacctgcccgttttttttttctttcttcttttttttttttttttttggcttgatttggctctatttttagaatgttttccactgggagaaggaagaaatatgaggggaacagagcagggagaggtgccagctgtggcttgccagcctagggttgctccgtggcatgtgtttacactgcagtcatgggccggccttgcctggcccctgcgggtcacccgggcatgcttcccatacccagcagaacgtgatctgggttccagtttctgttctccctagtcctgggttaggaaactcagttgttttgacattgactcttcccctcacccgtgtgtgtgtgtgtgtgtgtnnnnnnnnnnnnnnnnnnnnnnnnnnnnnnnnnnnnnnnnnnnnnnnnnnnnnnnnnnnnnnnnnnnnnnnnnnnnnnnnnnnnnnnnnnnnnnnnnnnnttcactgtatacgaattcgagctcggtaccctatctttcaggtattatgttcagacatagtattactttggttaattctcaaaataaagtaggtcatatgattatccccattttctgcctggtgaactgtggttaaatgggcttacagagattaaatgggttgcctgatgtagcccaacgaggaaggggctaggataggaagcaggcgctctcattccagaacctgccttttttcctcctgtctaaactgctgctaaaggtcaaagacaaaggtgccatgtgagcagggaagttatttttgttttttacaaaggtgaagtaataggctgtgagtaatgcccactgctccttcagccccaggtacatgcagtgaggcggtacccacagagccgcgtggcactcctcaacctgctagagcagccggcctcctgcaggatggcttaaggaccacctggtccttggggtctgggttctccgggtcctgctgttccctgcagccttccttctacccccagagcagcttgggggcatctttagagaaagcggcagtgtcgcacctgccccagcagccacaaaacagaggaaattctgagcacctccgggcgtgagtcaccataccacattcaggaa

SEQ ID NO: 90489 - DNA, 1819 bp, Homo sapiens
  misc_feature (1)...(1819): n = A,T,C or G
gatccttacgtccagggctagtcagaagccagcgagtttgagtcgcagctgttggggaagtccctctggaatggtttcgacaggtaggatctggctgctgcatttgccgtccctctggcccaccgctgtccactgtacagagaaggcatctctttctaccttcaaatcagcatctggtttctgttcacaggagcaacgcgatgcacgacaacccccgcgccttcgtcagtggctctaactcctgtcacagccttgttccttctccctgtctcgctctttagccgtttctcgtagggatggtgtccaggtggctcggacaccctggtcgccgttctctgggggtagatgagtttatgaagaccaaattggatatgagcaaaagcactcttggtaaaaytgtattcaatcaatccctagatgagtattttttttaactatccaggcccaccccagatgtctgaatagatttcttctgatcttggctactctgtgatttggccttcactccttgatttacccagcagagtcaatgacattccccaatacacacacacacacacacacacacacacacacacacacacacacagctttctgaggaggagtacacagaagggaacacgatccagtctcaacactggcgatgacagaccgtcccattctctcatatgaaccctacacattgatccagcccagcctggaggtttcctaacatctcgtcagcagctagcatcgctgtccaaaacctgcccgttttttttttctttcttcttttttttttttttttttggcttgatttggctctatttttagaatgttttccactgggagaaggaagaaatatgaggggaacagagcagggagaggtgccagctgtggcttgccagcctagggttgctccgtggcatgtgtttacactgcagtcatgggccggccttgcctggcccctgcgggtcacccgggcatgcttcccatacccagcagaacgtgatctgggttccagtttctgttctccctagtcctgggttaggaaactcagttgttttgacattgactcttcccctcacccgtgtgtgtgtgtgtgtgtgtnnnnnnnnnnnnnnnnnnnnnnnnnnnnnnnnnnnnnnnnnnnnnnnnnnnnnnnnnnnnnnnnnnnnnnnnnnnnnnnnnnnnnnnnnnnnnnnnnnnnttcactgtatacgaattcgagctcggtaccctatctttcaggtattatgttcagacatagtattactttggttaattctcaaaataaagtaggtcatatgattatccccattttctgcctggtgaactgtggttaaatgggcttacagagattaaatgggttgcctgatgtagcccaacgaggaaggggctaggataggaagcaggcgctctcattccagaacctgccttttttcctcctgtctaaactgctgctaaaggtcaaagacaaaggtgccatgtgagcagggaagttatttttgttttttacaaaggtgaagtaataggctgtgagtaatgcccactgctccttcagccccaggtacatgcagtgaggcggtacccacagagccgcgtggcactcctcaacctgctagagcagccggcctcctgcaggatggcttaaggaccacctggtccttggggtctgggttctccgggtcctgctgttccctgcagccttccttctacccccagagcagcttgggggcatctttagagaaagcggcagtgtcgcacctgccccagcagccacaaaacagaggaaattctgagcacctccgggcgtgagtcaccataccacattcaggaa

SEQ ID NO: 90490 - DNA, 966 bp, Homo sapiens
aaaattttaaaaattagctgggtgtggtggcagtgcacgcctggactcccagccactgggaaggctgaggagggaggatggcttgaacctgggaggttgaggctgcagtgagtcatggtcacgccattgcactccagcctgggcaacagagagagacacgtttcgaaaaaaaggaaaagaaaaatcagttttcttccactaaaacagtaagtttaattttcctaatttgctgtttgtacagtatggtcctctgctccaagcttaaaacaaaaatctataggaaacgtcacctttctagaggaagctgagatggagcagctctcgttctacaggaggggctgcacaagctctcaccacacatctctgtcctcaggaaaagcctgtgctgagtgaccaggagtttcttgtcactgctgcattttcttcttcttgttttttgtttgtttgtttgtttgtttttgagacaggactgtggcccaggctggaatgaatgcagtggcgtgatcaccgttcactgcggcctcaacctcccgggctcaagcagtcctcccatctcagcttcccagatacctgggatcacaggtatgtgccatcacacccagctaattttttgtatttttggtagagacggggtttcaccatgttgtccaagctggtcttgaaaytctaggctcaagtgatctgcctgccttggcctcctgaagtgctgggattacaggtgtgagccaccacacctggcctcatccctgaagcattttctgcacgttcttaggctgcattggtgacatatctgggggctgccgcccctcacagctacgtgacttcatatgcaagctccttggcctcactgtgcctcagtttcttcatctgtaaaatggagacaataataacacctgcccctagggtggctgtgagcattgcatgagataacatgtgtgtcagtcaggagttttggctgcaagctag

SEQ ID NO: 90491 - DNA, 966 bp, Homo sapiens
aaaattttaaaaattagctgggtgtggtggcagtgcacgcctggactcccagccactgggaaggctgaggagggaggatggcttgaacctgggaggttgaggctgcagtgagtcatggtcacgccattgcactccagcctgggcaacagagagagacacgtttcgaaaaaaaggaaaagaaaaatcagttttcttccactaaaacagtaagtttaattttcctaatttgctgtttgtacagtatggtcctctgctccaagcttaaaacaaaaatctataggaaacgtcacctttctagaggaagctgagatggagcagctctcgttctacaggaggggctgcacaagctctcaccacacatctctgtcctcaggaaaagcctgtgctgagtgaccaggagtttcttgtcactgctgcattttcttcttcttgttttttgtttgtttgtttgtttgtttttgagacaggactgtggcccaggctggaatgaatgcagtggcgtgatcaccgttcactgcggcctcaacctcccgggctcaagcagtcctcccatctcagcttcccagatacctgggatcacaggtatgtgccatcacacccagctaattttttgtatttttggtagagacggggtttcaccatgttgtccaagctggtcttgaaactctaggctcaagtgatctgcctgccttggcctcctgaagtgctgggattacaggtgtgagccaccacacctggcctcatccctgaagcattttctgcamgttcttaggctgcattggtgacatatctgggggctgccgcccctcacagctacgtgacttcatatgcaagctccttggcctcactgtgcctcagtttcttcatctgtaaaatggagacaataataacacctgcccctagggtggctgtgagcattgcatgagataacatgtgtgtcagtcaggagttttggctgcaagctag

SEQ ID NO: 90492 - DNA, 966 bp, Homo sapiens
aaaattttaaaaattagctgggtgtggtggcagtgcacgcctggactcccagccactgggaaggctgaggagggaggatggcttgaacctgggaggttgaggctgcagtgagtcatggtcacgccattgcactccagcctgggcaacagagagagacacgtttcgaaaaaaaggaaaagaaaaatcagttttcttccactaaaacagtaagtttaattttcctaatttgctgtttgtacagtatggtcctctgctccaagcttaaaacaaaaatctataggaaacgtcacctttctagaggaagctgagatggagcagctctcgttctacaggaggggctgcacaagctctcaccacacatctctgtcctcaggaaaagcctgtgctgagtgaccaggagtttcttgtcactgctgcattttcttcttcttgttttttgtttgtttgtttgtttgtttttgagacaggactgtggcccaggctggaatgaatgcagtggcgtgatcaccgttcactgcggcctcaacctcccgggctcaagcagtcctcccatctcagcttcccagatacctgggatcacaggtatgtgccatcacacccagctaattttttgtatttttggtagagacggggtttcaccatgttgtccaagctggtcttgaaactctaggctcaagtgatctgcctgccttggcctcctgaagtgctgggattacaggtgtgagccaccacacctggcctcatccctgaagcattttctgcacgktcttaggctgcattggtgacatatctgggggctgccgcccctcacagctacgtgacttcatatgcaagctccttggcctcactgtgcctcagtttcttcatctgtaaaatggagacaataataacacctgcccctagggtggctgtgagcattgcatgagataacatgtgtgtcagtcaggagttttggctgcaagctag

SEQ ID NO: 90493 - DNA, 2241 bp, Homo sapiens
gcataatggtcgtagcaatggccaagttgtcattgctgggcagaaagttcctttaagacaggaataataaggcccacttaggaagcactctggattgtaatagggtttccagtggccaccagcagggtggcatcctgattttctaccaggccatgtagaagccttttgtgcttagctgctcgtgttaatcctcacaactgcataaggctgacacatcagggaactgaagcacagagatgtttgggaaattctccaaggtcacacagctactcagtggtggaggtggcatcagaacccaggaaggctgactgaagccaccgttctgcctcgctcactggcatcctcagcctccagcctgaggcaggacattctaggacagctgatgaatacaagcatggtcagtgtgggtggccagggccctcgctcagcaagtgggagcaaagtggaggattccaggactcactacctcatgatcttccaccagcctcccactacctctagtcacccctacctaagctgcccctctgtatgaaaatgctggggttggagagtggggcaggctagggaaagaagacaatgtgatttaacctgtccctaaatggttagatagcatctctggagttaaagatctcagctatcagttaaaatgcaaactgagctactatctgtcatttagagatgacgcagatgaagaagctgaggatgtgacctagaaaaaagcaggaacgacctagggacttagcaagggacaaaggaccagaaacaggcaaagagaaacaaaatttaaccttctctacagtgtcgcttagggctgggctggctatctccatagatatccaattccttaacacctaagggcgtaggagaggaatgagaccaaggtttaggatgaataatctaggaaatcccttgaaaggaagaaaagaggatcatcagagacatcttctggagctccacaaactgctcagagcagagaggccaccagatacgaatgctgcctcagataatccaatggaggaagagggtttggctggtattttctggctgagttcttgataagaaactgtaatcacatctgctagctagggatccaagaaaaacaagatattgtctctttatacacattccacagcccctaccttctctcaagagatgttaaaatggcttaaaatgtgttaaaatgtgacaatttaataaatgtggcagaaacaaaaaagagactcctaaagtattcctctcttcagagagtatgaagctattaattcagcaaatgaatccaggagctcagaaagggttaccccgttatgcatcctcactacagactcagtatcagacagacactgaggaccgcagagctgaatgagacccgcacaggcgttttcctcccgacttctcagaggactgtacctggtaccacctggagggctgaaacgtactcaggtaaaagttactcactcctccagtcctcagctcttcctgtgtgagtcccatgctggccttgtctaggcacatggggtggaggggaggagtgtcagatttgcaaaaaagaaaggctaggaggccaggcaaggtggctcacgcctgtaatcccagcactttgggaggccgaggcgggcccatcacctgagatggggagttcctgaccaacatggagaaactccatctccactgaaaatacaaaattagcagggcatggtggtgcatgcctgtaatcccagctactcgggaggctgagacaggagaattgctttaaactgggaggcagaggtttcggtgagctgagatcgcaccattgcactctagcctaggcaacaagagccaaactctgtctcaaataaaaaaaaaaaaaaaaaaaaagaagaagaagggctaggagaagtgggaaaggtggactgcagtggaatactgtgaccacatttgttaaactcaaagtcatgattattcttctagcaagtccaagggcacctgggccccttgttaaaggggcaatgggccgaaacaggtgctactcaagatccgacttgcggtgagatgggaggctgcctccgtctgagagaagccctggcattctcctctgaccagcgacaatctccctcttcccctgaggtagacaatgacaaagctcaacagggctgggcaaaccctccagtccaaagaaatcaatcaatacacaaacrctttattacttcatgaataactgcaacatcattgttcacaaaggaacccattccactaaaatag

SEQ ID NO: 90494 - DNA, 1129 bp, Homo sapiens
tttgattttataagctcaatgttacagaaaactagcaggtgctggtaagatgacatcagtttctaatatttaaagcgttttgcaggtttgagaagagaaatgaggacctttaaatgagcatgagatttgctgcctgatgatttctgaracttttgcgcaatgcagcaaatcaactggaattgtcagtcagccatcttaaatgacatggaatcagaggagatgtgtggtctcataaaatctcattaattcactatttaatttttgctaaatattgaatctattgatggaagaactgttggcagctgagatctagtacactgctagatttttagcctcaaagtttagagaactcttttcatcagagttgactcttctggggagggtgaggagtgttgcctccctctctgggggttacttccttcccttattccccagtgctgcctctttgcctatttattttttattttatttttttgagacagtctcgctctatcatccaggctggagtgcagtggtgcaatcttggctcactgcgacctccgcctcccgggttcaagcaattctcctatctcaccctcttgtctcagctgggacaggactacaggcgtgcagcaccacacctggctagttttatatttttaatagagatgggttttcaccacgtaggccaggctggtctcaaactcctgacctcaagtgatccgcccgcctcggtctcccaaagtgctgggattacaggcatgagccaccgcagccggcccattattagtattttaataaagcttattaaatgcttgctatatgacagaaattgtagatgcaaaaataaataagtgaatctttcccctcgaagtttaatgggcatttggttaacccatttctggtggcactaacgtattcataaacactttcggtaaagttctcaagttataaagagaaatgggttgagtatcccttacccaaaatgcttgggaccagaagtgtttcagatttcggatatttttagatttttagaatgcctgcatatacataatgagataccttgaggatgcgacccatgtctaaacacaaaattcatttatgcttcatatatactttctacacatagcctgaatatgcaatatatgtc

SEQ ID NO: 90495 - DNA, 1129 bp, Homo sapiens
tttgattttataagctcaatgttacagaaaactagcaggtgctggtaagatgacatcagtttctaatatttaaagcgttttgcaggtttgagaagagaaatgaggacctttaaatgagcatgagatttgctgcctgatgatttctgaaacttttgcgcaatgcagcaaatcaactggaattgtcagtcagccatcttaaatgacatggaatcagaggagatgtgtggtctcataaaatctcattaattcactatttaatttttgctaaatattgaatctattgatggaagaactgttggcagckgagatctagtacactgctagatttttagcctcaaagtttagagaactcttttcatcagagttgactcttctggggagggtgaggagtgttgcctccctctctgggggttacttccttcccttattccccagtgctgcctctttgcctatttattttttattttatttttttgagacagtctcgctctatcatccaggctggagtgcagtggtgcaatcttggctcactgcgacctccgcctcccgggttcaagcaattctcctatctcaccctcttgtctcagctgggacaggactacaggcgtgcagcaccacacctggctagttttatatttttaatagagatgggttttcaccacgtaggccaggctggtctcaaactcctgacctcaagtgatccgcccgcctcggtctcccaaagtgctgggattacaggcatgagccaccgcagccggcccattattagtattttaataaagcttattaaatgcttgctatatgacagaaattgtagatgcaaaaataaataagtgaatctttcccctcgaagtttaatgggcatttggttaacccatttctggtggcactaacgtattcataaacactttcggtaaagttctcaagttataaagagaaatgggttgagtatcccttacccaaaatgcttgggaccagaagtgtttcagatttcggatatttttagatttttagaatgcctgcatatacataatgagataccttgaggatgcgacccatgtctaaacacaaaattcatttatgcttcatatatactttctacacatagcctgaatatgcaatatatgtc

SEQ ID NO: 90496 - DNA, 844 bp, Homo sapiens
taaaagaattttacatatacagtactttagcttttaaggcctaaaggatttgccttttgttatttccaagactcatttttaataaattaattttttattttctttggactcatagcagtacatgtgattcatgggactctggaaaagcagacagattcaactaggcagaatcaggcaaggcaataagaaacatcttaacacgggactgatactctacagagaaaacttagtttcttaaatccttattttataaacacactgggcaaatacaggaaacaaggccacagaaagtgaggctggaggcaaatgctaagataactaatagagaaagatttttgcaagattttgcacattaaccatagaggaagacagtgtaagtggctttttttcctaaaaggagatcatggtttagctgatctatccaatatggcagccactagcaacacgtggccaattaaatgtaaattaattaaaaggaaaaattcgtttcctaagttgcactacagttcatgtacgtaatagccacatgtggtttgtggctactgctctgaacggtacagacacagatcactgtagaaagtgctaatggagagtgctggcttaaaggakgaagaaaggaaacagagaaaggagagagtatgacctaggttagtaagtccagaaagtagacccaacaatcctactatctttggataatcagaatttattttttcatatgaaagaaattaaaatgaatatgctaaagttttatttattattattatttgagatgcagtctcactctgccacccatgctggcgtacagaggcacgatctcagctcagtgcagcctcgacctcccagg

SEQ ID NO: 90497 - DNA, 553 bp, Homo sapiens
tgagccttgctggcctctgggcacactctcctcccatgcacatttactttccctaagtggtaaratcttgatttctttgtgtaaacttttcatcaagatataaatctttatggaacttgaaagcattatgttatgaatctgagcacaggaaacagcaattcagacattttcatatttccaaatacttaaaggtatcaagacggtcttccaaatacatactctcttatctgattctcatagtaatatcatagtccaccttacagatggggaaacttaagctaagaacctgtaagttacttgactggggtcagctagcttttgccctaaacctgagtcctctagatccaaacttcatactctgtcctccacagttgcttctggatctaggccaccccaaatagaaggctctttgcccaagagcttgcgaatcagtttctcagacaacaaaatgaagtaattttttctcccccgtggcctctcctttcagggctgcgccccctcctttcccctctcctgggaagcactggcctctggtgtctttaaacatggaaag

SEQ ID NO: 90498 - DNA, 623 bp, Homo sapiens
caatcttccctgcgagcattggaaagaaaagaggtctgaggctgacccttggcttaatcatatagtgcatcatctctaggagacctggggatgcactgccacagagtaacactcattctatccctatggcccagctcttggctccatactatttgttcaattttcaaagccaatgattgtgagggattcaaatgtcattgtcagaggatcctcaaataactagaaagacatcttcagttcattaaattgaagtccwgtgaagctaagagccagcaatattgatttctgttgtcattcttaaaagtcagccaggaattctactccctttattttctgaacttcaagcgactagcctctcaaataaaagattccggaaaaaggtcattagagatcactttaccctcaaagtcgagaggctagagatgacacaggtcaaatcaagactggcaatgggacctgagaacctagtgatttggcattttaaagtaaggatcctggtcttttatgagccgtgatttatctatctatgaaataacacccttttctcaggatgagtcactggaaataaggtgatacatttatagaataaagatgaggaacttgcttaacatcactaacaatca

SEQ ID NO: 90499 - DNA, 623 bp, Homo sapiens
caatcttccctgcgagcattggaaagaaaagaggtctgaggctgacccttggcttaatcatatagtgcatcatctctaggagacctggggatgcactgccacagagtaacactcattctatccctatggcccagctcttggctccatactatttgttcaattttcaaagccaatgattgtgagggattcaaatgtcattgtcagaggatcctcaaataactagaaagacatcttcagttcattaaattgaagtccagtgaagctaagagccagcaatattgatttctgttgtcattcttaaaagtcagccaggaattctactccctttattttctgaacttcaagygactagcctctcaaataaaagattccggaaaaaggtcattagagatcactttaccctcaaagtcgagaggctagagatgacacaggtcaaatcaagactggcaatgggacctgagaacctagtgatttggcattttaaagtaaggatcctggtcttttatgagccgtgatttatctatctatgaaataacacccttttctcaggatgagtcactggaaataaggtgatacatttatagaataaagatgaggaacttgcttaacatcactaacaatca

SEQ ID NO: 90500 - DNA, 623 bp, Homo sapiens
caatcttccctgcgagcattggaaagaaaagaggtctgaggctgacccttggcttaatcatatagtgcatcatctctaggagacctggggatgcactgccacagagtaacactcattctatccctatggcccagctcttggctccatactatttgttcaattttcaaagccaatgattgtgagggattcaaatgtcattgtcagaggatcctcaaataactagaaagacatcttcagttcattaaattgaagtccagtgaagctaagagccagcaatattgatttctgttgtcattcttaaaagtcagccaggaattctactccctttattttctgaacttcaagcgactagcctctcaaataaaagattccggaaaaaggtcattagagatcactttaccctcaaagtcgagaggctagagatgacacaggtcaaatcaagactggcaatgggacctgagaacctagtgatttggcattttaaagtaaggatcctggtcttttatgagccgtgatttatctatctatgaaataacacccwtttctcaggatgagtcactggaaataaggtgatacatttatagaataaagatgaggaacttgcttaacatcactaacaatca

SEQ ID NO: 90501 - DNA, 592 bp, Homo sapiens
gcaacaataagatagatttaaaatggagacaaacagaaatgaggaaaagggaagaagagagggaagaagggagaacaagtcaactaaagcaacatcaaaatacataggggattttagtaatgcttttaartgtagtattcttaattagtaaaactaatacacaattgtgcaaggaaataatgactttaggagatggtaatacttttattgattaaatactatctcatgattcttcataattcttcagtcaggtgtgcctaaataaatcctaagtgttaaaagacacttatctatatttaaatagtttaggtagaaatgagttaattagcctggtctaaaatatgtctcaaatatcaaatagatttcagaaatataattttgatcataaactacataaataaattatgacagataccttatttcctttaaatgatcaacggcctataaattgatggcaaaatatatttcagatttcaaggtgatttgagcttgctgttgagaaagttttaaaaatgcggggacaaaactagttcgaccaatattacatattttttctctccaggtagctaaaagtgtagaatttgtagttatg

SEQ ID NO: 90502 - DNA, 592 bp, Homo sapiens
gcaacaataagatagatttaaaatggagacaaacagaaatgaggaaaagggaagaagagagggaagaagggagaacaagtcaactaaagcaacatcaaaatacataggggattttagtaatgcttttaaatgtagtattcttaattagtaaaactaatacacaattgtgcaaggaaataatgactttaggagatggtaatacttttattgattaaatactatctcatgattcttcataattcttcagtcaggtgtgcctaaataaatcctaagtgttaaaagacacttatctatatttaaatagkttaggtagaaatgagttaattagcctggtctaaaatatgtctcaaatatcaaatagatttcagaaatataattttgatcataaactacataaataaattatgacagataccttatttcctttaaatgatcaacggcctataaattgatggcaaaatatatttcagatttcaaggtgatttgagcttgctgttgagaaagttttaaaaatgcggggacaaaactagttcgaccaatattacatattttttctctccaggtagctaaaagtgtagaatttgtagttatg

SEQ ID NO: 90503 - DNA, 528 bp, Homo sapiens
ctctggctgcggtgtggagtggagatgccaggtggcagtggtcaaagggagaccagtaagcaggctgtcgaaggtgtccaggtgagagatgagccaggtggtaggattctgggtgtagacttaactactctccctctcttttttttttttttttttttttgagagagagtccagctyttgttgcccaggctggagtgcaatggtgtgatctcggctcactactacagcctccacctcctgggttcaagcgattctcctgcctcagcctcccaagtagctgggattataggcgtgtgccaccacgcccagctaattttttgtatttttaatagagatgggatttcgccatgttggccaggctggtctcgaactcctaacctcaggtgatccgcccacctcggcctcccaaagagctgggattacaggcatgagccactgggcccggccgacttctcttaacctcagtctcttcatctgtagagtggggctagtaaaggcccctgcctcatagattcattggaggcctaa

SEQ ID NO: 90504 - DNA, 528 bp, Homo sapiens
ctctggctgcggtgtggagtggagatgccaggtggcagtggtcaaagggagaccagtaagcaggctgtcgaaggtgtccaggtgagagatgagccaggtggtaggattctgggtgtagacttaactactctccctctcttttttttttttttttttttttgagagagagtccagctcttgttgcccaggctggagtgcaatggtgtgatctcggctcactactacagcctccacctcctgggttcaagcgattctcctgcctcagcctcccaagtagctgggattataggcgtgtgccaccacgcccagctaattttttgtatttttaatagagatgggatttcgccatgttggccaggctggtctygaactcctaacctcaggtgatccgcccacctcggcctcccaaagagctgggattacaggcatgagccactgggcccggccgacttctcttaacctcagtctcttcatctgtagagtggggctagtaaaggcccctgcctcatagattcattggaggcctaa

SEQ ID NO: 90505 - DNA, 807 bp, Homo sapiens
cctttgattctgctgaggccctccctctggggatggcatctacagcaggaaatagtagaagtcttctctgcattcttttgtaccttctatgtttggaatctattgcctattccaaaatgaacaaataaaggtaacattcttattttcaagaaaataattgtggtatgtgtgtaggtcagggtgggagtggatgaaatgaaaggctgcttcacagaacagcagcatttgggctaggcttggaattcagtggttcccaccccggtcatactctggaatcacccgcagagctttagaagtcccgatgcctgggtcccgcccagaggtgctgttttgattggcctggggcagggcgtgggcttcaggacttttaaaaagccccctaggtggttcaaatgcccagctaaggtggagagccagcgctcgatgggggaccaggattccgctggcagtggaaggctggagagacggagtgggctgtgctccaggagcagcgtgagccaaggcagggctgaagccgatgatttgtatggaaaaacctgaaaaagaattgctttgggggtgtagatgcttaaactaagcaaaacaaaacagaacaaaacaraaaggggtggccctgccttctgtgccctggtgtgcttattgaattggttcacagaaatgctcaatcctcatggccaggttgctcaatctcagaaggaattcatttgagggatggtaataattaggtctgcttacagggagaaatgctatgcagtgcaaaatccctctccacacaggaacggcctttcctagtcctgagctttgctg

SEQ ID NO: 90506 - DNA, 807 bp, Homo sapiens
cctttgattctgctgaggccctccctctggggatggcatctacagcaggaaatagtagaagtcttctctgcattcttttgtaccttctatgtttggaatctattgcctattccaaaatgaacaaataaaggtaacattcttattttcaagaaaataattgtggtatgtgtgtaggtcagggtgggagtggatgaaatgaaaggctgcttcacagaacagcagcatttgggctaggcttggaattcagtggttcccaccccggtcatactctggaatcacccgcagagctttagaagtcccgatgcctgggtcccgcccagaggtgctgttttgattggcctggggcagggcgtgggcttcaggacttttaaaaagccccctaggtggttcaaatgcccagctaaggtggagagccagcgctcgatgggggaccaggattccgctggcagtggaaggctggagagacggagtgggctgtgctccaggagcagcgtgagccaaggcagggctgaagccgatgatttgtatggaaaaacctgaaaaagaattgctttgggggtgtagatgcttaaactaagcaaaacaaaacagaacaaaacaaaaaggggtggccctgccttctgtgccctggtgtgcttattgaattggttcacagaaatgctcaatcctcatggccaggttgctcaatctcagaaggaattcatttgagggatggtaataattaggtytgcttacagggagaaatgctatgcagtgcaaaatccctctccacacaggaacggcctttcctagtcctgagctttgctg

SEQ ID NO: 90507 - DNA, 1871 bp, Homo sapiens
ttagttttaaatctttttcatatgcaagcagtttattctcattaagagaaatcctatcttctgcttgtttaactctgtcagttaaatccgttaagtttatttgtgtttgcccagtggtaatttttattgagggaacatctgaaaccatctgcagggaggaagttgaagaagctcttggagtgccccagctctgttactgattttcctgacatctttaccacccagaacggctccttccatccacgggaggctgaccacagggttgctcatctctgagtccttttgagttttgaatttggaataataggaacagccttaacttttgagatttcatattgtgtgctttttttgttgcaaggggtttcagagagagacagagccctaaagagctaggattaatgatttccagtgcaacattactagggagcacaggcagaagggacagagtccctgtttcctgctttcagatgaagggaaaggatgcataattcatccttctgggagtgatcattccatcctctgagttcgtattgcattttgtatctttaccagacccctggcacttcctccctcaggtcacgttcatctgccttattcccctactggactctgaaagccttgagtgaagactttgtatcattcattgtgatgctgtatcattcattgtgatgtgtatcattcattgtaatattggaccccctcgtttatccagtagagtgttttgagtatagaaactctttttagtgtttggtgaatggtgaatgaatgaatgagtgggtgaattcatgaataccattccctgaatatagccactgacttcccagaatgggtactgtcatggcataactgagacaaccacatgtgaatagccctggggttccagggaaattattattgttgcattatcattgcttctgttttataagacttttaaacatttatttgcttaacttcattttctttaaggaaaaaaaaaagatactcacctagctaatcaaaagtcttgcggctgggcgcagtggctcacgcctgtaatcccagcacttcgggaggccaaggtgggtggatcacccaaggtcaggagttcaagaccagcctggccaacatggtgatgccccttctctactaaaaatacaaaaaaattagctgggtgtagtggtgtgtgcctgtaatcccaggtacgtgggaggctgaggcaggagaatcacttggatccaggaggtggaggttgcagtsagctgaggtgcaccactgcactccagcctgggtgacagcaagactccgtctcaaaaaaaaaaaaaaaagtttcttgcattggttctttcagtataaatagcaatttccaaatgatgtagaacaaagataaccatgatcacaaaaccaggcatctcaaaaagacaaactttatatttcagggcaaaaaaaaaaaaaaaaaactcaaacaaaactttgcctgtcaactccccttgattcccatccagattttttagaatctcattttgacttaaaagaagtttttaatagattgagctttcaactgtgaactaggatatcaagataggtggtaatctgtccattcctggaggtaggcaagtagaagttggatgactaccaaagaggaaaatagaacaggaaataatgactagaatacagtgaaaagtccagcaacatgatctaggaacagagaaatgacaaattcaactccacaactggtaaatagaatgagtagtggaaaatagcagaagatttaggcttagacagtcctgagactgaatcttggctctagtattggatagctgtgtgacttgaggaagtaacataacttctttgattacatgagatatacatcataacgaatctagcacagtgcc

SEQ ID NO: 90508 - DNA, 2894 bp, Homo sapiens
tatggttgaccctttgggaatttcctaggagccaaatgtctctttaccacaattgttcttagaagaaaagcttttcggtaatgcaaaaaggatctaatatgtcagcagattctcttttacaagtcctttgaaatataagaagtttgtctaagggttttctctctttgcaagttgttttcagccaaatgttagagcagggtaaaaaagtagttaactttaaaagcttagcaggtgtttttacttayttattgaactttgtagagagagggaaaatgttggtaatagttgcaattaatttttcagatgagggcaagagaaattttgaggtgcttgaaatttattaaatgtgctgtgttttctcagtcacttcacttaattattttggctttttttgttaatgttaaaaactagagcgtctctaatgaaaagggctagtttttaaaagatcgttgtaaaagtactcagactatttttattctagaaaatgatatattattaaaggcatcaataataataataataataatagtgttcagaagattataccagagtgtgccaatggctatagacattaaaaataaattttcaaatatattttcgggtgtgtaaatttttggagtgttaacatttctatctaaaaatatgtagtacatgaagtttaagaatagttgtatacattttatagttacaaagtagacatttaaaaaatattgtataatcttatggaatataacttttaaaaattttaaagaatctgaacttttgatattgtgaacttaaattttgagctatttatttcatctgaagatttataaaatattttataaatattttaatcttctatctttgagaacaataagcctggatttagtatgcctaatcaaaagaaattcaatgttaggattttagtattacgcatgatatttaaataaagagctaaatttgtgtgtgtgtatgtatgtgtgcatgtgtgttttcattacttatttccaccaggtttctggaatagcctgtgtctactcttaccatcgttttcagctccagtgctattgctatgtaatcatttgtagcgtctgaacccatgttaaattttaaaagtttacataaaacaataccacttatattgtacagtgtgtttgcttatgaaattaatttaatagtaattttctggcaatttattaatcagcttttgtagttagtacatgatagtggcagcatgcataggacatggagctgatttgatggagaagcacattaaactaaaatgcactagttgttccattaggtcaaaatgacatttccattaagtattctgaagcctattacattgtaattaaatgacatgccattgatttctcctttctctgcttccccacttctcattcatattgatattattctgcttggggaatggagctgcatgtctcccagactaattcctcttgagtttgggggatcttggatcatgctgggttttgcattgtttgttacattcctttttggcagttcatcagtatctgtcaaatatattgtttgcatcggcttttatctcttaagttttcgattgagaaattgacattccgtttcacatatgcagtttttcactgtgcatagtgtctaaatgcaaaaaactcattcaaaaagttgtttgtttctagtctgacttttaatgtgtgatttaacaaatgttgtaataagcatcttgaaaatgtatttatgttctttattacctttttcacaaatcaaccctatgtaatatgtttttgtactaatatattgtaacatttctgtttgggagattttggtcacgattttgtagctttctggcctttgagataagtaggaaaaatataattatcaaatatgactgggtaaatatttgttaatgcaaacgaggcaaaacatggcatgtcttccaaaagtaattatttctgatgatattcatagatctttgaatcctatcatagtagtcattccatcatgaaatcacatgattgtcagttgaaggtagccatcctaggagcagtattatgcaggagaactttacctaaaagagtttttataatattttaaacctctagttgaaatgcaaaacctgtttaaaaaaataatttatctttgggaggccaaggcgggcggatcacaaggtcagatcgagaccatcctggctaacatggtgaaactctgtctctactgaaaacacaaaaaattagccaggcgtggtggtgggcacctgtagtcccagctacttgggaggctgaggcaggagaatggtgtgaacccaggaggcagagcttgcagtgagccgagattgcgccagccctggccacagagtgagactctgtctcaaaaaaaaaaaaaattaatttacactaaaagtgatgtagttttgtgagtcagctgtgtaatgcagaggctaaacatttaaaaaggccatttttaagaaaacaatttaggccatcagtaaagttcatgtagagttttaggagattattatagtaggaaatattttttaatgatgtatattatactgaaagaaaaccacaagtattcaaccacatacttccaacctaccagatgatttaaaaactgaatttctaaagctaaatgcacatctgtagataatcttgaagtcatattggtagacaaacctttttttttctgccagtgattgaagctatgctatagactaatgttctgattagaagtaaggacttatgattcaaagggtattttgaattttagctgtaatttaaatagcaataatagtaaattatactgttaacttcctttattctgacttggttaattagctaaaggagagattaaggagcattaaatggataaaatgttctgtcagtatgacttattttatgtcataagtgtcattttaa

SEQ ID NO: 90509 - DNA, 526 bp, Homo sapiens
cacacacacacacatatgtgcacaatgcaaactgcagctcaccacaacacaacatgtaccctccccttcctttcatggggataggataactcgaatcttccttctgacttttattgtcaagaaatattttctacactctctatttctatatcagttrttggcagttatatctgcaaacccatgagggttttctggattcagataacacacatcatttgtggaatatgaggaatttaaggagactcgagggtgggcaaagatttgaataaacatcagaacgaggatgattatttgtgaaacagacctttgagaattgagttccaagagcaacagacctttcgatgagaaccaaaaaattcattctgtagctcagaaaattcctaacttcatttcttcaggataaacatgtcattataccaaatagcaatctcagtgtgttaaaatctacctatgcactgtgtcccacagacatcgtcagatgccagctctcctggtgttgccatttattatgttgccgacgattctg

SEQ ID NO: 90510 - DNA, 568 bp, Homo sapiens
atgatcttatatatagaaaatcttacagattttaccaaaaaactgttacagctaataaacaaactcggtaaagctgcgtgatacaaaatcaacacacaacagtagcatttctatacactaacagtgaactatctgaaaaagaaatcaagggaataatcccatttacaatagctgcaaaaaaagagaagatacttaggaataaatttaaccaaggaggtgaaagatttgtacactgaaatttataaaacaatgatgaaagaaattgaaaaagaaagaaattgaaaataaatggaaagatatcctgttcatggattagaagaattaatattgttaaaatggccatactatccaaagcaacctacagattcaatgccatctctatcaaaattccaatgtttgaagcttggtctaggagaatcaatagtattgtgttctctcaaaggataatctatagggcacttgattgacaaggggcttgaacaaaaatataagacacaatcaataatctatctcccataaaacatgcagggagataacttgaacttatctatrttccactctgcttttc

SEQ ID NO: 90511 - DNA, 1331 bp, Homo sapiens
tgcatttttcaacatgtttatctaattgtattatgtataatacattttactctcgaacagttctatatctaaacggtattttttcctgccacatatagtctatattggaagatttcatagttttgtattgcagaggagttctttgtatatcccaagaattctgaaattttggaaaakattttaaacaccttacacactcaagtagcttggtaagagctggttacataattttagccatgataagcaataattttcttttttttttttttgagacagattctcagtctcgtcccctggctggagtacagtggtgtgatctcagctcactgcaacccccacttcccaggttcaagcgattctcctgcctcagcctcctgagtagctgggattacaggtgcccgccactgtgcctggctaatttttgtttatttgttaatttttatttttattagacatggggtttcaccatattggccaggctggtctcgaattcctggcctcaagtgatccgcccacctcagcctcccaaagtgccactgcgcccggccagcagtaaactttcttgaataagaattagtgttacactgggttctacccctggttgctggtagaacagtttttactggtgtcacatcttcctaaactttctcaaatggaattatggtgtcgttaaacttatttttcacgtttagtatgtttttctcttttaaggatttttaattataattttagtttactagttcaaagtagcaaacaaaaaagctttttatgttagaatacctagttttaagaataaaaattaagaattaataatattaaattttaatttaaaaagacttcgttcaaatctttgttgatctctttatctgggtaggaccccagggaagtctgccattttttaaaatattaacccgctgaatggtgggcctttgaaatgagtgaaagaggtcaaccattgttccatatttgttgggcaattccaggcagtgcagtggccagttagaaatcctcacgacttgagctggaagcctgggggaaagtaggatttgggggcagaggtaggtactggaatggtgcagtgaagaagctgttatcttccgttgccaagggactctgttcagctttaatctgtgtcctggctggacggtgcatgtcagctgcccaggctaccagtgtgcagggcgcaggagttagaagcaggccccagtctgtttctttttccattccagaatcgcttctgactggcacatgccttgaagagaggagatattatcttgcaaaactgatccaagtaaaattgaaattgcagggagtaaaaattgggctgtaca

SEQ ID NO: 90512 - DNA, 1129 bp, Homo sapiens
ggtgaaaccctgtctctactaaaaatacaaaaaattagccgggtgtggtggcaggcgcctgttagtcccagctactcgggaggctgaggcaggagaattgcttgaatccaggaggcggaggttgccgtgagcagagattgtgccactgcactccagcctgggcaacagagtgagactctgtctcaaaaaaaaaaaaaaaaaaagaaaagaaaaaacaaaaacaaacatgggtatgtggttgcaataacttacacttcgatgctctggtactgtttttagaaagaccattatttatctcccagaggtgtggtcacagtttattatctaatcaggattagagtgaattgtttgaaaacttagtgtatatttacggggatagcaaagaaggatatttgaaactgaagtatcctagcaaccttggatccctttggtaacccatggcaaacaggctgctgctgctattctctrtggttgaagacagggttttattcttatgtgccataactgggagtgtcaacttttgtcacaaagaatgtgtcaacaatatgccaaagttgaaactgtcaacttgggcaagcatcctatacaattttaaacaataccaaattctgtacagctgtctccttatgataaatgggcattgattttatttatatttattttatttttttgagacatggtcttgctctgttacccagtctggagtacagtgatgtgatgtgaccacagttcactgcagccctggactcctggactcaagtgatcctcccaccccagcctcccgagtagctgggaccgtgggtgtgcaccaccacgctcacttgagttttactatgtttttgtagaaacagggtcttgctatggtgcccaggctgttctccaactcttgacctcaaacagtcatcctgccttgaccttccaaagagctgggagtacaagtatgagccaccgcgcctggctgggcattgattttaaaactgctcctggtgtggacacctgccggtgatggcagccagaattagatgtctgctgggaacatcctgatggctggatgaggctgtggcagggatggctctgaacgaacgtctttcaggccagttaatttttccactgcatttggtggcctgga

SEQ ID NO: 90513 - DNA, 1129 bp, Homo sapiens
ggtgaaaccctgtctctactaaaaatacaaaaaattagccgggtgtggtggcaggcgcctgttagtcccagctactcgggaggctgaggcaggagaattgcttgaatccaggaggcggaggttgccgtgagcagagattgtgccactgcactccagcctgggcaacagagtgagactctgtctcaaaaaaaaaaaaaaaaaaagaaaagaaaaaacaaaaacaaacatgggtatgtggttgcaataacttacacttcgatgctctggtactgtttttagaaagaccattatttatctcccagaggtgtggtcacagtttattatctaatcaggattagagtgaattgtttgaaaacttagtgtatatttacggggatagcaaagaaggatatttgaaactgaagtatcctagcaaccttggatccctttggtaacccatggcaaacaggctgctgctgctattctctatggttgaagacagggttttattcttatgtgccataactgggagtgtcaacttttgtcacaaagaatgtgtcaacaatatgccaaagttgaaactgtcaacttgggcaagcatcctatacaattttaaacaataccaaattctgtacagctgtctccttatgataaatgggcattgattttatttatatttattttatttttttgagacatggtcttgctctgttacccagtctggagtacagtgatgtgatgtgaccacagttcactgcagccctggactcctggactcaagtgatcctcccaccccagcctcccgagtagctgggaccgtgggtgtgcaccaccacgctcacttgagttttactatgtttttgtagaaacagggtcttgctatggtgcccaggctgttctccaactcttgacctcaaacagtcatcctgccttgaccttccaaagagctgggagtacaagtatgagccaccgcgcctggctgggcattgattttaaaactgctcctggygtggacacctgccggtgatggcagccagaattagatgtctgctgggaacatcctgatggctggatgaggctgtggcagggatggctctgaacgaacgtctttcaggccagttaatttttccactgcatttggtggcctgga

SEQ ID NO: 90514 - DNA, 1129 bp, Homo sapiens
ggtgaaaccctgtctctactaaaaatacaaaaaattagccgggtgtggtggcaggcgcctgttagtcccagctactcgggaggctgaggcaggagaattgcttgaatccaggaggcggaggttgccgtgagcagagattgtgccactgcactccagcctgggcaacagagtgagactctgtctcaaaaaaaaaaaaaaaaaaagaaaagaaaaaacaaaaacaaacatgggtatgtggttgcaataacttacacttcgatgctctggtactgtttttagaaagaccattatttatctcccagaggtgtggtcacagtttattatctaatcaggattagagtgaattgtttgaaaacttagtgtatatttacggggatagcaaagaaggatatttgaaactgaagtatcctagcaaccttggatccctttggtaacccatggcaaacaggctgctgctgctattctctatggttgaagacagggttttattcttatgtgccataactgggagtgtcaacttttgtcacaaagaatgtgtcaacaatatgccaaagttgaaactgtcaacttgggcaagcatcctatacaattttaaacaataccaaattctgtacagctgtctccttatgataaatgggcattgattttatttatatttattttatttttttgagacatggtcttgctctgttacccagtctggagtacagtgatgtgatgtgaccacagttcactgcagccctggactcctggactcaagtgatcctcccaccccagcctcccgagtagctgggaccgtgggtgtgcaccaccacgctcacttgagttttactatgtttttgtagaaacagggtcttgctatggtgcccaggctgttctccaactcttgacctcaaacagtcatcctgccttgaccttccaaagagctgggagtacaagtatgagccaccgcgcctggctgggcattgattttaaaactgctcctggtgtggacacctgccggtgatggcagccagaattagatgtctgctgggaacatcctgatggctggatgargctgtggcagggatggctctgaacgaacgtctttcaggccagttaatttttccactgcatttggtggcctgga

SEQ ID NO: 90515 - DNA, 1233 bp, Homo sapiens
tctctgaagatatctatttccagtaaaatttgactatctagtgaagattgtaggcctgataatatattttgaagtacttgttatgatctgaatgtgtgtgtcacccccaaaaatgcatatgttgaaatttgaaccccttatgttatggttttaggaggaggggccttggggagtcctgagaatgggattagtgcttccaggagaagagacaggagagcttttttctcactctccctgctgtccaccatgtgaggacacagccagaaggtggctgtgtgccagtcaggaagggagccctcaccagacacccgatctgctggcaccttgatcttggacttcccagcctctagaattgtgagaaatagacaagtgttgtttaaggcccccagcctatggcagcttgttatagcagcctgagctaagacatatttgattttagcaaaatagcacttgatttgaaagcattctgctcattgccatcacctcctccttcacagttgtggattaaaaaaaaaaaaaaatgaacacatgaccacaacaaaacactgatatgtgctgagtttaatttacttcttttttttttgagatggagtctcactctgtcatccaggctggagtgcagtggtgcagtcttagcccactgcaacctctgcctcccaggttcaagcgattcttytgcctcagcctcccaagtagctgggattacaggaactcgccaccatgcccagctgatttttgtatttttagtagagatgaggtttcaccatgttggccaggctggtcttgaactcctgaccacaagcgatacgcccacctcagcctcccaaagtgctgggattataggcgtcagccactgtgcctggcctttaatttgcttcttattccttggttaggattagggagagaatgtcttgggtggccactgtggaaacagcatttccagtacctgtcggtacttgtctaaggagatttaatgctctccttcctcttgggcagtcattctcacagtggctatggcttgtcttgctacatacactgtgtaaccaccctgccctgctgggccttggtgtacacagatattgggtaaaaatctaatgttgacctagataaacatcacacacacacacacacacacacacacacacacacacccaccacatttttttggtaggtacgttttcaatgtcgtttcatttcagaaaaaatatgggctacccttatattaacatagga

SEQ ID NO: 90516 - DNA, 1233 bp, Homo sapiens
tctctgaagatatctatttccagtaaaatttgactatctagtgaagattgtaggcctgataatatattttgaagtacttgttatgatctgaatgtgtgtgtcacccccaaaaatgcatatgttgaaatttgaaccccttatgttatggttttaggaggaggggccttggggagtcctgagaatgggattagtgcttccaggagaagagacaggagagcttttttctcactctccctgctgtccaccatgtgaggacacagccagaaggtggctgtgtgccagtcaggaagggagccctcaccagacacccgatctgctggcaccttgatcttggacttcccagcctctagaattgtgagaaatagacaagtgttgtttaaggcccccagcctatggcagcttgttatagcagcctgagctaagacatatttgattttagcaaaatagcacttgatttgaaagcattctgctcattgccatcacctcctccttcacagttgtggattaaaaaaaaaaaaaaatgaacacatgaccacaacaaaacactgatatgtgctgagtttaatttacttcttttttttttgagatggagtctcactctgtcatccaggctggagtgcagtggtgcagtcttagcccactgcaacctctgcctcccaggttcaagcgattcttctgcctcagcctcccaagtagctgggattacaggaactcgccaccatgcccagctgatttttgtatttttagtagagatgaggtttcaccatgttggccaggctggtcttgaactcctgaccacaagcgatacgcccacctcagcctcccaaagtgctgggattataggcgtcagccactgtgcctggcctttaatttgcttcttattccttggttaggattagggagagaatgtcttgggtggccactgtggaaacagcatttccagtacctgtcggtacttgtctaaggagatttaatgctctccttcctcttgggcagtcattctcacagtggytatggcttgtcttgctacatacactgtgtaaccaccctgccctgctgggccttggtgtacacagatattgggtaaaaatctaatgttgacctagataaacatcacacacacacacacacacacacacacacacacacacccaccacatttttttggtaggtacgttttcaatgtcgtttcatttcagaaaaaatatgggctacccttatattaacatagga

SEQ ID NO: 90517 - DNA, 844 bp, Homo sapiens
  misc_feature (1)...(844): n = A,T,C or G
cagagggagaacagttttgcatcatgtgagtcaatgagaggagagaccagggttgattcttcagggccgtgatcagaattgacaaaacacagggcagaaggcaaaagtgcytgtcactcctcatacaccgatctgtgtgtgtgtttgtgtgcagaaaaagactcacctgtgttacgtgcaaagctatgtggatgaaaatacccagcatggcataggaatagaacagggctgctgttacagaaaaacagcaactagaacctcagatgaaaattagttttcctaaaatctagatttcttgagctgtaatacactcagatctcctactcgaggcattaaggaaaaacagcaacaacaacaaaaaactgcaagaaatccaagggtcagtcagctaaatagaaagcaggaatgatgaaaacagaaaactcgattaaatnnnnnnnnnnnnnnnnnnnnnnnnnnnnnnnnnnnnnnnnnnnnnnnnnnnnnnnnnnnnnnnnnnnnnnnnnnnnnnnnnnnnnnnnnnnnnnnnnnnncatgggtcagtcggttaattaaaaagcatgaacggtatgaaaacagaaactcgattaaatctagcttattatcaagatcagatgtcaagctacctccccataatacctgctttaaaaatttaatgatggttctgcataaatttcaaaactaaagacactgttatcagctattgagaatatttttaaatgaaaggatgttttacaccctgcctccatttcaacgaaacagctaagtgcttgagccatgtatgggattagactatagagtcctctaatcaatggtattattagagacaacaaaagagctaaga

SEQ ID NO: 90518 - DNA, 1159 bp, Homo sapiens
ttttactgattttattacctataacatcatagaatgtcactgtaataaggaaccagaaaaagtatatgtccccttctttccactacagttgaaagaactaaaggcaaaactaattttggcatgtctagatttaaaccacactgatctagagcccgggctaccacccagatgtttctggccacatgttcaggaccttttctactgttgaaaaaaaaaatctggttgcggctgggcgcggtggctcacgcctgtaatcccagcactttgggagcctgaggcgggcagatcacgaggtcaggagatcgagaccatcctggctaacacggtgaaacctcatctctactgaaaatacaaaaaattagccgggcatggtggcgggcgcctgtagtcccagctactcgggaggctgaggcaggagaatggcgtgaacccgggaggtggagcttgcagtgagccgagatagcgccactgcactccagcctgagcgacagagccagactccgtctcaaaaaaaaaaaaaaaaaaaaaaaaaatctggttgcaaaagattcaagaagatattttataaatttaaagtcattgtaatttatgtattcacttctctctttttttttcctctgtctctctttatccgtctctctcctctattcattgacccagggtctaatttattgaaactcaaatttgatgcttatacttacagtatgaaaaatgaaaaatgtgtgtgtgaggatagatgcaaatgtcatgtgttttcaggaatatcatttaagtttgaagatgattttaacccagcagttttgtttgtttgcttagttttagaaatgaggcctttctatgttgcctaggctggagtgcagtggctactcacaggsatgatcatagtgtattgcagcctcgaactgcaggcctcaagctgtccttccattctcagcctcatgagtagctgggactacaggtggataccaccatacctggcaagtaatattatttagatgataccatttacaaagtaccagtcacttgggctgttacctatgttctaacactttaaaaactgtgtgactttggaaagtttatctttctggtccccagttcaatctctgtaaattgaagttaatatgagagctattaaacagcactttactgtgtattaggt

SEQ ID NO: 90519 - DNA, 630 bp, Homo sapiens
attatccctgattgaaaatgaattctacaagtgctgttttgtaattattattgattatcctcccctcaaaaaawatccttcatttacttccaaatatcctgattactcttggggttgagttataatgatgtgccctcgggaccctggcttcaggaggttgtgcctccgtggggcactctgaactaagagaggaagggagagggacttgcctctctgttcaaatctttgggtgagaagtttataggaccaccaaggtctgctgtttccctttttactttgagttcttgaagctatttggggaatagagcttaattcaatagcaaaagaagttctatgaactttaaagagtaacttcccttaacatctaatattcctccttttgtaagagcttcctcttttatgcctaattttttttcgttgtacattcatacgtctcttattttattttcttatagaatacttaacccatgcttttaaagtcatgaatacaataccttgttgacaggaacactaagaaagccttgaagagctagatgacattagtttcatcaagattctttattcacattcaaaacatcatcagttattaaatatttgaggagtttacaatgttgagctgtaagcagtcct

SEQ ID NO: 90520 - DNA, 1054 bp, Homo sapiens
tgcatgtgccattacatgaaattgatccgtgcaaaaatttacttgtgcccttacactttataagaagtgtttcaatagagccacaaccaagtataaatcccacaattttattttagatacggccattatcaatatatwtttagactgtttatatgttacttaatttcctttttttatttcaagttatcataacaccggccagagactgaatatttacataacaatttctagttttgtattgaattggtgagcctaaaaattgttattactaatattagcacagttttaaattttttaatcttttcataagaatggcaaaatacagcaaattgttaatatgattgcataagttaatagtgactgtggccacttgcagttacatttttgaacagatcaatttcatgcaatggcagacaggagatttaatgattcctgcttctttgtgttcatgctgttatgtgatcccctaccccgagtgtgggtgacacctgtgatttgcttctaagcaatttaacaacgaaagtgacaggatgtacatcattatttgtatataattatatgattaatttacataacattgcagtgctggacttgctggaggaaggactcaccttgaggaagcaagtgaccatgttgggaaaccccatgttgtaaggaattgtgggtggcctctaggagctgagtgtagcctccaggaaacagtcagcaagctctcattactaccactgcaggagactgaatcctgccaactacatgagtaagttggaaagcagaaacttcctcccctgagcctcagataatactgcaacccagataaattatcccttttttgcagattcctgagccatggacactgtgagacaatgaatacgtgattgttaagcttctaagtgtgtggctatattgttgtgcaacactgaatgaataatatgattctgatgccaaaatcgcactgtgcagaggaagaagtatcaccactcaatgagtaagatgttactggatggtcaatacatgagaaacggaattcagcctgggaaacttggtttagggaaat

SEQ ID NO: 90521 - DNA, 781 bp, Homo sapiens
atcctggctggccttaatcccagtatgcttggctatggctgtgcctccctgcgtcggggtgcacctctcttctccatgcccctctttcctggcttcatcttgctctgagttgtcaatgaaaagaatcaaactgtgcaaaatattggaagagatttgttctgagtcawgtatgaggactgtggcctgtgacacagccccaggagatcctgagaccagtgcccaaggtggttgggctacaactttgttttacatgttttaggaagacataagacattgatcaatatgtgtaagatgtatactggttctgtccagaaagatgggacaacttgaagcgggggcttccaggtcataggtagagtcaaagattttctgattggcaattggttgaaagagttattatttaaagacctagaatcaatagaaaggaatgtctggattaagacaagggattgtggagaccaaggttttatcatgcagatgaagcctccatggagtacgcatcagagctcttatcaaacctaaaaaggcgccagactcttagttaatttgctcctggatcagggaaaagacgtcgagagggcagaggactctctacagaatgggaattttccccacaagagacagcattacagggccatttcaaaatatgtcaaagaaatatattttggggtaaaatatttcagtttctttcaaggcctgctatctgtcacatgatgctatactagagtcaggttggaatttggtgtcttatgctacgcagaatctgttttgttagtcttaa

SEQ ID NO: 90522 - DNA, 781 bp, Homo sapiens
atcctggctggccttaatcccagtatgcttggctatggctgtgcctccctgcgtcggggtgcacctctcttctccatgcccctctttcctggcttcatcttgctctgagttgtcaatgaaaagaatcaaactgtgcaaaatattggaagagatttgttctgagtcatrtatgaggactgtggcctgtgacacagccccaggagatcctgagaccagtgcccaaggtggttgggctacaactttgttttacatgttttaggaagacataagacattgatcaatatgtgtaagatgtatactggttctgtccagaaagatgggacaacttgaagcgggggcttccaggtcataggtagagtcaaagattttctgattggcaattggttgaaagagttattatttaaagacctagaatcaatagaaaggaatgtctggattaagacaagggattgtggagaccaaggttttatcatgcagatgaagcctccatggagtacgcatcagagctcttatcaaacctaaaaaggcgccagactcttagttaatttgctcctggatcagggaaaagacgtcgagagggcagaggactctctacagaatgggaattttccccacaagagacagcattacagggccatttcaaaatatgtcaaagaaatatattttggggtaaaatatttcagtttctttcaaggcctgctatctgtcacatgatgctatactagagtcaggttggaatttggtgtcttatgctacgcagaatctgttttgttagtcttaa

SEQ ID NO: 90523 - DNA, 1330 bp, Homo sapiens
tttttatttctaagagtcctcctctcattctccaacaggttcccaacctttcccagcactggccctgcagctccctgcctccggctcaatagacctggcactcccggaagcagcttcctttcttggcaccaaatgctctgagtgaggggtggaggtgaggggctggcacaggcttctggaatctcaatctagaagtggggcatgtggctgcttccaatcttctggtgacctatacctgcttagcatcccttagggccaaagcataggcagggcatgtgtgtttgcctgcagaggggagggaggtgcaaaatagcccactccaagtggggcttgggagggaacacttttttctttctttctttctttctttttttttttctaccactatccacctggagagggaacacttttttctttcccttatagtttcctaaagagagaagctctctgcccaaggcattcccagagctgggacggggtgggtgggggtggagaaacagggaggactgttcaggtgctatttagctccaggctgccagaccaggcccagcgagtcccagcaggccctggagcaccccacacccatggcctcagctgcactcccaggggtgcagagcttgggcccccagcagctcaggggtggggtgaaggccatggatccttcttccatgaaattggctggagtagaggggcaattctttgacctctgcacaagagccttggtttggccaagtgtctctgtgatctttttcacagaaaatctgatactgtcagttcccagctcacagcctctgtaagagctgatgtctgcctccatttccacctcttctcccactcattggccatgtgtttctgcactggccttctcccagtctctctgttccagggccattgcatgcactattctctcgctcgccctctgttccagggccattgcacacactattctctcgctcgccatgctctccctactccctctgagctaagctgacactcacgtatactttgggtgtcatctcaagtgtcactttgtcaaggaagtcttccctgatgccctcggcaccctgcacttctcctctgcagcagttagcacagttataatcacttatcgatcattagttgaatatctgcaccccccttgcctataagtccyataaaggcagtgttgctcacattggcttcctagcccctaggacagtgcctggcaaattaaacaggaggtcattaagcatctgttgaaagaagaaatgaatgagtgagtgaatgagtgaatgaaccctatcttcccaatctctctccagctgagcctccttcttcatcccatggccgt

SEQ ID NO: 90524 - DNA, 662 bp, Homo sapiens
cctgtggggcttttgctacctgcacaagggtcaaaatatgggatgagagagaaatgtgtactctgaaaaaggtcctacaggtgagaaccataagattagaaactggggtgaagattactggccaaattatacccagtaaagtagtttatttggcctgaggaatgctttaaaagtctttgaatttgaacagctttgagggagcagggcagctctccacagtccacacctgccccattgacttacacaacccttccttcactcacctgtgttacctgactggscccagctcctggaatccctacactagctgatctctaaggccgtctccaaattatctaatctatggagcaatacatttttgaagtccttactggctctatgctataactccacatgaatttgttttcagaaccctagaatatgaggtgtctcagaggagactctaggcatggtcactgaagttctctctggagtagcagaaaatgctgacataaaagaagcccttcctcctctctaaaactgtattcaaaggaggctttgggactttgttagtcagtgatctccagagaaacagaatctataggaggtgtgtgtgtatatatatattttaaattttattataagcaattgtctcacatgattttggaggctgataagtccca

SEQ ID NO: 90525 - DNA, 2053 bp, Homo sapiens
tgtgcccagtaggtgatgatagccccctggtggttaggtagcagatatttcagaagtagcagtgggatctcctggatttcccccgttaactgacgatatattcattggcatttacagaaattcactattacttctagaaagtctttaggcagtgagatgaatgtattagtcaagagaagttaggttgtcataaaaaacacattgcttctacttacaactcaataatcagaagcctcatggccctgccgaactgcgacttggcaagtggatgtggaggagcagatggcactcttgctaagcattgctgtctcagccccaagaagtatggaggctgtaagcaagggataggaggaggagctgctaaaatgtattcttaattttactgcattcattctcacatactgatgataccagggaagatagtcaattacatacataagtcttttatttaatcctcatggcagtcagagaaaacagagaagttaagtaacttgccagaagttacacagctgttcaggtctcctggactccaaagctatttgctttttattattccatgtttgcaaaaaaaaattatatgccttaaaatagcctcaaacattcactgagttcctactctgttattatctcagttttcttcacagcaacccagtaagatgagattgctattatcctcaacaggatcacagagggttaagtaacttgatcaaagttactgcaagcagaaaagatataatgtgagcccagatcttctcccttcaactgactggaatttgaaatccaatcaattcccagcctattcacagtctgatgctttttccacctccttaattggtgatgaagatacttcaattattcctattatcaatgtcataaatcataggccataaactatggttagttcagtaactgctactctggaggaaaatagcttctttctaacagaaacctttatttttcatttgagtaagtcattgaacatttccaaagcatagacttctttggccttcacaaataaaacaaagataatgggtacattaattctactaaatacacatcaagtacttaagagagatgcttaactctaactcctaggatgtttttgaaacagaatctgtaaagaaaaagacaatgtcaattgacatagttgagaagagaggcaggtgaaatgctgtcaggaaagtttaaaggaaattaatgaagactaagaacaatttttatttaatgtaaaggggaatgcatgtcataaaaatgataggaaaacaagccatatagtaagactttattagggcataggtacacagaaccaaaccagggaagataagagtgtattgtgctaaagaaagacaacagagttgttgggatattcactaagttacaagttatctgccatatgcaaaatctagcccatttgcagttaaggtttgggacttgtctcatacagattaaacattgtttatctgcaaatagattgatttctttatctgggctttaaactatataaatttgttaaaaataacctttataacaggacatatttgcaagatggctcagaataattactctrtcttcaaattattgtgaaaacaaggggtgttagatttattttcaccagtttccttaaaaggcaaatcactggctcaagtcagagaaagcatcaaaatggctacatttaaattgaaagttgatacagaagggtctacaacagggtctcaactctgactgctcattagaattgcctgaggaactgtcaataaacattgctgcctgggcctgcggacaaaaattctaattaaagatggggagttgagggcgcagtacaagggctggtgacaagcaattatatttttaaaattcttcccggatagtctgatgtctgatctgtagccttccaccatcagtagtgtatgaaagtacatctctttgactaatcagtcaacccattaaaaaaaagaccacaaagcaaaaaccctaactcttgaaagattagccatgtcatgctatgaccaatgttagttattagtgttacatttttactttggtatagtttaat

SEQ ID NO: 90526 - DNA, 959 bp, Homo sapiens
gtctctctccctcttcttataaagccaccagtctcatcataggggccccaccctgataaccttatttaatcctaattacctctgaaaggccccacctccaatcaacataggaaaatgggaactatcttcscaacacatgaaatttgggagacacattcaaaacacagcagcatctattgggaagatgactaaataatgtagacgtttcctaatacgaaagtgagaaaacttctggcaaagctaagtaaacatagccaataagttccttttgtaaaaaactattcctctgagagttaccattttccatctgttccaatcataacatcggtttttttgtttgtttgtgtttgtttgttttttgagacagagttttgctcttgtcgccccggctggagtgcaatggcataatctcacctcactgcaacctctgcctccccagtccaggtgattctcctacctcagcctcccgagtagctgggactacaggcacacgccaccatgcccagctaatttttgtattttttagtagagactgggtttcaccatgttggccaggatggtctcgaactcctgactttgggtgatccacctgccttgagccactgagccaggacccatccatagcatcttgtcagtggtatgggtagccattactttatttaacaagcaattattacacatcaactaagggaagggccagttaccttcatctctcctcctgtgcactggatctcagttgttcttgcatctattcttgattctctcttaatccagcatctttagtacttttcgtctcatttacttaacttgtacctgagactgagaatgtagtaacctgagagtattttttggtcgtacaggaagtgtatcacatctttgcttgcaggtgattatttttcctaatttaattaggcccataaaatgtaaacaagcaactggggctcagtcattattaattt

SEQ ID NO: 90527 - DNA, 959 bp, Homo sapiens
gtctctctccctcttcttataaagccaccagtctcatcataggggccccaccctgataaccttatttaatcctaattacctctgaaaggccccacctccaatcaacataggaaaatgggaactatcttcccaacacatgaaatttgggagacacattcaaaacacagcagcatctattgggaagatgactaaataatgtagacgtttcctaatacgaaagtgagaaaacttctggcaaagctaagtaaacatagccartaagttccttttgtaaaaaactattcctctgagagttaccattttccatctgttccaatcataacatcggtttttttgtttgtttgtgtttgtttgttttttgagacagagttttgctcttgtcgccccggctggagtgcaatggcataatctcacctcactgcaacctctgcctccccagtccaggtgattctcctacctcagcctcccgagtagctgggactacaggcacacgccaccatgcccagctaatttttgtattttttagtagagactgggtttcaccatgttggccaggatggtctcgaactcctgactttgggtgatccacctgccttgagccactgagccaggacccatccatagcatcttgtcagtggtatgggtagccattactttatttaacaagcaattattacacatcaactaagggaagggccagttaccttcatctctcctcctgtgcactggatctcagttgttcttgcatctattcttgattctctcttaatccagcatctttagtacttttcgtctcatttacttaacttgtacctgagactgagaatgtagtaacctgagagtattttttggtcgtacaggaagtgtatcacatctttgcttgcaggtgattatttttcctaatttaattaggcccataaaatgtaaacaagcaactggggctcagtcattattaattt

SEQ ID NO: 90528 - DNA, 1086 bp, Homo sapiens
tgcatgttcaaataatgatctaacaaagaaatttttwaaagtctgtttcccatattgaatcctcagaaatgtctcttttgctctgctaattgcagatttggggaatatgctagtaccaatcaaagtgaccactaaaattactggggaaggcaataactggggtcaatcatcttatatattaaggagcttcagttttcttttgtgtaaaattaagagttttggccagataaactttaagatcccttccaatgggtaactttttcccctcactttattttagataaagttttcttacatttagccaaacagaggcctagggaatcttttttgtatcctttgcttaatcaacttcaatggagtcttgaggagaaaaataaaatatttaaactaatcctaacactaacaagtaatttctgctatggattcataatggccaggcttccctgcagagagaaaaggaacatttgtaatgctcttgggaaaagcttttgttttagtcacaatgatagtgaaaatttcacttctgaaaaaaaaaaaaaagaaaaaaaaaagtgtgccctggcttttcaggctttgctgctattgaagagcatggtttctctcaaaaggggctaatctgcaaggcttgcttgagaagagtataacaaattgaatggaaccaaatgtctgggttttttagtgaagaacaatgctatcaggagagagcattttattgtttttagttcttttctcattgaaagggactttgggggcattatggagcagtaaaacattgcaaaggcaatgtttcagtcttgaaaagaagaagaatgaggagacgacattgattttgtgggtaaggcgggcatggtgaatcaccactaaattgaattgtattgtgatgaattttaactaactttctcaaatgaaagttttagtctatgtaaaaagatttttaaaatcagaatttgtaattaagactgttatgactacttttcttcttttctttaatccagcctgcatgcaattacaattcattcaattaccaggacattgaatattattatgctaaatctaacaagaaggactattaaatatagaaccttg

SEQ ID NO: 90529 - DNA, 2672 bp, Homo sapiens
tgacaaaaagaaaacataacttacttttaagcacatagtgtgtgtgtgtgtatatatatatgtatatatgtatatataagtatatatgtatatatgtatatataagtatatatgtatatatgtatatgtgtatatayatgtatatatatgtatacatatatgtgtgtatatatatatatatatttagatggagtctccctctgtcaccaggctggagtgcagtggcacgatttcggctcactgcaacctccacctctcgggttcaagcgattctcctgcctcagcctccccagtagctgggattacaggcgcccaccaccacgccccggctactttttgtattttttgtagtagagacggggtttcactatgttggccaggatggtctcaatctcctgacctccacccgccttggcctcccaaaatgttgggattacagacgtgagccactgcacctggcccatgtatttttaataatacattgtaaatgatttgacattatccatcccatattttatatgggcttagttatagattcactctagaattgctggttatagggcaaaaatcattcttttcaagacttgttttaacttctagtccttcagctttgtgaatggaacatgtacgtatgacctacaagggatcaagggaagacaaggatcctctgctggaaagatctgcctcccttaccattgctggaccccttttgtgtgagttttctccttcatgccatctgtaccaaaggtgaccatttggttctgaatccaaactctagattgttcttcttatagtgcttcaaaagaaagactgcaagccctatttctatattttatatagtatttgtaattttatgttatagaacttgagtcaccatgtatttcattcattcagtagatgttgagcctccggaatatgccaggcacagctgtagatgagggagatactgtgaagagaggcagcgttcatggtgtttacccgaggtcaacagaaaacaaacaaggtcaatgcagagagggataagtactgtaaagaatgcagagcagagtatgacatgggcaggcaaggtgacagaggggctgaaggagaggttactttagatgctcagggaaatcctatgagagaaggtggcacctgggcagacctgactgacaggaagaagccaccttagaagatctgggggaagaatgtcccaggaaagggcagaagccctggggtggaagcgagctgggcatgtccatggaagacaattctgagatgtctcggcatgctgagggaaggagagtatgatataggcagggtgcctataggccacagtaaggatttttaagaattttattctaagtgtgatggaaaaccactggcggtttttatgcagagtaatgacacgatccgatctatgtattgctcttgctgcactttagagaagagattttaggaaagcaaaagtggaggcagaaaaatcctttcatgtcagtttaatatatccttaaagagaaggtgaaatttgctttcagctttaaatgacacagagagattacattctggtggtaggaatgtggtcttttacagagcttttgttaccggggttcatgtttccattttctggaaactattaatatatatggatatttttgccagtaactcaagtaaccttgcttggtaaatttcataaaatgttgcaagaagtatcttgtgggaaggccaggttaagtgtaggtaaaataaaagctcacttaagtggttcgatttcaggtcaatacttgttacccccaaaatagtctacaagaacctctcagtactctcccaaacacatctgaagtctgaagactaatattctataaattaatttatgccttgtgctatccagtgaggatgataattaaggtggctttacctaaggcagttattttcatcttgatatgaaagtctcaagatcctttgcagagacaagttttaatacttgggaagcaagctgctttgacatgtattgatgagatagggtaaaataaattaagaaaggatttagtaaagacctcaataatgccaaggatgaattcaacttcttacatactgtattcagatttgttcttgctcatggacctatgaaacaaatacatacacttcatatgttgagtctttgttgctattagatctttttttttttttttttgagatggaatcttgctgttgtcagcctgggctggagtggaatggcatgatcttggctcactgccacctctgcctcctgggttccagcgattctcctgcttcagcctccagagtagctgagattataggcgcccaccaccacgccctgctaatttttttgtatttttagtagagacgtggtttcaccgtgtaggccatgctggcctcgaactcctgacgtcaggtgatccacccgccttggtctcccaaagtagtgggattacaggcatgagccactgctcccagcctagattttctttatttcatttaatggtcttagtctgggttctctagagggacagaactaatggaatagatatacacataaaggggagtttattaagtattaactcacatgatcacaaagtctcacaataggccatctgcaggctgaggagcaaggagagccagtatgagtttcaaaactgaagaacttggagtctgatgtttaagggcagaaa

SEQ ID NO: 90530 - DNA, 2672 bp, Homo sapiens
tgacaaaaagaaaacataacttacttttaagcacatagtgtgtgtgtgtgtatatatatatgtatatatgtatatataagtatatatgtatatatgtatatataagtatatatgtatatatgtatatgtgtatatacatgtatatatatgtatacatatatgtgtgtatatatatatatatatttagatggagtctccctctgtcaccaggctggagtgcagtggcacgatttcggctcactgcaacctccacctctcgggttcaagcgattctcctgcctcagcctccccagtagctgggattacaggcgcccaccaccacgccccggctactttttgtattttttgtagtagagacggggtttcactatgttggccaggatggtctcaatctcctgacctccacccgccttggcctcccaaaatgttgggattacagacgtgagccactgcacctggcccatgtatttttaataatacattgtaaatgatttgacattatccatcccatattttatatgggcttagttatagattcactctagaattgctggttatagggcaaaaatcattcttttcaagacttgttttaacttctagtccttcagctttgtgaatggaacatgtacgtatgacctacaagggatcaagggaagacaaggatcctctgctggaaagatctgcctcccttaccattgctggaccccttttgtgtgagttttctccttcatgccatctgtaccaaaggtgaccatttggttctgaatccaaactctagattgttcttcttatagtgcttcaaaagaaagactgcaagccctatttctatattttatatagtatttgtaattttatgttatagaacttgagtcaccatgtatttcattcattcagtagatgttgagcctccggaatatgccaggcacagctgtagatgagggagatactgtgaagagaggcagcgttcatggtgtttacccgaggtcaacagaaaacaaacaaggtcaatgcagagagggataagtactgtaaagaatgcagagcagagtatgacatgggcaggcaaggtgacagaggggctgaaggagaggttactttagatgctcagggaaatcctatgagagaaggtggcacctgggcagacctgactgacaggaagaagccaccttagaagatctgggggaagaatgtcccaggaaagggcagaagccctggggtggaagcgagctgggcatgtccatggaagacaattctgagatgtctcggcatgctgagggaaggagagtatgatataggcagggtgcctataggccacagtaaggatttttaagaattttattctaagtgtgatggaaaaccactggcggtttttatgcagagtaatgacacgatccgatctatgtattgctcttgctgcactttagagaagagattttaggaaagcaaaagtggaggcagaaaaatcctttcatgtcagtttaatatatccttaaagagaaggtgaaatttgctttcagctttaaatgacacagagagattacattctggtggtaggaatgtggtcttttacagagcttttgttaccggggttcatgtttccattttctggraactattaatatatatggatatttttgccagtaactcaagtaaccttgcttggtaaatttcataaaatgttgcaagaagtatcttgtgggaaggccaggttaagtgtaggtaaaataaaagctcacttaagtggttcgatttcaggtcaatacttgttacccccaaaatagtctacaagaacctctcagtactctcccaaacacatctgaagtctgaagactaatattctataaattaatttatgccttgtgctatccagtgaggatgataattaaggtggctttacctaaggcagttattttcatcttgatatgaaagtctcaagatcctttgcagagacaagttttaatacttgggaagcaagctgctttgacatgtattgatgagatagggtaaaataaattaagaaaggatttagtaaagacctcaataatgccaaggatgaattcaacttcttacatactgtattcagatttgttcttgctcatggacctatgaaacaaatacatacacttcatatgttgagtctttgttgctattagatctttttttttttttttttgagatggaatcttgctgttgtcagcctgggctggagtggaatggcatgatcttggctcactgccacctctgcctcctgggttccagcgattctcctgcttcagcctccagagtagctgagattataggcgcccaccaccacgccctgctaatttttttgtatttttagtagagacgtggtttcaccgtgtaggccatgctggcctcgaactcctgacgtcaggtgatccacccgccttggtctcccaaagtagtgggattacaggcatgagccactgctcccagcctagattttctttatttcatttaatggtcttagtctgggttctctagagggacagaactaatggaatagatatacacataaaggggagtttattaagtattaactcacatgatcacaaagtctcacaataggccatctgcaggctgaggagcaaggagagccagtatgagtttcaaaactgaagaacttggagtctgatgtttaagggcagaaa

SEQ ID NO: 90531 - DNA, 908 bp, Homo sapiens
tcggcaataaaaatgaatgaccgatatatgcaacaacttggatgaaccccaagaaaaaattatgctgagtgaaaaagccaatctcaacaggatacatatagcattattccatttacgagacaattacaaracaagggacacataagaggttgccaggggttggggccaggggccaggggagggttgtggctataaaggggtaataaaaaggaatcttaggatgttatagatgagtatcttgactatggaaatgggctacacatatgataaaactacaaaaagctacatacagacatacacccaagtgcatgtatactggtgaaatgtgaataaactctatggattgtaccaatgtcaattgtttggttttgatactatgctatagataagatgttagatgttaacactggagaagttggggtaaggataaacaaagtttccctgtacatttatttgcaatctcctgtgaattcctaattacttcaaaacaaaatgaaatttaaaaaaaagctttttttgagcagtgagggttaggagtagagaaacagtactggggctgtgataatttaggaatatctggcaaaaacaaagacagaaactctgagggccctgccctcaacctcatagaattaccatggataaatctttgacaaagatgagttcactccaaacttaaaagaacatatgatgatttccaatttcatccatgtccctacaaaggacatgaactcatcattttttatggctgcatagtattccatggtgtatatgtaccacattttcttaatccagtctatcactgttggacatttgggttggttccaagtctttgctattgtgaatagtgccgcaataaacatacgtgtgcatgtgtctttatagcagcatgatttatagtcctttgggta

SEQ ID NO: 90532 - DNA, 908 bp, Homo sapiens
tcggcaataaaaatgaatgaccgatatatgcaacaacttggatgaaccccaagaaaaaattatgctgagtgaaaaagccaatctcaacaggatacatatagcattattccatttacgagacaattacaaaacaarggacacataagaggttgccaggggttggggccaggggccaggggagggttgtggctataaaggggtaataaaaaggaatcttaggatgttatagatgagtatcttgactatggaaatgggctacacatatgataaaactacaaaaagctacatacagacatacacccaagtgcatgtatactggtgaaatgtgaataaactctatggattgtaccaatgtcaattgtttggttttgatactatgctatagataagatgttagatgttaacactggagaagttggggtaaggataaacaaagtttccctgtacatttatttgcaatctcctgtgaattcctaattacttcaaaacaaaatgaaatttaaaaaaaagctttttttgagcagtgagggttaggagtagagaaacagtactggggctgtgataatttaggaatatctggcaaaaacaaagacagaaactctgagggccctgccctcaacctcatagaattaccatggataaatctttgacaaagatgagttcactccaaacttaaaagaacatatgatgatttccaatttcatccatgtccctacaaaggacatgaactcatcattttttatggctgcatagtattccatggtgtatatgtaccacattttcttaatccagtctatcactgttggacatttgggttggttccaagtctttgctattgtgaatagtgccgcaataaacatacgtgtgcatgtgtctttatagcagcatgatttatagtcctttgggta

SEQ ID NO: 90533 - DNA, 973 bp, Homo sapiens
acgtggctacccaggttgtctgtttgtattttgtttatgtagaatcgaatgtggagaaagaaccgttctttctatgcgaacaatcattgcatcggaacagacctgaataggaactttgcttccaaacactggtgtggtaggttgttggctttatttcttgcaatgtctcttcactgaaagggtgatgttcacagggaaaggcccatgattcaaattaaatacagagctggcctgtctgaatcagggaaataatttaaatgataaatgcttaggtaaatgtaatgctgcgactgttggccagagtcagcaaatcactttggcctctcctctctcctgtttccctatctttaaaataagaaagttgaatcagttttttaagatcccttctagcttcaaaattctaaaatctattatcttggaataataaagaagtgacagttaaagatcctattttaataaacaaaaacattcatcattagaatatcaaagacctgagatggggggaggacctctcttttttttttgagacagagtcttgctgtgttgaccaggctggagtgcaktggcacaatcttggctcactgcagcctctgcctcctaggttcaaggattctcctgcctcagcctcccaagtagctgggactacaggcatatgccaccgtgcctggctaatttttgtattttttttagtacagatgggatttcaccatgttggccaggctggtctcaaactcctggccttaagtgatccgcccacctcggcctcccaaagtggctcacaggagtgggccactgtgcctggcctggacccctcatttttaattgcacaagtaaatgtttacttctatagtgtttgaagacatttttttcactattcactttcttaatttctttaataaataatataaagaaaatataaaaatattaaaaatagtataaaaagcagcacagtgggaatttattatttcttaat

SEQ ID NO: 90534 - DNA, 973 bp, Homo sapiens
acgtggctacccaggttgtctgtttgtattttgtttatgtagaatcgaatgtggagaaagaaccgttctttctatgcgaacaatcattgcatcggaacagacctgaataggaactttgcttccaaacactggtgtggtaggttgttggctttatttcttgcaatgtctcttcactgaaagggtgatgttcacagggaaaggcccatgattcaaattaaatacagagctggcctgtctgaatcagggaaataatttaaatgataaatgcttaggtaaatgtaatgctgcgactgttggccagagtcagcaaatcactttggcctctcctctctcctgtttccctatctttaaaataagaaagttgaatcagttttttaagatcccttctagcttcaaaattctaaaatctattatcttggaataataaagaagtgacagttaaagatcctattttaataaacaaaaacattcatcattagaatatcaaagacctgagatggggggaggacctctcttttttttttgagacagagtcttgctgtgttgaccaggctggagtgcagtggcacaatcttggctcactgcagcctctgcctcctaggttcaaggattctcctgcctcagcctcccaagtagctgggactacaggcatatgccaccgtgcctggctaatttttgtattttttttagtacagatgggatttcaccatgttggccaggctggtctcaaactcctggccttaagtgatccgcccacctcggcctcccaaagtggctcacaggagtgrgccactgtgcctggcctggacccctcatttttaattgcacaagtaaatgtttacttctatagtgtttgaagacatttttttcactattcactttcttaatttctttaataaataatataaagaaaatataaaaatattaaaaatagtataaaaagcagcacagtgggaatttattatttcttaat

SEQ ID NO: 90535 - DNA, 882 bp, Homo sapiens
  misc_feature (1)...(882): n = A,T,C or G
tgcattaagactagcctgccctgagcaggagtggagagggaattctccagcctgacaggctgtgaacttgagccgcagcatcagcttttcctaggttttcagcctgctggtccaccctgcagattttggacttgccagcctccagtatagtgtgaaccaattccttcaaataaatctctttctctctctctacacacacaccctattggttctatttctctgaagagccctgactaatacaagggctataccattttgcattcccaacaaacatgtatgagagtgcctgcttttccaaagccctgttgannnnnnnnnnnnnnnnnnnnnnnnnnnnnnnnnnnnnnnnnnnnnnnnnnnnnnnnnnnnnnnnnnnnnnnnnnnnnnnnnnnnnnnnnnnnnnnnnnnntcctatggaccactctaaatcccccttagaaagatagactgggttccgatgataaatataatctattatttctgataagaataccccttcctttatggaatgcagggtgtacatactccttattttttatacatacattttatttttattaagcaaaatttgattagcaacataatgtatacagggaaattytctttgataaaatgtgtcctgatgagaatctagattttacaatggaattgtaaaaaacctaggggagaagagatgccttgttagggcacgtggactcctgacctgacattttttattaaccaagatagtcgtcactttcttcctctccctcttcttacttactccctatcccccaggttctccaaagttttctttgtgttggttgaataaagacaagtctgtgcctttttttcttcctgtagctaaacactttcattttaacacaagcaagtgtaaatatc

SEQ ID NO: 90536 - DNA, 853 bp, Homo sapiens
atgttcaccctagctattatagtatgaataatactataaattactcttaccaagataatgaaaatatatgataatagcacatatttggaggaaatgcaaaacttagtgccacaattaagacttggaagatacagagatgaggattcttattcacattctcatgtaacttgactgtttttcttgtgcaaragtcaatggatcttttcaataatgtgtggattataataatcttactcagaagcaaatgcttctccaggcatgttatatcacctacagcaatttttacctgacacttggtttacagctattgatttgacaaatgcctcttctcctttacaccgaattacatgcaacaccttgagttgtttgctatcatctggctgggacaacgggacaattttatggtcttgcctcagggctatgccagctctcatattcttatccataatctcctccagtgctatctggcatctagtgtctggacttatgtcagtctgtaacgaggtaagtcaaagttttattcagtgtgtacttctctcattgtaggccaataaatacacagtttttaaatcagtgccagaccacagatcatactttgagtaccactgatcaagttcatcaagaaattaattgctagccacagacagtcacagtggtcaattgaattcatgacatgacgctgattgggctgaataagaaaaaaaagtagcaagtctatgagatgtattggtatgttacatatatcccagataataggaaacaaagctattcatcttagtaaaatttatgttcagtggtcttgacttggaaaaaacagaccctccacagtcaaagccagtttattacatcatgc

SEQ ID NO: 90537 - DNA, 714 bp, Homo sapiens
cctttattcccacgttttgcctttatgtgacccattgaaagtaatggactccagcttttctctcaatccaatgtctgccaaaagttttctcmaacctctcagctgccgtagttttgagtctgcacatacctcaaaagttgaagggctcaaagtccttggatgttttggcttttcttctctcctgatttatgccctgtaatttcctgctaccttggtgacatcccaaaacatctgaatagattttaaaaatcatcctgttcatactctttagtggaagtgccagtcaaaatcaatctagtcaccattacaggaagcacattgttggcaaaaaagtcagcccttcctatttgcatgttctgcaggagtagattcaaccaaccccagatcaagaatattgggaaaaatatatataaaacaacataaattttaaaaatacattataacaactattgacatagcacttacattgtattaagtattatatgtaatagagagatgttttgaatgggaaaatgtgcctagattctttgcaaatactaacaccattttatgtaaggaacttgatggattttggcatccaagcggggggtgggttctgaaaccaattttctgtgaataccaaggaactgaaactaaaatgggagagttgcttcatttcccttgcaggaggacttggtgacaggggtgtggcttgccagttctgttcctatgcgg

SEQ ID NO: 90538 - DNA, 1323 bp, Homo sapiens
tgcatacatttttgtgttgtcaaagagccaatctaagatttaattaataactctagtattttagttggtttaagtttctaaattatctttttatttttacaaatttgttatttttattttttactttattttgtcttttctcagattcatgatattaaagttttatttattaaatttttttctttttttcctaagaagtatatttttaaacacaatattgtatttgagaactgcttggattataacccacaaggttttttaatttaatattcattgttttctacaataatggtcaaatatagaggtagaataaaatggtaaattaaaccccatatgtgcatgctaccaaggttcaaaatatttcaattttcttcaattgatttagttgtccttttttctctaaataatttcaaacaaattttccatgggtcaaggtattttgttgatatatactgcaatatttgtctttcatggtacaggtattttcacatgtaactatgatgctattctgttgtagtatttccctgaatatttctgagtttctccaaattattatttagaatttattttttggataagattttaaccaaggttcacatactgcatgtagttgtgacatgccctaagccaggccagaacacttcctttttttctttcttttttatttgcaaacctactttcttttggaatgccccacattctggctgtttctgtttgttctcttataaaatcatttagctaatttccgtaatccctgcatttgttgaaaattgaaggtacatctggagtttccttattttaaaaaatttgaaatgaacactttatagatattcactgagattcatattgttttacataaggaaacacaaaatatcctattgcctatttttagagaagctaagattcaattgtggttcagaagacaacagcttcttttttcctttttgaaattttccatcaaggagtcattcaaaaatttcaattattacttattgtttccgaaataattatttctgaagaattgccaaatgtagattttgaaatatttttactttccttgtattttggctttcatgatacatattygttcttagctttcttcaaatttagtttttcttctgaaactaaaagaatatgtttttctaattgtttgctaatatttgtcagttttcactttacgtcctcctgctgtctggctaaaaagattaaaatttgtttgcattctaatcagtgtttttacaaagcttggtatttctctatagaactttaaatcatctttttactcttttaatttgcttggtggacacattcttctgatatgca

SEQ ID NO: 90539 - DNA, 1323 bp, Homo sapiens
tgcatacatttttgtgttgtcaaagagccaatctaagatttaattaataactctagtattttagttggtttaagtttctaaattatctttttatttttacaaatttgttatttttattttttactttattttgtcttttctcagattcatgatattaaagttttatttattaaatttttttctttttttcctaagaagtatatttttaaacacaatattgtatttgagaactgcttggattataacccacaaggttttttaatttaatattcattgttttctacaataatggtcaaatatagaggtagaataaaatggtaaattaaaccccatatgtgcatgctaccaaggttcaaaatatttcaattttcttcaattgatttagttgtccttttttctctaaataatttcaaacaaattttccatgggtcaaggtattttgttgatatatactgcaatatttgtctttcatggtacaggtattttcacatgtaactatgatgctattctgttgtagtatttccctgaatatttctgagtttctccaaattattatttagaatttattttttggataagattttaaccaaggttcacatactgcatgtagttgtgacatgccctaagccaggccagaacacttcctttttttctttcttttttatttgcaaacctactttcttttggaatgccccacattctggctgtttctgtttgttctcttataaaatcatttagctaatttccgtaatccctgcatttgttgaaaattgaaggtacatctggagtttccttattttaaaaaatttgaaatgaacactttatagatattcactgagattcatattgttttacataaggaaacacaaaatatcctattgcctatttttagagaagctaagattcaattgtggttcagaagacaacagcttcttttttcctttttgaaattttccatcaaggagtcattcaaaaatttcaattattacttattgtttccgaaataattatttctgaagaattgccaaatgtagattttgaaatatttttactttccttgtattttggctttcatgatacatattcgttcttagctttcttcaaatttagtttttcttctgaaactaaaagaatatgtttttctaattgtttgctaatatttgtcagttttcactttaygtcctcctgctgtctggctaaaaagattaaaatttgtttgcattctaatcagtgtttttacaaagcttggtatttctctatagaactttaaatcatctttttactcttttaatttgcttggtggacacattcttctgatatgca

SEQ ID NO: 90540 - DNA, 1323 bp, Homo sapiens
tgcatacatttttgtgttgtcaaagagccaatctaagatttaattaataactctagtattttagttggtttaagtttctaaattatctttttatttttacaaatttgttatttttattttttactttattttgtcttttctcagattcatgatattaaagttttatttattaaatttttttctttttttcctaagaagtatatttttaaacacaatattgtatttgagaactgcttggattataacccacaaggttttttaatttaatattcattgttttctacaataatggtcaaatatagaggtagaataaaatggtaaattaaaccccatatgtgcatgctaccaaggttcaaaatatttcaattttcttcaattgatttagttgtccttttttctctaaataatttcaaacaaattttccatgggtcaaggtattttgttgatatatactgcaatatttgtctttcatggtacaggtattttcacatgtaactatgatgctattctgttgtagtatttccctgaatatttctgagtttctccaaattattatttagaatttattttttggataagattttaaccaaggttcacatactgcatgtagttgtgacatgccctaagccaggccagaacacttcctttttttctttcttttttatttgcaaacctactttcttttggaatgccccacattctggctgtttctgtttgttctcttataaaatcatttagctaatttccgtaatccctgcatttgttgaaaattgaaggtacatctggagtttccttattttaaaaaatttgaaatgaacactttatagatattcactgagattcatattgttttacataaggaaacacaaaatatcctattgcctatttttagagaagctaagattcaattgtggttcagaagacaacagcttcttttttcctttttgaaattttccatcaaggagtcattcaaaaatttcaattattacttattgtttccgaaataattatttctgaagaattgccaaatgtagattttgaaatatttttactttccttgtattttggctttcatgatacatattcgttcttagctttcttcaaatttagtttttcttctgaaactaaaagaatatgtttttctaattgtttgctaatatttgtcagttttcactttacgtcctcctgctgtctggctaaaaagattaaaatttgtttgyattctaatcagtgtttttacaaagcttggtatttctctatagaactttaaatcatctttttactcttttaatttgcttggtggacacattcttctgatatgca

SEQ ID NO: 90541 - DNA, 594 bp, Homo sapiens
ttttttaatcttttatgccatgtttttactgtaccttttctatgtttaaatatgtttaagcacatgaatgctcaccactgtgttacaattgcctccagtattcagtccaataacatgctgtacacgtttgtagcctaggagcagtaggcygtataccacatagcctaggtgctaggctatcccatctaggtttatgtaagtacactctttgatgttagcacaaggacaaaaatcacctaaggacacatttatcagaacacgtctctgtcactaattgcatgtctgcacaaggcttattgtctaaaatttccaaaattttgactcaatatattcaaaaaaggagttatttgcagcaattgcatccactttctttagtgcctttatgtttacttcaatgccaattgcacaaaattcttccacaagtctatattactgttgaaaatgtcttaaggaagccatatatttcattgtattgcccctgaaaaatgtgggctctttgaaagcaaaattcatgctttcaccctgtatggaactcacggtctttcccagggactgcataagcctcctcagtacctgataggagtctaaagtctg

SEQ ID NO: 90542 - DNA, 533 bp, Homo sapiens
tctgtctccacatacacacacacgcatgcctaaatatatattgctttctttcacttttatttctcaatgttattgtgaaatgtgcaattgaattatagaactttttgtttgagtcattttgtttttctttctttattgagaaatagtcttgtttgtttattgagaaataatcttgcagatcaggaggtcaggagatcgagacaatcctggctaacaatcttgtttaatctattgagaaataatcagaacctatggtctgatagttcataagaggaaaatgcaagtytaaaagaatacttatagcacattctgataaatgaaaatagtttccaagtttctttttatgcctatgtaagtgcaagtcccctttagagggaaggggtaattgagcggtttagggaagaatcagtaagagtttgtcagccaagaagtagggaaggtgacccaggacagaaaaagtgcaacatctgaagtgggatcgtacaaggacatggccacattgtggctggtagtcgaaaagggtgataacttca

SEQ ID NO: 90543 - DNA, 863 bp, Homo sapiens
aaaaacacatttctgctctcattccaattctacaagtttcagttaatggagcctactaaccctgttagccaaagagcctgycttccctcttccttacagcccacctcatcttccatatctaaccagtcatcacatcctgctattcatccttagaaatgtccccctccagcccaggctagcatctccatgcccatggccttggctttagtgggaacctcatcatttcagagctagaatattacaaatagtctccaatgtggtttcaaccgatcctagccttcccacttcagtacaacctctatacattaaccagaggtggaaatagattggagcatgaatctgttccacccctgggctgcaacataaaaccaccttccgtaaactgacataaaagtcttttcagacatgtaattacctccacaccagggactctagtcacatgtagtatctcaccattcctaagcacattgccctttcacaaatcttgatcctacacattcaagtctcattgccaggaatatcattcccctctatctcttcctgttaccaccttcagcacccaattcaaatgtcacccatctctgtgggtatccctagacaaccccaggcaaaacgtggccatggtactttgttcacacctatatcaagctcttaccctgtggaattgtaataaaacactttaatgtgtctgtcttgacagtggcattgtcagtctttcacagccggaattacactttttcaccttttatttcagcacctattagaaagccttgacatattaggtgatcaaatacacatttgtggaataaatgaatgactatatagtggaatgtagccaattgagactgatgcttttattgccc

SEQ ID NO: 90544 - DNA, 1124 bp, Homo sapiens
tgtgtgtatgtgtgtttacatgtctgtgctcacctatgtgtgttgagcacagatgctaggccctagatacagtggttaacaagaagaaaatagtctctaccttcataggttattttccagtgggggttataagagagtgacactagattttgagatttttttgaaggccaggtctgactgtatcagattatctatatctagcacagtgcattataaatcttaagttctcaatgtctgctaaataatttttcaagctgaaaatgtcagtttcaggttgaaatcactctcaaagctatgatttgttccaagatgaattgttcaacatgaacatatatatgtctattttagtaaacagatacacgtggatatatatagtttaagcatcatcattcttaggtgtagtcaacagaatctactccagcaagtttaatcagaaaggcatttattagacagtaccgggtgatgtacagcatctccaggagggccaagagccaagaatagatgctccgtagccaggagcacctgcaaacagagaaacatctatccaccatgagactgttctaggaaaaacctctttcctcctgtgactcaactctttccccaggtttcccatcagagcttgccccagaaaaactaaatgcttctattgtcatcccacacattgwtcccttcccttcttccaaatctcatgtgtgtataaaacctgagccatatatggagctctgactgcgagaaagcatgaaaattgtcgctattaactttccggcctccccagtactgaaaggcatactggaaggggaattggaatgagtaatgtgcaagccaatccatcataaaattgctacagtttacactaagattgttgtcataactagctgactgcttggactgtgttcctagagagaaccataaataaaaggatagaagaaggtttcattcaatgcctagaatgtgtcagggtgagatggacaatccccttccctaaattctactccccagacccgaggggcagcggtaagcaagaagtgactctacacatcctagaaatcttaagctttgcaatggaactgagctgcattctctcagagagaagtaacaatgcctgtctgacccacttcaaagag

SEQ ID NO: 90545 - DNA, 1124 bp, Homo sapiens
tgtgtgtatgtgtgtttacatgtctgtgctcacctatgtgtgttgagcacagatgctaggccctagatacagtggttaacaagaagaaaatagtctctaccttcataggttattttccagtgggggttataagagagtgacactagattttgagatttttttgaaggccaggtctgactgtatcagattatctatatctagcacagtgcattataaatcttaagttctcaatgtctgctaaataatttttcaagctgaaaatgtcagtttcaggttgaaatcactctcaaagctatgatttgttccaagatgaattgttcaacatgaacatatatatgtctattttagtaaacagatacacgtggatatatatagtttaagcatcatcattcttaggtgtagtcaacagaatctactccagcaagtttaatcagaaaggcatttattagacagtaccgggtgatgtacagcatctccaggagggccaagagccaagaatagatgctccgtagccaggagcacctgcaaacagagaaacatctatccaccatgagactgttctaggaaaaacctctttcctcctgtgactcaactctttccccaggtttcccatcagagcttgccccagaaaaactaaatgcttctattgtcatcccacacattgttcccttcccttcttccaaatctcatgtgtgtataaaacctgagccatatatggagctctgactgcgagaaagcatgaaaattgtcgctattaactttccggcctccccagtactgaaaggcatactggaaggggaattggaatgagtaatgtgcaagccaatccatcataaaattgctacagtttacactaagattgttgtcataactagctgactgcttggactgtgttcctagagagaaccataaataaaaggatagaagaaggtttcwttcaatgcctagaatgtgtcagggtgagatggacaatccccttccctaaattctactccccagacccgaggggcagcggtaagcaagaagtgactctacacatcctagaaatcttaagctttgcaatggaactgagctgcattctctcagagagaagtaacaatgcctgtctgacccacttcaaagag

SEQ ID NO: 90546 - DNA, 628 bp, Homo sapiens
acattggtttttgaaagtctcttgacagttttacaacccaagaatgtctttctcaaggacctgggagacatccctgaaatgtaaccatcaaggacatagcacccctatctcccagtttctacgagaaggtgagaacctaacttcagtgggtgccttgctccaagttgcagactatattctgtcataaaaccatgagaagtttgcttttcttttctataaagccaattagctaatgcagatggtcacccaaattactaggtaaatgtaggatgaattatgtgtgacaaatggtcatgtcaagttctcttactggaggactagttattctatgtcttgaracatgtacataatgttctcggctatgtaatctgcctggctatataaaacagtaacatttctttctgtctttacaatctcctgtgatgcatattacattttggtttaatacttcaataacaaaactgttttctttctctactacctttgtggagaggttttctgggctgagggaagatttttgtttttagttatatttccccaacattccctctttatcctaaaatcctaattcaaacccaccaggctaggaagactgaaacacaaactacaaatctcagaaaaatatgca

SEQ ID NO: 90547 - DNA, 628 bp, Homo sapiens
acattggtttttgaaagtctcttgacagttttacaacccaagaatgtctttctcaaggacctgggagacatccctgaaatgtaaccatcaaggacatagcacccctatctcccagtttctacgagaaggtgagaacctaacttcagtgggtgccttgctccaagttgcagactatattctgtcataaaaccatgagaagtttgcttttcttttctataaagccaattagctaatgcagatggtcacccaaattactaggtaaatgtaggatgaattatgtgtgacaaatggtcatgtcaagttctcttactggaggactagttattctatgtcttgagacatgtacataatgttctcggctatgtaatctgcctggctatataaaacagtaacatttctttctgtctttacaatctcctgtgatgcayattacattttggtttaatacttcaataacaaaactgttttctttctctactacctttgtggagaggttttctgggctgagggaagatttttgtttttagttatatttccccaacattccctctttatcctaaaatcctaattcaaacccaccaggctaggaagactgaaacacaaactacaaatctcagaaaaatatgca

SEQ ID NO: 90548 - DNA, 532 bp, Homo sapiens
tttatttatttgaaatggaatttcactcttcttgcccaggctggagtgcagtggcgcgatctcagctcatcgcaacctctgcctcccgggttcaagtgattctcctgtctcagcctcccgaggagctgggattacaggcgcctcccaccacaacyggctaatttttttgtatttttagtagagacggggtttcaccatgttggccaggctggtctcaatctcctgacctcaggtgatccgcccacctcggcctcccaaagtgctggattacaggtgtaaaccaccgcgcccggccatgaaatctattttttaattccataaggcaatgaacacatatcaaagtaatatacaacttctttattgctatacattaacgtatagcaatgtattttgtacatattttcatatatctgtatataaaattttcaaaataataataaaaacaatctaagtaacatttcaaaaaacaaatataggaagagaaagaaagacgacccaaaccaaaatctaaaacggaagagagagaaaaaaa

SEQ ID NO: 90549 - DNA, 532 bp, Homo sapiens
tttatttatttgaaatggaatttcactcttcttgcccaggctggagtgcagtggcgcgatctcagctcatcgcaacctctgcctcccgggttcaagtgattctcctgtctcagcctcccgaggagctgggattacaggcgcctcccaccacaaccggctaatttttttgtatttttagtagagacggggtttcaccatgttggccaggctggtctcaatctcctgacctcaggtgatccgcccacctcggcctcccaaagtgctggattacaggtgtaaaccaccgcgcccggccatgaaatctattttttaattccrtaaggcaatgaacacatatcaaagtaatatacaacttctttattgctatacattaacgtatagcaatgtattttgtacatattttcatatatctgtatataaaattttcaaaataataataaaaacaatctaagtaacatttcaaaaaacaaatataggaagagaaagaaagacgacccaaaccaaaatctaaaacggaagagagagaaaaaaa

SEQ ID NO: 90550 - DNA, 532 bp, Homo sapiens
tttatttatttgaaatggaatttcactcttcttgcccaggctggagtgcagtggcgcgatctcagctcatcgcaacctctgcctcccgggttcaagtgattctcctgtctcagcctcccgaggagctgggattacaggcgcctcccaccacaaccggctaatttttttgtatttttagtagagacggggtttcaccatgttggccaggctggtctcaatctcctgacctcaggtgatccgcccacctcggcctcccaaagtgctggattacaggtgtaaaccaccgcgcccggccatgaaatctattttttaattccataaggcaatgaacacatatcaaagtaatatacaacttctttattgctatacattaaygtatagcaatgtattttgtacatattttcatatatctgtatataaaattttcaaaataataataaaaacaatctaagtaacatttcaaaaaacaaatataggaagagaaagaaagacgacccaaaccaaaatctaaaacggaagagagagaaaaaaa

SEQ ID NO: 90551 - DNA, 1353 bp, Homo sapiens
gattctgaccttatgttacacacaaagttgatgaaaacctaaatgtaagatctagaagtaaaaagcttatagaagaaaacgtaagcaaaatcttcatgaccttagattaaacaatggtttcttagatatgacaccaaattacaagcaacaaaagaaatattatattatattatgcttataatattatattgtgcactgagttgcatcctttttaaggacaaatattatgttgtatgaattataccttaattttaaaaagtacaataaattaaaaacaaattaagttttttcaataatgaaatattattttaatatcacaaaatcaattattgtaattaactatattaacaatatgaaagaaaatcttatctcaatggatacagaaaatattttttaatatgcaaactaggaatagaatggaatatttaatctgatgaaagataatcataaaatcttacaaaaatattataattaataaggaaatatggaaagctttccttaggggatcagaaacaagattctctagtcagttcaataagaactgtaagagaattcttactttttgtaagaattagcaagaaagaactacactggtcattatttgctaatgacattattgcatacgtagaaaatctaaactaaaatattagaactaataactaaatatagctatcaggatcaccggttacaatatgagcacataaaagtctattttatttccttacactaccaatacccaattataaaataaaattttataaatatatcatttagaatcaatattttgttaatttcataaaattaactggaaagtttttctttttgaatatattttccaaacttgaacaattcttcaagtcagttaaacagttttaaatatttctatcctgcaacaacaaggttcaatctacatgtgataatggatatctctactgatattagaactatcccattattgaaaaccattttagatataaacagcaggcacctaagaatgatctaatttcctgtggtgttcctttaaaaaaattttccaaaacaggcaaatctttctctctccctctctccctttcccwttacaaagtaatacaggcttatttttagagttgcaatcaaaacagacatgtaaaaagtagaaaattaaaatgacccatcatgcttgtcttaaaattaactactgataatattttggtatatgtccttatatgtgcttttatactgtgtgtttatacatgtggttatgaatatatgttcacaagtgagggtatatagacacatacacagatacatgtgtgagatggagacacaggcagagacagagagaagggcagattattgcctttattatatgca

SEQ ID NO: 90552 - DNA, 1353 bp, Homo sapiens
gattctgaccttatgttacacacaaagttgatgaaaacctaaatgtaagatctagaagtaaaaagcttatagaagaaaacgtaagcaaaatcttcatgaccttagattaaacaatggtttcttagatatgacaccaaattacaagcaacaaaagaaatattatattatattatgcttataatattatattgtgcactgagttgcatcctttttaaggacaaatattatgttgtatgaattataccttaattttaaaaagtacaataaattaaaaacaaattaagttttttcaataatgaaatattattttaatatcacaaaatcaattattgtaattaactatattaacaatatgaaagaaaatcttatctcaatggatacagaaaatattttttaatatgcaaactaggaatagaatggaatatttaatctgatgaaagataatcataaaatcttacaaaaatattataattaataaggaaatatggaaagctttccttaggggatcagaaacaagattctctagtcagttcaataagaactgtaagagaattcttactttttgtaagaattagcaagaaagaactacactggtcattatttgctaatgacattattgcatacgtagaaaatctaaactaaaatattagaactaataactaaatatagctatcaggatcaccggttacaatatgagcacataaaagtctattttatttccttacactaccaatacccaattataaaataaaattttataaatatatcatttagaatcaatattttgttaatttcataaaattaactggaaagtttttctttttgaatatattttccaaacttgaacaattcttcaagtcagttaaacagttttaaatatttctatcctgcaacaacaaggttcaatctacatgtgataatggatatctctactgatattagaactatcccattattgaaaaccattttagatataaacagcaggcacctaagaatgatctaatttcctgtggtgttcctttaaaaaaattttccaaaacaggcaaatctttctctctccctctctccctttccctttacaaagtaatacaggcttatttttagagttgcaatcaaaacagacatgtaaaaagtagaaaattaaaatgacccatcatgcttgtcttaaaattaactactgataatattttggtatatgtycttatatgtgcttttatactgtgtgtttatacatgtggttatgaatatatgttcacaagtgagggtatatagacacatacacagatacatgtgtgagatggagacacaggcagagacagagagaagggcagattattgcctttattatatgca

SEQ ID NO: 90553 - DNA, 1023 bp, Homo sapiens
caaatttggtgtattctgtttaagtcagtgttactttccatttggtaaggaggagcaagtcaagaatatatctcctgcagagtctttcctgatttgcttctgaaagtagaacagaccactcttttactatctctccttcatatgcagatctatatattaaaaagcccttacgaaaaatcatttttcttgtcttcctccccaaacttcaagggcagtgatttgatctgactcataactgtatctccagcaattaggggctcccactaggtgctcaataaatgtttgctgaatgttacactgcatataaattgttcttaaacaataaggaataaaaggaaaatattttaattttccttggaacatgagatcggaattagatcacaaaccattatagcatttgagacttactacctgattataaaaacattaatatgcacctagatagtccacattattccccaaacccaaaagtttattttactattttacaaaaccaaattcacccacacatttactgccattatgcatattcaattaatgttcagatacacatgtcaaattcaagggaaatatcttagataataatagtttcattagaataaaacttgaactttctatagtagtagctattttacgagattaggaaaatttcttgttactacataaaagatgacaacatccactaatagccaaactttgtgtaaaggaaacactctgatttatttttagcagtgtttggaaaatctcacaatgttagctttaagtaaccaaatataaacttggaaacagaataaaccaatgcaaatgaatgtaagaacagtatttcttaggaagcaatctaaataatttatataaagtatattaatatgtcttttatagatgaaaatctatcctttatcaccttatcaatagttatataatcagtagttattarctaataacaaaatgacatatggaatgatgacagtctaattccccccaaaaaaatcaagcaaaattaatagtggttcctttcctaatcac

SEQ ID NO: 90554 - DNA, 748 bp, Homo sapiens
aacctacaaatctctttcagtcctttgcatttcaagcaaaatattctcttcagaaaaatgaccatttcataatatatatccccttctgtaggctaggcatgtacgagtgaacaaacggatataaaattcaagaaaaaaatgaaaatattttaaaaataaaaatctgaaccttttccttgaggtgtattgcgatatggttaccaacacattcagcaccttgtaatcaccaagttactgatttgagtcctggaacaagaccctaaaattaaagaacaagagatcctagtcatttgtgagtcacaggttggcagcagaagaaaaaccracagcaactagaggagctcaaatacatgaaattcacacttctgaaatatttaatactcacttcaaacagctaattgtctatatgatttttaaaaaggaaacagctcagagtctggaatatgggtagttgtcctctgagtgacttgggcatttcttatgcatcttcagtactgttatcaacatatgactccatactgagaaagcaatcaaatatcaggagatctcatttcacagataaccttgggtatagaaacttaaggtgccaattgttcttttactttacccctaaggcaaacgtcatctagacttataaaagtctttcgagacctaaggttcttgtcaatatttgattattacaaaccacatcaagaaattttaaaaatctgaatcaatgcactaagtcacccatttgcaccaaaaaaaa

SEQ ID NO: 90555 - DNA, 1120 bp, Homo sapiens
aatttttcattttgtaattaatttttagaccacactaaagttgctcttagtgatgatagggcttgtttctttgtttcattgtggctacttcttagcaccttctttagaaagcagttaggagaagatcatttgaaggccaacgagtgttgtgggttattgttaagctgatttaacattatctccccccacaaccacgcttgactagcttcacatttggccaggtgcagtggctcacgtctgtaatccagcactttgggaggctgaggtggaagatcacaaggtcaagagattgagaccatcctggccaacatagtgaaaccctgtctctactaaaaatacaaaaattagctggttgtggtggcgcacgcctgtygtcccagctactcgggaggctgaggcaggagaattgcttgaacacgggaggtggaggttgcagtgagccaagattgcaccacagcactccagcctgggcgacagagtgagactctgtctcaaaaaaaaaaaaaaaaaaaaaaaagagaaagcaaacgtatttcttcttaaaacagaataaataaatagtctgtctctttctccttctgttcacatttgccccagtttcttctcttgaatcatgacagtttggaaaattgtctggattgcttagtgccactgaatcatgccatggaaggattttgtatttcacttttaaacttctctgtgacaggagaagcactgcttcatggcttcttgcccaaggattttagatggacacagtgggtaataaatggatgaatttttgtttgggttgaagaatctctctgagaagttgacacgtgggggcaatggtttgtttctcttgtatttctgaagttgcaaataatcatgtaagcagttcaaccaggagtttacaccaaacttttaataggcgatatatcattattttttttcccattggtttggataacatccactttaactggcagttagtcatacttagctatttttgttaaagcaggtgatttattgttattttatatttatgacatgattaataagtgaatatggaagattttacattgacttaggggatcaaagttttcattatattaacacctttaattgccatgagttttctatt

SEQ ID NO: 90556 - DNA, 1120 bp, Homo sapiens
aatttttcattttgtaattaatttttagaccacactaaagttgctcttagtgatgatagggcttgtttctttgtttcattgtggctacttcttagcaccttctttagaaagcagttaggagaagatcatttgaaggccaacgagtgttgtgggttattgttaagctgatttaacattatctccccccacaaccacgcttgactagcttcacatttggccaggtgcagtggctcacgtctgtaatccagcactttgggaggctgaggtggaagatcacaaggtcaagagattgagaccatcctggccaacatagtgaaaccctgtctctactaaaaatacaaaaattagctggttgtggtggcgcacgcctgtcgtcccagctactcgggaggctgaggcaggagaattgcttgaacacgggaggtggaggttgcagtgagccaagattgcaccacwgcactccagcctgggcgacagagtgagactctgtctcaaaaaaaaaaaaaaaaaaaaaaaagagaaagcaaacgtatttcttcttaaaacagaataaataaatagtctgtctctttctccttctgttcacatttgccccagtttcttctcttgaatcatgacagtttggaaaattgtctggattgcttagtgccactgaatcatgccatggaaggattttgtatttcacttttaaacttctctgtgacaggagaagcactgcttcatggcttcttgcccaaggattttagatggacacagtgggtaataaatggatgaatttttgtttgggttgaagaatctctctgagaagttgacacgtgggggcaatggtttgtttctcttgtatttctgaagttgcaaataatcatgtaagcagttcaaccaggagtttacaccaaacttttaataggcgatatatcattattttttttcccattggtttggataacatccactttaactggcagttagtcatacttagctatttttgttaaagcaggtgatttattgttattttatatttatgacatgattaataagtgaatatggaagattttacattgacttaggggatcaaagttttcattatattaacacctttaattgccatgagttttctatt

SEQ ID NO: 90557 - DNA, 1120 bp, Homo sapiens
aatttttcattttgtaattaatttttagaccacactaaagttgctcttagtgatgatagggcttgtttctttgtttcattgtggctacttcttagcaccttctttagaaagcagttaggagaagatcatttgaaggccaacgagtgttgtgggttattgttaagctgatttaacattatctccccccacaaccacgcttgactagcttcacatttggccaggtgcagtggctcacgtctgtaatccagcactttgggaggctgaggtggaagatcacaaggtcaagagattgagaccatcctggccaacatagtgaaaccctgtctctactaaaaatacaaaaattagctggttgtggtggcgcacgcctgtcgtcccagctactcgggaggctgaggcaggagaattgcttgaacacgggaggtggaggttgcagtgagccaagattgcaccacagcactccagcctgggcgacagagtgagactctgtctcaaaaaaaaaaaaaaaaaaaaaaaagagaaagcaaacgtatttcttcttaaaacagaataaataaatagtctgtctctttctccttctgttcacatttgccccagtttcttctcttgaatcatgacagtttggaaaattgtctggattgcttagtgccactgaatcatgccatggaaggattttgtatttcacttttaaacttctctgtgacaggagaagcactgcttcrtggcttcttgcccaaggattttagatggacacagtgggtaataaatggatgaatttttgtttgggttgaagaatctctctgagaagttgacacgtgggggcaatggtttgtttctcttgtatttctgaagttgcaaataatcatgtaagcagttcaaccaggagtttacaccaaacttttaataggcgatatatcattattttttttcccattggtttggataacatccactttaactggcagttagtcatacttagctatttttgttaaagcaggtgatttattgttattttatatttatgacatgattaataagtgaatatggaagattttacattgacttaggggatcaaagttttcattatattaacacctttaattgccatgagttttctatt

SEQ ID NO: 90558 - DNA, 1120 bp, Homo sapiens
aatttttcattttgtaattaatttttagaccacactaaagttgctcttagtgatgatagggcttgtttctttgtttcattgtggctacttcttagcaccttctttagaaagcagttaggagaagatcatttgaaggccaacgagtgttgtgggttattgttaagctgatttaacattatctccccccacaaccacgcttgactagcttcacatttggccaggtgcagtggctcacgtctgtaatccagcactttgggaggctgaggtggaagatcacaaggtcaagagattgagaccatcctggccaacatagtgaaaccctgtctctactaaaaatacaaaaattagctggttgtggtggcgcacgcctgtcgtcccagctactcgggaggctgaggcaggagaattgcttgaacacgggaggtggaggttgcagtgagccaagattgcaccacagcactccagcctgggcgacagagtgagactctgtctcaaaaaaaaaaaaaaaaaaaaaaaagagaaagcaaacgtatttcttcttaaaacagaataaataaatagtctgtctctttctccttctgttcacatttgccccagtttcttctcttgaatcatgacagtttggaaaattgtctggattgcttagtgccactgaatcatgccatggaaggattttgtatttcacttttaaacttctctgtgacaggagaagcactgcttcatggcttcttgcccaaggattttagatggacacagtgggtaataaatggatgaatttttgtttgggttgaagaatctctctgagaagttgacacgtgggggcaatggtttgtttctcttgtatttctgaagttgcaaatartcatgtaagcagttcaaccaggagtttacaccaaacttttaataggcgatatatcattattttttttcccattggtttggataacatccactttaactggcagttagtcatacttagctatttttgttaaagcaggtgatttattgttattttatatttatgacatgattaataagtgaatatggaagattttacattgacttaggggatcaaagttttcattatattaacacctttaattgccatgagttttctatt

SEQ ID NO: 90559 - DNA, 852 bp, Homo sapiens
ttacaaatagaactgaaatgttaactgcatcccaaattaatggtgctgaaaagaatgtattatagaccagtgtctcaggctaaatgtggatgatacagtcatcactgtgcccagacatctggtacataaacacttggatattttggagcaggatgagcaaacacaatggcaaagctctgaaaggcaaccrgccaactgagcagagaggttagcagagctgaccagcacatggaaacaaattttgcttgcccattgacaggacatgacttgattgcataatgttgaatttttttccttttttttctccttcctgtcagatgggtaatgtgctgacatcataacaaggttggagggaggcacatctcacatgtgagtgtgaaaacccaatcaccacatgtatgaaccacaaaaggatctcaatatacctttaaataagaatctcaacttttaaaatattttgaaaacactgagccttgtatcaatattgaaaagtcaactttgaaataaagggttgtttaaaatattctattaggccaactcagagtcttcaaggggtggaagctattactatctccctttctttagtaaaaaaaaaaaaaaaaaacttaaacaggggtagataacctctgagtaaatttgataggtgcaaaattctctctttaattatttccccaataattatttatcttttttatccaagatgataaagagtacttatcctcttgtaccagataccatagtattttaatagaacatttaaaatatgagcaatatatcatagataaaatactcaaaggaaagatttggaaaacttgtaatactagtgcaatgaaattaacacagctttggagt

SEQ ID NO: 90560 - DNA, 658 bp, Homo sapiens
tccttcctcagcttcttgagtagctgggaccacaggtgcatgccgcaacatctagctaggttttgttgttgttgytgttgttgtttcttgtttttttgtagagacagggtctcattatgttatccaggctggtctcaaactcctggcctcaatgaatcctcctgccttgacatcccaaagtgctgggattgcaggcttgagccactgcacccagccataaattttctcacttcagaaagaaggaaacggaggctcaaagagttcagctatgaatcccactttgcttggacagtgattcaaacaaaggcttgctggaaagagccagcccctcaaaaggctgacagaagagagtttaatgaagagatgatttacagaggcctggggaggcataaacaaactaactagggatggcagagctggaagccgtttcaccctgaagcctgaaggggcaaaggcagaaagcggtgttctagcaaaccagggagagctagcagcagggcatggggctgcctaactggagctggggccccagaaggacccaccactgccagcagggggagaacagaagagacaccctcacttctctcccttccatccaatggccaagcccagctaagaagcaagagggcaagagaggggaacagggactggagcaggt

SEQ ID NO: 90561 - DNA, 658 bp, Homo sapiens
tccttcctcagcttcttgagtagctgggaccacaggtgcatgccgcaacatctagctaggttttgttgttgttgctgttgttgtttcttgtttttttgtagagacagggtctcattatgttatccaggctggtctcaaactcctggcctcaatgaatcctcctgccttgacatcccaaagtgctgggattgcaggcttgagccactgcacccagccataaattttctcacttcagaaagaaggaaacggaggctcaaagagttcagctatgaatcccactttgcttggacagtgattcaaacaaaggcttgctggraagagccagcccctcaaaaggctgacagaagagagtttaatgaagagatgatttacagaggcctggggaggcataaacaaactaactagggatggcagagctggaagccgtttcaccctgaagcctgaaggggcaaaggcagaaagcggtgttctagcaaaccagggagagctagcagcagggcatggggctgcctaactggagctggggccccagaaggacccaccactgccagcagggggagaacagaagagacaccctcacttctctcccttccatccaatggccaagcccagctaagaagcaagagggcaagagaggggaacagggactggagcaggt

SEQ ID NO: 90562 - DNA, 1189 bp, Homo sapiens
gcatttatctgcctctcttcccagtcctggaagacaggaacggtgattccaatagcttgcagggtgcttctcactagcaaggcacatcaacctttgctgaataaacgacctcaggataaggtaaggcattcctaaattactgctgtttctgggactaattttgataattttatcctagtcccaacaaggactctccctttgtagagacagcattcacaacaaaatgaatctttctcaagactaaaataaagaaaagagcatttccaggttcagacctgctcacagagtaaaatagacaaggccagtccatgcctgtctgagtacacgagctgcattctctgtgagtgcccyggtcacctcttgggacacagcccaccagcagcagccttgcctgagaccacacggtgctatgtgggtgctggagatgccaggaggcaaggcgggaggcatgggaggcaccggcctggttcctaagaagctcaagtgtccagtgaggagaaatgggctggaaagtagaaaaagacaacgttgtttccaggaaaactaaaatcaaagtcaaggaagtgaggccagcagtcactgctctaagatgcaggggctgtcctcaaggtggccaaggagctccaggaaggcaagactttagggagaggagaaactgagaaaggcttgaaggtcagaaagaaagcagtgtgttggaaggtaacgagaaggggcaggggagagacaaaggagacgcatttgggagggttttaaatactttgctagtgaattttattttttgcctgtttaattaatttaaacctgctaatgaatttaacttttcattatgggggccattaaatatttttgggccaaagagaaagtgacgtgcatgccaagaggtgtttgatgaagatgaagcaggcaggagtccataggtggtggttagagagtagagccggggggcccggcagtccagactccaggtagcttggccctaacaagaaaggagccagcgggagaaatatcaggcaagtaacttgccctggtcctgcagcggcaaggtggcagtgaagctgggacatgaacccaggggtctgactccagcaacctcaccctttgctgctaggcacacctgcatggcagcctcctagctgtacctttcaaatagctgtgagcagcttaaggcttcaatagctacatagatgca

SEQ ID NO: 90563 - DNA, 583 bp, Homo sapiens
tcctacaaaaatgtatgttagtgtactttctcagcataggatgagctggaaatatttcatgccatttgatgtaaaagtttgctttgctttttactattaatgtaattattttgatttctgtgcacagaacatcttgcaartgttcatttgccttctgtttgttacttttattactaacttggtgtcctttgctcatgtttccatggtgccatttttctttttcttgaccattctgtggcaatcaaatgtaaaataatgtttatctgacatgtactttgagttttctttattatcactttggattgttatgaaattttttatacccacctcaaatctgtatatcaagctctgtctcacaaaccttgtaatttataaggtatattagatattacatttttattgaattttatatcatataaaagaaatctgcaatgtaatatgataatgctatggagaaaaaaagtaccatatacattggaaatattaccaaaaaactaactttcaggtaacagggattcatcttaactgaaaatcaagttgtcagattaaaataattctattgatactttcccttacatagagc

SEQ ID NO: 90564 - DNA, 2222 bp, Homo sapiens
agcgtcaagtctttggcatagggaaaggtggagaatgtacaaggtagatgtggaagataaaacaggtgggataggcagtgttgggtggtaatgccacctgaggccattatgcattcctttcagacactcatagcctcctcctgatctatcaccctccatgtaattccagtcaacattgatccatcatcttctgcaactcagtatgtttcctcagcaaagtcacagctggtaaggggaaaaccactggcgatcttttccccagaatccttgtagatgaacgagaccatactccttattttgtgggaggtggaaggaggttggtggaaggaggttggtggaaggagatcggggcacagagtaggcaagtttgagttctctgaatgttaggaatcacattgagagcctttttaaagctacaggagacagcgtacataccaaacttacaaggtgtagaggtcattttcgacactgcaaactatcgtagacactggggaatcaagaaaagaactgctgaaacatgacttcattaaagaacatttatgaccgtcttttatgtgtactgattactattgatgactcaatctcttttaccaaatactattgtaagtagcatgaaaatgtgtcagatcttatcaatgtaagtttggttttaactccaaaccagctttattatatratcagtcttggcctgatgttccagacctagcttagatctggtccaaagtaagccctcatcatgagtaaggaagactcaggagacctgtcatggccactgcctcttgtcttgtccccacccctgatgtctctgctactgtttcctgggggtgcagggataaggcacagaactgctagaaaccagcccaaaacaacactctgcaacttctaaattttcataaaaccagtaaagaatgctgctggtattatcctacttatactcttggaataaaattgccactattaacttcatcaaacactcttaaccaaacatcctaaaaatattttcagactatactccagactatatttttaaaccagtgtcttctggcctgttcatgggtgtgagggttgaacacagatttgtctttctatggccttcattgacactaccgaaagctaattatttaaatatacttttgaaatgtcatttatgcttgaatcaatgatgaagataagggaatgttagataagaaaatgagaaaaaaaaagatgttaaatgctatgcattttagagactgttaattaaaatttggagcttgagttcattaagaatttcttctttacaaagcagtttgaaatgtaaacagactatgggtcttccattaaaaaacaccattgctactaattatttaaagagcaaatctttcccattgtgttaacagagttaaagaggattaaggtttattatttcagctcatgggttgcagtaatttaaacagatgatagatagatagatagatagatagatagatagatagatagatagatagatagacagacagacagatagatggtagaataaatgctccaaccattttagaccaggtacctggaaagggagtggagtggtgggagtgtaagaaccctggaaatcagaaactggaagacatcaaaagtgacactgtgggagcatccctgggctgacactgctagaccacatagccatggaaaccagaagcctattatgtaagcagaatgagctcaggaatttctccccgtctcagagctgaggatccgaaactcaagagccaggtaaagaaagaggaaccccaggctggacccaggaaactgggcccaggacataatggacacagtggaaggagaaagcccagaaatattctgtgttgaacttgcccagttgagattttttgaaagtagaatggtttacctaatatttcccatcccatggcttaataattaatcacaatggtttgagtacagcacttttatgatttctgctagtgaaatcctccatggcaggccaagaatttcagtgtctcaagatacaagggaaatcccagtcctaagtatttaagtgtttacctgaggcaaataaaccacgcgcccatgcaaaacaaacaaacttgtctttgaatatttataaaggctctactcataatagccccaaactggaaacaaataaatgcccacaaactagtgaatggggtgcacacactgtgatatatccatcaaagagaatcctactcaacaataaaaatgaataa

SEQ ID NO: 90565 - DNA, 2222 bp, Homo sapiens
agcgtcaagtctttggcatagggaaaggtggagaatgtacaaggtagatgtggaagataaaacaggtgggataggcagtgttgggtggtaatgccacctgaggccattatgcattcctttcagacactcatagcctcctcctgatctatcaccctccatgtaattccagtcaacattgatccatcatcttctgcaactcagtatgtttcctcagcaaagtcacagctggtaaggggaaaaccactggcgatcttttccccagaatccttgtagatgaacgagaccatactccttattttgtgggaggtggaaggaggttggtggaaggaggttggtggaaggagatcggggcacagagtaggcaagtttgagttctctgaatgttaggaatcacattgagagcctttttaaagctacaggagacagcgtacataccaaacttacaaggtgtagaggtcattttcgacactgcaaactatcgtagacactggggaatcaagaaaagaactgctgaaacatgacttcattaaagaacatttatgaccgtcttttatgtgtactgattactattgatgactcaatctcttttaccaaatactattgtaagtagcatgaaaatgtgtcagatcttatcaatgtaagtttggttttaactccaaaccagctttattatatgatcagtcttggcctgatgttccagacctagcttagatctggtccaaagtaagccctcatcatgagtaaggaagactcaggagacctgtcatggccactgcctcttgtcttgtccccacccctgatgtctctgctactgtttcctgggggtgcagggataaggcacagaactgctagaaaccagcccaaaacaacactctgcaacttctaaattttcataaaaccagtaaagaatgctgctggtattatcctacttatactcttggaataaaattgccactattaacttcatcaaacactcttaaccaaacatcctaaaaatattttcagactatactccagactatatttttaaaccagtgtcttctggcctgttcatgggtgtgagggttgaacacagatttgtctttctatggccttcattgacactaccgaaagctaattatttaaatatacttttgraatgtcatttatgcttgaatcaatgatgaagataagggaatgttagataagaaaatgagaaaaaaaaagatgttaaatgctatgcattttagagactgttaattaaaatttggagcttgagttcattaagaatttcttctttacaaagcagtttgaaatgtaaacagactatgggtcttccattaaaaaacaccattgctactaattatttaaagagcaaatctttcccattgtgttaacagagttaaagaggattaaggtttattatttcagctcatgggttgcagtaatttaaacagatgatagatagatagatagatagatagatagatagatagatagatagatagatagacagacagacagatagatggtagaataaatgctccaaccattttagaccaggtacctggaaagggagtggagtggtgggagtgtaagaaccctggaaatcagaaactggaagacatcaaaagtgacactgtgggagcatccctgggctgacactgctagaccacatagccatggaaaccagaagcctattatgtaagcagaatgagctcaggaatttctccccgtctcagagctgaggatccgaaactcaagagccaggtaaagaaagaggaaccccaggctggacccaggaaactgggcccaggacataatggacacagtggaaggagaaagcccagaaatattctgtgttgaacttgcccagttgagattttttgaaagtagaatggtttacctaatatttcccatcccatggcttaataattaatcacaatggtttgagtacagcacttttatgatttctgctagtgaaatcctccatggcaggccaagaatttcagtgtctcaagatacaagggaaatcccagtcctaagtatttaagtgtttacctgaggcaaataaaccacgcgcccatgcaaaacaaacaaacttgtctttgaatatttataaaggctctactcataatagccccaaactggaaacaaataaatgcccacaaactagtgaatggggtgcacacactgtgatatatccatcaaagagaatcctactcaacaataaaaatgaataa

SEQ ID NO: 90566 - DNA, 800 bp, Homo sapiens
acacacacacacacacacacacacacacacacacacacacacwcaggctatatgggatgttctaattgctccttaagggcatttggccacccacttcctttggtgatttttttccctaatcaaaatgaaatgttttaaattctagtgaggaccagttaaactgggtatctaaagcaggacatttgtaaagcatttgtaaggtttttcacttgaatccgaacaaccactttgaaatctttccagcatatgcgttacaactatctaggaagacttttccatttcaggtgtttgaccttggacaaaagtttgcatatcttaatggtgaataagaaacagaccgttttgttttatgtctgtatgactctacctaggtttatgtgcacatgtgtgatatggatgaatatgagcacatgaataattaagtattctttgccttgttcttcaatcagtttgagggaataaatagtatactgcaaccagttaccaggaataggcagataaaaaaaaatttattgatgacgaagcaagtttagcgattactgttggcctaaataagacagctgggacaccaggctgaaatgtttgaacagatctctatacatttgtcatttagaagacaatatctgaaagttttttgatgatctaaaagatattcttaattttcccaaaaaggatgaaaggaattgtgaggcaattaaataagaagcctctccttcatacttttcccattgatatacatggattttttaaacaaaatatgcctctttagttgaatcatgctcttatttacaatttaatca

SEQ ID NO: 90567 - DNA, 2261 bp, Homo sapiens
  misc_feature (1)...(2261): n = A,T,C or G
ctcttccatagaatcttgggagagagtctgtagttactcaaagggatccctgacctgaaaaatgaagaccactcttgcagcagatggggagtggatagcagatttttaacagaggagttaaatcgtgatgctctgtgaagaacagatttgagggagacaagatggacagcaaggaaacttatttaaaaagctcctataatagtccaggggagagagcatgagggcttgaaattgagtcatggtagtgaagacagagcagactgggtaaattctcaggaagcaatagcttgaagactggcaggattgggaagtgagagagaagaccagctttctaggtgcttgggtgtttggtgaggccatctgcctatctggtgagggaaaggagagtggaggaagaagaagcagagtggaaaaggaaggggatggtgtaagggaaagacaatcgattatctgggtatgatatatctaggaaacatcaatagaataaataagtacatctattgggtactcagtaagtcttgtccttggctccctgtaaaaccatcccttgttatgtgtgcagggcttctgctatgcacagcgttnnnnnnnnnnnnnnnnnnnnnnnnnnnnnnnnnnnnnnnnnnnnnnnnnnnnnnnnnnnnnnnnnnnnnnnnnnnnnnnnnnnnnnnnnnnnnnnnnnnnctgctggtattagagaaaacacaagatggactgaacatggatcctagtctctatttatttcttctttattttcctttagtaaytttgtttatggagactgtactatcaggcaggcactaggccctgagagacaaccatggcacagatgaaagcccgtacctgtgaagagcttaccatttcaatgacattatttaggcatttacaacaacaggttgttcagtgctatagtgaggaggagtaaaactactcaggtatacacagaaaagcctctgcccaactgctagggatcaaataagattggctgaaatgagctatcatagctgaaatctgcagaatgcatagaaggaatgagggaatgagggcgtatgaaagagtgatgcagtcctgtggttttaaccgtggcccctggaccagcagcagcatccccagagaacttgtttgaaatgcagattctgtgctcccatcaaacagggctgcatccaaatctctggggtgggtccagcgctcttggggatctcacaggccctccagatggctctctgctaaacactaagtctgagaatcactgctctaggaaaacaaaaacctgaagaaaatggcacactcggtggcaagaaagaatggaaaacagcttccttttgtgtaaatgaagatgttcagggatggctggagtctggagttaaggatgagcaaacagatgagagaggacactgagatggaatcagagatcaggtcacaaaatggtttggagcaatttgaactttatcttggggatactggggaaggagccattcgcaggtttcaagccccagaatgaaaggaaatttcaagcagatcacttttgttacagtgtggacaatgtacacaatactttatctttcctctgaccttttcctcttttcatattcaattaagacgtagggagataaatgaataggtcctaacaattcctttctttctacacttttgtactgctttgacttactgatggattctaacaaccttcttaaaacaataagtagtttctaaaatactgcaacatttaatgcacttagagcagtaaggaaggaattcaaattccagaccaagaatgccttaattccctaggagcacatttcaagggcacagagagaaatcttcagcttaattcaccggcagcgtggtttatacacgaacaagggaaaaaggattactgcccatggttcagttcccaagtcatcatcatatgacccatcactaaacggccgaggaagagctaaaagagaatatggagttgataccatccacagttctctcgatgatttcaagcatagactacgatggtgaaggaattcgaatccccaggaaaaccggggattgcgcttactcagaacattgcatttcgctctgaaagagtcttaacttgttttgtacttaggcacaaaatacaaagaaagtgaacatgttttctccttaatgtctactgtatatacatttttacttgaaaatgctactcttcaaatattcaatttaaaaactagttatagaaagactagtgtgtacaaaatgttttcataaaagttgacttggataagata

SEQ ID NO: 90568 - DNA, 537 bp, Homo sapiens
tgtggatctatagctaagaaaacctatagcacattatatacaataatagttatacatggtaagaagactcaagtcatttttttcatggttttgtatgggctttttctagttaaactgtaatattctgagaatttctgttttkttttttttttttttttgtcttaaactgcaatgacagtaacagtgaatctttgagctggaaagtacctaaaaacatttggtgtgatccacttactttacccatgaaggaactgaaattcagccattgtatcatattttctggaaagctgtctggagcactctgatctttcattttattattctcttctcacctatggctgttcattgaatggccatctcctctgtgagtctgtgagcacatcgaaggtagggagaatgcccattagggtcattgctccctcctgcccatctcataccttccagcagcattgagcaaaagagagtaaagtgattggttcttgttcaacacacagtagttgttacaacaaacttaaataagaaagcagatcttaaaat

SEQ ID NO: 90569 - DNA, 537 bp, Homo sapiens
tgtggatctatagctaagaaaacctatagcacattatatacaataatagttatacatggtaagaagactcaagtcatttttttcatggttttgtatgggctttttctagttaaactgtaatattctgagaatttctgttttgttttttttttttttttgkcttaaactgcaatgacagtaacagtgaatctttgagctggaaagtacctaaaaacatttggtgtgatccacttactttacccatgaaggaactgaaattcagccattgtatcatattttctggaaagctgtctggagcactctgatctttcattttattattctcttctcacctatggctgttcattgaatggccatctcctctgtgagtctgtgagcacatcgaaggtagggagaatgcccattagggtcattgctccctcctgcccatctcataccttccagcagcattgagcaaaagagagtaaagtgattggttcttgttcaacacacagtagttgttacaacaaacttaaataagaaagcagatcttaaaat

SEQ ID NO: 90570 - DNA, 669 bp, Homo sapiens
ttgaaagccattgttttatatattttgtgggtggttttgttgttgttgttttgtgagtgttctcccaagaagatgagtaagtctctttcatgttaccccattttttgtggtaatgaaagttctcatggaaataatttttaatttctaaaagctcagcctacttataaagagtggattaatatgctagaagagaggaagcagatcagtttgaagcctattctagaagaaaaggaaaaagctgatgctaaacagaactagatagttggctgagtaaatagagtcagatataacacacactttaaaggtagatcattgcaaaaaccatgcaaagtaattttaatctattacatggtctatkacttatagaagttattataaatatgattttattaacacacataggccaagctttatatactaaaactagtagtgagatctaataaataaaggatggaacaaaagactttttcattaaatagtaagattcagcattattaagtgtatttattataaaggaatatttgtcctgtttttggagatatgtggaaaaataagaaaaaatgtaactttaaaatttgtcttagaatcttttaagccaatttaccaaattcagaaacatacttaaatgagttataatccaggtaatattatcaaataataatgtatgca

SEQ ID NO: 90571 - DNA, 710 bp, Homo sapiens
taaggcagaggttttaggaccctgtctaattcattttgtaggaagagtttccttatctataattacccttcctcgtatggtttctgcaccctcttatttaaattgaatatatgcctttcctcctgatttttctggaactcccagcatacaacacatgttctttgtagagtgtcagcaatgatatgatggaggaacagatggctaagattaggaataaagttatccccttttcctctcaaacctagtttaacaggcaggaggtctatggccataccaccctgaacgcgcccagtcttttctgatcttggaagctaagcagggccgggcctgattagtacttggatgggaaaaggcaaaagaagtagggttgaggcattttcttttttttttttttttttttttttttgagacggagtctcgctctgtcgcccaggctggagtgcagtggagctgtcttggctcactgcaagcttcgcctcccgggttcacaccattctcttggggttgaggcattttctattgaatattttaaaattatgaacttttcaggtagagactgaaagtacttctaaattacgggtgtctttgtattgagatagatctatactattcaaagaaattaacacaaggagtggtcagaatgttatataaayttttatcaaggtgaaaacataaaaggcctgcccagactactctgccaagtaaagaga

SEQ ID NO: 90572 - DNA, 1908 bp, Homo sapiens
attctctggcttcatcacacatgaaaaaattttaatatgtttttgtggattatctacctgtttaattactctcaccagtctctactgaaatcagcagccttccccccaattctgcatgtaataaaaatgaattcaacatttgtctaaatgaggtataaattatgcttataattaaactatccaatatttttaataatatattcaagtgtaagcaatcagtaattttgataaaagcaaaattaagaatatagcatttaattgtaaatactctttggaaagactataataatagttcagttataagtacaattgtaatgcaaagtagtaattttttattatggctttgtcacaartaaggacttattgctaggtgagagaacacttaatgtcttggtcttaactctccatcgttgctctgttccacatccactacttccacttccacctctagttcactgtagagaggctcctgcatataaagggttctctctgtatttcataattcccagtgaacatgctcattgtaagttgcacatgtactaatgtaatttgttttcactattgcaaatacagccctttatgggggaaaataattgattgccattgtatttggcttatgaataaatgcatttttgattttataattgaattgtgacttggcttctattatattgaaataaaaaaattcaatgggaagttcccttcatccactgaatttattcgtacttctacataacagcttctccctcatcccatttttttcacctaaatgaacagtattgtttggcccaaacatgtttttctgctttggtgtcattggtgcacagtattgacagaagggtatcaaagataaggctgtgtgggaaaatgatccgttggcggattatcagtaggcctgtgcctgtgaacctgtccaggaatgtatcacaggagccatttaagcagagctatcccagatatgctagaaaataaatgttttgtaatctgtaaaacacagattaaaacttttttcccacgttgagtcactaacaccccaacacctactcccaaataacattttatttctagtcaaaaatttgtcagtggaggtacatcctgtctttatgtactagtcttatgatgtgaaagaaactggaatagaatagttcgctgtttttgaactattgctgtcagccaacaacagactgacagcagtgtgataaacatgaataactggatatttaaattattcttgccttggtaaacttttttttccctaacttacagacacagattatgagacacaaggacattcacaggcttgtctcaaagtggacatgagtttgtaactacactcagacatcattgcaatgcctcaagaaggttaaatgaacttctagggatgtgattcgattctttcttcctactgacttgactataagtttgtttctggttttgttttcagctttaaacgaggggcacatatactttgctcttttccatgtcattaaagggcgattgatattgattatatgatacagtaagggaaatttttctgaatagaaaattagaaactcctaataaaccttttgatattatatcatatgactgaattctggtggcccttcagagggtagtttaacagcatataataatagcacactaaaccaagatacagaagaaaactaagaggcaatctataaaaagaagcttccaaattgtgatgcaacatatatagaatatttaataaaatgtatttgtaatgtatagagtgcttaagaattttcaatgcagtattattctgtaggggtgaactgattgtaattgtgtctatatcatgggtgaggagaagaaatacacaagcagtcaaaggacacaagtagtgataggaccagtgcaattcaaatattttatgttgggttagaatgt

SEQ ID NO: 90573 - DNA, 1908 bp, Homo sapiens
attctctggcttcatcacacatgaaaaaattttaatatgtttttgtggattatctacctgtttaattactctcaccagtctctactgaaatcagcagccttccccccaattctgcatgtaataaaaatgaattcaacatttgtctaaatgaggtataaattatgcttataattaaactatccaatatttttaataatatattcaagtgtaagcaatcagtaattttgataaaagcaaaattaagaatatagcatttaattgtaaatactctttggaaagactataataatagttcagttataagtacaattgtaatgcaaagtagtaattttttattatggctttgtcacaagtaaggacttattgctaggtgagagaacacttaatgtcttggtcttaactctccatcgttgctctgttccacatccactacttccacttccacctctagttcactgtagagaggctcctgcatataaagggttctctctgtatttcataattcccagtgaacatgctcattgtaakttgcacatgtactaatgtaatttgttttcactattgcaaatacagccctttatgggggaaaataattgattgccattgtatttggcttatgaataaatgcatttttgattttataattgaattgtgacttggcttctattatattgaaataaaaaaattcaatgggaagttcccttcatccactgaatttattcgtacttctacataacagcttctccctcatcccatttttttcacctaaatgaacagtattgtttggcccaaacatgtttttctgctttggtgtcattggtgcacagtattgacagaagggtatcaaagataaggctgtgtgggaaaatgatccgttggcggattatcagtaggcctgtgcctgtgaacctgtccaggaatgtatcacaggagccatttaagcagagctatcccagatatgctagaaaataaatgttttgtaatctgtaaaacacagattaaaacttttttcccacgttgagtcactaacaccccaacacctactcccaaataacattttatttctagtcaaaaatttgtcagtggaggtacatcctgtctttatgtactagtcttatgatgtgaaagaaactggaatagaatagttcgctgtttttgaactattgctgtcagccaacaacagactgacagcagtgtgataaacatgaataactggatatttaaattattcttgccttggtaaacttttttttccctaacttacagacacagattatgagacacaaggacattcacaggcttgtctcaaagtggacatgagtttgtaactacactcagacatcattgcaatgcctcaagaaggttaaatgaacttctagggatgtgattcgattctttcttcctactgacttgactataagtttgtttctggttttgttttcagctttaaacgaggggcacatatactttgctcttttccatgtcattaaagggcgattgatattgattatatgatacagtaagggaaatttttctgaatagaaaattagaaactcctaataaaccttttgatattatatcatatgactgaattctggtggcccttcagagggtagtttaacagcatataataatagcacactaaaccaagatacagaagaaaactaagaggcaatctataaaaagaagcttccaaattgtgatgcaacatatatagaatatttaataaaatgtatttgtaatgtatagagtgcttaagaattttcaatgcagtattattctgtaggggtgaactgattgtaattgtgtctatatcatgggtgaggagaagaaatacacaagcagtcaaaggacacaagtagtgataggaccagtgcaattcaaatattttatgttgggttagaatgt

SEQ ID NO: 90574 - DNA, 927 bp, Homo sapiens
catgcatttgtttataggtgtccttcaacttcttaatgtggaaattcagaacttcgggtcaccattgtactcatctgttgaattcagtaatgtgtcagcaggatcctggatcatatcatctactctgcaccagagctgtggcgggggcattcatgcagctgccagtcatggagtacttttaaatgacaatattgtgtttggcacagctggccatggcatagatttagagggtcaggcctatactgtcactaataaccttgtggttctgatgacacagccagcgtggtccaccatttgggtggcrggaatcaaagtgaaccaggtaaaggacatcaacctccatggcaacgttgtggcaggatcagagagacttggctttcacatccgaggccacaagtgctcctcttgtgaactgctttggtctgacaatgtggcgcattcaagtcttcatggccttcatctctataaggaaagtggacttgacaactgtaccagaatctctggcttcttggctttcaagaactttgactatggtgccatgttacatgtagagaacagcgtggagatagagaacattactctggtagacaatactattggtcttttggcagtagtgtatgtattttctgctccacaaaattccgtcaaaaaagtgcagattgtgcttaggaattcagtcattgtggccaccagctcttcttttgactgcattcaggacaaagtgaagccgcactcagccaacttgacatcaacagatagagctccctccaatccaagaggaggtcgaattggtattctgtggcctgtattcacctcagaaccaaatcagtggcctcaggagccatggcacaaagtgaggaatgatcattcaatttcaggaatcatgaaacttcaaggtaggatgttttattttatctaggcagtgcc

SEQ ID NO: 90575 - DNA, 2824 bp, Homo sapiens
ttataacaaaaatagcattttaaattatgggaaaatagaaatcattcaaatagcaacgttgagccatttgactcatcatgtagggagaaaaaacaattcagaaatttttatctttttctttacaaaaataaattttaaatggattaaagatggaaaaccccatggaattactagaaaatattgatgacgttatttagagttacagggatacttctttgcatgaatcaaaatctagaaaatacgtgggtagatttaaaaatttgaatataaaagaattaaaacttcttaaagaatattaaaagcaaaactaaaaaactagaaataaatttgcaactcatctagcaaagggctaatttcatcaatgtaaaaacaacttactaatatttaagaacaaaaaggaacaaaccaactgaaaaaatttgcaaagaattccaagaaacattttacagagaaatgaaacaaatatcaataaacatacaaaaagccaaagttttctcacaatcaaagcacaggttaagagttcttgcactgagtccagctgcttggattgtgtccactaaccagatgtgcaattgtaagcaagttgctcatctcctttatgcctcagtttttaaatttaggacttggagatattaatattatgtactcaaatgattattataaggattaaaaagataaacctaataaagatttccaccacttctaaggcaataatgaccactgctactataattattattattttcccaatcatatttgcaataattaaaaagtgtgataatttgcagtgttggggaaaatgtggagaaagagttctcaaacttcgttctcaaatatcacttttcttagctttttgtcatctggctaccacctaaagctctgtacttctgacttagcaacttcacttttaagacattatcctagagatttttgttgaatgaataaataaaacagtaaaacagaaaatgaaaaagaaaatatatcatgcctcttacccctctgctatcttgatcttcagcactactactcagagggaaaaactagaaggttgccattaaaaaaatgtgtatgtataatttagtttttatagtaagaataatgatagtataactcatttatatggaaaactagaatcttgaaacatgagttggttattatgtaaagtgtgtcaaggaaaagaacaccaaagaaaagaaattttcctagacatagaagccaatctttctactacagaattaaggacttccagtatgactgaatttcaatttgattagcttcctcacaggagaaatattaataaaaactgaatgtaagttcttgaaagtcattgccatgaaggaagggagttgaagccattttttaatatggctatgaataataatctcttcccttttgggtgatattggtaggatgcaacctttcttgggcactgcccatgtggaaaccagcctatccatatctgtaggctatatactgtctttctgtttgaacacgttacagacaaaggaaatcttagagctttataattttgtagacaaaatgcatataaaaaacttggccccaggcctgtcataggataagcactaaataacttgactattccattccattgccaccactgccaccacttatcatgatcctggttggaatggtgatgaacatttgagcatgacatcctggtttttgtacaagttttctattgctgctataacaaattattaacaatgtagtggcttcaaacaacacctaagtattatctcacagttttgtaggtcagaagtctggtgaacttggctattttctctgcttcagatctctgatggccaaaattcaggtaatggcaggattgtgtttctttctggagtttytggagatgatttcaccttcagtctcactcaggttcttggccagattcagttccatgtagttgtaggactgtggtcgtgtaaccggccaaagagtccggctgctcactgcttatgaaaagaagtcaaaataataagttgtgataaaaggaagcaaaattggtttattatccatgctagcaggggaagagtagaaagcaattccactcttcagttcccctattcaattccacagaggtttttaaaggaaagatttggaatgcagaagaagtgtgggggctgagaggtataaggtagcgtgacttgctccagtggcccctcttgaacagttgtcctatttggcaaaggggatgctgccatcgtagaccctgccaggttataaattactttcagtcaattttgtagtcactcatcatctgggagtgggttccatctttaagcaatcttttgttagagagagaattccagaggtgccttgtcactatcaggatctgactcctaaagtatataaggaaatatatgaccagataagaaagcatggtgcgtgcttgacaagcatttaggtaaataaatgtgcataaggcatgggagtattgtatggagaaggaaaaggaattgagattcacagcacatactgaggctgtattttaatatgagaggttacatagatgtgttataggttgttagacaggcatagagtagggcagaagagggctctcccctacccactaggaatgttgagtgatggtttggcaattatcacattgcctccctaaaagtgacagattggcagatggtgccaggaagaggccatttcctgatgggccacacctgttgcactgaagtgttaattgaatggagacgccaggaagaagcaacttcctgggcatatgcactaagagacaaaaatggcagagtttgcctttccaggggcacaccagcagcaaagggaagaaagc

SEQ ID NO: 90576 - DNA, 969 bp, Homo sapiens
tggaagaacccaaattagaacacctcggcctcrcctttccccataaaattgtaagcaaaataaaatgtgtgttttatgctgttaggtttctgggtggtttgccaggtaatgatacagtttcagaacacccactccacttgtcaccattctgatgccacacattacaaaaaggaccccagtagctgaagcccaaatttcttcccttcccacttgctaatccagaataagtggggtggtgggctttactgcttttatgtcccatccaaaaggtacaagaccaaaatttgagaactacacaagctatagaaacatcaccaatatttgtttggtttctaattggtgttgtagacctacatctctgctataattcagtatgaaatactgaattacatataatctcagataagaaaaaggtgaatgaagtcaatagttttataatcacaagatttcatagaattcctcccctcaaaaattactttctgatttatgatcatcttgcttcatatcaccaacctattatgatcttttgcaatttaacaaggaggtgcattacatattgccatctttgaacatcacacgactttgataagcttctctggcatttaaggtactgaatattaaaaatcagaacaaacagaagagctattataaaagaaaaacagtactctcccattcatgtcttcaaataaggacagttcaaagtaatatacaaaatgtaacagtgaattctaccacacacataaacacacaaagatgctggaggctacatgatatcatatttgcacccttcaaaacagaatcctgagaaagcactggaggcatcttacacaaatccactctggtcagtttagaacaaggcatagagcagaagctagagggatcttttgccatttgaccagctattctttatgaaggtttgagatttgcgtagtaaggcagaacttgttcctactacttaagaagttgaga

SEQ ID NO: 90577 - DNA, 969 bp, Homo sapiens
tggaagaacccaaattagaacacctcggcctcgcctttccycataaaattgtaagcaaaataaaatgtgtgttttatgctgttaggtttctgggtggtttgccaggtaatgatacagtttcagaacacccactccacttgtcaccattctgatgccacacattacaaaaaggaccccagtagctgaagcccaaatttcttcccttcccacttgctaatccagaataagtggggtggtgggctttactgcttttatgtcccatccaaaaggtacaagaccaaaatttgagaactacacaagctatagaaacatcaccaatatttgtttggtttctaattggtgttgtagacctacatctctgctataattcagtatgaaatactgaattacatataatctcagataagaaaaaggtgaatgaagtcaatagttttataatcacaagatttcatagaattcctcccctcaaaaattactttctgatttatgatcatcttgcttcatatcaccaacctattatgatcttttgcaatttaacaaggaggtgcattacatattgccatctttgaacatcacacgactttgataagcttctctggcatttaaggtactgaatattaaaaatcagaacaaacagaagagctattataaaagaaaaacagtactctcccattcatgtcttcaaataaggacagttcaaagtaatatacaaaatgtaacagtgaattctaccacacacataaacacacaaagatgctggaggctacatgatatcatatttgcacccttcaaaacagaatcctgagaaagcactggaggcatcttacacaaatccactctggtcagtttagaacaaggcatagagcagaagctagagggatcttttgccatttgaccagctattctttatgaaggtttgagatttgcgtagtaaggcagaacttgttcctactacttaagaagttgaga

SEQ ID NO: 90578 - DNA, 969 bp, Homo sapiens
tggaagaacccaaattagaacacctcggcctcgcctttccccataaaattgtaagcaaaataaaatgtgtgttttatgctgttaggtttctgggtggtttgccmggtaatgatacagtttcagaacacccactccacttgtcaccattctgatgccacacattacaaaaaggaccccagtagctgaagcccaaatttcttcccttcccacttgctaatccagaataagtggggtggtgggctttactgcttttatgtcccatccaaaaggtacaagaccaaaatttgagaactacacaagctatagaaacatcaccaatatttgtttggtttctaattggtgttgtagacctacatctctgctataattcagtatgaaatactgaattacatataatctcagataagaaaaaggtgaatgaagtcaatagttttataatcacaagatttcatagaattcctcccctcaaaaattactttctgatttatgatcatcttgcttcatatcaccaacctattatgatcttttgcaatttaacaaggaggtgcattacatattgccatctttgaacatcacacgactttgataagcttctctggcatttaaggtactgaatattaaaaatcagaacaaacagaagagctattataaaagaaaaacagtactctcccattcatgtcttcaaataaggacagttcaaagtaatatacaaaatgtaacagtgaattctaccacacacataaacacacaaagatgctggaggctacatgatatcatatttgcacccttcaaaacagaatcctgagaaagcactggaggcatcttacacaaatccactctggtcagtttagaacaaggcatagagcagaagctagagggatcttttgccatttgaccagctattctttatgaaggtttgagatttgcgtagtaaggcagaacttgttcctactacttaagaagttgaga

SEQ ID NO: 90579 - DNA, 925 bp, Homo sapiens
attgttgtcttccataccctctgtgtctttcaaacttaaggatactagaacctgtaaatccattctctgacacatgaagaaaattaaccagttagtggattattttaactcctttcagcatgacaattacttattccacttttaatgaagatatgctaggttaattttggggggatttcactggtctatgaaattgttctcctacattaacccccccaaaaagaggaagaatgaaacaacataagtgcctacttatttccaaactctwtactgtgttgtacaatataaatgaaacataatcagatctggctgggttcagcctgtctgtgattcatctcttgggtagttttactcactgggtaaaatgagaacgtcatccccagggcctggaatggtattgttgtatcctccccagccttcttcaacaccttgccatgtttcagggagggaccattttaaagctgattcaggggcagaggtagaagctagaaaataaaaaaaaattttgaaaatctaatccattgtgataacttccaaattctatccttattttaggatgctagtggtattttcacctcccaaagaagctgcctatcaatattttataagtttctgtacaaatatttatcagttaaaaagcaagtaattattcaatccttagattaccttcacttctgaaaaaaatcccacttttgttattatacatctgttttgccttataataaatatggcatgcttatcatgaaatatttaaaaaatgcaaataagaaaggtaataattgcccataatctcactaccttgcaataactaccttttatttctgtttccttccagaatttctcagaatttttacataattgagattatatcaaatcctgttcttattttttacacccagttctacttttgcttagcttagcctat

SEQ ID NO: 90580 - DNA, 925 bp, Homo sapiens
attgttgtcttccataccctctgtgtctttcaaacttaaggatactagaacctgtaaatccattctctgacacatgaagaaaattaaccagttagtggattattttaactcctttcagcatgacaattacttattccacttttaatgaagatatgctaggttaattttggggggatttcactggtctatgaaattgttctcctacattaacccccccaaaaagaggaagaatgaaacaacataagtgcctacttatttccaaactctttactgtgttgtacaatataaatgaaacataatcagatctggctgggttcagcctgtctgtgattcatctcttgggtwgttttactcactgggtaaaatgagaacgtcatccccagggcctggaatggtattgttgtatcctccccagccttcttcaacaccttgccatgtttcagggagggaccattttaaagctgattcaggggcagaggtagaagctagaaaataaaaaaaaattttgaaaatctaatccattgtgataacttccaaattctatccttattttaggatgctagtggtattttcacctcccaaagaagctgcctatcaatattttataagtttctgtacaaatatttatcagttaaaaagcaagtaattattcaatccttagattaccttcacttctgaaaaaaatcccacttttgttattatacatctgttttgccttataataaatatggcatgcttatcatgaaatatttaaaaaatgcaaataagaaaggtaataattgcccataatctcactaccttgcaataactaccttttatttctgtttccttccagaatttctcagaatttttacataattgagattatatcaaatcctgttcttattttttacacccagttctacttttgcttagcttagcctat

SEQ ID NO: 90581 - DNA, 925 bp, Homo sapiens
attgttgtcttccataccctctgtgtctttcaaacttaaggatactagaacctgtaaatccattctctgacacatgaagaaaattaaccagttagtggattattttaactcctttcagcatgacaattacttattccacttttaatgaagatatgctaggttaattttggggggatttcactggtctatgaaattgttctcctacattaacccccccaaaaagaggaagaatgaaacaacataagtgcctacttatttccaaactctttactgtgttgtacaatataaatgaaacataatcagatctggctgggttcagcctgtctgtgattcatctcttgggtagttttactcactgggtaaaatgagaacgtcatccccagggcctggaatggtattgttgtatcctccccagccttcttcaacaccttgccatgtttcagggagggaccattttaaagctgattcaggggcagaggtagaagctagaaaataaaaaaaaattttgaaaatctaatccattgtgataacttccaaattctatccttattttaggatgctagtggtattttcacctcccaaagaagctgcctatcaatattttataagtttctgtacaaatatttatcagttaaaaagcaagtaattattcaatccttagattaccttcacttctgaaaaaaatcccacttttgttattatacatctgttttgccttataataaatatggcatgcttatcatgaaatatttaraaaatgcaaataagaaaggtaataattgcccataatctcactaccttgcaataactaccttttatttctgtttccttccagaatttctcagaatttttacataattgagattatatcaaatcctgttcttattttttacacccagttctacttttgcttagcttagcctat

SEQ ID NO: 90582 - DNA, 925 bp, Homo sapiens
attgttgtcttccataccctctgtgtctttcaaacttaaggatactagaacctgtaaatccattctctgacacatgaagaaaattaaccagttagtggattattttaactcctttcagcatgacaattacttattccacttttaatgaagatatgctaggttaattttggggggatttcactggtctatgaaattgttctcctacattaacccccccaaaaagaggaagaatgaaacaacataagtgcctacttatttccaaactctttactgtgttgtacaatataaatgaaacataatcagatctggctgggttcagcctgtctgtgattcatctcttgggtagttttactcactgggtaaaatgagaacgtcatccccagggcctggaatggtattgttgtatcctccccagccttcttcaacaccttgccatgtttcagggagggaccattttaaagctgattcaggggcagaggtagaagctagaaaataaaaaaaaattttgaaaatctaatccattgtgataacttccaaattctatccttattttaggatgctagtggtattttcacctcccaaagaagctgcctatcaatattttataagtttctgtacaaatatttatcagttaaaaagcaagtaattattcaatccttagattaccttcacttctgaaaaaaatcccacttttgttattatacatctgttttgccttataataaatatggcatgcttatcatgaaatatttaaaaaatgcaaataagaaargtaataattgcccataatctcactaccttgcaataactaccttttatttctgtttccttccagaatttctcagaatttttacataattgagattatatcaaatcctgttcttattttttacacccagttctacttttgcttagcttagcctat

SEQ ID NO: 90583 - DNA, 627 bp, Homo sapiens
atattttaaatattcccatctggtacatgatcagggtctgttaggagatgaagcttgattttgatcctggattctttcagtccatcacatttggataagggggaaatactggattagtaccagactttgtctatccttatggaacatcttgttcatttrttattttcattctcaccttctaccttgtatagaatatgtgcaatacaaattagggggcctatttgtttgtttttggcatgttagttcacaaaatggtcaaaccagccatgcaaccttgtcctattattgattattcatccaagaattgactcctgcttgcctgtgagtaaactacctcatactggagaaacttctgtctgtgtagctcacacatccatcaagatatggaatgttaccccaagaactattgaaataaactttttaaatagagtatttccttatccgagaaaatcctttttccccttcaaagtcaatccttgcctttgcccatactcacaaggaggcaacaatttttctgatttataccaacatagattagttttgcctattctttaatttcatttaaatagaattgtattgtgtctgacttttttttgctcagcaaaatgatttcgtgattcattcatg

SEQ ID NO: 90584 - DNA, 627 bp, Homo sapiens
atattttaaatattcccatctggtacatgatcagggtctgttaggagatgaagcttgattttgatcctggattctttcagtccatcacatttggataagggggaaatactggattagtaccagactttgtctatccttatggaacatcttgttcatttgttatkttcattctcaccttctaccttgtatagaatatgtgcaatacaaattagggggcctatttgtttgtttttggcatgttagttcacaaaatggtcaaaccagccatgcaaccttgtcctattattgattattcatccaagaattgactcctgcttgcctgtgagtaaactacctcatactggagaaacttctgtctgtgtagctcacacatccatcaagatatggaatgttaccccaagaactattgaaataaactttttaaatagagtatttccttatccgagaaaatcctttttccccttcaaagtcaatccttgcctttgcccatactcacaaggaggcaacaatttttctgatttataccaacatagattagttttgcctattctttaatttcatttaaatagaattgtattgtgtctgacttttttttgctcagcaaaatgatttcgtgattcattcatg

SEQ ID NO: 90585 - DNA, 627 bp, Homo sapiens
atattttaaatattcccatctggtacatgatcagggtctgttaggagatgaagcttgattttgatcctggattctttcagtccatcacatttggataagggggaaatactggattagtaccagactttgtctatccttatggaacatcttgttcatttgttattttcattctcaccttctaccttgtatagaatatgtgcaatacaaattagggggcctatttgtttgtttttggcatgttagttcacaaaatggtcaaaccagccatgcaaccttgtcctattattgattattcatccaagaattgactcctgcttgcctgtgagtaaactacctcatactggagaaacttctgtctgtgtagctcacacatccatcaagatatggaatgttaccccaagaactattgaaataaaytttttaaatagagtatttccttatccgagaaaatcctttttccccttcaaagtcaatccttgcctttgcccatactcacaaggaggcaacaatttttctgatttataccaacatagattagttttgcctattctttaatttcatttaaatagaattgtattgtgtctgacttttttttgctcagcaaaatgatttcgtgattcattcatg

SEQ ID NO: 90586 - DNA, 716 bp, Homo sapiens
ctcataaattaacacagtgcctgccttcaatgtgcttacagtccaggccagccagcagaaggaagagagaggagaaaatacaaccaaaccatgtagagggcaggtgcctgtgacctggtgctcaaggcccggggcaggtggggaccagcccggagttacagagaggcgcagatcgacccagctctgaaaggagacagcgccccaggaatcgatcacgggttgggattatatttagtctcaggatctattttgggttttcagaagaaagggggacaatcaaaagggacaggttggatgaaggttgtgggggcgggtctaggagctgagcctgggaggaggaagtggttgagttaggcgccaggctccgtgaactgaccgcaagaggaggacagagggtggggagtcctcgaaggttggcagaggtgggcaccacgccttccccgcagttccgggcttggaggctggcgctacatcctgaaagctgtggggaggaagccccatggggcccaagcccacggaaaagactggggagggagaaacaggagggacccaacgcgcaggcctgggacacttggattcgcaagagcagatgaaggctacgargccggccccaggtgctcggccactaacactcaccgaccccggggagaagagaggcaggcaggagtctccaggccgaatctgagccgggaactgtggagagcaaggaggatcca

SEQ ID NO: 90587 - DNA, 713 bp, Homo sapiens
gtacattatcctcaggatgataaaaagatcatgaaagcaaaacatgaacaaagttgtagttttaaatggccactctggcttcagtctgggaatggatttgaaagggacagaagtagagtcagggaggccatttaggagggcattgcaaaatccaggcaagagaagatgcttgtcaggctgaactggggttttggcagtggagatagactcaagtgatacttacaaagtgagcttacagaattcgttgattgattgggaatgggtgaaagaggtgaaagttaattctttggtttggagtaggtaacaatttgcatgtgattgccacggcagtttgtagaakagatggatgaagttgtttttggatatcttgaatgtgtaataacttaaaatacccaagtgggggtaatcagtgaatagtaaaacagaaacctagaaagcaggaaaaggctgaattttaatcttttcaaatagggttttgttgatcttggactgtaacttttgtcattgaccaagcaatatcctaacagagtctgcctattggactaaattttcttgcaggaactgaaactaagattctttccattataccagaatggggcaagcctatcattattttgagaataaatccaaccttttcctgagattcctctaaaatcacttgcataagcttgcagccctctagtagaagaatgggtacttcagcctaagtctct

SEQ ID NO: 90588 - DNA, 713 bp, Homo sapiens
gtacattatcctcaggatgataaaaagatcatgaaagcaaaacatgaacaaagttgtagttttaaatggccactctggcttcagtctgggaatggatttgaaagggacagaagtagagtcagggaggccatttaggagggcattgcaaaatccaggcaagagaagatgcttgtcaggctgaactggggttttggcagtggagatagactcaagtgatacttacaaagtgagcttacagaattcgttgattgattgggaatgggtgaaagaggtgaaagttaattctttggtttggagtaggtaacaatttgcatgtgattgccacggcagtttgtagaatagawggatgaagttgtttttggatatcttgaatgtgtaataacttaaaatacccaagtgggggtaatcagtgaatagtaaaacagaaacctagaaagcaggaaaaggctgaattttaatcttttcaaatagggttttgttgatcttggactgtaacttttgtcattgaccaagcaatatcctaacagagtctgcctattggactaaattttcttgcaggaactgaaactaagattctttccattataccagaatggggcaagcctatcattattttgagaataaatccaaccttttcctgagattcctctaaaatcacttgcataagcttgcagccctctagtagaagaatgggtacttcagcctaagtctct

SEQ ID NO: 90589 - DNA, 713 bp, Homo sapiens
gtacattatcctcaggatgataaaaagatcatgaaagcaaaacatgaacaaagttgtagttttaaatggccactctggcttcagtctgggaatggatttgaaagggacagaagtagagtcagggaggccatttaggagggcattgcaaaatccaggcaagagaagatgcttgtcaggctgaactggggttttggcagtggagatagactcaagtgatacttacaaagtgagcttacagaattcgttgattgattgggaatgggtgaaagaggtgaaagttaattctttggtttggagtaggtaacaatttgcatgtgattgccacggcagtttgtagaatagatggatgaagttgtttttggatatcttgaawgtgtaataacttaaaatacccaagtgggggtaatcagtgaatagtaaaacagaaacctagaaagcaggaaaaggctgaattttaatcttttcaaatagggttttgttgatcttggactgtaacttttgtcattgaccaagcaatatcctaacagagtctgcctattggactaaattttcttgcaggaactgaaactaagattctttccattataccagaatggggcaagcctatcattattttgagaataaatccaaccttttcctgagattcctctaaaatcacttgcataagcttgcagccctctagtagaagaatgggtacttcagcctaagtctct

SEQ ID NO: 90590 - DNA, 1322 bp, Homo sapiens
gctaagtgaaagaaaacagtcacaacaagacgaatacggtatgattccatttatatgagggacctagagtwattgaaatcacaggcggaaaacagagtggtggttgccaggggcttggcgaaggggaatggggagtcagtgtttaacgggtacagagttttagttctgcaagatgaaaggagttctgtggatagatggtggtgatggctgcacaacgctgtgaatgtacttaacgtcactgcacacttaaaaatggctaagatggtaaattttctgttatgtatatttcacaacacccaaaaaatctacaccttcagaaatgttctctcctctgtccctcatggacaaggctgcagagattagtcagggccaaatgacaagctgagtgtgttttttttttaattgcattgagcatctgccaatctggacttgatgccaaaggctagtaatgcttacaccctcatctgagcaccaagggcttcacaagctccagctcttcccaccataggagctatcaggggtaacaggccaaccataacagcagggaaccctgagacaggcagctgcaaggtgcctgggctctgtccctcctctgcctctaccatccacaggcaacatcccccgctagacaatgccagcttgaggaggaaggactgaaaaggtgcctgtgctaaagacactgactctagtcccctgggtgtccctgggacccccggctctatcccctgtgatgttactcacttagctgtggcaggcaggtctcaagtgctggcagagcctggtgacccttccctactgctcatctctaccaagggggcccagtcctgccacccacacccacactcacccaccgtcctggggatgggtgtcaggctacacacattaccacgttcttcataatctccttctacatgcacatggtccctatgacacatttcttggagcagcgtctctgtctctcaagaataaaggacacgaactgcctctgggagaagcaaacctcatcccactacatgttgcaaatgcacagaataattttggaagatgacgccatcttttgccccacaatcaggggtctaactgatccaaatgcccacaatgaagcatcatcgacagtcactctgcagtgggtttagagattgttactgcatgaaaaagcttttaccacgtaattactcagcagcgcctgcggaattgagaatgtaggctgagtgcaagaaaagaactgaacatacttttacaaagtcacttttttgctgaggtttacacatgtggggcaaaagtcttctaatagcaccttttctgggggaggcagccagctc

SEQ ID NO: 90591 - DNA, 1322 bp, Homo sapiens
gctaagtgaaagaaaacagtcacaacaagacgaatacggtatgattccatttatatgagggacctagagttattgaaatcacaggyggaaaacagagtggtggttgccaggggcttggcgaaggggaatggggagtcagtgtttaacgggtacagagttttagttctgcaagatgaaaggagttctgtggatagatggtggtgatggctgcacaacgctgtgaatgtacttaacgtcactgcacacttaaaaatggctaagatggtaaattttctgttatgtatatttcacaacacccaaaaaatctacaccttcagaaatgttctctcctctgtccctcatggacaaggctgcagagattagtcagggccaaatgacaagctgagtgtgttttttttttaattgcattgagcatctgccaatctggacttgatgccaaaggctagtaatgcttacaccctcatctgagcaccaagggcttcacaagctccagctcttcccaccataggagctatcaggggtaacaggccaaccataacagcagggaaccctgagacaggcagctgcaaggtgcctgggctctgtccctcctctgcctctaccatccacaggcaacatcccccgctagacaatgccagcttgaggaggaaggactgaaaaggtgcctgtgctaaagacactgactctagtcccctgggtgtccctgggacccccggctctatcccctgtgatgttactcacttagctgtggcaggcaggtctcaagtgctggcagagcctggtgacccttccctactgctcatctctaccaagggggcccagtcctgccacccacacccacactcacccaccgtcctggggatgggtgtcaggctacacacattaccacgttcttcataatctccttctacatgcacatggtccctatgacacatttcttggagcagcgtctctgtctctcaagaataaaggacacgaactgcctctgggagaagcaaacctcatcccactacatgttgcaaatgcacagaataattttggaagatgacgccatcttttgccccacaatcaggggtctaactgatccaaatgcccacaatgaagcatcatcgacagtcactctgcagtgggtttagagattgttactgcatgaaaaagcttttaccacgtaattactcagcagcgcctgcggaattgagaatgtaggctgagtgcaagaaaagaactgaacatacttttacaaagtcacttttttgctgaggtttacacatgtggggcaaaagtcttctaatagcaccttttctgggggaggcagccagctc

SEQ ID NO: 90592 - DNA, 682 bp, Homo sapiens
ctttcaagaatgacttaatgaatcacgaggtcaggagtttgagaccagcctggccaacatggtgaaatcccatttctactaaaaatacaaaaaattagctgagcatggtggcggtcgcctgtaatctctcagctactcgggaggctgaggcaagagaattgcttgaacccaggagacaraggttgcagtgagctgagactgtgccactgcattccagccccagcaacagtgcgagactccatctcaaaaaaaaaaaagaatgacttaaatggcacttcatgcttcttgaatgcacagcaggccatgaccagagaaacagtcaattttttatttttgctttgaacaactacaagacatggagtttctgaagcaggtggatctgtactcagaatcaaattaataccataagtggagacatgagaaccactccaaaaggaacgtgttgagtaaatatatgtcccccctcacagcaaaacacatgccatggaggacatcattaagaatgcaataatcgaacaagtacctttcagtggggaaataaactggactgaaggatttgtagcttcctctagtgttgcattagacaaaagtgcattccagtaggtacctgtcaggacagtcgctggctctcccatcatctggggacagagatcagtttctgacttctccagaatcacagttc

SEQ ID NO: 90593 - DNA, 682 bp, Homo sapiens
ctttcaagaatgacttaatgaatcacgaggtcaggagtttgagaccagcctggccaacatggtgaaatcccatttctactaaaaatacaaaaaattagctgagcatggtggcggtcgcctgtaatctctcagctactcgggaggctgaggcaagagaattgcttgaacccaggagacaaaggttgcagtgagctgagactgtgccactgcattccagccccagcaacagtgcgagactccatctcaaaaaaaaaaaagaatgacttaaatggcacttcatgcttcttgaatgcacagcaggccatgaccagagaaacagtcaattttttatttttgctttgaacaactacaagacatggagtttctgaagcaggtggatctgtactcagaatcaaattaataccataagtggagacatgagaaccactccaaaaggaacgtgttgagtaaatatatgtcccccctcacagcaaaacacatgccatggaggayatcattaagaatgcaataatcgaacaagtacctttcagtggggaaataaactggactgaaggatttgtagcttcctctagtgttgcattagacaaaagtgcattccagtaggtacctgtcaggacagtcgctggctctcccatcatctggggacagagatcagtttctgacttctccagaatcacagttc

SEQ ID NO: 90594 - DNA, 682 bp, Homo sapiens
ctttcaagaatgacttaatgaatcacgaggtcaggagtttgagaccagcctggccaacatggtgaaatcccatttctactaaaaatacaaaaaattagctgagcatggtggcggtcgcctgtaatctctcagctactcgggaggctgaggcaagagaattgcttgaacccaggagacaaaggttgcagtgagctgagactgtgccactgcattccagccccagcaacagtgcgagactccatctcaaaaaaaaaaaagaatgacttaaatggcacttcatgcttcttgaatgcacagcaggccatgaccagagaaacagtcaattttttatttttgctttgaacaactacaagacatggagtttctgaagcaggtggatctgtactcagaatcaaattaataccataagtggagacatgagaaccactccaaaaggaacgtgttgagtaaatatatgtcccccctcacagcaaaacacatgccatggaggacatcattaagaatgcaataatcgaacaagtacctttcagtggggaaataaactggactgaaggatttgtagcttcctctagtgttkcattagacaaaagtgcattccagtaggtacctgtcaggacagtcgctggctctcccatcatctggggacagagatcagtttctgacttctccagaatcacagttc

SEQ ID NO: 90595 - DNA, 1694 bp, Homo sapiens
ttttaccttaaaatgctaaaataactttaagaatcatcatcattgaatggtggtgagaaatgggtagagaaggacaggatacaagaagggcagaatgctgtacccgcgggggatgaggattcactagacattgctgtctttcatatgcctgaaatgttgtataataaaaagttgaaagaaagaggcattggatttttgtttgtttgtttgagacaggtcttggtctgttgcccaggctggagtgcagagatggaatcatagctcacttgagcctcaaactcacaggttcatgtgatctacccacctcctaatagctagggttacaggtgtgtgccacaatccctggcttctttttaaaacatttttttgtttcttttattattttttgttttttcttttttacaaacccttgtgttgagggctttcaatagatctcagcgaaggagctgctctgctgcataccaaaaaaatattttctagagacatggtcttactatgttgtcaaggctggtctcgaactcctggcctaaagtggtcctcctacctcagcctcccatggcactgagattacagacatgagccactatttctggctttgcactgggttttcattataacctttaatctgactctgatctttttttcatagaaatcaaatagtgagctatttctttgagaaagagtattttgaattaattaaacagtatccattgctaaaaatattctacttattcagaccaggaacttggagagtggacgaatttaacacagtgatcaatttcttccatatatttgcctaattaccctagaacaggcttcctcagcctggacactattcacatttgaggccagataattctttgccacaggggctgtcctgtgccctgcaggatattcagcagcatccttgacctctgttctcgagatgccaatagcaccccctgttacacatgcacgcacacacacacacacacgcacacttgtgacaaccaaaaatgtctccagacattgctaaatgtcccctggggggtgcaaaactgcccagtggagaaccactgccctagaacatgcattctcatatgccccctgaggagatgaaaattggtaattggttcctggggagatcttaaaatcttagaaatgacagttatttagggaaaaaatcattagggaaaaaaaaaaaacatgaggggctcttgcctagtatgctgatgtcccttaacatgactgtgaacctagatgcttatatttttaagacataaacagatatacaatatatctgcagcattaacattttatggtggggaattatttttwaaaaatctaaaaaggctccatggggaggagggagtgataaaaaaacaaaacaaaacaaaaaaacaacaagttgagaaacattgccctccaaagaggtctgattcagctttaaacaaccattccctccagggacttggcatgcccaaagcaagcctcccaggatctagggggagtcttcctttatttggcaaaacaactgttgttacttcccagaacctccgcaattgtcttggaagcttgagatgtagggttataaaaattcagggaaaaaaccatgaggggatcttgccaagttcgctgataccccttgacatatcagtgaatctgggagctttcatttgtaagttataagagaaaccatacaagttgaggtgacc

SEQ ID NO: 90596 - DNA, 660 bp, Homo sapiens
ttttttaaaggtagctggcattgacttggattttcttttattggataatgaatgcttctagagtcatctgtgtgcaatttagaggagccaattcggcaaatgtaacaagaaaattaacagaatgatggctaggggattaagtgcagagtaaatggtaataatgtcactggaagcctcctaacttgcactttcgctgtctgtggcaccattagctcaggtgatgtctgtcactctgaaagttgggtgtagttggaactgtttgattccaagagcttgtttcccttgacaacccagtgttcctgttgaccagagagactggctgaaaattcttttcagatgcactcaaaagtcttgcttaacatttctgggatatgccccaggcctttatggaaggctgtttcctcattcaaaagaggtaccggtttcctgctgagtgtgagaggtttatcagaatattttttaaaacctactttttgtgtaggacaacttaatcggtattagttgttgctytttggtatactttttgttgtctatagtagttgtgtctttgtacattcaggggacattttcagggagcctgctgtgggtaaagaaaaccataggggctataggggatgagaagtccaatgagacttgggaggtaccctcagggaccttcca

SEQ ID NO: 90597 - DNA, 1020 bp, Homo sapiens
agccttttccatgtaggattgctgtgagaagtgaatgagttaatttgcatggggtgcctagaatagactatagtccttagtaagttctcagtacacgttagcctttgttattgtaacctaggtatgtacattcagcagccccatactcataacaagtgagcagaactcaagtccaagaagggttcaatatgttctctgaatcctgcagcagtgttcggctggaattctttgttttctctcaggtctcagttaataagctctgaccactccccatcttcctaccctgggctcatcctaggatttcctaggatttgattcttttaaaattagccatggaaacattaacagaagagaaaacaataccaagggagactttgcttgctcatgtttttcctccacctctgcccatgtgtggaggtacaagggagcatccccaccttacgtccctctgtacatcttcatctgctcccctggctcgggcagcagaactgcagctaccaatggcctttgtcgaaagagtggaatgcttatgcactggtttcaattcagtctgctttgctgagtgaaagtgaggtggtggggtgcttactcgcytcattcctcctttacccagttcagaggtgttttgccctaggaggaagtcgttttcctaatgtgttggcttctgaagttcacctcttaattccaactttcatttaaaaatgtttgtgtacaagggggtgaatgatacatgtaactatgtctctatccatcctgattcacggactgtgctgcccaaggatatggcagatacatttccaggagaagaatgagacactagggcccattgcttttaggatgagaggaggaaacaagccacatcttgcaatcacacagacacctctgctgcagcaactctggggtgggaaccatggcattttgaaggctgcattcccttgcctgggaagcccttgatatggggagccttgggccctcctaggtgcttagcattggctcaagagcagttgatagtggtcctag

SEQ ID NO: 90598 - DNA, 1020 bp, Homo sapiens
agccttttccatgtaggattgctgtgagaagtgaatgagttaatttgcatggggtgcctagaatagactatagtccttagtaagttctcagtacacgttagcctttgttattgtaacctaggtatgtacattcagcagccccatactcataacaagtgagcagaactcaagtccaagaagggttcaatatgttctctgaatcctgcagcagtgttcggctggaattctttgttttctctcaggtctcagttaataagctctgaccactccccatcttcctaccctgggctcatcctaggatttcctaggatttgattcttttaaaattagccatggaaacattaacagaagagaaaacaataccaagggagactttgcttgctcatgtttttcctccacctctgcccatgtgtggaggtacaagggagcatccccaccttacgtccctctgtacatcttcatctgctcccctggctcgggcagcagaactgcagctaccaatggcctttgtcgaaagagtggaatgcttatgcactggtttcaattcagtctgctttgctgagtgaaagtgaggtggtggggtgcttactcgcctcattcctcctttacccagttcagaggtgttttgccctaggaggaagtcgttttcctaatgtgttggcttctgaagttcacctcttaattccaactttcatttaaaaatgtttgtgtacaagggggtgaatgatacatgtaactatgtctctatccatcctgattcacggactgtgctgcccaaggatatggcagatacatttccaggagaagaatgagacactagggcccattgcttttaggatragaggaggaaacaagccacatcttgcaatcacacagacacctctgctgcagcaactctggggtgggaaccatggcattttgaaggctgcattcccttgcctgggaagcccttgatatggggagccttgggccctcctaggtgcttagcattggctcaagagcagttgatagtggtcctag

SEQ ID NO: 90599 - DNA, 758 bp, Homo sapiens
gagaataaactaaaaatactgaaaccaagcagaacctacatagcaaaatacttacttttacctctagaaaggaaaatgaaaaatatggctccatggtagaacttttactcccaaagctagactgaaaaaagatcgtgtttgtcctatggttggtctgcataatgtacaagcttacaaatggtaggctgtccccaactggcttttttctagtgtttaaatcacattttgtattttccttgcattgtgcctgggccatgtgagacagtttagataaaaaggactttatttggtaccacagttttcagtctttcacccaactcatctggaaagactgaacagaaatgagaccggggtctctgaagaggtcagcatccatactttttagtttagttgttcggtcagctactgaaactccaaaatagctctctgctgctcagcctgttttgcttctaaactgtggccttggcaaacaccttactgtatcaacacacactgggtgcagagacagaaagagcacgggtctgcctggcrtagtgcctgcctgtttgaatgaatgaatgcatgaatgaatgtaatttcaagtcttgtatctatcacctgccagccttgaccttcagcaggtttctttgcatctcattcattcacccaacagatatttattgattgcctcctgggtgccaggcacaaaattaagttatgaggatcacaaggtgaaaaagacagcatctgttcttaagaaattccagtctggtaaggag

SEQ ID NO: 90600 - DNA, 504 bp, Homo sapiens
ggttctgccccagatcctgtccctccctccatcgggcatcttggcaaggctctggacttccaacaaatgaaggaacagaactagctgtacatgaagtacaaagatgtctttattttttatgttgttcttgccctaatattcctggattctagttactgccacagcatctatgggaggggtcctcaacccccgggccacaaccccttagaaactgggctgtacagcaggaggtgagtgatgagtggtgtgtggggagtgagccagagagtgaagctttatctgtatttacagccactccccatcgctggcattactgcctgagctmcacctcctatcagatcagtggtgacattagattctcacaggagcacaaactccattgtgaactgcacatgtgaggaatctaggttgcatgctccttatgagaatctactgcctggtgatctgtcactgtctcccatcacccccagatgagactgtctagttgctggaaaacaggctcag

SEQ ID NO: 90601 - DNA, 2236 bp, Homo sapiens
agggctgcacctctaaacagggacgcgcaccctggcccgtgccctcgggaagtttctccttctgtgtgatctttgaggcccacgttggaagtctttacccctggccccgtctccgattcctccccgctgtgcccagggccagactccttccgtgtccctggctttagcgcccgcggtcctggcgagcgttttcccagcgggcgtttgcggcgcttctcctactgagaaactgttgctgtggaggcttgagaagtcaaggggctgcaggccggggtgggatacacacaccctggagctctgtgcccrgtcgatgtccgctttgggggcggaggccctccaggggtagccgtgaaatgcccagggtggctttgagcggctggcactgagaacagcgatcccgaaaagaagaaggggtggtggcgcaggttctttcagagatgcctgagcctcctccgtgcgcccagggacccaccgctcattgacttccagggcccaagctgcagggagctgtcacatctctctttcagacctgagcccagaacaccagctcagagccaccccgcagcctcccgtgagctgctgtcacctaggcacccacacctgcactggtccctccatcagtgagccaaattctctccccctctctgcccatggatgttttctgccacattctaagtattaaagttacatgaactttttggatttgccatgcatttatttatttgtttgtttttgttttcgtttctggaaaagccctcccgagccaaacaggaggccctctttgaatttctgcctcaatctggagtcatccatggcaggtgtgctgtgtcaaagatgacttctgttctgggcagcccaggggatacacatggaaagaaatgccctttcttgcatgtttttctttagcagggattaaattcatccagagtatttattcacaccatcagaaaaggccatgagctcccccagatgcaagcaagcccccctctcccgccttctgcccgaacactggtgttattcactgggaagaaggaacgagaacttcagttggattttgatgcatttggaaaaacaaaacactcttcccttctcctactctattttctacctttggaatgtacgttaaaactaatgattgctgtgtgatcagatggggacagtttctaattggcagatgggctaaaacctcattaaattattatgtgatagaaatgataaactagttttcagtgcacagtagaatttaacatttgttgggtgaatgtaggaagaatgctgagataaagtgagataggctcttacactatctcactatctggtttgactgctgctgggggtgctcagataaaaaagggtccaacaatatgtaaaaatatttatagttttcaggtgtcccttccaatatcccccccaaatatttatgagatgtttacagatatacaatggtctatgcagtaaatttgaaaacttggtaattattgcttatgcgcgtcttgctttttctaagggtgtcatgtaaaagctggacaggcagtttatgttctgttctctgaagttccctcttgtgttacttaataggggatctgttgtcacatatggacattgatagcatttttggatgactcccaggtttcttatcaagttgttaacagtgtgtccaacttgtggctcttttacctgcaaaaaccagctttggtattgatgcgagcctccctagggggcagatcttggatgttcagatgctgttagtatcaggcatgtaccgacttctgggaggacggctgggagcatgcagaaacagatgaccctttgttttctcagataagcgtctggcaccttgacagaggctgacttttgggggaagtttaattcttccttttgccagtactggaaatgatggcaatattgggttgtacctacctctgctcacgaagatggtggtcttagcagcacaggggtttagaaagtgcccctgggcaggctgaatccgatttccctgcttcagccagtgtagctcagcagctagttttgcttggtatttctaccctattgctcaggatgaaagaattatctgcggggagagggggtatcttgcttctttgcaaacttatgcccccggagaaacatcacctgtagatgtgcctgttctctgactacatttgctctgcatgagagcagggatcctgttacccgtagcccatatgctcctcaaagattccaagtgagagctaagaaa

SEQ ID NO: 90602 - DNA, 1268 bp, Homo sapiens
tgcatgcagggcttagtacctgggtgatgggttgataggtgcagcaaaccaccagggcacacgtttacctatgtagcaaacctgcacttgcatctcagaaattaaaattaaaattaaattatattaaaaaactatctagtatcccttttagttttcagtasgaagattgttgtaaacaacctaatatgacttatttacagaaacagaagctggaattatcaatagtgtttttttattaatggatttcttttggattgcaccattctacaacagccagcatgatactgaccacaagacagtctaagtagaaaaatgctaccttagaattggctcatgttctaaaattcctatatcttctcttttaaaaaatgcccaataaactacagatttgcaaattttctttctatatttatagataattccatatatgggatatgctaagatattgggatataacgtttgcacagtttcgcatcttttattactagtgttctgccttttcagtgatgtactaaaagattttggacaaatgaatccccatgatatcagcttgattttgagtgtttaaaacaaaatcttctttaaatgcttccttcctcattctttccatattttatggtattatttttcattctgaattagcagcatctttgaattattctcatttcaccaaagtcatctgttataatgatattattacttgataaagtacaatgtcatttaattaactcctcacctcctggataaattttatgtgatcacatgtatttattcaacccatacttaatggatgcctaatatatgctaggcacaatgttagacattgagaagcagattagttgcagaaaaaattgttgcacagttgttctacttttactgtctccattacagaatctttttcattatttttgaaaggactttgcagtggaatagctaatatgttatcttcaacatgatttccttttcatgacactccctaatcatttcccaatattggtaaaatgaggacatgtgaatcaattgtctctgaattcatttttaaatgactcatggagataatcatctaaataggaaaatatgaagcacttatattttatttcttcatattaaaggtcccttaagaatacctctactcaaataaaatgcaccagtgttaatgttttctggaacatatttaattcagtagtagtttagttgacttatctctcatctctatgaaatttaatgtcttttcttattcttcaggacaaaacttttacttgaatgca

SEQ ID NO: 90603 - DNA, 1164 bp, Homo sapiens
tagcaaatctctaaaacataaattcgagattgttattattgttagagactataccagtatttgaaataaaatgacctccacgaaatagttcagcaccagaattcaaatccaggtcttcctgacatgaaaatcccctgggctctcttgcttctgtgccttatatattatactttcctctacatagaaatctgcacctccctttatgcatgcataactctgacataggtcttgaggtctcaaacttagacatcaatggcaggaatatgtctagcatgataattcctcctgtagacaaatactgacttaaatcctcttcccattcaattaagaggaaagacttgtatttcctctattacacattcactatatataataaataaattttaaaatctatgtgtgtgtatgtgtatatgtgtgtatgtatgaatgtggaacaaaaacatttattttcttaagttttataattgtttactgcttaaacttcatgctgttttcatattgtcttattgatttaaactcttttgcttcgatattccttaattaaaatgtattagtggtcaatatttccttgaaagctagtcaagatgtatttattcatgaatgattgctttgtagataatagtagggtaaaacaatcaaccagctgcaaattagaactctattgggatattttagaacatttttttgtccatgtagttaaccggaaatcaacccagataatgacagattttataaattgatactggtataactttgggttatattattaaatacccatgtagcccagattcatttctatgttctttctttctcttcccaagttcttacgctatttcatcacctataagactagcaacatttgcatttttcagaggaagttttgctatttgataccaatatggctatatagaacaaatattctatgacacttctttaaaaataccactaattagatgacacttaaggtgaaataattgttttacaaaaktagagcataatattctgtctttaatttttagtagtaacaataccatattaaaaatttttaattatactaatagacttgtagcacatagaggactgaggtgaataaagatgtttaaaacatatatatcatgaagggaactgagacactgattaatgtttaacatataaggttgaata

SEQ ID NO: 90604 - DNA, 1189 bp, Homo sapiens
gcattaaaaaaaaaaaaaactcattagcttatcataggataaaattattttatttaaaaactgactagccaaatctgaaaactcctagaggaatcacaactccactgtaaggagtggtgacattactataatcttatctcacattagaggccttccatgttaataccaaataaactaatgcgcccaagttcccaataacacagaagtttaaaattttccaatcaagctctcttcagacctttaaaaagcaaatcacaaatcacaacacctaccacataagatatacagaaatcataatctctrgcctccacaaatctttactactattattacaactaatgctattgattgcaaacactatgagcaaggcatgggtctaggattaaatgaggtcacataatcctcatatgttacctcatttaatcctcacagcaaaatagggaggtacctctcatcttcaatgtataggtggacaaagagatgtagtttaaatagactaagtaactagcccaaattatcgcagggataaagctggaacccaaacccaggtctgcttaactcccaagcccattctttattccagaacatttattatcatattatctctactcacctgtcctctgtctacccagtgttcaaactagaaaccccagacttatttaattttgtctagtccttcactccctacatatattcaatcactaaatcccataggctatacttccaaaataagtctcagacacgttcatctccactgccactaccctggtcaggccactgtcatatctgaccaatgtaactacgagtcttctacttcgtctccttctcttccatcttgccactattccctgcctcctcatgctcaatcattctttagcatgtagctagaataatcttcctaaaattaaaatctgattctgtcaatatcttaattaaaatatttcagagaggactcaactccaaagtccttatgtagattttcctcagctcttcaggatctgttccctataatctcttcagtctctggaattgtattttcccctcttagagtgactgatttctggttctctgaaggtgtcaagctctcaccacttagctttctaacaagtaattttctctgcctgaggtgctaatcttctgctcctactcttctccaacacttccagtgtaatttgattaattattcaac

SEQ ID NO: 90605 - DNA, 625 bp, Homo sapiens
tttaaaaaatcttgcaaatcactgaggtaagggactttctatttttctcaagcataattttgaacataaaatcaactcataattgttacttaaagccatcttcaaaattcgtgtcaaattatattctgatattattaatgaagccaggatgacagtggaatctttcagtaaaaccatatgataatatttgaataacaakattttagtggttcagtccagctcttttgctcaagtatactgaggcaaggaaaagtcagagcaaactcacaatgtttgaaaagcttaatggtgctttaacgaaagataaaatagtcataagggattttttgaattataagatccttataacaagaagaaagtaaaaggaagctgatctgatttttccttcataaaatcatattaatggcctggtacattttgtcactttcagtatgtaaatattgattgtcttctcttacaatttattgttatcattcacactttcaaggtgaaacctttgccttattaaaatttatatttattttcaaacatttagagagagatttttcctgtccataaaaactttgaatattaacatttttaaaaataatttcaaaagcctgtttgaatgtaaaggataatatag

SEQ ID NO: 90606 - DNA, 830 bp, Homo sapiens
gatccttttctgatatggtcagctagctcagccttgcagtagcactgcttttgagttttcgtaatccatttttattatgtcaagtagtcggggctcacttttctctgaattagtgattggagtctaggccaaaaagcaagaatagtgataagtatctcacacttaaagttcagagaagctctagctgtgagaccagccacttccctcttcaaggcaggctgggtggcccagttcagcaaaaccagaatatccttttccccctatcttcttacaaggaagttgggggcacaggaggtcagtaggttggctttgggggcacacctcccctctgctccctaccaaatcaagagtccccaaaccacactcccctcctgcccgcactgattgtctcttgtctttatcattctgagacactgaatggccaagacttgatgctgcaggcctgggccctaagaaaggagcaggagggagatggccgggctaaatgggaaacagtgtctatgcctagatgagagagtggaaaaattggtttagaagtttgtacagaaagcaattgacaggagtcgacaaattaaagaccacaggccaaatctggcctgccacctatttttgtaaataaagccttatacacacacacacacacacacacacacaccagttgaaccaccagatcagctacctcttccccttcccatcagaaggccaaagcttactctytggaaagatggaccagggacctagaccacaggacaccaagcacagtcaaggtaggagtgctagaccgcaggacgccaagcacagtcaaggtgggagtgccatactgggcccag

SEQ ID NO: 90607 - DNA, 1430 bp, Homo sapiens
tccccaaaactacctctaacgcgtaatcatttctgttttagaacatcttgtttacccacagtcaggagaggcagaattccaaaataaaagattttttaaaaaaataaattgactggtataataagagtgaactcaaaccatttcagaattctactttgtctctttatgctcagtgtagatgttgggactggagtgttgacaaagagcctatgtataaattcttccttcaatttttttccagaataggaactgccctagatcagcagggttaaaactttacagacaattagtcagatgtgaaaggaaacgtagccttggtttatctatctcctgagctcctactcagtggagaaatataggggaagatgagaccggtgagtgacacggggatcttaatcagttattgtaatatgctctaacctgttttaagtaagtccctttcaatattttttttcctttgagataatccatttcatttccaactcttttctcaaaatgacatcttggggcagtttatttttagctgtaagagccaacaagtacacccttcacctcagaaatgaggtaacagaactcggggaaaataaatgagaaaaatcatttcagaaatgcagactaaactagaagcaacacagagcatcacaacagtgatggtgtaagagaaatggaaggacaacaagaatacattttttaaattgaaaagaaatgtagagataaaaagaattaaaaaaaaaataacaaatattaaaattaggcaaaggatccattttataggtaataggaatcccagaagaagaaacccaaaataaaaaaacacaataaatactaaaaaatataattmatgaaaactttcttaaaattaaaagatatgtttgaaactatatactgaaggggccaccatgtatttgagaataatgacccataatgaccaacatcaagtcatgtttcagtaaaattactagactttaaagagaaagaaaaaacactgcagtcatctagataaaaccagtatatttctgatggcaagtaaattgccatcagaattccagaatttttagcagcaatacatatgccagagaaagtagaataacagattttagacactcaaggaaaactgaaccaattattatataaccagctaaactgactttcaaatataagggcaataaactatttgacatggcaagaacttaggaaatactatttgcatgagcctttactgaagaatatactaaagaatgaacttcaaatttgattgagaaacatcaaaataaggactggtgaatattaaatatgcatttacttgtagagctaaattatatttaggataaaaaggaaagagaacaacatacaatgtctacatgttcaggcagcatagattttatataattgcaaagagtagaggatgatagggagcacatctgcaaaaa

SEQ ID NO: 90608 - DNA, 564 bp, Homo sapiens
atttgagtgataatgcccttaaaatatttatttgggctggatgtggtggcatgtgcctatggtttcaactttttgggagactcacgtgggaggatcgcttgagcccagaagtttgatcatcctgggcagcatatagtgagaccctttctcttaaaaataaataaataaatgaaattatttaaaaaaatatgcatttgaagttaacttgatttgatgtgttacacattgatcgttttttcaattccataattttctcactgttacatatataacactgacagttacaaatggaacctcccaaagttggtctcagccttattttgatgcatctaaaaatagggttaggtgtgtaatctcagcgctttgggaggccgaggcgggtggatcacgaggtcaggagatcgagaccatcctggctaacacagtgaaactccatctttaataaaaatacaaaaaaatgagctgggcgtggttgcaggcrcctgtagtcccagctactcgggaggctgaggcaggagaatggcgtgaacccaggaggcggagcttgcagtgagccaagatcgc

SEQ ID NO: 90609 - DNA, 1566 bp, Homo sapiens
aaaatcaattacttaatttattatagctaataattttctttgctattaatcatatattatttgcattgtgacaacattatatccagtgactggatttcaatttgaaattcaaaactgtagaaatgaaataaaaagttctggataagatttcaattctattcttataaaatagtatctcttgtcttctggtattacggtataaactgtacattttaataaattatatattcaaagtataaagaaaaattggtctccaacttcaatttccaacaaaacattggaaaatgtttcattttgctggcattttaaatttaaaatgtaaacttagattgcagagggtttgttgttgttgttgttgttgtaccactgtaagaaatgaaatgcaaaatagagcaaaattgaaagaaacacaactagccagacagatatgtctcctttctaaaattatggtgttcaaatttctcaactttgtatttttttgaacttaatatcttcagacacaagcctctcaggctgttaaatggctgagaagactatacacgaaaacactcctgtgtaggctttttaattagctacttgtctttgataatataaggtgtcacttttattctcctgttgaactctagactgtcttctccatgagaatactgagattattgggacaaacatgctcagtcactatattccttctgagtctagttataacatgttggatccaagaagcttccttccagaatgtaactggagaggtcaggttgtcaattcaggcaagttggctaagtgagagagtgtgagtaggtgggatcttaagtctatggagtgacacattgggcaagagcagcagtagggagctgagtgagtaacttcagtacagtgaagacagccatatgccttttcccttgacctccttcttaggtattctggtgtatggggacatgtgggcacaggatttgggggacctatcctcagtcgctgatattcccttggcttacaaatagattccaggtgaattaactataggcttcaattaaaaggatggggtacagtgatcagacagggcatggtggttccaaatccaggaaaagtgtctttcaaaactatagcatctgtccttccagggaactactgggctataacaaaatgataaaaattaatctktaaaattctaacactaatattgcttcacaatctgatcaaaaaccctaacaatgtggtgctgtgtgtgtgtgtgacaaactcttctacagtgatacaaatattcttgtagttctggtagctctaccctgatgtaaaatctccccaggtggtgtacaactcaatgccttaagatagtaatcccttaacacgtggccattgaccagtgaataagtgaatgaataaatggtcaacaaaggaacatccatctcctagcaaatattggcagtttactctaaagagcaagtaatgaagctttctgataattagcattttcaacttagcttttttaaaggctaatgataaaaagattcttaacaaaattagacattacaacactttaaaaaatggaacaatttatcagtaataaaa

SEQ ID NO: 90610 - DNA, 644 bp, Homo sapiens
cccctctctcctgtttaatggctttgctcctatgtgttccatctcaccctgcatcattgttgctttccattttactgttttattgtcatcattgtacacatatgctgttacctcctattgaaaagtaatactgctaacccaacagccctagagctaactaacacaccatatctctttcccttgcagagcaaaacttaagagcaggtttacccattttttctagwttttctactcccaatttttaaaaaagttttcagttctggggtatatgtgtgggatgtacaggtttgttacataggtaaatgtgtgtcatggtggtttgttgcacctatcaacccatccatcacctaggtattaagtaccatatgcattagctattttttctgatgttctccctgcccccaacctaccccccgacaggcccgagtgtgtgttgttcccctccctgtgtccatgtgttctcattggtcagctcccacttataagtgtactattcccaatttattttgaatcctttccagccaatttgaaccctcaacgccttttaatcctttgcccattacaatgaatgtattaactgtgtaacacactgtcccaaataattgaaccagtcttaacctctcagtagaggttggaatatccca

SEQ ID NO: 90611 - DNA, 644 bp, Homo sapiens
cccctctctcctgtttaatggctttgctcctatgtgttccatctcaccctgcatcattgttgctttccattttactgttttattgtcatcattgtacacatatgctgttacctcctattgaaaagtaatactgctaacccaacagccctagagctaactaacacaccatatctctttcccttgcagagcaaaacttaagagcaggtttacccattttttctagtttttctactcccaatttttaaaaaagttttcagttctggggtatatgtgygggatgtacaggtttgttacataggtaaatgtgtgtcatggtggtttgttgcacctatcaacccatccatcacctaggtattaagtaccatatgcattagctattttttctgatgttctccctgcccccaacctaccccccgacaggcccgagtgtgtgttgttcccctccctgtgtccatgtgttctcattggtcagctcccacttataagtgtactattcccaatttattttgaatcctttccagccaatttgaaccctcaacgccttttaatcctttgcccattacaatgaatgtattaactgtgtaacacactgtcccaaataattgaaccagtcttaacctctcagtagaggttggaatatccca

SEQ ID NO: 90612 - DNA, 644 bp, Homo sapiens
cccctctctcctgtttaatggctttgctcctatgtgttccatctcaccctgcatcattgttgctttccattttactgttttattgtcatcattgtacacatatgctgttacctcctattgaaaagtaatactgctaacccaacagccctagagctaactaacacaccatatctctttcccttgcagagcaaaacttaagagcaggtttacccattttttctagtttttctactcccaatttttaaaaaagttttcagttctggggtatatgtgtrggatgtacaggtttgttacataggtaaatgtgtgtcatggtggtttgttgcacctatcaacccatccatcacctaggtattaagtaccatatgcattagctattttttctgatgttctccctgcccccaacctaccccccgacaggcccgagtgtgtgttgttcccctccctgtgtccatgtgttctcattggtcagctcccacttataagtgtactattcccaatttattttgaatcctttccagccaatttgaaccctcaacgccttttaatcctttgcccattacaatgaatgtattaactgtgtaacacactgtcccaaataattgaaccagtcttaacctctcagtagaggttggaatatccca

SEQ ID NO: 90613 - DNA, 942 bp, Homo sapiens
cggggggsggggggagagagagaaacagagagagagagagaaagagggctcaaactagagcccacatgacctaatcataacttttacaagtcccccctctcaacactgttgcattgaggattaagtttccaacatgtgaactttgagggacacattcaaaccatagcatggtagtcttttggaatgcaaacatttaaatgtatcagtgattcaccaaatattttacatactatcaacaaatgtgcttgaaattatatttctgtattatacacagtttccacaagtatttatatatttttggatagaaggttattcaactgaagggttaaagagaaatgttagagttatttctgttagaataaatcaatatgtgttcaaagaccatctcaagtactcagtgaagatttaatggggaatttggacaggaaaatttcaaggttggaaaaggtgaatataatggcagggaaactaagatgttattttttgagagattgtgtgaatttcagttatgtattatgaactcggttatttaattctgccctcttattcaacctgatgtcagattttatacagataaatgccattatgcttttattattcaacaaccatatattttaagatggctcccctccaattattattgctgagtcttaaactaggttccttggcacgtttgaacccagatattttatttctaaagtctttaatgaagttgcctgttagtgcgacaacagtgcctgataggaacaggatagtgtctaaatattgattgttgtgtctttcacagcttttgatgtacttctatttaattcagtttaaagaaatcaggagctacaaactggcagatgaagagagcacatttaactttttaaacataactcagcttatttatatataatattaaaaatgagaacatatgcaaatactatttatggtgttggc

SEQ ID NO: 90614 - DNA, 1038 bp, Homo sapiens
ctgccgtcacttggcttcctcccttgtctcttcgtataaccttcgctctgttctgcctgtctccgtgtttcttctcgtaagggcaccagtcatattgggttgggcacagccctactccagtatgaccttatttttacttaactaattttatctgcaatgacctattgccaaataaggacacattctgaggtaccaagagttagaagctcacatgtgttttataagccstagggcaactactaaaaaactttttttgaaggtttataaatcataagtcagcagtgaacatacatcgaaactataactcgtaacttagtttcctggaaaaaataaattgtaaaattgaaagatgtatatattgaaagactaagaaccattcagaatatctggacttgattaagatcccaataccaacaaacaacacactgttaaaagaagttataacatttatgatgcaactgaaaattcaaacactgattagatatttgatgattctaaggaacaattgttaactttgtttgatgatcatatttttatttttaggagttcttacttttttgtaatatacactaaaatgtgtatgaataaaagatatcaatacaacttaacctacaataaatataataaatattattgtgctccctaccctgaatattaaaaaatgttaatgatgaatcatatttactttagtttaaaaataaaatacataaaacattactggtaattatatagttgaaacctccttggtgactttttccaagctcagtctcctcctctccacagagggatcactgtgtatctctgttcagtcaatattattataattttgctgcataaaaacagacaggcccatatagccttacacacaatatgtcttctttttgtgttcacaaaaatttacaacaagcgtatcttgtctctgccaatagcttttctcctcctcaacattacattcttatacttaaaatgggccttgaaaacagcatatagttgtggtttgcttcttagccaagctggcagtctctgtcttttaattgg

SEQ ID NO: 90615 - DNA, 585 bp, Homo sapiens
agaaaactgaggctgggagaggctgggtcactttgatctccttatgctgctagtaagtgacagagccaagatgcacacccaccttggcctgaaacctgagccattcactttcttctccaccccaggctgcctcccgaactccatcattggagtccttgggtaatgactgtcatctcttcatggctgtttggatggcatcactcaccttttcttacatttctctctgagcaactttcttttcttttcttgtaggtcttaaatccctctgttctagtttacagactcagagatggaaaatattgagtatgaattgctagtwaaattggtttgtttcatttttggctttggaaaacaaggtggattctttcaccacaagatcatatccagtgcattcaggggtgagacggggccagggttctttcaggtgcagcaggctttggtctgtaccagggatcgaagcacgccgggagttacagggtgctgcagaggagcaaatgaaagggctaccggcagacacctttgctccccaaatcaggtagaagagacctcctacgactattggggtgcttccagcattgaggactc

SEQ ID NO: 90616 - DNA, 704 bp, Homo sapiens
tagatatcaaacttgctacccaagatgatgcaaaagtaatacaaaaatgtatccatggactgtggtaaccttgaatagaaaaccaatgcgtgactctcaaacatgagttcacacacagcacacaaagaaagaaactaccatgagtgagagccagcagacaaaacaagcaggactcagtaagaacttctgagaatagaactcttgtataagactaaaataatacaattattaatgatttaagaaaaggataatcaaatatgtaagaaacaagatgaatgatgataaaaatataataataagatgaaaaatgaataggcagacttaaaaatatagaacttataaaaataacattagggttaatgtcttaaaagcatctcagtgcatgcgttggacagataattagacaaaactgaagaaagaattagcaaactgaagataaacctgagagyactacacagaatctagcaaagaaagagaaagagattgaaataggtggaggataaaatggaagtatccagcaaatatctaactggaattccagaaggaataaacagactggtattaaaagagacattgtctagaaatgagtcatataagatgcctaataagtttgtttctattggttatattcatgtaactctgaagttcaaacaccattaaccacgagagctctgtgattaccgtaggccttctacattgtggta

SEQ ID NO: 90617 - DNA, 1083 bp, Homo sapiens
tttccttcctttttaaggctgaataatgttccactgcatggatatgccacattttatttatccactcatcagccaatgggcacttgagttacttttaggtttatgtgaataatgctgttatgcacatacatgggtatagaaatatctgttcaagttcctgctttcacttgttttgggtatatacccagaggtgcaattgttggatcatatggtaattctgtgtttagttttctgaggaatcattatactttttccacagaggcctcaccattttatattctcaccagcaatgcacaagggttccagtttctycatggcctcaccaacacttgttattttctgctttttttttttaaaaaaaagaataactgtcctaatgagtgtgaagtggcatctcattgtgattttgacttgcatctccctaatgaccagtgacattgaacatccttttatgtgttatcagccagttgtatatcttctttggaaaaatgtcctttgcccatttcgtaattgagatgttagatttttttgttagttgttaggccctttgcttttgtaaacgtgagtgaagcaattccatcagtcagtcaagcaacactttcagacttttaggtgtgaggcattgtgctaagcttgtgccaaattctgctcagatggcagcctccaggtaacgggacttgatattttcttgtagagtaactctctgggattacccaaaggattttaaagggtctgaaaaccagactgtgggaagcaaaagagtaaatgtgtccccaggctaatcagcagggaagactgatcagaaaaccccctcctccccgggagccacggcccactaaggtcctaacttctgtctttagatagaatctcattactagtaggaaagtagcacccctggaacaaaacatactttggcacttatggctcttccagatgaaagcttacaagttttttaaaacatttctttgaaactgggaactcaacatgatttaggctcgtgaaaagccatcgttaacgtgcactcttcttccaccactacatggacctttactccacacgctctctaaacacagataattacca

SEQ ID NO: 90618 - DNA, 1083 bp, Homo sapiens
tttccttcctttttaaggctgaataatgttccactgcatggatatgccacattttatttatccactcatcagccaatgggcacttgagttacttttaggtttatgtgaataatgctgttatgcacatacatgggtatagaaatatctgttcaagttcctgctttcacttgttttgggtatatacccagaggtgcaattgttggatcatatggtaattctgtgtttagttttctgaggaatcattatactttttccacagaggcctcaccattttatattctcaccagcaatgcacaagggttccagtttcttcatggcctcaccaacacttgttattttctgctttttttttttwaaaaaaagaataactgtcctaatgagtgtgaagtggcatctcattgtgattttgacttgcatctccctaatgaccagtgacattgaacatccttttatgtgttatcagccagttgtatatcttctttggaaaaatgtcctttgcccatttcgtaattgagatgttagatttttttgttagttgttaggccctttgcttttgtaaacgtgagtgaagcaattccatcagtcagtcaagcaacactttcagacttttaggtgtgaggcattgtgctaagcttgtgccaaattctgctcagatggcagcctccaggtaacgggacttgatattttcttgtagagtaactctctgggattacccaaaggattttaaagggtctgaaaaccagactgtgggaagcaaaagagtaaatgtgtccccaggctaatcagcagggaagactgatcagaaaaccccctcctccccgggagccacggcccactaaggtcctaacttctgtctttagatagaatctcattactagtaggaaagtagcacccctggaacaaaacatactttggcacttatggctcttccagatgaaagcttacaagttttttaaaacatttctttgaaactgggaactcaacatgatttaggctcgtgaaaagccatcgttaacgtgcactcttcttccaccactacatggacctttactccacacgctctctaaacacagataattacca

SEQ ID NO: 90619 - DNA, 648 bp, Homo sapiens
cttgggaggccaaggcaggaggatcacttgaggcagggagatggaggctgcagtgagccatgatcatgccaccacactccagcctaggtgacagagggagaccctgtattcaaaaaaaaaaaaaaagggagaagaaagtcatatagtaagaaccttaggacttcaaaagcttagtcttttggttttaactaagtaccagctactgaggaacctgtttttcccccattagaatatcttatgtatccatatattccttttttatatctatakctatcatcctagttgtagtcttttctatgttattcttgccaccgtttattcacttaaaccatatatgagtgtgtattttgtggcaggcagtattctctgtgctggaggtaggtcagtgaacaaaacagacaatagcctcccaagtgacttcctgcttgtgaactcttagtttatcaatatgaactgtttttactcacacttctgacactaaaagcttgggattttttcacacccacacccagttctgacaccaactgggtgtctttgtcctacaattcagttcaattctgaccctaaccacttggagttagcacagaccccacaggttaaggggcttagtctctcaaaactgcccctccttcagatgcccattgcaag

SEQ ID NO: 90620 - DNA, 648 bp, Homo sapiens
cttgggaggccaaggcaggaggatcacttgaggcagggagatggaggctgcagtgagccatgatcatgccaccacactccagcctaggtgacagagggagaccctgtattcaaaaaaaaaaaaaaagggagaagaaagtcatatagtaagaaccttaggacttcaaaagcttagtcttttggttttaactaagtaccagctactgaggaacctgtttttcccccattagaatatcttatgtatccatatattccttttttatatctatagctatcatcctagttgtagtcttttctatgttattcttgccacmgtttattcacttaaaccatatatgagtgtgtattttgtggcaggcagtattctctgtgctggaggtaggtcagtgaacaaaacagacaatagcctcccaagtgacttcctgcttgtgaactcttagtttatcaatatgaactgtttttactcacacttctgacactaaaagcttgggattttttcacacccacacccagttctgacaccaactgggtgtctttgtcctacaattcagttcaattctgaccctaaccacttggagttagcacagaccccacaggttaaggggcttagtctctcaaaactgcccctccttcagatgcccattgcaag

SEQ ID NO: 90621 - DNA, 1060 bp, Homo sapiens
gattacatatggaaagtttgcaggacttgcatcctagaatgtcaggattttaagctaagtagggttcaaattaaatttttcacatacttcrctgcattataataactagtttatatttaactcatccactaaactaagttatttgaaaagagatgccagtgttcactcaatctagttgtctgtcattaataatttaaaaataattgagattttaattttggtctgctaagcctgtttaattaaaatttgacattaaataagattttacagggcctgtaattttttttttcagtcatcacagtttgaatattaaacattactacttttatctccctcagtcagcataaaacatactacttatggttttaataatcaaattcaatgagcaccaacaaaatttgatgtaactattaactttgaaattttattgaaatagaactatgccttgggtatcattcaaagcatttaattgttgcaataaaaaactttgagataaattgaaatgatggacaatatgggtcgaaagcaacattggcttgagggaataggctaatgtttgagaacggaattgttaaggacaagattggatgtttatattattttaggaaagatacactctaatggagtttaattctaaaatgtttaatattatgaaaatattatatattatatgatcattatagaaaattaaatatataagaacatcagaagcaaaatagtcaaagtctacctaaacccaattagaagtgaatactattaatcttgatttgcatgtttctaatcttattattatcaaattaataaacagctttcagatattctgcttctccctgttactagatcaggataatgtcatttatgtacaggcatctcctgcttactcagttcagcattgatcaataaatattttagacttccattcaaaacacttccatttttcttttgcccatattctttttattcagtgctacctattttcaaatacacaacactttgtcaaacaaattccaacattagattggatctagttggtatcaaagtagtaatacacattgccatt

SEQ ID NO: 90622 - DNA, 710 bp, Homo sapiens
gggatccacccccatgatccaatcacctcccatcacactccacctccaacattggggattacagttcaacatgagatttgggtgaggtcacatatccaaattatatcaccagattaggatttttgttttgtyttaagcagtctttatattcaaggacaagtgaggaagacttcctcaaatagtttttgttttaagtaatctgacctattttggggaaagaaatgagaagttcttctacaaaagtgattgattctccactaaattgttatagtttcatgattcctaaaaatgggtttatgctatagagatttgatatctcctatacgccactctcaggttggccctctccattacaaggcaaggaaggggaggaaatggactcaaatctctcagcctcacctctatcctttctgactccaagaggtgatggagagaggaaagaaaggaaagagaaggcaagcatgacaaaacttctctacctttgagtcatttttaaagccacaaaaggtggaattcagctatcttcatcagcaaaatgagatgggtgatgagtgggttggccagatgacaaattgctaagcatcactctcactaaatgttgtatacgtaacctccacagctccagcaagctctcaggaatataacccaagggtccatgcatataagctaaggaaattttataatatttctccatttacttctcatatctt

SEQ ID NO: 90623 - DNA, 710 bp, Homo sapiens
gggatccacccccatgatccaatcacctcccatcacactccacctccaacattggggattacagttcaacatgagatttgggtgaggtcacatatccaaattatatcaccagattaggatttttgttttgtcttaagcagtctttatattcaaggacaagtgaggaagacttcctcaaatagtttttgttttaagtaatctgacctattttggggaaagaaatgagaagttcttctacaaaagtgattgattctccactaaattgttatagtttcatgawtcctaaaaatgggtttatgctatagagatttgatatctcctatacgccactctcaggttggccctctccattacaaggcaaggaaggggaggaaatggactcaaatctctcagcctcacctctatcctttctgactccaagaggtgatggagagaggaaagaaaggaaagagaaggcaagcatgacaaaacttctctacctttgagtcatttttaaagccacaaaaggtggaattcagctatcttcatcagcaaaatgagatgggtgatgagtgggttggccagatgacaaattgctaagcatcactctcactaaatgttgtatacgtaacctccacagctccagcaagctctcaggaatataacccaagggtccatgcatataagctaaggaaattttataatatttctccatttacttctcatatctt

SEQ ID NO: 90624 - DNA, 710 bp, Homo sapiens
gggatccacccccatgatccaatcacctcccatcacactccacctccaacattggggattacagttcaacatgagatttgggtgaggtcacatatccaaattatatcaccagattaggatttttgttttgtcttaagcagtctttatattcaaggacaagtgaggaagacttcctcaaatagtttttgttttaagtaatctgacctattttggggaaagaaatgagaagttcttctacaaaagtgattgattctccactaaattgttatagtttcatgattcctaaaaatgggtttatgctatagagatttgatatctcctrtacgccactctcaggttggccctctccattacaaggcaaggaaggggaggaaatggactcaaatctctcagcctcacctctatcctttctgactccaagaggtgatggagagaggaaagaaaggaaagagaaggcaagcatgacaaaacttctctacctttgagtcatttttaaagccacaaaaggtggaattcagctatcttcatcagcaaaatgagatgggtgatgagtgggttggccagatgacaaattgctaagcatcactctcactaaatgttgtatacgtaacctccacagctccagcaagctctcaggaatataacccaagggtccatgcatataagctaaggaaattttataatatttctccatttacttctcatatctt

SEQ ID NO: 90625 - DNA, 710 bp, Homo sapiens
gggatccacccccatgatccaatcacctcccatcacactccacctccaacattggggattacagttcaacatgagatttgggtgaggtcacatatccaaattatatcaccagattaggatttttgttttgtcttaagcagtctttatattcaaggacaagtgaggaagacttcctcaaatagtttttgttttaagtaatctgacctattttggggaaagaaatgagaagttcttctacaaaagtgattgattctccactaaattgttatagtttcatgattcctaaaaatgggtttatgctatagagatttgatatctcctatacrccactctcaggttggccctctccattacaaggcaaggaaggggaggaaatggactcaaatctctcagcctcacctctatcctttctgactccaagaggtgatggagagaggaaagaaaggaaagagaaggcaagcatgacaaaacttctctacctttgagtcatttttaaagccacaaaaggtggaattcagctatcttcatcagcaaaatgagatgggtgatgagtgggttggccagatgacaaattgctaagcatcactctcactaaatgttgtatacgtaacctccacagctccagcaagctctcaggaatataacccaagggtccatgcatataagctaaggaaattttataatatttctccatttacttctcatatctt

SEQ ID NO: 90626 - DNA, 710 bp, Homo sapiens
gggatccacccccatgatccaatcacctcccatcacactccacctccaacattggggattacagttcaacatgagatttgggtgaggtcacatatccaaattatatcaccagattaggatttttgttttgtcttaagcagtctttatattcaaggacaagtgaggaagacttcctcaaatagtttttgttttaagtaatctgacctattttggggaaagaaatgagaagttcttctacaaaagtgattgattctccactaaattgttatagtttcatgattcctaaaaatgggtttatgctatagagatttgatatctcctatacgccactctcaggttggccctctccattacaaggcaaggaaggggaggaaatggactcaaatctctcagcctcacctctatcctttctgactccaagaggtgatggagagaggaargaaaggaaagagaaggcaagcatgacaaaacttctctacctttgagtcatttttaaagccacaaaaggtggaattcagctatcttcatcagcaaaatgagatgggtgatgagtgggttggccagatgacaaattgctaagcatcactctcactaaatgttgtatacgtaacctccacagctccagcaagctctcaggaatataacccaagggtccatgcatataagctaaggaaattttataatatttctccatttacttctcatatctt

SEQ ID NO: 90627 - DNA, 992 bp, Homo sapiens
gtctttgggagagtttccactgtgcctgggcctcctgcctcgggcccttggaatgatcactccattcaacagcaaagataataaacaactgatcaggtaacatgctggaaagtggtgtaaaagaaaataaaatttcaggaccctctaaatttggcctctaagcaagccaaacttctcttaataatgacacgttactggggagaacataagaaaataattttggttagattggacccaataaagaatatctgcttaaacttgttgcaagattggttaaaagcccttaatccatgcccaaggctgactatcagctgggggatcttctacgtaaggctttaaagctcattaaaatcaatcagaaaattgctagagaattttattgagaatgtaaattattcccataaggagcagccattcaaactgactgcagacatttgacccagctcagattcaggccagtttcttcccagtaggcaccttctgtgttcattccatcagtggaagtttcttatgtgtacattccatcagcggaagttagggacagagcttatctgtggctaaatgaagactgttgaatgaaaagcagaggttctacatagaaaccaaataagccatctgatatggtttggctgtgtccccacccaaatctccaattgtagctcccataattcccatgtgtcaygggagggacccagtgggaggtaattgaatcatgagggtggatctttctggtgctgttcttgtgatagtgcataagtctcatgagatctgatggttttataaaggggagttcccctgaacatgctttctctcttttgccagccaccatgtaagatgtgcttttgctcctccttcaccttccaccatgattgtgaggcctccccagccacgtggaacacataagtccattaaacctctttttctttataaattacccagtctctgatatgtctttattagcagcgtgagaacagataccatcagtcagaatc

SEQ ID NO: 90628 - DNA, 992 bp, Homo sapiens
gtctttgggagagtttccactgtgcctgggcctcctgcctcgggcccttggaatgatcactccattcaacagcaaagataataaacaactgatcaggtaacatgctggaaagtggtgtaaaagaaaataaaatttcaggaccctctaaatttggcctctaagcaagccaaacttctcttaataatgacacgttactggggagaacataagaaaataattttggttagattggacccaataaagaatatctgcttaaacttgttgcaagattggttaaaagcccttaatccatgcccaaggctgactatcagctgggggatcttctacgtaaggctttaaagctcattaaaatcaatcagaaaattgctagagaattttattgagaatgtaaattattcccataaggagcagccattcaaactgactgcagacatttgacccagctcagattcaggccagtttcttcccagtaggcaccttctgtgttcattccatcagtggaagtttcttatgtgtacattccatcagcggaagttagggacagagcttatctgtggctaaatgaagactgttgaatgaaaagcagaggttctacatagaaaccaaataagccatctgatatggtttggctgtgtccccacccaaatctccaattgtagctcccataattcccatgtgtcacgggagggacccagtgggaggtaattgaatcatgagggtggatctttctggtgctgttcttgtgatagtgcataagtctcatgagatctgatggttttataaaggggagttcccctgaacatgctttctctcttttgccagccaccatgtaagatgtgcttttgctcctccttcaccttccaccatgattgtgaggcctccccagccacgtggaacacataagtccattaaacctctttttctttataaattacccagtctctgrtatgtctttattagcagcgtgagaacagataccatcagtcagaatc

SEQ ID NO: 90629 - DNA, 992 bp, Homo sapiens
gtctttgggagagtttccactgtgcctgggcctcctgcctcgggcccttggaatgatcactccattcaacagcaaagataataaacaactgatcaggtaacatgctggaaagtggtgtaaaagaaaataaaatttcaggaccctctaaatttggcctctaagcaagccaaacttctcttaataatgacacgttactggggagaacataagaaaataattttggttagattggacccaataaagaatatctgcttaaacttgttgcaagattggttaaaagcccttaatccatgcccaaggctgactatcagctgggggatcttctacgtaaggctttaaagctcattaaaatcaatcagaaaattgctagagaattttattgagaatgtaaattattcccataaggagcagccattcaaactgactgcagacatttgacccagctcagattcaggccagtttcttcccagtaggcaccttctgtgttcattccatcagtggaagtttcttatgtgtacattccatcagcggaagttagggacagagcttatctgtggctaaatgaagactgttgaatgaaaagcagaggttctacatagaaaccaaataagccatctgatatggtttggctgtgtccccacccaaatctccaattgtagctcccataattcccatgtgtcacgggagggacccagtgggaggtaattgaatcatgagggtggatctttctggtgctgttcttgtgatagtgcataagtctcatgagatctgatggttttataaaggggagttcccctgaacatgctttctctcttttgccagccaccatgtaagatgtgcttttgctcctccttcaccttccaccatgattgtgaggcctccccagccacgtggaacacataagtccattaaacctctttttctttataaattacccagtctctgatatgtctttattagcagygtgagaacagataccatcagtcagaatc

SEQ ID NO: 90630 - DNA, 588 bp, Homo sapiens
tattcctccagttttcttgaaacaagtttttgtatcttactgatttaccttttcctttaaaaattgtattggtatcttttccattgctttaatctttatttcttcttctttccaggacttctgtccttttttagttattaagctatttttttcttttatttcattcatgtaataaacactctggcagaaataataacattttaaataccattgtagattgatatgtatatgccttttgcaaagtattactatttttcctgcatttgcctttgaagccacacatttcaacattctcacctattaatattattactagagtctatttamatctcttaaaccataatttataatatgagatttcacaagatacacttgtggctctgagttatttcaaaactgatatttctgtgcattctgacattttattccttttagaaacaaattcagttggctgtagaattaatatcgttctgcttaacaactttgtgcatgacatattaactgattttgttgtatttcatgatttaaaaaaaaaagcagcagctctggaactcagattcctgggggttcagattttttctcagtgga

SEQ ID NO: 90631 - DNA, 1084 bp, Homo sapiens
tcctctgtgggtcttctcttccattaccagccattcttttgcgcagaagagctcctttactgccaagcagtactctctaaaatagtatatggagaacaaaacttgatgaatcattacatgttaaagcaaatttgtggcagagcctaaattctgtgttttcaagacatcatcatggtaaattgttcttgaaaaaagcgcgtttatgaaagaaactttttactgtaaataatatgagacctcatgaaatctagtgtactgtcccgtgagatgaaatgctatctcgttttgttgtgaaacacaattaatgctagtctaagggaaaaaaacgtcaaatttaaaacgtattagattgggaatctctgatatgtcttctcccaacttcatattcaaataacaacacaggtagaggaaaaaggtatacagagtttaaaaaacacacctactgaaagtcaggatcattgtcaaccagtttccagcttggaagatttttctatgatcttggggctaatgggtagggctcgaggaacacagtctgggcctctgtgtgctttgtcctctgaaacagaacaccaccacctccctggcagcttataggagggcatctgggtccttactcagcccttactttgaggcacggaatcctgtcccattgctctgcgtgcttccatctgagaaagccaaagtattatctgtttgaatatgaagctgttatgttcatctacatgttgtattatgagtgaaggggctgaagaaacactaattggactacttggaattttgcagattagtatttgtttaagcctgatagaaaataggacaaactgcataggaaaaacctggttaatttcaaattaaggtatttggggttaataataagaggaaattaaagataattaaataaattaaacataataatagcagatgtcctttattcagtatctgaaggattcagagaggaggaaattgtaagwgtgtgtgtgtgtgtgtgtgtgtgtgtatatatatgccacaatggtgtcttttttcatacttattcccacactcctactttcctaacttgccaatatgtgctaattgagtatgc

SEQ ID NO: 90632 - DNA, 1132 bp, Homo sapiens
gcatgctaagggggttgaaaggtactgtattagtttgttttcacactgctgataaagacatacccgagactgagcaatttacaaaagaaagaggtttattggacttatggttcaacatggctgggaggccacacaatcgtggaggaaggcaaggaggagcaagtcacatcttacatggatggcggcaggcaaagagagagcttgtgcagagaaactcctgtttttaaatcagatctcatgagacccatttgctatcatgagaacagcacgggcaagaccctcccccatgattcagtcatctcccatggggtcccttccgcaacacatgggaattatgggagctgcaagatgagatttagatgggaacatagagccaaactatgtcaggtaggaaggcaggattcaggaaaataaaattctctgtctgattaaagagttcactaaatcacgcctgtaatctcagcactttgggaggccgaggtgggcagatcatgaggtcaggagatcgagaccatcctggctaacacggtgaaaccccatctctactaaaaatacaaaaaattagccaggcgtggtggcaggcgcctgtagtcccagctactcggraggctgaggcaggagaatggcatgaacctgggaggcggagcttgcagtgagctgagatcacgccactgcactccagcctgggcaacagagcaagactccatctcaaaaaaaaaaaaaaaaaagatttcactaaatagttgcatattcaaatacaagtcacttaactcaccccctcccaaattttaagtcatgcttcagtgtattatgtgtttattacaagttcatacggtgcttaaatcctagtcttcaatctagtaacctcactatgggtaatccttagtgtactattcttgtggatcctttcctttgtttttcttgcctacttaagtgtagggttactttctagatcataccatggagtagtacaatggggaatgtcttaaaaatcaaatacttaagtgcaaaacacaaaataaggtgtaattcagtaacaatcagactaagcaaataaaaaacattctgagttgccttttaaatgtttcaagtgtgggttgcccctgataaatttaattaggcatcataaaga

SEQ ID NO: 90633 - DNA, 980 bp, Homo sapiens
gatcctggccagactattaaccactctatgcccccattttctcttctgtaaagtgagggtgacaacctcactgggttgtttgttgtgtggatggaaaatatcacatgtgttagcacttgaacaaggcctggcatacggcaaatattcaatgaatgttagctactggtattactattatcattatttccttttaagtaacctattcttttaaagtggaagcatgttaaaattttctctttatacttgaaactcagaaatttcactggtacatataaaataagtctgccttcctgatcccttcctgggactcagtgagccacttcaatctgaagttttgacccctccactcacataaaactcaccataacacaaaactcattataatagtttcaacagtgactacaggagacagaggaggggcttcaagatggctgactagaggcatctggcacttacgtcctccacaaagcagcagcaaaacagtgagtagataaccacacttaaaatagatcatctaagacagaacactgaaactcaacagagaagtaacaagaacacctaagacaaggaaggagagggaaggcaggcaggctacttggccaggagaccagggaggcttcccagtacaggaaaagggtaagtgagattctcagtggtccacatcygcactacagactcctccaatcctagccaggggggagccctccatcctcacaggtcccaagactaacacagggagctgcttcgagactgcacaaaggtattgctccagagagtgaactcacacggggtgtgacctaagcagcagcagcattggcacagttttgagaacccagcccccactcaactgcatcctgccccgaggcccaacagcctctgcctccccaacccacagccaccaatgccacaagctgctgccactgaaacctaagcaacagtcactggcagagaccccacttcccagcagcaagctgtcatgc

SEQ ID NO: 90634 - DNA, 990 bp, Homo sapiens
ctgtttttctcatcgcaaattttctaggagcaaatacaggtaacaacagagttggttgtttttgtttttttgtttgtttctttgtttttgagatggagtctcactctgttgcccaagctggagtgcggtggcacgatctcagctcaccgcaacctctgcctcctgggttcaagtgagtagctgggactataggtgcccgagtaactgggactacaggcatgtgccaccacacccagctaattttttgtatttttagtagagacagggttttactgtgttggccaggatggtctcaatctcctgacctcgtgatccacccacctcggcctcccaaagycctgggattacaggcatgagccaccacgcccagccaacaacagagttttgaatttccaggttttttgtgtttgtttccttcagctgcatctcctttgcactttaacttgcataccaacatatctatgtttaaaacacctgtaccaactctcatccaccttttgatttcttatcatgctacttacctcacactattaaaaatgtatcttaaagctttgttttgaactcagtggtatattagactgtacacaggcagtaagaatgtcaattacttcaggaaaaagtcctacagatgccctaatatatggaagaagctggactctaatctgtagattacatttacaggacaattctgaggtccatgtttcagaaacaaggtgagaaaactaatcacaaatattaagacagagaaggttggagaagagtcacagtaactcccagtatgtataaattcctccatcatcaggataggctcagtcagggagagagagggagtgaagcttggaaccatggatagaacaatattacctgaaaggtcaagcaagccaggcaaggacaaaacccagtatcagaaatagctgctcaaagaggacagaggtcaccagagctaagggtggtagtcctcaatctgcatacagacattcacagagatat

SEQ ID NO: 90635 - DNA, 664 bp, Homo sapiens
tcaacaacttttaacaaygtaaaagggtcctaaccaaaagtttgaaagcatttagagttttaatattagatccctgcaaaccaagaacaagtatgtaaaatcatactggagggaaaaaaaaagttcctaggaaaattatatgaaagctgaaaatgaacacaatgtcaaatcaaaactgatttcacactatataatatcaataaaaaagaaaatgcttagataaaaaagaatgcttaaaaaaattgattttgtgtgccctggaaacaacatacaatattctgatcaaataaacaagtacatacctaccaatattttgacagatcacatttttgatagcggcacattatagtcaaagaaacacccaatcacaaactcaaaaacagatgattaaaagattaaaatagcagccatcaccaacaggagggagacaatccaaggttctgtcagaagggacaaacggatttatcaacagctctccagtagcatcccagggcacccagctcagggtctagctgttctatttaaaactgacttacatgtttccaaggcaggaggcaggacagtgagactaagctctcatttaaccccaaaggagcaaatgggtcatagtggaattaatctgcactaatactgctccatcccccaaaagtcctttttctgctta

SEQ ID NO: 90636 - DNA, 664 bp, Homo sapiens
tcaacaacttttaacaatgtaaaagggtcctaaccaaaagtttgaaagcatttagagttttaatattagatccctgcaaaccaagaacaagtatgtaaaatcayactggagggaaaaaaaaagttcctaggaaaattatatgaaagctgaaaatgaacacaatgtcaaatcaaaactgatttcacactatataatatcaataaaaaagaaaatgcttagataaaaaagaatgcttaaaaaaattgattttgtgtgccctggaaacaacatacaatattctgatcaaataaacaagtacatacctaccaatattttgacagatcacatttttgatagcggcacattatagtcaaagaaacacccaatcacaaactcaaaaacagatgattaaaagattaaaatagcagccatcaccaacaggagggagacaatccaaggttctgtcagaagggacaaacggatttatcaacagctctccagtagcatcccagggcacccagctcagggtctagctgttctatttaaaactgacttacatgtttccaaggcaggaggcaggacagtgagactaagctctcatttaaccccaaaggagcaaatgggtcatagtggaattaatctgcactaatactgctccatcccccaaaagtcctttttctgctta

SEQ ID NO: 90637 - DNA, 664 bp, Homo sapiens
tcaacaacttttaacaatgtaaaagggtcctaaccaaaagtttgaaagcatttagagttttaatattagatccctgcaaaccaagaacaagtatgtaaaatcatactggagggaaaaaaaaagttcctaggaaaattatatgaaagctgaaaatgaacacaatgtcaaatcaaaactgatttcacactatataatatcaataaaaaagaaaatgcttagataaaaaagaatgcttaraaaaattgattttgtgtgccctggaaacaacatacaatattctgatcaaataaacaagtacatacctaccaatattttgacagatcacatttttgatagcggcacattatagtcaaagaaacacccaatcacaaactcaaaaacagatgattaaaagattaaaatagcagccatcaccaacaggagggagacaatccaaggttctgtcagaagggacaaacggatttatcaacagctctccagtagcatcccagggcacccagctcagggtctagctgttctatttaaaactgacttacatgtttccaaggcaggaggcaggacagtgagactaagctctcatttaaccccaaaggagcaaatgggtcatagtggaattaatctgcactaatactgctccatcccccaaaagtcctttttctgctta

SEQ ID NO: 90638 - DNA, 664 bp, Homo sapiens
tcaacaacttttaacaatgtaaaagggtcctaaccaaaagtttgaaagcatttagagttttaatattagatccctgcaaaccaagaacaagtatgtaaaatcatactggagggaaaaaaaaagttcctaggaaaattatatgaaagctgaaaatgaacacaatgtcaaatcaaaactgatttcacactatataatatcaataaaaaagaaaatgcttagataaaaaagaatgcttaaaaaaaytgattttgtgtgccctggaaacaacatacaatattctgatcaaataaacaagtacatacctaccaatattttgacagatcacatttttgatagcggcacattatagtcaaagaaacacccaatcacaaactcaaaaacagatgattaaaagattaaaatagcagccatcaccaacaggagggagacaatccaaggttctgtcagaagggacaaacggatttatcaacagctctccagtagcatcccagggcacccagctcagggtctagctgttctatttaaaactgacttacatgtttccaaggcaggaggcaggacagtgagactaagctctcatttaaccccaaaggagcaaatgggtcatagtggaattaatctgcactaatactgctccatcccccaaaagtcctttttctgctta

SEQ ID NO: 90639 - DNA, 1032 bp, Homo sapiens
tacagatttgaacataatatgtgagcaataaatatttatttcatgtcaaatgggacgatgatttagaagctttctaatgagtctgaccctctcatttcatagatgaagaaactaagacccagaaggtataagatcatgaaactgtaaagactcctatgtctgaacttttagagatgtcaaagatggcagagtatgcaactacagagatgagcagatagttttgctatttcgattggagatctcgcctcccataaatgccctcacacaccccactgcaaagcctcacgctggtctccttcaggtgcgccctgagtccccacacaggatgaagggggcaggctgcagacatactgaggagagyagaaggaagggcagcctctccaggtcccagccgtgaccctcaattaaatgaagacttcacacgttagaatccacctcttaaagacaagatcagagaagcctttctaggcaatgggtccaggtcacatagctagttcgtagcaaggccaagaagagcagaaccatagactgtttcccaagccagtgtctcgtagaggctgtatccatttctcaaggctcatggtttattaataagtgaagtagaatcacagaaacggtgcgatgtcctacatgttgacattaaagtaatggtttaacaatttaaaatatgactcttctctcaatataattataggacttactagatatatattatatatcatatgtatgttaagtaatactttgcttgaggaagtgtggtctgggaaagatacaaatttcaaattgtttgataatcatcttctagcaatactgtcattgtgtctctttggcagtgtgtataaacttgggtgttatcaaaactccactatgtgccaccacaagccacaagtataaccactagcccataagatttttgaaaaaactaattacacggtatacagaaaaaaaaaaggcttcaagagaaacacatcaagctgttacgaggagtggcctctataaagagaaattaggattgaggaggggaaaggtatg

SEQ ID NO: 90640 - DNA, 962 bp, Homo sapiens
agtcttaatgaaaagatttaggcaaacattagcatttgagcacccagaactaaatggcctttcataaataattttaaaagattaaaaggcttattaacttttttcacttacattaaattgtgactaattctttgcttgaacaagcaaaaaaaaaaaaagacgattgagaaagatcaatagagcaaacgaaaacattgattatctacaaatataacaaagaaggtcttgactttcctccaaagattcctaggaattcaagcctgttcagtgtttctcttatttttttgcacattgtcaaatcctgggggtttcctgaccctttggtagagagttttgtgtctaagaattaacattagactcaaggtgtgtctaactgacaacaaatgattctggaagagaataaactggtacataaggaaatgggaggcactgtttgtaggattccaaacatctgtatgagaagtgaaacattccatccagagtcaacatgttgcctctacaaaagatgtttttcagatactgtaccttcatgttaggtgtcatgtgagctcagcactgagctaaggagctgtgatcgcttcatttgtcccagatcacccagacccccttactgtaactgatctcaccatggttctttcttctttcctctatctttccatgttgtgaaagggagttttccaggctgagggtggttggcctgtctgccgcaggtagagtaaagaaaatgggatgtgaactatgagtgaaggctgggagaagaggaagcactggttgacttttggtgggcaacctgaaagagagctgtgaatgacatctctcctccctgctcctaactagagagtgtgtctcagagaactgtgccrtttaagagccggaaggcactctcaaagccacctggttcaatatttcccaaagaggagcattttctgttcatacaataggatattattttagcttatgca

SEQ ID NO: 90641 - DNA, 788 bp, Homo sapiens
ccccttttttgaagtgtggataaatctaaagcctaggaaatacatgttgcagactagtgagaaaatgtttatactgtcctatttagacagacagataaatagagacagagttggatggatagatggatggatggatggatggatggatcaggtgatggatggatgcaaacaaacagacatttaaaatgggagggtaaaaatgttattagcccagctggtaaaataattcctctcggagggaacacggtatgtggatacgttggtaagtcacccagattaggtaagggtaagaccccaagatgcatggtcttatgataaaagatggtctctaaactgctaaggagagacagtcttgctgatttcaaagttctgtaagtgtcatgtcttggyggtttggacgattgctgaggtagagctgttctgcaaaataaagggatgagaatttgcaactaggaatggaggatgcagggagagaggtatgaatcaataaagtgaggttttgtacacaagaaaagaaagatggaaaatttcataccttagcagagtaggcaagctgagatgtctaaggtgactttgaagttatttcctgtaggatgtacgtaagtaaactcctccttccacctgccctagaaaactgtttcccagaagtggatcccaagcccatgtgcagggggtttattaaggtgtgctcccaagggagatgagtgaaggagtggggaaaacaagacagagaaggataaaaagtcaaacaaaagttcgatcacagtcaagaccttcggtctgatcat

SEQ ID NO: 90642 - DNA, 1096 bp, Homo sapiens
tttcagtcggagtctccctctgttgtccaggctggagtgcagtggcaacatcttggctcactatatcaatatttatatctaaatatatctatataaacctgatagaaggtattattattagaaggagattgtctccagaataggccttagaggaccaggatgttttgagagagaagagataacaaggagcatcttattattttttgagatggagtttcgctcttgttgtccaggctggaatgcaatggtgtggtctgggctcactgcaacctctgactcctgggttcaagtgattctcctgcctcattctttgagtaattgggattacaggcatgtgccaccataccaggctaattttgtattttcagtagagatggagtttctccatgttggtcaggctggtctcgaactcctgaccttagcctaagaggtgaataacattcccaatgccatttaactaacargaagcagaagctgtctaactccatttgtcccaaattaaccaccactctccagtgcgtttactttttctttattttgctttgagcccacatcaaaaacaaaaaacaaaactctggttcatcgacctgactgctgattgaaagagctgacagtggtagatgagcaggagatctctttcagaagaccagtacctttggaaatcttgaggaatcctcattgagaggaaaagttaagacctaataggttattttaaaagaatacattgattccaatgacttatgttttagaatgtctttcgtatcataaattacttaattttaataaataaagtgtataaattaaaaaaagaatacatcgtttcaaatgaaattctcttaaacattttcatttgatatgacagtagtttgtcctcaaaatgatgaaagtttgttatctgatattggaataattaatgttcagccacttaagaaaaaaataaaaactcaaagcattgaaagaaattgaatttatatttgcagagtagactcctgcagtgtatttatctttactgagctcaatgtcattataaccaaattatcagagcatgctcatcttttatacaaatgaaatttcttacttcattaatatgatgaaa

SEQ ID NO: 90643 - DNA, 936 bp, Homo sapiens
cagatttgttagtagtactgacacagtggttgctgttggcttcctggtgatgaaaatgagcttctttgcagctgctctgagagctcccagtcttattgatgagaaatagtaccagaaagcaactagctggggacctgtaccattagggtccaggcaggaaacagaaaccactgcaatcattttaacagaaagaatttaatataaacaattgcaaagggtatcgaagaattgaaagataaacagaactaaagtattagagaagggagcaamagtaggaattaactaccagctcctgggttgggaaacaaaggtaaataatggaattatcacaatttagaagtttggaggagggtatctctggggttgggacccatgaatttgagggggtggggacagacaattggtccagatatttcttagtgaatgtgatgggactggtctgcatgtgttaaaaaaaactgcaagttagattgaattgaattcaaattctgctgatagaacaattgcttctgaagtcgttgttaagatgatgctgatagcaacagaaaaccgaaaggaaacagacctcaatgaacatctttcttttcctctggcagaatttaatggggaggagagggcaaagcagaaaggtggtccacagaacctgagattgatcataatcttgaaagacacagtcctacaggctctgttcccaaatattgaaatcccaaagagcaaaatctctaaagtctaaaattcctggtgtctaaaatcccaataatcacagtcacaagatggttgcatcatgttaggcagagctattaccttgttatcgtcctaacacagaggaaaatggatttcacttggatcccctaaccctaatgacagatttggagccaggaatgaccaaggcttctaaaagagaatgtcaaggtattaccagtaaagtttgttttt

SEQ ID NO: 90644 - DNA, 1376 bp, Homo sapiens
  misc_feature (1)...(1376): n = A,T,C or G
ataactataagctctattagatggatatgaaaatgtgatgaaggccatataggtacatcctacaaagatagggacagagccacttctccaaatatttacatttatttaacgagttgggattctatatcctggaggaaaaaggaatttaaaaacaattaccattccacttagataatttccatatcccttaggcaagtgtttttttttttttttttttttgtaggatcttgcactgttgtccaggctggagtgcagtggtgcaatcatagatcattgcagccttgatctcctgggctcaagtgatgttcccacttcagcctcccaagtagctgggacaagaggtgtgcaccaccacacccagctaattaaaacaaattgtttttagagaggggggtctcactatgttgccaagttctcatcaaactcctggactcaagtgatcctcccggcttggcctcccaaatgctaggtttacaggtgtgagccactatgcccagccacttagacaagacttttatatcaccaaaggagaggttaggggaggaggaaacagtttcatcacagtcagtccrtgctgaccatagccccgtttgggccaacatagagaaagtatctggatgagtttcccagggatgccccaaccaatgaccagaaacttgctggcttaaaacagcagaaatgtattttctcgcagtctagtggccagaagtttgaaatcaagttgtcagcggggctgcactccctccaaagcctccagcgggggatccttccttgcatcttccagcntctggtggctccaggcatccaggctcatgcctgcatccctccaatctgtgcctcagtcttctcatgagcttctccctgtgtctctgtgtcttctccttttcctgtctcttacatcggatttagggtccaccctcatcttggatgatctcacctcaaggtccttaccttaattacatctgtgaagacctttattccaaataaggtcacattctgacatcccaggtggacatatcttttgggggacacattgcaatttacaattcactacagcaaacttttcccaggtgaagcttttgaagatgaagctgggtggcagatcaccaataacaaatcgttgaacagtaactctcagcgaatggaggaggtctttctcccctctccaagccttcagatttcccctgagaactgagggcccgcaggtgaaacagatgaagaataggcaagcacttcacacccttcctttggttaatctcttcatgcacctttaaccgtgaacaaggaaccctttttttttttgtattatactaagttctagggtacgtgtgcacaatgtgcaggtttgttacataggtatacatgtgtcatgttgg

SEQ ID NO: 90645 - DNA, 997 bp, Homo sapiens
acttcctcgctgaggagtccctaaatccatactcggactaccactccacagctgagaactacctagagcctaaaccagacaactttcaatcttgcgcaaagaagtttagccagatttgagtgctgcataaacacgttgttatggttttcctgattaccatctctaacagcagagccgcacaaatctctggcttggctgatacttaacatgaacacaggttcccctgccttactcagtataattctgcsaaaatgccagatatgttataattattttctttcatcaagaaaccattcatatgaaatttgaaaatgatttgtcggatcgctgggcatacacttttatagctttaagaacagtaatttctacagtcccagagaactgcagacctgtccccgatccaggtccctggtacttgaattacttggctctaagatgggcccacccacaagttccaaagacaagcaggaagatggcccaatgcttgctaagggaggccagcagaccctgtgaaaaccaaatgctgcatgtgaacctgaattggatactgggctgagaaagaaatccacaaaagacattttgggacaattggggatgtttgaatatggtccgaggattagccagaggctctgcagactatctataatgaaggaacagtttttgtttttgttttctagtgtgtctcagagtgatgcttttgtaaaacataagaatagtgacttattaggaagaagtggaaaaatacaaaaaatgccagcccagatttttattattagatttaacagatctaaaagtactctgtcagattgctataaaagtttctaaaagcttgctctcaggtttagaattcagcttgttgttgacctgcaaaaatagtccacagttggccgagtgtgctgaccacgccctgaacattactggaattacaccctggcttatacattttgggaattttctaagccggggctaaagatataaaaatttgtaaaagggcttt

SEQ ID NO: 90646 - DNA, 576 bp, Homo sapiens
aggtcagtacctgccagacacagacagagagcaggttcaggtcaatggagcacagctgaagctgggtccggatgggatgggtctaagtagaaataaagtttcaaaggatggaaagcctttaaacacttaaaatggtgccatggatgaatacaaattatttccctaaaagctctctggactccatccctatcgtcataaatttttcggatgaagcacctataggcaggctgctgcagaaacaaatgataattacgtgtttctaaaatcacattttggcagtagggtcatttgagaagggctgccagtccttttgcagcacaggaaaaacaaagctactgtgaagacactagcttcataatctatgcactaaactcactaggaaagtgtagcgtgtgtgtgtgtgtgcacacacgcgcgtgcttgtgtgtagatttctatgtatatcactttttgcagattcatatctggcagcaattgtgcagatttggttgttaagcatgagttgaagccaatttggtcaagtaattagtgttctrccctttctaattagctgatttaaggttgcataacagatta

SEQ ID NO: 90647 - DNA, 509 bp, Homo sapiens
tgctctctgcaacctctgcttcccaagttcaagtgattctcctgcttcagcttcctgagtagctgggactacaggcgcctgccaccatgcccagctaatttttgtatctttagtagagacgggctttcaccatgttggccaagctggtctcaaactcctgacctcaagtgatccatccacctcagcctcccaaagttcttggattacaggcatgagccaccatgcccagcctgttttcctcttctttaaaagtctacttttctacttgagcttgatgtctactttctatccaaaatccaacgttgtaaagttcccgtgacgccaagagcttccacctttatgtgcatcaacttctaaaatcatgtttcttctttcatcataaaaatgtgaattrctggttttcagtaaatgctttgatgtacctaaaagattgttcaactttttcccaacttttgttaactccagtgaccaaccacttatcattaaaaaatgtccaaatccttgcttct

SEQ ID NO: 90648 - DNA, 2343 bp, Homo sapiens
gcagaaagctttcacgaactcttccaaaggatgccaactcctgcaatgacaaatgtacaaaacacctggtgtgaatcacaggcaccctgtggcctctccccaacaggactcatttaaacaccatttgccaggcaatttaggcataaacccctatctcttgtagcccgatttccttccccactctgacttcccaaagtagaacaaggatctttaattcaccagctgaaatggtccccattagaatcacaggatcttgggcagaaggcagctttagagatcatctttaatggagatcacaaactgaaagcacaaggggtgacatccaacctgtggaagtgttacatttcatctatggatatgtttagaaaatctgagccaaacataaaaatcagagctatcacacaaaaacccagatttctggcttctcttaaagaaagaaaaaaaaatcagacctgtcaacatggcccacatttatgtcttaaaatgatcaggtggtgctaagcattaaaagcagtcacccttcataggcaggcttggccgctccaatataccacagtccccaccactccctattgtctcctccacacagagaagaactggggttgtcattagtcattgcccttgcattatttttttcttgcggtacagaaatattttcttctacttataattctaacacaagtgggaaaacaaaaggggcctagttccaagaaaaaaaaaatggtagagcccatataataactcaagttggtagcctcactcctgtagacatttgcaacccccaaagaagtacaacactcccactttacatgaattaaatgtaagcaggaaactgacttgcccactcccatagttagatgcagaggtcaatctaggtctctcgattgcctaatccaggactcgtacactatgctggactacatactagtcttatactattaagcaaaaaaattaatacaataaacaagtacacacacacaattaactaattaaagataattatcaaaaataatactttcagagaagtattaaagtcaaggaaatacagttgaagcaccccactttccactaaaatgcttgccatacatcaaaagtgctcagtgtcctaaacggtcttgagtactctttatgctagaaaaatctcccctaacatgcatcttcaatacaagactgtaaataagtttatgtacaaggtaacagcactgtaataagtaagcaatgttcaacaataagatcttgatagtacttatttatatcactcccacaaagaatttattgattcattcacttaacaaatatttattgagccctattacactccaggaagtatgcaaggtgatggagatacaaaagtgaacaagaccctcaagttgatctgaataaaagatagatccagacactcaaaatgaattataaaataatgggtaattgtagtgatctgcagtcaaatgctctacccctgagctaaaccctctayggtaagtgtagtgatctgagtatgcacctgtgttatgggagcactgagcaggggcacctgatgcagtggaggtgaaaagatacttcctagcatggacagaggcctcaggaaatcctaaaggttggatgggagtggaccaggcacagtgagaaatggacgacaatggaggcaaaagcaaggagatgagaagagcccctacaatttggtcttgtccagatctcctattagctctgggtcttaaaagcccctgcctgatgccacgtgacccaacatctgctggacttgatccacagacctacatatgcacttacagaagtttatcttgacaagtgtccatatcaaaaatgtcactaattcagccctgctccctggcaatgcctacctacgactccctggagtctgctgtcccagagtctgcagggcctaagaaacacagtggtagaaatactaagccttcaggcgcagtggctcacacctataatcccagcactttgggaggccgagatgggtggatcatgagttcaggagtttgagacccgcctgaccaacatggtgaaaccccatctctactaaaaataaaaaattagctaagcatggtggcacgcacctgtaatcccagctactcaggaggctgaggcaggacaatcgcttgaaccagggaagcagactttgcagtgagccaagatcacgccgctgcactccagcctgggcgacagagtgagactccgtctcaaaaaaaaaaaagaaaaaagaaataaagaaatactaagcctttcatgatggacaaaagacagtaaataaagatgtttttctcataccagtcacaaggctgccctgtctatctccaccccaggacctggatttcc

SEQ ID NO: 90649 - DNA, 697 bp, Homo sapiens
ggaaagagagcactcacttttgagagctcagatcaaatatgctttttcactggggccagcccagactccctaaccttactctcaccagcaaaagctgctttccttgtagaccctctcacaatctgtaattatcttatttatctgtatttccctttagggggtaagaatcttgcccaacttgtttactgcggtacccccagcaacacaacacatagcaagtactcagtaaaacgttgctgagtgggtgggcgggtaaacaaggaggaggaggcaggccagtgggaacagggctgagagccctttaaagatgccccatggcatcttcatcatggcatgaagcrtgggcaggacttcatcatggcctctagaatgggtctcttggtttctcttgccttgattcttctcaagtctgttgctacttagatactggttccaccaccatatacccctgactccaccccaattgttcagacctgggtatttcccaggaaacccagttcccatgtttggcttctcttactctgcctccattcagccatcctcagcttgaaaaattcagacatccatagccgtgtctgactttttatgacgtcaagaccctcaagaatctgacccaagcccacccctcgaaccatatctccaataccccacttcgccctccatcaccaccaatgagctcacggttcaactctctgga

SEQ ID NO: 90650 - DNA, 787 bp, Homo sapiens
tattctatttatcaaagagaaggaagaattcttttcaaattatttaagaaaaaggaaaamaaaatacctataataccctccggaagtacatttctttattccttttatcatctcttgatgtgtaattttaaactcccgtcctggaaagagaagtgtggccatcacagcagctttagagtgggtatgaatcactgcacctgctcctgaaggaggaagaagaaagccgcatgctcaatgaagactgaattatagcttttaaagaaaaaaagtccatatagttatacttatatttacatatggttatgggcttatttttcctggcatggaataagttggtagtaggcaggagggtaagtggaataatggaccttcctcataggttgatgtgagaactgagtaagttcatgcacttcaagttcttgcacatggtgggtatccaagaaatgttaactgaaataataattaccattatttagaggagcctactctgcaaatattctttatgttgaatatattttctgcatacctctcattgtgtaagcattcatgaaaagaggagtacactggcttttttttagcttcttcgatggcgaaggtccacttatgtccttttcatttatatcacaaacaaacatgtcttcaggctatttatagaggggaaaaaaagaaaaaaagaaggcttgtaaaatatcaattagaaatgttccttttcttgtgtacatatacataagaatacaagaaagtttatctatagtatacatacttgtgtgtatatttagtatacata

SEQ ID NO: 90651 - DNA, 787 bp, Homo sapiens
tattctatttatcaaagagaaggaagaattcttttcaaattatttaagaaaaaggaaaaaaaaatacctataataccctccggaagtacatttctttattccttttatcatctcttgatgtgtaattttaaactcccgtcctggaaagagaagkgtggccatcacagcagctttagagtgggtatgaatcactgcacctgctcctgaaggaggaagaagaaagccgcatgctcaatgaagactgaattatagcttttaaagaaaaaaagtccatatagttatacttatatttacatatggttatgggcttatttttcctggcatggaataagttggtagtaggcaggagggtaagtggaataatggaccttcctcataggttgatgtgagaactgagtaagttcatgcacttcaagttcttgcacatggtgggtatccaagaaatgttaactgaaataataattaccattatttagaggagcctactctgcaaatattctttatgttgaatatattttctgcatacctctcattgtgtaagcattcatgaaaagaggagtacactggcttttttttagcttcttcgatggcgaaggtccacttatgtccttttcatttatatcacaaacaaacatgtcttcaggctatttatagaggggaaaaaaagaaaaaaagaaggcttgtaaaatatcaattagaaatgttccttttcttgtgtacatatacataagaatacaagaaagtttatctatagtatacatacttgtgtgtatatttagtatacata

SEQ ID NO: 90652 - DNA, 787 bp, Homo sapiens
tattctatttatcaaagagaaggaagaattcttttcaaattatttaagaaaaaggaaaaaaaaatacctataataccctccggaagtacatttctttattccttttatcatctcttgatgtgtaattttaaactcccgtcctggaaagagaagtgtggccatcacagcagctttagagtgggtatgaatcactgcacctgctcctgaaggaggaagaagaaagccgcatgctcaatgaagactgaattatagcttttaaagaaaaaaagtccatatagttatacttatatttacatatggttatrggcttatttttcctggcatggaataagttggtagtaggcaggagggtaagtggaataatggaccttcctcataggttgatgtgagaactgagtaagttcatgcacttcaagttcttgcacatggtgggtatccaagaaatgttaactgaaataataattaccattatttagaggagcctactctgcaaatattctttatgttgaatatattttctgcatacctctcattgtgtaagcattcatgaaaagaggagtacactggcttttttttagcttcttcgatggcgaaggtccacttatgtccttttcatttatatcacaaacaaacatgtcttcaggctatttatagaggggaaaaaaagaaaaaaagaaggcttgtaaaatatcaattagaaatgttccttttcttgtgtacatatacataagaatacaagaaagtttatctatagtatacatacttgtgtgtatatttagtatacata

SEQ ID NO: 90653 - DNA, 787 bp, Homo sapiens
tattctatttatcaaagagaaggaagaattcttttcaaattatttaagaaaaaggaaaaaaaaatacctataataccctccggaagtacatttctttattccttttatcatctcttgatgtgtaattttaaactcccgtcctggaaagagaagtgtggccatcacagcagctttagagtgggtatgaatcactgcacctgctcctgaaggaggaagaagaaagccgcatgctcaatgaagactgaattatagcttttaaagaaaaaaagtccatatagttatacttatatttacatatggttatgggcttatttttcctggcatggaataagttggtagtaggcaggagggtaagtggaataatggaccttcctcataggttgatgtgagaactgagtaagttcatgcacttcaagttcttgcacatggtgggtatccaagaaawgttaactgaaataataattaccattatttagaggagcctactctgcaaatattctttatgttgaatatattttctgcatacctctcattgtgtaagcattcatgaaaagaggagtacactggcttttttttagcttcttcgatggcgaaggtccacttatgtccttttcatttatatcacaaacaaacatgtcttcaggctatttatagaggggaaaaaaagaaaaaaagaaggcttgtaaaatatcaattagaaatgttccttttcttgtgtacatatacataagaatacaagaaagtttatctatagtatacatacttgtgtgtatatttagtatacata

SEQ ID NO: 90654 - DNA, 787 bp, Homo sapiens
tattctatttatcaaagagaaggaagaattcttttcaaattatttaagaaaaaggaaaaaaaaatacctataataccctccggaagtacatttctttattccttttatcatctcttgatgtgtaattttaaactcccgtcctggaaagagaagtgtggccatcacagcagctttagagtgggtatgaatcactgcacctgctcctgaaggaggaagaagaaagccgcatgctcaatgaagactgaattatagcttttaaagaaaaaaagtccatatagttatacttatatttacatatggttatgggcttatttttcctggcatggaataagttggtagtaggcaggagggtaagtggaataatggaccttcctcataggttgatgtgagaactgagtaagttcatgcacttcaagttcttgcacatggtgggtatccaagaaatgttaactgaaataataattaccattatttagaggagcctactctgcaaatattctttatgttgaatatattttctgcatacctctcattgtgtaagcattcatgaaaagaggagtacactggcttttttttagcttcttcgatggcgaaggtccacttatgtccttttcatttatatcayaaacaaacatgtcttcaggctatttatagaggggaaaaaaagaaaaaaagaaggcttgtaaaatatcaattagaaatgttccttttcttgtgtacatatacataagaatacaagaaagtttatctatagtatacatacttgtgtgtatatttagtatacata

SEQ ID NO: 90655 - DNA, 787 bp, Homo sapiens
tattctatttatcaaagagaaggaagaattcttttcaaattatttaagaaaaaggaaaaaaaaatacctataataccctccggaagtacatttctttattccttttatcatctcttgatgtgtaattttaaactcccgtcctggaaagagaagtgtggccatcacagcagctttagagtgggtatgaatcactgcacctgctcctgaaggaggaagaagaaagccgcatgctcaatgaagactgaattatagcttttaaagaaaaaaagtccatatagttatacttatatttacatatggttatgggcttatttttcctggcatggaataagttggtagtaggcaggagggtaagtggaataatggaccttcctcataggttgatgtgagaactgagtaagttcatgcacttcaagttcttgcacatggtgggtatccaagaaatgttaactgaaataataattaccattatttagaggagcctactctgcaaatattctttatgttgaatatattttctgcatacctctcattgtgtaagcattcatgaaaagaggagtacactggcttttttttagcttcttcgatggcgaaggtccacttatgtccttttcatttatatcacaaacaaacatgtcttcaggctatttatagaggggaraaaaagaaaaaaagaaggcttgtaaaatatcaattagaaatgttccttttcttgtgtacatatacataagaatacaagaaagtttatctatagtatacatacttgtgtgtatatttagtatacata

SEQ ID NO: 90656 - DNA, 1115 bp, Homo sapiens
aagtgagtccaggatgaaggaagaaatattttatgagatcctcaaagtcctaatgtgtccctagagcagaagctaagggccaggaagaaatctgcgatacttcagcattttgtcatggcacaagtgaagttgtgacaggctcatcgccaaacctccagatggcttcctaaatgacatcacagccatcctgtgcagtggaccatagccaactgccctctgctaccagcactgctggggactaggaaagcaaggggtcaaagtgtgctggaggatgttattttatccatgtacctctaacactgcgttttgtggattccattcactgttatggacctaccattctaccattcatgaggtcagaaagcttttgaaccacaagccactagaacttcaagttctgtgaagattgaggctaagctatacttgtctaatggttaatactgagatttacctctaccrtctttcctaacgtgcaatataaaacataatgttaaataacatcccaatagattactagaattaactcctttctcctaatcaaaatccccaacagtatacaaatatttaagtaacttatttggacttctccataactttatgattggtcaataactcttgagaacattgggtttttataatatatttccgtaacattacctcttctgagataagacaatgattagaaataaaatttgtgtttattcactttcagattaatcaaaatgtgtctcccttttgttaatattcaactaatttaaatagtcttataactttttctgaatgtgtatccttgtaccatttatacttatttcttattttcatatggacattttgcttcatgctcacggaaaaaaggattcatgcttctgttaagaactggtattgtattggatttctctcagttccttacattgcgaaccaaaagcccatgatcgattgcagccatgattatgagaactttggaaataattatgaggtaaagccaaggggtcaatgtgtctcaatgaatcctttctttttattgctgtgtctaatgttttcatttagcaacctgggatgacgtcttcttgatataaaagtcagaagtatatagacatagtaggtttcttagagat

SEQ ID NO: 90657 - DNA, 841 bp, Homo sapiens
gtgtgtgtattgaaaaatgtaaatgcacagtgggaaaaatttcattttgaatctcccccagaaagataatgtaaagcatttaaaggtgttatgattttagggagaaaagaataggatgaggcaataagtttctacacttttcttatgtacctgaaacaaaaagttatggaggtattttggtgttttattatcgttgccattgttgtcatttttatggtatatagacagaacaatttaacccaaacctagatccacctcaaagaacgtcaaagtccaaggcttctcagtgaaggctgcccagggtcaagtcacagaatcaggattacaaattgcttctggccagaaggagagaattatggtgcagaaaataaattcctggggaaataaagtaagtaggcctttagaaaattgtagatttgagaagaaagaatagatgtattkctttaaattcctgcttcacatggtgtcttcaccgtaagtgaataactgtgtaactgtacttcattaaggatgagttgatggttatactattttaacaaagagttatacttttgtagagaaagcttaatcaagggtgtctttaatctgtcactcatttcagttatctgaacctgatgtagtacctgtatctccacttgcctgcattacaccaaaactggccttcatcaaacaggatgtgctccatttccaaagctccaaaagcacaaaacacaaaactcagacatatctgagaaaaatccagcaaaatcctagccaatataaagatttggaagactgcacactacaagaaaaaacaaaaaatgaatatccttcaaaccacaggtcaatagcttcatctaca

SEQ ID NO: 90658 - DNA, 841 bp, Homo sapiens
gtgtgtgtattgaaaaatgtaaatgcacagtgggaaaaatttcattttgaatctcccccagaaagataatgtaaagcatttaaaggtgttatgattttagggagaaaagaataggatgaggcaataagtttctacacttttcttatgtacctgaaacaaaaagttatggaggtattttggtgttttattatcgttgccattgttgtcatttttatggtatatagacagaacaatttaacccaaacctagatccacctcaaagaacgtcaaagtccaaggcttctcagtgaaggctgcccagggtcaagtcacagaatcaggattacaaattgcttctggccagaaggagagaattatggtgcagaaaataaattcctggggaaataaagtaagtaggcctttagaaaattgtagatttgagaagaaagaatagatgtattgctttaaattcctgcttcacatggtgtcttcaccgtaagtgaataactgtgtaactgtacttcattaaggatgagttgatggttatactattttaacaaagagttatacttttgtagagaaagcttaatcaagggtgtctttaatctgtcactcatttcagttatctgaacctgatgtagtacctgtatctccacttgcctgcattacaccaaaactggccttcatcaaacaggatgtgctccatttccaaagctccaraagcacaaaacacaaaactcagacatatctgagaaaaatccagcaaaatcctagccaatataaagatttggaagactgcacactacaagaaaaaacaaaaaatgaatatccttcaaaccacaggtcaatagcttcatctaca

SEQ ID NO: 90659 - DNA, 478 bp, Homo sapiens
tattatgtcaagttatacttgtaaaaatttaatggagctcccagatgtagggagtaaattaaacacatgcatcaaatttggtcctccccaaatccagttaatttgtcagtgaatttttttaagtcctgggccatgggaaaataaacaataataacacaattttggaaaattggatgagtgagaaaagacttagcagaactcccaaattaaagtactaaaccagcagcaggaaagccaagaagcaacttgttttacactcaagagccttcaagtgtcaggaattggcagcatcagattcttctggaagtgtggtgaagaggagagactaaaatgagaatgatgcgytgaaagtttatttaagaagcagtcagatcactagatcctttccaatcatgaaaaggtacactaccgcttctatttcccttctctttcccaggaagcatattcacaggagagagagaacaggtttcctgcttgg

SEQ ID NO: 90660 - DNA, 1120 bp, Homo sapiens
ccactggacccaagcagggaaagaccctggtccagtgcctggcaccttaaaaagcctcccttccacaagatgccccaagagccaggagagggtagtggttaaggtatggacggcctgggtttaagcccaggctcccctgtcctctgaccttgggcaagagagttagtctctccgggtctcagttgccttcactggggaaatggaaacagtaataacagcacttagccaagggtttttgtgaggatttaatgaaacggtgcagtaaagggcttgagagggtttccagccccacagtgatactctgartacttggtcaatgggaattgtgtacatcgaagcaagaacccatgttacacatttacagtgaaggctttgcaagtggtgctggtgagaatggtgctgcaatgttatcctgagggctactgggacctattttcagagtgggccttataagatcttaaaaggattgcccaggctgcagtgaagaggctgagttggaggagtggaggccaagccgtggaggccaagccaaggaggccagtgaggaggccaatgagccaacagagagaggtccttaggcaggcaagaggcctgagggtccgaggtgggagatacgaaggagtagaaccacctgcaggcagtgtgtgcagttaagaatgtggtcactggtgttggactgcctgggtccagctctgccacttactggctgtgtatcctcgggcaaagaggaggaggtctctgtgcctcagtgttgtcttctgctgtgaaatgagaaaacgatgtgacctacctcttagggttgttacaattaaaaattgtaaatttttaatttacaattttcttggagacagggtctcatgtcatccaggctggaatgcagcagtgagatcatagctcactgcagcctcaaactcctggcttcaagaaatcctcccacctcggccttccaaaattcattataggcaatgactgattatatgcaaagtgtctggaatagggcctggcactattaagtgttagaacacatcctagtgtgattatgttagctagtgtaactattatcagaacttgggtgtgagggaggacctaggatgattctgaggtttgttgctttggtgac

SEQ ID NO: 90661 - DNA, 594 bp, Homo sapiens
ggtggcaggagagcaaccagtgacacaggcctcccatgccatgctgaggcgctgaggtggacggagatgcacgagatgatgtggcatccttcttgaaatcttgggggatgcagagacagagaaccaggcagggtcggggaagctccagacactgactcggcctctgcctccccaggttatccccttctccatcccccaggcagaatacgccatcaaagacttgtacacggggggatgtttactgatggaggggccrctcttctagagaagctatacgttatctgctgggactcaggggtggggcatggtggaaacaaggtaggggagtgggctggagccaacctgagtcccaggagggaaactgggggcctgggctggggtgcctctgcctaatagtgtgaccttatgccgcaaaccacacactgggcctgtctttaggatgcacctgttccgggggtggggcagaagtacatctttgggtttggcctccttcttgtctacggcgtggaagttgggtggctgtgggggcaggccactggctaagggctgtgacttacccatctgcgactggttcctcagagagggggacattgt

SEQ ID NO: 90662 - DNA, 655 bp, Homo sapiens
tgaatatgtgaagaagtgcaaatctcatgaccaatgcctggaataaattgtcattgccatgaatacaagtgggaatagcagatgacctatcttctgggtgatgcttgcaagattcctgggaggtcacagtgcaaaacccctgtcaagtgtgctcaaagaggtcagagcgaaacagattcctttgaagagtaaatcaactctcatgacaataaaggctttcatgacaaataattttgacaggtgaattgtttagaagaagagactgtggattcagcaaatccaaaaggtatcctgtcaattagagaataacaacttttctttcttccatgcttcagctcttacgaggttggacacagatgatctcatgtgatctttatagtaattacaacccagaaatgagcaagctgtgaattaaccacttccaccccagaaccggttgttagtcatttaccagcacaccactgcctgggaccctcatgagaaagtccaagcgtctcctctggacttctaggtttttcatgagctagccctcacccacccattctgcctcgtctctcttttgcattagaagttcaggctcagctagccttccaatcacctgagattgtgtttaaaagtgaagaktcttggtcctctcttccagaaatcccgactc

SEQ ID NO: 90663 - DNA, 1727 bp, Homo sapiens
ctgccctataaatttagaccagaatgagtgttttactggacaccctaaaatatataaaactaaaactagtttatatataaactaaaactaactagtatatataaaactaaatacctaagacataatatatctataagtataataattaagagcactaaatttggaatccaacagtccaaagtttccgtctcagttctgtcctatgttagctgttgaaccttgggcaattccgtttcctcctcggtaaggcagacaggtaagattatcttaaagaacattgtgaaaattaagattaaaagatgattcacttaaaagcatttagtacagttgcctagaacgtagttagtgctcaggaaatatgagctactttattatcatcacaataattattatttcttacttccttaatccttcctgttagccagagaacaaaagtctgcaatcagaatgaattttttaaaacttcactgtgactcatttaagcaattaaaatttttcaaaaattctatttctaaaatttactatagatagagaatccatagcatatatgccaggatgtcttccacaaatgacaccttttcttttcttttcttttttttttttttttttttttttttgagatggagtctcactgtgtcgtgcaggctggagggcaatggtgccatcttggatcactgcaatctccaatctctgcttcccgggttcaagcgattctcctgcttcatcctcctgagtagctggggttgcaggtgcccaccaccacccccgtctaatttttgtatttttagckgggatggggtttcaccatgttggctaggctggtcttgaactcctgacctcaggtgatctgcctgccttggcctcccaaagtgctgggattacaggcatgagccaccgcacccggcctgctttttttgttctttagtgaatgaataagatgtaatgcagctaaacataatgtaggtgggaaagaatgcattgttgtaatgttcccatttcactgcttctgtagctcatgctcaggtgtctctcctgagtcatcaactcctgcagagcagagttcagatctgcccacttattttcatggccaagcaaagtgagtcccctgcaaaattagctgcttcaacctttccctctttaggtgatttatgttttgtaactttggggtgaattatctaatattgaaaaacttacttatttgcagagttgggttaagaagtaattatttgccccaaagttgcctagatttctgttaggaactcacatctgagctccctacatcgagtgggattttgagatcagaagtctctctccataactgttgccagggaaagaagtcaattcagcaggtggcttagtcagttcaggctgctataacaaaatatcttggattgggtagtttataagcaacagaaattgatcgctcacagttttggaggctgggaagttcaagatcaaggcaacagcagatctggtgtctggtgagggcccgtttctcacagattgtcccttctatgtgccctcacatgacagaagggacaaacaggttccctccagcctgttttataaggacactaatcccattcgtgaagattccactttcatgatctaatcagccccgaaagtctcacttcttaatacccacgtgttgggaattagatttcaacatatgaattttggaggggaacaacctgatcacagcagaaggcttggtgcctttttttccc

SEQ ID NO: 90664 - DNA, 1350 bp, Homo sapiens
cagagtcagacacatctaggtctgaatcctgctgctcaccggtcaagcagcaaccttgagactgatcttcaagggaaaccccacacaagctgggcatggtggtgcgtacctgtaatctcagctactcaagagactgggactggaggactgcttgagcccgggagttcaagaccagcctgggcaacatagcaaaaccccatctccgaaaaaaaaaaaaaaaagcccatgcaggcaggtgtgggcatccctattttacaagcacaggcaagtggctgccctgctctgtcctctgtacccagagtcaggttgtgcagatgccttgagctactgcccaggcaaacgccctgttaacgccattctccagatgcaaatgatcactctctcttgctcttacagcccaagaggcgagcaggccattgaagggacccaaagtaaactactggctttaaccaagaatctcatgcacctgggcaaagatgcccctggcacccagcatggcccagcctggctgtttcccaggcaccctcctgtgtgccaagtaattctcaagcatcatcttcctgcttctacttcacagatcaggaaacagacacttggggagtccaggcagtcgctgcaggtcacatgggaggtaacgggtggtctgtactcccaggccccccttcaggaacccacccccacttcctgatcttgcagaacccctgggaaatctgccaaggcagtacagccattctccagagattgtggcatgggcatctgtcacgctagcgaccctggaccccatgctgtgtgggctgacccttcaccttgagtctcaatcccagggaagaggctttgagaccaggtttatgccaagggagggatggtcactgggtcaaagtgtggggccaatggggtgtggctctgagccaaatccgtcaagacctgctggtgttggggaccatgttaggaagtcccaagttaggagggagaagtgggaaaaggccccccagcaggcaagctctgcagaacttccaaagatgagcgctccatctcctgaacacttgctgcatgtcaggcaccgagccaagcactctccctgaccccaagaatccacacccagccctaggagatgggtgctgtcagcccattaccccatcgcagccaaggaaattgaggccccagagcagggaagtcacctgcccaaggtctactggccgggagagggctgtgacctaaagccagggctgtctgaccccagagctgcaagctgggctcccatgccagggttggrcccaagaccccagcagttcaaagcaagaagacacaatgggtgtcacactgggctgtggtagcagcttcccctcccca

SEQ ID NO: 90665 - DNA, 662 bp, Homo sapiens
agtgggatgcagaaggatatgccctagatctgccttgctctgaagctttcacgatgcccaccaagctcactgcccccacctagctggcagctccatggaaacagggctgtctaatcatgatcacctccagaagcccaagacaaagcgtgtgttcagggaaagtggaacaggcacacgtgcccaccagcctcctctccctctccagtgtgctcagcctccagagctcctgctctgtgaaggaaagtgggtgccctgccaatctaagaatcccatcgaacctccacggcccctgctccactcagcyccaagggacagaattctgtgtccatctccatcctgccctcctggagctccacactgtgcctgtgagcaggcctcccccggaggtggattcaaccagcattccacagccttttcctagaagggcgggtgagggaccaggggggtggaggctctggccacaagtgtgtggagtgtgaggaaagacccggccaggctggcctccccagggactgggcctggcgtggggcccccagcgcggcactgacctggccaaggccttcttcatactaaaagaaccccacctgtgcctccggggccaccatcccagccgtgccatggaaggcaggcagcatctttgtggtgggcggccacgcgcccac

SEQ ID NO: 90666 - DNA, 645 bp, Homo sapiens
ctcccatctgtagaagtccaaggctcttcggagacaggccaggatgatgtgaccccagctgggcccaattggcaagggacagcctgggaactcagttgcattcagcaacaagctgggcagctggacctgccaggatggggacgaacaacacaaaaccaaactcaacggagcctctttcagagagggcagcagcctcctcgacaagggtatttgcaatgcaaagcagcccagctccagccagaggaggatagtcactcggagggggctgggtaggccaaaatccagccacctccctccagccagactagggagtgcctgcgatcgggccttcccaggcgcctgggggtgccggggaacccgtggctggcctrgactcttgaatcatatgacagccccagtggccagttcgggtgcaaggtggcctgaacacccctcccctgcacaatcgctcagggtacaaatccctgataggctgtacatgcaagtctgcagaatggacctactgcaggcggcacgcagggccccaagagaaggctgaaagactagacccccaggtatttggctggcggctgcctggcaccctgccaactgcctcagggcccagtcctgccttgtgcaacctgccccaggcacacagaatccccc

SEQ ID NO: 90667 - DNA, 533 bp, Homo sapiens
tagctgggcgtggtggcgtgcgcctgttgtcccagctactccggaggctgaggcaggagaatcgcttgaacccgggaggcggaggttgcagtgaaccgagatggtgccactgcactccagcctggcgacagagcgagactccgtctcaaaaacaaaaacaaaaataaataaataaaataaaataaaakaaagaaagaaagaaaagaaagtgctcccacaatgccaacagctgttagtcttgtggttaatcactgttcaaggcccgcctctccagtgtgtcagtgaaacactcctcccctgaccccagtgcagcgactttcccggaatatcaaggaatgtgtgggaatgcgttctaagcatcacccacgcactgaatccaggcaatgcatggtaggagctcttgttgcccattttacagataaggagactgaggttcagagaggcaaagcgccttgcggggccgcccagagccggctccagagccttgtttacagggagctgcccagggctgagcctgacttcgtctccctgga

SEQ ID NO: 90668 - DNA, 533 bp, Homo sapiens
tagctgggcgtggtggcgtgcgcctgttgtcccagctactccggaggctgaggcaggagaatcgcttgaacccgggaggcggaggttgcagtgaaccgagatggtgccactgcactccagcctggcgacagagcgagactccgtctcaaaaacaaaaacaaaaataaataaataaaataaaataaaagaaagaaagaaagaaaagaaagtgctcccacaatgccaacagctgttagtcttgtggttaatcactgttcaaggcccgcctctccagtgtgtcagtgaarcactcctcccctgaccccagtgcagcgactttcccggaatatcaaggaatgtgtgggaatgcgttctaagcatcacccacgcactgaatccaggcaatgcatggtaggagctcttgttgcccattttacagataaggagactgaggttcagagaggcaaagcgccttgcggggccgcccagagccggctccagagccttgtttacagggagctgcccagggctgagcctgacttcgtctccctgga

SEQ ID NO: 90669 - DNA, 533 bp, Homo sapiens
tagctgggcgtggtggcgtgcgcctgttgtcccagctactccggaggctgaggcaggagaatcgcttgaacccgggaggcggaggttgcagtgaaccgagatggtgccactgcactccagcctggcgacagagcgagactccgtctcaaaaacaaaaacaaaaataaataaataaaataaaataaaagaaagaaagaaagaaaagaaagtgctcccacaatgccaacagctgttagtcttgtggttaatcactgttcaaggcccgcctctccagtgtgtcagtgaaacactcctcccctgaccccagtgcagcgactttcccggaatatcaaggaatgtgtgggaatgcgttctaagcatcacccacgcactgaatccaggcaatgcatggtaggagctcttgttgcccattttacagataaggaractgaggttcagagaggcaaagcgccttgcggggccgcccagagccggctccagagccttgtttacagggagctgcccagggctgagcctgacttcgtctccctgga

SEQ ID NO: 90670 - DNA, 1273 bp, Homo sapiens
accttctcagcgtcccccttctccctcttttggctctcaaagctagaaaccattgaacatctagacaggctgccagtaaatatccaatggcctatagtaattttttaaagcctcaaaatgattttatctggttcatacttcaaaaaagaaagaaatcactactgatgttaacaaagccctgaccaagcaggattcccttaaccccaaggctttgcatcagtttccttgtgtcctgtgctcctaaagcggcgactagccccactgagggagatgctgtccctacagtgcaccgctaacagcagttggtacaaccaaaacagcagagtagcatagaaagtaatccatcagaagctatgtttttgaccacataagcactgaaaaccaaacttaaaaggtatgggaggagaggaggcattgaatctgaggattccttgaatttagccaaacacatataaatatttcagcagacttcacatgatttcatatatacttaccttcttctctctttctgcataaataataggctcacatctcttcttctcaactcgctttcctttcttttttcctttttttttttttccaagacagagtcttgctctgtcgccaggctggagtgcggtggcgcaatcttggctcactgcaacctctacctcccaggttcaagcaattctcctgcctcagcctcccaagtagctgggattacaggcatccgccaccatgcccagctaatttctgtatttttagtagagatggggtttcaccatgttggccaggctggcctcaactcctgacctcgtgatcgacccgcctcagcctcccaaagtgctgggattacaggcctgagccaccacgcccagcctctctttcctttcttctttgttttgttttgttttgttttgttttttgttttgagacagagtcttactctgtcaccagggtggagtgcagtggcgcaatctcagctcaccgcaacctctgcctcccgggttcaagccattctcctgcctcagcctcccgagtcgctgggacgcccggctaatttttttgtatttttagtagagacgggggtttcaccatgttggtcaggatggtctcagtctcttgacctcgtgatccaccygcctcggcctcccaaagtgttgggattacaggcgtgagccactgcgcctagccctctctttcctttctaatagggcttttcctgctttgattaatcctattttggtttagtttctcagcaggaatgactcacattcccagtgcttggaagaaa

SEQ ID NO: 90671 - DNA, 796 bp, Homo sapiens
  misc_feature (1)...(796): n = A,T,C or G
ttcagacctgaatttaaatcttgattttgccatttagttaactgtgaatttttagcaagtcaatttcatataaccgaaactcaatttccttctctataaattgggggtaataattcctaactcacgaggtggttgtatgaagtaaggagaaaacatatgcaaagtgttgaacacagtacctgggataaagcagatgggccaacagtaagcaactattattataccctaaccttattctactttgtcccccaaatattggaagaatctaatcttcccaattagcaagtcattggaaggcttcccagacttatacgaagcacaatatacactattcaaaaatggaacagactaaaagtannnnnnnnnnnnnnnnnnnnnnnnnnnnnnnnnnnnnnnnnnnnnnnnnnnnnnnnnnnnnnnnnnnnnnnnnnnnnnnnnnnnnnnnnnnnnnnnnnnnacataaagatttcctccaggtatctggaattttcacatcagccacctccccatcctccacctggccctgtatgcccgccttgccccttttacttcagaaagttttagaaaggcatcatcttgtttcacatagacccaaggatgatttctcaaactgaaagaattctcaaatttttatttggaaataaaggaattctggccaaatgcagtggctcatgcctgtaatcccagcactttggaaggccgaggtgggaggattgcttgagcccaggagttagagaccagcctgggcaacgtgacaaaacactgtctctacaaaaaaraaaagcagattagccat

SEQ ID NO: 90672 - DNA, 597 bp, Homo sapiens
tttgcatataataagtaaattaaataaaggcatgggagcaagatagaacctggagtgttagaaaaacaaaagagaatctggcatgtcaggcaccaaagtcaaatgtgagggcatgagatgaccctagaaacagggcaggagccagagcctgaaraatcttgcaggcaagtgtcttaggttgggttcccctagcagcagaccctggcacaggtgatgtacatgaaggacggctgcagttctttgctctttttcccatttcagggggctgtcttattcatgaccctctgaatctgggctggactcagtgacctgctcagccaacagaatttgtagaagtaacattctgggacttctgagactaacttacaagaaaccttgctgcttctacctgggtctcttggaacaccctcactctggtagctttgagccaccatggaagaactctgatgactctaaattggccaagttagagagattacatgcaggctctctgggacgtggtccccgtcaggtccagccttctagttgtctctgcgactctgccaaagtgccagacaatgaacggagctgttgtggattccctcgacttgcccagct

SEQ ID NO: 90673 - DNA, 1496 bp, Homo sapiens
tcttcccatcactgccacagtccccgccctggttttgggcagaggtgagctcaccaccttggagtggttcaaggcaccttatcagcattggtgggcaggaccctcccgcgggcagtagaccctccatggggagagcccgcacctgctgaccctgagaggagacggcattcctagcgcagagctccggatacagccgcacccggggcgttggtgcgtacactggcagagtgacgccaggaaatgtgtcattggcggatggttctgaagaccagcggggtcttctcctgcaaaggtgtttgccactgatcccatggatgaatagaactctgctctgaatgaattgtaactgaatgctgtctgtcattttgccagaaaaggtgctaatatttcagacatttatacaaccctcaatttttgtccttaactaaaagcacggttcttcctagcgccttctttagggacagccacaaaagtgacctgtttgaggcggtcaggagcaggagagtgagcaggcgggaaggaggctggccagaccttgggctgcctctgcctctgcataaggaactctcccgggcgggaccctgagctgtaagatggtgccttcaggccaggacagcacccaggatacagcctcccgaaggcctttcatgccatgtgctatttccatcgggtgtgacgtgttaaagctctacacgtgtgcttagagttactgggggatgagggacccatggtggcagggatgagtcttgcccactctggtctctggaaaccaggcggctatgagtggatgcggggtcaggtggcgtcagcccttagtggtgagcagaggcggcgatgggctttcttcacccagcattggtctgcccggctccccagacgccaaggccctcagggcaggattgtggtgtgcgcctcaacagcagccctgcagcccccaccccgtagctccccccccccaagttcctgatacgtgtggctcccggtacagcccaggctcaggtggcggcgatttggacaccccagtggtagcatggagctgctgcctttttgcgcatcctagctagaagtgaatttctaatttttagtttaactttgagaattaaccgccattaactctaagataaagagatttaagatggctcctcggtggccgctccactggtgtgacagcccgacatttctaggcgttagcatttctcacgaaaccccatgtagaacagggctggcgagggcggcgcctctggaaccagagtcccacctctgccctgacactgcagagttgggcacattgctcacccctcgtggcctcagcgtscccctcaggatgctatcgtctcctctgggcaggctgagccttcaggcccaggcctgcccgacggtacccacccccaggtcagcctctccgcagccagagagccgaacgctcccaagtcaccgcagtgtcgccggccatcgggtggctcctgttgcagcttccggaatgtggggggcactgc

SEQ ID NO: 90674 - DNA, 817 bp, Homo sapiens
tctaggtgaaggtttaaaaaattctccctccccagatattcctaatggaagcaaaaatttggatgataaaaggcagttttggtcatggaaattcttacaaatgtattttttctttggtttatgtgaaccaaaaactgtatggaaagaataacggccttccgaagatgtccacattccaatctctggaaactgtgaatatgttattttgaggtagcagatggaattaagattgctaatcagatgaacttaaaacaggcagattgtccacctgggcgtgatataatcacagagtcctgaaatgtagaagggggaggcagaagagatccgagtgatatgatacgagaagtacttgacccatttgatggttttgaagatggaaaaaggggccatgagccaaggaatatggtcagcttccggaagctagaaagagcaagcagtggaccccccaggcctccagaatggcaygaactcctgctgacaccttgattttagcctggtgagacccatcttgtacctctgatctctagatctgtaggataataatcatgtgctttttaatccacattttgtggtaacttgttacaacagtattttatggtaacttgttacaacagccatagaaaactgacatatagcacaatattttaaatgacatctaacgtaacttcaaattaaggtttgtaatggtgtatttcttcatgaattaagattcatattttataaatcatgaaatgttctgcataaataagtcctttgtatgagttataattaaattatcatatgcaggcttctgacttctatttttaaatttaaaagt

SEQ ID NO: 90675 - DNA, 728 bp, Homo sapiens
tcccacccagaaagggccataggttggctcatttattgggtaaccagtggctgtgaaaacactccattcctagtctgttagctaaaataataattaaatgacatgaagttgcaatttatacggaaagtcttttacagtaaaccctcccataataggaccattcaaaatcctatctgataatctgatttccaaactaaaatagagtctaaaatgaaacactacagtgttactaatttgaactaaatgacaaggggtaaaggccaaactgaattactctgaacttgctatctctttaaaaaagtaaaaatcagtaagagggaattaaagctcaagatggaagagaagattgaaagagacatagttgttttaaatgaattcaagactccaggcccacacaaattatatacagagtcctgaaaaaacctggagatggaattgcaaaaccactttagaaaatgaattaggaagaggttgctgattttcagaaaaactacagaataaaaattagcaaagatttgtgagcacttagaacataatcaaagaaaagctttgattattaagagtcaatatgaatrgtccatctgcacctcaactccgcctttcagcttcaactcattcactccttcctctgcatctcctccttaatccttttttttggtttccctatttctccaactgaaccattatcccctgttatctgggctcaaaccttaacttcttcattctct

SEQ ID NO: 90676 - DNA, 728 bp, Homo sapiens
tcccacccagaaagggccataggttggctcatttattgggtaaccagtggctgtgaaaacactccattcctagtctgttagctaaaataataattaaatgacatgaagttgcaatttatacggaaagtcttttacagtaaaccctcccataataggaccattcaaaatcctatctgataatctgatttccaaactaaaatagagtctaaaatgaaacactacagtgttactaatttgaactaaatgacaaggggtaaaggccaaactgaattactctgaacttgctatctctttaaaaaagtaaaaatcagtaagagggaattaaagctcaagatggaagagaagattgaaagagacatagttgttttaaatgaattcaagactccaggcccacacaaattatatacagagtcctgaaaaaacctggagatggaattgcaaaaccactttagaaaatgaattaggaagaggttgctgattttcagaaaaactacagaataaaaattagcaaagatttgtgagcacttagaacataatcaaagaaaagctttgattattaagagtcaatatgaatagtccatctgcacctcaactccgcctttcagcttcaactcattcactccttcctctgcatctcctccttaatccttttttttggtttccctatttctccaactgaaccattatcccctgttatctgggctcaaaccttaacttcttcrttctct

SEQ ID NO: 90677 - DNA, 1199 bp, Homo sapiens
ggaattaagacaaaacaagggaatgaagaatttattatttctttccaccagccaactcactggtttctgttgccaagaatatacctttaatttataagaccaacacaattctagttatatattattttaaatttaatttagagataataccatgtctttggaattaaattatttattttgaggtaagtaaataaacatgagaaaagtagaaattttagagggtctcttaatgcaaacaaatttcatcgcctgtgatgtggttaacacatacgggcattgaataaaacttggcttgactgaattatattgatttttaatacatgccttctaaacataaagtactgtgctataataagaggtatattatgattttcagcaaaatactttacagaaaagatctgtaagaagcaagataagctaaattgcccccccccattattatatgacaatggcattgtcaggatacagtttaaaatctaagaccaccccacacttgtgttatctgcagacaagctgaaggcwcaaaccctcaaattaaaaaagacatgagaaacctgaagtcatgctgaaggaatcctcttcttgttttatcattccaaaggaaaaatgtccccataaagcctaccattcacaaaatatctataaggaatatactctaattatgttgacacttatcttcatgtaattgtttgcctgttagcatgaagcttttggacatgaatatttctttctaatattcaaacaactggctttaggaacaaaagaatgaatatgtctagaaattatcagctacttagcttcaaatagcaattcacatgaagacagcaacttgaagacaaataaacttttttcagaattaattttagggctcaccctctactcagttgttactgaacatgggtaagtgttaggttttagtctttacatacacatataaatttacttaggaaatgtgagcaaaaatatattaaataagatagaggttatttgttcaaataacatattcagaaaatataaatgttaaggtcatttttagcaatgttaacacattattcactgctttttcaccaaagtcgttatcagaatgtaaaaactgttaaaacatactgtatgtgtggaatgtgatgaaattgccactccattaacagaaaaataaaaccaggagagagagagagaaaaaaaaaaaggagaacagaaac

SEQ ID NO: 90678 - DNA, 625 bp, Homo sapiens
gcagacaccttaaacttgtgcctaaaaatagctcctctctccccagacctgcttctcccccaccttcccctcggtgacgtagcagcgcctcagcctggttttcagccgagacccagagaccaccccaccctccacaccccaaccagaagtacttcccacactgaaagcccagcctgtccgtccaacccagggtcttgcagccctctccaggccatccctgtgcccagcggggaccacacaggtgccttccctcagtgagatctggggggtcctggggcccgagcccaggaacagggaggaggtgkcccctgccccacgctccccttgaagccctcctgctcttctggggttcccggaggtcagtcccctcagcatatccggaaagtggccgctttcagtggcagggctctcggtgaggagtgaccatgaccgtggctgattcctggtggccaccgatcacctggtgacgagcctgtccacagccatcgtccatcgtcaccaatgggcagctgctgaccactgcccagaatgtgcagctgccagaggccctcaggggaggaagctgttcctgaccccttagagagtcctcacccaccccaggggctcagtaactttgggggtcaga

SEQ ID NO: 90679 - DNA, 607 bp, Homo sapiens
tctggagctcgggtctgggcccagcctccgggaggcagtggagccgacctcaggcctttgctcagcagtcggacctgccagccagggacacggggctctctggtagcatgtggccaccccacaagctcttaccccctaccctgtgcccagcacacgtgagggtcacagacaccccgatctctgccttctctaacacccgtgttcttcatcgacacgcctgctgcacccataggcatgtcacacgcttagcaacacatgcagctgtcctgaacacacatgccccrcacccacacgtatgcacagagacccccggagcaggaggcagcagagatgacgaacacgggttctgggctggtgccccctttgtccttcactagctgtgtgaccttggaaaagcctgtcctctaaatcctccgtccacttcctcatctgttcagcagggttaacagcggccactgcgtgagggtgtcctgaggggtggaagtgcatgcgtgcgtgcgcgggggctgtgtgtacgcacatgtatatgcacagacgccacacacatgcgcgtctcatgagaagatgtttatttcgtacatggacgtacaaacatgcatggccaaga

SEQ ID NO: 90680 - DNA, 607 bp, Homo sapiens
tctggagctcgggtctgggcccagcctccgggaggcagtggagccgacctcaggcctttgctcagcagtcggacctgccagccagggacacggggctctctggtagcatgtggccaccccacaagctcttaccccctaccctgtgcccagcacacgtgagggtcacagacaccccgatctctgccttctctaacacccgtgttcttcatcgacacgcctgctgcacccataggcatgtcacacgcttagcaacacatgcagctgtcctgaacacacatgccccacacccacacgtatgcacagagacccccggagcaggaggcagcagagatgacgaacacgggttctgggctggtgccccctttgtccttcactagctgtgtgaccttggaaaagcctgtcctctaaatcctccgtccamttcctcatctgttcagcagggttaacagcggccactgcgtgagggtgtcctgaggggtggaagtgcatgcgtgcgtgcgcgggggctgtgtgtacgcacatgtatatgcacagacgccacacacatgcgcgtctcatgagaagatgtttatttcgtacatggacgtacaaacatgcatggccaaga

SEQ ID NO: 90681 - DNA, 1099 bp, Homo sapiens
aatttttaagatctgtgtggtaattagacatataatcatagttataattattattttatactgaaaaactttccaaaagacatttagggtatcatggccaaagcgagtcactgttttatttaaaactacagtcagttcaaccacaagcttttctgagtgtctattgtagtggatatatgtgcttttctttgtcaacttccccatcagtaaaagcaccctaattttattttggggttccactttctccctgccctcagtaatttggttaggttaagactcaccctcctcatatcccccattttccaggtttacttggaaaatagtttccaggtttaccattttcccatttacttgggcagtcatcatattccaactctctggccacacgactggtgcggggatgggcctgtaacccatgtaagtcaatgaataagacccagcttggtagttattaagatataggttgattgcttaaaattgtaagagtggaagagtaagaaggaaagtcaaagagaaaacagttgagccggaaagaaaacggagtcattcaaatcattattcgtaaagagtttcaagaagtggcgtatcaatattctcaacttaatagttgggcaatatttatgtttttgaaactaacaactaaaatacttggataaaatatttctcctgatttaagtaactataatttcagtcatgattcattgttcccagcaggatctgtatctgtgtaagtgggcatagtattgattttttttcaaaagagaagataggtgatctcattaatttccttttcacatcaaagctttccttttagggttttttttttttccttctctcaaaaaaaatactgaatgagtcagggtgctaatctgctttgctctagtaaattctatcttctcattgtagagatgtttttcaccgtagtaataatttgcttagctgcttggtatttactcatgtattcattcacagttctttatcaggcttcaggtatgtacccratattgtgccaggtgaaatgagattcaaaggtgtctcctagcctagaatgtaaattctataaggaccttctcactcggagcacagtattggcacatta

SEQ ID NO: 90682 - DNA, 3270 bp, Homo sapiens
atgtcaaaaaagctacatatatgtgtttgtgtgtctatgtgcatgtgtgtgtgtatgtgtaaataagtaactacagtagttttctctggtggaaaggtaggagtatgggcatgcaaagtgtatatgggtagatgaaagtcatgttaatattttttagttcttgagttggttgattggttcaccaatgtttattatttatttttctaaatctattatagatatacacacacattgtaaatatatcaaatataattttatgttttttaaaatatttaaatatttgtatattggaacaaaaaataacaaagggaaaaggaactgcaaaatgctcatagcactgttttgctttctttaaaaataaggttgggtttattagtgatgtggaacaattgtttatcagcttcctttcaaaattctcagagatcttttggtcattgagtaatcccaaattctgtggtttgtaatatattctatttagagttttgatctttcaaacttctttaagaagtctcagtacatctttgaaatccaagtgttttatttttagtgtttcactttgctctttttattagctgaaatgaccttcttgaattattgtggcatacaggaaagaggaagaaggaaaaagtcatctgaagaagtgttctttctaagcggttcatctattccacgtccttacaaataattcaactgtgtttattctcaaccaaaactctgctattattctaatgatggacagcctgttctttacagttctatcatatttcctgatccgtgccaattgcctagatggagctatgaatgtggtcacagtgataggtggctgtgagggttttgtgagaggcattttcttctgcagggcagatgaagtgcttggaatggaggattaaaaaaatagtaaagctcatttccattgcattatgtattttgatgtatttctaatgtattccttttcaaaacttatcttcactggagtagaggtaaagacagaatgagcaacagttgctgtttcatgcacatcaagtagccatttttaaaactcttaaaaatgcagcaaagcaatttaaaaagagcaagtggcatggttgctttttttaaaaaaatgtgttttctctgtagctacatttaccagactcaagatatgcaaatgaaacaatatatgaatttggctataccaattttctttcaaaactgtctaatacaaagatattaaatccatctatttatgcattaaatccagatttcttaatacagagccagtacttcttttgaagtaattcaacaggattgcattttgtatcaagatatatttcagatgttgaaaagattccattttcaacaatactttggatcaacaatagttttattaatcattagtcaaacatgttttcttcccttaaagtcctctccttggctttctgtagtacctgagaaatttccaagtaagtgagaatttgccttgcctattgaagtcaaattattttatgtgtttgaattacaaattgaaggaggctatggttttattgactcacttttgtgttcaaatgcaaaagtttttgaaatcattctgtgctcatagtctgtcattgctccttctgagtccccttctcctcttttgaagtcattgttgtataaagatgaaaaaaagacatgtcctattagctaaatcaatattgatattcaagaaaaaggtctaaaataatttctaaagagctattctcacataaaaataaatcatctttggtaacgtattttttaaaagagtttggcttttacgtttatgcaagactgacttcttgctaagcctttactccaagacatttcacaatggaggtccccagtgtttgtccttgtcattttataggattaatttgatacattgtcattcacctaactgccttgtacctcttgttagtacacaatccctaactaagcctgagtatttgttcttcaaactttctaaaatgactcttccgttcactctcaggatgtatcatttatcataccttcaatggctggagaaaacatactctctttatgggcttttaaarctctgaaaaatcatttgttaaaggagaggtttcaaagaaagtattgtctttctggcttaaagtttatgctttttcatcacataccataaagggagcacatttataatcatattttttaaagaaggtaaaggaatggaattttaatctgaatgcttagagggaagatgagaggcagcaagaagacaaaagcaaaatgggaaagccaaagcagtaagaaaggaaagaaacctcagagatgaatcgtagcaaagaaatatgtttatcattactctcagaatatatagatttttaactaaaatattaagtcctctgaaatgttccaaaaacatgaaaatctgaaattgattcttactcttgaattcaaggattagcatttcatgagcttctgccccctcttggtgaatctttccttactaacattagttatcaagacacttggcattttttcacagcatgcatgagtcacaacacagacacccttatcctcaaaataaatggatattgaactttgaataaaacatgcctcttctatcttaatctcaaatttctgagtgtgctcctctctcttagtctgttgtcagattgccttcaagtgatagtttattcttttatgcattccaggttgaagaagggtgaaccaaggatttctttgggaaacgtctgtccagaaatgggaaaggattgggaaagatgcactgagattcttatagggccccaagtcacttctattaggctaaatttctaagagatgctaggttcttagaaatttcacaaaaatacttgtctgatggtaatacaattaaatgttctaaagtaaaatgattttcacttcactgaaacacgtcaatcagaaagcttatttcaaaaaagggaactatcttagttaagtaagaaaatgctccatttcattttgattgtttactggctataataacattcacaagtcttacatatctgctatctttttcctacccaaggagctgctactttgtaaggtgtggagaatgggtatttttattccattatatggattagaaaactaaaactgggaatcacttgttatgtcacaaagaaaaattggtagaatttcagtaagaactatagtctcctgatttttcatccaagacaattttatttatccatacagtgtcattgattgagtgcctgttatgtaccaagtattattctgggtcctatgaataacactgtcctgcctttt

SEQ ID NO: 90683 - DNA, 3270 bp, Homo sapiens
atgtcaaaaaagctacatatatgtgtttgtgtgtctatgtgcatgtgtgtgtgtatgtgtaaataagtaactacagtagttttctctggtggaaaggtaggagtatgggcatgcaaagtgtatatgggtagatgaaagtcatgttaatattttttagttcttgagttggttgattggttcaccaatgtttattatttatttttctaaatctattatagatatacacacacattgtaaatatatcaaatataattttatgttttttaaaatatttaaatatttgtatattggaacaaaaaataacaaagggaaaaggaactgcaaaatgctcatagcactgttttgctttctttaaaaataaggttgggtttattagtgatgtggaacaattgtttatcagcttcctttcaaaattctcagagatcttttggtcattgagtaatcccaaattctgtggtttgtaatatattctatttagagttttgatctttcaaacttctttaagaagtctcagtacatctttgaaatccaagtgttttatttttagtgtttcactttgctctttttattagctgaaatgaccttcttgaattattgtggcatacaggaaagaggaagaaggaaaaagtcatctgaagaagtgttctttctaagcggttcatctattccacgtccttacaaataattcaactgtgtttattctcaaccaaaactctgctattattctaatgatggacagcctgttctttacagttctatcatatttcctgatccgtgccaattgcctagatggagctatgaatgtggtcacagtgataggtggctgtgagggttttgtgagaggcattttcttctgcagggcagatgaagtgcttggaatggaggattaaaaaaatagtaaagctcatttccattgcattatgtattttgatgtatttctaatgtattccttttcaaaacttatcttcactggagtagaggtaaagacagaatgagcaacagttgctgtttcatgcacatcaagtagccatttttaaaactcttaaaaatgcagcaaagcaatttaaaaagagcaagtggcatggttgctttttttaaaaaaatgtgttttctctgtagctacatttaccagactcaagatatgcaaatgaaacaatatatgaatttggctataccaattttctttcaaaactgtctaatacaaagatattaaatccatctatttatgcattaaatccagatttcttaatacagagccagtacttcttttgaagtaattcaacaggattgcattttgtatcaagatatatttcagatgttgaaaagattccattttcaacaatactttggatcaacaatagttttattaatcattagtcaaacatgttttcttcccttaaagtcctctccttggctttctgtagtacctgagaaatttccaagtaagtgagaatttgccttgcctattgaagtcaaattattttatgtgtttgaattacaaattgaaggaggctatggttttattgactcacttttgtgttcaaatgcaaaagtttttgaaatcattctgtgctcatagtctgtcattgctccttctgagtccccttctcctcttttgaagtcattgttgtataaagatgaaaaaaagacatgtcctattagctaaatcaatattgatattcaagaaaaaggtctaaaataatttctaaagagctattctcacataaaaataaatcatctttggtaacgtattttttaaaagagtttggcttttacgtttatgcaagactgacttcttgctaagcctttactccaagacatttcacaatggaggtccccagtgtttgtccttgtcattttataggattaatttgatacattgtcattcacctaactgccttgtacctcttgttagtacacaatccctaactaagcctgagtatttgttcttcaaactttctaaaatgactcttccgttcactctcaggatgtatcatttatcataccttcaatggctggagaaaacatactctctttatgggcttttaaagctctgaaaaatcatttgttaaaggagrggtttcaaagaaagtattgtctttctggcttaaagtttatgctttttcatcacataccataaagggagcacatttataatcatattttttaaagaaggtaaaggaatggaattttaatctgaatgcttagagggaagatgagaggcagcaagaagacaaaagcaaaatgggaaagccaaagcagtaagaaaggaaagaaacctcagagatgaatcgtagcaaagaaatatgtttatcattactctcagaatatatagatttttaactaaaatattaagtcctctgaaatgttccaaaaacatgaaaatctgaaattgattcttactcttgaattcaaggattagcatttcatgagcttctgccccctcttggtgaatctttccttactaacattagttatcaagacacttggcattttttcacagcatgcatgagtcacaacacagacacccttatcctcaaaataaatggatattgaactttgaataaaacatgcctcttctatcttaatctcaaatttctgagtgtgctcctctctcttagtctgttgtcagattgccttcaagtgatagtttattcttttatgcattccaggttgaagaagggtgaaccaaggatttctttgggaaacgtctgtccagaaatgggaaaggattgggaaagatgcactgagattcttatagggccccaagtcacttctattaggctaaatttctaagagatgctaggttcttagaaatttcacaaaaatacttgtctgatggtaatacaattaaatgttctaaagtaaaatgattttcacttcactgaaacacgtcaatcagaaagcttatttcaaaaaagggaactatcttagttaagtaagaaaatgctccatttcattttgattgtttactggctataataacattcacaagtcttacatatctgctatctttttcctacccaaggagctgctactttgtaaggtgtggagaatgggtatttttattccattatatggattagaaaactaaaactgggaatcacttgttatgtcacaaagaaaaattggtagaatttcagtaagaactatagtctcctgatttttcatccaagacaattttatttatccatacagtgtcattgattgagtgcctgttatgtaccaagtattattctgggtcctatgaataacactgtcctgcctttt

SEQ ID NO: 90684 - DNA, 3270 bp, Homo sapiens
atgtcaaaaaagctacatatatgtgtttgtgtgtctatgtgcatgtgtgtgtgtatgtgtaaataagtaactacagtagttttctctggtggaaaggtaggagtatgggcatgcaaagtgtatatgggtagatgaaagtcatgttaatattttttagttcttgagttggttgattggttcaccaatgtttattatttatttttctaaatctattatagatatacacacacattgtaaatatatcaaatataattttatgttttttaaaatatttaaatatttgtatattggaacaaaaaataacaaagggaaaaggaactgcaaaatgctcatagcactgttttgctttctttaaaaataaggttgggtttattagtgatgtggaacaattgtttatcagcttcctttcaaaattctcagagatcttttggtcattgagtaatcccaaattctgtggtttgtaatatattctatttagagttttgatctttcaaacttctttaagaagtctcagtacatctttgaaatccaagtgttttatttttagtgtttcactttgctctttttattagctgaaatgaccttcttgaattattgtggcatacaggaaagaggaagaaggaaaaagtcatctgaagaagtgttctttctaagcggttcatctattccacgtccttacaaataattcaactgtgtttattctcaaccaaaactctgctattattctaatgatggacagcctgttctttacagttctatcatatttcctgatccgtgccaattgcctagatggagctatgaatgtggtcacagtgataggtggctgtgagggttttgtgagaggcattttcttctgcagggcagatgaagtgcttggaatggaggattaaaaaaatagtaaagctcatttccattgcattatgtattttgatgtatttctaatgtattccttttcaaaacttatcttcactggagtagaggtaaagacagaatgagcaacagttgctgtttcatgcacatcaagtagccatttttaaaactcttaaaaatgcagcaaagcaatttaaaaagagcaagtggcatggttgctttttttaaaaaaatgtgttttctctgtagctacatttaccagactcaagatatgcaaatgaaacaatatatgaatttggctataccaattttctttcaaaactgtctaatacaaagatattaaatccatctatttatgcattaaatccagatttcttaatacagagccagtacttcttttgaagtaattcaacaggattgcattttgtatcaagatatatttcagatgttgaaaagattccattttcaacaatactttggatcaacaatagttttattaatcattagtcaaacatgttttcttcccttaaagtcctctccttggctttctgtagtacctgagaaatttccaagtaagtgagaatttgccttgcctattgaagtcaaattattttatgtgtttgaattacaaattgaaggaggctatggttttattgactcacttttgtgttcaaatgcaaaagtttttgaaatcattctgtgctcatagtctgtcattgctccttctgagtccccttctcctcttttgaagtcattgttgtataaagatgaaaaaaagacatgtcctattagctaaatcaatattgatattcaagaaaaaggtctaaaataatttctaaagagctattctcacataaaaataaatcatctttggtaacgtattttttaaaagagtttggcttttacgtttatgcaagactgacttcttgctaagcctttactccaagacatttcacaatggaggtccccagtgtttgtccttgtcattttataggattaatttgatacattgtcattcacctaactgccttgtacctcttgttagtacacaatccctaactaagcctgagtatttgttcttcaaactttctaaaatgactcttccgttcactctcaggatgtatcatttatcataccttcaatggctggagaaaacatactctctttatgggcttttaaagctctgaaaaatcatttgttaaaggagaggtttcaaagaaagtattgtctttctggcttaaagtttatgctttttcatcacataccataaagggagcacatttataatcatattttttaaagaaggtaaaggamtggaattttaatctgaatgcttagagggaagatgagaggcagcaagaagacaaaagcaaaatgggaaagccaaagcagtaagaaaggaaagaaacctcagagatgaatcgtagcaaagaaatatgtttatcattactctcagaatatatagatttttaactaaaatattaagtcctctgaaatgttccaaaaacatgaaaatctgaaattgattcttactcttgaattcaaggattagcatttcatgagcttctgccccctcttggtgaatctttccttactaacattagttatcaagacacttggcattttttcacagcatgcatgagtcacaacacagacacccttatcctcaaaataaatggatattgaactttgaataaaacatgcctcttctatcttaatctcaaatttctgagtgtgctcctctctcttagtctgttgtcagattgccttcaagtgatagtttattcttttatgcattccaggttgaagaagggtgaaccaaggatttctttgggaaacgtctgtccagaaatgggaaaggattgggaaagatgcactgagattcttatagggccccaagtcacttctattaggctaaatttctaagagatgctaggttcttagaaatttcacaaaaatacttgtctgatggtaatacaattaaatgttctaaagtaaaatgattttcacttcactgaaacacgtcaatcagaaagcttatttcaaaaaagggaactatcttagttaagtaagaaaatgctccatttcattttgattgtttactggctataataacattcacaagtcttacatatctgctatctttttcctacccaaggagctgctactttgtaaggtgtggagaatgggtatttttattccattatatggattagaaaactaaaactgggaatcacttgttatgtcacaaagaaaaattggtagaatttcagtaagaactatagtctcctgatttttcatccaagacaattttatttatccatacagtgtcattgattgagtgcctgttatgtaccaagtattattctgggtcctatgaataacactgtcctgcctttt

SEQ ID NO: 90685 - DNA, 3270 bp, Homo sapiens
atgtcaaaaaagctacatatatgtgtttgtgtgtctatgtgcatgtgtgtgtgtatgtgtaaataagtaactacagtagttttctctggtggaaaggtaggagtatgggcatgcaaagtgtatatgggtagatgaaagtcatgttaatattttttagttcttgagttggttgattggttcaccaatgtttattatttatttttctaaatctattatagatatacacacacattgtaaatatatcaaatataattttatgttttttaaaatatttaaatatttgtatattggaacaaaaaataacaaagggaaaaggaactgcaaaatgctcatagcactgttttgctttctttaaaaataaggttgggtttattagtgatgtggaacaattgtttatcagcttcctttcaaaattctcagagatcttttggtcattgagtaatcccaaattctgtggtttgtaatatattctatttagagttttgatctttcaaacttytttaagaagtctcagtacatctttgaaatccaagtgttttatttttagtgtttcactttgctctttttattagctgaaatgaccttcttgaattattgtggcatacaggaaagaggaagaaggaaaaagtcatctgaagaagtgttctttctaagcggttcatctattccacgtccttacaaataattcaactgtgtttattctcaaccaaaactctgctattattctaatgatggacagcctgttctttacagttctatcatatttcctgatccgtgccaattgcctagatggagctatgaatgtggtcacagtgataggtggctgtgagggttttgtgagaggcattttcttctgcagggcagatgaagtgcttggaatggaggattaaaaaaatagtaaagctcatttccattgcattatgtattttgatgtatttctaatgtattccttttcaaaacttatcttcactggagtagaggtaaagacagaatgagcaacagttgctgtttcatgcacatcaagtagccatttttaaaactcttaaaaatgcagcaaagcaatttaaaaagagcaagtggcatggttgctttttttaaaaaaatgtgttttctctgtagctacatttaccagactcaagatatgcaaatgaaacaatatatgaatttggctataccaattttctttcaaaactgtctaatacaaagatattaaatccatctatttatgcattaaatccagatttcttaatacagagccagtacttcttttgaagtaattcaacaggattgcattttgtatcaagatatatttcagatgttgaaaagattccattttcaacaatactttggatcaacaatagttttattaatcattagtcaaacatgttttcttcccttaaagtcctctccttggctttctgtagtacctgagaaatttccaagtaagtgagaatttgccttgcctattgaagtcaaattattttatgtgtttgaattacaaattgaaggaggctatggttttattgactcacttttgtgttcaaatgcaaaagtttttgaaatcattctgtgctcatagtctgtcattgctccttctgagtccccttctcctcttttgaagtcattgttgtataaagatgaaaaaaagacatgtcctattagctaaatcaatattgatattcaagaaaaaggtctaaaataatttctaaagagctattctcacataaaaataaatcatctttggtaacgtattttttaaaagagtttggcttttacgtttatgcaagactgacttcttgctaagcctttactccaagacatttcacaatggaggtccccagtgtttgtccttgtcattttataggattaatttgatacattgtcattcacctaactgccttgtacctcttgttagtacacaatccctaactaagcctgagtatttgttcttcaaactttctaaaatgactcttccgttcactctcaggatgtatcatttatcataccttcaatggctggagaaaacatactctctttatgggcttttaaagctctgaaaaatcatttgttaaaggagaggtttcaaagaaagtattgtctttctggcttaaagtttatgctttttcatcacataccataaagggagcacatttataatcatattttttaaagaaggtaaaggaatggaattttaatctgaatgcttagagggaagatgagaggcagcaagaagacaaaagcaaaatgggaaagccaaagcagtaagaaaggaaagaaacctcagagatgaatcgtagcaaagaaatatgtttatcattactctcagaatatatagatttttaactaaaatattaagtcctctgaaatgttccaaaaacatgaaaatctgaaattgattcttactcttgaattcaaggattagcatttcatgagcttctgccccctcttggtgaatctttccttactaacattagttatcaagacacttggcattttttcacagcatgcatgagtcacaacacagacacccttatcctcaaaataaatggatattgaactttgaataaaacatgcctcttctatcttaatctcaaatttctgagtgtgctcctctctcttagtctgttgtcagattgccttcaagtgatagtttattcttttatgcattccaggttgaagaagggtgaaccaaggatttctttgggaaacgtctgtccagaaatgggaaaggattgggaaagatgcactgagattcttatagggccccaagtcacttctattaggctaaatttctaagagatgctaggttcttagaaatttcacaaaaatacttgtctgatggtaatacaattaaatgttctaaagtaaaatgattttcacttcactgaaacacgtcaatcagaaagcttatttcaaaaaagggaactatcttagttaagtaagaaaatgctccatttcattttgattgtttactggctataataacattcacaagtcttacatatctgctatctttttcctacccaaggagctgctactttgtaaggtgtggagaatgggtatttttattccattatatggattagaaaactaaaactgggaatcacttgttatgtcacaaagaaaaattggtagaatttcagtaagaactatagtctcctgatttttcatccaagacaattttatttatccatacagtgtcattgattgagtgcctgttatgtaccaagtattattctgggtcctatgaataacactgtcctgcctttt

SEQ ID NO: 90686 - DNA, 3270 bp, Homo sapiens
atgtcaaaaaagctacatatatgtgtttgtgtgtctatgtgcatgtgtgtgtgtatgtgtaaataagtaactacagtagttttctctggtggaaaggtaggagtatgggcatgcaaagtgtatatgggtagatgaaagtcatgttaatattttttagttcttgagttggttgattggttcaccaatgtttattatttatttttctaaatctattatagatatacacacacattgtaaatatatcaaatataattttatgttttttaaaatatttaaatatttgtatattggaacaaaaaataacaaagggaaaaggaactgcaaaatgctcatagcactgttttgctttctttaaaaataaggttgggtttattagtgatgtggaacaattgtttatcagcttcctttcaaaattctcagagatcttttggtcattgagtaatcccaaattctgtggtttgtaatatattctatttagagttttgatctttcaaacttcyttaagaagtctcagtacatctttgaaatccaagtgttttatttttagtgtttcactttgctctttttattagctgaaatgaccttcttgaattattgtggcatacaggaaagaggaagaaggaaaaagtcatctgaagaagtgttctttctaagcggttcatctattccacgtccttacaaataattcaactgtgtttattctcaaccaaaactctgctattattctaatgatggacagcctgttctttacagttctatcatatttcctgatccgtgccaattgcctagatggagctatgaatgtggtcacagtgataggtggctgtgagggttttgtgagaggcattttcttctgcagggcagatgaagtgcttggaatggaggattaaaaaaatagtaaagctcatttccattgcattatgtattttgatgtatttctaatgtattccttttcaaaacttatcttcactggagtagaggtaaagacagaatgagcaacagttgctgtttcatgcacatcaagtagccatttttaaaactcttaaaaatgcagcaaagcaatttaaaaagagcaagtggcatggttgctttttttaaaaaaatgtgttttctctgtagctacatttaccagactcaagatatgcaaatgaaacaatatatgaatttggctataccaattttctttcaaaactgtctaatacaaagatattaaatccatctatttatgcattaaatccagatttcttaatacagagccagtacttcttttgaagtaattcaacaggattgcattttgtatcaagatatatttcagatgttgaaaagattccattttcaacaatactttggatcaacaatagttttattaatcattagtcaaacatgttttcttcccttaaagtcctctccttggctttctgtagtacctgagaaatttccaagtaagtgagaatttgccttgcctattgaagtcaaattattttatgtgtttgaattacaaattgaaggaggctatggttttattgactcacttttgtgttcaaatgcaaaagtttttgaaatcattctgtgctcatagtctgtcattgctccttctgagtccccttctcctcttttgaagtcattgttgtataaagatgaaaaaaagacatgtcctattagctaaatcaatattgatattcaagaaaaaggtctaaaataatttctaaagagctattctcacataaaaataaatcatctttggtaacgtattttttaaaagagtttggcttttacgtttatgcaagactgacttcttgctaagcctttactccaagacatttcacaatggaggtccccagtgtttgtccttgtcattttataggattaatttgatacattgtcattcacctaactgccttgtacctcttgttagtacacaatccctaactaagcctgagtatttgttcttcaaactttctaaaatgactcttccgttcactctcaggatgtatcatttatcataccttcaatggctggagaaaacatactctctttatgggcttttaaagctctgaaaaatcatttgttaaaggagaggtttcaaagaaagtattgtctttctggcttaaagtttatgctttttcatcacataccataaagggagcacatttataatcatattttttaaagaaggtaaaggaatggaattttaatctgaatgcttagagggaagatgagaggcagcaagaagacaaaagcaaaatgggaaagccaaagcagtaagaaaggaaagaaacctcagagatgaatcgtagcaaagaaatatgtttatcattactctcagaatatatagatttttaactaaaatattaagtcctctgaaatgttccaaaaacatgaaaatctgaaattgattcttactcttgaattcaaggattagcatttcatgagcttctgccccctcttggtgaatctttccttactaacattagttatcaagacacttggcattttttcacagcatgcatgagtcacaacacagacacccttatcctcaaaataaatggatattgaactttgaataaaacatgcctcttctatcttaatctcaaatttctgagtgtgctcctctctcttagtctgttgtcagattgccttcaagtgatagtttattcttttatgcattccaggttgaagaagggtgaaccaaggatttctttgggaaacgtctgtccagaaatgggaaaggattgggaaagatgcactgagattcttatagggccccaagtcacttctattaggctaaatttctaagagatgctaggttcttagaaatttcacaaaaatacttgtctgatggtaatacaattaaatgttctaaagtaaaatgattttcacttcactgaaacacgtcaatcagaaagcttatttcaaaaaagggaactatcttagttaagtaagaaaatgctccatttcattttgattgtttactggctataataacattcacaagtcttacatatctgctatctttttcctacccaaggagctgctactttgtaaggtgtggagaatgggtatttttattccattatatggattagaaaactaaaactgggaatcacttgttatgtcacaaagaaaaattggtagaatttcagtaagaactatagtctcctgatttttcatccaagacaattttatttatccatacagtgtcattgattgagtgcctgttatgtaccaagtattattctgggtcctatgaataacactgtcctgcctttt

SEQ ID NO: 90687 - DNA, 3270 bp, Homo sapiens
atgtcaaaaaagctacatatatgtgtttgtgtgtctatgtgcatgtgtgtgtgtatgtgtaaataagtaactacagtagttttctctggtggaaaggtaggagtatgggcatgcaaagtgtatatgggtagatgaaagtcatgttaatattttttagttcttgagttggttgattggttcaccaatgtttattatttatttttctaaatctattatagatatacacacacattgtaaatatatcaaatataattttatgttttttaaaatatttaaatatttgtatattggaacaaaaaataacaaagggaaaaggaactgcaaaatgctcatagcactgttttgctttctttaaaaataaggttgggtttattagtgatgtggaacaattgtttatcagcttcctttcaaaattctcagagatcttttggtcattgagtaatcccaaattctgtggtttgtaatatattctatttagagttttgatctttcaaacttctttaagaagtctcagtacatctttgaaatccaagtgttttatttttagtgtttcactttgctctttttattagctgaaatgaccttcttgaattattgtggcatacaggaaagaggaagaaggaaaaagtcatctgaagaagtsttctttctaagcggttcatctattccacgtccttacaaataattcaactgtgtttattctcaaccaaaactctgctattattctaatgatggacagcctgttctttacagttctatcatatttcctgatccgtgccaattgcctagatggagctatgaatgtggtcacagtgataggtggctgtgagggttttgtgagaggcattttcttctgcagggcagatgaagtgcttggaatggaggattaaaaaaatagtaaagctcatttccattgcattatgtattttgatgtatttctaatgtattccttttcaaaacttatcttcactggagtagaggtaaagacagaatgagcaacagttgctgtttcatgcacatcaagtagccatttttaaaactcttaaaaatgcagcaaagcaatttaaaaagagcaagtggcatggttgctttttttaaaaaaatgtgttttctctgtagctacatttaccagactcaagatatgcaaatgaaacaatatatgaatttggctataccaattttctttcaaaactgtctaatacaaagatattaaatccatctatttatgcattaaatccagatttcttaatacagagccagtacttcttttgaagtaattcaacaggattgcattttgtatcaagatatatttcagatgttgaaaagattccattttcaacaatactttggatcaacaatagttttattaatcattagtcaaacatgttttcttcccttaaagtcctctccttggctttctgtagtacctgagaaatttccaagtaagtgagaatttgccttgcctattgaagtcaaattattttatgtgtttgaattacaaattgaaggaggctatggttttattgactcacttttgtgttcaaatgcaaaagtttttgaaatcattctgtgctcatagtctgtcattgctccttctgagtccccttctcctcttttgaagtcattgttgtataaagatgaaaaaaagacatgtcctattagctaaatcaatattgatattcaagaaaaaggtctaaaataatttctaaagagctattctcacataaaaataaatcatctttggtaacgtattttttaaaagagtttggcttttacgtttatgcaagactgacttcttgctaagcctttactccaagacatttcacaatggaggtccccagtgtttgtccttgtcattttataggattaatttgatacattgtcattcacctaactgccttgtacctcttgttagtacacaatccctaactaagcctgagtatttgttcttcaaactttctaaaatgactcttccgttcactctcaggatgtatcatttatcataccttcaatggctggagaaaacatactctctttatgggcttttaaagctctgaaaaatcatttgttaaaggagaggtttcaaagaaagtattgtctttctggcttaaagtttatgctttttcatcacataccataaagggagcacatttataatcatattttttaaagaaggtaaaggaatggaattttaatctgaatgcttagagggaagatgagaggcagcaagaagacaaaagcaaaatgggaaagccaaagcagtaagaaaggaaagaaacctcagagatgaatcgtagcaaagaaatatgtttatcattactctcagaatatatagatttttaactaaaatattaagtcctctgaaatgttccaaaaacatgaaaatctgaaattgattcttactcttgaattcaaggattagcatttcatgagcttctgccccctcttggtgaatctttccttactaacattagttatcaagacacttggcattttttcacagcatgcatgagtcacaacacagacacccttatcctcaaaataaatggatattgaactttgaataaaacatgcctcttctatcttaatctcaaatttctgagtgtgctcctctctcttagtctgttgtcagattgccttcaagtgatagtttattcttttatgcattccaggttgaagaagggtgaaccaaggatttctttgggaaacgtctgtccagaaatgggaaaggattgggaaagatgcactgagattcttatagggccccaagtcacttctattaggctaaatttctaagagatgctaggttcttagaaatttcacaaaaatacttgtctgatggtaatacaattaaatgttctaaagtaaaatgattttcacttcactgaaacacgtcaatcagaaagcttatttcaaaaaagggaactatcttagttaagtaagaaaatgctccatttcattttgattgtttactggctataataacattcacaagtcttacatatctgctatctttttcctacccaaggagctgctactttgtaaggtgtggagaatgggtatttttattccattatatggattagaaaactaaaactgggaatcacttgttatgtcacaaagaaaaattggtagaatttcagtaagaactatagtctcctgatttttcatccaagacaattttatttatccatacagtgtcattgattgagtgcctgttatgtaccaagtattattctgggtcctatgaataacactgtcctgcctttt

SEQ ID NO: 90688 - DNA, 1045 bp, Homo sapiens
cattaattcaaaggaagtggagtgatatgtgtgccttactttgagcctaagaaatgtattttttcatcatgagacatttcaaatcccataattattcccttatgttaaattccttcaactcttcgtgccataatattctgccttgcgtatatagctgccttcagataatttttctgtggtcttctggtatgtaagttatctcctcaactggtatgtatcctcataaccaaatacattcttcattttagactacaagtgacaaactgtttttcttggtttcaagacattcatgattaatttacaaataggaaacttgtggagtatcttcatctaaaaacataaggagtttaattttgtaacagtacatcaacttaaagctcctagccaagagataagacattgatacttcttttcaaaaacagcactaatattttcttctagcaaatctgatctaattttataatccccttccttgagaattttgtytcaaatgagtgattccttctgaccaattattgaagaaggaatcatcccagcagcatcttgatgagtaagaaaaaattctccttgcccacagatggcacttctggctccacctccatcctacggtcttcccatcccacctccactccaggcacttgttgcctagcctgtccccatctctcttttacttccaagcatctggcattttttagttacctgcctctcccatctcaaccatgtttccttcactcagtaaataaatactgagtagctatatgtactaaacactaagttgagtttctaggaatgcagagattttggtgtcaaacaagctagagtaaatgccttcaaggaggcttgtaatctgaaatatgatagggacagacagaatgtcagggaacatgagagaggtttctatgaggaatttagtctgttccccatagctcttcccactgggttcttctctaagtcctgtttaatactgtacatcatcaaatcccaggcctcatacttttacttccatcccattatttgaataaattctattagcatacacacccac

SEQ ID NO: 90689 - DNA, 1045 bp, Homo sapiens
cattaattcaaaggaagtggagtgatatgtgtgccttactttgagcctaagaaatgtattttttcatcatgagacatttcaaatcccataattattcccttatgttaaattccttcaactcttcgtgccataatattctgccttgcgtatatagctgccttcagataatttttctgtggtcttctggtatgtaagttatctcctcaactggtatgtatcctcataaccaaatacattcttcattttagactacaagtgacaaactgtttttcttggtttcaagacattcatgattaatttacaaataggaaacttgtggagtatcttcatctaaaaacataaggagtttaattttgtaacagtacatcaacttaaagctcctagccaagagataagacattgatacttcttttcaaaaacagcactaatattttcttctagcaaatctgatctaattttataatccccttccttgagaattttgtttcaaatgagtgattccttctgaccaattattgaagarggaatcatcccagcagcatcttgatgagtaagaaaaaattctccttgcccacagatggcacttctggctccacctccatcctacggtcttcccatcccacctccactccaggcacttgttgcctagcctgtccccatctctcttttacttccaagcatctggcattttttagttacctgcctctcccatctcaaccatgtttccttcactcagtaaataaatactgagtagctatatgtactaaacactaagttgagtttctaggaatgcagagattttggtgtcaaacaagctagagtaaatgccttcaaggaggcttgtaatctgaaatatgatagggacagacagaatgtcagggaacatgagagaggtttctatgaggaatttagtctgttccccatagctcttcccactgggttcttctctaagtcctgtttaatactgtacatcatcaaatcccaggcctcatacttttacttccatcccattatttgaataaattctattagcatacacacccac

SEQ ID NO: 90690 - DNA, 1045 bp, Homo sapiens
cattaattcaaaggaagtggagtgatatgtgtgccttactttgagcctaagaaatgtattttttcatcatgagacatttcaaatcccataattattcccttatgttaaattccttcaactcttcgtgccataatattctgccttgcgtatatagctgccttcagataatttttctgtggtcttctggtatgtaagttatctcctcaactggtatgtatcctcataaccaaatacattcttcattttagactacaagtgacaaactgtttttcttggtttcaagacattcatgattaatttacaaataggaaacttgtggagtatcttcatctaaaaacataaggagtttaattttgtaacagtacatcaacttaaagctcctagccaagagataagacattgatacttcttttcaaaaacagcactaatattttcttctagcaaatctgatctaattttataatccccttccttgagaattttgtttcaaatgagtgattccttctgaccaattattgaagaaggaatcatcccagcagcatcttgatgagtaagaaaaaattctccttgcccacagatggcacttctggctccacctccatcctacggtcttcccatcccacctccactccaggcayttgttgcctagcctgtccccatctctcttttacttccaagcatctggcattttttagttacctgcctctcccatctcaaccatgtttccttcactcagtaaataaatactgagtagctatatgtactaaacactaagttgagtttctaggaatgcagagattttggtgtcaaacaagctagagtaaatgccttcaaggaggcttgtaatctgaaatatgatagggacagacagaatgtcagggaacatgagagaggtttctatgaggaatttagtctgttccccatagctcttcccactgggttcttctctaagtcctgtttaatactgtacatcatcaaatcccaggcctcatacttttacttccatcccattatttgaataaattctattagcatacacacccac

SEQ ID NO: 90691 - DNA, 644 bp, Homo sapiens
atctaaaatagtttaaaaaatctcatagggtattgagaatttaaatttggctccttaaaaattttgaaacaatttgattaatcctctcaactttctatgaggttgtacaaatgattatttgctatatcatgtaccttaaagagttaatagacataacttctgtagttttccttagtttatcatatagctcagtcacaaaaggaccaatatccctcattttagaatatttattgctttctactaccacaagtatttggaaytttaaaaaaagacttttaagtagaataatgatgtctgtgtagtaggcattatgctttacagaactgatcttttttaaaaggtggcttctccatgttgacaactgaatatacaaagatacagagcttttttttcaatacctttcaacctggatctccagtaatatgcccaaactggtacttgaaggtcaggagtcctttgattaagtatttaaaggcacaatctccattttcaaatgtaagcatgctgcacaatccatcacatatttttaatcaattcacattttctaagttgatgcgcaatgacactaagtttctacaaggaaaaaccaaacacttcatcacaaaatggcagctaattttccagaccataactgaattcataca

SEQ ID NO: 90692 - DNA, 1059 bp, Homo sapiens
  misc_feature (1)...(1059): n = A,T,C or G
acgttacagtatttaccataagaagttggtgagtggtgaagcaggtgtcaggcacatgctttgctacctgatttagagacattacctctttttatcatacagtaaacttttaagaggatgctatgatgtttattttgcaaagaaagagacagacttgcatcagttcagtaagtcacttaaagtgacagaattaataaatggtgaaactggaatttgaacccaggccaccctaaaaagcaggaaacatgatataaacanaaattacantagcctataaatctacaaatangagaacttgagtgnttattactagtttgatatgtgatttggggctggttgcttgggatccataggcatcagttgcctcatcaataaaacgagggagttggaataaatgatttcaaaaattctttatggctcttgaattccatagattttgcaatataattaggatcaaccagcatcaatgtacatcctaagttccctgtaagttccagatggtatggacactggtgtcttacttagatgagagaattccagttctgcatagacctttgaaatctgttgtcttttatgtccagcattggcaggttaagcaagaagtgcaaggccatgcttgcgtcagtcattgaagactcttctttgaaaaattttggttctgtctttaaaacattgtgtaattctttaggtaacaataatacaaatcccagtttctaaatagttcttttcagctcacaaaggagctgtaaagaacctttggaaataacttccatgcactgttaactcatttgattcttactgccattctgtgaagaaataaaattatctctatttcccagaagaaraaatgtgtttaaagtgattgacttactcaaaattacatttatttataaattccacacataataataagagctcgtggttcttctaagaacttcacattcattttctggtttaagcttcaaaatgaccctatcagatatgcactgttattataccactttacaggtgagagaactgaggtacagagaggctgtacaagcatattcttctaatgca

SEQ ID NO: 90693 - DNA, 1480 bp, Homo sapiens
ggctcccaaagtcatcttgggcatagagtcacagttagtcagagggggatgaggatagagctactcttttgggaggttttacgggccaaacatatgactcccattcacattccattggaagaactggccacatctaactgcaaggcaagctgggaaatgtatggtaaccaggaaaccatattccagcttctatgaaaggatgaattttggtgaacaactagcagtctctgtcacacacctgtaaattgagttttatttttcttatttgcagctgaaagaatttgtcactgatccaatgggtctggagataggagaggcattttggtgggttatacagagtttttctttgactgtggtatctacatttttcaaaacgtatcatatgtgataggtaaatccaaggaagtggatgacttcacttaggaagaatgtagagagtgagaagagatacagagatagagccctttgaagtgttcactgacccatctaatgcagaatcattcctccttattgctggtgaaaagagcagttcagacatctcagtggcctatagagacctcccttgggttgagtagcctcatgactcagatgtaagaataactctatagaccatggttgcccagatatttctgttttgggtggattctgaatataaaattccagcagcgctatctttgcctctgttttcattctttaaggtactaactttgacaaatagctgaaaaaagtcttgagtgtgtagtgtgttcaacttctttcctttcctggtgaagatatcatatgtggacacctagcaacctggatcctgaaataatgtggaaaatgccccaggggctgttctgttctttcctctttcttatcctctgtcctatggcttcatatttggaaactctaacttttctgggtttaactacatwaagccacaatagaagcaacaataaaggcattcactggaactttcctccaccagaatctaccttgagatttgaattttcttgaaagggcatctccattagactgtggtttttcctgataacttaagccattctaaggggtaaatacggatgaccccacgatctgagctgacacaccttgtgggcctcatgatttgtagtgtatgcagtcatgggtagacatcagatgtcctccacctgactggccagtgatgtcctccaacactctcccctcaaagatcccaatcacaggagctaagcaggaagagaacattcaactgtgggttggtctgaaaacttagggatgtaggcacttgttagccagagccttatctatttataattcaaataaattccaccagggcagagaccatattatatacatttaattttactctcccactctgccatactatatatttaaaaataatgataattaccagagatggagttcttactttaagccaggtaccatgctatgtgttttacctgagttcctcatttaatcctcataaaactgtattaga

SEQ ID NO: 90694 - DNA, 558 bp, Homo sapiens
atgggactttacctgtgttttctgagttacacctgagcgcccaaggtgacaactccactttctaaagaaacttccaggccatccatattgctaagaggtggttctaccatagttctatggttcttgtcccacctctagcctatacataaaagaaggctagagcttgatcaaggatgctgaggagtaaagatttccttgaagtgacttawcagtgtcctgagttttcttttcccttctcatggggtttcagggaaagtgctttcttgccccttcttcaagccaatacagagattctgttgccctggtgctgctggaaggccacagcagagcaggatggaagagtcccttggaatttgtagagcaaatacaccagtgcctgaattgcctccagaaaattctaaaagagagaaggccactagtgccgtttactagagtcaaaagtgaacaaggcactgaagttgggcaagctactctttcaacagtgactgagcaaggttgctttctcctggggctagcacagatactgcagaagatgattggtcttgaattgtcttgaga

SEQ ID NO: 90695 - DNA, 1568 bp, Homo sapiens
gaacatttggaagcaaagtaagtgcacctcagtaggagaatggatacacacattgtgccagccatcaccatttgttatttcatttattcttttattcatttttcattaaatatatttccatgagtttgtattattatactatgtagagaatcacctgggaagattgtgaaaagggccgaattcctggtcctaccctcagagagattgagtctgggaatgagtccaagaaatggggctcttttstaagtgcatgtgatacaactgcatgtggtcctgggtcacaccatatataaccattcattctgccattggatttcaagttggattacaaaacttgcagggctatgtgtggcccctgtactcatcccttactgggaaggaggcctggattgctggaacatgggagcctgagaaacttctggatcctcaagcatcaggcccagaggaagacagcagaagaggagataagggggtacagtgaaggggaaaggatagggaatgggtctgagggcaaagaggcctagaacagcacatcttctgatcttttgcccagacacaagtctacccacagatctttgttaacaaaatttgtcttggaactaagaaagctaccctcctctctcctgtccctcagtaacacttaatgattcaactcaacagttttttgttttttttttaagtcccaaaggctaaggttctagatctgggtcacttcccacacatgaccaagattcgtgagaaaagagatgacattgaatcaagcttttatctgaacctttggtctatttttccttgtccacagaagtagggaagtaagtattcatagggaatttagccaacctttgtccaaacagtttaacaccagtcacataattaatcagatagtctggcttttatagctatatctaatatgcatgtattaatttttttcaaggccttagaatcttttatctatattcaattgagaaatggtctctaagcgtaacttaatgtttgtttgatgaagatgctttgggagtacacaggaaccatgaagaaatttaaggaactggaagtcccagttaatagagagtcctggttaatgcagtgctgataaacagagagttgctgtatatagaggtggtgctgtgggcttgtttggaaaactgttcacttactgggcagcttacttaccctcacttacttaacctgaagggagagaatcatagaagtgagaaatggaaggaaaaattaagccatcctctgtttgaccctcttgttgtatgcaaggagactctgttctgtagaggagaaatgctcccctgagttcagccagtgaggtgcctgcaaggactggagaaagaaaatgagaagccagggtatttctctgctccctctctgccctgagcatgcctccagcagctactacatttcctccatggccccagcgccctccagacaagcccatcagggattccgggaacactatctcctccctttctcttttcagcctatgaatactagtgactttctgctcttattaacctttgagctatctctttatcccctctttggcattgcagcttttc

SEQ ID NO: 90696 - DNA, 992 bp, Homo sapiens
gggttccaatttattgcaattcttatctttgttgaaagtcaaattgttctatcttcggcaataagaaatgggaatagaatagagtagagtagagtggaatggrcggaacggaacggaacagaacagaacagaacagaataggtgaacctcattgagttagcttctgagcctttacacaggactctagtggttttcttaatagtttccttggtatgtagtatatcaagatgtttcagattcatcttcttcatttgctgcctcatatctagaatcaacatattcaagaaatgttgatttctttgaatatgcaatggcatttgaagaccacaatcttagtacagatatgcttagtgctacttacaaaagatatatccagaatatatattttaaaactctcaattcagtcaatagcaaagaagaattaaaaatggggtaatatttggacagacattttaatgaataggtcatggcttctggccttttcagtggacggatggatagatatagttgggtagaatatgttgtgagtatgtgctatttattctggtgttttcattaaattcagaaatatcggatttttatttaacctcttctatactacatctccattttctttctttcacactgacaatcccagttctgaaggatacaggggaaaatacagttagaatgctgtataattattcatttacattctctcatatgatacacataacaatcagagaaaagcaatattaatacaaccaccaccaattataatgactaaaaaacagtttaaaacattattgaatctgtcattcctattttttctactttttgtgcatacaaatgtaatcttttcatatactctcagggcttatacctatcttgaagccagtatatgggtcttaatataaaaataactattcttcaatttagttatcttacaatctctcctcattgaaactcaggtatggctaggatacactttcctagtgtagtcacataaggaa

SEQ ID NO: 90697 - DNA, 992 bp, Homo sapiens
gggttccaatttattgcaattcttatctttgttgaaagtcaaattgttctatcttcggcaataagaaatgggaatagaatagagtagagtagagtggaatgggcggaacggaacggaacagaacagaacagaacagaataggtgaacctcattgagttagcttctgagcctttacacaggactctagtggttttcttaatagtttccttggtatgtagtatatcaagatgtttcagattcatcttcttcatttsctgcctcatatctagaatcaacatattcaagaaatgttgatttctttgaatatgcaatggcatttgaagaccacaatcttagtacagatatgcttagtgctacttacaaaagatatatccagaatatatattttaaaactctcaattcagtcaatagcaaagaagaattaaaaatggggtaatatttggacagacattttaatgaataggtcatggcttctggccttttcagtggacggatggatagatatagttgggtagaatatgttgtgagtatgtgctatttattctggtgttttcattaaattcagaaatatcggatttttatttaacctcttctatactacatctccattttctttctttcacactgacaatcccagttctgaaggatacaggggaaaatacagttagaatgctgtataattattcatttacattctctcatatgatacacataacaatcagagaaaagcaatattaatacaaccaccaccaattataatgactaaaaaacagtttaaaacattattgaatctgtcattcctattttttctactttttgtgcatacaaatgtaatcttttcatatactctcagggcttatacctatcttgaagccagtatatgggtcttaatataaaaataactattcttcaatttagttatcttacaatctctcctcattgaaactcaggtatggctaggatacactttcctagtgtagtcacataaggaa

SEQ ID NO: 90698 - DNA, 607 bp, Homo sapiens
atgaaagctcaacaaaagcataaaaatctatgtactttaaactttattgttctccattttccaaaaagcatttgagatgacccaaaaaggaggaaaaaaatctatctatctatctatctaagtatacatatatgagacagaaggaaaaaaattcatctgcatacataatgcagttcaaaataaagtaattcaataaaacacagatcattttgtgataaataatatacttctaaacctaactagtagatattttgacatctcttttctttaagcatatttattggactatttttaagatatgcattaaagcacttytaccaatatcattttatccattcaaattatcaggggaaaaagaggtaaaagtgataaaattaacttctattggccaaacactgtaaatatgatctcatttaatcctcacaatatcctttcaaggtcgtgttactctcttatagatgaaaagagagaaacaaagataaaacttacacacctgagaggaggtggggctgaagtcaaacctaagactgtctgacactaaattccatggagtctcatgatttaaggccacatgtgggagagggagaaggagagggagagagcaatg

SEQ ID NO: 90699 - DNA, 1282 bp, Homo sapiens
tgtccagcaatcatttttatttttattaacattatatagggaatatattaatatatcccattttttgaaagtttaaacattacagataaaactgaagttctctttgaccactattccccactccatggaaattctttaaacctaatccaaaccctgctttcttagttctctcacataaggagaacaggagaaatggaaagtaaccagttaccattcttggcactagtccttttaattttacttgagaacttaaaatgacttatgttcacagcatacaaccataatttattttgtaggttctattttcaccgctcttttggacactttccagtttatctctataaacattcatgtgaggaacaagggtaaaaaggaagagaaggtgcatttactaatgagtctcaggtgtttacttcctttagtatgctctaatactgcacactacattcctgaggcaaagattacctttcctaggtccactggaacagtcacagagaggctgggaaatggtgaaacagagagcacccatcagcctgaacactcacacggttgtgcaattatgacttgaggagctagcacaggagaattcataatttttttccttttctttctctcccttttaagagacaggatctcattatattggccaggctggagtgcagtggctattcacaggcacraccccactactgatcacagcgtgggagttctgacctgctccatttctgatctgggccagttcactcctcctcaggcaacctggtcgtctcccctcccaagaggctgccgtatttgatgtcaaacttagtgcagacacccaatcagcatagctcactccagcccagaactcctgggcccaagtgatccaccttagacctctactagctgggactacaggtatgtgccaccacacttgacaagaatttataattatactgacataccaacaaatattaacccaaagacagaggtgcatactatatactccaaagtcttttgtagcataatatttaaatacaaacatttcttgaaggacttctgcagattatgctcaaaacgccacagaagagtctatatttgcactggatacatcagaggatggagacatgttggtaaagaaggaaaaagataatctgaaaaggggaaaagtctgctcgcctttcctttcttctctgtaacattgccaacaggaatactcacgttcctctgtcatttcaaattgacagtctaaactaaaaaatgtaaaccaaatgactcgttgctttttatatatatttatagt

SEQ ID NO: 90700 - DNA, 500 bp, Homo sapiens
tgtgtatttttaaataaaaagaatcaagtaaaagacaccctggtccccaatatattaaagsctatttcttgttcagtagtaacaggcaacatctaatttatgtatcataataactatcccagttttagaaatgaatttaacccctgtaaaaatttgtaatatgaaacacactaaaggtagttagaaacagcaaaatagaccttaacacagtgaccgtatcatattagtgtttttaggcagtggaaactccagctgataaattatccaaaggcataattatagcacatttctgcaaataggagctggatgtatacaaaataaagtctgattaggtgccatcagaatggcaccaatggatcaacagcctaaataacttaatgttagtgattaagatgatgactaattagttgttcatttgtctttaaaaaaaaagtgaaccctagcatggtcagttgccatttcgattatgaatcattatttttttccttgttatagaggga

SEQ ID NO: 90701 - DNA, 1052 bp, Homo sapiens
cttgatagagccaggattaaggtaaggcaagygagtgttcactccgcagcacaaaatttcaggagcaccaaatactcagtaatccagataaataatacttaatgaaatcatttttaaaaatcaaaattaatgcaaaaatttatgatgaacaagctacatatttaaaataaagacaaacgatttcatgagctgccattatcgtcttgtcgcagcctgcagttggttcctgggcctgcattcaccatcacatcccccactggtgggctcttgggaattgacaatggcgtgggaacagatcaggcacacagagctttgtatgtcatcgtggttttttcttattgttgtacagctttcattaactttttttacttgctttgaaatatgggaggatatttgataactgtatgaaaaagtacacatttttcctttgtctcaggctccaacagggttatggagtcactgtctttggaaatatccattagacattatataatgagaagcaaaagacaaaacacagccagtccgtctgaacttcatggaagggggttctaaccaaggtcagaatcaagtctgagaataacgcgtgggtacacaccttctttgtcagcttcatccacggaaaaacctgtaaagctaagcaaagttgattgcctaaagcagccactttttctaaaagcaaaggaaatggcagtaaaatttttcttttgcatgctgctctccccacatcactgcccagcagatgtcattgaagtagaggaggttgggatgattttaaaattttcattgtgcacatttttagatgttagtttttaaggtataaataataacacctctgtgtctaccagacttctaaaataaattattgtccttcccgttgaagtctctgtgttcacgaatcacttctttctctctgccttgacacactgagagatattcactggatttgttttcattattagacttttcctaatgagaagtaagcttcctcagcaatacatgaaatagttttgcatattttaatatgtatacatggcataatctgtacatactct

SEQ ID NO: 90702 - DNA, 1052 bp, Homo sapiens
cttgatagagccaggattaaggtaaggcaagcgagtgttcactcygcagcacaaaatttcaggagcaccaaatactcagtaatccagataaataatacttaatgaaatcatttttaaaaatcaaaattaatgcaaaaatttatgatgaacaagctacatatttaaaataaagacaaacgatttcatgagctgccattatcgtcttgtcgcagcctgcagttggttcctgggcctgcattcaccatcacatcccccactggtgggctcttgggaattgacaatggcgtgggaacagatcaggcacacagagctttgtatgtcatcgtggttttttcttattgttgtacagctttcattaactttttttacttgctttgaaatatgggaggatatttgataactgtatgaaaaagtacacatttttcctttgtctcaggctccaacagggttatggagtcactgtctttggaaatatccattagacattatataatgagaagcaaaagacaaaacacagccagtccgtctgaacttcatggaagggggttctaaccaaggtcagaatcaagtctgagaataacgcgtgggtacacaccttctttgtcagcttcatccacggaaaaacctgtaaagctaagcaaagttgattgcctaaagcagccactttttctaaaagcaaaggaaatggcagtaaaatttttcttttgcatgctgctctccccacatcactgcccagcagatgtcattgaagtagaggaggttgggatgattttaaaattttcattgtgcacatttttagatgttagtttttaaggtataaataataacacctctgtgtctaccagacttctaaaataaattattgtccttcccgttgaagtctctgtgttcacgaatcacttctttctctctgccttgacacactgagagatattcactggatttgttttcattattagacttttcctaatgagaagtaagcttcctcagcaatacatgaaatagttttgcatattttaatatgtatacatggcataatctgtacatactct

SEQ ID NO: 90703 - DNA, 1719 bp, Homo sapiens
atcatagtactcagtagttagttttcaactcttaccctcctctttctcacccctctagtattccccagtgtctgtttttcccatctttgtgtccacgagtagttgatcttttgctcccacttataagtgagagcaaacttttaaacttttaagacatattttgataaacagaatattttaattttagtgtagtcaatttaatatatgatatataagatatggtttgtgttttatcgcattttacattaaaaattcttctctgcctccaaatcacaaatatagttccatatatttccttgtaagatgaagttcaattcctctatgtctgtttattcaactttattttttaaatgataactaatgttctaaataccattgagtgcaattacagttcagtatcagacattgaacttcaaaatatgtctggatattttcctgggctccattttctattcaattaatcttttatctctttccaagccagtactgcactcatagttcttgtagctggattcaggaaaaaaaaatcactttgtcttattaatctgaatggtcttggctactttgataatttggcgtcttagtttgttttgtgttgccataacacagtacctgaggctggataatttatagagaaatgaggctaatttggtttatgattctggtggccagaacatacctgtctgagttgttgcttctggtgagggacttatgctgcttccaatcttggtggaaaaaggaatgggaacaggtgtgtgcaaagagattacatggccagagagggaaaaaaaagagaaaccaaggaagttaggctcttttaacaatccactctcaaagaaataagtcattcctgagagagcaagaactcactcactcccagggaaggcattaatccgtttatgaaggatccacccccacaacccaaacccctcccactagactccacttcccaactcaactccgccacattggggatgcaatttcaacatgagttttggcagggacaaatcacatccaaaccatagcatttggttttccgtatgacccctataattcctagagtyagtctgtcaaattataagaacaatgctatagagacttttactaaaattgcattaaaatttgtttaacttggagacatctaacatctttatgctaatgatttttctctatccatatatatgttatatcttaccatttatttaggtcttctacctgatttgttcataacaatttgaaattttacatatattagacataaattcttttcttagatttttttctcacatattcataattttacttgctattttgaatgttttctttttaaattttatttttggccattgctagtgcataggattttttttacagagatctcatacgcagtaaccttgtcaaactcatatatctttacttactataaacatatctaagtttcctgccctttcactcgtaattctctattatctatttatagcataatggtggaaaagattagttttagaaaaagaatggagcaataagaaacagaggatagggccaagactctattttgacatgtgaatgcagtgtggcctggagaaaattatacatttttttctggattataattttaaaattttttagttatctcatctgtacctcaaatatgttaaatagtatccatgatttgttgtgtgagcaggaaataagctaacaaatacaaaatacttagca

SEQ ID NO: 90704 - DNA, 881 bp, Homo sapiens
ataaaacactaaaatgctttaccttgatgaaatgtatgtgcagcaaaaaggagcagagattcttactttttcctctaggttgcgttactactgtgtatgctgtatgcttagccacaaactccaattgctgagtaataattgatgagtgcttacttcttaaatcaaatgacccctccagcctcttttccacctggcctggtggtgcaggtgcatctggtgctcacatgcccctgttgctgagtcaactacccagagcctctcgtcaacattgctgccacccttgggaaggtcagcaatgattggcaatgctcakgtaacaaaggcacattgcctcttcccatgacacttttactctttgcactgcaatttccagtttttcaaaaattttcccttgcttgcattcctctattttctatctctaccctgagctttttcatagcggattcggagaccacaaagatctcttctcaggagaaactctgtggaggtaggcacctctaaccctgtttatttgtttttgctctgaaataattccttctaaataaattatttacatttctttttgctacatcccaccttttctcaatatacattccagcacgactttcttcccaacattatccaaacattgggacatcaacatttactgagaaaaactttcagagaagaattgcacccgataagttaaacaggcaaggaagatttattcaagactattgcaatatggaagagagattgaactcaacaccactgaagcaaaaggtgggagagtttttaagcattgaggtgaactatggggaaagcaatgtggggcctcagggccaaggatgatcaaaatcattaggctatgtgtttttgctaattggcacttatctaagtta

SEQ ID NO: 90705 - DNA, 881 bp, Homo sapiens
ataaaacactaaaatgctttaccttgatgaaatgtatgtgcagcaaaaaggagcagagattcttactttttcctctaggttgcgttactactgtgtatgctgtatgcttagccacaaactccaattgctgagtaataattgatgagtgcttacttcttaaatcaaatgacccctccagcctcttttccacctggcctggtggtgcaggtgcatctggtgctcacatgcccctgttgctgagtcaactacccagagcctctcgtcaacattgctgccacccttgggaaggtcagcaatgattggcaatgctcaggtaacaaaggcacattgcctcttcccatgacacttttactctttgcactgcaatttccagtttttcaaaaattttcccttgcttgcattcctctatyttctatctctaccctgagctttttcatagcggattcggagaccacaaagatctcttctcaggagaaactctgtggaggtaggcacctctaaccctgtttatttgtttttgctctgaaataattccttctaaataaattatttacatttctttttgctacatcccaccttttctcaatatacattccagcacgactttcttcccaacattatccaaacattgggacatcaacatttactgagaaaaactttcagagaagaattgcacccgataagttaaacaggcaaggaagatttattcaagactattgcaatatggaagagagattgaactcaacaccactgaagcaaaaggtgggagagtttttaagcattgaggtgaactatggggaaagcaatgtggggcctcagggccaaggatgatcaaaatcattaggctatgtgtttttgctaattggcacttatctaagtta

SEQ ID NO: 90706 - DNA, 881 bp, Homo sapiens
ataaaacactaaaatgctttaccttgatgaaatgtatgtgcagcaaaaaggagcagagattcttactttttcctctaggttgcgttactactgtgtatgctgtatgcttagccacaaactccaattgctgagtaataattgatgagtgcttacttcttaaatcaaatgacccctccagcctcttttccacctggcctggtggtgcaggtgcatctggtgctcacatgcccctgttgctgagtcaactacccagagcctctcgtcaacattgctgccacccttgggaaggtcagcaatgattggcaatgctcaggtaacaaaggcacattgcctcttcccatgacacttttactctttgcactgcaatttccagtttttcaaaaattttcccttgcttgcattcctctattttctatctctaccctgagctttttcatagcggattcggagaccacaaagatctcttctcaggagaaactctgtggaggtaggcacctctaaccctgtttatttgkttttgctctgaaataattccttctaaataaattatttacatttctttttgctacatcccaccttttctcaatatacattccagcacgactttcttcccaacattatccaaacattgggacatcaacatttactgagaaaaactttcagagaagaattgcacccgataagttaaacaggcaaggaagatttattcaagactattgcaatatggaagagagattgaactcaacaccactgaagcaaaaggtgggagagtttttaagcattgaggtgaactatggggaaagcaatgtggggcctcagggccaaggatgatcaaaatcattaggctatgtgtttttgctaattggcacttatctaagtta

SEQ ID NO: 90707 - DNA, 881 bp, Homo sapiens
ataaaacactaaaatgctttaccttgatgaaatgtatgtgcagcaaaaaggagcagagattcttactttttcctctaggttgcgttactactgtgtatgctgtatgcttagccacaaactccaattgctgagtaataattgatgagtgcttacttcttaaatcaaatgacccctccagcctcttttccacctggcctggtggtgcaggtgcatctggtgctcacatgcccctgttgctgagtcaactacccagagcctctcgtcaacattgctgccacccttgggaaggtcagcaatgattggcaatgctcaggtaacaaaggcacattgcctcttcccatgacacttttactctttgcactgcaatttccagtttttcaaaaattttcccttgcttgcattcctctattttctatctctaccctgagctttttcatagcggattcggagaccacaaagatctcttctcaggagaaactctgtggaggtaggcacctctaaccctgtttatttgtttttgctctgaaataattccttctaaataaattatttacatttctttttgctacwtcccaccttttctcaatatacattccagcacgactttcttcccaacattatccaaacattgggacatcaacatttactgagaaaaactttcagagaagaattgcacccgataagttaaacaggcaaggaagatttattcaagactattgcaatatggaagagagattgaactcaacaccactgaagcaaaaggtgggagagtttttaagcattgaggtgaactatggggaaagcaatgtggggcctcagggccaaggatgatcaaaatcattaggctatgtgtttttgctaattggcacttatctaagtta

SEQ ID NO: 90708 - DNA, 881 bp, Homo sapiens
ataaaacactaaaatgctttaccttgatgaaatgtatgtgcagcaaaaaggagcagagattcttactttttcctctaggttgcgttactactgtgtatgctgtatgcttagccacaaactccaattgctgagtaataattgatgagtgcttacttcttaaatcaaatgacccctccagcctcttttccacctggcctggtggtgcaggtgcatctggtgctcacatgcccctgttgctgagtcaactacccagagcctctcgtcaacattgctgccacccttgggaaggtcagcaatgattggcaatgctcaggtaacaaaggcacattgcctcttcccatgacacttttactctttgcactgcaatttccagtttttcaaaaattttcccttgcttgcattcctctattttctatctctaccctgagctttttcatagcggattcggagaccacaaagatctcttctcaggagaaactctgtggaggtaggcacctctaaccctgtttatttgtttttgctctgaaataattccttctaaataaattatttacatttctttttgctacatcccaccttttctcaatatacattccagcacgactttcttcccaacattatccaaacattgggacatcaacatttactgagaaaaactttcagagaagaattgcacccgataagttaaacaggcaaggaagatttattcaagactattgcaatatggaagagagattgaactcaacaccactgaagcaaaaggtgggagagtttttaagcattgaggtgaactatggggaaagcamtgtggggcctcagggccaaggatgatcaaaatcattaggctatgtgtttttgctaattggcacttatctaagtta

SEQ ID NO: 90709 - DNA, 1138 bp, Homo sapiens
tgactgcactgtcagaaaaatggctcactttacaagagtagatttttttwaaattaaattgtcctattgacttacattacttggaaagatatctgtttcctattcatgttgaattgtatgaacacagccgactctcacttatgatttcaataaagagtgtctttatgtgttctgagaatctaagaatatgtcattcctcatgaaaccccattacctatggggagaatgtgttgtattctggagagaatgttccatcactggctggtcctagagcaaatgttatttcagattatttacagacaaggttacattttgttccttctgtcattcaccagtgagcttgtgactctctaagctatgtgccctttgtcaccacattcatttgtttttcttgaattttaacattacccatttatatttgggtttctgttttaatatgaccaagtaatcctggatcctgtcaaattctcctctgcatgtctgctgtagccattatgagtctttcattgctgtgttataaccttatagctatccatcagtagcataagacattttgtctattatgacctgatgctcttcaaaggttttcttcatatttctttatctttggggaagtatagtctagaaaatagccaagggcgtacatgaataagttatgttgttaaaaccttagtggaataccatcaatgtaaccttaggctcccatcagtgttcagagaaatcttgtatcttaaatgtgctttctgtaacatttccctcccaatattctatgatttataaataagtaaacattgtttcatataataataattcatttatttaattgagtaaattttattccatctaaaatgtcatgtaccttaaataaatgtgaaagaaaatttaaatactataggcagagaggctaatgtggcattacttaaaatgtgataattaatcctgatactgcttttctccttttacattggctaaagctgatttggagatctgggttgcaaggttctatgcaaaatattctatgatttacaaataagtaaaccttgtttcctatgacaataatccatttatttgagtaaattttattccatctaaaatgtcatgtaccttaaataaatgtggaaggaaaaagaaaatacta

SEQ ID NO: 90710 - DNA, 871 bp, Homo sapiens
ttttttgaagggttttttgtgtctctatctcctttagttctgctctgatcttagttatttcttgccttctgctagcttttgaatttgtttgctcttgcttctctagttcttttaattgtgatgttagggtgttgattttagatctttcctgctttctcttgggggcatttagtgctacaaatttccctctacagactgctttaaatgtgtcccagagattctggtacattgtgtctttgttctcattggtttcaaagaacgtctttatttctgccttcatttcgttatttacccaatagtcattcaggagcaggttgttcagttttcatgtagttgtgtggttttgagtgagtttcttaatcctgagttctaatttgattgcactgtggtctgagagacagtttattgtgatttctgttctttcacatttgctgaggagtgctttacttccaactatgttgtcaattttggaatgagtgtgatgtggcgctgacaagaacgtatgttctgttgatttggggtggagagttctgtagacgtctattagttctgcttggtgcagagccgagtttaagtcctggatatccttgttaaccttcttaaccttcccccatttgtcatttactttttgaccctctttaatgtttttttgtagtactaacataaatttttatataggtaaatttattaatgtcttctttgtgttttctgaatatttatgacatgccttaaaagatttttcccgctgcaagacaataagaaaatactacacatgttgttttctttttgttgttgttgcttgtattactttacttttkacattgacatcttgttttggtctggaatttatattggagtaaggcatgagaaa

SEQ ID NO: 90711 - DNA, 1035 bp, Homo sapiens
tgccctggagtcagctccaccaggccaggccagcagctttctcgtttctatttgctcagaatccagcacagtgcctggtggttctaaatcagtggttctcagagggtgatgttgctcctctgagcaacatttggcaatgtctggagacagatatttttggttgtcacaaatggcgggagggtgtgcttctggtatctagtagggtgaggtcagagatacagctcaacaacctacgatgacaggctagtcccccaagcacccccccaaaaccaatagtgckgaggctgagaaaccctgttctaaataaatggcaatgccgagaatatctccccaacccattcctcaccacttctcatcacttcctcatgttcagtgaattctggccccacccagagaatggaagaaggtagattgagggactctgtctctctctctttcccatattcccttctcatttagggaccacacgtggcacaggaattgaccatgtaagatgttcataataagcatctttggaataagtaaatggatgaatccattataataagacaggaaataaatcagttagtggatctgttttttgtttttttgtttttttcattttgaaagctgaaagtgcccttattgatctcgtggtctgccctctcatgtaacagaagagagaactgaggctcagaaaattaaggtgagtgatcaaagctatctacctaattagcagcaggaagggattaggagccagttctcccagcgcctccctcggtcctcttttggccgggccagtgtttgactcttccaggcatcactcagtgaggatctgatttgaataggtgattggatttgctcatgcacagagtattaatattacatatgccgaaggattgtttaatcggccagatgtcggaccctatcagacttaatgcttgtgacttgtactgatttctgagcagtgtagcagcatccagtgcagtagctggcattcaatcagccagtggccgggtgaaatgctcattcttcatactttaaaaggggcttttc

SEQ ID NO: 90712 - DNA, 675 bp, Homo sapiens
tgatttgtattcagctgagatggattgactaaaaattacaccttctgctcactctaatttattgctgtagaagaaagaataagtgagatatttccatttctagtgacaggtggctggcactttgaaaccttccatttcattactcaccttaatgttttcactaaaacacatgtggttttcaaacacaggaaggaaaacatggtaacctgtggttacaatttccactagaaaatagaaaaggtgtaggtcagaaagaatgtttgtggggtgttccttttttactttaaacatgaaaacccatgtcagaagagttttctcttgagaagaacactgttaattgttgcaattttcaaaagttgatgaaaatggggcccagtggcctctgttgttgcaaccagggcagttgtggttgaagaactctgaaggctttagtgccagggatatttttaatcttccactgtgtcttcaagcagtctctctcttctcttttaattcaaattctgggaagcctaaagaaaatgtcttttcaggcagtccttctcatacccaagtagctcyaagaatcccttttcagatcccatcttgaagcaaattagcttgttcaaatagcatttcctctgtagcaattaccttcacagttattttcagctactggttccgtagtttgctgtgatc

SEQ ID NO: 90713 - DNA, 733 bp, Homo sapiens
tcccaacaactaatgactttaaaattattgaagtcacttttgaaatgactatggatttattttaagttctttttttttttttttgagggtaagagtaggggaaggtcaattgtggtaaaaacgataattatattaaaactcatcaaatatcctattaatttggtgtgaaagtaatttgcagtttttgccattaaaagtaatggaaatttaaaaaaargctgggcatggtggctcatgcctgtaatcccagaattttgggaggccaagacaggcggatcacctgaggtcaggagttcaagaccagcctgatcaacatggctaaaccctgcctctactaaaaatactttttaaaaaaactttgccattaaaagtattggcaaaaaccacaattacttttgcaccaacctaataatcccacctcgccgtactttctgttgccttagtgctctctgtggggtcattacgctttcagttgttcaggcaactgccttacaactaattctgatttctgaacaaatccttagcaggtatcttgatcatcgaagatgtcaaaaggaaaaatggaaatagtatatacctggatgtcccagacactcttactctaagtccacgagcaggagaaaagaaaggctcacttgcctctttcctccttgatctccacacagagggtcattcccaggttggtttctttgagggggatctgctggaggccatgaagtatcattttggagaa

SEQ ID NO: 90714 - DNA, 757 bp, Homo sapiens
gggatccccaacacagaggtgtgaagcggagagaggctacaaggaggatgccaaggctttggactcaagtgcagttgtctttctgtttgtttgtttgagatggagtctcactctgttgcccaggctgaagtgcagtagcaagatctcagctcactgcaacctccgcctctcgggttcaagtgacttctggctaatttttgcatttttagtagagatgtggtttcaccatgttggccaggctggtctagaactcctgacctcaagtagatctgccagcctcagcctcccaaagaagtgcagttgtcttatgcataattccctgcactctaaggcaaatctctgagtagctcatttagaatttcaaacacactgagattttcaatatttttttaaagaacacaaaraagttccaacaatttcccttctttaaaggataaaaaaaggatcatagatgttagtgacatttcaggtatgtcccttccttgctgtgacaaggtgtggtcatgaacaaagtaagctagagagcttctgtcttctcccagctatatttctgtattcctctaaggaaacaatattttatttccattaactagaaaattgggaattgctgtttcttatttatagatctttttggtggacaaatgagttgtcagtgaaacttgtacaatttaatatttgcaaacacgtaggatctcagatatggaatacgatttataagaattgctgggaacgaaaaagtaatatggaggctcgtaaa

SEQ ID NO: 90715 - DNA, 757 bp, Homo sapiens
gggatccccaacacagaggtgtgaagcggagagaggctacaaggaggatgccaaggctttggactcaagtgcagttgtctttctgtttgtttgtttgagatggagtctcactctgttgcccaggctgaagtgcagtagcaagatctcagctcactgcaacctccgcctctcgggttcaagtgacttctggctaatttttgcatttttagtagagatgtggtttcaccatgttggccaggctggtctagaactcctgacctcaagtagatctgccagcctcagcctcccaaagaagtgcagttgtcttatgcataattccctgcactctaaggcaaatctctgagtagctcatttagaatttcaaacacactgagattttcaatatttttttaaagaacacaaaaaagttccaacaatttcccttctttaaaggataaaaaaaggatcatagatgttagtgacatttcagrtatgtcccttccttgctgtgacaaggtgtggtcatgaacaaagtaagctagagagcttctgtcttctcccagctatatttctgtattcctctaaggaaacaatattttatttccattaactagaaaattgggaattgctgtttcttatttatagatctttttggtggacaaatgagttgtcagtgaaacttgtacaatttaatatttgcaaacacgtaggatctcagatatggaatacgatttataagaattgctgggaacgaaaaagtaatatggaggctcgtaaa

SEQ ID NO: 90716 - DNA, 757 bp, Homo sapiens
gggatccccaacacagaggtgtgaagcggagagaggctacaaggaggatgccaaggctttggactcaagtgcagttgtctttctgtttgtttgtttgagatggagtctcactctgttgcccaggctgaagtgcagtagcaagatctcagctcactgcaacctccgcctctcgggttcaagtgacttctggctaatttttgcatttttagtagagatgtggtttcaccatgttggccaggctggtctagaactcctgacctcaagtagatctgccagcctcagcctcccaaagaagtgcagttgtcttatgcataattccctgcactctaaggcaaatctctgagtagctcatttagaatttcaaacacactgagattttcaatatttttttaaagaacacaaaaaagttccaacaatttcccttctttaaaggataaaaaaaggatcatagatgttagtgacatttcaggtatgtcccttccttgctgtgacaagstgtggtcatgaacaaagtaagctagagagcttctgtcttctcccagctatatttctgtattcctctaaggaaacaatattttatttccattaactagaaaattgggaattgctgtttcttatttatagatctttttggtggacaaatgagttgtcagtgaaacttgtacaatttaatatttgcaaacacgtaggatctcagatatggaatacgatttataagaattgctgggaacgaaaaagtaatatggaggctcgtaaa

SEQ ID NO: 90717 - DNA, 629 bp, Homo sapiens
tcaactatttatccttcaactgaatgtacattttggaaatgatctgtatttgccaaataaggtaagtcagaattcccagtaaagtatggcatccaaagctattcacagtgatctcttaaatcaaagataaataacagtagaaataataatcatgagcttgttctcatactgttccagtttgtattcaagacagaaaggaacacctacccaggagctcaatcacattgcatgcacagacaccgacaaccacacagacgtgtgaacacatccccccaacgtgagcaaccgcagcataatgggactcatcccatccaaatacccatttcatctaaagtgtaaaaataataaaaagaacttcttggaaataccgctcatctccggccattaaatgtscttagctttgacttctgtctcgtaacagctgaacgctatggcaattttccataacaacacgcatctcagatgactcactgctgaattcaaacacatattccttttaccgtaatgaaagaaactagaaaaaagtctgcctgctgagaaacagtgatgatcaacagtgataacagagaaaaaaagcaagtaagtgtgtgcgtgtgtgtgtgtgtgtgtgtgtgtgtgtgtgtgtgtgt

SEQ ID NO: 90718 - DNA, 629 bp, Homo sapiens
tcaactatttatccttcaactgaatgtacattttggaaatgatctgtatttgccaaataaggtaagtcagaattcccagtaaagtatggcatccaaagctattcacagtgatctcttaaatcaaagataaataacagtagaaataataatcatgagcttgttctcatactgttccagtttgtattcaagacagaaaggaacacctacccaggagctcaatcacattgcatgcacagacaccgacaaccacacagacgtgtgaacacatccccccaacgtgagcaaccgcagcataatgggactcatcccatccaaatacccatttcatctaaagtgtaaaaataataaaaagaacttcttggaaataccgctcatctccggccattaaatgtgcttagctttgacttctgtctcgtaacagctgaacgctatggcaattttccataacaacacgcatctcagatgactcactgctgaattcaaacacatattccttttaccgtaatgaaagaaactagaaaaaagtctgcctgctgagaaacagtgatgatcaacagtgataacagagaaaaaaagcaagtaagtgtgtgygtgtgtgtgtgtgtgtgtgtgtgtgtgtgtgtgtgtgt

SEQ ID NO: 90719 - DNA, 730 bp, Homo sapiens
atgacaaaaagctttcagtcatctgcagctatgtgaataggtatttctgtgactcaatgccagtgcaaaggctatgtagttcattatttcccatggtatcctacaaactacttcgttttgctctcttagtccctttcatacttgcttcaactcttcttccttccccatcttgcctgaagctgcattgctcaaatcttttcttctctctgcctttcattccactttccttatctctcttcagctcccaatcactctttttgctaactatattcaaaataaatgcctcatggtttaatactttgttgaaataaaattcccatggtgactaaaaagttgtaccagaagaacacttcatacaaactaaaattttgtatgaaacaagcttttggtaggaatggatgactaaaagacttacatttgatcttccaaattgccttctgttaatagtgtcaaaatctatatttgttcttcaaaggtagcaacagtaggcaaaacaaaaacaaacaaaaaactatatttgttagtccttttcttggttccttaataggcctgtctcatccagatagcaatagcgatgacgactttcctattattaaactcttgcactgtggcaggcactctgtgaargccttacctcatttatgtgagaacttatgaggtagttccattctacctacaaggaaactgaggcttgtagagattacacaacttgctgcagatggtgaacctt

SEQ ID NO: 90720 - DNA, 630 bp, Homo sapiens
catccagaaacagaagtcagcaagaagaactcagtttgaccacctatgatttcatcttcaacctgaccaatcagcactccccgctttctgagcccatacccaccaaattatccttaaaaactcttttgagtaataataaaactcyggtctcctgcacagccggttctgcatgaattactcttttgcccttgcaattccactgtcttgataaatcagctctgtctaggcagcgggcaaggtgaactcactgggtgattacaatatgagggactaagacggggtggtcagggagagggagaagcctgtgtgagtcagggtagggaagagaaattccatggatatgctgtgacttgagttggaccttgaaggatcactaaggtatgcagaagagaagagcaagaggcaggaaagttccagatgagatggtaaatggttggacagaggcacagggcaggaatgtgtaggatgctgagaaggtaaaatgtcggcttcattggagtcacaagagagtctgataaatagaagataaatacttcttcatgagcatgaactccaatacttaggagctgaccttctttgagatgtattgagactgagttatcataaaataattttgaacaatagatcttg

SEQ ID NO: 90721 - DNA, 630 bp, Homo sapiens
catccagaaacagaagtcagcaagaagaactcagtttgaccacctatgatttcatcttcaacctgaccaatcagcactccccgctttctgagcccatacccaccaaattatccttaaaaactcttttgagtaataataaaactctggtctcctgcacagccggttctgcatgaattactcttttgcccttgcaattccactgtcttgataaatcagctctgtctaggcagcgggcaaggtgaactcactgggtgattacaatatgagggactaagayggggtggtcagggagagggagaagcctgtgtgagtcagggtagggaagagaaattccatggatatgctgtgacttgagttggaccttgaaggatcactaaggtatgcagaagagaagagcaagaggcaggaaagttccagatgagatggtaaatggttggacagaggcacagggcaggaatgtgtaggatgctgagaaggtaaaatgtcggcttcattggagtcacaagagagtctgataaatagaagataaatacttcttcatgagcatgaactccaatacttaggagctgaccttctttgagatgtattgagactgagttatcataaaataattttgaacaatagatcttg

SEQ ID NO: 90722 - DNA, 630 bp, Homo sapiens
catccagaaacagaagtcagcaagaagaactcagtttgaccacctatgatttcatcttcaacctgaccaatcagcactccccgctttctgagcccatacccaccaaattatccttaaaaactcttttgagtaataataaaactctggtctcctgcacagccggttctgcatgaattactcttttgcccttgcaattccactgtcttgataaatcagctctgtctaggcagcgggcaaggtgaactcactgggtgattacaatatgagggactaagacggggtggtcagggagagggagaagcctgygtgagtcagggtagggaagagaaattccatggatatgctgtgacttgagttggaccttgaaggatcactaaggtatgcagaagagaagagcaagaggcaggaaagttccagatgagatggtaaatggttggacagaggcacagggcaggaatgtgtaggatgctgagaaggtaaaatgtcggcttcattggagtcacaagagagtctgataaatagaagataaatacttcttcatgagcatgaactccaatacttaggagctgaccttctttgagatgtattgagactgagttatcataaaataattttgaacaatagatcttg

SEQ ID NO: 90723 - DNA, 630 bp, Homo sapiens
catccagaaacagaagtcagcaagaagaactcagtttgaccacctatgatttcatcttcaacctgaccaatcagcactccccgctttctgagcccatacccaccaaattatccttaaaaactcttttgagtaataataaaactctggtctcctgcacagccggttctgcatgaattactcttttgcccttgcaattccactgtcttgataaatcagctctgtctaggcagcgggcaaggtgaactcactgggtgattacaatatgagggactaagacggggtggtcagggagagggagaagcctgtgtgagtcagggtagggaagagaaattccayggatatgctgtgacttgagttggaccttgaaggatcactaaggtatgcagaagagaagagcaagaggcaggaaagttccagatgagatggtaaatggttggacagaggcacagggcaggaatgtgtaggatgctgagaaggtaaaatgtcggcttcattggagtcacaagagagtctgataaatagaagataaatacttcttcatgagcatgaactccaatacttaggagctgaccttctttgagatgtattgagactgagttatcataaaataattttgaacaatagatcttg

SEQ ID NO: 90724 - DNA, 630 bp, Homo sapiens
catccagaaacagaagtcagcaagaagaactcagtttgaccacctatgatttcatcttcaacctgaccaatcagcactccccgctttctgagcccatacccaccaaattatccttaaaaactcttttgagtaataataaaactctggtctcctgcacagccggttctgcatgaattactcttttgcccttgcaattccactgtcttgataaatcagctctgtctaggcagcgggcaaggtgaactcactgggtgattacaatatgagggactaagacggggtggtcagggagagggagaagcctgtgtgagtcagggtagggaagagaaattccatggatatgctgtgacttgagttggaccttgaaggatcactaaggtatgcagaagagaagagcaagaggcaggaaagttccagatgagatggkaaatggttggacagaggcacagggcaggaatgtgtaggatgctgagaaggtaaaatgtcggcttcattggagtcacaagagagtctgataaatagaagataaatacttcttcatgagcatgaactccaatacttaggagctgaccttctttgagatgtattgagactgagttatcataaaataattttgaacaatagatcttg

SEQ ID NO: 90725 - DNA, 630 bp, Homo sapiens
catccagaaacagaagtcagcaagaagaactcagtttgaccacctatgatttcatcttcaacctgaccaatcagcactccccgctttctgagcccatacccaccaaattatccttaaaaactcttttgagtaataataaaactctggtctcctgcacagccggttctgcatgaattactcttttgcccttgcaattccactgtcttgataaatcagctctgtctaggcagcgggcaaggtgaactcactgggtgattacaatatgagggactaagacggggtggtcagggagagggagaagcctgtgtgagtcagggtagggaagagaaattccatggatatgctgtgacttgagttggaccttgaaggatcactaaggtatgcagaagagaagagcaagaggcaggaaagttccagatgagatggtaaatggttggacagagscacagggcaggaatgtgtaggatgctgagaaggtaaaatgtcggcttcattggagtcacaagagagtctgataaatagaagataaatacttcttcatgagcatgaactccaatacttaggagctgaccttctttgagatgtattgagactgagttatcataaaataattttgaacaatagatcttg

SEQ ID NO: 90726 - DNA, 735 bp, Homo sapiens
gctttccaaggccttcccttgtctggatctaagaaagattaactacgatcggacttcataggtctaaaagaaacctttaccatcattctctctgggggctgctaccactgaacaagaccaactttgctagccaggtctcctcttctccccctcccataacctgtttagccagctctttctataacctcaagatgatataaaagcatcaaccctcccataatttctttgagttcttatattttgcttgactcccatgcatgttaataaatktatatgccttttctccttttaatctgctttttgtcagtcaatttttcagcaaaccttcagagggtaaagaggaagtttgcccttggccactatgatggtgatattcactgcctacttaataaacaaaggtcctcatagaagcttcttctttcaggacatctcctgtgcacatttgggatggcacagtaagggacttccttccagggacctaggcatcttcggatgaggattttagaagaacgatggtgtttacagtcatcgctcattgtccatttggactaatgggggtctgaggtgcaggcaacacccaaatcacttatatttgattatgaatattgctcatttaatgtgagttctaatattccagaaactatcatgaaaaaaataatagaatcacgatgtaaaaaccaaattttcacaacctacccaatccttttaaaccttaagaacaccttccagctccag

SEQ ID NO: 90727 - DNA, 782 bp, Homo sapiens
aggtgcttagaaaacacctgttgaattgaactgaagtgacatcaggcctccaggtctgtttctttatctttaatggaaggaaattcgaccaggttctttccagctttaaaaatctaattctaagtagtgtcaactaaatctgactgtctgccgaggtggaataaacagctactacatgctgtgctccagctgtgtcaggaaaggcccctccccttacagacacgctgcccactgatgtgccgggcaggccaactggagcagcacagcttggcattaaggtgttcagccttgtcgaaatacaaaaacgtctgcaaaggtacgtgcaagctattatcagtcttttacaccagattgagaaaacaacttccagaactttgcctgggagcagaccttgagagagggaacagtactatatgaaggagttgacctgcggtgctaggggaacaagcttggggtcctcagagatgaaaggagtgtggcgacactgaaggtgaactcgtaccggctcacaaatggcccagttcagccacttgctgtcttccctgagctctttcccagtgtctctcagcaaagaagtgagaagtgaaactcagaaactcttyatctcctctatccaaagccaatattttgctctatgagcaatgctggctcttgcatgttctaaggcaaattaaaaatagctgctgtgtgcttattttcctgcagcgaatttaaatgtgtgccactgaggccatcactttttactttgaagaggcatcatcccacgtcctcccacacagact

SEQ ID NO: 90728 - DNA, 782 bp, Homo sapiens
aggtgcttagaaaacacctgttgaattgaactgaagtgacatcaggcctccaggtctgtttctttatctttaatggaaggaaattcgaccaggttctttccagctttaaaaatctaattctaagtagtgtcaactaaatctgactgtctgccgaggtggaataaacagctactacatgctgtgctccagctgtgtcaggaaaggcccctccccttacagacacgctgcccactgatgtgccgggcaggccaactggagcagcacagcttggcattaaggtgttcagccttgtcgaaatacaaaaacgtctgcaaaggtacgtgcaagctattatcagtcttttacaccagattgagaaaacaacttccagaactttgcctgggagcagaccttgagagagggaacagtactatatgaaggagttgacctgcggtgctaggggaacaagcttggggtcctcagagatgaaaggagtgtggcgacactgaaggtgaactcgtaccggctcacaaatggcccagttcagccacttgctgtcttccctgagctctttcccagtgtctctcagcaaagaagtgagaagtgaaactcagaaactcttcatctcctctatccaaagccaatattttgctctatgagcaatgctggctcttgcatgttctaaggcaaattraaaatagctgctgtgtgcttattttcctgcagcgaatttaaatgtgtgccactgaggccatcactttttactttgaagaggcatcatcccacgtcctcccacacagact

SEQ ID NO: 90729 - DNA, 705 bp, Homo sapiens
acggaatggtccatcgtaaaggcattcgattcctggttcaaatttggatcagtctgacctcttaaagtctaccaggtgctgagggartgtgtcctcagtctagtccagacaaactgactcccacatgaatagcacagcctcaccctgccaccctccccactcctttgacctgagatcagcttggtaaagtccatgcccagacttagtgattcactgggggctgtaagattgagggtgagtcagaagctgggttctccctgggcctttctgggaattcacttgctctaagtctatcttccagaaactcggcgtgtcttcaggttctgggctttcacttatggctctcacatccagcatgcctttcttaaaattttctaaaaatttccaaattccatttcatacaaatgccccatatcaaccgtccatgtcaatatcactgtatatttcacataatgtagcacattaggggtgctcaaatggtatagcctgacatgacttgcagtggattttgctttgatttcaagtcaacatacagtaatggagctctcagtgtgtgtgaagcccgtggtaggagtgccctccctcactctgcctccctggcggccacgtggtgtgaagcttatgaaactaaaggcaaactaagcagtggaggatgctacatttttgagctgcactgggagttattagcagagtgtgggatgcctg

SEQ ID NO: 90730 - DNA, 705 bp, Homo sapiens
acggaatggtccatcgtaaaggcattcgattcctggttcaaatttggatcagtctgacctcttaaagtctaccaggtgctgagggagtgtgtcctcagtctagtccagacaaactgactcccacatgaatagcacagcctcaccctgccaccctccccactcctttgacctgagatcagyttggtaaagtccatgcccagacttagtgattcactgggggctgtaagattgagggtgagtcagaagctgggttctccctgggcctttctgggaattcacttgctctaagtctatcttccagaaactcggcgtgtcttcaggttctgggctttcacttatggctctcacatccagcatgcctttcttaaaattttctaaaaatttccaaattccatttcatacaaatgccccatatcaaccgtccatgtcaatatcactgtatatttcacataatgtagcacattaggggtgctcaaatggtatagcctgacatgacttgcagtggattttgctttgatttcaagtcaacatacagtaatggagctctcagtgtgtgtgaagcccgtggtaggagtgccctccctcactctgcctccctggcggccacgtggtgtgaagcttatgaaactaaaggcaaactaagcagtggaggatgctacatttttgagctgcactgggagttattagcagagtgtgggatgcctg

SEQ ID NO: 90731 - DNA, 705 bp, Homo sapiens
acggaatggtccatcgtaaaggcattcgattcctggttcaaatttggatcagtctgacctcttaaagtctaccaggtgctgagggagtgtgtcctcagtctagtccagacaaactgactcccacatgaatagcacagcctcaccctgccaccctccccactcctttgacctgagatcagcttggtaaagtccatgcccagacttagtgattcactgggggctgtaagattgagggtgagtcagaagctgggttctccctgggcctttctgggaattcacttgctctaagtctatcttccagaaactcggcgtgtcttcaggttctgggctttcacttatggctctcacatccagcatgcctttcttaaaattttctaaaaatttccaaattccatttcatacaaatgccccatatcaaccgtccatgtcaatatcactgtatatttcacataatgtagcacattaggggtgctcaaatggtatagcctgacatgacttgcagtrgattttgctttgatttcaagtcaacatacagtaatggagctctcagtgtgtgtgaagcccgtggtaggagtgccctccctcactctgcctccctggcggccacgtggtgtgaagcttatgaaactaaaggcaaactaagcagtggaggatgctacatttttgagctgcactgggagttattagcagagtgtgggatgcctg

SEQ ID NO: 90732 - DNA, 865 bp, Homo sapiens
cctccctgctacctctctggcagtgggagtggtgagaccccatcccctccacacagacacatcctgctttcccacctctactgagtgttaagctgtgcaggggaagcaaggttggtgatggagaaatggacatggaaatggaggccagtttctctctgcactttctttctcaagtcccggaggtgtacgactgaccaatttccctgcgtccctgggcaacagtgcatcccagctttatctctctgcttacattctggaagcaggcaaatagctctcgtgatgtttatatggatttttacaactgctaatactcggtaacagctaggccggtgaaagatacctccatagagccccactctctcgcaaccctttccattttcatgtagattcaggcagggaagacctaagcgctcctcctaggaggcttttcttgacccccagcactgtggctgggagtgagagccacaaggtatgggagtggctgggagtgagagggttacagatggaggacagaggggaaagagagagcccagggggatgagaaaaaaatatgcctctgaaagaaggtaagaaaatgatatgatatggagacacctccaccaagacaaactctcaactagaggtggtttgagaaataaccagtcttgaaggcacatgggacctcctcctccctcatcagaggctcactctgccctgaaaagtccaccttgggttgtgaccagaagagcaaagagaacaggagagatgggaaggggatgaagtcctccaaattggtgatggaaaagaaaaagtgaagaacatctaagggctggcaatcaatgggcaattccaggaggaggrgcatacctaaggaggagtttatgca

SEQ ID NO: 90733 - DNA, 1006 bp, Homo sapiens
ataatagctgccagttattcaggaccttgtatgtaccaggcaaagtgttaggaacgttttatccattttctcttatgtgctaagcagtcccgctagctgcttcatcctggaaatatagatgggagactgaagtcaaggactccaactgtgtgtttaacatctctcttgactcccaggaacctccagtttggcatgtccaaaatgaaacacatgtctgtcttctatcaatatgttttgcccaacccctgcaacactcccacttccagaaaaatcacacaaacaaaaaaccacacacacaaccattgtgcctttcctctctcagggagtgccaagaaaccatctggttcatgccagaaacttgggagtcaaccttgcccccttctctgcttgccccccataaatctgccaccacaaatcctgtcaactgttcttacatctttccttcccattttttctgaccccattgcctccactctattccatttcattattttcctgccttttctattgttggagcctcctaactggcctgtgtctctgagctggccttcctgcccctcctccactggtccatttaatctgcaatctgagtgaatgttttttctaatatgcaaatatgattatattgccttcttggttaaaatgcttcagcagcttgttacattcttctttcaatttcttgaactgaatgtaatttctttagctcttaaatatgcaatttcctcttccttgattactcttttcctcctctttgtctagccaagtttcattcatccttcaggcttcagcttaaatagcctacatttgttgaggtttatggttatctctgcatgggatgtccacgttggcagggactatgagagatttttcagattataacatctgactcagagttggtgctcagtgtctgcctgttgwatgtagtataggggaggaaaaacattttttctctgccctcttaggttcagtagctgggccctgcaaaataaactgatgaaagatagat

SEQ ID NO: 90734 - DNA, 586 bp, Homo sapiens
cctaattaaattgtggaattcagtcagagccaggaatgcaaataagcataacagtaaagtaaataatgatactcatttactcatcaaatatttattgggccctgctagttgcaaggcattgatttgcatactataagtgtatcatagttagattcagaaataatgaaaactgagaagtcactggaaaagtgagagacttatgaagtgctccaggaaaacagaggagataaatataattaaggattgaatgaacgaggtcagcacatctgcattaatgtgagagaaggagattctgctcacwtgagaatttttcttttttcttgtagaataagagatattggtatatacaagtgaggatgatggagacaaaaaatggaagttaagatacagatgtaaaaaaaaggcataaagtgtataaaagaaaataatgtatgtttcatggtttttattattattaagttttttgttttgttttgttttgttttttttagttttggacttttccaaaaccccaaataccagctggaactaaaatggtaaagggtgaataaaatcttgcatgtaatttacatattgcacatatgcc

SEQ ID NO: 90735 - DNA, 2316 bp, Homo sapiens
tagttctgtaaataatgccaaaaacttgaatcactttaccaattcttaatcatagttctaattcagtttcagatagactagctcctttaactgtaccctccccttttgtagccaggaagacctgaagaaaaaagttctgcagatttagtccttaaagcatgctcaccagtttttattctctactggcctgcaaactccttgaaggtgtatggtttcagatctcttttgtattctgcattgaagcacagactctttcaactgatgcattgtttggtttttcagtcttctttccttcatcctagtagacagggtcatcctgggctccaggctctgcagtctgaagccaggtccatatcctaaggctctccttccagatgcctggctaccacccatctggaaggttaagatggcagggattcctttaatctgaagaaagtgagatgctttgattggaccagtcttgatgacctagctaaaagggcaacaccaattcagtaacaccaggttctgattaccagtattactgattctgatttgcaagatctgggcagacrttagaggttgtagtttatacttcagcggtaacctttgagaagccaagtttaaagctggaaaattctctcctatggtacacgagtgcctccaagtggcagaaaattaaggtgcatgggtataactgaaagctaaacaccatacccagttgcacccaagcacactggcatcttggtagtggttgtttctgccagagagagtcacaggtaacttaattatatattttggatatggccaaccttcgaattttaactgtaagctttctttaaaataggcaaagaggatgatatgatttacataactagcttcaatcttcatctgtaagatttggaaaatgattcctaactcataagaatattgcaggaattaaatgaattaaaatgcttataccagtgcctggcatatgtgatatgatattggtaatatgtagcaactattggtagtatgatatatgttgtatatactaaatagtatatcttatgttgtatatattccatgtatgaatatataatatataatatttataatataaatatataacatattacatacaatgagtaatatatgctatgcaatattcataatgggaaatataatattgaacatataatgtataatattattattatgagattcataatttttttgcaggggattgggctacaaaatgatttgacttttttttgagaattgtacaagagagctatccatcagcaaggatggattcagtggctcaataagttgtggagatttgggcattttaacatggaaatcaagtggaattattgcaaattttccatacaatcaaaggcccaaaatggaagcccgatattataaaatggcacaagaaactgagtgctcttcccactcatcaatagtctaatagactgaaagaaactttctcaaatctttgagagacatgtatgcattccctccttcccaaccacgatggccaagaatgaaaaagagcatttggtgctaattgcctttatctattacctagtaacagcagcagagcagttggctgctggaatgagctgtcatgccattagttgactcaaagttggcactaacacatggatgcccagtttgtgaacgtccagctcaccctttcaggagatacactagttcttatattataaaggatttcagttctcaggactaagaacagtatccctgacatagtaaagctactattctgtgacctgtcaaaaatttaatcttctgattttcagaaactagtctaatgggactcagttgacttaattggccattctttctgcccaatctcagctgaaattttttttatttttatagatttaggggtaacaagtgtagttttgttacatggatatatgtaatggtgaaatctgggcctttggtgcacccatgatccaaacagtgtacactgtatccaaaaagtaattttttttttatcagttcctaccctcccggcttcccaccatttggagtttccaatgtctattattcccctcttatgtccatttgtacccattgtttagctcctgcttataagtgagaccatacgttatttgacttttggtttctgagtaatttcccttaggataacggcctccagtttccaagcatgttgctgcaaaagacatgatttcatttttcaaaaaatggctgagtaatattaagggttactgagtagtagtagcagggatttttttttttttttaacttgttgagttgtttcattttcttgtagattctggatattagccctttgttggatgc

SEQ ID NO: 90736 - DNA, 2264 bp, Homo sapiens
attacaacttactaaatgtaaacaccagaaattattcaaggtattcttcagaccacaatggaattaaactagaaatcaataaaagaaagactgctggaaaaacccaaaatattgggtgattaaacaacatccttctaaataatgttatatgtcagagatgtcttgaggaattataaagtattttgaattaaaatgaaaatacaacttctcaaagtttgtgggatatactgaaagcagtgcttagatagaaatagcattggatgtatataatagaaaagagaaaatatctaaatcgataataaccttccaccttattaggaaactagaaaaagaagagcaaaatggggtagaggaccacttggagtaagaaggatgagtttggttacataattaggagaattgttcaggtgactgatttcaaaattttagaatgtggttctaagtagttttcttagatagtgcttgataaacttttacagttgttttaacatttttgacatatttaatattttgtttttcttagaccattccaacaaaagacagacttgaaggtcttcttgcttttaaagagaaaaggccccctcgctataaaggagaataaaaggaacagaaattcttaagatgccaatgtaataaatgtacttcctggaagtgtctttcggatccactatatgcctcagcacatggaaccttaatgaccaaagtgaagagcagattattcatacggtgtaataagcatctggaatggacccatccgtgtacttcattcaaatgtgtaaatgtcatattcattcagatttataaagctagtagtgtatagtcagaaacagaatcaaagttagatatacatttttaaatatttactgcatatgaggctttctgttaattttttaatgtgaataatttatatattgcacattctagggaataatattgattgtatgtctactgtgctgcattaagaaaataaaatttctatataccaaaaatgtgaagttataccaaataaagtttctaagtgattaatgcatacgaacagctacatatacatatatctaaacctgaaaaatgaattgatattctgagtgaaaactacctaatataaataaaattagtgaaaagaaaacatgggaatttttctcttaccccattctttttgaattgactaaatcattgcatgctggactttagaagaaacaaccctttcattgctgcttctatcaggcaacctctttacatggtcagtcctgtaatacagtattgaaggtgaagaatgaatccaaagactgaagccaaagaaccaaagcggacaggagacctagtgcagtgggacttgctgggacctcctcccagcaagtggtgtggtcgccgactggcctaggaaaggcgatgtttgcacacaaaggaggaaagaaaatggggcagccaggattggagcatggaaatggcttggggtcatggattaaagtggagactgttctctgcttccctaccctctgctatttgcctccaatttctgtaagggaaagaggtgaacttaacaaccctttgtcctaacaaacacctgccttcctacccaggccaggtcaagaagctgtaaacggcctccaggttgcatgcctgagtagccacacctggggagtaggcactggtgggagttgtgtgggacattgggaactggagaattcgctgtggaaaaaaggagaacattctgatgcctttaagtaatttgagatagctctactttacattcattttaycaaaccaccctgccttcctagtttgtgtcaggtctgagtctggtcatgccagagacaacgtccccgggagtgcccctgcagcaagcttcactgtggtacagcccagctgtgtccctaaggtgtcctcctttcacatttccatgtatcagataaacacccattttactgtggatttacatcctcattgtggcgacttcattgctatttgaaggcatgtaggcttcatttttttaattctgaaacttacattttttaacttaggaatttgaactcaacctcaattctaaaattcttataagaggcaaatgtggactggctggctgctgatgtctgtcctgacaaaggtaggcggtgtcttcactcatgtttggacactaaggtgagcgctattttctttatgacctttggtgctgaggctctgcggatttatgatgattgctcagctgatcatcatactataaagagggcttactaaaattcacatttggcactctctgtggtggt

SEQ ID NO: 90737 - DNA, 735 bp, Homo sapiens
taaaaataaaaagtattgaaatcccagcacatatagatgtcttatgttttaggacaacttttcttccacactgttaaattcatkttccactgttagacatttagattatgatgacaaaatcatttattaatttgagctttcagaccttgaacaggatttcatgtacagtaagagtttgctagtaatcaaatcgaagagtcctttccttaaaaaaaaaaagtaaaatgaagatgaaatttaatttccaatatatgttagggaaccagatatattctagttggtactagaatgtataattagcccttggtgaaatttcagaagactttctaggttaagatattattgaaaacagtccctctacaccaaggctactttgagggtagaagataacgcgtgagtcatctcacctccggcagcactgttacctctcagagcttctcaaacacagtggccattgttgttaccacggctaattattagcctgctccaacagaatttgtgttgatgttacaaaaacagtttatgctacacaagctctttattcatgtaataattacagcatgtttgtcttaagtatttcgcaagtgttctctttggataatactagcaagattaagtaatagtttctcgctaacagtattgctcaagaacatcaaacgtgatggattgggatttgatatatgtatgtctttggcttctagcgtctttgactttttgcgttgcttacatataaaa

SEQ ID NO: 90738 - DNA, 735 bp, Homo sapiens
taaaaataaaaagtattgaaatcccagcacatatagatgtcttatgttttaggacaacttttcttccacactgttaaattcatgttccactgttagacatttagattatgatgacaaaatcatttattaatttgagctttcagaccttgaacaggatttcatgtacagtaagagtttgctagtaatcaaatcgaagagtcctttccttaaaaaaaaaaagtaaaatgaagatgaaatttaatttccaatatatgttagggaaccagatatattctagttggtactagaatgtataattagcccttgstgaaatttcagaagactttctaggttaagatattattgaaaacagtccctctacaccaaggctactttgagggtagaagataacgcgtgagtcatctcacctccggcagcactgttacctctcagagcttctcaaacacagtggccattgttgttaccacggctaattattagcctgctccaacagaatttgtgttgatgttacaaaaacagtttatgctacacaagctctttattcatgtaataattacagcatgtttgtcttaagtatttcgcaagtgttctctttggataatactagcaagattaagtaatagtttctcgctaacagtattgctcaagaacatcaaacgtgatggattgggatttgatatatgtatgtctttggcttctagcgtctttgactttttgcgttgcttacatataaaa

SEQ ID NO: 90739 - DNA, 1648 bp, Homo sapiens
ggaattctaaaggtttcaaccagaaatctgaaatttcctcaaacaaatgtcttctatgtaaaaaatatatatctatatctakatctgtatctatatatctctctatatatctatatctatatctatatatctgtatctacatctatatagatatagatatagaagcttcaatttccattatgctgaatggaatgtttcagataaacatttcgttaattacaactcttcatggatagtgccataaaaaatagtggcttatattttaaatattcatccaaggaggcagcatggcagtgatagagtagattttgcagtcaaatcactcttgagccatttgctagtttcatcaatttggatgaggttttaatttctctgaacttctgtttctgcatctttactctgtggataataatatctacctcttaaggctgttatgataacttactgactaacataaataatgtacatacacatagtgggaaattaagaacaaatttgagtctgctattgtgccctactccacttcaggagcaagaaaataatcactgcaaaataatagactttttgttgaatctcaaacttgtagactgggttacaaaattccatattttttatgtcattatctgctcgtagtaagaagaaaacccatacacacacacatatacacgtctgtatatttatatataatatgcatattatatatacatttcctttatatatatgtaatatgtatatatagtatgaaattggaccaacatattaagaatcactttcctcttaccacaacatgaagcaatttcaacatggatgctccaacttcatttgggatacttcacatataaggatcctatatcttgaaaccatctccagtggatttcctagatgaaatgaaacagaaactcttgggaacatggaaaataaaaacctagcttctttcagtagtgctcagctaaaattccacatcattctccatcttgctggttttgccctaattatttaaaaaaatgtttacttccaatccaatttgatgtacccatccttgatgacactattgcttgcattttcaggtaatgcattttattatatgtgttttcataaatcaatgagtattcttaaatgtatattaaaaatcaactaaatatcagcaatagcatatagatgagaaaaaggaggacagcaatcaagttacagtgtgttagagaaagaaaaataatttgaatatatagcttttctctttttcagatgcttgtggatgtctttctaaaagttgaatgaataaaaaccataatacaataatgaaacacatttatctgtttccattcatcacattagtataaaatatattactctgtacctatatattctagtcttgataattttgcaagctaaagcttttataaatctataaatttgccatttataaatttgccaggtatttatttggctcttttggcaaaatttgagcaattttctgactctcgctctcacacacagatacatatatgcacatgcacatacacataccacttaaaagtcaaatttattgcaagaaattatactacaatcacataaaatacaatgaaatcacatttatttgccaggctaggtctataccctttaatagctattttggtttcattacaataaa

SEQ ID NO: 90740 - DNA, 1648 bp, Homo sapiens
ggaattctaaaggtttcaaccagaaatctgaaatttcctcaaacaaatgtcttctatgtaaaaaatatatatctatatctagatctgtatctatatatctctctatatatctatatctatatctatatatctgtatctacatctatatagatataratatagaagcttcaatttccattatgctgaatggaatgtttcagataaacatttcgttaattacaactcttcatggatagtgccataaaaaatagtggcttatattttaaatattcatccaaggaggcagcatggcagtgatagagtagattttgcagtcaaatcactcttgagccatttgctagtttcatcaatttggatgaggttttaatttctctgaacttctgtttctgcatctttactctgtggataataatatctacctcttaaggctgttatgataacttactgactaacataaataatgtacatacacatagtgggaaattaagaacaaatttgagtctgctattgtgccctactccacttcaggagcaagaaaataatcactgcaaaataatagactttttgttgaatctcaaacttgtagactgggttacaaaattccatattttttatgtcattatctgctcgtagtaagaagaaaacccatacacacacacatatacacgtctgtatatttatatataatatgcatattatatatacatttcctttatatatatgtaatatgtatatatagtatgaaattggaccaacatattaagaatcactttcctcttaccacaacatgaagcaatttcaacatggatgctccaacttcatttgggatacttcacatataaggatcctatatcttgaaaccatctccagtggatttcctagatgaaatgaaacagaaactcttgggaacatggaaaataaaaacctagcttctttcagtagtgctcagctaaaattccacatcattctccatcttgctggttttgccctaattatttaaaaaaatgtttacttccaatccaatttgatgtacccatccttgatgacactattgcttgcattttcaggtaatgcattttattatatgtgttttcataaatcaatgagtattcttaaatgtatattaaaaatcaactaaatatcagcaatagcatatagatgagaaaaaggaggacagcaatcaagttacagtgtgttagagaaagaaaaataatttgaatatatagcttttctctttttcagatgcttgtggatgtctttctaaaagttgaatgaataaaaaccataatacaataatgaaacacatttatctgtttccattcatcacattagtataaaatatattactctgtacctatatattctagtcttgataattttgcaagctaaagcttttataaatctataaatttgccatttataaatttgccaggtatttatttggctcttttggcaaaatttgagcaattttctgactctcgctctcacacacagatacatatatgcacatgcacatacacataccacttaaaagtcaaatttattgcaagaaattatactacaatcacataaaatacaatgaaatcacatttatttgccaggctaggtctataccctttaatagctattttggtttcattacaataaa

SEQ ID NO: 90741 - DNA, 1648 bp, Homo sapiens
ggaattctaaaggtttcaaccagaaatctgaaatttcctcaaacaaatgtcttctatgtaaaaaatatatatctatatctagatctgtatctatatatctctctatatatctatatctatatctatatatctgtatctacatctatatagatatagatatagaagcttmaatttccattatgctgaatggaatgtttcagataaacatttcgttaattacaactcttcatggatagtgccataaaaaatagtggcttatattttaaatattcatccaaggaggcagcatggcagtgatagagtagattttgcagtcaaatcactcttgagccatttgctagtttcatcaatttggatgaggttttaatttctctgaacttctgtttctgcatctttactctgtggataataatatctacctcttaaggctgttatgataacttactgactaacataaataatgtacatacacatagtgggaaattaagaacaaatttgagtctgctattgtgccctactccacttcaggagcaagaaaataatcactgcaaaataatagactttttgttgaatctcaaacttgtagactgggttacaaaattccatattttttatgtcattatctgctcgtagtaagaagaaaacccatacacacacacatatacacgtctgtatatttatatataatatgcatattatatatacatttcctttatatatatgtaatatgtatatatagtatgaaattggaccaacatattaagaatcactttcctcttaccacaacatgaagcaatttcaacatggatgctccaacttcatttgggatacttcacatataaggatcctatatcttgaaaccatctccagtggatttcctagatgaaatgaaacagaaactcttgggaacatggaaaataaaaacctagcttctttcagtagtgctcagctaaaattccacatcattctccatcttgctggttttgccctaattatttaaaaaaatgtttacttccaatccaatttgatgtacccatccttgatgacactattgcttgcattttcaggtaatgcattttattatatgtgttttcataaatcaatgagtattcttaaatgtatattaaaaatcaactaaatatcagcaatagcatatagatgagaaaaaggaggacagcaatcaagttacagtgtgttagagaaagaaaaataatttgaatatatagcttttctctttttcagatgcttgtggatgtctttctaaaagttgaatgaataaaaaccataatacaataatgaaacacatttatctgtttccattcatcacattagtataaaatatattactctgtacctatatattctagtcttgataattttgcaagctaaagcttttataaatctataaatttgccatttataaatttgccaggtatttatttggctcttttggcaaaatttgagcaattttctgactctcgctctcacacacagatacatatatgcacatgcacatacacataccacttaaaagtcaaatttattgcaagaaattatactacaatcacataaaatacaatgaaatcacatttatttgccaggctaggtctataccctttaatagctattttggtttcattacaataaa

SEQ ID NO: 90742 - DNA, 1648 bp, Homo sapiens
ggaattctaaaggtttcaaccagaaatctgaaatttcctcaaacaaatgtcttctatgtaaaaaatatatatctatatctagatctgtatctatatatctctctatatatctatatctatatctatatatctgtatctacatctatatagatatagatatagaagcttcaatttccattatgctgaatggaatgtttcagataaacatttckttaattacaactcttcatggatagtgccataaaaaatagtggcttatattttaaatattcatccaaggaggcagcatggcagtgatagagtagattttgcagtcaaatcactcttgagccatttgctagtttcatcaatttggatgaggttttaatttctctgaacttctgtttctgcatctttactctgtggataataatatctacctcttaaggctgttatgataacttactgactaacataaataatgtacatacacatagtgggaaattaagaacaaatttgagtctgctattgtgccctactccacttcaggagcaagaaaataatcactgcaaaataatagactttttgttgaatctcaaacttgtagactgggttacaaaattccatattttttatgtcattatctgctcgtagtaagaagaaaacccatacacacacacatatacacgtctgtatatttatatataatatgcatattatatatacatttcctttatatatatgtaatatgtatatatagtatgaaattggaccaacatattaagaatcactttcctcttaccacaacatgaagcaatttcaacatggatgctccaacttcatttgggatacttcacatataaggatcctatatcttgaaaccatctccagtggatttcctagatgaaatgaaacagaaactcttgggaacatggaaaataaaaacctagcttctttcagtagtgctcagctaaaattccacatcattctccatcttgctggttttgccctaattatttaaaaaaatgtttacttccaatccaatttgatgtacccatccttgatgacactattgcttgcattttcaggtaatgcattttattatatgtgttttcataaatcaatgagtattcttaaatgtatattaaaaatcaactaaatatcagcaatagcatatagatgagaaaaaggaggacagcaatcaagttacagtgtgttagagaaagaaaaataatttgaatatatagcttttctctttttcagatgcttgtggatgtctttctaaaagttgaatgaataaaaaccataatacaataatgaaacacatttatctgtttccattcatcacattagtataaaatatattactctgtacctatatattctagtcttgataattttgcaagctaaagcttttataaatctataaatttgccatttataaatttgccaggtatttatttggctcttttggcaaaatttgagcaattttctgactctcgctctcacacacagatacatatatgcacatgcacatacacataccacttaaaagtcaaatttattgcaagaaattatactacaatcacataaaatacaatgaaatcacatttatttgccaggctaggtctataccctttaatagctattttggtttcattacaataaa

SEQ ID NO: 90743 - DNA, 733 bp, Homo sapiens
cttytgataataagttctttccccagtgaatgctggaaactcatacttacctaatagcctcaggagatatttccactactcatgtaaattatctattactcaatggaattgtacatgtgggcaagaaaaatagtcagtgcatggctttacaaatccagataaccagtactaaagatacacaccctgccacacacaccatgagtatatactgggactatgatgatcaattatcttaacaaaagtagaaatccaatatctttactttaatattgtcatccttgaacaaaaaattaataaaaagacaagagacagagaaacaaaacaacaaacatgagtattactgatgaggaaaaagaaaatgacaaagttcacagaaacaatattttttaaatttttttgagccatttttgttttctgtattttaattgaatacagctacaagaagatatgggatgattaaagatctaatagaccaaagcctatcatctacttaaaaaatcttatcctttagtagaattcaggctacattttccatagtctgcgcaatctgtctctcagtctttttcgatcacaccctctgccttttgcggagagttgttattttattccaagaaaacttgagactttccctgatcagtgcaactcctaaattttaccctgatatattcctatattacatagcagttacatgccattttaatggtagagccttatggtttgcacattcctagct

SEQ ID NO: 90744 - DNA, 1535 bp, Homo sapiens
tgcatattaaagtttaagatgcactgctctacactatttaaggaactgggaactcccaagtacttgtcagatcttcagtcagaaaaacataaataaataaaacaatctccaccctcctactcctcaaaacctcaccattgctcttcaaaaacaaacaaaacatgactgagggcggtggctcacgcctgtaatcccagcactttgggaggctgaggagggcggatcacgaggtcaagagatagagaccatcctggccaacatagtgaaaccccgtctgtactaaaaatacgaaaattagccgggcgtggcggcgggcgcctgtagtcccagctactcaggaggctgaggcaggagaatcgcttgaatccgggaggcagaggttgcagtgagccgagatcgcgccactgcactccarcctgggcgacagagtcagactccgtctcaaaacaaaacaaaacaaaaccaaaacacacacacacattgatagttctgattgggaaattctgaactagattaactttatgctacaccttgggggaaacattgagttagttctgggaggctagtttgttcatctgcagatcaatgcaagcaaggatgaggtttcctgagttgaagacacacattaaatgattttatttttaattgcagtctcaccagagaaggggaattgtcctggctccttctcttcctaggatagtttgatcattctgctctttctagtcattaacagactactaccttcattttcttaaaaatactagtcatgtgttctacgtgttttctttgacatccagtaagatttattctggaagtgtaattagaaaactctaattgtctaaatgctttctcaacagagatagaaggacaatttggatattttatatgcatgtggatggtatgatagttaaggcaaggggttaaatgtttaacaaattcaggaattataaattttttttcttttcttttttctttctttttttttttgagaggttgtctagctctcatagcccagactggagtgcagtgatgagatctcagctcactgcaacctgcgcctcccaggttcaagcgattctcctgcctcaacctcccgagtagctgggattacaggtgtgtgccaccatgcctgcctaattttcctgtttttactagagactgggttgcaccatattggccaggctggtctggatctcctgacctcaggtgatgcgcccccacctcggccttcccatagtgctgggattacaggtgtgagccaccacggctggccaggaatgataaatttctgtaggaaaagaagtctagctccacccttagcaaataagttcataaagcaaggactttgtgcctgtcttgttactgtatttccagtgtagtcttagcaaataccgtgtgctcaattaatagttttataattggattcagttgaattaaaacaaattccttcagtctaatcagacaataaggtctttatattcaatttgacagtcttgtattataaaggacaaaatatatgacagtaggaagagccc

SEQ ID NO: 90745 - DNA, 1535 bp, Homo sapiens
tgcatattaaagtttaagatgcactgctctacactatttaaggaactgggaactcccaagtacttgtcagatcttcagtcagaaaaacataaataaataaaacaatctccaccctcctactcctcaaaacctcaccattgctcttcaaaaacaaacaaaacatgactgagggcggtggctcacgcctgtaatcccagcactttgggaggctgaggagggcggatcacgaggtcaagagatagagaccatcctggccaacatagtgaaaccccgtctgtactaaaaatacgaaaattagccgggcgtggcggcgggcgcctgtagtcccagctactcaggaggctgaggcaggagaatcgcttgaatccgggaggcagaggttgcagtgagccgagatcgcgccactgcactccagcctgggcgacagagtcagactccgtctcaaaacaaaacaaaacaaaaccaaaacacacacacacattgatagttctgattgggaaattctgaactagattaastttatgctacaccttgggggaaacattgagttagttctgggaggctagtttgttcatctgcagatcaatgcaagcaaggatgaggtttcctgagttgaagacacacattaaatgattttatttttaattgcagtctcaccagagaaggggaattgtcctggctccttctcttcctaggatagtttgatcattctgctctttctagtcattaacagactactaccttcattttcttaaaaatactagtcatgtgttctacgtgttttctttgacatccagtaagatttattctggaagtgtaattagaaaactctaattgtctaaatgctttctcaacagagatagaaggacaatttggatattttatatgcatgtggatggtatgatagttaaggcaaggggttaaatgtttaacaaattcaggaattataaattttttttcttttcttttttctttctttttttttttgagaggttgtctagctctcatagcccagactggagtgcagtgatgagatctcagctcactgcaacctgcgcctcccaggttcaagcgattctcctgcctcaacctcccgagtagctgggattacaggtgtgtgccaccatgcctgcctaattttcctgtttttactagagactgggttgcaccatattggccaggctggtctggatctcctgacctcaggtgatgcgcccccacctcggccttcccatagtgctgggattacaggtgtgagccaccacggctggccaggaatgataaatttctgtaggaaaagaagtctagctccacccttagcaaataagttcataaagcaaggactttgtgcctgtcttgttactgtatttccagtgtagtcttagcaaataccgtgtgctcaattaatagttttataattggattcagttgaattaaaacaaattccttcagtctaatcagacaataaggtctttatattcaatttgacagtcttgtattataaaggacaaaatatatgacagtaggaagagccc

SEQ ID NO: 90746 - DNA, 722 bp, Homo sapiens
aatgcttggccactgaaatttgatagactttctattcataggagctactatttgcctaacacatgccttttctctgaataagtaatggcgccatttttggccacatacttcttaatggcttggtttattcattacacaaacatctagcttcttataaagcctaactaagtttcttagtaaatcactatggcttctggaatgtgcgtataggggtaaggatgcagcaaggaggataggccatacagttacatgttttcatgacaaatatctctgaacgctggacacagtgaaatctgaactcatcatctacaagcatgctcttctggtttatttttaatttcaataattagcattacacttataattactcagaccagtttccttctttccctacattttctaatataattagtcagagtccttttgattctatattttcaacattcctcacatctatctcttaccttcttcccatttttactctcactattgtagatctgaccctcattatttcttatctgtattattaccctggccttgtaactcctcagtttcttccaaagtattctacatcttactgccagattaatcttttcaaagcttgattctgattatatcatttctctattaaaaaaccttcaacaattctccgttagcagacacaagtgttcatattactttgtgagaaattcagggtactccatgacctgattccaakccaa

SEQ ID NO: 90747 - DNA, 1224 bp, Homo sapiens
gagacttgatggttttaaagggaagttcccctgcacaagctctcttgtctgctgccatgtaagatgtgactttgctcctcctttgccttctgccattattgtgaggcctcccctgccatgtggaactgtgagtgaattaaattcctttcctttataaattacccagtatatctttattagcagcatgagaacagactaatacaaatgttcaccaatatgaraacactgaaacatttaaaatgtttagaatggatgctaagcataccattctagtcaaatgatctatttaagttggctgtttgatttatttgtgagataatatcacattttaaaagtttcagcacatactgttttttaaactattaatattgtgttccttcatatttatggagctatactagtcctgaagctttaatgccactctactcctccaaatactgtatgtgtgcagacatgaaaataattagagtatattcaaattaactttgtttggggaacagtgtggcaccctatgcccatagtttagtgcacatcatgtcgtattttctgtcctgtaccctttctgcctctaggaacagcattttcctctcttaggaactgcctcttccccagatccaaccatatggttactcaggatccaccctggtcttccgtgatgctgtcatactctgacctcaagtaatttctctagaagcaggcacatagccagagttcagccaataggaatgcttcccctgggatttttgtgaaaggaagagaggaagagtcagttcttctctagagatggaaactattcataaaatcaggttcccttggcagccagttttcctctcacttgaaggaagcctgtttttggtggcagaaactaaagtggacagaaatgtgggtcagaggttagccttgccacagtcaagtccttggctccagctgtttcagaagccaggtgcatttctgcctttatcaagttgtggttgttcagatttccttcaattatataagacatactcagtattgtactgcaggcttacacatttgcctaagctagtttgattgtggtctctatcagttacaatggaaagcatcatgactaaagcaaatggctataacttcaatttaaatttgttcaacactttctgggtagttttgagccaaaccctccaaaggaagcaatgcaatatgaagccttgtccctatcctctgtgagtttatgctaaagtaggagag

SEQ ID NO: 90748 - DNA, 1224 bp, Homo sapiens
gagacttgatggttttaaagggaagttcccctgcacaagctctcttgtctgctgccatgtaagatgtgactttgctcctcctttgccttctgccattattgtgaggcctcccctgccatgtggaactgtgagtgaattaaattcctttcctttataaattacccagtatatctttattagcagcatgagaacagactaatacaaatgttcaccaatatgagaacaytgaaacatttaaaatgtttagaatggatgctaagcataccattctagtcaaatgatctatttaagttggctgtttgatttatttgtgagataatatcacattttaaaagtttcagcacatactgttttttaaactattaatattgtgttccttcatatttatggagctatactagtcctgaagctttaatgccactctactcctccaaatactgtatgtgtgcagacatgaaaataattagagtatattcaaattaactttgtttggggaacagtgtggcaccctatgcccatagtttagtgcacatcatgtcgtattttctgtcctgtaccctttctgcctctaggaacagcattttcctctcttaggaactgcctcttccccagatccaaccatatggttactcaggatccaccctggtcttccgtgatgctgtcatactctgacctcaagtaatttctctagaagcaggcacatagccagagttcagccaataggaatgcttcccctgggatttttgtgaaaggaagagaggaagagtcagttcttctctagagatggaaactattcataaaatcaggttcccttggcagccagttttcctctcacttgaaggaagcctgtttttggtggcagaaactaaagtggacagaaatgtgggtcagaggttagccttgccacagtcaagtccttggctccagctgtttcagaagccaggtgcatttctgcctttatcaagttgtggttgttcagatttccttcaattatataagacatactcagtattgtactgcaggcttacacatttgcctaagctagtttgattgtggtctctatcagttacaatggaaagcatcatgactaaagcaaatggctataacttcaatttaaatttgttcaacactttctgggtagttttgagccaaaccctccaaaggaagcaatgcaatatgaagccttgtccctatcctctgtgagtttatgctaaagtaggagag

SEQ ID NO: 90749 - DNA, 1224 bp, Homo sapiens
gagacttgatggttttaaagggaagttcccctgcacaagctctcttgtctgctgccatgtaagatgtgactttgctcctcctttgccttctgccattattgtgaggcctcccctgccatgtggaactgtgagtgaattaaattcctttcctttataaattacccagtatatctttattagcagcatgagaacagactaatacaaatgttcaccaatatgagaacactgaaacatttaaaatgtttagaatggatgctaagcataccattctagtcaaatgatctatttaagttggctgtttgatttatttgtgagataatatcacattttaaaagtttcagcacatactgttttttaaactattaatattgtgttccttcatatttatggagctatactagtcctgaagctttaatgccactctactcctccaaatactgtatgtgtgcagacatgaaaataattagagtatattcaaattaactttgtttggggaacagtgtggcaccctatgcccatagtttagtgcacatcatgtcgkattttctgtcctgtaccctttctgcctctaggaacagcattttcctctcttaggaactgcctcttccccagatccaaccatatggttactcaggatccaccctggtcttccgtgatgctgtcatactctgacctcaagtaatttctctagaagcaggcacatagccagagttcagccaataggaatgcttcccctgggatttttgtgaaaggaagagaggaagagtcagttcttctctagagatggaaactattcataaaatcaggttcccttggcagccagttttcctctcacttgaaggaagcctgtttttggtggcagaaactaaagtggacagaaatgtgggtcagaggttagccttgccacagtcaagtccttggctccagctgtttcagaagccaggtgcatttctgcctttatcaagttgtggttgttcagatttccttcaattatataagacatactcagtattgtactgcaggcttacacatttgcctaagctagtttgattgtggtctctatcagttacaatggaaagcatcatgactaaagcaaatggctataacttcaatttaaatttgttcaacactttctgggtagttttgagccaaaccctccaaaggaagcaatgcaatatgaagccttgtccctatcctctgtgagtttatgctaaagtaggagag

SEQ ID NO: 90750 - DNA, 1224 bp, Homo sapiens
gagacttgatggttttaaagggaagttcccctgcacaagctctcttgtctgctgccatgtaagatgtgactttgctcctcctttgccttctgccattattgtgaggcctcccctgccatgtggaactgtgagtgaattaaattcctttcctttataaattacccagtatatctttattagcagcatgagaacagactaatacaaatgttcaccaatatgagaacactgaaacatttaaaatgtttagaatggatgctaagcataccattctagtcaaatgatctatttaagttggctgtttgatttatttgtgagataatatcacattttaaaagtttcagcacatactgttttttaaactattaatattgtgttccttcatatttatggagctatactagtcctgaagctttaatgccactctactcctccaaatactgtatgtgtgcagacatgaaaataattagagtatattcaaattaactttgtttggggaacagtgtggcaccctatgcccatagtttagtgcacatcatgtcgtwttttctgtcctgtaccctttctgcctctaggaacagcattttcctctcttaggaactgcctcttccccagatccaaccatatggttactcaggatccaccctggtcttccgtgatgctgtcatactctgacctcaagtaatttctctagaagcaggcacatagccagagttcagccaataggaatgcttcccctgggatttttgtgaaaggaagagaggaagagtcagttcttctctagagatggaaactattcataaaatcaggttcccttggcagccagttttcctctcacttgaaggaagcctgtttttggtggcagaaactaaagtggacagaaatgtgggtcagaggttagccttgccacagtcaagtccttggctccagctgtttcagaagccaggtgcatttctgcctttatcaagttgtggttgttcagatttccttcaattatataagacatactcagtattgtactgcaggcttacacatttgcctaagctagtttgattgtggtctctatcagttacaatggaaagcatcatgactaaagcaaatggctataacttcaatttaaatttgttcaacactttctgggtagttttgagccaaaccctccaaaggaagcaatgcaatatgaagccttgtccctatcctctgtgagtttatgctaaagtaggagag

SEQ ID NO: 90751 - DNA, 795 bp, Homo sapiens
tccatttaacaacaaatggcagaaaacatagctacaaattggcttaactaataaaaggtaagatggattccagacatgtgatgctctgcaaataagtgggctaagtggtgtcatctaagatccagcatttttccatctatatatattttcttatgtttggaacagctttatactgaagctgactcatctagtagttgcaacacaactgccagtaacattcagattactaagattccttgtccctctcctctaggagagagagctagatatgctcatagatgaagaaaagaacattcagagagaaaataatactctcctcacccagcaaagaaaatcaacccatcccttcactctgattggtaaacttaaattacaatctgagccctagaccaaagggaatgacawcatattttttgtcatatgtcaaacatatgacaatatgtttgatcaacatattttctacaaatggacaaggcataaacatctgaaaaattggtgctcttgaaagaaaagaacaatgataaatgtcggaaaaatcaacattaattaagcaatcaggagtgctcactaagcacataggggaattcagttctatttgttagatgaatgctcattgaatactgcttgctctcaacttgtaaatatttaagggctttgtggaaatttctcaaacaaataatactgatattatataacagcatatttcaaaattatctctgattttcttatatgtccatttattttaatattcttttgaaaccatcataggttattttaatactgtgttacctcttt

SEQ ID NO: 90752 - DNA, 795 bp, Homo sapiens
tccatttaacaacaaatggcagaaaacatagctacaaattggcttaactaataaaaggtaagatggattccagacatgtgatgctctgcaaataagtgggctaagtggtgtcatctaagatccagcatttttccatctatatatattttcttatgtttggaacagctttatactgaagctgactcatctagtagttgcaacacaactgccagtaacattcagattactaagattccttgtccctctcctctaggagagagagctagatatgctcatagatgaagaaaagaacattcagagagaaaataatactctcctcacccagcaaagaaaatcaacccatcccttcactctgattggtaaacttaaattacaatctgagccctagaccaaagggaatgacaamatattttttgtcatatgtcaaacatatgacaatatgtttgatcaacatattttctacaaatggacaaggcataaacatctgaaaaattggtgctcttgaaagaaaagaacaatgataaatgtcggaaaaatcaacattaattaagcaatcaggagtgctcactaagcacataggggaattcagttctatttgttagatgaatgctcattgaatactgcttgctctcaacttgtaaatatttaagggctttgtggaaatttctcaaacaaataatactgatattatataacagcatatttcaaaattatctctgattttcttatatgtccatttattttaatattcttttgaaaccatcataggttattttaatactgtgttacctcttt

SEQ ID NO: 90753 - DNA, 795 bp, Homo sapiens
tccatttaacaacaaatggcagaaaacatagctacaaattggcttaactaataaaaggtaagatggattccagacatgtgatgctctgcaaataagtgggctaagtggtgtcatctaagatccagcatttttccatctatatatattttcttatgtttggaacagctttatactgaagctgactcatctagtagttgcaacacaactgccagtaacattcagattactaagattccttgtccctctcctctaggagagagagctagatatgctcatagatgaagaaaagaacattcagagagaaaataatactctcctcacccagcaaagaaaatcaacccatcccttcactctgattggtaaacttaaattacaatctgagccctagaccaaagggaatgacaacayattttttgtcatatgtcaaacatatgacaatatgtttgatcaacatattttctacaaatggacaaggcataaacatctgaaaaattggtgctcttgaaagaaaagaacaatgataaatgtcggaaaaatcaacattaattaagcaatcaggagtgctcactaagcacataggggaattcagttctatttgttagatgaatgctcattgaatactgcttgctctcaacttgtaaatatttaagggctttgtggaaatttctcaaacaaataatactgatattatataacagcatatttcaaaattatctctgattttcttatatgtccatttattttaatattcttttgaaaccatcataggttattttaatactgtgttacctcttt

SEQ ID NO: 90754 - DNA, 791 bp, Homo sapiens
tgaacaatcaatattactaagcaaagcatcactataattcaatattagaatacggaatgataaaataaaagacatagatgtatgagacaaaaaaagcctaggtttaaatccaggtgatgactcctgtagttatatgtcctcacgacttatttcaccttcaggagttcttatattaaagtaggaataaagttattctactgaatggctgtggtaaaggttagaaatatgtcttttggaggacataaaatgggtcctgacacagagtagggagaatcaaagaatttagaaacctcagctatcaccatagttattatgatcaaggttatatcaagctcttttgagaatttacctaagtattattgatacagtagagaagcttctctagcataatcctttagatttctatcatagatatcttcccatgatraatcacataatttgtaccttatgaaaaaattataacacaaattattttactttgaatgaaaacaccatgacattcacaatgctaagtactactaaagtatttttaaagttttagaagataaagtttgaaataaatgtaataaaaaataaaaataaaccagaaacatcatatgtggggaaaatttaagactaaaggtataccagtaacaagtcataatttttcattgaaatagtgattaattatcaataaggagttcaatgtttcagactaaagctgggaataaaataacaatttcttaatgagtaagactcaaaataattcagtttagaaataatgatggcaatattgcctgtttcttgggatc

SEQ ID NO: 90755 - DNA, 591 bp, Homo sapiens
ccacttcactccagtctgggtgacagagtgagactctgtctcaaaaaaaaaaattacccttgatgtgtgggtggtgggcctcatccaatcagttgaaggctttaagagcaaaaacgcatttgccagagaagacattctgcctcaaaactgcaacatcaaatcctgcctgagtttccaacctgctggcccaccctacacattttggacctgccagcgcccataatcacatgagccatatccttaaaataaggtataggccacacataaacacacacwctctctctttccctctctctctctatatgtgtgtgtgtgtgtgtatatatatgtgcgtgtatatatatatgtgtgtgtatatatacacacacgtatatatagatacacacacacacatatatatatatgttgtattccctatctaagacccaggggaggcagagcagcattcatctccactgtcggaaggtagtccaaggtcaccccaaggaggcagaacccagggctacagactctcaaaccagtgttcttcccacaaaatcaaaggcagtgcagtccctgagaaagggtcatctggtgccaggctgcccaagc

SEQ ID NO: 90756 - DNA, 591 bp, Homo sapiens
ccacttcactccagtctgggtgacagagtgagactctgtctcaaaaaaaaaaattacccttgatgtgtgggtggtgggcctcatccaatcagttgaaggctttaagagcaaaaacgcatttgccagagaagacattctgcctcaaaactgcaacatcaaatcctgcctgagtttccaacctgctggcccaccctacacattttggacctgccagcgcccataatcacatgagccatatccttaaaataaggtataggccacacataaacacacactctctctctttccctctctctctctatatgtgtgtgtgtgtgtgtatatatatgtgcgtrtatatatatatgtgtgtgtatatatacacacacgtatatatagatacacacacacacatatatatatatgttgtattccctatctaagacccaggggaggcagagcagcattcatctccactgtcggaaggtagtccaaggtcaccccaaggaggcagaacccagggctacagactctcaaaccagtgttcttcccacaaaatcaaaggcagtgcagtccctgagaaagggtcatctggtgccaggctgcccaagc

SEQ ID NO: 90757 - DNA, 591 bp, Homo sapiens
ccacttcactccagtctgggtgacagagtgagactctgtctcaaaaaaaaaaattacccttgatgtgtgggtggtgggcctcatccaatcagttgaaggctttaagagcaaaaacgcatttgccagagaagacattctgcctcaaaactgcaacatcaaatcctgcctgagtttccaacctgctggcccaccctacacattttggacctgccagcgcccataatcacatgagccatatccttaaaataaggtataggccacacataaacacacactctctctctttccctctctctctctatatgtgtgtgtgtgtgtgtatatatatgtgcgtgtatatatatrtgtgtgtgtatatatacacacacgtatatatagatacacacacacacatatatatatatgttgtattccctatctaagacccaggggaggcagagcagcattcatctccactgtcggaaggtagtccaaggtcaccccaaggaggcagaacccagggctacagactctcaaaccagtgttcttcccacaaaatcaaaggcagtgcagtccctgagaaagggtcatctggtgccaggctgcccaagc

SEQ ID NO: 90758 - DNA, 591 bp, Homo sapiens
ccacttcactccagtctgggtgacagagtgagactctgtctcaaaaaaaaaaattacccttgatgtgtgggtggtgggcctcatccaatcagttgaaggctttaagagcaaaaacgcatttgccagagaagacattctgcctcaaaactgcaacatcaaatcctgcctgagtttccaacctgctggcccaccctacacattttggacctgccagcgcccataatcacatgagccatatccttaaaataaggtataggccacacataaacacacactctctctctttccctctctctctctatatgtgtgtgtgtgtgtgtatatatatgtgcgtgtatatatatatgtgtgtgtatatatacacacrcgtatatatagatacacacacacacatatatatatatgttgtattccctatctaagacccaggggaggcagagcagcattcatctccactgtcggaaggtagtccaaggtcaccccaaggaggcagaacccagggctacagactctcaaaccagtgttcttcccacaaaatcaaaggcagtgcagtccctgagaaagggtcatctggtgccaggctgcccaagc

SEQ ID NO: 90759 - DNA, 755 bp, Homo sapiens
ttctttagtcagttcacaaaacagtgtttggaggaaaatggcagcattgcagccatatggacacttgcacttgaatgataaaattggacaatgtaaaaacagattacttaaaattaattgctgtatctctttaagtaaagaatactctagttgactttggttttgacatcagtcatttactcaataattatttactgggtatctrttatttgccaggcactcttttaggcattagggattcatgtgtgaataaaacagatttctgcctgaatgaaacttacagttcactgacttctttctatgtttccaccataaaccatatactggcataaatagggctcctgagaaagtgagtgaaccacccttgaggcccatcaaactccatataaacaccctgctatatccttttgttaaaaaataatgtggccttttaaaataagatagattaatgtttatcatcctgcttcctggcttctcaagcagtacagattttggtaattcaatctgagccacataactttattttgttgaatgttggtgtgatccacagatgattttcaatattcaccaaggaatttttcaatcaaattttggaaatctgttgcctcctattttattgagaaaatagaaacaaaaagacagcttctccaagtcccaccaagacattcacccattacctgtagctgggcaatcactcggctccctccttactattaaaatgtgggcacttgtcagggcctttccatttgtgtgca

SEQ ID NO: 90760 - DNA, 693 bp, Homo sapiens
ttaatttttttgtttttttcacagggtctctttgagaggatgacagtgggaagygcctactgtggctgttgcggctgcaggcctggctccttccactctcgggctgcccttcacggtgccaggtttgtggcagagcctgagccgccatcatggtgaaattctgctattgccgccatggacagagaaatcaaaccgtggggttctgcttactaggaaactggagtaacacctcatctcaaaaaaaaaaaaaaaaagaaaagactgggtgcagtggctcatacctgccatccactcgcatgcttttgggaagctgatgtgggaggatcgcttgagcccaggagtttgagactagcctgggcaatatagtgagaccctgtctctacaaaaaatacaaaaaattagctagatgcagtggcacacacctgtaatcccagctacttgggaggtggaggtgggaggattgtttgaggccaagagtttaagaccagcctgggcaacacagtgagacctcatctcaaatgaaataaaatgaaactgtagtaacaaaaatgcacgcacagccactgtttgacagtcatggtatcacatggtgacactcaccatttaagggccacaggacccgagggcagattctcaccaccccaaggagtcagttgtgggctccccaccacacctgtatgtgtgagcctccag

SEQ ID NO: 90761 - DNA, 742 bp, Homo sapiens
atcccagcgatgttctttcataagtgtggtgtccacaccgttccccacactgtcatgattaagccattgcccygtcatctccaaaggtttgggggaacaagcccttgtatggtacctgattttgcatgtttggagtgtgtctgagcagtgtgctatggaaatttttaagagttgctattaataaaagatgttggaaatatccttgaaatttttggggtttggaatcagcacatagcaagagtctctgtacagataagcaaagcagaatgagaacaagccttctagggcctcaacacaaaatgtcacgctcctcacattctttctgaataaaccgtctcgcccactcctctcttactgggaccagcagtgtccacccaacgatgttcagccatcatttgcacaaacccagcactgctgagagggccaggacagtctgtcctcttctgacctttgtgtaactcacagaagaagctacagcatgcgggataagtgtttgagaacaaacaggtctctttaactttgtagcttaagggttttgcttatttgtttggtagtttggtcatttctaggttctctggattgtctattaggaacccagtgagttcaggttgtcctgatgaggattgcaggaaatgattgtatggaagagaatctgggaaaacaaattaagtatattagcatctagcaggaaaacacgatgttaatgagacatttatttaaattgctcattttccaatgtgaa

SEQ ID NO: 90762 - DNA, 742 bp, Homo sapiens
atcccagcgatgttctttcataagtgtggtgtccacaccgttccccacactgtcatgattaagccattgccccgtcatctccaaaggtttgggggaacaagcccttgtatggtacctgattttgcatgtttggagtgtgtctgagcagtgtgctatggaaatttttaagagttgctattaataaaagatgttggaaatatccttgaaatttttggggtttggaatcagcacatagcaagartctctgtacagataagcaaagcagaatgagaacaagccttctagggcctcaacacaaaatgtcacgctcctcacattctttctgaataaaccgtctcgcccactcctctcttactgggaccagcagtgtccacccaacgatgttcagccatcatttgcacaaacccagcactgctgagagggccaggacagtctgtcctcttctgacctttgtgtaactcacagaagaagctacagcatgcgggataagtgtttgagaacaaacaggtctctttaactttgtagcttaagggttttgcttatttgtttggtagtttggtcatttctaggttctctggattgtctattaggaacccagtgagttcaggttgtcctgatgaggattgcaggaaatgattgtatggaagagaatctgggaaaacaaattaagtatattagcatctagcaggaaaacacgatgttaatgagacatttatttaaattgctcattttccaatgtgaa

SEQ ID NO: 90763 - DNA, 699 bp, Homo sapiens
tggagttgggatggaagaaacagttatgagtgtgtgaacacagtggaatctgtaggacttagagattcggaaggaatggggagagcagggagggagacggaggattccaggagggctgccgagtttctgacatggatgcctgggtggatgatgaccccattcactgagaacagaaataccagagtgggagggcaggtcaagagtctggacatgctgaacttgggggttgggaggatgccctggtagagaggtccagttgactgtccagttctggaactcagattgtgatctggacttgctgattggtaaagtttttcagacacagcatgtaagaaaaaagtcctggccgggtgccacggctcacgcctgtaatcccagcactttgggaggctgaggcaggtggatcacgaggtcaggagatcragacaatcctggctaatacggtgaaaccccgtctctactaaaaatacacaaaaaaattggctgggtatggtggtgggcgcctgtagtcccagctactcgggagactgaggcaggagaatggtgtgaacccgggaggcgtagcttgaagtgagcccagatcgcgccactgcactctagcctgggcgacagagtgagactccatctcaaaaaaaaaaaaaaaaaaagaaaaaagaaaaaagtcttttgatgattttcatgactaagtcattgtagaca

SEQ ID NO: 90764 - DNA, 699 bp, Homo sapiens
tggagttgggatggaagaaacagttatgagtgtgtgaacacagtggaatctgtaggacttagagattcggaaggaatggggagagcagggagggagacggaggattccaggagggctgccgagtttctgacatggatgcctgggtggatgatgaccccattcactgagaacagaaataccagagtgggagggcaggtcaagagtctggacatgctgaacttgggggttgggaggatgccctggtagagaggtccagttgactgtccagttctggaactcagattgtgatctggacttgctgattggtaaagtttttcagacacagcatgtaagaaaaaagtcctggccgggtgccacggctcacgcctgtaatcccagcactttgggaggctgaggcaggtggatcacgaggtcaggagatcgagacaatcctggctaatacggtgaaaccccgtctctactaaaaatacacaaaaaaattggctgggtatggtggtgggcgcctgtagtcccagctactcgggagactgaggcaggagaatggtgtgaacccgggaggcgkagcttgaagtgagcccagatcgcgccactgcactctagcctgggcgacagagtgagactccatctcaaaaaaaaaaaaaaaaaaagaaaaaagaaaaaagtcttttgatgattttcatgactaagtcattgtagaca

SEQ ID NO: 90765 - DNA, 699 bp, Homo sapiens
tggagttgggatggaagaaacagttatgagtgtgtgaacacagtggaatctgtaggacttagagattcggaaggaatggggagagcagggagggagacggaggattccaggagggctgccgagtttctgacatggatgcctgggtggatgatgaccccattcactgagaacagaaataccagagtgggagggcaggtcaagagtctggacatgctgaacttgggggttgggaggatgccctggtagagaggtccagttgactgtccagttctggaactcagattgtgatctggacttgctgattggtaaagtttttcagacacagcatgtaagaaaaaagtcctggccgggtgccacggctcacgcctgtaatcccagcactttgggaggctgaggcaggtggatcacgaggtcaggagatcgagacaatcctggctaatacggtgaaaccccgtctctactaaaaatacacaaaaaaattggctgggtatggtggtgggcgcctgtagtcccagctactcgggagactgaggcaggagaatggtgtgaacccgggaggcgtagcttgaagtgagcccagatcgcgccactgcactctagcctgggcgacagagygagactccatctcaaaaaaaaaaaaaaaaaaagaaaaaagaaaaaagtcttttgatgattttcatgactaagtcattgtagaca

SEQ ID NO: 90766 - DNA, 1466 bp, Homo sapiens
cagttttatttctccaattccatctctcatgccttttaccatatatctcatggttatttgtagttccctgaaattcctatttctctcatgtttacctggtgttgcccacatatagcatctctgtctagaatgccatatcttacaatacttatctctttatctcagacattgcctatttcagaaggcctttatgccttcaacgccctgagtcaagtaactctctttgatctctcatgcatcctgtgtgtgatttcataaaaatattctcctttctgtatggtaataattggtttgctcttgtgtcttcctcgctagactaaaacttgtagacagcaacagacaatacctatttaaatccatagatatcttataaatgtttgctagctaaatgaatgctttataaaaaagtattgatcaataaattgcaaaaacaagcaacattattaataaaagtgttatactagcttttttatatctaatgactacagcaatcagtaaacatagtttayagttttatcagtgaaacatagtttacagtttcagtgtacaagcttaccactgtgcaaatgcaagctattttaaaagtaaacccttataggccgggcatggtggctcaagcctgtaatcccagcactttgggaggtgaaggcaggaggatcgcctgaggtcaggagttcaagaccagtctggccaacacagtgaaaccccctctccaatataaatacaaaaattagctgggcacagtggcaggcgcttgtaatcccagctactagggaggctgagacaggagaattgcttgaacccaacaggtggaagttgcagtgagccaagatttttccaccgcattccagcctgggcgacagagtaagaccctgcctcaaataaagaaagaaacaaataaataaataaataaacccacccttatatgagtctatgatttctgcatctggtacattatattcagtatcagattgggtcaggtcagtctaaatcatgacctttactgcttctcataatttcaaacaatgaaataggctttaatgcagaaaattgtgtaaactaatttagctttatttagatgtgtcatccagacagaatgaaaaaggcttttgactaactttcagttgaaacacacacacacgaacatgcacacacacacacacacacacactacacacttaaaaaaactgtacgcaagtattgtttcacatttgcttgggaatggaagatgcatcagtatgttcatgtttctgagttaatgtctgatgtttgcatttgatgctgtgctattattcagcaaaagaaaaaaacactcagaacaaaataatgttgtctctcatttttattttgattaatagtgttgtatctcttgtaatttgtaggtgttatttggaagatggagcttcaaagggtgcctggctgaaccggtcaagtattatttttgcgggaggtgataagtggtcagt

SEQ ID NO: 90767 - DNA, 650 bp, Homo sapiens
atttggacacttctttccttccaacaggatatctgacgacagaattaattaacatgaccccacaggcctgtgagaatgaggccaagcctgcaagcactcaggccacaggcctgcagccctgggatagaaagcagggcctgctgctctgatgctgggtttgcttctgttagtgatgcctgtgggtgtcagatgtggagcgggaaggagagagggcatgatggagacgatgatggagacgatgctttttatcgtcatgcagagctggttgacttacactggtgggttaccgctagcattgccgagatgcactgcagtcattggcacgaaagtcagctgtgaggcaggacatcatcatcgtctagatatttcaggtggaccaaatggagcacacacttattggcagtgtgagtgggggactcactttctgcagttctggcttctagaacaatggttttcactcgatagactgtgacaatttcaggatgttactagctttcctcttctttccttctttttcttccttgccttctttcttacgtttttctttttctttttttttgkttttggtttttgagtcagttctgtcacccaggctggagtgcagtggcctgatctggactcactgcagccttgaaacttctgagctcaag

SEQ ID NO: 90768 - DNA, 650 bp, Homo sapiens
atttggacacttctttccttccaacaggatatctgacgacagaattaattaacatgaccccacaggcctgtgagaatgaggccaagcctgcaagcactcaggccacaggcctgcagccctgggatagaaagcagggcctgctgctctgatgctgggtttgcttctgttagtgatgcctgtgggtgtcagatgtggagcgggaaggagagagggcatgatggagacgatgatggagacgatgctttttatcgtcatgcagagctggttgacttacactggtgggttaccgctagcattgccgagatgcactgcagtcattggcacgaaagtcagctgtgaggcaggacatcatcatcgtctagatatttcaggtggaccaaatggagcacacacttattggcagtgtgagtgggggactcactttctgcagttctggcttctagaacaatggttttcactcgatagactgtgacaatttcaggatgttactagctttcctcttctttccttctttttcttccttgccttctttcttacgtttttctttttctttttttttggttttkgtttttgagtcagttctgtcacccaggctggagtgcagtggcctgatctggactcactgcagccttgaaacttctgagctcaag

SEQ ID NO: 90769 - DNA, 872 bp, Homo sapiens
aaaaatactttggtaagtgccatcagcaataaatatgccaaggaagatggtccccctctcaagcctctgaccttaggaaggatctgtgcctgggaaatgtgtcttgggaacgttttttatgggaaggtcgtggcggcagctacacagggcttcttacacgagctgagagcgacatctggtccagacagatgacagstgcaaaatgaagcaggatgtttcagggattgtcgtagctggggcacatttgcttgtttaaaatctctggaacttcctggccaaaaggcttatagggttttgatgactcattttgaagcaaagcaagcaccccaggatgttgccctcgaactcaggttgaaatttcacctctcttggctgcctgagaaacttgttgtcagtacgtggcccgcagaaggaatgggtagatgctgccatgtggaacgtgtaataaatattgtgactcggcaaaggggtgtccactctcatgttttcttttttattgacatggagtctcactctgtcacgctggctggagtgcagtggcgcgatctcagttcactgcaacctctgcctcccgggttcaagcgattgtcctgcctcagccccccgattagctgggattacaggtagctgccacaatgcctggctaattcttgtaattttagtagagatggggttttgccattttgtccaggctggtcttgaaccgctggcctcaagtgatccacctacctcagtctcccaaagtactgggattataagcatgagccactgcgcccagtcactctcatgttttcctgacagctgggaccagggtaacttatgaattgtgacttgagccatgtcccaacctaaagagagcagttacttaatgc

SEQ ID NO: 90770 - DNA, 872 bp, Homo sapiens
aaaaatactttggtaagtgccatcagcaataaatatgccaaggaagatggtccccctctcaagcctctgaccttaggaaggatctgtgcctgggaaatgtgtcttgggaacgttttttatgggaaggtcgtggcggcagctacacagggcttcttacacgagctgagagcgacatctggtccagacagatgacaggtgcaaaatgaagcaggatgtttcagggattgtcgtagctggggcacatttgcttgtttaaaatctctggaacttcctggccaaaaggcktatagggttttgatgactcattttgaagcaaagcaagcaccccaggatgttgccctcgaactcaggttgaaatttcacctctcttggctgcctgagaaacttgttgtcagtacgtggcccgcagaaggaatgggtagatgctgccatgtggaacgtgtaataaatattgtgactcggcaaaggggtgtccactctcatgttttcttttttattgacatggagtctcactctgtcacgctggctggagtgcagtggcgcgatctcagttcactgcaacctctgcctcccgggttcaagcgattgtcctgcctcagccccccgattagctgggattacaggtagctgccacaatgcctggctaattcttgtaattttagtagagatggggttttgccattttgtccaggctggtcttgaaccgctggcctcaagtgatccacctacctcagtctcccaaagtactgggattataagcatgagccactgcgcccagtcactctcatgttttcctgacagctgggaccagggtaacttatgaattgtgacttgagccatgtcccaacctaaagagagcagttacttaatgc

SEQ ID NO: 90771 - DNA, 872 bp, Homo sapiens
aaaaatactttggtaagtgccatcagcaataaatatgccaaggaagatggtccccctctcaagcctctgaccttaggaaggatctgtgcctgggaaatgtgtcttgggaacgttttttatgggaaggtcgtggcggcagctacacagggcttcttacacgagctgagagcgacatctggtccagacagatgacaggtgcaaaatgaagcaggatgtttcagggattgtcgtagctggggcacatttgcttgtttaaaatctctggaacttcctggccaaaaggcttatagggttttgatgactcattttgaagcaaagcaagcaccccaggatgttgccctcgaactcaggttgaaatttcacctctcttggctgcctgagaaacttgttgtcagtacgtggcccgcagaaggaatgggtagatgctgccatgtggaacgtgtaataaatattgtgactcggcaaaggggtgtccactctcatgttttcttttttattgacatggagtctcactctgtcacgctggctggagtgcagtggcgcgatctcagttcactgcaacctctgcctcccgggttcaagcgattgtcctgcctcagccccccgattagctgggattacmggtagctgccacaatgcctggctaattcttgtaattttagtagagatggggttttgccattttgtccaggctggtcttgaaccgctggcctcaagtgatccacctacctcagtctcccaaagtactgggattataagcatgagccactgcgcccagtcactctcatgttttcctgacagctgggaccagggtaacttatgaattgtgacttgagccatgtcccaacctaaagagagcagttacttaatgc

SEQ ID NO: 90772 - DNA, 551 bp, Homo sapiens
tgctatcattatgtccattttacagatgaggaaactgagggttggagagaagtgacttgcccgtagtcacacaaacatttggcagctcgggggttggagccctgcccatcctcagcctggtaagggagcagtgagccaggcttctcctggtattgcttccacatgagatgggagttcaatttctgcattttaaagtacctggggctgggcgcagtggctcacacctataatcctagcatgctgggaggccgaggtgggtggatcacgaggtcagcagttcgagaccagcctgaccaacatgatgaaaccctgtctctcctaaaaatacaaaatttagccgggcgtggtggtgcattcctgtaatcccagctacttgggaggctgaggcaggagaattcttgaacctgggaggtggaggttgcaggagctgagatcacgccaccrcactccagcctgggcaacagagtaagactccatctcagaaaaataaaagtattattaataataaagtacccggcaagcccggaagccatggaaaggtagcaggccac

SEQ ID NO: 90773 - DNA, 408 bp, Homo sapiens
cagctccaccaagctgagcgagagcaggcaaaccacgctgcctcagtttccctatttgtacaagagggctagtgattccttcctcatggggctggggtgagaagtagaggcaatgatggttagagacagaggggctggrggatgctgcgtgtcacctgcgtgtgctcaggagtggggcactgtcctgagcaggagcagcctggggaggctgaggccagtggggagaggacagcgcagtgtgcagaagctggggatgggtctccctgcagcccctgccctgcctggccacttcttgcatggctggctccttgtcatttctcaggtctcagctcaaagtttccctctgcagagcagcctttcctgacctccctctcccaaaccagctaccacctccccccgaccagccca

SEQ ID NO: 90774 - DNA, 1384 bp, Homo sapiens
ttgtacatacacattctatatatacacatatatatatatatacatccacacacacacatatatgtgcatatgtgtgtgttttaagacatttattttaaggaattgactcatgcgattgcgggggctgtacagtcctggatttggagggcaggccagcrgctggagtggattccgcagtcttgaggcaagatttcctcttctctgggaaactccaatttattctcaaacctttaactgactggagagggccactcaaagccccttaaagtcaccgactgcaggtgacaaccacatctacaaaataccttcacagcaacatgcagactagcatttcaatagctgggtggaacagctcagccaagaggacacacaagattgaccttcacccttgcggagcctgcaaagtgcagaggcccaggccccagggagacggatacagttcctaccaatgcttttaagagcacacggctggcccagaacagctgctttcagatgcacaaatcacagagtactctttgcctgtgtccatctggtgctcatgccccaatcttgaaatcacctcctgggggctcctgcctcccccttgctgcaggcacctgcgggctgggaccctggcttgtatcactgtgtccacagcacccagggcagtgcctggcacctatgatgtgcttacgcattggacgaacagtaggctacagtcatgtgctgtggagctggaaagccctggattcaaaatgggcaagtttcatcccctctctttgcctcattttcctctactgttaacaaacaaacaaacaaaaaaagcggtaatagcagctgtcttatcaccttgtcaagggacttaggcaataaaatgcatgaaaagtgcttatcaaggtacttgatgggaaataatagctcaaacaaaaaaaagggccggggtggggcggggcggggggcagccctgtttcagctgattgtcactggggctgtgcgttcccactctgagagctctgctgcttggtgctcagccagaaccaccctgggccagacctgcctccgctgcaagacgcccaccaggtcgtcctgagaccaggttctcacaagcatcctgcatcccagcgagcatctccagcgccatctggtgtcagtgcagggagtggctgggtttccacagcctttcaaatctctagccccaactttcaagaaaaggcaggggctgcctgctgttctgtgaagtcaccatggagacgactgtgggggagtcctcactcgctgcaggtggctcttcactttacagaagcatacactgcacgaagcctttcagtacaccctccccacacttaaaatggcattcaaataacacgttagcattcactttttacaagtatgtctactggggaaa

SEQ ID NO: 90775 - DNA, 1455 bp, Homo sapiens
ccatggataccagcactttttctggtggaagtggtggagggtgcaatggactccatgagggtccttagctttggtggtttaatgctgtatttttatgctggttggccccctgccaggaggttgtgctttccagaaagcatcagctataatagtagtatggagaggaaccagcggtgggtggggtcctagaactcccaagattatgtgccctttctcttccactaccaggatggatagggaaggaccctcaggtgggggtggggctaggcatatctgagctcagactctccttgggcgagtcttgctgtggctgctgtgggggatgggggtgagtttccctggccactggaattgtgtacctaggaggattatggctgcctctgctgagtcatgcaggttgtcagggaactgggggaaagtgggcagtcacatgcctcacccagctcccatgcaaaccgaagggccagtctcactcccaccgtgcccccaccccccacagcaaacagccccgagtctgtttctaggcggagggcaagatgggcttaaaaactttcctgagaatatctgcctcctagctgtgaaagaaaaaggctttagttcttccccaacctgtgaagtctccacaccagattaatgctcttccccaagttctagccaggaggcttcttgccctgttcaaattgtttcaaagttcagctagggaattccttctccctgtggagttttaccccctgttcctctagccaccctcccaatggatccctgttgtgccaggcaggaatgggctgcttggggacccagtgagctcccagggcctttctgctgcttcctctacccctgtcttttgctcggctctctaacttgactcagctccaggtaaagtcggaaatttctcccrcaaacagaccttcagcttttccagtgggggtgtctgtttgtgagaggagggcctccgtttcccacttgcacagttggggcactcacagtatttggggtgtctacccggtcctgcaggagcagtctgcttccttcagagggtctgtgggtcctctcaggatttctggtttgttcttgcagtcaatctggagctaaaatttacaatataagcctccgtatgctgctctgtcccggctgcaaatctagtcctccctcccatccgccatgattcccatacctaatctctatttttaatctttgttattcatagaaatgtctcttaatcaatatgtagctacattttaagaattaagctgaaagtctatgttttgtaataggatatagcaaacccattacattcacaaaatatttagattcatttatgttacttattttttgttttatgttttcatttgtgttcttttcttttattttcaggcagttttagactgaccaaagtctctttgatctatttttcttcttcagtggtttggaagttaaatatcctatttttattct

SEQ ID NO: 90776 - DNA, 1455 bp, Homo sapiens
ccatggataccagcactttttctggtggaagtggtggagggtgcaatggactccatgagggtccttagctttggtggtttaatgctgtatttttatgctggttggccccctgccaggaggttgtgctttccagaaagcatcagctataatagtagtatggagaggaaccagcggtgggtggggtcctagaactcccaagattatgtgccctttctcttccactaccaggatggatagggaaggaccctcaggtgggggtggggctaggcatatctgagctcagactctccttgggcgagtcttgctgtggctgctgtgggggatgggggtgagtttccctggccactggaattgtgtacctaggaggattatggctgcctctgctgagtcatgcaggttgtcagggaactgggggaaagtgggcagtcacatgcctcacccagctcccatgcaaaccgaagggccagtctcactcccaccgtgcccccaccccccacagcaaacagccccgagtctgtttctaggcggagggcaagatgggcttaaaaactttcctgagaatatctgcctcctagctgtgaaagaaaaaggctttagttcttccccaacctgtgaagtctccacaccagattaatgctcttccccaagttctagccaggaggcttcttgccctgttcaaattgtttcaaagttcagctagggaattccttctccctgtggagttttaccccctgttcctctagccaccctcccaatggatccctgttgtgccaggcaggaatgggctgcttggggacccagtgagctcccagggcctttctgctgcttcctctacccctgtcttttgctcggctctctaacttgactcagctccaggtaaagtcggaaatttctcccgcaaacagaccttcagcttttccagtgggggtgtctgtttgtgagaggagggcctccgtttcccacttgcacagttggggcactcacagtatttggggtgtctacccggtcctgcaggagcagtctgcttccttcagagggtctgtgggtcctctcaggatttctggtttgttcttgcagtcaatctggagctaaaatttacaatataagcctccgtatgctgctctgtcccggctgcaaatctagtcctccctcccatccgccatgattcccatacctaatctctatttttaatctttgttattcatagaaatgtctcttaatcaatatgtagctacattttaaraattaagctgaaagtctatgttttgtaataggatatagcaaacccattacattcacaaaatatttagattcatttatgttacttattttttgttttatgttttcatttgtgttcttttcttttattttcaggcagttttagactgaccaaagtctctttgatctatttttcttcttcagtggtttggaagttaaatatcctatttttattct

SEQ ID NO: 90777 - DNA, 2231 bp, Homo sapiens
aaatcagagtagtggtttcccggttttgcagggagagagcagggcagacattaccttggaaggagcaccagggaactttctagtgtgtgcattgtaataatgttaaaataacactattgttacataattaaaacaactgtatccattcagccattttctccatctatggatctttttaaactctaggattaaaattttaatttcccccgtggtttctatattctcacatcttataaggacattggttacatatattctataggcttatwtgtttgctttctcgatttgtccagctttggcagatggaagttattctttggtttagtttgatgcctctttttatgtcagcattcttcacatgtttggtaaacattttctgtatttgtctatgttatctgagagccaagtttatgaaagtctgatcagttcccttcagcctgtcttcagaaattgcaggaggctggtagaagaaggcaattgtgctatgaaatgaaccagtgactagtttgtttctcctaagtggtgtttgcctcctgagatccttctttaaccctagtctagaagctctaatgttccctgctcccgactggcattgtatacttttcttgcactctgcttggtttagcgagaataaagaagagagtgtgcataagtcaatgagtctggcggtttctacttaggtccccccaacctgcagattttgacttggagtaccctggatcctctttcactctttatagtagatatcccacacacacatttttgcattttaataatacaatctcatctattttcatcttttttataattcttcatagacttaggtacttcttcattgttactcaaaaacagctaagattttttttctctttttttttgagacggaattttgctcttgttgcccaggctggagtgcaatggcaccatcttggctcaccacaacctctgcctcatgggttcaagtgattcttctgcctcagcctcccaagtagctgagattacaggcatgtgccaccacacctggctaattgtgtatttttagtagagatggggtttctccatgttggtcaggctggtctcgaactcccgaccttaggtgatctgcctgccttggccacccaaagtgcgggattacaggcatgagccactgctcctggccatttttttttttcatatgtttttggacatctaggactttggaataagacaggaagtagggcaggctacataatttgcagaatctagtgcaaagttaaaaagcgggacatcttgtccaaaaagtaggaaaagaagtgtcgttaaacgtgctgtaatataaagtttttctttataatattttactaacaaaaatcactagcgttttcctaagtcactaaattttcccgtataacatcattcttcccctcaactggaaacttaaaaaaaaattttacattgccctcagaggcaaaaatagctaacactttttaatctgtgttgaaaacattatttcttctcctctttttgaaatttttaattttttaatcttttaaattacggtgaagtacgtatagtataaaatttaccatcttaaccattttaaagtgttcagctccatggcgtaaattacacttacattgttgtacaaccattgccactgtccagctccagaactcttttcgtcttgcaaaactgaaaaataataaagcttttttctttaaaaatgtttatcacttataaaacataataggagtaatagtgatggatgaggagcaacgtaaactgaacaattgcaaaaaataacatttttggtgttgtagtgagttgactactgtctgccaaaattcatatccactcaaaacctcagaatacaaacttatttagatacagggtcttttttgtttgtttgtttgttttaattttattattattatactttaagttttagggtacatgtgcacaacgtgcaggtttgttacatatgtatacaggtgccatgttggtctgctgcatccattaactcgtcatttagcattaggtatgtctcctaatgctatccctcccccctccccccaccccacaacagtccccagagtgtgatgttccccttcctgtgtccatgtgttctcattgttcaattcccacctatgagtgagaacatgcggtgtttggttttttgtccttgtgatagtttgctgagaatgatggtttccagtttcatccatgtccctacaaaggacatgagctcatca

SEQ ID NO: 90778 - DNA, 2231 bp, Homo sapiens
aaatcagagtagtggtttcccggttttgcagggagagagcagggcagacattaccttggaaggagcaccagggaactttctagtgtgtgcattgtaataatgttaaaataacactattgttacataattaaaacaactgtatccattcagccattttctccatctatggatctttttaaactctaggattaaaattttaatttcccccgtggtttctatattctcacatcttataaggacattggttacatatattctataggcttatttgtttgctttctcgatttgtccagctttggcagatggaagttattctttggtttagtttgatgcctctttttatgtcagcattcttcacatgtttggtaaacattttctgtatttgtctatgttatctgagagccaagtttatgaaagtctkatcagttcccttcagcctgtcttcagaaattgcaggaggctggtagaagaaggcaattgtgctatgaaatgaaccagtgactagtttgtttctcctaagtggtgtttgcctcctgagatccttctttaaccctagtctagaagctctaatgttccctgctcccgactggcattgtatacttttcttgcactctgcttggtttagcgagaataaagaagagagtgtgcataagtcaatgagtctggcggtttctacttaggtccccccaacctgcagattttgacttggagtaccctggatcctctttcactctttatagtagatatcccacacacacatttttgcattttaataatacaatctcatctattttcatcttttttataattcttcatagacttaggtacttcttcattgttactcaaaaacagctaagattttttttctctttttttttgagacggaattttgctcttgttgcccaggctggagtgcaatggcaccatcttggctcaccacaacctctgcctcatgggttcaagtgattcttctgcctcagcctcccaagtagctgagattacaggcatgtgccaccacacctggctaattgtgtatttttagtagagatggggtttctccatgttggtcaggctggtctcgaactcccgaccttaggtgatctgcctgccttggccacccaaagtgcgggattacaggcatgagccactgctcctggccatttttttttttcatatgtttttggacatctaggactttggaataagacaggaagtagggcaggctacataatttgcagaatctagtgcaaagttaaaaagcgggacatcttgtccaaaaagtaggaaaagaagtgtcgttaaacgtgctgtaatataaagtttttctttataatattttactaacaaaaatcactagcgttttcctaagtcactaaattttcccgtataacatcattcttcccctcaactggaaacttaaaaaaaaattttacattgccctcagaggcaaaaatagctaacactttttaatctgtgttgaaaacattatttcttctcctctttttgaaatttttaattttttaatcttttaaattacggtgaagtacgtatagtataaaatttaccatcttaaccattttaaagtgttcagctccatggcgtaaattacacttacattgttgtacaaccattgccactgtccagctccagaactcttttcgtcttgcaaaactgaaaaataataaagcttttttctttaaaaatgtttatcacttataaaacataataggagtaatagtgatggatgaggagcaacgtaaactgaacaattgcaaaaaataacatttttggtgttgtagtgagttgactactgtctgccaaaattcatatccactcaaaacctcagaatacaaacttatttagatacagggtcttttttgtttgtttgtttgttttaattttattattattatactttaagttttagggtacatgtgcacaacgtgcaggtttgttacatatgtatacaggtgccatgttggtctgctgcatccattaactcgtcatttagcattaggtatgtctcctaatgctatccctcccccctccccccaccccacaacagtccccagagtgtgatgttccccttcctgtgtccatgtgttctcattgttcaattcccacctatgagtgagaacatgcggtgtttggttttttgtccttgtgatagtttgctgagaatgatggtttccagtttcatccatgtccctacaaaggacatgagctcatca

SEQ ID NO: 90779 - DNA, 2231 bp, Homo sapiens
aaatcagagtagtggtttcccggttttgcagggagagagcagggcagacattaccttggaaggagcaccagggaactttctagtgtgtgcattgtaataatgttaaaataacactattgttacataattaaaacaactgtatccattcagccattttctccatctatggatctttttaaactctaggattaaaattttaatttcccccgtggtttctatattctcacatcttataaggacattggttacatatattctataggcttatttgtttgctttctcgatttgtccagctttggcagatggaagttattctttggtttagtttgatgcctctttttatgtcagcattcttcacatgtttggtaaacattttctgtatttgtctatgttatctgagagccaagtttatgaaagtctgatcagttcccttcagcctgtcttcagaaattgcaggaggctggtagaagaaggcaattgtgctatgaaatgaaccagtgactagtttgtttctcctaagtggtgtttgcctcctgagatccttctttaaccctagtctagaagctctaatgttccctgctcccgactggcattgtatacttttcttgcactctgcttkgtttagcgagaataaagaagagagtgtgcataagtcaatgagtctggcggtttctacttaggtccccccaacctgcagattttgacttggagtaccctggatcctctttcactctttatagtagatatcccacacacacatttttgcattttaataatacaatctcatctattttcatcttttttataattcttcatagacttaggtacttcttcattgttactcaaaaacagctaagattttttttctctttttttttgagacggaattttgctcttgttgcccaggctggagtgcaatggcaccatcttggctcaccacaacctctgcctcatgggttcaagtgattcttctgcctcagcctcccaagtagctgagattacaggcatgtgccaccacacctggctaattgtgtatttttagtagagatggggtttctccatgttggtcaggctggtctcgaactcccgaccttaggtgatctgcctgccttggccacccaaagtgcgggattacaggcatgagccactgctcctggccatttttttttttcatatgtttttggacatctaggactttggaataagacaggaagtagggcaggctacataatttgcagaatctagtgcaaagttaaaaagcgggacatcttgtccaaaaagtaggaaaagaagtgtcgttaaacgtgctgtaatataaagtttttctttataatattttactaacaaaaatcactagcgttttcctaagtcactaaattttcccgtataacatcattcttcccctcaactggaaacttaaaaaaaaattttacattgccctcagaggcaaaaatagctaacactttttaatctgtgttgaaaacattatttcttctcctctttttgaaatttttaattttttaatcttttaaattacggtgaagtacgtatagtataaaatttaccatcttaaccattttaaagtgttcagctccatggcgtaaattacacttacattgttgtacaaccattgccactgtccagctccagaactcttttcgtcttgcaaaactgaaaaataataaagcttttttctttaaaaatgtttatcacttataaaacataataggagtaatagtgatggatgaggagcaacgtaaactgaacaattgcaaaaaataacatttttggtgttgtagtgagttgactactgtctgccaaaattcatatccactcaaaacctcagaatacaaacttatttagatacagggtcttttttgtttgtttgtttgttttaattttattattattatactttaagttttagggtacatgtgcacaacgtgcaggtttgttacatatgtatacaggtgccatgttggtctgctgcatccattaactcgtcatttagcattaggtatgtctcctaatgctatccctcccccctccccccaccccacaacagtccccagagtgtgatgttccccttcctgtgtccatgtgttctcattgttcaattcccacctatgagtgagaacatgcggtgtttggttttttgtccttgtgatagtttgctgagaatgatggtttccagtttcatccatgtccctacaaaggacatgagctcatca

SEQ ID NO: 90780 - DNA, 1281 bp, Homo sapiens
tattttactaatttttgtgggaagccatatttcttttggaggagagatgtccaggtttattttccttcatgtttctttaattccattttcccaccacagccagtagccagtaaatgtgaacaatgatgctctttttctgcctatttttgtcatgaggtaataaagtggaagacacttggtagtaatttaccaccgatagtgatttcctgcctaaaaattcaacaagagcgtgagtcacagtgtcatggacatatgaaaataagctgtgacccatatcttgagagtaattggacccaggctaatgaggaccaagtggttgttgtacacagcctaaatgcagtcattgatgctttctgctttgcttctattatcttttaaggcttcctggattgctgactcagctccccagggaatccaggcagaatttaactatgggatccattatgggaatgttggacttgggggactggcgtagatacagctggtgactatattttaagatgagatcaaatactcaaaatattagagaagaatttttatttttcagtttaattgttttaaatggtttcctcgagcccaggctaaaattttatcatatacttacttggcatgtggttttgggtgacattataagatctccagtgtcagtaaatatgataaggcaggtaactaggaccctaggatcctctatttctcactggatgaccttagtttaatgggcatggtatagtagattgggagtggagatttgtaggcattgtagcaaccttttagttaagatgttctgtgcaaattkgtgtttgttccaagcccagacaactaattagctatgattattttatcattttcttgtgttgtgagaagccaagaggctcttcctctttcttcttgtttctaatacactgggtagtcacttccttcttaattcttgctcccatctcttctatcctcactcctgtttcctgccagtctttgtgtttttctactctcattgctcctaaagtgatctgcctgtcatatggcacagaagacaattaagtgaagccagcttggtgggtgacaggtggatactagaaaatcaatcaagttggggtggatttgtactgtgtcaacttggcatgactgaaattgcattcctcagaatttccttccttgcatggttctgagttaaaatgagacacaagagacattttgtgaaagatttggaaggcaaaagtgaagcaacagccaaattatttttatccttgggaggtctatggatggcacctggagcagttgcca

SEQ ID NO: 90781 - DNA, 1094 bp, Homo sapiens
ctttttatagcctctgcgttgcagtatgtggccactgcatgctgaaagatagccagtgacatcaggatcattaatcatgcttcagggatcagaaccactcacttcctattctggtgcctcggtagtggctctggacaatgacacgatgatttggaaattcactgtctctctaattctagggttttgtttgtagaaaattctacattgaatcaagctataataatagtgaggtacagagtaaagcctcctttgtatattctctctcagtattcaatctagttgttcacatgttataaagggtgacaaattatttgaagagagatgaactgaaaatgaaggtgtcttacatggatgtcatcatctatttttagcacactgatatggtttggctctgtgttcccacccaaatttcatctggaattgtaatctccatgtgttgggggagggatctggtgggaggtgactggatcatggggacaatttcccctatgctgttctcatgatagtaagtgagttctcatgagatctgatggtttaaaagcggcagtttgccccatgctgtttccaatacacacagtgtttgcaactaggaaaatatttcaataatatrtgaaaggttcaagatatcctgtgcttgatagtaattgataaactatgtgataacacaaaaataagaagtacatatttcaagttgtgacaacaattagaaatatgtcttctacatagcattataaataaaaataaatcaccttgccaagtttcatgaccccatgacttatttgtaatacatacttgaacatgcacatgtctgatgtattcctagatgtctgtacatgtattataaagggcaatgttttccttgaacaactgctgtttttagtgagattgttagtagatattagtaaattacacttgtagaaagaactctatagtcaggaatgtcacatgtgactgatgaatgtaataaaagtaacagaattattataatgatcacatttggtactagaaagaacagaaaattttgtatagatacaaaatacatagtcattgaatgaatagtttcttggtggatcaaagcttatatatcttatgga

SEQ ID NO: 90782 - DNA, 712 bp, Homo sapiens
aaagagggaaactgttgacaactacttatactttcattactatccttcatagacatattgatcccaaatgatgaaccattctatccaatcatttgttttttattcattcattcacttattaattcattctgtgttgtctttattaaggacagcctattatggcaaaacttgtgttaaatcatatgtggaaagaggaaagtggagaaattaaagaaaaaggtgctcttgtatttgtttcctarttcttctagtgggtatttttaatcttctttttgagcagagcagcctgtgaagtttcctggtctttttcttcttttcagggctgttccgcagggctcctttttgcttagagcaacataatgtttcattaatatggactcccaagacatctattgctctggagcaaatttagaaagagctggcatactgtattttaatattaaattaatgtggattagcctatgtatggccagctgcacttttacatcaaccgtttagacatatacaggaagtctttcttcctgtgaaaaaaatgtactattaataataaagactaattttgaatgcttccaagtagcgatcctgatttggtagattgctcatagacaagcattttttccccttgtttatctgggctctttgctgtaacttgcctgaatttttcatttcgactttggtgttcatgagtgtaaatttagtataaaagtatcaa

SEQ ID NO: 90783 - DNA, 712 bp, Homo sapiens
aaagagggaaactgttgacaactacttatactttcattactatccttcatagacatattgatcccaaatgatgaaccattctatccaatcatttgttttttattcattcattcacttattaattcattctgtgttgtctttattaaggacagcctattatggcaaaacttgtgttaaatcatatgtggaaagaggaaagtggagaaattaaagaaaaaggtgctcttgtatttgtttcctaattcttctagtgggtatttttaatcttctttttgagcagagcagcctgtgaagtttcctggtctttttcttcttttcagggctgttccgcagggctcctttttgcttagagcaacataatgtttcattaatatggactcccaagacatctattgctctggagcaaatttagaaagagctggcatactgtattttaatattaaattaatgtggattagcctatgtatggccagctgcacttttacatcaaccktttagacatatacaggaagtctttcttcctgtgaaaaaaatgtactattaataataaagactaattttgaatgcttccaagtagcgatcctgatttggtagattgctcatagacaagcattttttccccttgtttatctgggctctttgctgtaacttgcctgaatttttcatttcgactttggtgttcatgagtgtaaatttagtataaaagtatcaa

SEQ ID NO: 90784 - DNA, 1023 bp, Homo sapiens
ttagccctgggctttaacaggctgatttaacatctggcaaccaggtcacatctaaatataactaggaaatggatgttgggtagcactttgattctctcataagccccaattaggtccatgagcgtctctcctttctagctaccgtcacctctcctctctcagactgcctacaaagtaggatacatttctctggttccctgatttcttgctgtctttgaaacaaacccataggccctttaggatttaggataggaggtgacaaaacagcaaacatgggcaagtaatccagaggcccaggaactttgtccaagtttccagagcagatgtccattgtctactaaacaagtgcttctcaaactttcatgtgcattgaatcaccccgggatcttgttacaatgaagattctgatttaggatcctgagagtctgcatttctaacaaacgcctgatgatgctaatgctgctggtccatgaatctaagacattatgtaaatggcaggtaactcacatgcctacaggattagcataaatagttgagcgaagcccaggggttctgagaaggtagcaaatggataaaccagttgctcttcaaatatccctggactccctgggccctagatctcgttacctaccccatccccctgcccaggtgaaggcctccttggcattttcttcagatttcttccttcaaaacaaagggcttggaatccacaaagggcgccgcccaccaccaggtacaacgtttaaaaaagtttttaatttaaaaaattttatttttggctaggcgcagtggctcatgcctgtaatcccagcactttgggaggctgaggcaggcggatcatgaggctaggagttcgrgactagcctggcctacatggtgaaaccccatctctactaaaaatacaaaaaaattagctgggtgtggtggcaggcacctgtaatcccagctactcgggaggctgaggcaggagaatcgcttgaacccaggaagcggttgcagtgagctgagatcacgccaatgcac

SEQ ID NO: 90785 - DNA, 581 bp, Homo sapiens
ggatcccttgagctcaggagttcaagaacagcttgkgcgacatagcaagaccctgcctctaaaaattactaaataaataaaactaaaagatctcaatacatatagctaaatcaatttctaaaagacgtttctaattctactggtaatgtactatagtactaacaaacattaaatattattataaatgttgctatgctttgtagccaaatgaatggaaggggtatcttatcacttttaaaattaaaagtgaggtggaacatttttccatgtttgttaactagatgatctcttcttctcaatatctatttactttattataccacgaaggacttgaagagctttcaagtagtgtttgtcagtaagaaaacatactctttttgtttcttttttatgtaggtgttttgtgtgggtcactccatggattcataggtgaatctattccctcaaaatgaatctattgggaacattctttaaaaaaaaacaaacaaacaaaagtaacagagcaatagcaagatctttctgaaaaagaaattgctggcacattttaccagcatttaccttgatccaaatcattgagttta

SEQ ID NO: 90786 - DNA, 716 bp, Homo sapiens
ttttggggtttcttcgaaccttggcttaatgagcctttccttgtgccaggtatattctgagctgggtgccttcctctagccgcttttctrtaaggaaacaactgaatgacccaactcctaaatctggacttcctgctgctgctgctctcccaagtcagaaatcaaacaaaaactaacaaacattaaacaataaaaacaaaaacaaaaattaacaaacaccgagtgagcatattttgtttactggctgctaaactaggtctgggcaaagttttaatagttggcaacatgacaagaaaaacgaaactgttaaaacaccatgaatttaaaaaaataaataaataaggataattaaagatgtcagcaggaagtattatacagtgatggggggtgagtgtattgggattctgtgaccttgaacaaattattcaagatcactaatcctttaccacatctgtaaaagggaacaataatggtgcattcctcgtaggacagtcatgaggttcaaatgaggtgattatgtgaaatgcttaatggtgctggaagcacagagcacatattcagacttgattcatccattggcttctccacatgctctctgtccttctccaggctcccttgccctgggaggctagcctatatggcttctgcctgggtttgcttgcctgagaggcccagtaggagcatgggggaaggaaagaaggggaaagtgaggcgtg

SEQ ID NO: 90787 - DNA, 716 bp, Homo sapiens
ttttggggtttcttcgaaccttggcttaatgagcctttccttgtgccaggtatattctgagctgggtgccttcctctagccgcttttctgtaaggaaacaactgaatgacccaactcctaaatctggacttcctgctgctgctgctctcccaagtcagaaatcaaacaaaaactaacaaacattaaacaataaaaacaaaaacaaaaattaacaaacaccgagtgagcatattttgtttactggctgctaaactaggtctgggcaaagttttaatagttggcaacatgacaagaaaaacgaaactgttaaaacaccatgaatttaaaaaaataaataaataaggataattaaagatgtcagcaggaagtattatacagtgatggggggtgagtgtattgggattctgtgaccttgaacaaattattcaagatcactaatcctttaccacatctgtaaaagggaacaataatggtgcattcctygtaggacagtcatgaggttcaaatgaggtgattatgtgaaatgcttaatggtgctggaagcacagagcacatattcagacttgattcatccattggcttctccacatgctctctgtccttctccaggctcccttgccctgggaggctagcctatatggcttctgcctgggtttgcttgcctgagaggcccagtaggagcatgggggaaggaaagaaggggaaagtgaggcgtg

SEQ ID NO: 90788 - DNA, 1374 bp, Homo sapiens
ggacagcttggaccaggtggtgtctttgctgatcctcatggtacccttggcatatctccctcagagcatcggaggacttatcccactgtgtctgcctgttcttggttcttccccattgggttataaggttctagaagggactgtgttatatttgtctctttacccccacgtcctgtagcaatgctggcatacagtatggtgtgggagtgggatgtccttaaggatagttgggcttcaagatctgacacacccttaagtggtatatccaaaactgaaatcaatgctcctcccaacccctaccccaaaaartctcagacccagaatgttattcctctcctccatagcaatctccatgaaagagtcatctttggtggccttggaggtaccaacctttcccatactggtgaagaacatggtgtggtgtgatcctatcccatagctccttaatcttccctatatcctagtacccagattttaaaaaatagggctcaggctgggctctgaggtgagggaagaggaaagttggggctagccagggccctgaggcatgggcggggcgtggtgtgacatggtaaggggtgggagtgggcaggagagactgcctgggtgaggcttgcctcagatggagaagcctgacctggatccacttgctgcctgtaggagctcagtcgccaaaacctgtctggcctaaagacaggcacagtttgatttaatagttggtactgacctcacttgaacattaaatcaataaatgccaacttaatggagctgttgctgggaaactaaggagtatcaaatatccaatatctgcacagaggagattgttttgatctgttttgtttttctaaagctgcaacttgctccttggtgcactttaggttattcctttttggtaggaaagtggctcccacactctcctctccacccaccctttgaagaggcttggaaatgcactcagcagctgcccccatgataagccgaagggcctgtcctgtccaggttggcaggtcctcccagcaggcagagtgaggagttcatgaatgagggaggagactatggtgtctcagaaggaaaactctagaggaaaaacacttgagtaacaatgcccagttcaacctctggatctctcttgcagcttgctgaggctctatttccagctgaactgtgtagctctcagcgtgggtgccttttatccatcactggtgtcatgccaggtcatcttcatcttttcttagctaactgaggaggacagtcatccaagctggggtctcctctcctgtgtgtctctcctagggatggagttgccaggctttgtgcttgttttacttcttctccagcctttccttcccctccctttcctgttccctaggttgg

SEQ ID NO: 90789 - DNA, 1374 bp, Homo sapiens
ggacagcttggaccaggtggtgtctttgctgatcctcatggtacccttggcatatctccctcagagcatcggaggacttatcccactgtgtctgcctgttcttggttcttccccattgggttataaggttctagaagggactgtgttatatttgtctctttacccccacgtcctgtagcaatgctggcatacagtatggtgtgggagtgggatgtccttaaggatagttgggcttcaagatctgacacacccttaagtggtatatccaaaactgaaatcaatgctcctcccaacccctaccccaaaaaatctcagacccagaatgttattcctctcctccatagcaatctccatgaaagagtcatctttggtggccttggaggtaccaacctttcccatactggtgaagaacatggtgtggtgtgatcctatcccatagctccttaatcttccctatatcctagtacccagattttaaaaaatagggctcaggctgggctctgaggtgagggaagaggaaagttggggctagccagggccctgaggcatgggcggggygtggtgtgacatggtaaggggtgggagtgggcaggagagactgcctgggtgaggcttgcctcagatggagaagcctgacctggatccacttgctgcctgtaggagctcagtcgccaaaacctgtctggcctaaagacaggcacagtttgatttaatagttggtactgacctcacttgaacattaaatcaataaatgccaacttaatggagctgttgctgggaaactaaggagtatcaaatatccaatatctgcacagaggagattgttttgatctgttttgtttttctaaagctgcaacttgctccttggtgcactttaggttattcctttttggtaggaaagtggctcccacactctcctctccacccaccctttgaagaggcttggaaatgcactcagcagctgcccccatgataagccgaagggcctgtcctgtccaggttggcaggtcctcccagcaggcagagtgaggagttcatgaatgagggaggagactatggtgtctcagaaggaaaactctagaggaaaaacacttgagtaacaatgcccagttcaacctctggatctctcttgcagcttgctgaggctctatttccagctgaactgtgtagctctcagcgtgggtgccttttatccatcactggtgtcatgccaggtcatcttcatcttttcttagctaactgaggaggacagtcatccaagctggggtctcctctcctgtgtgtctctcctagggatggagttgccaggctttgtgcttgttttacttcttctccagcctttccttcccctccctttcctgttccctaggttgg

SEQ ID NO: 90790 - DNA, 533 bp, Homo sapiens
cagatcatccacaggctcatgaacaaggaaaataaaggcttatttttatgagccactgagttttggagctgtttattactcagcattgtaacaatagctgactaatatatcccatatttcgtgttcagtgacatatatatctgtgaaaattgattgatagaatcatatccttatattaactctcagtcccgcaatatgcaatgacaaggagctttgaagactcaaataatcaagtacaacccaatgaccagtgttttttgctaatatcaatggggaccccagacaaataataaacactagataatattccataatgaagttggagaagaagtaaatagagtacaagaatcaacaaaaatgtaagaaaatcctaaaaccgtaagagccttataaaaatagctggagtgggcaagaatgtgtgagtttaaccaagccatctgccttctgctccrctggcaaacaattcagttatacagtacagctcttgattaaatataaaaacacttctcccaccctttttctgtcataataat

SEQ ID NO: 90791 - DNA, 729 bp, Homo sapiens
ataactccagaccccattccctgggccaattctagtactgcctgcaggcttcggtctccctgggaccaactctaaacaaacaaaaaataaaagagcttatcaatgaaacttgggtctttttaaaggggctgccccctgactcaactaaatatacacaatgtatatgctccgacctgaggatgccacttccagaaatgtagcttacatgcacacaaggatgttcattgtggcggtgttgatagtagagaaaaactggaagcaacataaaaattggaaacaaccactacaggactgctttaataaatgatgacacagccaggcccagtggctcatgcctgcaatctcaacactttgggaggccaaggcaggtggatcacttgaggttaggagttcaagactagcctggccaacctggtgaaacctcatctctactaaaaatacaaaaattagccgggcgtggtggcggcsacctgtaatcccagctactcaggagtctaaggctggagaatcgcttgaacccaggaggcagaggttgcagtgagccaaggtcacaccattgcacttcagccagggcaacagagtgagactctgtctcaataaataaataaataatgacatatctgttttgtggaatactgtataatcattaaaaataaatttttagaagaatatgtataaagaaaaaaattatgctagaaaactgaggaaataatacatattgtacattcc

SEQ ID NO: 90792 - DNA, 1284 bp, Homo sapiens
atatttacataactgaccatttttagaacattatccgttagtatttggtaactgcttagcttctcaataatgtgtatatatgtggttgaactagtttccttaattttatttaacatttttcagtgcaatggtactatggtttttttaaatctcagtgtcggtgcttgaaatacttaactatctccaaccagagaaatttcagaacaaaaggataaaatatgcctaatacacagccatatgtaacgtctcagcacactacaaaagttcaaggtaatgactgctagtggataactcctatcttcttccactttaagacagaacagaaatgagatcacagaacattctcctctaaaacacccttctgcccaaaagctcagcattttccttccctcaaaccgcccagatttgctcattacgagagtctcagtgcaaaaactaaacayagacccagtccccaaatgatgggcacactaccatcttctcccctgcttgggcccacacctcttggaatgtgtttttactatagcactgagcccagtgtttcagaacaacatcccagcctgttttcacagccagcctaagagttcctcaaggaatgggctgtctcattcgtccctttacctcttaattactccccttccaccaaacaaacatgtattcatcagatgtttgaatgaatgctcagagagaatccaagagaataaaaagtactttatatcaactaacagcttatttttcctttccttccttgactaaatatattgtccacaccagtgacacattaacccttttaaagcatactgggtctattaaataagatccacaccttcttagccaggccttgaggcccttccggcctaccttccccgcttgtcactcactattttcctgacacacaccacactcaaagttccaattatcttcccatgcattccaatatttcatgagggcctacaaagtatccatgaatcagggacacaactgagctcaagtccccctccttaaggcagctctcagctctccatctgtgccccctgcttcctcacctccatgttgcccctgtgactaattcctccacctgttcatgaatatttgaatgatagctgtttgctccttgaagggagtgactgtatctatttactgactgcacagtaacatgcagattttagttgctcaaaaaacatatattaactaagtgaataaatactcaaataaaaaacactaatcaattcattcagcaccttaaaaaaaaaaggcagtccattagcagtcagcttctgctcc

SEQ ID NO: 90793 - DNA, 911 bp, Homo sapiens
ataggccgggaaggaaaagggagagaggaggtttctttagcctaccagaactctctagtctttccactccagaattcacaattcccaggggtaaaaggacataacactgactttctgatacttggaaaagagagtagtagagaccttatgatggatctcagaaataattaacaatacttgattctgttaattgttaataaataattaacaaaacttggagcattggctccaagctagaatcacagaatttttttttttttaagacaaggtttcactctgtcatccaggctggagggcagtggtgccatcacagctcactgcagcctcgacctcctgggatcaagcaatcctcccacctcagcctcccaagtagctgggaccacagacacgcaaaaccatgcatgggtaatttttgtattttctgtagagatagggtttcaccatgcttcccaagctggtatcgaactcctgagctcaagcaatccacctacctcagccacgcaaagtgctgagatcacaggcatgagccaccacacctagcctagaatcacagaatttttaaattgaaagggggcatgggaaatatctgttctagtatctccattatgttatgtagatgaaaaatctgaagttccgaatgatgtacatgaaccagtcatagacataggataggygtctatcacttccaaaggactaggtacatttcctgacatacaactagctcaagtcatctatgactctcaggcaatcctagaatggataacagaactttaagaatataacaactgcactggtacactggtacacaggtaagaaaaaaaagttaaaaaaaaaaaacaagaatataataggttcctctagaataacatcatccaatggaaatagaatgcaagccatgtcatacacgtcat

SEQ ID NO: 90794 - DNA, 862 bp, Homo sapiens
agaaaattcacaacccaccactggtgggccaccagccagatgaaccaggcctacctggtcgtctgtggagtgacagcccactgtgtccctgtaatcctcacatgtaatccacataaatcaaatatgctgctccaagggaatagggcattgtattgggtggtgagagaacagtggctgccacttatataaaacttattacataacaggcagtattctaagtgctgtatatattaactcacttaatcttcagactgtcctaataaggtgggtactattaatgccagttttatagatgcagaaacagatatacagaaaatgagggaatttgtcccagctcacttggctagaagtggaaaagcacaaatgcaaattcagacccagagcccacgatctgacccactctactctctggttctaacagttagggaataccaactacatgtcggtcaattgtgctcaagtctttccatacatgatcttgtttcatcttcacaataaccctttgtgatgggtatgattctctccattctacagatttctaaatacaaggctcagaggagctaagaaacttgcccaaaagtcacatggctagtgaggtgagttggaatttaaaccgtattgttgtctccaaagccatgttcttctgatacctcatatcacacttaggggcattttatttccasatggagtaaaggttaaagaaaaaaataatcagagggaagattttcaggaggaaaagaacttcagaatgtttgaagaatgagaagaactggccaatctagatgtccatctccagaggaacctctgctgtggggctggaatggccaacataatgggaggcctggaccccaaggaaatctgc

SEQ ID NO: 90795 - DNA, 862 bp, Homo sapiens
agaaaattcacaacccaccactggtgggccaccagccagatgaaccaggcctacctggtcgtctgtggagtgacagcccactgtgtccctgtaatcctcacatgtaatccacataaatcaaatatgctgctccaagggaatagggcattgtattgggtggtgagagaacagtggctgccacttatataaaacttattacataacaggcagtattctaagtgctgtatatattaactcacttaatcttcagactgtcctaataaggtgggtactattaatgccagttttatagatgcagaaacagatatacagaaaatgagggaatttgtcccagctcacttggctagaagtggaaaagcacaaatgcaaattcagacccagagcccacgatctgacccactctactctctggttctaacagttagggaataccaactacatgtcggtcaattgtgctcaagtctttccatacatgatcttgtttcatcttcacaataaccctttgtgatgggtatgattctctccattctacagatttctaaatacaaggctcagaggagctaagaaacttgcccaaaagtcacatggctagtgaggtgagttggaatttaaaccgtattgttgtctccaaagccatgttcttctgatacctcatatcacacttaggggcattttatttccagatggagtaaaggttaaagaaaaaaataatcagagggaagattttcaggaggaaaagaacttcagaatgtttgaagaatgaraagaactggccaatctagatgtccatctccagaggaacctctgctgtggggctggaatggccaacataatgggaggcctggaccccaaggaaatctgc

SEQ ID NO: 90796 - DNA, 2060 bp, Homo sapiens
attaaggactgacccaaccaaatggtaagtggcatgggccttctcaatcctcacttctgctcctggccaggacccacagggtaatagcctgggtggggatttgtgtagatatgccaaactctgtcacctggagcccttgtaaacaatggttcagaaccattcatccattgagtccctcacttgacacactttgttgtgtcattccctgtgttcgatgctgggaatacagatgttgggcattcaaggcacagtttgggaagcccttctatcacaggtgagtgacagaacaaacaaaccacttcaattaatagaataaaagtatttgctatagtctgaatgtgccccaaaattcatgtgctgaaacttaatccccaatacggtggtattgggaggtgaggccttttgggaaatgattgcatcatgcrggctccaccttcatgaatggattagcactgctatacaatgactggagggagctagccaaggcccttttttccttctggctttcaccacatgaggacacagcaacaaggcaccatcttggaagcagagagcagaccctcactggacaccaaacctatcagcgccttgatcttgaacttcccagccttcagaactgcgagaaataaatgtcttatttataaattactcactctcaagtatttttgttacagcagcacaaatgaactaagaaagtagtattcaaaaaaaaacctcataagacacacatgttgcaaactggtacccataggttaatctaactataagtgtttcctttagctacatactgatttgttttaaaatcggaattgcagaggaaaactatgaactccaacctcaaatgcacatgttccaagaacaaaaaccctgtccatctatgcatgcctggttctgagcagtccagttcagacttgactggtgttcatttattaactctgtttaagtaggcaagcagttaagaggtaccagaagtttaaggaaactgaggaagaaaataggattttctcaattttaactttgtcagtagggaagtcagccattatattagtcagttcttgcactgctataaagaaatgcctgagattgggtaatttataaagaaaagcagttgaattggctcatggttctgcaggatgtacaggaagcatggtagcatctgtttctggggaggcctcagggagttttactcatggtggaaggcaaagtgcaataaggcatcctacacggcaggagcaggacagagagcgcgagtcgggaggtggggaggtgccaaacgcttctaaacaagcagatctcaggggaactcactcattttacagtactaagggggcaggggggtgctaaaccatcaaaaaccgcccccattatacaatcacctctcaccaggccccacctccaacactgaggattacaattcaacatgagatttcatgggggcagagacccaaaccctgtcagccatgattcagtttaagctgtggaatactcactcttctgtagtttgaagaggacagcctgagatgtagctgtatggacaaagggagagacaggggaaaatggcagtgaaagagattaaacaaagagtactgctggggtgtggtggggtgcatgcgtgcgtgcgtgtgtgtgtgtgtgtgtgtgtgtgtgtgtgtatgtgtgtgtgtgttgagcggtaagtagtctgctggggagaagtagggaggacttctctttaaatgctacatatagacctcctccatccttgccaacccccaagacaagcaaggagcatttttcactcgcagacctctccctgcacctagggcaaggtggaagagagggaactgaactgacaggcaggagctctgaagagtctctccctatactaagattcataaaccaacagggcccacaaagacagtgtagaggagaggcgagtccgccatcggatatgccatatcacagtcccttattccctccacccatcgtggaaagcgcttactgcagtttcattcctctatcccactagctcaatgtctgtgctgccttatttctggtcttcttgtaaacactggattaaa

SEQ ID NO: 90797 - DNA, 2060 bp, Homo sapiens
attaaggactgacccaaccaaatggtaagtggcatgggccttctcaatcctcacttctgctcctggccaggacccacagggtaatagcctgggtggggatttgtgtagatatgccaaactctgtcacctggagcccttgtaaacaatggttcagaaccattcatccattgagtccctcacttgacacactttgttgtgtcattccctgtgttcgatgctgggaatacagatgttgggcattcaaggcacagtttgggaagcccttctatcacaggtgagtgacagaacaaacaaaccacttcaattaatagaataaaagtatttgctatagtctgaatgtgccccaaaattcatgtgctgaaacttaatccccaatacggtggtattgggaggtgaggccttttgggaaatgattgcatcatgcaggctccaccttcatgaatggattagcactgctatacaatgactggagggagctagccaaggcccttttttccttctggctttcaccacatgaggacacagcaacaaggcaccatcttggaagcagagagcagaccctcactggacaccaaacctatcagcgccttgatcttgaacttcccagccttcagaactgcgagaaataaatgtcttatttataaattactcactctcaastatttttgttacagcagcacaaatgaactaagaaagtagtattcaaaaaaaaacctcataagacacacatgttgcaaactggtacccataggttaatctaactataagtgtttcctttagctacatactgatttgttttaaaatcggaattgcagaggaaaactatgaactccaacctcaaatgcacatgttccaagaacaaaaaccctgtccatctatgcatgcctggttctgagcagtccagttcagacttgactggtgttcatttattaactctgtttaagtaggcaagcagttaagaggtaccagaagtttaaggaaactgaggaagaaaataggattttctcaattttaactttgtcagtagggaagtcagccattatattagtcagttcttgcactgctataaagaaatgcctgagattgggtaatttataaagaaaagcagttgaattggctcatggttctgcaggatgtacaggaagcatggtagcatctgtttctggggaggcctcagggagttttactcatggtggaaggcaaagtgcaataaggcatcctacacggcaggagcaggacagagagcgcgagtcgggaggtggggaggtgccaaacgcttctaaacaagcagatctcaggggaactcactcattttacagtactaagggggcaggggggtgctaaaccatcaaaaaccgcccccattatacaatcacctctcaccaggccccacctccaacactgaggattacaattcaacatgagatttcatgggggcagagacccaaaccctgtcagccatgattcagtttaagctgtggaatactcactcttctgtagtttgaagaggacagcctgagatgtagctgtatggacaaagggagagacaggggaaaatggcagtgaaagagattaaacaaagagtactgctggggtgtggtggggtgcatgcgtgcgtgcgtgtgtgtgtgtgtgtgtgtgtgtgtgtgtgtatgtgtgtgtgtgttgagcggtaagtagtctgctggggagaagtagggaggacttctctttaaatgctacatatagacctcctccatccttgccaacccccaagacaagcaaggagcatttttcactcgcagacctctccctgcacctagggcaaggtggaagagagggaactgaactgacaggcaggagctctgaagagtctctccctatactaagattcataaaccaacagggcccacaaagacagtgtagaggagaggcgagtccgccatcggatatgccatatcacagtcccttattccctccacccatcgtggaaagcgcttactgcagtttcattcctctatcccactagctcaatgtctgtgctgccttatttctggtcttcttgtaaacactggattaaa

SEQ ID NO: 90798 - DNA, 722 bp, Homo sapiens
tggtggcacacgcctgtaatcccagctactcggaaggctgaggcaggagaatcggttgaatccgggagggggaggttgcggtgagccgagattacactacggcactccagtctgggcaacaaagcaagactccgtctcaaaaaaaaaaaaaaaaaaaaaaaaaccctaacattactgaaccacaaaagaaaaagtagtggcgggtcagttttaaccttgctttatgtttttcgtatttgatttttaaatctttctaccatatcccacataytacttttgtaataagaaaaaaaaagaaaggaaactgaataaaaagatctccccgctaacaagcgccggaggatggtgcatcttgggcagagaggagggggcttgtccttctagtcaggagggagaggaaggagaggggccttgctcacatctgttgggataaaggaaggggaggtgagttcttggtaggtgctttggcccagagaccccctcagagggagtgggcagtcggggctgggggattcagggagtgagaggtattggggaaaagtgtttgagagtccatgtgagctggacccagggagaggaggcagcctagatcctgattcctcagggggcctttggactggggagagttgtggccagcagttccctggcgggcatctgcagccttcctggtgacctctgggacccagcttctgttctcaggaccccagcacatgtgagttgga

SEQ ID NO: 90799 - DNA, 791 bp, Homo sapiens
cttgctggagctcttgcttctagagctgctgctctctggaagctcccccttgtcatcccccgggcacccagtctcttctaattcccctacctccctaagcagcacccctaagtcctgtctgggggctccactggtctttttactggagggagagaggcttgtctgtggagctgaaatggactcctggtttgcctgcccgcctgaccccatccccctttcagacgacccccatggccaggcaaccccatccacccgcctcccggacccagcctctcacttgtgctatgcacgggaacatcggtctctctggatgttctaggctggtatgtttcctgctgcgccagtggccccagggattgtgagtggggtgaagatgcagcttaggagcaagtgttggagacagtgtgtggctgggtgtggccctcagtgtggggtgtagtgtagaatcaaggctgtgcagcctgttacagttttgtgtggaatgtcttggtgagacgggtagattgccagtgggttgcgttttgggtcaaggggaattatactcagggcactaaccctttgtggggctgcccaggtccttgggccccgagaagataagggaaggggaagggcacctctctttagggtgctcccagagcgccccatcccwtcccttggcattgctagattccagtgtgcggcttaggctcagatcacccggcagaggggaggggagccctcgtctggggtcctgctgagttcagagatcttatttcgcaccccaccatccactctcctttaccacagggatc

SEQ ID NO: 90800 - DNA, 772 bp, Homo sapiens
atccctagtggagtacaggcccctggctgtttccccaagggaaggaagctcctgtctgcccttcactgatctacagatgaggaaaactaaggcccagagaggtggcccaaaagcccagagccacacagcagctctcaaggaagccctcggccacacaggaaggtctgactgactcagggacccagttcttaggggctaccagtcacctgttgtacaacttggggacaagttgcctccccctcaccccttgccaagttgcctccccctcaccccttgccaaaggctagtggcccagtgctgcaggggagtgcgtgtgatgaagaggcgcatcctgctgctgttcaccacgggttgagggggcgcaggtgggcccaggtctctgggggtggaaggccagagaaagctgtactggctgtgtgcaggaagggtgggtgttgcagtcagcatagaggacacagggtgacagtcacctgggagtgtgcrcagcgccagacatggagcctttaataccacatccctggctggtgcccagagaccccccaccccccagagagaggacagaccgtcagggcagagagtaaggatgtgtcacccacatcttgtcactagcataaggattcatccttgcagggagcatcccctcaagattgccctgaccttgagatcaaagtgggtatctactccccgaggccacaggttcctcaggctgctctgataccccagtctcctgcctccttggacagttctctgctggggatggtcaaaaactcac

SEQ ID NO: 90801 - DNA, 1243 bp, Homo sapiens
tgtggtcatctactcgagcccaggcgtgatgctacccaagcaggacttcgtggacctgcagggtcagctccggtgagtggctggggtttgggggccaggaggcagccgggcccctcgagttcacttcgcccagccgcttggaggggccccraccctgtttatctttctgccccacaagcagccttatgaagtagggagcatcctccctattttacaaatggggaaattgaggctcggagcagggaagggagctgcccaagaccccattcaggaagcagggtctctccagctctaaagcctcatggctgttaaccaccacatcttcgcagaggccccatcctcctccatacctgaggcttctccccgaccccagttttagcacttcacctctcctttccactcttctcagctagccacaggggtgacctctgtacacagtcctcttttccacattcagccaggtcacctgccccagcccctattccagtcctaccagagataaaaataccagtgacaaggatctcctgcccaaggaccagccactggctgccaccacctgcttctcttaaagggaccagggtaccctgggaagggccggggttcaggcccaggaactccagccactggtccccatggtgggatccaggggcggccccaagcattgagggtggttgccatgggccagacagccctgggaggaaggcggcctgggggacacagaggcccagagtggggaagggacctagtggagggaacaccggagccactgctctcccatcacaccaccccaggggcccggggcctccagaaccgatgcttcagagcagatgacaccccctccagattctaggctgaggttcaggagctcaggccctttgtgggtagacccagcccactgacccctaaccaagccacactccagctgcagggggccagcacccaagtcctactaggcccttggccaccagcacttccccgagccctcccgaccatgctccctctagaggttatgaagaagcacacacaggctggcaagctgggactcgcaggcccctcccttgcgctcccaggctttctggaagcggtgagagaggctggaagactagacctcccgctccccaagcaggtgtccctagcccggggcctccctcagggtgtccacgcagcttctaatctctaatcaatctttccagatttgctgccaaactcattgagggtgtgttggatttcaaggtcatgattg

SEQ ID NO: 90802 - DNA, 1411 bp, Homo sapiens
tgggcaggatgggagcccactcaggccctgggagatgggccatggaggcacgtgcacctgtagcctgtgctgtgctcggtggaggttggcctgctgctggcaccccagcggctcaacatgtccgaaagaagccctctgagtgtggggctggctgcagagctgaagggcgggtgtcacttcccagcatcctgggccacaggagctccaggatggacaagctgaactcagccacttgtgctcctttttggttcgccggggcagaggccgcttcatgctcgtgagaggtgagaggaagaagccttcctgggaggaaaatcctgggcagaggttggggttggaaggagagcaaagctgagggtttggtgtgcccaagacttgggcctaagtcaggtgatatgtttttcttgaatcccacaagcattaagcatgtgttatatatgtatgaggtrttggaggaatgtggagatgagaaaaaggtaagaatctgccttcaagaaacttccagcttactggggaaacagagagatggagaactagttgcaaaggagggcggaaggtgatgcggccgggtggactttaggtaagctctggaatactctgtggaggaggtggcgtgtgggcatcctctcacctgggtgatgggcgcagaccaaggacgtgctcgcggggccattgtgcacagagatgtggaggggtggctggcaggggacacagttgcaacagcaggtcggggctggcctgcagagggctttaacaccagctcgggatccaagacccccgccatggatgcccgtagcactccacacgtggccttgacacttgcctagcggcatttaattctctacaaaatgcattgcttaaggttcgtcttccctgctagaagatgagccgcaggaggccagggactgtctgtcttgcccactgctgtatcccagtgcccagcagagactggcacacagcaggcacccggaagcaggaatcagtggttcggtggggagttggtggggagctggggaagtatgtaactggtgcctctgtggtgtgtgtgagagatgaggattgggatttaggaaactcatgggcagctggctggatgctggtgatgggactgtggatgctggtgatgggactggggccttggcccagataagggatgttgaaggccccaagcagcacagagagaggccctgggctgggaagcggagggtggaggtgggagctggtgctgaggaagagggaggggttcttaatgaccctaggcacatgcctgagaggaggactccggcaaaggtagctcagccaggggtgcagagtttgaggagctctggtagacatgttgcatgggctgaatgggaggctggcagggctgccaggacccaacccctggtagagtggggaatctggggccaaa

SEQ ID NO: 90803 - DNA, 1408 bp, Homo sapiens
ggaggtaactttagactgactcctgcacctagagagggcatccttagagcatcttaggggaaatctgcccacccctatgtattttcttttctttttttcttttcctttttttttttttttttttgagactatatctctctctgttgcctaggctggagtgcagcagtgtgatcatggctcactgtggcctctacctcctgggaccaagcaatcctcctgtatcagcctctggagtagctgggattacaggcatgcaccaccacacctggctaattatttagttttggtagagatggggtctcactatgttgcccagacttccctctgtcaatgacagacataattcaatcattcattcattcaataaatatttattgagcacctactaggaggtgccaggcattgttcttggtactggaattatggcagcgaatgaaacaaagcccctgctctcagagcttacatcctggtgggcatggagggaaactagacaataaacagagaaataaagatgtatcagattggtggagtgtccagggctagatgaggcagagtgagggagggggagaaggaccagtgggcaggaagtggtgccatcagggaagccagtgaagggccaccctttgagtgacatctgtaggacatgaggctcagaccctgtggacctggggggagtggagaatgttccaggcaggggaacagctggtgcaggaggtctgagtgctgggcagaggggatcccaggcgggatcccaggaaagctggagacagagggagggaggtcagaggcggtggtgtcggcctctgtgggccgtgattaggaccctggccttacccggagggagacaggagcctttggagagatcccttactggagcagaggcttggctctggctgtccgtgagaagggactggagcaggcccagggcagaaacagtggggcaaccaggaggctggggcagaggggcctcagcttggaccaggtgcaggcgacggagctgggctgggggacgagataggcttctgggtgtgtttaaagttggagccatgaggattgggtgatgagttagactccctacccctgaatgcccwcacaggaccacaaggttcctggtgctctcaccaaataccatctggaagcctcctcattccacaggtgattgtgaaaataagaccttaattgtttcattttgtttttttcccccaaaacaaaaccaaatgtaatgactaagaaaagctccacttccacctccagggcgccgctccctctggtggagggttggctcctgatttagatgctttctatatatgaattacagggaaagggaggcctgggagcaggtccttctggccagctgggcggctctcaggggctgccaggatgcctggcttctgcctgaagtgagcag

SEQ ID NO: 90804 - DNA, 710 bp, Homo sapiens
aacggctttggcagaatgaggcagttctccctttcacaaaattcatcacagttcaagcttttggccccaaacagcggcagatgacagagggatttcctgaggtggtttatgggacttttgctgaaatggtagcatgaacttcacctgggcctgcagggagccatcccctgcctccatccccttgctcctccttggcctgtcctaaatcagggatgggaccttggtccttacccagrgcaaccttggccttcaagcagcatgcctgagctcctccctcaggttctgctcaaaccctttttcctcagaacctgcacaccccgctgggtcgtcacacagcaaggcccatgcctcctcctccaggaagctgcactctgcccagatctccttggatgatgctaactcatggggtgtggggagtgtggaagcccagcttccttgcctggggtttcaataaccctgagatgtaacttgcattccagagcggccctcgggatcacaatgaagcacctgcctgctggacttggccagacatggcactgttggtcttccttccctcccctctcctgcttcccactcctttcctggtttattctgggggcacttccttaatcaatcacttgctcacaaatcctcagcagagagcctgcttctggggacccgacccaagacacagcttccaggggtcactcctgctgtttctcagcttggac

SEQ ID NO: 90805 - DNA, 710 bp, Homo sapiens
aacggctttggcagaatgaggcagttctccctttcacaaaattcatcacagttcaagcttttggccccaaacagcggcagatgacagagggatttcctgaggtggtttatgggacttttgctgaaatggtagcatgaacttcacctgggcctgcagggagccatcccctgcctccatccccttgctcctccttggcctgtcctaaatcagggatgggaccttggtccttacccagagcaaccttggccttcaagcagcatgcctgagctcctccctcaggttctgctcaaaccctttttcctcagaacctgcacaccccgctgggtcgtcacacagcaaggcccatgcctcctcctccaggaagctgcactctgcccagatctccttggatgatgctaactcatggggtgtggggagtgtggaagcccagcttccttgcctggggtttcaataaccctgagatgtaacttgcattccagagcggccctcgggatcacaatgaagcacctgcctgctggacttggccagacatggcactgttggtcttccttccctcycctctcctgcttcccactcctttcctggtttattctgggggcacttccttaatcaatcacttgctcacaaatcctcagcagagagcctgcttctggggacccgacccaagacacagcttccaggggtcactcctgctgtttctcagcttggac

SEQ ID NO: 90806 - DNA, 1583 bp, Homo sapiens
cccctcttgactccgagcacacatgcacatttcctatcattccatttggctttatttactatatctttacactaatccatggagattcatgaaacaacagggacttcttagaacaaggtaacactttttattttattttttttaatgcattcaagttttgcctttccgttttaccactggggcctctgcatgtggaattaaaagtaacaaatgtccccagagcctgtgcacctggagtgtgatgcctgtaaagaactggaaaaacaatgatggaagcctgtctgggatggagggagtatggcctgaagtaggccccaagtggttccgttttttgattaaaaaaactttttattttgctgggcgcggtggctcatgcctgtaatcccagcactttgggaggccgaggcaggcagatcatgaggtcaggagattgagaccatccaggctaacacggtgaaaccccgtctctactaaaaatacaaaaaattagccgggcatggtggtgggcacctgtagtcccagctactcaggaggctgagacagaagaatggtgtgaacccaggaggcggggcttgcagtgagccgagatcgtgccactgcactctagcctgggcgaaagagcaagactccgtctcaaaaaaacaaaacaaaacaaaacaaaatcaactttttttttttttttttttttaaagaagtgaggtctctstgtgttgcccaggctggagtacagtggcaggatcatagctcactgcagcctcgaactcctggccacaagtgatcctcccaccttagcctctcaaaatactgtgattacaggcgtgagttaccatgcccagacttgttccattttttatggtcccaagagtgttagaactcagagtttctgtgtagcactctcctaacctcccactggaggtatccacatgcctctgggccacctggtgtccccagcctcagtgggagagaaggaggcaagtcccataagacttggctctcaacaagcaggctctctgctgctgcctcgccctgtgacttcagcacgtccttgaacctttctgaacctatttccttgcctctaaactgaggctgacaatggctggcctgatacacctcatgcagattttgacaatttccagagaaaaaaatcatttattcaacaaacattcgttgattgcctatgtgccaagcattgttccaagaactgaaaagcagtaaatgaggcaaagtccctaccttcagagacagacaataaacgaaaaagatattaacataaatgctatgaagagaaataaagcaggttaaggggtatatgtgcatgcatgtgctatttcagacagggttgtcaaggaaggtctctgaggaagtgacatttgaatagagacctgaatgacatttaaagccatggcatggactgagatcactggtgaaggagttaagagagagaagcaatctgatgaacaagcccttggccagtctaacatctcaacggcatgacatggaaacacatctgtaaaggggaaagtgggaacaacctccctcacagcactgtccagagctctgcacctgtgaggcactggaaggaa

SEQ ID NO: 90807 - DNA, 647 bp, Homo sapiens
tttattcttttttttgaggcagggtctcagtctgtcatccaggccagagtgcagtggctcgattatagcccactgcagccctgacctccagggttcaagtgatcctcccacccagcctcccaagaagctgggactacaggcacgcaccaccacacctggctaattttttttgtatttttttktagagacaggatttccccattttgcccaggatggtctggaactcctgggctcaagtgatctacccgccttggcctcctaaagtactgggattacaggcatgagccaccatgcctggccaaaactagttcatttttaatcatcagtcctcaaggccattgggtgtatagtaggtgccggggagataggagtgcacaagatagacacaagccttgcccttggggaaaggagtcagcagataagtccctgaaacatcagacagcagacaagatttacagtgctaattgctggcagggtaaggccagggccttctggtctggagtagccttgatcaaaactgtccaagtcctatttgccagcactggagctggcccttgggtactgaccttcttttctgcttctctccatagaaaatgtcatccgtgagaatcagtggggaggtgtggacatccgccgtggagggatcc

SEQ ID NO: 90808 - DNA, 472 bp, Homo sapiens
gttgattcctcttcctggggttggtggaatctttgttctcatacaaggtaaagcgcatgttgcctggactctgtagcttcccgttggagaactggactgtaagagtgcagcccaagaatgagatgagagcagaaggccacacaatgtaccacacaatgtacggtgggactagactgtcactgggagggagtgycagaatggggatggcaaggaagctcgggtcctgacccaaagggaactggaggagatccggggccagctgagaagaggaggtagggaggtgggagaaccctggggaggggctgtgacaggagggaatgtctcgcggaaggaggctgacagcagaggcctggtacatacctaaagtgacagaaggaacccctgcccagtgaagagagggaaatgggggaggcgggagacctggtgggtgagggggtcagcagggtcctggacacagctctggggagcgggt

SEQ ID NO: 90809 - DNA, 590 bp, Homo sapiens
ttattgccaattaagtgaagtttcaacatacttcttcattttttcatgttagtctttcactgtaatgtatgtaaagaaaaatgtcaagtaacagtcacattagaatgttcgtttatcagttgcaaccataggttgactaaaggtacacaatttttgccaaaattaacaaaagctttctgtatgagtcaattggctctgtggaatttgcaaagacgaattttgagaatcactattgtagacaataagaaaacaaaaggaaatgagatatkgctattggttggaagaatcaaaaaaatcattatttgtggatgcctgtatttcctgcatagaaaatccaagagtcaactgaaaactataagaactaataagaaattttaccaagatggtcagattcaaaacaaagaatgaaaaaggcagtaggttccctgtcaatcatgaaaaaccagttagaaaatgcaaatgggaaaaataattaataattacaaaactcacaataaatctatattttataatacaagtaagcttcaagaagtgtgtaatatttacatttaaaagtttaccaacactcatgaaaaagatttatgtaaatg

SEQ ID NO: 90810 - DNA, 590 bp, Homo sapiens
ttattgccaattaagtgaagtttcaacatacttcttcattttttcatgttagtctttcactgtaatgtatgtaaagaaaaatgtcaagtaacagtcacattagaatgttcgtttatcagttgcaaccataggttgactaaaggtacacaatttttgccaaaattaacaaaagctttctgtatgagtcaattggctctgtggaatttgcaaagacgaattttgagaatcactattgtagacaataagaaaacaaaaggaaatgagatattgctattggttggaagaatcaaaaaaatcattatttgtggatgcctgtatttcctgcatagaaaatccaagagtcaactgaaaactataagaactaataagaaattttaccaagatggtcagattcaaaacaaagaatgaaaaaggcagtaggttccctgtcaatcatgaaaaaccagttagaaaatgcaaatgggaaaaataattaataattacaaaactcamaataaatctatattttataatacaagtaagcttcaagaagtgtgtaatatttacatttaaaagtttaccaacactcatgaaaaagatttatgtaaatg

SEQ ID NO: 90811 - DNA, 1003 bp, Homo sapiens
aaaataccatctgcctgtcaagtattgttttaaaacattaaatttgctaaatattacctagtgttagatgtaggccaaaaaggcagcaacagtggagtaggaagttcatgagttttagagtaaatcaggcttggggttcatttggctttgccatttattttagatcagttatttgacttctcagcgtttcactttcctcatccataaaataaagttaataatacctatctcagtagaattgttgtgaagattcaaagacctaatctctttaaaacacctactgcagtgtgtagcatgtattattagttgttcaaaaactagtttgaaagctaaattatatgattgatttatagttcattttcttctttgttaggtttttgcatcagagtgacatttggtaaatatttggcaaatattactcaatgtttgtcatcttttccagcttgtgggatagtttatatagcatggtgaatggctccgccttcaaaaattcactacaagatatatctagtatgaaagattttaaaatttctytttaaaatttttgttttcctacactggtcttctctgcatagtatggaagattaaaaaataatattcaactatttttagtatcattactctgtgactcacatttctaaacatgtattatttccacacctcacttgtatggtgctttacttccttatattctctatacgccaggactactttgacttactgtgaaaatataaacctttcagcctattcaaagtaacccaatacaaattccactttgaaggtaaacttatttagtaggtactttcagaactgagtgttgtttccaattgctttcttagcttaattttttctgctactatttttttttattactcagatttggggctgtattttgttttcttttctttttgaaatagggtctcactttgtgtgaagtggtgcgatctgggctcactgcagcctcgacctcccaggtttaagcaaccctcctgcctcagcctcc

SEQ ID NO: 90812 - DNA, 515 bp, Homo sapiens
tgcattttaaagaccactgggaaccaacagtgtttatcatagggaaatgartaactattcatataatttaaggcatgtggacccctttaaattatgtaagatgactaagctcctcatacaaactacatacacagggtgatcgaataagcaaacagtagagaaaagttgggaagctcttattctgcactctcactttgcatatagaacaatccaggccattactcttagctaatcttcttttcctctcccttcctgtgtcttagttttctcttcaccaaatagagagagtggcagggtagatggcattgctaggcccaatcaaagacagagacaaggatggaataattctgatacattcattttccccatggcagtgataaccagcacaacagcaatggcacaaccaacaattactgaatgtcttccagctgtcaagttcctttcagtttccaagtcttgtgaaaaggaagatgtcagtggattttctggctaatgagagccaaacctcaaccttt

SEQ ID NO: 90813 - DNA, 1108 bp, Homo sapiens
ttggatgaataaaacagtaagttaaatagcttaactctgttgaattttgtgatttatgtttaagtctaactgctacctagacactgctctgagaatatggtgagctgactctgtcaagagtttattaatccccaaggctttattttaatacctgagtaagaatcctcaacaccaagcctgtaaaattccactgggagagtcactggtattgtgttgacagcagggacaccaggtgggtaagttataggaaaatagattgtcttggcaaattgatagcacagcacagcagggcaaggacaagagtattcttcaagttcagttccaagggcttgacagagtacatctctcaatattggcctttcttttaaggacactaaagcataaaattcataagtttgtgtgcgtacttattgtttgtgagaccccttaatccttacagcaacatcagtaagagtgggccctattattgcttccattacacaaatgaggaaagaggcatccaaatcacgtggctagtaaagggaaggaccagggtttggatatgggcagtcaaattccagagcttgtgcttttaatcactgcacccatccatgagaaataaaccttgctatcaaagcaattcagacaygtaaactagccatgatataaagaaaaaagtgctttgatagagatgtgtgtaaagtgatgcagagcctgaaggataaagcaactaagttcagggatcttacatattaataaaagccctgaggccgggcacctgtaatcccagcactttggtaggccaaggcgggtggatcacttgaggtcaggagtttgagaccagcctggtcaacatggcgaaaacccatctctactaaaaatacaaaaattggccagacgtgatggcacatgcctgtaatcccagctactcaggaggctgaggcaggagaatcatttgaacctggaaggcagaggttgcagtgagctgagatcacgccattgcgcttcagactaggcaacagagtgagactctgtctcaaaaaaaaaaaaaaaagaagagcaagccagatacattgtctttttaagaaaggattcatcttaatattctataattgcagaccatgggttt

SEQ ID NO: 90814 - DNA, 752 bp, Homo sapiens
ggatcccaggcctgaagctcaaggtaagagctgaactccaaatatgaacatgagcatcatcagcttagagctagccatggaagtcctggactccaagactgcgttggaacaaagtgactgggacacgcagcatggaggatttccatcagagcttggaggaatgttactggagaaggggagcaagagcacgtagccaaagaggtggggggtgacacgggtgagtgtggcaagagggaagctgagggcagagagaccgagaaggaggagactgacggggagccactgaattcactcaaaaagtggtgtactggtacctggcaaaaagtgggtgaaagcctgggtaaggggggcaggactggaggctgctctcaatgawtgataggtgaatgggaagcggggaggcagaggcatccttcactcaccaatgtgcttcaacaacagaatcttctcccttttctccctccttcccctgcccagataaacatcaaatcctcctctgaataaaagtccccattcgagttaaaataagaaacatgaaaacagatgggttttccaaaaacatgtccatagttccaatattcaaaattacccatttgtagcactgtgccttcttttaaatttaaaaatgattacacatcatcttctatagtgtgtcacatatgcagaacgtacaaatggcctctatgttgatgactccccggtttgtatttccagcccagatctctgccccaagtcccagctgtcccattgaa

SEQ ID NO: 90815 - DNA, 725 bp, Homo sapiens
ctttcatgtagaagttatcaaatttattggtatagagctactcataatattcccttactattcttttaatatctatacaatctgtagtaatgtcatttctgtcatccctggtattggttctttgttccctatctttttttcttaatcattctgcctattcagcgattttcatactctcaaataactagccctggtgtgattctgtcctgtacagctcttctctggagcagtaatcatttatctccatccatcttctctcctacctaagcatatgccaccaccccatggaaggctcagtggacatggacatgagccccctgaggccccagaaccaacaaagattatcgctttaaagtggatactgatgaaaatgagcaccaattatctttaagaacagtcaggttagggactcatgcaaaggatgaattgcacattgttgaagcagaggcaatgaattacaaatgcagtccaattaaagtaacactgscaactttgaaaatgtctgtacaaaatcaatgtgcaaaaatcacaagcattcctatgcagcaataacagacaaatagggagccaaatcatgagtgaactcccattcacaattgctacaaagagaataaaacaccgaggaatttaacttacaagggatgtgaaggaccccttcaaggagaactaaaaaccactgctaaacaaaataaaagaggacacaaacaaatggaagaactttccat

SEQ ID NO: 90816 - DNA, 570 bp, Homo sapiens
cattcaagaggatatgacattacatgattttgaatatcacaacaaaatcaagttagatcaataaagtaagaacaaattgcaaagaaaaaaatgggaatcagaaataccaaggagccattaaaaaatttaaaaataaaaatatatgtgttgaaattagtggttcatgtgggtcgggtgacagtcagggcaggttcaccacaaaggggccacaagagagaattttagggagtgatgaaatgttccataccttgattgtggcagtggttactcaactatatgggtttgtcaaaactcatagaatcatattccaaaaataaattttactctacataaaatttaaaaagtgattttttaaaaaatgtgtgattgttgaaataaaatagtcaacagagagatagaataatggaatgaacattcaagataaattggagatcaaaaaacactcccctartgaagagtagaaagataaatagacaaaatgagagaaaagttaaggaaactgtagacaaattcatttaatacgaggttcagaaacaagaaagggagtaagaaccatttgcatcttcacct

SEQ ID NO: 90817 - DNA, 570 bp, Homo sapiens
cattcaagaggatatgacattacatgattttgaatatcacaacaaaatcaagttagatcaataaagtaagaacaaattgcaaagaaaaaaatgggaatcagaaataccaaggagccattaaaaaatttaaaaataaaaatatatgtgttgaaattagtggttcatgtgggtcgggtgacagtcagggcaggttcaccacaaaggggccacaagagagaattttagggagtgatgaaatgttccataccttgattgtggcagtggttactcaactatatgggtttgtcaaaactcatagaatcatattccaaaaataaattttactctacataaaatttaaaaagtgattttttaaaaaatgtgtgattgttgaaataaaatagtcaacagagagatagaataatggaatgaacattcaagataaattggagatcaaaaaacactcccctaatgaagagtagaaagataaatagacaaaatgagagaaaagttaaggaaactgtagacaaattcattkaatacgaggttcagaaacaagaaagggagtaagaaccatttgcatcttcacct

SEQ ID NO: 90818 - DNA, 1215 bp, Homo sapiens
agtgattggtagagctaaaattaatccttcttgacataaagtaaattatgttctttaccatggggttgccatgtttagtacagctgtcagagggcttatagcacttcacagtttatcttgtttaattcatctgactgctttatctctggaagtagagcttaagagctcatgaagtcagatgacttgagaatgactcttggccaaaaaaaaaaaatggctaaagcaaggtatattagttaaaatattagacttaagacttagcactgagttactacgcagccaggacaaagagagtggctccagtttgctttaaatagaaagcctatcagttcacaagggctgtaaggaaaatgaaccatcagagtcttttcagaaatggtttgactgatgtcaacacaagttttgttttgttttattttgtttcaggcagggacagagtgttctgcatggggatgggggtttctggtaagcggaaaacctgataaattctagaagatatgtaaaactttcaacacacattttcaaagaaaataaaaaggcataacttgtgtatctatttctaaaatcagccctggatttaaaaaaaggtacaataattatttttcagggacagaaaagtaagtgttccattaaattaaccctctgatatagtggttcagtttgatacagagcttgaaattttttgatgaccgattcatttggctacagaagtatccaggagaaaagatgattctcaaactgtgttccataaatccctagaggttccacaaaggcatgtaaagagctgctatcaggggcagcaggaaactaagtgagcaaggcccaagtcctttcctctccacatacacaatgacactacagaatacctcatgtttgcattatttagtgtattcctccaatacatattgagcatttactactggccagtatttactggtttcatgaaagagcctttgaaaaaaagaatcatttgctaaacagataatatgtgccccactcctgaaagcaatgtaacatcaagctcacatacattcattttataattactgtcctggcgtatacttctcaaatasaagcacaggctgtcaagaccaagtggctattatcaaaaacaagttatttaaattcctttaggcccagtttcctcgcccataaaaggcagataataccaactaccttgcagggttgttttaagcttgagaaataatgagccat

SEQ ID NO: 90819 - DNA, 656 bp, Homo sapiens
actagtacttgttattttctattttttgataatagccatcccagtgggtatgaagtggtatcttgttgtgatttgcatttccctagtgattactgatgttgagcgtctttttcatgtgtttattgcccacttgtatatcgttagagaaatatatattgaagtccattgcccattttaaaattggcttctttgaggttttttgtggtggtcttgttttattgtagttctttacacatttttggatattaatccattatgagatatatgatttgcatatattttctcccactatataggttgccttttcactcttcatagtatcctctgatgcactaaagttttaaattttgataaaatctaacatcgatttttctttttttattatgtatagcttaaaaatgtgttccacacccattcttcagagttctgtagtttgtgcttttctgtatctccaacctctgccttaaaaaataataataaatagaaaaatcttgacaagaccaattaaaaatgaaaaggttttttaaagctcagtaacactgcaagtaatttaaattgccaatacagagctttcaaccagaatggaaagggagaaatataccttattttctgttcttttagagtcctagtaarttgagaagcagtttttatttgta

SEQ ID NO: 90820 - DNA, 574 bp, Homo sapiens
ctacttaagttacctttaaaaatcttaaagaatctaggatgactaaacacagtgccacttttctggttagttctctggtctaccatgcctagggtgcatttactcaattcaagggtcatacaaatagcaaattatcagaggtaaatgtatgtccccaagatgtcacagagttcagatatttaatgttgtcaccatgtaagatataaaaggaatatatcttaggagacaacactacaaggacatatgtaaagggagtgttcactgcaatgtgcayataaatagcaaaatattagaaataacctaatgtacatcaatagactaaattatggtactatgcaatgttgtacggatattaaaaatgacagcatagtataactttatgtatataaattataatttttgtatgtaactaacaaatagtaaattctagactctctccacacaggaatacagatatatttcatcttttcattgcctatgatttgtgatatggctatatcataatttaatcattcctattatcaactgatatttaggttgtttctattttcctttacattttttaatcttgttt

SEQ ID NO: 90821 - DNA, 371 bp, Homo sapiens
tttgtgtcaggcaccccatttaggctggttcctcaccaattccagatatraaaaaatcttattcatttggataaactgggggaaaaccaagcccgattactgaaaaatccccaaatggtagactagcaggaggaaaaaactcatttattcctgccaagtatttcatgagagctgaaaaacagaggctttgaagacctattttcagtgatataaataagaattcttggtaaattaacagattgaatatcttcacgcacattcacagtgtctgaaaacaatttgctcttttagtcagcttacattagtaccctccaatcctgctaacccaatatcataaatagttgcttaaattgtgtgtgtgtggggggggg

SEQ ID NO: 90822 - DNA, 681 bp, Homo sapiens
tggtggcacaagccttccccagtcctgcagccttcgggaagcggcggtgcccagggcgcagagctctggcgttgcactcatgggcttatgctgccctctagtgctgtgctcttaaaatagccgcgtggctttgccacttaaggctgatgcggaatctagggcctcgtgggccctctaaagaaactgcctcattgcatcaaaatcaatgccctgctcttctaacagacgctctctaatgccctctaatgaaacccatacagaygatcacctatctatgctccaaatcgcaaaagataaacataatgtcttaactttaatataaagtggaagtataagaacttaaagaaaagtagcttttatagcatggaacttgtcttgcaatgagcttgacctacactcaccagaagcaatttcttaaatacccactcagaggtgacactgcttccgctgagaaacgctcgtggaaggtcgggctggccagccttgctgtaaagggccaggtggtgcatacgcatggctttgtgggccataagctcccagccacacctacacagccctgtcattgtgacgcaaaggcagctgcagacagcagcaagtgaatgggcatggccacattccaacaaaacatcatttgcaaaaagaggcagttggctagatttggcccagaggttaatgatttgt

SEQ ID NO: 90823 - DNA, 952 bp, Homo sapiens
tgcatttgagcctttaacgctgcactgaagccactctgcctccagccctgtaaccctgagcgggctctggcttctgggaggcattcagagcaccacgcctctctccttccaagcatttggcaggttggatttttgtgaagtgagtgggattgcatgtcccccttagactgtagtcttcgtggggacaggtcccggattagtcttcctgtctgatccattcctcatttgtcacaattgccagcacatagtaggcacttaataggaatctgttgatccaatttgatagcgcaacagggtgactatagtcaatgataacttaattgtacatttttaaataactaaaagaatgtaatcggattgtttacaacacaaaggataaatgcttgaggggatggagaccctattcctcatgatgaggtcatttcacattgcaygcatatatcaaaacatctcatgaatcctataaatatatacacttagtatgtacccacaaaatttcttttaaaatttatgaaagagaatctgttgaatgaatgatttcctgaaagtctctcctccagcaaagggcagaccagcatttcactccaggtttcctttcaggacaagcagcctgctccctggcatcacctcaccactgggaatgactgggtccatcttgctttccagggcgtaaaccctgagcagggtgccaacttgccggggagtgcggcgtgagccatgccagtgcagggacgctgttgctcaccctttcattcattcaagcatttactagagccacttttcttccaggggttttcccactagatcagcagttttgagatagtcagggacataaccatgtccttgggaggcagcaaccatggagacctcaccgtcaacacacaatatgcgctgtagtcaagctcattccagcaaagctgcctccggtaaggactttcccctgtagagggta

SEQ ID NO: 90824 - DNA, 682 bp, Homo sapiens
  misc_feature (1)...(682): n = A,T,C or G
ctcgagctcaggagggcaaggccaccatgattgtgccactacactccagcttagatgacagaatgagaccctgtctcaaaaaaaaaaaaaaaagctatatgtttttaaatatcatttatagtgtgatttgtgtaaaattgcatagacacagagaagggtttacgccatgggacagccacgaaaatgtgatagcacttcagtttgactttaaaaaaaatactcttgtgcattgttcaattgtttttataatacagtgatcacatttatttagtgattggaaaagaggttatattttagttttggaaaattaaataagtgtagatgtgaaaacaaaataaataamaattctcagaggtatgtttatctaaagtgagccagattcacgtgcattcaaaactcctctcctaggaaaacctcccctgattgtcttcttcaactgttaggaaatagnnnnnnnnnnnnnnnnnnnnnnnnnnnnnnnnnnnnnnnnnnnnnnnnnnnnnnnnnnnnnnnnnnnnnnnnnnnnnnnnnnnnnnnnnnnnnnnnnnnntcctgaaaaaattcaggtttgctcccatgggtttacattttatttatctcttaatgcttacatcctctgatgcctctgacattttaccttgtctttggacaaattttcacaatgtttaaaaggtatgcttta

SEQ ID NO: 90825 - DNA, 682 bp, Homo sapiens
  misc_feature (1)...(682): n = A,T,C or G
ctcgagctcaggagggcaaggccaccatgattgtgccactacactccagcttagatgacagaatgagaccctgtctcaaaaaaaaaaaaaaaagctatatgtttttaaatatcatttatagtgtgatttgtgtaaaattgcatagacacagagaagggtttacgccatgggacagccacgaaaatgtgatagcacttcagtttgactttaaaaaaaatactcttgtgcattgttcaattgtttttataatacagtgatcacatttatttagtgattggaaaagaggttatattttagttttggaaaattaaataagtgtagatgtgaaaacaaaataaataaaaattctcagaggtatstttatctaaagtgagccagattcacgtgcattcaaaactcctctcctaggaaaacctcccctgattgtcttcttcaactgttaggaaatagnnnnnnnnnnnnnnnnnnnnnnnnnnnnnnnnnnnnnnnnnnnnnnnnnnnnnnnnnnnnnnnnnnnnnnnnnnnnnnnnnnnnnnnnnnnnnnnnnnnntcctgaaaaaattcaggtttgctcccatgggtttacattttatttatctcttaatgcttacatcctctgatgcctctgacattttaccttgtctttggacaaattttcacaatgtttaaaaggtatgcttta

SEQ ID NO: 90826 - DNA, 596 bp, Homo sapiens
tgtccttttaggacatattacagtctggcttatcttaaaactaattgtgttatgtgggtgtggagtaggggcagggaagtagccttccctttgtgagctccatgaggttagaagctgtgtcttactcatatcttccatttccaagaccttacacggaaccaggcacagagtaagtgttcartgaatatttattgagtaaaattatcttgggtttgtaatagtaataataagtatttagaattttaaggagagtcttcctactcctgtctctggttaggcaacagcattataggaatgtaagtatttcttaatttactaaaagtttaatattccgaaagctttatttttaattttcaaaatatttaatctagcacaaaattactaagacaacattggaagcatggtaacgccattgtggataaatgcaatgctttcaacataactttctaacttcatttgtggttaaacatgtataaggaaaagccatttgcattaaaaaaaactgtctacgtatttaaatatggcatttgtctgtgaggacacctatcattagcatggctgatatcctggtaataattctatgtacctgggccaag

SEQ ID NO: 90827 - DNA, 715 bp, Homo sapiens
atctagtctaatacccttggtccaagaaacctaaaactagagttcagtctactttcctatgacatgtacatccactttcagatttttgactcccaaccagtgtgtcctctggaacttaaaatttgtcataaacaatatcccccacctttctaacctctgctccaaaagctcccttcatcttgatctaatggaaacctgcctacagtaacagttcttaagcttacctcaattttctggagaaatgtctgttggctttttgcttgttttttaaaaacagacttttttagagcagtttcaggttccaagcaaaactgcacagaaggtacagagacttcccacatgcctcctgtccctatgcaggcaaaatttcccacattgtcaatagcctgcatcagagtgcttcatatgttacagttgaggaaactacactgacacatcattatcacctagagttcatagtttacttcagggttcactcttggtgttgtacattctatggkattggacaaatgtataacagcatgtatccaccattgtagcattatacagagtaattttaccgccttataaatctccggttctccacctattcacccctccctccctcctaactcctagcaaccactgatctttttactgtctccacaatgtagtcttcttcagaatgttgtaatgtgtaattggaataatataatatgttgcctttttacattgg

SEQ ID NO: 90828 - DNA, 687 bp, Homo sapiens
cttaccagaaaatgacaaccagaaatcatacttcttcaagtgatccttggacactgtatggactgaaatgcttaagagtttccagttgttcagacaagccctaggaatagcacccaagttcatgtgcatatggaaaatgacagtctgccatggcaaccagtagtggttgtgagacaacagttgattgttagagacattaaaatgtgaaaaaaattcacatcttacaattgactacctagtatacttaagaggtaaaggataaatggatttcttcaagctattaaaaacatcacatactggcttaatggtacatttctaaaggggccatggaatggtttgagagagggcatctctaagtcagtaatggcattgctcttaggacataagaagccttatgcccatcttcattatttatttcacagacttattgaggtaaagggaactccgtttgtttcatcccctgccttctccagcccacttcagtgcatatactgacttcttctacctgaagcctctctctgcctagaacttaagccaagctgactcaggaggctgagtatcacgcagctctaacccaccagtcatatggcatggaaattattttgctgctctaggtttctwgtggcctagggtgaactccaggtgttgcagttcatgatgctgcagccctcacctaagctggaacgt

SEQ ID NO: 90829 - DNA, 687 bp, Homo sapiens
cttaccagaaaatgacaaccagaaatcatacttcttcaagtgatccttggacactgtatggactgaaatgcttaagagtttccagttgttcagacaagccctaggaatagcacccaagttcatgtgcatatggaaaatgacagtctgccatggcaaccagtagtggttgtgagacaacagttgattgttagagacattaaaatgtgaaaaaaattcacatcttacaattgactacctagtatacttaagaggtaaaggataaatggatttcttcaagctattaaaaacatcacatactggcttaatggtacatttctaaaggggccatggaatggtttgagagagggcatctctaagtcagtaatggcattgctcttaggacataagaagccttatgcccatcttcattatttatttcacagacttattgaggtaaagggaactccgtttgtttcatcccctgccttctccagcccacttcagtgcatatactgacttcttctacctgaagcctctctctgcctagaacttaagccaagctgactcaggaggctgagtatcacgcagctctaacccaccagtcatatggcatggaaattattttgctgctctaggtttctagtggcctarggtgaactccaggtgttgcagttcatgatgctgcagccctcacctaagctggaacgt

SEQ ID NO: 90830 - DNA, 552 bp, Homo sapiens
ggccactatcccacattgccttcaaccccagcccacaaaaggagcagttcagggagtcacccacattaggggttcgtcaggggaacccctggattccagctgagggccagctccatgtcttccctgctgcaactgcctctttggattctggaggctgtccccgggtggtcagtcagtctggggctctgggcttcatcctcagtggaggagatcccattgctgtcttccaccttggctgctgtgaacagctctggggaaattatgagagcaaagggagcctcgaaacttggggaaaggcgttctcctcaattgttgcatttgctgatcccttggctggcaggagaaccatcagggaggtcatcccattttaagaaagctagkgaaacatacagaccagatcgcaatgcctccctagctagatctttatacatccttaatggacagactgccctgtacatacagatcctttactgtcatctgaattgggcttcaggcacaaatgtgagcctccaaacataagtaaaatgatctctataagcatatctacagagg

SEQ ID NO: 90831 - DNA, 626 bp, Homo sapiens
tgaaccattccacaatgtacacatatttcaaagcatcatgttgtacatgataaatatatgcaatttttatttgtcaatttttttaaagcagcaacattaaggaaagtgagcagaaaaggcctcatattttaatattacctatttaggaatcaaaattttccttacaactgcaataaatttcaccagcagcatcttcaaagatgtttgttaagtagctcatatattatttgaaactgtcgttttcttcttagtccttgctacagaaaatttccccaatacaatctaatcaagtgaaatagttatgccttagtagggataaataagctcacatatgtatgtttgtgtttcagtagsgattaataaactaaactgattcattctctctgtaaggtagaaattctttcttagaaacaattgagtaaggaaatatttgatcaatttggcacaggtaattccagacaaataagaaaataaataatcttatatgttcttgtgaacagatagtgatagttccaagaaatgaattaagtaaattttaacaagcagtataattatttctgttagataatccttaatctcatctacgaaacggaaaggaaataaatgccttcctgtaacaggaagag

SEQ ID NO: 90832 - DNA, 1245 bp, Homo sapiens
agccttcaactcccttgggtttcttttgcctcatctgtaaacttgccattcctctagtaactcattcaagcaactgttcaagacaagttacattttactccattttagtgtgccttgcagcagaatctatagaactggtaaactttatggctatatataataccatgttgttattcccacctggctctttgctgctgcttttactgagtacagttaaaaagataaattatcatcttaaaaggatgctatggaaggtgttaataagttttatctaacttcaggagtgttcactggggctgtagaaacttgcgaccctgcttaaggggaaatgatgtgcgtcatcagcagacattcactgcctatatcttctgtaaatatttcaaatttcaagaaggattctgtaataccgtatatatttcctaaatcatggaagttattgctgcatatggattgattatgatattgagtgaaaacccaatggattttgctttataggtaataacttaaatttgtacaccaccactatggggtcagtgaaaccatcatccccatttcaaagataaagagaggtacagagaggtttaagtaacttagccaaggccacacagttgggacagaactgggatgtgaacccatttattctgttcctggctttgaaaactcacacaataatgccttcctaattatctctgatgactagtagtagggacattccaccccccacaaatagcaaaagtgctccgatttacccatttgtcatctggattcaaatatctgattctgattttccaactcttttcaaagttcttcatctcaatctgtattatcattatcacacaggttttagaagttgtttcatttaacgtatgtcaggaatggttactcttacagaacatttgtcttttacctcaaggagttaagaactaaatcagatctgtaattgactgacttgtctactgacagcctttgaagagccaccactccccaccttgtttttctgtctaaagagcaagattgacatctctttatawgtttaaaatttgtcagtggtgtaaagtgctcagtaatgatggaaattaacctgaggctttatctaactacctttcctagcaactccattgaagttctgataacaattaaaattttgatgcaaacaactgttcacatcagaaaaaatacttttttctgtcttgtcatacctttcttcaaaatattctgggtagtagtggctcttttccttacctt

SEQ ID NO: 90833 - DNA, 793 bp, Homo sapiens
aagaaggtcttttacaatggcagaagttactttgtgctaactttatcataaacttggaaatttaataacaattgttaataattgcatagtattcaccatgtaccagatatgttctaagtgattctttatccctggaaaacattgctattcctcttctgcaaatgaggaaattgagacacagagaggtaatgccactggagtaattccagacaacccagaaactgaacccgggcagcttggcttcaatgtccaacctcctaacaagtttatggtacagcctctcactaaactctgctcttgaccactgggtcttcaactgccctcttctttcycgtgttttgaaagttttacacttttcttattctcttatctcattacactattattattgcctggaatgctcttctttcatctgccttgtggcactaacttttactcagcatacaaaactcagttcatggtttactctctctcttgaatgtttagtctaatttagaggtaccacctctagattcccatagtgtcttgtgaatatgtatctgtataactaatatttgttgagcattgatatgtattaagagataaggccttcccatggattattttgttccatctttgcaacaggcctatagggaaggcgctccatttcactgaaagaatattaggacatcgtcataattaaggaaacagcttaaggttagaattaattaattaatagtaactgacaatgtcaagattccaactcagacaatctgattcccaatgccttgctcttaagcatcatacccatatg

SEQ ID NO: 90834 - DNA, 739 bp, Homo sapiens
ctttgttctctctaggataatctgcatgttcattgtattttatcattttttaaaaatctttaataccagtcaaacttggcaacctataccaaaaagtaaggtaatcatyttcagagaaattttgggttaaagaacatctactttttctccttgtctttgtcaataatattagcagagtggagggaaagagtgctgatttaaaacatgttaagtacactggtaaagagtaacacccactaataatactagtgtttgttagtaataattattaattttaataacaattgcttctgactttccagaatttgctgtggattatttcatttctcttctgtttaccctcccattttacaactgagaagacaggcagaaagaagccatccagccaagataacaaaactagtaattgtcagagatacaagccttatacgaggccacatgacttgacattgccttcctctgtggaatgtaattctttgtgatttaaaccaataacaattgcatttcctatcagtgttctttgttttctgcttaaataatttaaaaatcagaaataataataaacaaaactattaaaattatgaagtaaattgaagggtttccccgtaatgcgtggcattcatttttttgtcacccaacctcagatttatatatatttatagatttaattgagaccacactgtacaatacaaagttgaaaatagaaacttagaggtgaaacagtcacacatgagttgtg

SEQ ID NO: 90835 - DNA, 581 bp, Homo sapiens
tacccactgctgagtcttaacactgcaattggctggattggggcaattcatacaacttgtcacagaagcagaaccaggattcttccctagcagtaaatagacagggaccgtgtggggcaccagaagcagctatgcaggcactctagacagaccttcccatctctgcacagggcaaagtcggtcccagccagcagctgcctccccgggcatgcaccagcacatgcagtgcaagcttctgcaggttgacttagtgtgatgtgagaaagtatcattcacatgtttcatgtcgtgtactttcagagttgggcagagaaaccgtgtcccctgtgtggactgyctgcaggctctctgggacagacccagaggtaaaaagccagcacattccccgtgtgcctgcctaggctctgtttcccagacactcattagagcctgacacattctgacatattccacttagaaacaccttatcaataaaaaccaaatgcttttcgtctttggccacttaggaatcccacactggggacacagtccacgtttagtgggcaatgcttttggccagatgaggcgcaactaaaacttca

SEQ ID NO: 90836 - DNA, 1153 bp, Homo sapiens
aaatctattctttgaatgtattatgctgatgtaggtcactgattatctccatgccaggcaccatgagaatttttccttctcatctggctcctcgaccttcctgagccttcagctggttgcccgcctgcacctccagacctgagcttcaccaccttgtcccctctccttttttgggggttgaggtgtctgctgagcattccttcttggttctattgactgaatctcacgcatcttgcatgtcagggcctttcaagctctatggatgctgtacttcctattgcattgcctttctcttcttgaccatagcccacatcatcattgctacacctgcattcctaatgggtaacccacaaaacagcttcccaatgcactatgggatactctaggcccatgggatagctcctagagccccctggttggtcagagctgacctcattatcctgctcaataaactgattgtgtggaggtgagttttaggactcaagggcctcagctacaccttccatcctagtccttgaccacttgctcagtggagaccactcctttaccccaaccaaccacacctgctattgtcttatctcctaaagctgactgctctcttgggctcccctggactgggtttttgtatagattctgttgcatgcaccatgaagaattacagttcccctgtcacccaagctcaatccactcagataccctgcagttctactccaaccccgggactcagatggagcccaggggctcagactgcaccacgtgatgcagtgtttgacttcccagtggcttcctgaaggaaccaggtagcataacttggaggagtgagacagttaatacccgtggaaaggaactagaacagtgagagaaaggtggaaggaaggagtcatgaaatgaacttctcccactttctgccctcaaaggccatcttgagatgccccatacaatagctggaatataatgaataccagaaatgatttattgtgtatctgacatttaaatttaactgggcactctgtatttttatttgctaaatctggcagctctgactagggatcaatatctgcgaagggtagagggaggaagcagaattyggccaaggaagaacctggtcataatgcagggctggcaaagtcctggccaccccatagggagctct

SEQ ID NO: 90837 - DNA, 636 bp, Homo sapiens
acaccaagcagaactcaattccctttttcttagcagcacttcctctttgtgccacatcaagatccacttctgtgraaaaagcctgtgtgggcatgggggcttaggcctgccaaagtctaagaaaccacgtggaccacacctgggaattgttcccctggggagttggagacgtgggcattttgtcctctactcgtgtccctacccatgtccacctctagcccttcctgccctcttggccatttaccttccctgttaccctttgctcaccgtcttcctcaccagaatggagaactggcccctggcaagctcgccccatggctgcacctttaaagttgtcttctccaagcgtgtgctgggctgtcagcagcgtcacccaggagctggaagtgcaaatgctcaggtccttccccagacctgctaaatcagagactcagagggtgggctccacccttgtgtgcccacagccctccaggggactccagggcttgctgcagccctagaagcactgctctaaagccatactaattagcattagatgtatagttcacaacagcttgttctgcttctaaccactggtcggaggggttggggcctgattatgtaacagcatatgatgactcattaatgatgagagat

SEQ ID NO: 90838 - DNA, 636 bp, Homo sapiens
acaccaagcagaactcaattccctttttcttagcagcacttcctctttgtgccacatcaagatccacttctgtggaaaaagcctgtgtgggcatgggggcttaggcctgccaaagtctaagaaaccacgtggaccacacctgggaattgttcccctggggagttggagacgtgggcattttgtcctctactcgtgtccctacccatgtccacctctagcccttcctgccytcttggccatttaccttccctgttaccctttgctcaccgtcttcctcaccagaatggagaactggcccctggcaagctcgccccatggctgcacctttaaagttgtcttctccaagcgtgtgctgggctgtcagcagcgtcacccaggagctggaagtgcaaatgctcaggtccttccccagacctgctaaatcagagactcagagggtgggctccacccttgtgtgcccacagccctccaggggactccagggcttgctgcagccctagaagcactgctctaaagccatactaattagcattagatgtatagttcacaacagcttgttctgcttctaaccactggtcggaggggttggggcctgattatgtaacagcatatgatgactcattaatgatgagagat

SEQ ID NO: 90839 - DNA, 659 bp, Homo sapiens
ttccttcctctttcttgtctctgtggttgctgggaatcgttggcaccccttggcccatagaggctccaccccagtcacagcctctgtccacacgtgatgctgtccttctgtgtctgcaygtgtccacattttcctttcttataaggacaccagacatggctcagggcccaccttaagccagcatgactccttcctaagttgattatatcttcaaggaccctgtttccaaataaagtcacattcacaggtaccaggaattaagagcatatcttttctttttgggaacacagttcagcctgtaacagtgtctataatttggagctcatttgttacagcagctggtgttacttgctctgactaatgtatgtctggcattggtcccaacttgggcataactttctccaggaagccctaccttcctgacttcaaacctagatggggtgctgcttcacagtgggttctccacattgccctaaactccctctatcacagcattcaccatgctgtgccatcatgtcctgctcacatggacaagtggactcttgtctcttctctgctacactgttcatgccaaaggcaagaatctgcctttcctgctccttgttgaatatcctggacctggcatgcagtacatttcttaatcaatagctctcacatga

SEQ ID NO: 90840 - DNA, 233 bp, Homo sapiens
ccaccatgcccagccgacaaaactttcaatgcctggatgagaaatctcagcaaaatcttttaggtgacaaggagttattgaagacatttgtggaagaaaatgttaatacaattcaattatgcagagtttcaaggaagattgttctggcatgtacatgggagggactagcaataagtgagactgaaaaatagcaggggattattaggagggataagaagataagactggcyggg

SEQ ID NO: 90841 - DNA, 1304 bp, Homo sapiens
gaaggcagaggtttcagtgagccgagattgcatcactgcactccagcctgggcaacagagcaagactctgtctcaaaaaaaaaaaaaaaaaaaaagcgtgaacttggctttgggaaagaatggattcaggagttcatatcagacaattataaatccatctctcttgttcttcttttgccactgttatcttctgcattgagttcattctcaggcagagaatgaagagcaggcgggttgcattgtttgtaaagaggactcccagggaaaaaaaagagagcctttcccctatgaatcccgtgcagcttctggagttcctcaccagccctgtttgggccacatacccatgctagggtccattcttgtagccatagtagtgaaaaactttggccaatctaaggagtatgttcacctggtggaggtaaggaaggattcccacaacaaagaagaatttgttagcagaaagatgaagaaggagaatatgtgcaggcagacaaaagcctttgctaccatgattctgtgccaaagaaatactgggcacccgggacaatcaatcatcagcgttggttctgaccaagcaccttgatttcacttgctcggtatttttagtaatgcatggaagctagtgagagaacactttaaccattgcttctttcatgtattgactcattctaacacagaatgtttgcaccaaggtctaagaatacaagaatgaacaggacacacaatagcccctgccctgatggaacttacattccattgtgtgtgaggtggggtgagggaggtagacaaaacccaaacaaagaaaccaatagatcattagaaattgtaataaatgytgtgagggaagccaacttgggggtaactatcatttctatcaagtctttgctcagtgtcctctttttaaggaagcttaccctatttttcctgtttcaaattacagctcactccattctgcctctcccatttccccttctcccttatgttcatagctcctttgaccttctaacgtacccatagtctatttataatttacacattaagtttgcatttttttgttttgttttgttttgagacaggctcttgctctgtcacccaggctggagtgccgtggtgctatcacagctcactgcaaccttaaactcctggggtcaagcgatcctcctgcctcagcatcctgaatagctgggactgcaggtatgcacaaccacgcctgctaattaattttttttttggtagagatggcggggggcgggtcttgctatgttgcccaggctggtcttgaactcctggactcaagcaatcct

SEQ ID NO: 90842 - DNA, 1304 bp, Homo sapiens
gaaggcagaggtttcagtgagccgagattgcatcactgcactccagcctgggcaacagagcaagactctgtctcaaaaaaaaaaaaaaaaaaaaagcgtgaacttggctttgggaaagaatggattcaggagttcatatcagacaattataaatccatctctcttgttcttcttttgccactgttatcttctgcattgagttcattctcaggcagagaatgaagagcaggcgggttgcattgtttgtaaagaggactcccagggaaaaaaaagagagcctttcccctatgaatcccgtgcagcttctggagttcctcaccagccctgtttgggccacatacccatgctagggtccattcttgtagccatagtagtgaaaaactttggccaatctaaggagtatgttcacctggtggaggtaaggaaggattcccacaacaaagaagaatttgttagcagaaagatgaagaaggagaatatgtgcaggcagacaaaagcctttgctaccatgattctgtgccaaagaaatactgggcacccgggacaatcaatcatcagcgttggttctgaccaagcaccttgatttcacttgctcggtatttttagtaatgcatggaagctagtgagagaacactttaaccattgcttctttcatgtattgactcattctaacacagaatgtttgcaccaaggtctaagaatacaagaatgaacaggacacacaatagcccctgccctgatggaacttacattccattgtgtgtgaggtggggtgagggaggtagacaaaacccaaacaaagaaaccaatagatcattagaaattgtaataaatgctgtgagggaagccaacttgggggtaactatcatttctatcaagtctttgctcagtgtcctctttttaaggaagcttaccctatttttcctgtttcaaattacagctcactccattctgcctctcccatttccccttctcccttatgttcatagctcctttgaccttctaacgtacccatagtctatttataatttacacattaagtttgcatttttttgttttgttttgttttgagacaggctcttgctctgtcacccaggctggagtgccgtggtgctatcacagctcactgcaaccttaaactcctggggtcaagcgatcctcctgcctcagcatcctgaatagctgggrctgcaggtatgcacaaccacgcctgctaattaattttttttttggtagagatggcggggggcgggtcttgctatgttgcccaggctggtcttgaactcctggactcaagcaatcct

SEQ ID NO: 90843 - DNA, 656 bp, Homo sapiens
tttatcctatttctatcttttttgttctcttcagtgcattggtgccttctcttacacacacacacacacacacacacacacacacacacacacacataaaaccttggcccagattcacgtgtctgggaggcctggccctgctggttgattctgaccctggcctgggactgccttgcggttttttttctagtaattgccactcactccacatattgcccctactcctggacacctatctcctacaacctgaacccacgtcatcttgacccctcttcccaagggagggagattaaacagttcctgagtggtagaaaacatcggacataattatagtgatcccataattgcaaaagattttcatagaaaatttctcagaaagtttatcttgatgaattgctttgacctatgacccactgtagctatttttggcttatgtgttcatgagtgcaytgcagagatggacagggcatccacaccaaacaggaaaataaacattaaaattggggctttgtgttgtctgacccgcagctgcaaaaatgccaggattttaagcaacaggacaggtagagcctagccctaccggatggggtaggtgcatggggtagggaccaaatgcaaatttggtccctggtctcaattccccaaaactgctatgg

SEQ ID NO: 90844 - DNA, 661 bp, Homo sapiens
ctttaaaaacaataataataaaataactatatttctttatctgaattcctcaagaaaataacctgatagaccccttggccactgtgattgttttaccgaagcctatcaaagccaaaacagacctttagttttcatactaagccttatttttaataattttatttcaaattaattttacttcagtggtctccattgtctctcattcctagtttctcatattaataataataatagctatcatcaagtgaaacttaaaataatccaggcatccttccaaatgttttgcagggattttaaactctacctatgaagtagctactattatcataaawatatgcagttatatctataaactgaggcacagaagggtcaaacaacctgacagagctagtaagaggcagaccatcatcttctgtattaatacttgggattccaccatcatacttctcactaactctattttctaaagcagagatagtaggactcaccaaatgttccatatgctcctctgtacttctcaggtgccttgcagtaggcagggccatgtgactggttctgatcaataacatatgagtgaaagtgatatgtgaaaataagcactgttatgccaaagcatccctgtgttgagagggtgacatcatatgctggagggagcctggat

SEQ ID NO: 90845 - DNA, 772 bp, Homo sapiens
agtagccactatttttctgtatccctgaagtcatgccatcattccagtatgctcgcttgagtggctgcatcaccactatcctagctgcttggagcctattgctgtgtggaatggctaagattttggtgttcaaacacatagagcaccccacccacaagggaataggtggacttgcacaatatggaagatgacacacagctggacagtctgatatacctacacacttggcctgccagccagcccagcaacccctacccccaccccacctcgcccagcaaaaccatatcactgccatcacaaaccaacagcctaggccactgaaacaattgcagacactataaatgaggattgcagctgaataaaatgcagagaccatgctactgagtccatctaaaaccaaagccaacacaccacacttaaacaacatcctatgactcatgtgcaggaaacagtctctccctctgaaaactactccaccaaatttgaaaagatgactgttccactggtatgcacagatatcaacaaaggaacacacacacacacacacacmcacacacacacacacacacacacacacacacagaaaaagtaaggaaacacgacacgtctaaaggagcaaaataattctccagtaacagaatccaaagaaaagaacaaaattccagaaagggaatttaaaataatgaccttaagaaactcagtgagatacaagagaatacagccaatattcaatacaattcaatgaaattaggaaaacaacagagattgatat

SEQ ID NO: 90846 - DNA, 1280 bp, Homo sapiens
  misc_feature (1)...(1280): n = A,T,C or G
taaatctgaggaggtcaggagttcacaatacacatacatgctccacacactgatcctcagtgtctgcaaagtaggactataattggtcatttttaactaattagaatccttctagaatagtttttttttaaaaaaaaaatttgggggggttttttttttttttttaaaacccccccaaaccccctttaaaaaaaattttaaatttaaaaaaaaaatgttgggggggtttttttttncctttctctcctcctaccagagtcatggctcaatatgacccgtgagagttgagtaaacaaaaccaacacataccgcagaagtttggcaccctggaaacttaacataagaaatgatygactagagtactgagaggcatgtttagaatgcaagtgtaatgaacaaagcttcaatctactttagcccattgcctgagaattgactgcattaacaaaaaagggttagccaacagcagatgcagggaacggtcagaaaacaaaaggtgacaaggatctcttgcactgtctagaggaaaaggtaccctgacctatgaacacaaataatccaatctcttgaacacaaatatccctacactgtggagacacaaagcctcatgattgtgtcattaatttttaatctatccttgtttgttctgatccaagtttaacaagcaacatcctgtgataatatggcttctcatatagttttgtctatgggaaaaagatatgtttggcactattacttttcatcgtaagtgagtaaatcagcattctagattacgcagcagttgctatgagtgaatttatttaacatgaatttctaaaagacttgtcaactctgggtgcccaggagtcaggtttagcacctccaaaaagacagagtagaggatgagaccctgaaatgaaaggactacaggtactactacctcatgggagtgaggcagtcccagaccatcttttataatagcaatatggaatcctcattcccaataggcttgtaactttgcttttttctggtagagagtgatccctactacattgttatccctaggaaaagtaggctaagacgtatttttgcctttgacaaccagttctggtttggaatgtgtggtacatcaatgacttaaactatgttaattaactactacttatgtactgtattggttccttcagttcaataattaacctgagtaatgagcaaaacattttgttggaagatgtatggctataaagatggattatagcaatgtggaagtaacctaactgtccatcgtcagatgaatggat

SEQ ID NO: 90847 - DNA, 428 bp, Homo sapiens
ccccactccctttctacccccagttcccagggatgccaagcatggatgtgaaggctggcacagctcaagggcagccgtgcaaggagcttactctcagcccatcaagctgactgcctgaacgtgccgtgcctcctcagagaggccagcagtggccctgacatcctttccctccagatctgactctggattttaaggggagatggaggtgaggagggcggtgtgacagggtggctagccyagcttccttcccctccagcactcactcttgccactgggtttttgaagactagattcgggaccgtggcttcttcctaactctccaggccattttctgctgccatgagccaaggagggtatcttccctctctcctgcctgccttcccattgcatggatgaccaaactaaggtccagggagcagatgcccagt

SEQ ID NO: 90848 - DNA, 428 bp, Homo sapiens
ccccactccctttctacccccagttcccagggatgccaagcatggatgtgaaggctggcacagctcaagggcagccgtgcaaggagcttactctcagcccatcaagctgactgcctgaacgtgccgtgcctcctcagagaggccagcagtggccctgacatcctttccctccagatctgactctggattttaaggggagatggaggtgaggagggcggtgtgacagggtggctagcccagcttccttcccctccagcactcactcttgccactgggtttttgaagactagattcgggaccgtggcttcttcctaactctccaggccattttctgctgccatgagccaaggagggtatcttccctctctcctgcctgccttcccattgyatggatgaccaaactaaggtccagggagcagatgcccagt

SEQ ID NO: 90849 - DNA, 428 bp, Homo sapiens
ccccactccctttctacccccagttcccagggatgccaagcatggatgtgaaggctggcacagctcaagggcagccgtgcaaggagcttactctcagcccatcaagctgactgcctgaacgtgccgtgcctcctcagagaggccagcagtggccctgacatcctttccctccagatctgactctggattttaaggggagatggaggtgaggagggcggtgtgacagggtggctagcccagcttccttcccctccagcactcactcttgccactgggtttttgaagactagattcgggaccgtggcttcttcctaactctccaggccattttctgctgccatgagccaaggagggtatcttccctctctcctgcctgccttcccattgcatggatgascaaactaaggtccagggagcagatgcccagt

SEQ ID NO: 90850 - DNA, 615 bp, Homo sapiens
tttttttgagacagggtctcactgtgtaacccagactggagtgcaatggcacgatcttggctcactgcaacctctgcctcccaggcccaagcgattctcctgactcagcctcccaagtagctgggattcaggcgcacaccactactgcccagctaatttttgtatttttggtagagacagggtttcaccatgttggccaggctggtcttgaactcctgacctcaaatgatccacccacctcagcctcccaaagtgctaggattacaggcgtgagctacagcgcctgaccaacacaattttttttaaaaaaaagcacractatgactcgaaaattcagagaagaactaaaggggatcagtaaacgtgaaaatatgttcaatcttcacacttatcaaagaagtgcaaatgagttctttttaactatatgacagaaacaattgaaaatgtttataacagctagtgtagcaagcagatgaacaggtcctcatctccatgttaaaggaaactaaacctcactgtggtcatctaagacttcaggacttccctcttcactggctcttcacatctttaaaaaagtgaaaagcaaaaaccacatttccagtctggcaataacca

SEQ ID NO: 90851 - DNA, 1378 bp, Homo sapiens
gcgccaccacacctggctaatttttgcattttttgcagaggtgaggtttctccatgttgtccaggctggttgagaactcctgggtccaagcaatccacctgccttggcctcccaaagtgctgggattgcaggtatgaaccttcatgaccggctcagttgttgctttttaacagtgatattaagaatcagaatcagatggcagtatgaggtaagtagtttatttaacatttggagtcagatatacctgggtctgaatcttagtgtacttaacaataagattgagttaataatagtgtttacctcagaaagatctgtggtaaggaccaagtaagataatgtacataaagctcttagcacaaaacataacacatcacactcaatagattttccctgtaaaaatattcaacagttaattaaagactagaaccatttcacaactataaggatcaaagaaatgagggactggaaacaagaaagataagcagggagtcagaatatttcatttgttaaattctgtttcttggtggtttcattttgaagatggatagctcattatcttttggtctaaaagacagttcttttatctcagcaactgaattctaagggaggtagcagtgaacaagcttattaaaatctccataataagggagcttacattctagtggggtatggctgtgtgttccctcatttctgcagaaaccctctttgtctgcatcagaggagctctctgcaaagattagttcagctggagcaggaaggctgtggtggatttctacaagggtaggagagagaaacatcattctttgcaatacctcttgggttctttatcagaattttcttccttctcataaacagtgtagtggttaaaaatgtaagccctgcccagatttgcatttgctttcatccaccaaaatgcttttgtatgtcctgggtaaattactgtactaggcttcatctgtttctccaaatctattctccagtcttctccaccctgctctgcagcctggaggctggcctctagggactgcattgccaagttctctttacctstggtttacagttgggttcaactaatgggagatgattcagaagatccaagagaggaaaaagagcgggaggggagggtagttattctcccagatgcctgccttccaggccacagtttgtcaatcactgtgcacttgtctcaaaggcttcagctgctgttgactggtcttgcaatgttccagattgggacaataaggactttctaatggtgctatcccttcaccattgcttgctggtttcccttaaccattcccacaattttgtaaatagcccttcatttaattatctttgtttacctcttttgaagtttccttctgttccctgctgggat

SEQ ID NO: 90852 - DNA, 661 bp, Homo sapiens
ttaagtctacatattttcctctaaacacaaaactatatcgtataacttttgatatgccatattttcattactatttagttcaaaatattttctaacttccattgtggtcgtttttgacccatggattacctagaagtttattattatattaccaatatttgggactttcycattatctttttgttatttgtttctagtttagtcttatcaccatcagaaaatataatcctgtatgaagtcaatattttgacatttgttgagccttgctttttggcctagcatatggtctgttttggtaaatgttctgcaggcacttgaaaataatgagtaacttgaagttccttggagcactgttctacatatgtcacttcaattaattgtgttattcaagctttctccttgttttatcatttactgagagaggtgtatggaaacctcccacttagataagccatggacatagaagttaagatcccaagagcctaatgagtaagcaggaggctaaaacaaaaagacagttaatctgattggcattagaaattagtagaaatttgggggagatatgaacaactagagaagaaaataggatattgccaaactacatgatgtggagaaaagatttgcaaagcaagggaatatctaattacctcatttgaatatg

SEQ ID NO: 90853 - DNA, 662 bp, Homo sapiens
ccctgaggctcacgggttcctcctggcccttgcaccaacccacagggacatagaaccaagccccaagccggcccagctacaggaccgcctctgggtgccacacttccggaggaaaatggcggagtgggccgggcggcgcatccgcagagagaaaagctggttcccaaggtccttgatggtaacgtcattggaaggtgacactacaattcccatgaggctttgcggtcctcctttaggaacccacaccrgacattctgttttgcccagcagttgagtccagttacccagagacccggacttaatgtatcaggactggtccctacccagttgacacagatgtggcattctggttctttattaaatactggtttcacagcctgggacattgtgaaaataatgaagaaatttcaatagaggccaattggtctatgctattaatcagtaactttttttttttttttgagacagagtctcactctgtcgcccaggctggaatgcaatggtgcgatcttggctcactgcaacctccgcttcccgggttcaagtgattctcctgcctcagcctcctaagtacctgggattacaggcgcgcgccaccacactcacctaatttttgtatttttagtagagacgggttttcaccatgttggtcaggctggtct

SEQ ID NO: 90854 - DNA, 424 bp, Homo sapiens
ttatcttaaatgcaagtttatagaagaaaaatctttgctcctacatgaatagattatttccttgacatgctttgcttttaacygactaataacccctcctgctttaagccacttttgatacctgttggatttggctggcagagagacacagatgttgggcatgatggacaatcagatgatacttcacttatgtaagagtctgaattactgttcagcaaatattcattctcctcctctcctgctgtgggagaaatgatcttccctgtctcactgatgtttgctttggccaaagggatgttagagggcataatgcaagcaaaggtttgaaatgggcttaagaggtgaggcttgcactctgctacagcatgagaaggacaagccccagtcagcctgcaagtggatgagagtcctggggagcagatct

SEQ ID NO: 90855 - DNA, 1331 bp, Homo sapiens
caatgataacaaaagagcgaattcctgagttccactgtcagcagtaagaatttgccttcatgcatgatggcctgatagaatcaaagccactggcaactacaccaggtaaatggaaatgggctggaaatctaacctatccggattrggcaggaatctgggcttggtatcatcagatgatgtcttgtttaaaccaacaaatgcttattgctctctttgaagataagaaggtccagaattttctccatgcttcaaattaggcgaacgtgattccagattcagataagatgcacattcattcaatcaccaggaaagtcctttttgaaatgaactatgccccaatgcaaaaacaggaggatatgaaagaatcatcaaactgggttttctaaggtcagagaaaaactaaggtgcaaaggggctgtgggagctttttagatcggcccagttcaccctccaggtagagccctaataccacgacacagaaacctgcccttcccactaaattctagaatagttaacagctggttaggatgcctaccatttactttcacatacttgatcggggcaatttaatacagctgtgtgcttctggaattagtttaaattacattccagggtctgacaaccatcctaaatgggaatataaactcaagggatggtcatctaggatccaatgagagatcccacgccccacaggtggcttcctccagtacttagctccctttaactcccaagaacccctgaagctttgctaattggcataattaaggtgagaaataggttttcattagtgaaattagtggcctgtcaattagcataatgaatgttagaaatccgtgaaattggtggtgttcaaatttgtggattagagatcttcctcaccctttcataaaggggatatgccaatagagcgaaccctttggtttatacacccttagggatggtgtttgaggtttgaaaactaaacgatcttgtttctagcctttggctcaggggacttcggttgcttaccacccactaaaatggtaacagaatcctgtcttcataaagttgccacatctgtcttcaggcaaggtggggttggagcatctagaaatttagggagctgagatttcctcatagcattttttataaatgtttattcaactcaagtctgtatgagtgccagaatttggtcccagagacctgtgtttaacataacctggtagccaggctgcaactaaagtcgcctttatttaccaaaaagtgtttaatagttttgcaaagcaaattagcgtggcttaatttacaacacaggtgcctatgtctccacctaaagaatgcaggaaatgtgg

SEQ ID NO: 90856 - DNA, 1331 bp, Homo sapiens
caatgataacaaaagagcgaattcctgagttccactgtcagcagtaagaatttgccttcatgcatgatggcctgatagaatcaaagccactggcaactacaccaggtaaatggaaatgggctggaaatctaacctatccggattaggcaggaatctgggcttggtatcatcagatgatgtcttgtttaaaccaacaaatgcttattgctctctttgaagataagaaggtccagaattttctccatgcttcaaattaggcgaacgtgattccagattcagataagatgcacattcattcaatcaccaggaaagtcctttttgaaatgaactatgccccaatgcaaaaacaggaggatatgaaagaatcatcaaactgggttttctaaggtcagagaaaaactaaggtgcaaaggggctgtgggagctttttagatcggcccagttcaccctccaggtagagccctaataccacgacacagaaacctgcccttcccactaaattctagaatagttaacagctggttaggatgcctaccatttactttcacatacttgatcggggcaatttaatacagctgtgtgcttctggaattagtttaaattacattccagggtctgacaaccatcctaaatgggaatataaactcaagggatggtcatctaggatccaatgagagatcccacgccccacaggtggcttcctccagtacttagctccctttaactcccaagaacccctgaagctttgctaattggcataattaaggtgagaaataggttttcattagtgaaattagtggcctgtcaattagcataatgaatgttagaaatccgtgaaattggtggtgttcaaatttgtggattagagatcttcctcaccctttcataaaggggatatgccaatagagcgaaccctttggtttatacacccttagggatggtgtttgaggtttgaaaactaaacgatcttgtttctagcctttggctcaggggacttcggttgcttaccacccactaaaatggtaacagaatcctgtcttcataaagttgccacatctgtcttcaggcaaggtggggttggagcatctagaaatttagggagctgagatttcctcatagcattttttataaatgtttattcaacwcaagtctgtatgagtgccagaatttggtcccagagacctgtgtttaacataacctggtagccaggctgcaactaaagtcgcctttatttaccaaaaagtgtttaatagttttgcaaagcaaattagcgtggcttaatttacaacacaggtgcctatgtctccacctaaagaatgcaggaaatgtgg

SEQ ID NO: 90857 - DNA, 584 bp, Homo sapiens
ataacccagattacttcctactaaagccatgacatttaaattagaaatgcttttctccagataataggtgacccgatcctttaatccagttatttataagttccaccaaaaatataaactcactcttggcctaggaacagaggcatggctataaaacaaaacttcctcatagctgtgaaatcagagagtatctccgttttcccttctcatcctgcctctcttttgtaagtcacgttttcagtgcgcaggacgcaatgacaatcatgatgaagaactggttccacgagctatgtgtggctatctttagagaggttcttcctaaatttttaactttctggctaagtcaggatgtctccagcatgaaggcaaatgcagaaggggtgagggtgggatggaaggaagtgcacctggctggtggatgatgcccagaaacctaaaagatgcccacatcagctgaacctcatcagctttggacaaaccaggcaaagctgcagtcaggaggtctgggggaggctaactccccaaaccgagggaacccgaagcataaggaagggaacagaagttgaasaggtcaacactacctt

SEQ ID NO: 90858 - DNA, 1069 bp, Homo sapiens
cagatgattctgtgcctatgaacaaagctggcgagggtctccttccatacccatgggacctccaagagacaagcaccacacattccccccaaaaccatattcccccaggccaccctgtgaatgtggtgagttccacagcatggaaacagaaggctagctgtagaccacaagactgagtctcttgaacaaatgctagatggctaagaaacgaggcgmcagaatcaccgagtcacttggttttgttctggaaaagggcacacagattctcacagacacacttgcaccatcttcaaagcgtgatctgccacagacgactcatatagctttgcactatatgtgcaggactgagcgtcctctttgcctcttagcacaaaagctgagagttttacaagatttgcaaaaaaaaaaaaaagagagagagaagcaagacaccagtctgagctcggctgcctactctccagcaagaaaggactccacagcacatgacacactcagaaaacctcctccataaagacactggcctcaaaaaaagacccctgtcctttcaaattagaaagaaaaggacacgaagataagtcagcagacttggcttaccctgcccagagcgcgcgcctcaaacctcctcagtgagaactgcctttttccagacagattcctgcgtgcaccctggctcaagctggacaaattcctcctgagcctcctgacggaagactgtgatgtcaccgtgggccctccctctgctccctaaaaggccattcacacaaagaaggactttaacctccttcggagaggcctggcccctccctggctggccggagctggagggcagcggcattcccagccagagcaggcccggcctgctcctgtcacgctcaaggctgagcagggaggcaggagctggcggcgttgaggtgaatcagttagcattgatgtgaatcagctaccactgtcttctcggcaattcagaggtgggccctgggacaagcagggaattgatatcccaggggtattgaggcagcaaaaaatctgaaagaccctggagaaatctccagttagacagacttttcag

SEQ ID NO: 90859 - DNA, 1523 bp, Homo sapiens
cgtcaggcagtcactcacttaacccctaccggttcttttcacacctgtctcatacctgattcattctccagaagggtgtaccttttttttttttttttgagatggagtttcactcttgttgcccaggctggagtacaatagcatgatctcggctcactgcaacctccacctcccgggttcaggctattctcctgtctcagcctcctgagtagctgggattacaggtgtgggccaccatgccccgctaatttttgcatttttagtagagatggggtttctccatgttggtcaggctggtctcgaactcctgacctcaggtgatccatccaccccaatctcccaaagtgctgggattataggtgtgagccaccacgccaagctgagtgtatcctttttcttaatctttgcagttcattttccctctctcttctgcagagctgaggccaacagactacttgggattttgagctacagagacctagcatcccattttaggatttgaccagaagaccaagaatacacccaggaccaagtccctggaggtggaagacaagccatggtgggcatcttcatcaactctaatcctgcaccctttattttaagtaactttaaatcactccaaaacaatccactcactctatttctcttctttcctcctgtggctcaccctgaatagtgaatgtgctgctgtgattcctgaagacagagggaagatcaagcatgaaatgcatgatgagtgaagtcaggtgacctttgtatacagcaagaacaacttcctgacctccagccaggcctgagccaacaggcctgactctagcaacgaatgccagagaaaggttaagaaacaggactaactggttctacccctcctcgcccattcctaccctctggactcccctgggccctgcaccccacccagccaccaacaccctcctgccatatcaattacgcgaaacacactttccttacactcaggtcatctgacttcagytcaactgacttcagctctcctccccaaaacatctttgatgccaattaatgtcattcagcccatgttgccagtgacagactgaatatacaaatggacaatggccagatcatatatatatatatatatagagagagagagagagagagagagagccttgctctgtcacctaggctggagtgcagtggcatgatctcggctcactgcaacctctgcctcccaggttcaagcggctctcctgcctcagcctctggagtagctaggattacaagcgcccaccaccaggcccggccaattttttttgtatttttagtagagatggggtttcaccatgttggccaagctggtctcgaactcctgaccccaagtgatccacccacctcggcttcccaaaatgttgggattataggcgtgagccaccgcacccagcccatatattaaaatagaagtctaacccacaatctgcagcaatcattccaggaactctgtagcaatcagccccaaatggtcaggctttaatcagtaacggccagct

SEQ ID NO: 90860 - DNA, 657 bp, Homo sapiens
gtctttccatctcccttctctgccaccctcaaggtttaagacrgctgttgcagttccagacattatatcaagatgcagtattcacagaaagaggactgttcatttctttaccagaagattctcccatatatcatgtgtctacatctaaaccaatcactactaaggggaaattgacctacaacatttggattagactaatcaaatttaccttctgagttaggcatagagtcaacttctatgagcatatggctgagccaaggataagcattctgccagcaagagaggacataatatgggtgtgggattggagatgggagaggaatattcaggcagtaaccaataatgtctatgatctttttagtctattttttatacttatacacatacctagaaaaagtttaaatataaaaccatgtatatactgatgatgttttttcaagtagcaatacacatggcaaatatttctccatttcaagaaatatttttctataacttttttttttttttctagacagggtctcactctgttatctaggctggagtgcagtggtgtaatctcagctcactgcacgctcgacctcccaggctcaagcaatcctcctacctcagcctcccaagtagctgggactacaggtgcgtgccaccatgcctgactaa

SEQ ID NO: 90861 - DNA, 657 bp, Homo sapiens
gtctttccatctcccttctctgccaccctcaaggtttaagacagctgttgcagttccagacattatatcaagatgcagtattcacagaaagaggactgttcatttctttaccagaagattctcccatatatcatgtgtctacatctaaaccaatcactactaaggggaaattgacctacaacatttggattagactaatcaaatttaccttctgagttaggcatagagtcaacttctatgagcatatggctgagccaaggataagcattctgccagcaagagaggacataatatgggtgtgggattggagatgggagaggaatattcaggcagtaaccaataatgtctatgatctttttagtctatttttkatacttatacacatacctagaaaaagtttaaatataaaaccatgtatatactgatgatgttttttcaagtagcaatacacatggcaaatatttctccatttcaagaaatatttttctataacttttttttttttttctagacagggtctcactctgttatctaggctggagtgcagtggtgtaatctcagctcactgcacgctcgacctcccaggctcaagcaatcctcctacctcagcctcccaagtagctgggactacaggtgcgtgccaccatgcctgactaa

SEQ ID NO: 90862 - DNA, 519 bp, Homo sapiens
tctactttaagaagacattaatttaatactatggagttgtaatttattacattggatacctaaaaggggtagaatcaggttgaacaaagaattttcttggcataattagtacaaatgttttgtttatgaagtgcagcaatatctcctttagacccaggcaagagggaccctgctgtgaaccctggcaccccaacacattttatgcaccccaatacctatgttgctttgttacaggcaaayggtgctttcgtctctcaggaccccatgccctgtgctggcacagcatgacctaaagccctaaacaccaacgcttatgtgcaacactgctcaccaagggatatctcttgacctatgctcccaacacacaaggcacctgcatacaaaggtcatgagagtttgtgggttgtatgccactgatgtcaaagcagatactgttccaattagaggaaggattccagaggaggaagcacttaagaaagaaaaaaacataattgcctgccaaatccttacacgtggtta

SEQ ID NO: 90863 - DNA, 830 bp, Homo sapiens
taaagaaccagggagattagagacatccttggatagatattgatagaaacagaaagttctagagatgaagttggctaattagccaatgaaaacccaaaacataccagccccaaaataaagaaaatctctgatctactaattatctgagaaaattttaagaaaaatattaatctgggggaaataacaagatagaaggtagatttttgcctcagtttccttggagttggaaggcctggagttggaatattctgacaaggaattaaaatgagaaagttcccaatagaaagcgatctctgcaggctttgtcctcagaatctgccacctcagatttgaaccatgacctttgctgctccctgtcactcagccatgacttgggaagggagatcaaggtcttgctgagccttcacagtgtgagctcagcctgcaaatgcccagctccttaggaatggaagacagtcgtcagctcagctcagctgactgattagctgggaatcctctagggagcacactttggctagaatcctgtaattcagccatccagttaaccttttaagtgaataaaagtcaaatacagcaccagggccaaagctatgagttggtgtgatgacaagcaatcctttaggaagacacaggattcttgagaggtaaaaatacagagcctgtctacattctgctctccctcttggagagcaagctctaaagtatttagtggtgtgtgtggtggtatgtgccatagtaaaactccgctagggaagggacgtaacctgtttkgcttactgctctatccctagtggttagaataatgccaggaacacagtaagtgctcagta

SEQ ID NO: 90864 - DNA, 734 bp, Homo sapiens
gatccaggaactaatcaatgagaaaagatgactcttatcctaatttctgccaaaagaagagcaagtccatctttgacaatgatctctacactcacatgctcctttcttctgtagggatactccccaaactttacatttagaacatggtaaaaagcctctgaaacagcatgagtgagaatggtaatcccagggactaataacaacaattgccatttattgaatattgttcattcagaaaggcacggtgtgaaatactttttgtttttcrcctaacgttatttatagtctaatggaagaaatagaaaagcacataagcagttactatccaggagtactatgaaaatgagcatccaggaggaacatgtaaaccaatctcagagttgtgaaacaattccccaaaaagaagacattagagtaagtcctgaaaattgggtaaaataaaatataaaataacatcataaccttcccaattaccaggaggcatttgtttattcgttatttgattattatttattcaggacatttagtgtgagaaagggaaaggcaaaagcatgaagaagttaagtcagtagctaaagacacaaactcagagtgaacactgaaatgcttttcagcatgtattatctcattgaatcctaataagaagcttatgaggtaggcactacagtattactcatattttataggtgaggaggttctagaactggtctaacattaaactgatagtatcaaag

SEQ ID NO: 90865 - DNA, 599 bp, Homo sapiens
ggcttaaagagcaggagttacccagctgaaattcattctttttttttttttccttaaactgccaactttttattctttcttcctgataaacaagcaaaaccagctttgccccgaaggcagaaccgggctgctttccagccttttgccaagggggcagggggcctgttcacaattcctgccctgggccctgacagtcactggctctttcatgaggagcctggagagggcagagtgagtcaggctgggctcagggaggcctcaggagaggaggaagatgctgagggaagagcctgtctcagccaaaagtttaaatggtagaggaggggcataracctcctcagaatcttttttttctttttcttttgagtcaaggtcttgctctgtcacgcaggctggagtgcagtggtgcgatcatggctcactgcagcctcgatctcctgggctcaagcgatcctcccatctcagtctcccgagtagctgggaccacaggcgtgggtcaccacgcatggctaattttttttttttttgtcctcctcagaatctctacagagcctccagcggtagaggcctggcctccagaaggaacttcgagaacccag

SEQ ID NO: 90866 - DNA, 1166 bp, Homo sapiens
gatgcccttcctgtctccgactttcctctttcaaacttctcatctttctgccttatctctcgggtccccttaacatctagctactgcagaagtcacccagagagaatcatacttgcttgaaatgagcaccccgttttcttttttcttttctttttttcagactgagtctcgctctgttgcccaggctggagtgcagtggcgcaatctcagctcactgcaacctctgcctcccgggttctagtgattctcctgcctcagactcccgagttgctgggattacaggcacacaccaccacacccagttaattttcgcatttttagtagagatggggtttcaccatgttgggcaggctggtctcaaactcctgacctcaagtgatctgyccgcctcagcctcccaatgtgctggaattacagatgttgagtcacggtgtccggcccccattttcttttctaaaaatattcactctttacccatagacagataacaaggatgaattactttatacatctaaatgggacctattcctttgaactctaaagtttagagtcaaacatggatggagagggggagtagtcagcaatataaaaatctccaggggagggtgtagacccttggaagaagtcccccaaagtgactctcaaatggatcccacctccaaccagtgaagaatcactggaataaactgtaaaaaccatctcttctgtcctagagccctggtgacaatggctagtgtgccactagcgttatgctctcaagagtcagccctgtgctgcaaggttcccacaaggcaagtgacctgcttcctaagcagctctacattctcagtgagcagtggggaagttccttctctctggaacttaagaggttcatctgtgagaccagcttacccagcattctacagttccaagtacagaaaggtaccaaggcccaaattcaatgcctggagggactaaacttttaagactgagctcctaaaaacaggtgtcatggccaggcgcggtggctcacgcctgtaatcccagcactttgggaggccaaggaaggcagatcacgaggtcaggagatcgagaccatcctggctaacacagtgaaaccttgtttctactaaaaacagaaaaaaattagctgggcatggtggcgggcacctgtagtcccagctact

SEQ ID NO: 90867 - DNA, 826 bp, Homo sapiens
tcatgctttcaaggacctcatgtaagtaattcggaattcaatagagctttattattgaaattgcaatcagaaaaaaaggggggaaaaaggaaaattacaaagaggaagaggaaagctttggttttaaatctatcaaatccatcatttttaaagacttttttactgctaactcagtttagtcattctgtggctgctacttgcttctcagttactgtgccaaaattcagggtctttctgcatctccaaactgaaagttgaaattgaactcttttctccagattcctggcactttcatcagataaagtggggttccttttactttttgagatctctgtttcataaatacagtttatttccaaaacatgcaawgtttaactattttgtttccttcccttttgaaacatggcatgtagagctgcctgatttgtacttcttttccctcagttatttaactattgactgatcacatgattggggtgggtgcatttactccaagttaattagtatctaagtcaaataaaaaggaaattatcatgtttatcaatatataaatgcgacatatagtgtgctatactatagtgtagtttattaaacctaatttttcattgaggcatatggaaatccaaatgttttaggaaatcatcatcacagttcaattaggtgattaaaatatatattcaatttaaagatcatctatagttaaggaatggcttatacaaacgtgtgtgtgtgtgtgtgtttaaagacaggatcttgctctgtcacccaggctggattgtagtggcataatcatagctcactgcagctttcaactcctgggctcaag

SEQ ID NO: 90868 - DNA, 826 bp, Homo sapiens
tcatgctttcaaggacctcatgtaagtaattcggaattcaatagagctttattattgaaattgcaatcagaaaaaaaggggggaaaaaggaaaattacaaagaggaagaggaaagctttggttttaaatctatcaaatccatcatttttaaagacttttttactgctaactcagtttagtcattctgtggctgctacttgcttctcagttactgtgccaaaattcagggtctttctgcatctccaaactgaaagttgaaattgaactcttttctccagattcctggcactttcatcagataaagtggggttccttttactttttgagatctctgtttcataaatacagtttatttccaaaacatgcaaagtttaactattttgtttccttcccttttgaaacatggcatgtagagctgcctgatttgtacttcttttccctcagttatttaactattgactgatcacatgattggggtgggtgcatttactccaagttaattagtatctaagtcaaataaaaaggaaattatcatgtttatcaatatataaatgcgacatatagtgtgctatactatagtgtagtttattaaacctaatttttcattgaggcatatggaaatccaaatgttttaggaaatcatcatcacagttcaattaggtgattaaaatatatattcaatttaaagatcatctatagttaaggaatggcttatacaaacgtgtgtgygtgtgtgtgtttaaagacaggatcttgctctgtcacccaggctggattgtagtggcataatcatagctcactgcagctttcaactcctgggctcaag

SEQ ID NO: 90869 - DNA, 2265 bp, Homo sapiens
aagaaatggagatagctatttgagagggagatggctagggacacagtgtaaagggaagaataaagagaaagaaagagaaaataaaatgcttaagtaaaaggaagacttaaaagaggagtaaagtaaccagaatacaatgagattgaaatgcatgttaaaaaagagtaaatgtgtgtgtgtgtgtgagagagagagagacagagagacagagagaacaagaattatagagggagatacaaaggctgaaagggtagaatggctatataataacttatcatccaaacctcagtagtaaaaaagaaggaaattaataatggcatgaagccaacagaggaaaacaagattttcctgagcaaattgggatatgtggtcagtaaccaaaatgcctctttaaattctatttaacttaattcctacttcccatatatcacttgttaattgaggctcttgatggatctgtttcaagacagagggactgtagggtagggtacagtgtatagtgtaggggatatgttggaggaaaggaaaaaggtgagcttggggcttagaattgttttccaggaaataaagcccataagtctagtgaagttgtttgatagaaaaccattttgtggtatctacaataaccagttattcccacacactctttcattatgttttagaacaacattgtgagttaagcattataatcagaatttcacccctgatgaggaaaaaaatatatacgaatgcctggaaaggcactctgaggataagttaaggtaggctcaattctgcaatgaagctttattctgccaccaaaatcagtctctaatctgtacacatctttatcataccattctcatcattccttctgctccacattatttctgctctcccggtcccattctccatttccttctgtgttgctctatacttcccagaggaagagcaactgcaacctcaccctgcttctcctccctttaaagccctccagagcccactaaagaagcccactcataacttaaagtccaccttgtccagctctttgctatttgtcctctacctgagtcattgtttattagtcatctcctattgcctatctatactaaactttagtgcatttggtaaattaagcaaatatctataattacttgcttcctgtttggcttgccttctattcttgagggtaggatctatctcagacttttctttttaccattttattacaccagagcccagccctattatagacataatgatagggttttaattatttttttgaatgcatgaagaaatgaactcaggtggccatagtaaaaagatctgaattagttataggaaaatagaggcaaatactattagccagtaccaaagtgactatagttatacgcagcagagacaagttcatctcgaaaacatgtctttttaaaaaataattacttgtcatcacttccatgtgagagatgaaaagtgctaagaaggagctgcaaggtgtagttcacaaagcctttcctgacaggctgagaggagggacaagacatccacctctttatctgcagaaccctgcatagtgcccggcacagcacaacactcataagtagtattatttagcagagaaagactagatgtactaatacattcaaccttttgctattatatttcagcccatgtacaagttccaggtcaaatgacatagccatataatcttggcttaaaattagttccttaatattatttttagcctgaacatccttgctttaaatgaaattgtactcaggaagcttactatataaaacaaaggaaagaagtactactttgtttgagataagggattagggcaggtgtctgaccaccaagcaccctcttaatttcctgaagttcttgaggtaattccttgagaaaagtttgaaaacacttgttaagagracagagtacagaagagtttcaatctgcagacagagctgattagttggggcctggaagtcatcagtcctgatgccaaaattggaatataatcaaaatctatgggcaagccttctatccattcatctatttattcatctatctatccatccatccattattctatttcatcatctgtaaagtaagtttaataatcttttctaccttgatcaaatagaacctttaaactactaaaagttgtctaaaataatgaataagtgaaggtgttctagattaactcctgcttctgtatttataagagaaattcttgattctatctgtatgttctatctgtatcaagctttaaagttgtgaatatat

SEQ ID NO: 90870 - DNA, 682 bp, Homo sapiens
gatcctttgagtaacaggcatttctttccatccttcattcagttgttcattaattgaacaaaagtatttragtacctgctctgggtccttttcatgccttttccagatctaatatttcataatcatatttttatttacattaaaatgacataagagtaggttattaatatattaagacaaaaagggtaatatgtttggaagagtttatggtgtttaaaagaaaatagaacatatttaatttaatatttatggaaatatgttatgtaaaagatctaaataaaagttggaaaaactaatactctcctttctgtagttttggttttgtttatacttttaatgtctaatcttccaaatataattttctggtggaatttattactttttcatccccagaacccagcaactttcttggcatagagtaaatactccacataaactagttaaattaattgccttattaaaaataagtaagataaatgtaaaacattttcaaaagcataatatgttacatacgaggctccactttctggtgaaaagacctctgagcttggagtcagctttttggattaaaaaccatcctctgccttttattagttgcttaaccctctgaaagtcactcagtgtctctgtacatggatgtcctttgcagtaatcagtgggtctacatattttttcgaaatag

SEQ ID NO: 90871 - DNA, 682 bp, Homo sapiens
gatcctttgagtaacaggcatttctttccatccttcattcagttgttcattaattgaacaaaagtatttgagtacctgctctgggtccttttcatgccttttccagatctaatatttcataatcatatttttatttacattaaaatgacataagagtaggttattaatatattaagacaaaaagggtaatatgtttggaagagtttatggtgtttaaaagaaaatagaacatatttaatttaatatttatggaaatatgttatgtaaaagatctaaataaaagttggaaaaactaatactctcctttctgtagttttggttttgtttatacttttaatgtctaatcttccaaatataattttctggtggaatttattactttttcatccccagaacccagmaactttcttggcatagagtaaatactccacataaactagttaaattaattgccttattaaaaataagtaagataaatgtaaaacattttcaaaagcataatatgttacatacgaggctccactttctggtgaaaagacctctgagcttggagtcagctttttggattaaaaaccatcctctgccttttattagttgcttaaccctctgaaagtcactcagtgtctctgtacatggatgtcctttgcagtaatcagtgggtctacatattttttcgaaatag

SEQ ID NO: 90872 - DNA, 1966 bp, Homo sapiens
  misc_feature (1)...(1966): n = A,T,C or G
tctttttaacagccaattggcttcaatatatctattgaattgaattaaaatctactttgtgtcaaatacattctcttggttttcatatcaagggttggcaatttctgatattgttcctaattttaaagactgccgataactaaccttagcaccttatgtggtgggctgagagatgaggtaagaacggccagaaatttgcacttgatgtgttgcctacagtaggtctggagatggagaaacggacctgcatatattattttatttgttggggaaggcagagtctgatcacattctaggaaagaagcctcaaacttaaatgtctaaagggctatgtaagtgagagaatgagaccagtgggtactttggtgaatggacagtacacatttcacctaaaaggacatgatttatacttagctccagttggtaagagccaaagcaagaatgggacccctatatcattatctctgagacaaatgttctcagactgtcagattccaacatctgatgcaggtgaacagggaaacaggtcctgctgaactttgggggatcttagccagtgtacaaggcacaatcctaaaatgatagctgttagttggaaagttggcaatgtagatgttagatcaaacaacaaaaataatcaacgaggccagtccactgaagaagagtctaaaaacattaaaaaaataatgcttcattnnnnnnnnnnnnnnnnnnnnnnnnnnnnnnnnnnnnnnnnnnnnnnnnnnnnnnnnnnnnnnnnnnnnnnnnnnnnnnnnnnnnnnnnnnnnnnnnnnnnaaaaaaaaattaaaaaaaaaanaanannaaaaaannaaaaaaaaaanaaaaaaaaaaaaaannaanaaaagaaattattaaacaaaannnttttttnaacacttgnacantatacgnatncggactcggtacccctgnanaanatctaaaacattaaaaaataatgcttcattctgngnaanaanagnatacctgtaagtcaggnnaaaagtctagnaaatagnannaatctgaaaaaaaaaaaagcagaactaattatttaaatttaaacaaccgcttattgagtatttactttggaaaagactctgtgctaaatttacctgcaacaaaattttactattatgtccggtaattttgctagtgcattcttygataatttcaaaactagagtagtagtgctataatagcagaaatggtagcacttgtagaaacgtcttttatttgtatagatcattatactttgtacaaaattttacttcttgtcttaactctcagcagaattgtaagaaaatcaaggcaaataatacaacccccagtttgtacatgaagaaagagatgttcaatggcattgagtgacttactcataatcatgtagctattaagtggtggagtctgtaacagagcagggatatcctggatccagtctgttgcttcatcctgcacgatgccatttgatttctcactccaatttgtgttgttctggaatacaatgctcttgtcttactctctgcttcaaacctttaattaagacattcttctgattctctggtgggttccagtagcctgcccctcattccatcattttttcacttcttccagactcctgtttttgattcaggacatgttagtccctggttccctaaaaacaattcaacacaatgggaaatcaactgacccaggaaccaagaagcctgagttctgcctctcattagctagctgtgtgacacatgtaacctctttgatccacactatcctcacccaaagaagaggaccaatgaaaactacctcactgagttctttagaaaattaagatgttatgtgtgaatgcattttgtaaattttagagttannnnnnnnnnnnnnnnnnnnnnnnnnnnnnnnnnnnnnnnnnnnnnnnnnnnnnnnnnnnnnnnnnnnnnnnnnnnnnnnnnnnnnnnnnnnnnnnnnnna

SEQ ID NO: 90873 - DNA, 1966 bp, Homo sapiens
  misc_feature (1)...(1966): n = A,T,C or G
tctttttaacagccaattggcttcaatatatctattgaattgaattaaaatctactttgtgtcaaatacattctcttggttttcatatcaagggttggcaatttctgatattgttcctaattttaaagactgccgataactaaccttagcaccttatgtggtgggctgagagatgaggtaagaacggccagaaatttgcacttgatgtgttgcctacagtaggtctggagatggagaaacggacctgcatatattattttatttgttggggaaggcagagtctgatcacattctaggaaagaagcctcaaacttaaatgtctaaagggctatgtaagtgagagaatgagaccagtgggtactttggtgaatggacagtacacatttcacctaaaaggacatgatttatacttagctccagttggtaagagccaaagcaagaatgggacccctatatcattatctctgagacaaatgttctcagactgtcagattccaacatctgatgcaggtgaacagggaaacaggtcctgctgaactttgggggatcttagccagtgtacaaggcacaatcctaaaatgatagctgttagttggaaagttggcaatgtagatgttagatcaaacaacaaaaataatcaacgaggccagtccactgaagaagagtctaaaaacattaaaaaaataatgcttcattnnnnnnnnnnnnnnnnnnnnnnnnnnnnnnnnnnnnnnnnnnnnnnnnnnnnnnnnnnnnnnnnnnnnnnnnnnnnnnnnnnnnnnnnnnnnnnnnnnnnaaaaaaaaattaaaaaaaaaanaanannaaaaaannaaaaaaaaaanaaaaaaaaaaaaaannaanaaaagaaattattaaacaaaannnttttttnaacacttgnacantatacgnatncggactcggtacccctgnanaanatctaaaacattaaaaaataatgcttcattctgngnaanaanagnatacctgtaagtcaggnnaaaagtctagnaaatagnannaatctgaaaaaaaaaaaagcagaactaattatttaaatttaaacaaccgcttattgagtatttactttggaaaagactctgtgctaaatttacctgcaacaaaattttactattatgtccggtaattttgctagtgcattcttcgataatttcaaaamtagagtagtagtgctataatagcagaaatggtagcacttgtagaaacgtcttttatttgtatagatcattatactttgtacaaaattttacttcttgtcttaactctcagcagaattgtaagaaaatcaaggcaaataatacaacccccagtttgtacatgaagaaagagatgttcaatggcattgagtgacttactcataatcatgtagctattaagtggtggagtctgtaacagagcagggatatcctggatccagtctgttgcttcatcctgcacgatgccatttgatttctcactccaatttgtgttgttctggaatacaatgctcttgtcttactctctgcttcaaacctttaattaagacattcttctgattctctggtgggttccagtagcctgcccctcattccatcattttttcacttcttccagactcctgtttttgattcaggacatgttagtccctggttccctaaaaacaattcaacacaatgggaaatcaactgacccaggaaccaagaagcctgagttctgcctctcattagctagctgtgtgacacatgtaacctctttgatccacactatcctcacccaaagaagaggaccaatgaaaactacctcactgagttctttagaaaattaagatgttatgtgtgaatgcattttgtaaattttagagttannnnnnnnnnnnnnnnnnnnnnnnnnnnnnnnnnnnnnnnnnnnnnnnnnnnnnnnnnnnnnnnnnnnnnnnnnnnnnnnnnnnnnnnnnnnnnnnnnnna

SEQ ID NO: 90874 - DNA, 614 bp, Homo sapiens
tcaacctgtaatcagatttgtatgttggaaaaaaaattattcaagcaggagcaatgtgaagagaccattggagtagaaaatgttagaggcagggacgatggcgtgagagccatgcagacctaaacccgggcaggacytacagagaagatgcgagagagaaggaatggccaggtagaagagtttgctggacttggcgatgaatgggatgtggagagaagggggagacccccaaacctaccagatttctagatatcctgcagtaggttccactctttcagtcaaaccagaacagcatcctttgcagccatactgacactatcatgcaaattgacaggaaccatttggtttccaaatcaggcaactgttgaatgccttgtctttggaaatcagtatttcattcacaatactgcaaatgcctgctaatgagtgtgacttgaacagatgttaaaataatgttttgggtaactagcgtgctctatgaacaaggttagaatcttcccattacaattttccaccaccacacacctggcatctttgctgattgaaactgtttgatatcattcaccataaatccttcttatctggctaatgcagcatgaaattatgtcaattga

SEQ ID NO: 90875 - DNA, 614 bp, Homo sapiens
tcaacctgtaatcagatttgtatgttggaaaaaaaattattcaagcaggagcaatgtgaagagaccattggagtagaaaatgttagaggcagggacgatggcgtgagagccatgcagacctaaacccgggcaggacctacagagaaratgcgagagagaaggaatggccaggtagaagagtttgctggacttggcgatgaatgggatgtggagagaagggggagacccccaaacctaccagatttctagatatcctgcagtaggttccactctttcagtcaaaccagaacagcatcctttgcagccatactgacactatcatgcaaattgacaggaaccatttggtttccaaatcaggcaactgttgaatgccttgtctttggaaatcagtatttcattcacaatactgcaaatgcctgctaatgagtgtgacttgaacagatgttaaaataatgttttgggtaactagcgtgctctatgaacaaggttagaatcttcccattacaattttccaccaccacacacctggcatctttgctgattgaaactgtttgatatcattcaccataaatccttcttatctggctaatgcagcatgaaattatgtcaattga

SEQ ID NO: 90876 - DNA, 614 bp, Homo sapiens
tcaacctgtaatcagatttgtatgttggaaaaaaaattattcaagcaggagcaatgtgaagagaccattggagtagaaaatgttagaggcagggacgatggcgtgagagccatgcagacctaaacccgggcaggacctacagagaagatgcgagagagaaggaatggccaggtagaagagtttgctggacttggygatgaatgggatgtggagagaagggggagacccccaaacctaccagatttctagatatcctgcagtaggttccactctttcagtcaaaccagaacagcatcctttgcagccatactgacactatcatgcaaattgacaggaaccatttggtttccaaatcaggcaactgttgaatgccttgtctttggaaatcagtatttcattcacaatactgcaaatgcctgctaatgagtgtgacttgaacagatgttaaaataatgttttgggtaactagcgtgctctatgaacaaggttagaatcttcccattacaattttccaccaccacacacctggcatctttgctgattgaaactgtttgatatcattcaccataaatccttcttatctggctaatgcagcatgaaattatgtcaattga

SEQ ID NO: 90877 - DNA, 614 bp, Homo sapiens
tcaacctgtaatcagatttgtatgttggaaaaaaaattattcaagcaggagcaatgtgaagagaccattggagtagaaaatgttagaggcagggacgatggcgtgagagccatgcagacctaaacccgggcaggacctacagagaagatgcgagagagaaggaatggccaggtagaagagtttgctggacttggcgatgaatgggatgtggagagaagggggagacccccaaacctaccagatttctagatatcctgcaktaggttccactctttcagtcaaaccagaacagcatcctttgcagccatactgacactatcatgcaaattgacaggaaccatttggtttccaaatcaggcaactgttgaatgccttgtctttggaaatcagtatttcattcacaatactgcaaatgcctgctaatgagtgtgacttgaacagatgttaaaataatgttttgggtaactagcgtgctctatgaacaaggttagaatcttcccattacaattttccaccaccacacacctggcatctttgctgattgaaactgtttgatatcattcaccataaatccttcttatctggctaatgcagcatgaaattatgtcaattga

SEQ ID NO: 90878 - DNA, 683 bp, Homo sapiens
caaccttgatgttactccacaaatcgtaggctgtgactcacgtagcgttcttgcctgttctggagggctgcctttggttgtcttgctggagcacgaataccctttccctatggtatctaagccttgcatctggggtgtgagaatgcagagctccacctgtcttgtggccacccaagatcccacttcggtctgtaaattccctcaataaatcacccaatattgacaaactggatttgttctgcctccttctttgggtctgggctcctttggcatttgggggtccctttcatggaacagagtccttagagcattccaccaatgggcctgagacccctggtcccgtcatttgactttttctttcttactgggaggactgaggtgttcccaaacctcctgcttctacctgccacatgctaggctkgctgcgcccctttctagaggtgctgctaccccaagggaaggggacccatggtgaaaccacctttgcaaaaataacgaggaaattacgacagtgaaagaaatcagacctaaccaactctatcttgcttctaatccttaagctgtccttgttcatgcctgggtgtaggccgagctatctttgggaaggaattcagttcatgattttactctgaagcaaaattgataacagccctttcctgaaaagacccccttcttgcctggga

SEQ ID NO: 90879 - DNA, 1336 bp, Homo sapiens
cagactggttgcatgacaccagcaagtgtaggaagggcagctcttgggagaggcctggagtccagatccccggctgcactccagctgtgcctccacatggccacgcgtcccctctctgggcctcagtgtgtccacttgtacaagaactgattargccgtggactttcccacattcctccctgtgccattcagcgactctgaatattcccaggggttttcagggctggtgatgaggcgctaggcactgaagggactcacgcaatttcagtcagatattgacttatgaggggcagccagatggtaggtgaaaagtagtgaaaactcaggcttctgaaaataaaatgggaaactctctcagaagaaatgataacttcagcataaaacagcaacctattgccatttcatatccctgaaaactaaagaaataaactgaagtatcaaacctctgatttatatattatttctttaagggtaactgagaccaagctttctcttattttatcctggtattttcttgttcccgaaaagctaatgattttgctgatcttattacctaatgtcctctgcctttattcctggtagctttagaagacagatgatatgggtagaagggatacgatctagctccattttaatacggggggaaagttacaaggtctaaggtcatcctgggtcacactgctcatgtggactattagagcttcaaaaccctgggagagacagtaacagtcatagttccatggagagcttgcctttggagaacaaggtgtcatgctacatgatctctgaacacctctatgaggcaggtaccatggttatgtacagataaccatatttcacagataaggatactgatgcacagagagattacatcacttaccttcattcacatagctaataaacagcaagagggagaattcaaatctgtttttatctcatccgaaagctggtactccaaaccactgatagactttgctcccagactaactatgtgacagcaaaaggtgcgcaggtgacagctaagacatctgcatcgaggacggcagcatgcttcagaggcaagaactggtttctaggtgctgacagtcttgggagccacggcaggtggagctggaggggcaggtggagcttgtgtggctcggctggagggtgctgcatgctattataagatcggctacatttgtagactttcttctacatgtggaaccaattctatggtttgtcacctcagttatctgcccaggggccacctccacatctcgatctcctgtcctcttggtgaaggactggagacacactgtgtgctcctagcttgagctaacaagctgggaagagt

SEQ ID NO: 90880 - DNA, 852 bp, Homo sapiens
atgtttaagcaaatattgtggaaaacattcagaaaagagacacagacacacacgagatggatagcttagaagggaaaacatgaaaaaagacatggagactattgaacataagaataaaatgaagaagagtgattatcatgtgaaacaggctaagactgactctcccgagtcttcccaagaaatcaggacctgtcaggactactagacagggaaggttagtgaccccagattcatgggccccagaatcacaggaatctgaattttaasagtcaccacctctgtagctcaatgggactacagtaaaatatctgcatcgcagtactagtcagagagtaggtacacaggacagatgaggacacattactttccacctttgctgcagcatcacggcctctgtttaattcctccctgcatctactcaaggcagttctgccagggccaggtggagaatgggtctcaaagcatggggtggacagcttgtagaggtgtaaagagtatcacctgaaaatccaagccctccaccttgctctgggccttctcagcatttggccatgaggagtcacttaccatctttgaatcagtttccttaacttgtgcagtgaaaatagaatgccaggcactctttaatataggtggtaaaatttcatgtaaaaacgctatgtaaactggaaaagtctatacttatgtcagatgtagttttatggaaaaagctctttagaaaaaaattattttatttacttttttaagttctatggaacatgtgcagaatgtacatgtttattacataaacatgtgccatggtggtttgctgcacctatcaacccatcacctaggtattaagcccagcatgca

SEQ ID NO: 90881 - DNA, 852 bp, Homo sapiens
atgtttaagcaaatattgtggaaaacattcagaaaagagacacagacacacacgagatggatagcttagaagggaaaacatgaaaaaagacatggagactattgaacataagaataaaatgaagaagagtgattatcatgtgaaacaggctaagactgactctcccgagtcttcccaagaaatcaggacctgtcaggactactagacagggaaggttagtgaccccagattcatgggccccagaatcacaggaatctgaattttaacagtcaccacctctgtagctcaatgggactacagtaaaatatctgcatygcagtactagtcagagagtaggtacacaggacagatgaggacacattactttccacctttgctgcagcatcacggcctctgtttaattcctccctgcatctactcaaggcagttctgccagggccaggtggagaatgggtctcaaagcatggggtggacagcttgtagaggtgtaaagagtatcacctgaaaatccaagccctccaccttgctctgggccttctcagcatttggccatgaggagtcacttaccatctttgaatcagtttccttaacttgtgcagtgaaaatagaatgccaggcactctttaatataggtggtaaaatttcatgtaaaaacgctatgtaaactggaaaagtctatacttatgtcagatgtagttttatggaaaaagctctttagaaaaaaattattttatttacttttttaagttctatggaacatgtgcagaatgtacatgtttattacataaacatgtgccatggtggtttgctgcacctatcaacccatcacctaggtattaagcccagcatgca

SEQ ID NO: 90882 - DNA, 852 bp, Homo sapiens
atgtttaagcaaatattgtggaaaacattcagaaaagagacacagacacacacgagatggatagcttagaagggaaaacatgaaaaaagacatggagactattgaacataagaataaaatgaagaagagtgattatcatgtgaaacaggctaagactgactctcccgagtcttcccaagaaatcaggacctgtcaggactactagacagggaaggttagtgaccccagattcatgggccccagaatcacaggaatctgaattttaacagtcaccacctctgtagctcaatgggactacagtaaaatatctgcatcgcagtactagtcagagagtaggtacacaggacagatgaggacacattactttccacctttgctgcagcatcacggcctctgtttaattcctccctgcatctrctcaaggcagttctgccagggccaggtggagaatgggtctcaaagcatggggtggacagcttgtagaggtgtaaagagtatcacctgaaaatccaagccctccaccttgctctgggccttctcagcatttggccatgaggagtcacttaccatctttgaatcagtttccttaacttgtgcagtgaaaatagaatgccaggcactctttaatataggtggtaaaatttcatgtaaaaacgctatgtaaactggaaaagtctatacttatgtcagatgtagttttatggaaaaagctctttagaaaaaaattattttatttacttttttaagttctatggaacatgtgcagaatgtacatgtttattacataaacatgtgccatggtggtttgctgcacctatcaacccatcacctaggtattaagcccagcatgca

SEQ ID NO: 90883 - DNA, 852 bp, Homo sapiens
atgtttaagcaaatattgtggaaaacattcagaaaagagacacagacacacacgagatggatagcttagaagggaaaacatgaaaaaagacatggagactattgaacataagaataaaatgaagaagagtgattatcatgtgaaacaggctaagactgactctcccgagtcttcccaagaaatcaggacctgtcaggactactagacagggaaggttagtgaccccagattcatgggccccagaatcacaggaatctgaattttaacagtcaccacctctgtagctcaatgggactacagtaaaatatctgcatcgcagtactagtcagagagtaggtacacaggacagatgaggacacattactttccacctttgctgcagcatcacggcctctgtttaattcctccctgcatctactcaaggcagttctgccagggccaggtggagaatgggtctcaaagcatggggtggacagcttgtagaggtgtaaagagtatcacctgaaaatccaagccctccaccttgctctgggccttctcagcatttggccatgaggagtcacttaccatctttgaatcagtttccttaacttgtgcagtgaaaatagaatgccaggcactctttaatataggtggtaaaatttcatgtaaaaacgctatgtaaactggaaaagtctatacttatgtcagatgtagttttatggaaaaagctctttagaaaaaaattattttatttacttttttaagttctatggaacatgtgcagaatgtrcatgtttattacataaacatgtgccatggtggtttgctgcacctatcaacccatcacctaggtattaagcccagcatgca

SEQ ID NO: 90884 - DNA, 1170 bp, Homo sapiens
ttactctgttgtggcacaatgatacttatgaatttgggagtctagttaaacacactaaatggaggaggctgggtcgggtctgggcagcactggaaggcagtggttataatttgttagcatctttctttctgactgtggtcaaggcagtggcatcttggaaatgtcatagctttgcttcactgtcccctatgtggaaaagcagtccagatctgtttataaacaagcactktatctcctaccttaaaggattctgcaacgtgagatatactgatagtttcaagctgcagttacaggacctacagttcttgctttgacaagacagaacttagtccatcggctgtcatgttaaaatgaaagaaatgcaggtaaaatcctaaatccaagaataaaaactccagactgactataacaaaacagattcttgtaactcggggaattgtttaaccatggtgataaacttgttcgcgaatatcataaatgtagcagcagtagtagcccttgctgtgagtctgtactttagaaagaacaatggtaaggctttgtatgcttgaatcacaagtcagaataggagacagcattttgctctctgctcttttgagaagatccattgttcctatttgcagaaattcccagacattctggctgttctgatcatttttctttctcatgcctcaggtagcaaattgacagtgggtaggagagtgtaaacactggggcaatagaaattatgtaaatgttgcatcccggcaagaaaactttcaaccccttgaggtcttttagacagcattaattctagaaattagatacaaaatttaactttttcatgcttataatgatttcataaagaaaaactcattagtaaaggtgacaaatatgaagttctattgaacatttaaattcaggaatctcagtgagtgccctagggagatatttagccagccaatgactctctgatgttattaagaagtaatttattcaaggaagtctccattcatgagtttacataagaacaatacctacttttcaaaggcttgtgttctcagtatagaacatacctaatttacaatgacttttggttaaaattttcattaggttcgttcaatagtatttgataattttaatttagttttttgagatcccaggttcccatttacaggaagagaaaatgca

SEQ ID NO: 90885 - DNA, 1170 bp, Homo sapiens
ttactctgttgtggcacaatgatacttatgaatttgggagtctagttaaacacactaaatggaggaggctgggtcgggtctgggcagcactggaaggcagtggttataatttgttagcatctttctttctgactgtggtcaaggcagtggcatcttggaaatgtcatagctttgcttcactgtcccctatgtggaaaagcagtccagatctgtttataaacaagcactttatctcctaccttaaaggattctgcaacgtgagatatactgatagtttcaagctgcagttacaggacctacagttcttgctttgacaagacagaacttagtccatcggctgtcatgttaaaatgaaagaartgcaggtaaaatcctaaatccaagaataaaaactccagactgactataacaaaacagattcttgtaactcggggaattgtttaaccatggtgataaacttgttcgcgaatatcataaatgtagcagcagtagtagcccttgctgtgagtctgtactttagaaagaacaatggtaaggctttgtatgcttgaatcacaagtcagaataggagacagcattttgctctctgctcttttgagaagatccattgttcctatttgcagaaattcccagacattctggctgttctgatcatttttctttctcatgcctcaggtagcaaattgacagtgggtaggagagtgtaaacactggggcaatagaaattatgtaaatgttgcatcccggcaagaaaactttcaaccccttgaggtcttttagacagcattaattctagaaattagatacaaaatttaactttttcatgcttataatgatttcataaagaaaaactcattagtaaaggtgacaaatatgaagttctattgaacatttaaattcaggaatctcagtgagtgccctagggagatatttagccagccaatgactctctgatgttattaagaagtaatttattcaaggaagtctccattcatgagtttacataagaacaatacctacttttcaaaggcttgtgttctcagtatagaacatacctaatttacaatgacttttggttaaaattttcattaggttcgttcaatagtatttgataattttaatttagttttttgagatcccaggttcccatttacaggaagagaaaatgca

SEQ ID NO: 90886 - DNA, 1170 bp, Homo sapiens
ttactctgttgtggcacaatgatacttatgaatttgggagtctagttaaacacactaaatggaggaggctgggtcgggtctgggcagcactggaaggcagtggttataatttgttagcatctttctttctgactgtggtcaaggcagtggcatcttggaaatgtcatagctttgcttcactgtcccctatgtggaaaagcagtccagatctgtttataaacaagcactttatctcctaccttaaaggattctgcaacgtgagatatactgatagtttcaagctgcagttacaggacctacagttcttgctttgacaagacagaacttagtccatcggctgtcatgttaaaatgaaagaaatgcaggtaaaatcctaaatccaagaataaaaactccagactgactataacaaaacagattcttgtaactcggggaattgtttaaccatggtgataaacttgttcgcgaatatcataaatgtagcagcagtagtagcccttgctgtgagtctgtactttagaaagaacaatggtaaggctttgtatgcttgaatcacaagtcagaataggagacagcattttgctctctgctcttttgagaagatccattgttcctatttgcagaaattcccagacattctggctgttctgatcatttttctttctcatgcctcaggtagcaaattgacagtgggtaggagagtgtaaacactggggcaatagaaattatgtaaatgttgcatcccggcaagaaaactttcaaccccttgaggtcttttagacagcattaattctagaaattagatacaaaatttaactttttcatgctwataatgatttcataaagaaaaactcattagtaaaggtgacaaatatgaagttctattgaacatttaaattcaggaatctcagtgagtgccctagggagatatttagccagccaatgactctctgatgttattaagaagtaatttattcaaggaagtctccattcatgagtttacataagaacaatacctacttttcaaaggcttgtgttctcagtatagaacatacctaatttacaatgacttttggttaaaattttcattaggttcgttcaatagtatttgataattttaatttagttttttgagatcccaggttcccatttacaggaagagaaaatgca

SEQ ID NO: 90887 - DNA, 728 bp, Homo sapiens
tatattgttatacctgagatgcctgtattataagtaacaactgccatatacaaattttacaaatttaaaacaaaaaaccttaactctgtctccactcccacatgtcctccattccatcatcctgttcatacacggaatcaagagaaaatgttttcaagtagaaagagcaacatcttcagaatcagacagaattgagtctaatcttcattccatcacctactagcaatgctacctccaatgagtttctgcttctgagcctcagtttcctcatcygtaaaatggagagggtatgtggaacttaggaagaggcaactgtggcagaagccaatagctgttttttttcttcctgagcacatataataaggtcacaagtttgcatttccttgccttccctgcacaatgtgtggccttgtgactagtgcttgccaatgggccaacggcatgtgggcacaatcagggtggtcacttcgggatcaagtctgaggaagcatttgcacctttgctctgctctccttcctctctgctggctggtttcagacagtttccaggcccttgaagatagaagtcccactaatgtaaatagttggagatgaacagaagagtgggcccctgagtctttctcaactgtgtgagaaagaaacttctattgtatttgagtcattatagctttttagtccacttttatagcagtttagctcatcttaattgaaacaaaaaatttactcaac

SEQ ID NO: 90888 - DNA, 746 bp, Homo sapiens
ttttacaatgtttataaagaacctaacctataatattttgttgtagcagcatgggcttactaaaacatcatccaaaacacatggccctcttgttccaggaataagctagacgtcttccttcagaattttgtcactaacccattcctctgcctagaatattttcccccagtgcgatggtcaatattgtccatcaacgtggtgagactcagttcccagttacccaatcaaacagtaatctaaggttgctgtgaatatattttctaaatgtgattaaagcccataacatgctgacttcaaataagagagattatcctcaataatctaagtggtctgatttaacaagttgaaacactttaagaacagaatggaggcttcccagaaaaataaatttggtctttggataacaagtttagctctcatatccaagagttctgcaatgcccttcctgatggcctgctctatttattccaggttttcttagccagccctcacagttcataacccaatatcttgcaataagtatctcaatatttttcacctactggttatttttctccagttgaatactgattagttcatcaggtgttatcccttcgagtgttcactcaaaccttttagtaaggtcctggtcactctgttatatttaagcttcctgttccctgctttgttatgatttattcttatcacgtacaactatccagwataatacattgacttatctttcctctggtgcctttttcttccaa

SEQ ID NO: 90889 - DNA, 612 bp, Homo sapiens
ctgccttgaagcctctaaagaattctctttccttaccatatctgtcctctacctccagaagccaatttttctttttctttatcccaaatgtaatagtacagaagccagtttttattgagccagcttgaatggtttctgtcccacgggacatgaaaggcagtgtcttctagacaaggtgtttgatgaggaatagcttcctcctctcccacctgcaccagccccaaaccttccgacttgttctgtctgcttccttctgccgtgccagcctgcctacctgttgcaccaggtcagtgggctgagcaatgtgttgacaagagccagagtggaacaaagaggacacaggggcatccatctgttgggactggccagacagagctgacttctcaaacagggaggtgtgggccctcccaagcaggatgccattgaaagraaggggaaacatggggtggaatttaggcagccaggatttgagaaactcaagcaagatggctagtggaaaccttccctcggttccactgagcagctccgtgcagattcgggtggctcagttttacatgctggctttggcgtaaaaatttcatgtgaggccgggcgcggtggctcacgcctgta

SEQ ID NO: 90890 - DNA, 650 bp, Homo sapiens
ctgaataggaaggcaaggggaatggacattagcctggggcctagtacctgtacactccccacggctcctttggtccctgacacccccagggcccaggaacagattactactaagggcttggctgtcactgactcccagcctcgtatctatctgcctgggaggggacttggcgagtgtctgggacacagggtgatggtagtaaagtggccctttctcccagggaccccagggggctgagccatggtttgtagatcagtcaccaggctcaggcccaatggccrtatcgttaatcgtggctgtctagaccgccagccaggacacccttcctccaccaaaaacacacacacatatacacactcggttggccacacctctggtggtgcttggggatggacctgggccaagtgtgcccacaggaagtggtgctaaaggagcaggatttcctgggggatggcattgccagggccagcacctctcctcttcagggttttgcaatgagtttatcaaaccatggtctccagacctcctgcatcagcatcccatggagtgtttgttcaaaatgcagatacctggacctgtctccaagcccacaggatcagaatctctggagaagagacacagccttctgcatatgtaacatggtccccagg

SEQ ID NO: 90891 - DNA, 650 bp, Homo sapiens
ctgaataggaaggcaaggggaatggacattagcctggggcctagtacctgtacactccccacggctcctttggtccctgacacccccagggcccaggaacagattactactaagggcttggctgtcactgactcccagcctcgtatctatctgcctgggaggggacttggcgagtgtctgggacacagggtgatggtagtaaagtggccctttctcccagggaccccagggggctgagccatggtttgtagatcagtcaccaggctcaggcccaatggccgtatcgttaatcgtggctgtctagacygccagccaggacacccttcctccaccaaaaacacacacacatatacacactcggttggccacacctctggtggtgcttggggatggacctgggccaagtgtgcccacaggaagtggtgctaaaggagcaggatttcctgggggatggcattgccagggccagcacctctcctcttcagggttttgcaatgagtttatcaaaccatggtctccagacctcctgcatcagcatcccatggagtgtttgttcaaaatgcagatacctggacctgtctccaagcccacaggatcagaatctctggagaagagacacagccttctgcatatgtaacatggtccccagg

SEQ ID NO: 90892 - DNA, 650 bp, Homo sapiens
ctgaataggaaggcaaggggaatggacattagcctggggcctagtacctgtacactccccacggctcctttggtccctgacacccccagggcccaggaacagattactactaagggcttggctgtcactgactcccagcctcgtatctatctgcctgggaggggacttggcgagtgtctgggacacagggtgatggtagtaaagtggccctttctcccagggaccccagggggctgagccatggtttgtagatcagtcaccaggctcaggcccaatggccgtatcgttaatcgtggctgtctagaccgccagccaggacacccttcctccaccaaaaacacacacacatatacacactcggttggccacacctctggtggtgcttggggatggacctgggccaagtgtgcccacaggaagtggtgctaaaggagcaggatttcctgggggatggcattgccagggccagcacctctcctcttcagggttttgcaatgagtttatcaaaccatggtctccagacctcctgcatcagcatcccatggrgtgtttgttcaaaatgcagatacctggacctgtctccaagcccacaggatcagaatctctggagaagagacacagccttctgcatatgtaacatggtccccagg

SEQ ID NO: 90893 - DNA, 873 bp, Homo sapiens
cccctctgcaaattcatcttctacctctgccttctcattccctgcccttttgccactctggccttctctgagttcttccaaaatgccaaattatttcctggctcagtatctttgcacactctgttccctctgcatggaatgcccttccatcccctcttggcctggcaactgatgcttatcctcagtcttagtttaaatggcatatcctccaagaagctttccttgaaccgtgggacaagcctgggccatctgttttattctcccattgtgcactgtacttttccttctcaacatttatcaaaaacataaataggaaagcataaatagggccaggcacagtgastgatgcctgcaatcctagcacttggggaggccttggcaggaggattacttgaagccaggagttcgagaccagcctgagcaacacagtaagactcagtcactacccaaattttgaaaaacttagccaggcatgatggctcaaacctgtagtcacagatacttgggaggctgaggcaggagaatggcttgagcccaggagattgaagctgcagcgagctatgattgcaccattgcactccagcctgggctacaaagccagaccttgtctcgaataaataaataaataaataaatagttactagtataattggtcattcaacgtctgtctttcctattaaactaaactctgtgaggcaaagctgtctattacaataacaatcgctgaacacatctatagctcttcctatgtgtttgggtctgttctaagcactttttatgtatcatcttactgaatcctcacagtaacccttcaagacaaatactttttctttccctgtttcatgagtgaggagactgaagcacaaagaggtc

SEQ ID NO: 90894 - DNA, 1087 bp, Homo sapiens
agcagcctgtctgtgcccaaaggggtcgccacccccaccctctgcccactcacctgcgccaggcccagctcccacatcctcctgtctgtgtctctgactttggatttctcccactccttccactctgacatctgtctcctgtgcaccccttatctgtccgggtgatgaggggtgggatgtgggtggtggggagaggatctgcttcgactgaccccgaatcagcctcttgtaggagtgagggcctcccttaccacatccttgttccatcccaagaagtctccgcttggcggggaatccagacctaatagccacccccaagtcctaagtcagctttgtccccactcacccccacccccagctctggctaacttggctctctcccaacctgcctgccctgccagcagccggatgggcatcaaagaccgcatccgcatgggcagctcccagcggcggacgggtccttccaagcagcatctggcacctccaacaatgcccacctccccaagcagcgagcaggtgggtgaggccaccagccccaccaaggtgcaaaagagctggagcttcaatgaccgcacccgcttccgggcatctctgagactcaaaccccgcacctctgctgagggtaagcccccggggggctgagtccgatcgagggccggctgagggtggcagggcggggacagtctgggctgggagcagaaagatctggctcgcgtctcagctctggaactgatggaccgtctttgggctctggtcttctcatctgtaaaatgggcattataatatttgctctgctatacaatggacatcagactgtttgggaatcacgtggagggtggcatttcataggggttagcagcacaggctttggagcgagactgcctggatttgcatcctggctttgtcacttatcttaggcgagtgacctaatttctctgggcctcattctcctcattcataaaatgggaacaataatagcatccacttcctaggattattgtgaggattaaatgagataatccatggaaggtgaacagaagacttttgggaatatagkaggtgctcaacaaatagctaaacacaaatg

SEQ ID NO: 90895 - DNA, 724 bp, Homo sapiens
tctttcctgcaatgttcctcagaacccttaatatgttaatgtgcattgggtctacaaggcaggggtatatgagtgacatttccaagaaaggcttattaacttgacagcacattagttagaaaagggtggcaaaaaagctggcgggtcaaacagcttggggcgggtgaggagggtctgggatgccaagccagggaatattcacattagcttagagagcactggaagaataaaagattttttaagcagggtggtgacgtaagcccggctgagagctagcaagctgcctccaaagtcagtgtggggatagatgtgaggaaggaaagagattaacgtgttgatatagtttggatctgtgtccccacccaaatctcacattcaatgtaatccccagttttggaagtggagcctggtgggaggtgattagatcatgggggtaggtttctcatgaatggtttagcaccattcccttggtgctgtcctctcaatagtgagtgaattctcccgaggtctggtcattttaaagtgtgtggcatctccccctgacctcttcctcctgcttcggtcatgtgacatgcctgctccccctttgccttccgccataattgtaagtttcctgaggcctccccagaagccgagcaaatgcyagcatcatgcttactgtacaacttacagaactgtgagccaattaaacctcttttctttgtaaattacccggtctcgggta

SEQ ID NO: 90896 - DNA, 724 bp, Homo sapiens
tctttcctgcaatgttcctcagaacccttaatatgttaatgtgcattgggtctacaaggcaggggtatatgagtgacatttccaagaaaggcttattaacttgacagcacattagttagaaaagggtggcaaaaaagctggcgggtcaaacagcttggggcgggtgaggagggtctgggatgccaagccagggaatattcacattagcttagagagcactggaagaataaaagattttttaagcagggtggtgacgtaagcccggctgagagctagcaagctgcctccaaagtcagtgtggggatagatgtgaggaaggaaagagattaacgtgttgatatagtttggatctgtgtccccacccaaatctcacattcaatgtaatccccagttttggaagtggagcctggtgggaggtgattagatcatgggggtaggtttctcatgaatggtttagcaccattcccttggtgctgtcctctcaatagtgagtgaattctcccgaggtctggtcattttaaagtgtgtggcatctccccctgacctcttcctcctgcttcggtcatgtgacatgcctgctccccctttgccttccgccataattgtaagtttcctgaggcctccccagaagccgagcaaatgccagyatcatgcttactgtacaacttacagaactgtgagccaattaaacctcttttctttgtaaattacccggtctcgggta

SEQ ID NO: 90897 - DNA, 659 bp, Homo sapiens
attcccaagaagggaacaattggaagatcaagagaacccccagccaccaggtgccctgagattgttctgtgtgtgtgcgtgtgtgcgtgtgtgggtgtgtgtgttttcctgtgtgcatgcccgtgcatgcacatgcgcttgagtcaggaactttgaatcagacaagcctggagtccrctcctggccacagggttcaccaactgagtgacctgagcaagtacctgcacctctctgggtcttcatgaactcaaacatgctaacaataaaaaacccatcatggagaatcagctcttcttcctttgttcatttaccctcccccagccccttgcctatggcaggctcagtgtttggtgctgcgggaacaggagtggaaggaacacatttttcccctcaaggagcactagtaagggtaggaagcaggtctgcagggaagagggaacagcccctgggtggagagggaagcttcttagaggatgtgagaatcacttgggtttgctgctggacaagtcaaggcagaggcagccacatgttcaaagacaacaagctgtgaacaaagggttccctattactgctggagaatgaggtgggaggtggggggtggtggcagaaattggggctggtgagggtgacagtgtccagatcagggaaggctttagggg

SEQ ID NO: 90898 - DNA, 481 bp, Homo sapiens
tccatgacccacctccatccccacaagtgaacttttttgtttctaagttctgggccctgcttaggggcaactcaggatctattgtttaagaggagttgtccaaacctttcaaagtgggaatgagaggcccactcccacagtatgggtcctgggacactaagagtcccagccaggacccagcgtggtgcccaggctgatgccccgccggctctcactgcttagagcatgatggagagttcaccagagtgaggagggccacactggagagccagagccatgccccctggcagagaaggtggcatcagatgactgtcccatgggctttaagactcttttcccccattttgggagtgaaagagcaggtycacttctcttggattttagaagttctggctgttcttgaatgacccaaatgtcagagtgtgagggaggagaggcactgcccacaaaggatgatcttggacttggccagtcttaccag

SEQ ID NO: 90899 - DNA, 1278 bp, Homo sapiens
tgcatgcaagatttggagtgtgcttgcatatcataggaagatgaatacagtcctcagattccccaaggtatcaataactctcaagagttaagaaccactgctctggggtcctctccgtggtagcaactaagttaaaatcacagaagccataaactcctcatagtcctcagaggtgccacatttggataaatatttaatgttctttaagcatgttttaagtgttcaaacgtacacatttctcattaacagtttttttagaggtaatctcttccacacaaaacagtcaattgtgcattttaggaagtcatcagcttataaatgggctgtgatccagggatctatttacaaaccggaatcaattttctcatcaagcaatgtaaataattaagcaaaagtctcatttgctataaagacactgggaacaagaaaccaagaaatgtggtaggaagaagaaagagattgccacccccttcctcgggacaggattgattccagaaaataaaaaataataggcaatgtttcttttcagaacctgttccctcttctgcagcattgctcccagggtacccccaaaatccctagagacacactaacaggacttccccatcatccttccccagcattacccgtctcccacgtcctgcarctccatttcctcaccacaaacgaactcacctaggaatctggaggctagtggcattattaagttcacactcatgtatgtgggactgatggctctttgacctcataatgtgcttgtactttcagcagaggacacatattgatccaaaggaatgactgattgggggtcaaggcagtatgacaaagtcaaggggaaatacaggtcagaggggttaggaaggggtgggaatgccacataaaatgccgaatcttcttagcaatctccttctatgcaactcatattccaatcattcccaaactctgcttccttcagcatctccagtgtgggtaagggtaaggagaataatggagactgaacataaaggaccctgggccactcttcttctgttttaaatttattttagttctctaacccttcccagtaaaactaatttgactaaaggacacaaaactaaagtttggaaatcactgctccaaaataaacagatattttccagcttattccctttctccacttctgattccacaatatttgttcaaacctataagttttgttgcatttttcacccgttgtattttagtagagggttgagaagaaaatagacaggaaggagctagggaaactatctatatgca

SEQ ID NO: 90900 - DNA, 1091 bp, Homo sapiens
cacaattttatatctagggttgctgtagaaaccaacatctctggagagggaaggaaagaaaaggagaaggaagagagagttcagtgggactttttttccattttcatttttatataaaagtgttaagaccacaatgaaaaaagttttttatccatatatataataaaccagtttgtgagctacataatttgtctttcccatcttcagaaatgttctcacattaacaatgattagatagcatcatgcccaaagacattggccacacaataaaacaaacaaaaaaacccagtactatgatacaattgaggtaaaaggggaaacaaaaaaatttaacatttgcccacaaataattttttttctttttcttaattttgtcagaaaaataccaaacacagtgatttaaatttaaaaaaaaaaaaagtcacaaaaacctgtttttagcagaagtgaatgaccaatgggccagctccttggctcagacgtgattactattggttttcctaattaatccacaaatccacagggaagtgtaagtcaacttcaggggggagtggtggtataaaattaaaaaatagaaaccaaataccccacctggtatgcccccttttccctaagcccctttaccctccctcacatgtttccacccccactgcacaccccctaatgaccccaacactcaaatctccatcagatctaggtcagcttcttcaaagccatagaaagactcggtctcactttcaccctcaaagagctggtgaagactttcaggctcaattgtctcttcaggagatgatctgggtcgtggmgtggaagactcagaatgttccccactcagcttcagttgctcctctagggaggcaattagctcctcctgcatgtcagcatttcttgtaggtgagttaatgttgccatcggggccaggcagaacactagccaccaggaaggagcgctgaactagctctggacagtccccaatgacacctagcacttcacccagccagacaagcaccagctgaagcaggacatcagaatcacatgcagtatctgccatttcccgagcctgttccttccattttttatgcaggaagttc

SEQ ID NO: 90901 - DNA, 570 bp, Homo sapiens
agatttgtacaaaaaaaatatrgagtttattatttacttatccacaaatttattcctaactctataaaattgtatctgcaaaacctatctataatttttggtgtaaaaatatggaaatgttcatggcagacataaaagatggactcagtaaatgtttaagctggtatcatttgatataattggttcacctcatatcatatgtatggtggagtgggtcttaagcaacacataaaactctggatttgaaggaagatatgtcgtctgcaccaaagcatgaggggtaatagaaatgtcctggtctctccagtcagatctgagtgataaattgtataactttgattgagttatttaaccttcttaagtctcattttcctcctcagaacactgatgacaccactgcttccctcttactgcaactgttagttgaaacgatatatacacagcacttagtgctacctaacatataatagctattctcacacctcccctgaatttaacatgtgacaaaaataataaaaataagatgacaaaaaccaagtgtgccaagacactctttttctgagaaactct

SEQ ID NO: 90902 - DNA, 479 bp, Homo sapiens
  misc_feature (1)...(479): n = A,T,C or G
ttatatttgacacaattccaattttaaagaatgacccagtatctattctgcaaatgggtgcttgtgttaatatgttcagtacactaatgccaaagaaagcacgtaatagtatttnnnnnnnnnnnnnnnnnnnnnnnnnnnnnnnnnnnnnnnnnnnnnnnnnnnnnnnnnnnnnnnnnnnnnnnnnnnnnnnnnnnnnnnnnnnnnnnnnnnngaatatagggttggtgttcagaataacccccatcagccataagaacaattagaccttgcccacaaaagtcaatgttcagtcatccamattaccatagctgcaccgaatgttaatggactctttttgttgttttttctttttacaatatatctgctaattaggggccccaaggaccaaaagggcagaaaggtgagccttatgcactgcctaaagaggagcgcgacagatatcgggtacgtttgcaagagatgggaggggtaatgaa

SEQ ID NO: 90903 - DNA, 671 bp, Homo sapiens
cgtagtgattctctttttttaatgtgttaaggagccgccagagtgttttccaaagcacctgcaccatttcacrtgcccaccagcagcgcacggagattctgatttctccacatcctcaccaatacttataactttttttaataacagccatcctatttagtgtggacaaacatttttatatgtttcagaagctcttttttttccctctatgtgaacaaaaggagagattaaccacttaaacatctgagggtctttttgatatttgaatgcaatacacatttccacagttactggatgcattatattgaggaaaatagagataaaattgtagaaattcatttggaaaattttttatactgaaatgaccttaaaaagaacccaaataagttaattctttcatcccaacccagtattatcatttcacaatgacatgactttagtaatttaggataatttttttctcacattccatattttctcttcttaaactctatgacttcttttgttagctatcatggcagtagatgatagtttacatataatgttccctgtagattatagctctttaaaaacaaaaaaaaaaatgtagttttgaaagtaaccgtaactgatcatgagtatgtattgtgattaatcgtggaaattgaacctttgttgttcccacagggtca

SEQ ID NO: 90904 - DNA, 671 bp, Homo sapiens
cgtagtgattctctttttttaatgtgttaaggagccgccagagtgttttccaaagcacctgcaccatttcacatgcccaycagcagcgcacggagattctgatttctccacatcctcaccaatacttataactttttttaataacagccatcctatttagtgtggacaaacatttttatatgtttcagaagctcttttttttccctctatgtgaacaaaaggagagattaaccacttaaacatctgagggtctttttgatatttgaatgcaatacacatttccacagttactggatgcattatattgaggaaaatagagataaaattgtagaaattcatttggaaaattttttatactgaaatgaccttaaaaagaacccaaataagttaattctttcatcccaacccagtattatcatttcacaatgacatgactttagtaatttaggataatttttttctcacattccatattttctcttcttaaactctatgacttcttttgttagctatcatggcagtagatgatagtttacatataatgttccctgtagattatagctctttaaaaacaaaaaaaaaaatgtagttttgaaagtaaccgtaactgatcatgagtatgtattgtgattaatcgtggaaattgaacctttgttgttcccacagggtca

SEQ ID NO: 90905 - DNA, 671 bp, Homo sapiens
cgtagtgattctctttttttaatgtgttaaggagccgccagagtgttttccaaagcacctgcaccatttcacatgcccaccagcagcgcacggagattctgatttctccacatcctcaccaatacttataactttttttaataacagccatcctatttagtgtggacaaacatttttatatgtttcagaagcycttttttttccctctatgtgaacaaaaggagagattaaccacttaaacatctgagggtctttttgatatttgaatgcaatacacatttccacagttactggatgcattatattgaggaaaatagagataaaattgtagaaattcatttggaaaattttttatactgaaatgaccttaaaaagaacccaaataagttaattctttcatcccaacccagtattatcatttcacaatgacatgactttagtaatttaggataatttttttctcacattccatattttctcttcttaaactctatgacttcttttgttagctatcatggcagtagatgatagtttacatataatgttccctgtagattatagctctttaaaaacaaaaaaaaaaatgtagttttgaaagtaaccgtaactgatcatgagtatgtattgtgattaatcgtggaaattgaacctttgttgttcccacagggtca

SEQ ID NO: 90906 - DNA, 1804 bp, Homo sapiens
tgtccatttcataaagcttaacagagagtttaaagcagggtagacatggtagtactgcaagatgctgtattgaaagacactgaaatcctttctggagggttgaactcttgacttcaaaggctttctgcaaataaaacactatttattgcatttgagctcagaaacaaattaataaaaaaagcacatgaaaaaggcaccattattgagaattagcagaacaatatggtagaatcaatcctgcccagtccttagatattgaaatatttgatatagaatgtgtatgtgtatgaatatataaagtatggttaaagtaataaaagaaaatatcaaaagtatgattaagkagtgagaatataaaaagtagtcagacattaggaaaaaaaacaaatcgaactcctagaaatgaaaaaccaaataattacaattagaaacttaaaatgggttaactattgtataatatggttgaagatggaaatggtgaactgaaagataaagaggaagaaattatctagaatgcaacagagagacaaggagagaaatatggaagataaaataagaaacatggatcgagaatgacaaaatctaatgtaatacaatctgagttccacaaggcaataatagatttgtggagatagagtacttgaaataatggctaagattttacagaattggtgaatgacatggaatcccaagagtaaggaagtctaccttgcttgagatttgcttcttatagatgaacttttagttggtactttttgctggcatgcgaaatatcattctgaacaatttattgtcttatgaatgatgatgtattaccaaagtatctttgttctgtgtttgtaacatttaaaaatgttttttcattatttttcttctcttttgattaggtgccaacaattctaaattcgctacagagaagtgtacaagcagttttggtgggaaaaattcaaattcaggactggtttagtaatggcattaagaaagcagctttaatgcacaagtggccattaaaagaaatatctgttgatgaagatgaccaatgtctacttcagaatgatggattttttctttatctattatgcaaggatggattatataaaataggctctggatacagtggaacagttagggtaatgtgattccttacagttccttaattatacagagttataaccataatgaattgtgttctgtgtgtttctagtttcatttctagaatatgatctaattttagtgtaataatatttatttgaaaaccataattgaaatacatgcattaaatgtcattcacccatttgtattatttttcattgattattaattatgaaaccactgatatactaacttttgttttttttgcagggccatatatacaattctacatcccgtattagaaacagaaaagaaaaaaagtcttggttagggtatgctcaggtaagaaactatccacaataaaccaaaattttcttatcttttacaacatgtgatttgtccttgtttaatcagtaatatcacttctatttaaacagaaatgataatatatttttactaatatggccataataactgaatagtgtagcgtaaagaacactgtctcagaactcataagaggttcaattttagttctggccctgcttcctactagctgtatgactggacaactcagttaacttattgggtcctctgttatttagctttaatatgggattaaacataccttctttagagttcttgtgtaagtgagcctctagataagaattgaagaccacctttatcattagcacatttttttttttaattgaga

SEQ ID NO: 90907 - DNA, 545 bp, Homo sapiens
ccatgacatcctcctcatatcccactccaccccatgagggccaagccacattctgccttctttatttctacctttatcagccctgcagccaaacccttctaagcttccactcctgcgccacccagaccgtaagccccggggggcagaacttgcacttctgaacagaaaccccataaagttatacaaagtcagcaactctgcctacaactgtatggatggctgggttcagtggctcatgcctgtaatcccagcacgttgggaggccgaggcatgtggatcacttgaggaaaggagtttgagaccagcctgggcaacatggtgaaatcgtgtctctacccaaaatacaaaaattagctgggcctggtgggatatgtaatcccagctactcgggaggctgagacccaagcatcacttgaacccaggaggtggaggttgcagtgagctgagatagcaccactgcactccagcctgggygacagagtgagacgctgtctccaaaaaaaaagaaaagaaagaaaaaagaaaaaactgcgtggagagatgga

SEQ ID NO: 90908 - DNA, 545 bp, Homo sapiens
ccatgacatcctcctcatatcccactccaccccatgagggccaagccacattctgccttctttatttctacctttatcagccctgcagccaaacccttctaagcttccactcctgcgccacccagaccgtaagccccggggggcagaacttgcacttctgaacagaaaccccataaagttatacaaagtcagcaactctgcctacaactgtatggatggctgggttcagtggctcatgcctgtaatcccagcacgttgggaggccgaggcatgtggatcacttgaggaaaggagtttgagaccagcctgggcaacatggtgaaatcgtgtctctacccaaaatacaaaaattagctgggcctggtgggatatgtaatcccagctactcgggaggctgagacccaagcatcacttgaacccaggaggtggaggttgcagtgagctgagatagcaccactgcactccagcctgggtgacagagtgagackctgtctccaaaaaaaaagaaaagaaagaaaaaagaaaaaactgcgtggagagatgga

SEQ ID NO: 90909 - DNA, 1264 bp, Homo sapiens
catctagtgcatgcaaaactcatcagttttaactcacttacttcacatataacctacatttctttcaatgctttactgctcctaaaatgctttcaagcaaatcccagacagcatatcattttactcctaactcagtatgcctccataagtgttacagaacttttattacataaccacaggaccatcatcataccttatgaattgacaatattttttggtatcatgtaatactcagtctataatcaaattgccccagttggctaaaawatatctttttataggtagtttgtttaaaacaaaattcaaataaaattctcacatgatgcttagttgttagatctcttttgtctcttttagtctagaacagttcccttcacattattttcataccattgacttatttgtaagttattgattatgaaaataggtaattcaaacatagattcccatagataaattatatggcaacccatgttacacattaaatcttatggaacaaaggcattctaatcctacttgtaagtatttatttcccccatcattcatcaatactgtacttgtcaattcaccagcattttttgagtgcctaagatggtttgaacaaaagacattttaagggaatattagcagaggggaggaaaaaatacaaaagaaaatcgagtcaccaaacttttaggctcattaagtgtaagaacaggactaattttaaagttatactattttactctaaattaaaaattcggtttatcaatttcatagtgaaaacagttataaatgtatttttgtgtggaattaagcatctaattgttttgtaaaccaccttcctctcttctttcctttcttccttcttccttccttcctccctcccttctttccttccttcctcccttctttccttcctctctttctttccctccgttcctccctgccttccctacctacctccctgttccttccttcctctctttctctttcttctttccttctccctttctttttttctctctcttctccccttccttccttctctccttccttccttcctgccttccttcctgcctctcttctttttttgttaaattttaactacagttagaagtcattggtgtggaattcagcattttttctaatgtattataatatattttaaatattttatctttgaaaagatcagatagtttaagaacgtttgaaaaagggcaagttgacataattacaatctacccagaattattgaggataatttacatgtattcaatgcata

SEQ ID NO: 90910 - DNA, 1264 bp, Homo sapiens
catctagtgcatgcaaaactcatcagttttaactcacttacttcacatataacctacatttctttcaatgctttactgctcctaaaatgctttcaagcaaatcccagacagcatatcattttactcctaactcagtatgcctccataagtgttacagaacttttattacataaccacaggaccatcatcataccttatgaattgacaatattttttggtatcatgtaatactcagtctataatcaaattgccccagttggctaaaatatatctttttataggtagyttgtttaaaacaaaattcaaataaaattctcacatgatgcttagttgttagatctcttttgtctcttttagtctagaacagttcccttcacattattttcataccattgacttatttgtaagttattgattatgaaaataggtaattcaaacatagattcccatagataaattatatggcaacccatgttacacattaaatcttatggaacaaaggcattctaatcctacttgtaagtatttatttcccccatcattcatcaatactgtacttgtcaattcaccagcattttttgagtgcctaagatggtttgaacaaaagacattttaagggaatattagcagaggggaggaaaaaatacaaaagaaaatcgagtcaccaaacttttaggctcattaagtgtaagaacaggactaattttaaagttatactattttactctaaattaaaaattcggtttatcaatttcatagtgaaaacagttataaatgtatttttgtgtggaattaagcatctaattgttttgtaaaccaccttcctctcttctttcctttcttccttcttccttccttcctccctcccttctttccttccttcctcccttctttccttcctctctttctttccctccgttcctccctgccttccctacctacctccctgttccttccttcctctctttctctttcttctttccttctccctttctttttttctctctcttctccccttccttccttctctccttccttccttcctgccttccttcctgcctctcttctttttttgttaaattttaactacagttagaagtcattggtgtggaattcagcattttttctaatgtattataatatattttaaatattttatctttgaaaagatcagatagtttaagaacgtttgaaaaagggcaagttgacataattacaatctacccagaattattgaggataatttacatgtattcaatgcata

SEQ ID NO: 90911 - DNA, 676 bp, Homo sapiens
gtttttattttcaatctatgacttgactggtattaaagctgctatttgatagtaattaaatatgttgtcattgatataaacctgtttggttcagcaaacaaactaaaatgattgtcatagacagtgttttatttttcctgttggtgttgctgatttgtgagcatgctttaagatgaaaaaagcatgaatgataacttccttaaaaaggtgcggcatccaattcaaatattttcgtcctgattttaaagctggttggtgtagtgctattaaaatttcgttcagttaattttccttttgaaaacttgttcgcacgttgtttagggtgcccttacttcagcaaagaagaaggagtaggagagccttagaattttttgaggaaaaaaaaacctataacatacaatgtactgtatcaaactattttacatgaatgacacaagtattctgaataaaaaataattgaacattgttaaaaacaaggtgttatgtaataaatttatttttcataaatcaaaacatggagtcagctgtcttttttatatgtacaaagggtttttgttttaattttaaawtatgccttaataagtagcctctgaagaaatctcttcacttttcatgaagaatatctatgtgtctgtctccataatagagtactgacttgagtcttagatatggatcc

SEQ ID NO: 90912 - DNA, 499 bp, Homo sapiens
gctacacatgctgcaatgagacaggaaagtacaacaatcccttaattctatccaacttttaaatttctcactggtcattcctgtaagtaaaaaaaaaaaaaaaaaaaaaaaaaaaaaaaaaaaaaaaaaaaaaaaacagtttaaaaattatctaaaaatgtaaataaataaaaaattacctaagcctagactctaaccctgttttacatayaaacacaaggtatctttcaatcttattttttaaattaacaatagaatgacatttttgggttcagttttcacacatgtatagatatgtgtgtatgtgtaattacttacacagctaggctacaggacagttaccttaccaccaaacgccacctctgcttatctatctgcagtcatcctcctgtgaccccaaaccccaaacctggcaatgactgatctgccatcccttacgatggtcttgtctttttgagaatattgtatatattgaaatcatacagtatgtagccttttc

SEQ ID NO: 90913 - DNA, 776 bp, Homo sapiens
aggattaagggagtttttacatggaaggcacttgcagcgcattacaaatgctcaatacacttccagttccttctctgatactcagttatctctatggctaatagatggtcatggcctagtctgaattgcttatttggtgtctctaggtgttcttgtgccaagatatctgcttctagattctgtgacctgatgattagccttggccattgctcatattcctgcttacagtaaaatctggaagtgctgtgcctattctgactgatttctagggaaggctttgctttgcctgaatgtgagcttccaaagactagaggtgcaccagcctgccatgcctcagtatcttgcatctgtgtgccctgtgtctgagcccatgctccttctgccatgatcagcagttctgcctgccttctggattggtgcttcctgttacagtgacagaaaggctagagggtgaaagataagacctattctttccctgcttggaactggaactgcaaaacaggttcctactgtccagaatctacataccatggttctttctgtgcaagagcactaaatatctaccaagagagctgagctcccaggtcctactgttcgatcatgtcaagcccaaggatgtgtaggctacatttccatttcttacagattaatggaacgtggaaatgggggcacacatcctgggatgaatgytgcctcagatgtttcccctgagtctgaggacattcactcatctttccctctcatgaaatggcaaagccacaagatggaacctgcct

SEQ ID NO: 90914 - DNA, 1476 bp, Homo sapiens
aagtactgttagcagcttcttgtttcgtgaatgcctccataacattttccattgtgggtatattttgttctccctctgagctgaactttttctgtttaaccaattgagaagaaccagcagcagcagcagggcaataaccacactaatggaactggccacccagggaatcaagacagcagtcacacacagggacccccgttgaagaaagtgagagttgttcctcctaccactacctcaggtggacttatcatgacctcagactatcaggtattccaagtttattttgtattgactgcatgtcagtgtttacatatgggtttatgatcgtgggaaaatgtgatttaattgagaaatactgacgtctgtatacccagggaaatacattaacatgaaatgttactggcatggaaaagtactgacagtggtatggtagcaagggtttagacttttgaaccagacttggaatgatcaaatacaaattatgccatttattaactgtgtgaccttggacaagtaggataatatctcctggcgttttttcatctgtaaaatgaaactagtaaaacctaacttgcagctgttgtcagattagacatgaagtggcttgacacctagcttatggtaggagcttgatagctattgttttggaacaatgtttcacagtgattaagaacataggctttcagatcccagtctggccacttacttctctgtatccttgagtaagtgattcagatgttctcagtttccatttgtagactggataatgatcaatgtgaagctgtagtaaggattaaatgagataactctgggaggttaagtgttgcagccatttcaggaaactgaggcttgtagaggttaaataactttcacatggatcccsagcaagctgtagatgcaggactcatatttgatctgaccacaaaggctgttatgttgcctgcttagggatcctatcatggcattgtcagttacgttgtggaaagaccctctttgaaaattgtataccacctccttttctcttctgcttattctaaccatattcccaactacacaagggttcagtgtgggaaggatactgaaaatctgaccaattagaattatttacacacaaaaaaaaagagagagagaaagagatgttattaaactgataaggtcccgagtgctcgttactgtactttcagaattaggtattaactctttcttttggttaggggagaagtccagcccatcacaccatggaaatcactgttgtgtgagtagtaattctcttccagttagctaaacaaggacaccaagggcagacagctgtgggagttgttggttccagtatctttttcttcctttccggatgggaagagtgcatctctcttggcccacaaatgtgtttgcacactaaggtgatggcatccttagaaggaagcagagcagtgctctgaccttcgcttctggaaccgagaaaatgatgccatgctg

SEQ ID NO: 90915 - DNA, 975 bp, Homo sapiens
gcatgatactgaggattgtgcaacaacagctgggctgactcttgtggatatgcccacaggctcgggggagcaaagccaaatagtcataatctttgaacattgcatttgcaatatccctgatgtggcatttatcacttccagtcagcacattatgagtggctgaaatgattaaaactaatgttgaaaactactctcattattttcttaatatagcaagaggctgaaactttgtccttttatttcttttctctctgtcatcggctttctttgccacctaaaaaaaaatgcaggtacccaggcacaacttacatctgcttgtttcagattagagcagaagggaatatgttcactcatcatccccatgctcatatcacaagctccaaaaacagagcttttgtgctctcgcttcttgccacagacatatcaagacagaggatctcaatgagagaatcagtgcacaaccaaatggtatatagatgaagtagcagagagtggcccgggcaaagagtgaaattacctgaagttctggagacacactcctactgcaaactctttgcatcaacatataagactttcctcttcgtactctgcaaaaacagaggaggataccactctgctaggtagactgatgctaccattccctgcttccaccagacctgagtcttactgagctacaaaactagatgagacctaagagagcagatgggattgaagatgaatgaactgacagcatctgtgaatacctccggatagtactgcaatcatcatcacactaggaagcatcagtcattgttctgtttgaatttgttatgaaaataaaacctccacaggatggctagagaagtccccagtgtctatagttttccctcacaagagcctttcacctgatcctgattcagatccagatctggagatgggagtatctccccatactaagctttatcccyagccccagagaagataaatccttccttc

SEQ ID NO: 90916 - DNA, 1159 bp, Homo sapiens
tttgtcaaggttaagtctgtcccaggmactcttaaaggcactagggatataaagatataagacactcaaggagttaatagtataatgaagtagaagtaatgattaaacagtatatgaagtatcacaagatggatcatgaggaatactctaggagaatgtaggagagatacctaacccaagtttgaggttcaagaaggacaaagaatgagcaggaataacacaggtaaagatggggaggggaagagcgttctagcagtaggagcaacatgagcaagggcctaggtgtgcatcccataaggcttggtctggctgggcttgaatctgagtaggagtagaaggagacaagcctaggaggtgagtagtggtgggtcctgaagagtcatacatgtcccttgaggaatttggactttatgctgaggtcaaaaaaaaaacaaacccatcaagggtttaggtagagaataacacaatcaaattgatatttcagaaagtggactggcagcaatgaagggaataaattctcaagggtccaggatgtcggaagttgctatggtttggatgtggtttgttcctccccaagaactcgtgttaaaatttggtctgcaatgtggtattgagatgtgatgggacctctaagacatgtttgggtcacaggggctctgcctttataaaggaattaatgttgttcttacaggagtgagttagatctcatgggaggggtgtagttatcatgacagtgggttgttacaaaagtgagttggaattcggcttccttggcttgctcggcttcctcttccaccaggtgatacctcctgccatgttataaagcagcatgaggccctcaccagatgttggcaccatgctcttggatttttagcctccagaactgtgagacaaaataaacctctttcttatataaagtatccagtgtgtggtgttctaacagcagaaaatgaactaaggtagcaggtaagtcagtgaaggggcagttgcaatggtcctggagacaaaggacagtgtcctgaaccaaacggcactgccacatcagtgaggcctacagtcttgtaatcaagtgacaatcaaacataggagacacagtgacagcatgatggggagaatgaggctgtttgtgtacacatcatttccacacaacttggaaata

SEQ ID NO: 90917 - DNA, 579 bp, Homo sapiens
caaagtggaatatttgaaaggttctaatccaaaacatcttcccagacaacctgcatggatgtcttactgttagactcattcctctgaaataatgtatccaagagctaccattcaagtgaaaatttctttgctatgagtcattatggcaaaagattaaagatcagcagttcaaattatcttctaaagggtattgtgcatgtggttttgatctgggaagaaatgagaaatgctgcaagctcaggtactgacaatggaataaartgaatacttggcaattgtcgataatcaaataaacaaaatagaacattttttggtgtcattttagagaagattcaagcatgacatggaactacctttatggttatctctacactgctaattaatgactattatctttgaattggtttaacataatccagaaatttatattgcttggtgcaacgtagatagatccttaagtgggatgtgtctatgcatttcagatgcctcaaattatataaaatcaatgttttgaaggttgtccaagtattttcgttttcatgaggaagatttggaatggttgatttatatatcattggt

SEQ ID NO: 90918 - DNA, 579 bp, Homo sapiens
caaagtggaatatttgaaaggttctaatccaaaacatcttcccagacaacctgcatggatgtcttactgttagactcattcctctgaaataatgtatccaagagctaccattcaagtgaaaatttctttgctatgagtcattatggcaaaagattaaagatcagcagttcaaattatcttctaaagggtattgtgcatgtggttttgatctgggaagaaatgagaaatgctgcaagctcaggtactgacaatggaataaaatgaatacttggcaattgtygataatcaaataaacaaaatagaacattttttggtgtcattttagagaagattcaagcatgacatggaactacctttatggttatctctacactgctaattaatgactattatctttgaattggtttaacataatccagaaatttatattgcttggtgcaacgtagatagatccttaagtgggatgtgtctatgcatttcagatgcctcaaattatataaaatcaatgttttgaaggttgtccaagtattttcgttttcatgaggaagatttggaatggttgatttatatatcattggt

SEQ ID NO: 90919 - DNA, 579 bp, Homo sapiens
caaagtggaatatttgaaaggttctaatccaaaacatcttcccagacaacctgcatggatgtcttactgttagactcattcctctgaaataatgtatccaagagctaccattcaagtgaaaatttctttgctatgagtcattatggcaaaagattaaagatcagcagttcaaattatcttctaaagggtattgtgcatgtggttttgatctgggaagaaatgagaaatgctgcaagctcaggtactgacaatggaataaaatgaatacttggcaattgtcgataatcaaataaacaaaatagaacattttttggtgtcattttagagaagattcaagcatgacatggaactacctttatggttatctctacactgctmattaatgactattatctttgaattggtttaacataatccagaaatttatattgcttggtgcaacgtagatagatccttaagtgggatgtgtctatgcatttcagatgcctcaaattatataaaatcaatgttttgaaggttgtccaagtattttcgttttcatgaggaagatttggaatggttgatttatatatcattggt

SEQ ID NO: 90920 - DNA, 1242 bp, Homo sapiens
aatatataaatataatatagtaaaaaaagttttacctttaattcggcccctgtcccactgttgccttaggtcacaccctcacaatttctagtcaggatggtttcaacatgctctggacactagctggtgttctttcctctgttcttgctctgtcctagggcaattcattctctattcaattgttaaaaccatgttttaaaaagacaaacactattaaagcttttgatgtttacccacagcataacaagaaaatccaaaagactgtctacaagccagagagggcttgaacagattcttccctcgcagccctcagaaggaaccagccctatcagcaatttgatttaggacctcctgactccagaactgggagacaataaagttctgttgtctaagccactcaatttgtggtactttgttacagcaggcctaaaaatcacayacagctcttaaatttgaatttattcataatttttaaatctggatatggaaaaagtggaccgttatcttactatatgtgattattatgatggagctgctttgaaggatccaaaatcaaaacccatcttagacttttttttacatttcctactttgcattttgaaactaagggaggagaccacccctcatactgtcttatgcccaatttctgcctccaaagaaagaaaaagtaaaaactaaaaggcagaaatgaaatccacaagcagacagcccggcgccacaccctgggcctggtagttaaagatcgacccctgacctaatcggttatgttatctatagattacagacattgtatagaaaagcactgtgaaaatccctatcctgttttgttccaatctaattaccggtgcatgcagcccccagtcacgtaccccctgcttgctcaatggatcacgaccctctcacacgcactcccttagagttgtgagcccttaaaagggacaggagttgctcactctgggagctcggatcttgagacaggagtcttgccgatgcccctggcccaataaaccccttccttctttaactcggtgtctgaggagtcttgtctgtggctcatcctgctacaaaaccatttgaatgtaaccaataacaacatctctttctatgaaatccctggtattcatctactagggaggttttggggaatccacagttactttgattaatatttaaaatggattttgatggtgaaaaaacacaagtctaggccaaagcaaatttgacaggaacagcagcttccct

SEQ ID NO: 90921 - DNA, 774 bp, Homo sapiens
caagaaacaggattgagcaactgggaagaatacaacagtgagggaggaaagcccatcccagtggtcattactgctatgggtgactgggacgtaatccttatgggatctttttctctttttgagacggagtcttgctctgtcacccaggcaggctggagtaaagtggggcaatctcagctcactgcaacctctgcctcccaggttcaagcgattctcctgcctccgccttccaagtagctaggatyacaagcgcatgccaatacgcccagctaatttttgtatttttagtcgagacagggtttcaccatgttggccaggttggtcttgaactcctgacctcaggtgatccacccgccttggcctcccaaagtgctgggattacaggcataagccactgcacctggccccctatagggatcttctgagggacttcattgaatgtgcctcaattattcacccaaattacagaagatagcagtatttatccatagcttctattctccatgggtcaagggttttcctgatttggttccaggtttgagcatgtgatggctgagtggactctcataggctggagctggagagaagcccagagacagaaagcaagagatatgcagtgcagctggggaggtcttgcctggctacatttgcatgaagctattggctatagcaatggctgaagagaaagctgagctgagaggacataaaatgaagcaaggatggagaagagatggaacaatcttatataaattggccaaagaagtcattagacca

SEQ ID NO: 90922 - DNA, 678 bp, Homo sapiens
atttaggaaagaaaccacttgagggtacgactgtaagttgtctgacaagctcaattttttattgtaaaataatactttaaagttttgtaaactatatgtttgttacagaaaacttaagacaaacaaaaaaagtataacagaggaaaaacaacacccacratccctcattcaacaaaaaatgcagctatcattatggactgtttatctaccatcatctttgcgctcaaactgatgatgcactttaagaccacaacatttctgaacagtattaaagactcttggtacccatcatttttggtggctgcataatgtttcttttacatatagactataatttccttaacccctcccatgttgttgaatgttttgtttccaatttttgttattgtaacttatgctgtcctgaatatctgtgtgcacaaagctttgtttacatttctgtttatttccttgtgagatattcttagaattgtacaactcagggaagagactgagttttttaaatttttatttatttatttattatacgttaagttctgggatacctgtgcagaatgtgcagttttattacacagttatacacgtgccatggtggtttgctgcacctatcaacccgtcatctacattaggtatttctcctaatgctatccctcccctagccccccaccccacaacagg

SEQ ID NO: 90923 - DNA, 678 bp, Homo sapiens
atttaggaaagaaaccacttgagggtacgactgtaagttgtctgacaagctcaattttttattgtaaaataatactttaaagttttgtaaactatatgtttgttacagaaaacttaagacaaacaaaaaaagtataacagaggaaaaacaacacccacgatccctcattcaacaaaaaatgcagctatcattatggactgtttatctaccatcatctttgcgctcaaactgatgatgcactttaagaccacaacatttctgaacagtattaaagactcttggtacccatsatttttggtggctgcataatgtttcttttacatatagactataatttccttaacccctcccatgttgttgaatgttttgtttccaatttttgttattgtaacttatgctgtcctgaatatctgtgtgcacaaagctttgtttacatttctgtttatttccttgtgagatattcttagaattgtacaactcagggaagagactgagttttttaaatttttatttatttatttattatacgttaagttctgggatacctgtgcagaatgtgcagttttattacacagttatacacgtgccatggtggtttgctgcacctatcaacccgtcatctacattaggtatttctcctaatgctatccctcccctagccccccaccccacaacagg

SEQ ID NO: 90924 - DNA, 583 bp, Homo sapiens
actcaaggtagcatgatcactccttcatgccaaaaaggatattttccctgtgggaatcttaccaagtgcttaccccgagcttttcactgtgatggcaaggatgactgtgggaacggggcggacgaagagaactgtggtgagtgctcccctcggctccccatgtgtgcctcactttatgaacaccccaaaactgtgggtcggttggataatgattgtgataaactaggaaagctgatttggtgttctgtagggattycctttgaaacacaaataatgactccccaatgtatttgtgataacgacctgaatttttgtaggtacaggttacttaagtcagaaatacagtatcataaaatgttatattttataaaaataaaattatatttgaaaatctacttcaatactcatattttaattataagcagttttctatgaatacctccttatggctggtaatttggttcagcttcaagaatattcgtaaagtggctgggagtggcggctcatgcctataaccccagcactttggaaggccgaggcaggtggctcacctgaggtcaggagttcgagatcagcctggcca

SEQ ID NO: 90925 - DNA, 583 bp, Homo sapiens
actcaaggtagcatgatcactccttcatgccaaaaaggatattttccctgtgggaatcttaccaagtgcttaccccgagcttttcactgtgatggcaaggatgactgtgggaacggggcggacgaagagaactgtggtgagtgctcccctcggctccccatgtgtgcctcactttatgaacaccccaaaactgtgggtcggttggataatgattgtgataaactaggaaagctgatttggtgttctgtagggatttcctttgaaacacaaataaygactccccaatgtatttgtgataacgacctgaatttttgtaggtacaggttacttaagtcagaaatacagtatcataaaatgttatattttataaaaataaaattatatttgaaaatctacttcaatactcatattttaattataagcagttttctatgaatacctccttatggctggtaatttggttcagcttcaagaatattcgtaaagtggctgggagtggcggctcatgcctataaccccagcactttggaaggccgaggcaggtggctcacctgaggtcaggagttcgagatcagcctggcca

SEQ ID NO: 90926 - DNA, 550 bp, Homo sapiens
aaaggagggtggagaggaagagtgggcactgggaaacatgagcagagccaagtctcaaacaaaggctcattgaatttgttcacctttgtgatttcttcaaaccacctcgctttttatataggctgccatattgcactgtgcccattgacttgtcagccctaccaaagccaagtccgggccctctccatcatatttcatattcactccactatgcccagttcaggatcttacatgctaaggacatttactgcccaagggtggatagtttggcctgtgacctctctttctccttcctcctttttcatgactctataaagaattatgattgccttcaataagttaaagcattcttcagccaagaacccccttgcacatggcctcccacagaccattatgggggtcaaccttcacacacgatgccatgtgccatggaggagacttgrgtggaggctgtagggttgggttctggaaagggagcatataaatgtaggttgagtaggcacatacctgaaggccctttgagtgacagcctagtaataatcaatcatca

SEQ ID NO: 90927 - DNA, 691 bp, Homo sapiens
ttttgttttttgttttttgttttgttatgttttcttttgtttctgagacggagtctcgctctgtcgcccaggctggagtgcagtggcgcgatctcggctcactgcaagctccgcctcctgggttcacaccattctcctgcctcagcctcccaagtagctgggactacaggcgcccgccaccrccccagctaattttttgtatttttagtagagacggggtttcacctgtgttagccaggatggtctctatctcctgacctcatgatctacccgccttggcctcccaaagtgctgggattacaggagtgagccaccgcacccggcctgggattctggtacagttttatatcaatattttatcaagcaaaaagttgaagccaacacccgaagctgccagatatggagaacccagtgacaattttgaattaacctgagtgaccctttttctttcaaagttgctaaattgtttcacagatatgcttctgtgggatgtaaataacagagtatatatgacctttttaaaaaaattctttcttttctgtgttctaaggaactggaaactaaaaactgccctggcctatcataagggagaagatgggagtcttttgctgtccatcttgaatgtaattcacattgtccatgagtgctgatctaaccccatatgcctctgcccgactgcctttatgaaata

SEQ ID NO: 90928 - DNA, 691 bp, Homo sapiens
ttttgttttttgttttttgttttgttatgttttcttttgtttctgagacggagtctcgctctgtcgcccaggctggagtgcagtggcgcgatctcggctcactgcaagctccgcctcctgggttcacaccattctcctgcctcagcctcccaagtagctgggactacaggcgcccgccaccgccccagctaattttttgtatttttagtagagacggggtttcacctgtgttagccaggatgrtctctatctcctgacctcatgatctacccgccttggcctcccaaagtgctgggattacaggagtgagccaccgcacccggcctgggattctggtacagttttatatcaatattttatcaagcaaaaagttgaagccaacacccgaagctgccagatatggagaacccagtgacaattttgaattaacctgagtgaccctttttctttcaaagttgctaaattgtttcacagatatgcttctgtgggatgtaaataacagagtatatatgacctttttaaaaaaattctttcttttctgtgttctaaggaactggaaactaaaaactgccctggcctatcataagggagaagatgggagtcttttgctgtccatcttgaatgtaattcacattgtccatgagtgctgatctaaccccatatgcctctgcccgactgcctttatgaaata

SEQ ID NO: 90929 - DNA, 691 bp, Homo sapiens
ttttgttttttgttttttgttttgttatgttttcttttgtttctgagacggagtctcgctctgtcgcccaggctggagtgcagtggcgcgatctcggctcactgcaagctccgcctcctgggttcacaccattctcctgcctcagcctcccaagtagctgggactacaggcgcccgccaccgccccagctaattttttgtatttttagtagagacggggtttcacctgtgttagccaggatggtctctmtctcctgacctcatgatctacccgccttggcctcccaaagtgctgggattacaggagtgagccaccgcacccggcctgggattctggtacagttttatatcaatattttatcaagcaaaaagttgaagccaacacccgaagctgccagatatggagaacccagtgacaattttgaattaacctgagtgaccctttttctttcaaagttgctaaattgtttcacagatatgcttctgtgggatgtaaataacagagtatatatgacctttttaaaaaaattctttcttttctgtgttctaaggaactggaaactaaaaactgccctggcctatcataagggagaagatgggagtcttttgctgtccatcttgaatgtaattcacattgtccatgagtgctgatctaaccccatatgcctctgcccgactgcctttatgaaata

SEQ ID NO: 90930 - DNA, 655 bp, Homo sapiens
aggacctggcatcaactcctgtgataagccactgtaatcaatattttgtttgttttaaaacgaattacgttcactttttcctttgaaagcttcctcttgtctcaaactccttggctatgcctatgatccccatagtccacatatcctggattagcatctatactgcacactccagaatagaatgagtatctttagataatctctctctgttatttaggttgacagtatgttagtaaacactgtggcaagaaagaagttgcacactaaaacaggttattatggtgagtttgttgaacgaacagttttaacaaaggccaaacttcctcggttgtcttttttttttttcttttgagatggagtttcactcttgttgccctggctggagtgcaatggcttaatctyggctcactgcaacctccgcctctcaggttcaagcgattctcctgcctcagcctcccaagtagctgggattacaggcgtccgccacaacacccggttaagtttttgtatttttagtagagatggggtttcaccatgtaggccaggctggtctcgaactcctaacctcaggtgatccacttgcctcggcctcccagcgtgctggaattataggtgtgagccaccatggctggccctcagttgtcttcttattttc

SEQ ID NO: 90931 - DNA, 1531 bp, Homo sapiens
tagaaaacaattttatgcaacttatatcaataacctaagataaaagaatagccaaaggttatatgtaaattactaattatctaaaggaagcaaaactgatttactgcttaatttatgttagctcttctgttaggcaaataactattctgaaagtaataataaattgtccacatctacaggagatacgtgtttcatgttaaatgatataacacaaaaccagcttctaagaatagcatatttcttgcactttgattagaaaactacagctcttgcccaggtgcaatgactcacacctgtaatcccaacaatttgggaagctgaggtagaaggactgcctaagcctaggtgttcaagaccagcctgggccatacagcaagacaccatctccaataataataaaaaaaagaatgaaaaaaagaaaactatagctatcgtatagaattgtttaaacaattatgtgttttctgaaagtcaaagataatttaccaattatagatgtcattggagttcacaatgtcactacttcagcatgaatagaaataagaaataagaagctaacacttttactcaagcaattttagagaaatagactgagtagaatcttgctaacctgtacgtctatggaaattaatgttattttatggcaataacttggcatttttaagaacaaaatatacttttatrctagtagaaaaatttaggatggcaataataaataataaaaataatcaaatggtaaatttgcaaaatatataatgacttttaaagtttttaattataatcttacatagtttgattgaaaatacttaccaagtatagatttgaaatttggatgctattgtaccataagctattagtagttgatgagtgtgtgcttctaagtcattctaagttaatttccaaagcaagccattaggaccaaagtaataaatattaattgctataaatgcataggtagaaagccagaacttgaatgccgtaagtctgtaccattactcaacacaataacatggtacaaatgtatacttgcataacataataaccatgcaattacatagtctttctacaccaacataaaaagcagttacacacacacacaaactcacacacacattcatttaaatgaaggaaaaagtagcagaagcctttttttattattttacattattgtcatatttcatagaatttataacatgatctaaagcagtttgccaacattttaatttaattctctaagactgtaatttagcttgctgcatcttaaatttcctactgaaattctcagtcattttccttatattactgttataaacttgagttagagccatatagtttttgagaggtactccactgtagtgtggttctaaaaattatttctcagaattacatagctggattggtatcctggaattcttaaaaatatctctctaaaagaatattctaagtgcattagaaatgctccactgtagaaataaatagtaaagagaaataaagatataaagtgttcaaaatgtgactataatgaaaataa

SEQ ID NO: 90932 - DNA, 1531 bp, Homo sapiens
tagaaaacaattttatgcaacttatatcaataacctaagataaaagaatagccaaaggttatatgtaaattactaattatctaaaggaagcaaaactgatttactgcttaatttatgttagctcttctgttaggcaaataactattctgaaagtaataataaattgtccacatctacaggagatacgtgtttcatgttaaatgatataacacaaaaccagcttctaagaatagcatatttcttgcactttgattagaaaactacagctcttgcccaggtgcaatgactcacacctgtaatcccaacaatttgggaagctgaggtagaaggactgcctaagcctaggtgttcaagaccagcctgggccatacagcaagacaccatctccaataataataaaaaaaagaatgaaaaaaagaaaactatagctatcgtatagaattgtttaaacaattatgtgttttctgaaagtcaaagataatttaccaattatagatgtcattggagttcacaatgtcactacttcagcatgaatagaaataagaaataagaagctaacacttttactcaagcaattttagagaaatagactgagtagaatcttgctaacctgtacgtctatggaaattaatgttattttatggcaataacttggcatttttaagaacaaaatatacttttatgctagtagaaaaatttaggatggcaataataaataataaaaataatcaaatggtaaatttgcaaaatatataaygacttttaaagtttttaattataatcttacatagtttgattgaaaatacttaccaagtatagatttgaaatttggatgctattgtaccataagctattagtagttgatgagtgtgtgcttctaagtcattctaagttaatttccaaagcaagccattaggaccaaagtaataaatattaattgctataaatgcataggtagaaagccagaacttgaatgccgtaagtctgtaccattactcaacacaataacatggtacaaatgtatacttgcataacataataaccatgcaattacatagtctttctacaccaacataaaaagcagttacacacacacacaaactcacacacacattcatttaaatgaaggaaaaagtagcagaagcctttttttattattttacattattgtcatatttcatagaatttataacatgatctaaagcagtttgccaacattttaatttaattctctaagactgtaatttagcttgctgcatcttaaatttcctactgaaattctcagtcattttccttatattactgttataaacttgagttagagccatatagtttttgagaggtactccactgtagtgtggttctaaaaattatttctcagaattacatagctggattggtatcctggaattcttaaaaatatctctctaaaagaatattctaagtgcattagaaatgctccactgtagaaataaatagtaaagagaaataaagatataaagtgttcaaaatgtgactataatgaaaataa

SEQ ID NO: 90933 - DNA, 775 bp, Homo sapiens
tgtggcattattatttatcaattaaactaaatttttaaaaattgaaaatcattctgttgcactcattaattatgtacatggtatttatttgggatgggaagacataaaaaaagcttcatttctatggatcaccatggtacagaatgaagacagaggttactgagataatgtacgttttctaaaaatttgcagaaactttaggaatggctttggaccttttaagaattttcttatttcctttggctgtcatctggattattgggtagctacacagttaattaaagcttcttatgacaaattagatgcatgtgaaaacctatacacatttactctatagggaaatggattttacataaataggtaatttatttataggtaatttgacccttttctccagatgcattgaagattttttatttagtgttgaccttggataatctgatgactatatagcttgggaatgtttatcttgtatagtatctagcaggtgttctctgaactccttgtatatggatgtctacctctctagagatattagggaagttttcttcaattattttcttaaatatgttttccaggtggcttactttgttttcttctctrtcaggaatgcctataaattgtaggtttgtttgttttatataatcccacatttcttgaaggctttgttcattttgaaagattattttttctttatttttgttcgattgggttaattttaaataccaactttcagactctgaaattctttcttccgtttggtctagattattgt

SEQ ID NO: 90934 - DNA, 560 bp, Homo sapiens
gtgaaagtgtgaaactattatattgaacatttggatagaaaatcttccaaaatgtgtatagattctataatctttaaaatatattttgtgcagtatatttttaaggtatattaaaaacacaggcctggcgtggtgsctcatgcctgtaatctcagcactttgggaggccaaggcgggcagatcacttgaggtcaggagttcgagaccagcctggccaacatggtgaaaccctgtctctacttaaaaatacaaaaattatctgggtgtggtggtgcatgcctgtaatcccagctacttgggaagctgaagcagaagaatcatttgcacccgggtgatgaagattgcagggcgctaaggtcgcgtcactgcactccagcctgggtgacagagtaagactctgtctcaaaaaaaaaaagtcagaatgaagaccacttactgtttgttacaaaggaacgaaaccataggaatctgcataatttattacatgtttcacactttgtgattacacatttgatatacctgttactcttacatcttatactttttaaagagagcattca

SEQ ID NO: 90935 - DNA, 560 bp, Homo sapiens
gtgaaagtgtgaaactattatattgaacatttggatagaaaatcttccaaaatgtgtatagattctataatctttaaaatatattttgtgcagtatatttttaaggtatattaaaaacacaggcctggcgtggtgcctcatgcctgtaatctcagcactttgggaggccaaggcgggcagatcacttgaggtcaggagttcgagaccagcctggccaacatggtgaaaccctgtctctacttaaaaatacaaaaattatctgggtgtggtggtgcatgcctgtaatcccagctacttgggaagctgaagcagaagaatcatttgcacccgggtgatgaagattkcagggcgctaaggtcgcgtcactgcactccagcctgggtgacagagtaagactctgtctcaaaaaaaaaaagtcagaatgaagaccacttactgtttgttacaaaggaacgaaaccataggaatctgcataatttattacatgtttcacactttgtgattacacatttgatatacctgttactcttacatcttatactttttaaagagagcattca

SEQ ID NO: 90936 - DNA, 560 bp, Homo sapiens
gtgaaagtgtgaaactattatattgaacatttggatagaaaatcttccaaaatgtgtatagattctataatctttaaaatatattttgtgcagtatatttttaaggtatattaaaaacacaggcctggcgtggtgcctcatgcctgtaatctcagcactttgggaggccaaggcgggcagatcacttgaggtcaggagttcgagaccagcctggccaacatggtgaaaccctgtctctacttaaaaatacaaaaattatctgggtgtggtggtgcatgcctgtaatcccagctacttgggaagctgaagcagaagaatcatttgcacccgggtgatgaagattgcagggcgctaaggtcgcgtcactgcactccagcctgggtgacagagtaagactctgtctcaaaaaaaaaaagtcagaatgaagaccacttactgtttgttacaaaggaacgaaaccataggaatctgcataatttattacatgtttcacactttgtgattacacayttgatatacctgttactcttacatcttatactttttaaagagagcattca

SEQ ID NO: 90937 - DNA, 843 bp, Homo sapiens
taagtgaggacaaatttgaattaaatatacgtgtgtgtgtgtgtgtgtgttttaagcccagtttcttctcaagttgtacggtaataagacatgatatatgtgtgccaatggtgataataacagccagctgttttctagatagaagtccttttggacatagttttatacttgtgtgtaaagtataaataagttattataaagtaaaataagcatttattatggctgtattaattaccagtgtacaaaaagtgctgcagaaatagtctagataacaatatgtttcttggaggggattaaatgttccttcagcaaatgtgttcactttctaaattggttagtaaactgtcttatagataccaaggtatacttaatgctggtcatggattagcgggtcaaaattgataagtttgaaaaattaaaagacaaaaacaaataaggaaatcatgatgttttatcggggtgattgtttctggactaggccctcgcagaacaaacaagtgctccctgaccccctgggctgagcgcattgtgcaccctggtaggtgatggaggccttggccacattgacccaaaagcagtgcccgtgaaggattgctcaaaggttccatgtgcccagggcttaggaatgctccatctcaaayggtgtttttaaaattgtattttcttcaggattaaaatcaccaactgaaccttccaaggagaccaactgagtggaaatcatcttcagtaactgctaatgggagctggatttaaaaccgtcaacttaaagtaaaaaagcttatgtctcctgtactgttacccagccgggtaaattgttttttagtgtggaatcatgtacactta

SEQ ID NO: 90938 - DNA, 644 bp, Homo sapiens
tcaaatacactatgttcaaatgtagagatggaaccatagtgaatatgagaagagggagggatgaaaacacagaccacagagaatttgcagggcaatgagacgactctgcctgatactaccatggtggatacacgtcatgatacacttgtccaaacccacagaatgtacaccaccaagagtgaatctcccaaatttctactctgagtctgtatccatacattttacacttaaaagcccactaaatatcatgaggtgggggttgtgagttgacgcctgtaacatcaatttcaaayaaggctgttcgcaatctggcctccccagactacattcccagcctcatctcttttcactccctttgcccatcactccttccctccctgcccagaaggcccctgtgcagctctatctttcctgctccttcttcaaaacagagctggaagccaacttcctggaaaccttccctggaggcccccaggcaacagcactgatcagctctctgctgctcctctgggcttccacagcacctaacatgtgctagtcactcacaacagcacttaccacacttgaatccccagatttggtaagtgttttctccagagatgcctagccttctatcaggccacaagccaagccacattgtggtc

SEQ ID NO: 90939 - DNA, 739 bp, Homo sapiens
tgtgggaggtggggaagctgggaaggcctcagcgtggggtaaaggtgcacaggagaggaaagccagggtatgcatggaaactagcatttgctattttaactgcagcataaaatagggaaagaccgggaagataagcctggaaaagtggtcttgggtcagcctaacacaaaaggaagccgacaccaaaggagagcagaatacaagtcaggcaagtgcggccgaggtgtccgtcatggttttggggtaggaagtgtcaggatgaagaccaccaagcaagaagaacatccagttttcatgggtataatgactcctaatgctaacagatatcttgaaatcctaacaactttagttgacacaagtttcttaagagacaaaatttaccggaatatttattttaaaaggttagtttattaccaagggataattgtttatttttttaatgtccttacttaggacatggacattcaccaggataacatgaaacattgtgaaaatgctcacagtattgytaagtacttatgcatttactgtttgcattttttttttttttgctttagaataacttttcaacccactagcaacagtaaccaaggaaatataaatccaacagcctagaattacaactatttgagaagattcatggtttcaacgtactgctatatttactgtttcattctggacagtttcccgtttctttaactcctctctaagtgtccaaaacaatataaagtctgcacta

SEQ ID NO: 90940 - DNA, 921 bp, Homo sapiens
acatgggtgaccattctctgataagcaatggtgaatagagtagactggaaaaagaaaccatcagacaagaggctctaagagattgtgctctggggactccaaatggtagagaaaaaaacaagtagtcaaaaaataaatatacagatgatatggtttggctgtgtcccaactcaaatcttatcttgaattgtagctcccataattcccacgtgttgtgggagggacacagtgggagataattgaattacagggatggtttcccccttgttctcttggttgtgaataagtctcatgagatctgatgattttataaggggtttcccctttcatttggctctcattctctcttgcctgccgccatgtaagacgtggctttcgccttcggccgtgattgtgaggcctccccagccacgtggaattgtgagtccattaaacctctttctttataaattacccagtctcgggtatgtctttattagtagcatgagaacagactaataacaacagtttcaaaatgtaattatcagaacatatatatcttatcatagtactttcaacttaaacaaatatatgctaatgatatgaaatatttggaaacaatatcttgtattaaaattcaatgacatgtctgtttcctaggtctatggttcaatattttgtacagagtctatgaaagttagcttaaaatctcctgtcaccggtttgcagttgattttcatgacattcacagtaagcattttgaaaccatcctcagctatatgtgtagtaggaatgatgccatttggccataccaccctgaatccacctgatctcatctgatctcagaaactaagcagggtcaggcctagttagtacttggatgggargaatgctgccataatttagattatttttgaacaagtgggtgagaaagtcttagct

SEQ ID NO: 90941 - DNA, 921 bp, Homo sapiens
acatgggtgaccattctctgataagcaatggtgaatagagtagactggaaaaagaaaccatcagacaagaggctctaagagattgtgctctggggactccaaatggtagagaaaaaaacaagtagtcaaaaaataaatatacagatgatatggtttggctgtgtcccaactcaaatcttatcttgaattgtagctcccataattcccacgtgttgtgggagggacacagtgggagataattgaattacagggatggtttcccccttgttctcttggttgtgaataagtctcatgagatctgatgattttataaggggtttcccctttcatttggctctcattctctcttgcctgccgccatgtaagacgtggctttcgccttcggccgtgattgtgaggcctccccagccacgtggaattgtgagtccattaaacctctttctttataaattacccagtctcgggtatgtctttattagtagcatgagaacagactaataacaacagtttcaaaatgtaattatcagaacatatatatcttatcatagtactttcaacttaaacaaatatatgctaatgatatgaaatatttggaaacaatatcttgtattaaaattcaatgacatgtctgtttcctaggtctatggttcaatattttgtacagagtctatgaaagttagcttaaaatctcctgtcaccggtttgcagttgattttcatgacattcacagtaagcattttgaaaccatcctcagctatatgtgtagtaggaatgatgccatttggccataccaccctgaatccacctgatctcatctgatctcagaaactaagcagggtcaggcctagttagtacttggatgggaagaatgctgccataatttagattattttygaacaagtgggtgagaaagtcttagct

SEQ ID NO: 90942 - DNA, 585 bp, Homo sapiens
ttatgaagaagaatttgaatcatctctgtgacttcagttttaatgtaaaatatctacggtatattcctaacactgataaaaatataatgcctcctatccatctgaatgtagagacttctatttcttcatggcctgtagatctgaggcaccaagagaaaagaaaggatacatttccctttatcataacaactatcttgataatatatttttaccatctgggtaaaatcaaagccagtggatgtttgcaaagaaaactgatagtttcatcctagttgttatttgacctgactggctccgttgccttaaatgtgcactgatcatatttttaaatactttcactcacaacacagctatccctaattacttaattccacttccacatctcaactgctgcttgtaaatatgacagtgcgcttacagacactcatgcctatcttatgccacttttaaayaccatgctatctttacatctcagtgtcacacagggggagacagcggaaggagttacagggcacatgggcatgcaaagcagagctggaaaaaaaacacttctgtctttttaaaaaaagtcatgtggttttgata

SEQ ID NO: 90943 - DNA, 585 bp, Homo sapiens
ttatgaagaagaatttgaatcatctctgtgacttcagttttaatgtaaaatatctacggtatattcctaacactgataaaaatataatgcctcctatccatctgaatgtagagacttctatttcttcatggcctgtagatctgaggcaccaagagaaaagaaaggatacatttccctttatcataacaactatcttgataatatatttttaccatctgggtaaaatcaaagccagtggatgtttgcaaagaaaactgatagtttcatcctagttgttatttgacctgactggctccgttgccttaaatgtgcactgatcatatttttaaatactttcactcacaacacagctatccctaattacttaattccacttccacatctcaactgctgcttgtaaatatgacagtgcgcttacagacactcatgcctatcttatgccacttttaaataccatgctatctttacatctcagtgtcacacrgggggagacagcggaaggagttacagggcacatgggcatgcaaagcagagctggaaaaaaaacacttctgtctttttaaaaaaagtcatgtggttttgata

SEQ ID NO: 90944 - DNA, 922 bp, Homo sapiens
acgattattaatgtatttatataaaattgtatgtgtatgcatacagaaagtttcatttaaaaaaatttaattacttagcatttattgaagggcctactgtgttagaataggcacttgcagtcgggcgcagtggctcacacctgtaatcccagcaccttaggaggccaaagtagtcagatcatttgaggtcaggagttcaagaccagcctggccaacatggtgaaactctgtcttggctaaaaatacaaaattagccaggcgtggtggtgcatgcctgtaattccagctacgcgggaggtggaggcaggagaatcgcttgaacccgggaggcagaggttgcagtgagctgagatcgtgccactgcactccagcctgggcgacagtgaaactccatctcaagaaaaaataaactaagcacttgaaagtgttagtttttactttagcgacaacatactaatctggaaaaagcatcatttctggagacaattttaggttcaaatcttggctctggctctaacaatatgacctgtttatacgtcactttaacttctctgagttgctttcctcatgtcaaaacaaggacaatactacttgccctgcaatgttttgaggttcaaataaattagcacaaatgaaaatacttcctaaaataatataattaaggttaacataaaatctgtcttttaacacattccaaaaatcaaggcttaatttgtgcaaaggctttattcttatggccccatgatggtgcatccactgccgaaatgcaaggggcgtgtccagattgcactggcccgtgacgaaagcttccaacattgtgcastaagtcatttggaatcagagggcctggatttaagtccaatagctgtgcagtcttgagcaagtaatttaaccttgaaaagtctgcttctgtgtttataaa

SEQ ID NO: 90945 - DNA, 1083 bp, Homo sapiens
tatccacaaagcagaatgtgagcccctctatgtggaagctttttttttccttaaataatttaatgtcctattcagcattattgatttgctttttatcatagtcaaactattgttttccatctctagtttgttagaaaatgatactttttgccacaaggattcaagtgggcacagtaacagcaacatgccatctttcacatgtttctgaaagaagaggtgacctgccagcttcctttgagctgtgcttgctttagggccgacagtttttttatgttcatctgttcatgtcatgttttccctggccccttcatgaccaatacacatttataaatgctctagccatggaagatgaacaaggaccatgggctctacatctcaggtgtgctagtgaaatgagccagccccaagcagctcccatgagagctacaggttctaaaagattgcagagcggcatgcttggtcttgcagccgactttctggtgaaaagcattaactaagtttcctggtggaatcatgaactacacagcccargtatgacagtagccatgtgttctctggtttgttttcttccagactttcgaccagtttgttacgaggagccccagcactggtgctcggtcgcctactatgaactgaacaaccgagttggggagacattccaggcttcctcccgaagtgtgctcatagatgggttcaccgacccttcaaataacaggaacagattctgtcttggacttctttctaatgtaaacagaaactcaacgatagaaaataccaggagacatataggaaagggtaagagcaaagatgttattcctttagtcatctagccgaaatgtagatggtcatgtgtgtagaagtgcacgtgaccaccctcacatgttggtcatgtgcccctgtggaaggaccccagggctggtgagctctgagatagctctgacattaccactggggaaagcacataggttgtcaggatcttagtccctcttcctctaatgtcatcatgccactttctaggggtggcatggagtggggattgtgaagacaagcaagatgataaatatgaagaaagccggatgaaat

SEQ ID NO: 90946 - DNA, 748 bp, Homo sapiens
taagtaaagtacaaaaaaagtatttttttctttgctctgaattgtttgtttatttcaaggactgtatcttcttgcctaggataatgaaaatctttctagggcaggagttggtttctaccactacttcctaaaaacaagtagcataatatggctagagtagagacgttaagcatcygggtttactaactgtgtggccttaagcaaatgacttaggatatatattttagtctcctcatatgtaaaatgcagctaaaaatagcacctttttcactgagctttgagaaaaatcaaatgagattatgtaggttagagatttacttgagagatggtaataattcaatggattagtaattttcataaaaggctcaccttctcctatgagctctatgtcttggtgaaaaggaaaggcccagacagttctaatgaaagtggatgctgcgtagttccaccatccactcctagggcctcatttgaaacggtaaattgaatttaccttcaggcctagttagatttagatatagggactcctgtggaaagtctcaacatttctccatttccactctaactactcctaatatactctggagatccaaccttcacaggcatgaaggctgtggaatagagacagtgagctctttaatgtttcagagaattcaggctgctgcaagcaaaaaaggctgggaagtccaaacttattccaggtgaaaagcaaccactctgtgtctctttttccatagcacctcagctt

SEQ ID NO: 90947 - DNA, 710 bp, Homo sapiens
ttatggtgatggaaacattctgtatcttgactgtatcactgtcagtattttggatgtgatatcgtactacagttttgcatgacaacaccattgggggatatttggaaaaggacacatgggatctctctgtgttatttcttacatctttgtgaatttaaaatgtctcaaaaagtttaatttggaaaagagaaaaaagtaatcaaaggcagaataacagctaactagcaacatattggacatgcagaaatgccttggagggatgtgtgctccctgttaagaatgaacttgggaaagcaaggattggaggtatagaaaaggaataaattgagtttgctcacctgagagtttctggaggcactgcaractcatttctcccaatggtttcactgcaacctgtgccagtaagtaccacatgcatgttgcttcttttattctttcaccagtattgctaactgaaagagactctagactgagaaatgacagatctcatctacctcaaaaaggtggatgacaatgaaaacaactaatgtttgctttgctctctctgcctttaacatagatcaggagggttgaaatcatccgaaatgggaggagacagaacaaactcataactgtaaattaaattctctgaaggaaagagacagtgttatgggagtgcaaggcaaatgaacctgacctaggatgatgtgagaaaagccttctcataagtt

SEQ ID NO: 90948 - DNA, 658 bp, Homo sapiens
tgagaaaccctaccttttgcatagaagttctaagaagttcagaacacttaatacatcatgaagctaatgctggaaggcaaactgaattgcccacattcctgctttcagttaggtcataggaggatatgaggtaccttacaatctgcaattaacttcctcagaacactggggtatcattgagcctactgcagcagcaatttgctaaatggtactccagtgatcagaaagagtgagtgcagtaccccatgtgctaacttattcccaggaagtcattagcacactgaaagaatccagctgattagagcccatttatccctcaatgtactagacatggcagagcacatacagtcgattttatggcttcaaaatccaagtgagacaaaacagcagagacatagaagttggaaaccagawgccagagacagtaagggaagtacgatttaaagatttttgtgataagccatgttttttccaatgtattaggcattagattgctgtaatgtggagttatatatctaaagtttcctgatgcttgagaaagttaactagaagtctaactaatgcacataattcaatgccaaaaaagaacaagcttgataacattagtcctccttactcctgataattgtagttcaatagagctttcaaaactctgaaa

SEQ ID NO: 90949 - DNA, 648 bp, Homo sapiens
attaatgtgtacttagcctgtgagagagtctacacaaatttgtggaaggaatggatttagtggtaattatataatttccatgggaaactgtggagaataaaaatatctgcgttcattaccaagaaaacaaaataacagaaacaaaaattcacacacaaaatttttgctgccacaattgccaataatagaaatatctgagcagatactccagcagtatgctccttgtttaagccatgtgaatattttttaactgattttatgaataatctagtatagtttaagaatagaagttactgtttcccagttagtgatagatatttatagtcaccttctattatgtccttttaaaayattctgaaactatgtgtttgaaaaaccatgacaagattttaatgtatattttatgacagacaaaatagtacatcatgtaacggacctgccatgtgcccagtatgttgccacacactacaaatgcaggtgtgaataaaccatgggctatgctctcaagaagtttgcaatagggtgaagaaacagagaagtaaatagaaaagtgcaatacaatattcatgctaaaatatgggtgagaacccagagaagagagcaactaactcagcgctggaaagtaaaattaaaatttcacaatgaaaa

SEQ ID NO: 90950 - DNA, 964 bp, Homo sapiens
aaagcctgtgccctaagatgcctctacttcacactgaggactgtaggagtagaagacctaggaggctacattttcgcaggagcctcggtgggaatagggaggtgcaggattgatcccaagtgcttggaattttgcttcaatttagtgtacactgtggccccagttctttctgaaacctgagaatttcggcgattgcttggccagtctgttgggacttgaagcttgagtcaaaacttcayagtatgtttcaatgtttttgaagtcaattctcaaattttcaaatattcacttttagatgtaaggaaggtggtggcgaggcctgtattatcttagttgttggaaatcagaattgccgtgatggaaatgaaaccaagtaggctttgtgattttttaacttttttgcaaggttccttcaatgcatagaaatgccgattttcagcttttgtagtttttcaaacaaattataaaacaaaacataaaattcctttttggattatgtatttgaataattcattttgcattgtctttaaaggcattttcattctctctattaatacaaattatccatataaatgttgatatatttgactaatttcaatgtgagaaacaatacaatgctctttcatatatattgagttgtaatttcatctttctttcaattaataaacagaattcacatattattctatgtaggggagcaattgtctgatttaaaagaaaatactgagtaatcatttgattgtagtttaggttttatgctaagtctcagctgtgctaatacaactaacgcagacaagcagctggaatgataattgggctaaaagtatttctcctaaccctcttactaatgacagattggcaagagatggtggcattatcgtagttaactttttcacaaatgacaatatcccagggcaagcaattggtattaaccatcaagcttcctggctttacaacggacact

SEQ ID NO: 90951 - DNA, 605 bp, Homo sapiens
ttccaaacttgttttatgagtcagaatcctsatagcaaaactacaaaacccaggaatgcaaaattgatttcaacttaaagggctatcaccattctaatctgtgattctaattaatttggctatcttagatactttatacaagtggaatcatacagtttgtccttctgtgactgatttactttacgtagcattaatgtcctctaggttcatccatgttgcatattgccggattttcttgttttaaagctgaataatattccgttgtatgaatataccacattttctttatctattcatctgccaataaacattaaccttatttccacattttgattagtgtaaataatgctgcaatgagcctgagaatcatcccaatctcaattctttcagataaataacctgaagtgagattgctagatcatatggtagttctactttcttaatttttttgaggaacaactgtactgttttccatagaggctgcacagttttactttcccagaaacactgtacaagtgttccaatttctccccattgttaacactcgttatctttttgttttaataagaccattctaacaggcttgaggcaatatctctttgtgg

SEQ ID NO: 90952 - DNA, 605 bp, Homo sapiens
ttccaaacttgttttatgagtcagaatcctcatagcaaaactacaaaacccaggaatgyaaaattgatttcaacttaaagggctatcaccattctaatctgtgattctaattaatttggctatcttagatactttatacaagtggaatcatacagtttgtccttctgtgactgatttactttacgtagcattaatgtcctctaggttcatccatgttgcatattgccggattttcttgttttaaagctgaataatattccgttgtatgaatataccacattttctttatctattcatctgccaataaacattaaccttatttccacattttgattagtgtaaataatgctgcaatgagcctgagaatcatcccaatctcaattctttcagataaataacctgaagtgagattgctagatcatatggtagttctactttcttaatttttttgaggaacaactgtactgttttccatagaggctgcacagttttactttcccagaaacactgtacaagtgttccaatttctccccattgttaacactcgttatctttttgttttaataagaccattctaacaggcttgaggcaatatctctttgtgg

SEQ ID NO: 90953 - DNA, 605 bp, Homo sapiens
ttccaaacttgttttatgagtcagaatcctcatagcaaaactacaaaacccaggaatgcaaaattgatttcaacttaaagggctatcaccattctaatctgtgattctaattaatttggctatcttagatactttatacaagtggaatcatacagtttgtccttctgtgactgatttactttacgtagcattaatgtcctctaggttcatccatgttgcatattgccggattttcttgttttaaagctgaataatattccgttgtatgaatataccacattttctttatctattcatctgccaataaacattaaccttatttccacattttgattagtgtaaataatgctgcaatgagcctgagaatcatcccaatctcaattctttcagataaataacctgaagtgagattgctagatcatatggtagttctactttcttaatttttttgaggaacaactgtactgttttccatagaggctgcacagttttactttcccagaaacactgtacaagtgttccaatttctccccattgttaacactcgttatctttttsttttaataagaccattctaacaggcttgaggcaatatctctttgtgg

SEQ ID NO: 90954 - DNA, 739 bp, Homo sapiens
aaaagacccaccaaggataccaaagagttggcctagtatgcaaatacagagttttgatttctctccattcatagttttcaatccttatttattgaatttaaagacactcgggttttgagtcttgactcattaaaatgtttctcgtggaagattgggctgagcccttgttttttctagaggttggattatgaccactgtcattccttacattttgactgtttttctgttaacatagggagcactacaattatgaaatatattcttttctgctatgggaaaatcaacacaatttggaagcagtcctgcctggaattttgggaaattgattcttcctccttgccacttttccatcaatcaacctgcagtcaatggataactccactctactatgtcttctatctcctttgtggtacatctgraagttgctgaattggatcaggtcattgctttgacaatgtttgtcacaaggatctgttgtaaactctcccaagaaatcttcctctgtgtatttgtcttctcaagtcattatgttgtaccaccaagtaaattagacattatgcaaaagtacattcgtttatgaaatatacagcagatattcaaagatatcgtttcccagtaaaacagaatgtaacaggatgtttgcacactaagtaactatgtttactgtcatttaaagatcgacaaattcaaaagttcattaaattgcccaggggcatccaactaggaaatggaagagcca

SEQ ID NO: 90955 - DNA, 928 bp, Homo sapiens
gcattcaacaggtctctgtcatttcatcctggctaccatcctctttactggacttgcattaattgtcaatgtggcataaacgtttattgcttatcgaacagccatgcactcctgcatatttctcagcaaccttgcagtgaggcatgccataaaactgctttggccaggggaatataaaggggaaaatgtatcattttcagaataaaatatttaaaagttggtgttcaacccgtcatatctcctttccccataaagaaccacctaacaagttcacaacagcctgaattacagtcacttagagcagcacagcttctctagagatctcttcttccaactcacatcagaatttgcatgaacatgcaatacatctttattgtgttacaccacagagattacagggccaatgttaccacagctcagcttagtctatacccactaacatagttaatgtaacatattaacctcttggtttgccatattaggctttgcagttctagtgagtttgttatgcaaatgagtcttttcctatctttgttgactgtttagctttgaacagattaatataagacatatacaatctgcaaggcgtttccagtaacttaggcttgtagtcattgatacttataatagaccttactaagtctcatgcagagcattgattacaacatttacttctttttgtttacctgagtccctccatgtctttaatgagttctggcttctatgactctactttccaattctaagtaaaaytcttctcctgggtaccttaaataagaccgttatagattaaggagtcaatgctaccccagggaacatatagtacattttagaacttaggtattcttccagtcagagcaatatagtcagtaactggatcatttttacctctctgatgtggatactagaccaatgccttagaaataat

SEQ ID NO: 90956 - DNA, 928 bp, Homo sapiens
gcattcaacaggtctctgtcatttcatcctggctaccatcctctttactggacttgcattaattgtcaatgtggcataaacgtttattgcttatcgaacagccatgcactcctgcatatttctcagcaaccttgcagtgaggcatgccataaaactgctttggccaggggaatataaaggggaaaatgtatcattttcagaataaaatatttaaaagttggtgttcaacccgtcatatctcctttccccataaagaaccacctaacaagttcacaacagcctgaattacagtcacttagagcagcacagcttctctagagatctcttcttccaactcacatcagaatttgcatgaacatgcaatacatctttattgtgttacaccacagagattacagggccaatgttaccacagctcagcttagtctatacccactaacatagttaatgtaacatattaacctcttggtttgccatattaggctttgcagttctagtgagtttgttatgcaaatgagtcttttcctatctttgttgactgtttagctttgaacagattaatataagacatatacaatctgcaaggcgtttccagtaacttaggcttgtagtcattgatacttataatagaccttactaagtctcatgcagagcattgattacaacatttacttctttttgtttacctgagtccctccatgtctttaatgagttctggcttctatgactctactttccaattctaagtaaaactcttctcctgggtaccttaaataagaccgttatagatkaaggagtcaatgctaccccagggaacatatagtacattttagaacttaggtattcttccagtcagagcaatatagtcagtaactggatcatttttacctctctgatgtggatactagaccaatgccttagaaataat

SEQ ID NO: 90957 - DNA, 736 bp, Homo sapiens
atgggcttaataaaatagcccccaaacaatataaaaaacaaagccaagctaaaatgaagttgtaggaaagaaagtactgctagctyagagggtttccttgagctgtttttcttactacctttagcactgattcctctctgtgaacctttaggcccctatggccagcccaaccaattatttttttttcagtgtatcaccagtggggccagatttctttttagggctctgataacttaatgaatctaattttatggcttctccagatacttttctcctatcccctccccttaactaaaaggcagtgctcaccgtaagtctcagtatgaagtctagtttcccgatgtggtctaaatatgtggagcctggacgtttactcaggcagcatggatttaagaagagggtcaggcagcagagtcaagtggtctggaagtcagaggttcttggttttaatcttttccctgtatctcatttgtttcattcaggaagcatctatgggtttgtttgccccttgccggttactgtgctgctggctgtgtaaactgttcactttcactttccttctttttatcatgttccttccagctctaacattcctggcttggaagctcttgaaaatggtaaaagttgatgtgaagttgcaggtttagatgggcgtctttatttggtggtatgagaagcaagggaggaaaggtttgaaagaattccatagagataaagaggcagacaaatttagttt

SEQ ID NO: 90958 - DNA, 1127 bp, Homo sapiens
  misc_feature (1)...(1127): n = A,T,C or G
cnnnnnnnnnnnnnnnnnnnnnnnnnnnnnnnnnnnnnnnnnnnnnnnnnnnnnnnnnnnnnnnnnnnnnnnnnnnnnnnnnnnnnnnnnnnnnnnnnnnnttctaamttactttttctactgcccgaattcggtgggaatttctatgaaaatgagattttcacttttaaaatattttaacaggcagtgagtcgaattgctaccatgattaaagcacatagacataatgaggcagattaaaatttcttagcacccatagaaatagaaataccgtgcctaaaaagccctgaatcacaagcatgcttaaaagtatcaaagatagaaatcttggagcagcctgccaccttcaggataacttcccagttaatgctatctgagatcactgatttcagcttctataaattccaaataccaatccctgtaaaaatgttcagtataattaaataaagggcatttaaattagagtggctgaagccgtcttccttgcagtgcttttgctctgattaagcattatacttaatgattacattagttttctttttaaaaaactttccctttcttcattttggttctttgattcttgttttattattattattctattcgattatctttacatcaatattttcttactttaagctggttaaaaacatccactctacttcattttgctaagcagagatcagaacactaaaaatagattttgcagccacagtaagagaaatactgtaacttccttcctactgcttccttcctggtgggttttattttagattaataacaatatttctaaagggtcttaaataaaagcagcactacagtaacccattcaggaaatggagagagacggagaaggtgaatgtaacactcgtttttttgtttgtttgttttttttttctgacgtcttattgtctgttcctttcattaaattacacagaggcttaaaaagaatgaagaaggcaagagagaagagaaataggagagggaatgactcagcatttagtagcatggagaagtaaattagtagcaaaaataagataagggaaagtataactaaaatcgataccattaggtcaaatgagaacgggatgtaaaaaataatggaaaaagaatacagtggcttgaaa

SEQ ID NO: 90959 - DNA, 1863 bp, Homo sapiens
  misc_feature (1)...(1863): n = A,T,C or G
tgtttcatatgggtttacatgaaaggcattcaactgtagatatcattctgtttctcatgtcttcaaccctatgcctttaagatatctccatgttggctgagcagggtggctcacacctgtgatccaaacactttgggaggccaaggtggatggatcacctgaggttagtagtttgataccagcctggccaacatggtgaaaccccgtctctagtaaaaatacaaaaaattagccagacacagtggtgggcacctgtaattccagctacttgggaggctgaggcaggagaatcccttgaacccaggaggcagaggttgcagtcagccgagatcrtgccattgcactccagcctgggcaacaagagcaaaagaccatctccaaaaaaaaaaaaaaaaaaaaagatgtctccatgttgattcatgtaatattctgatagctaatataatgagtgtaatattctaatacattctaatatctgtgcactgtttcattgtgtccattcacgcttttcagtggaggagggtggataacttccaattccactagcagaaacaacattgaagtcaatatatcccttcagggtcctatatgagaatttctctgggaaatacacctaggagtgggattgctgggtcaccatgtacagttgtgctttacttgactaagcagttgctgaatagctaaatgagcctttcacccaccgatggtgcatgaggatcctgttttctcacatactctcctacatgtagcatgatccagttttctaatttttgacaatatgatgcatttcaaatgatggctcattgttttaatttactttctctaattacaaatatatttgagtgttctttcaatacttactgccactgaggtttctccttctgagagtagtttgttcacatattttgtctgctttctattgagctttctgtatttttcttgttaatatgtggacctttctagtgaattctaggtatttgtaccttaatgatgtccaattttgccaatatcttatctcaatctgtcatctgcctattcagtacctttttttaattactcatctgccaatttttctttgttgactcttattaaattgatacccttaattgcaatgttgtcataacattttcaccttgtggtttatgtttttttggagttatgttgaaaaaactttcttctgtattcgtttattttaagttccggagtacatgtgcaggatgtgcactcttgatcataaagatagtctcttactttttttcttctaaggttacaatttgctattaactatacatttactctacccatccatttggagttcgcttaacccagttttatttgtaatccatatagcaaacaagttttcccttttctgtctactaaagagtatgttgttattattattattattattattattattacatagaggaggaagcagacgcttagaaatttaaataatttgcctcataacttaagcaagtaagagtcagagctgtgattttcatctagttcttttaacctcaaagttcttaagtggtccttcctcttcaccttctctagaagcagttcccttctatgttgcagtctccttgaaggcaaaggttgtgcactgtcatgttttgaagcccagtatcgctgagaacaatgacagacacatgcagtggcttagtaagtatttgctgaagttgcaatatcttgctctatcactttctgtctttttaccctctgtagattaacataaaatcttgtagaattgcccttnnnnnnnnnnnnnnnnnnnnnnnnnnnnnnnnnnnnnnnnnnnnnnnnnnnnnnnnnnnnnnnnnnnnnnnnnnnnnnnnnnnnnnnnnnnnnnnnnnnnag

SEQ ID NO: 90960 - DNA, 710 bp, Homo sapiens
gtcatttccccaagaaaaaagaattttgcctccagattgctttctgacccgaaccacaaaattaactccacattaactcttccatgggtctccagtctgtcagcctgccctgcaaattttggacttgctagtctctacaattacttgagaaagttccttaaaatcaatctcaatctttctcaatctctctctctytaaacacacacacacacacacacacacacacacacacacatacgtatgtatgtatgtatatgtatattcacatattctattaattctgttattctggagaaccctaacacagacttcagtactgagagtgattctagagaataaccttttttttttttttttttttttttttttttaattgatcattcttgggtgtttctcgcagagggggatttggcagggtcataggacaatagtggagggaaggtcagcagataaacaagtgaacaaagaaacaagtgaacaaaggtctctggttttcctaggcagaggaccctgcagccttccgcagtgtttgtgtccctgggtacttgagattagggagtggtgatgactcttaacgagcatgctgccttcaagcatctgtttaacaaagcacatcttgcaccgcccttaatccatttaaccctgagtggacacagcacatgtttcagagagcacaggtttgggggtaaggtcacagatcaacaggatcc

SEQ ID NO: 90961 - DNA, 710 bp, Homo sapiens
gtcatttccccaagaaaaaagaattttgcctccagattgctttctgacccgaaccacaaaattaactccacattaactcttccatgggtctccagtctgtcagcctgccctgcaaattttggacttgctagtctctacaattacttgagaaagttccttaaaatcaatctcaatctttctcaatctctctctctctaaacacacacacacacacacacacacacacacacacacatacgtatgtatgtatgtatatgtatattcacatattctattaattctgttattctggagaaccctaacacagacttcagtactgagagtgattctagagaataacctttttttttttttttttttttttttttttwaattgatcattcttgggtgtttctcgcagagggggatttggcagggtcataggacaatagtggagggaaggtcagcagataaacaagtgaacaaagaaacaagtgaacaaaggtctctggttttcctaggcagaggaccctgcagccttccgcagtgtttgtgtccctgggtacttgagattagggagtggtgatgactcttaacgagcatgctgccttcaagcatctgtttaacaaagcacatcttgcaccgcccttaatccatttaaccctgagtggacacagcacatgtttcagagagcacaggtttgggggtaaggtcacagatcaacaggatcc

SEQ ID NO: 90962 - DNA, 726 bp, Homo sapiens
aacccttgctttctcttcatgcccctatgattctctaagcttaaggcattccaggatgccacttccaatctctatttgcacacatctctctgcactgaagagcagtttatttgcagtcaggagtcctagtccttgctcagtaagcatttgttgagtagatgaattattaccaagtggttatgtttaggagactggtttgaaagaagcaaacattaaaaaggagtacattcaacacaagaatggtaacatagcaaagtgaatgtggtgtattaagccacagaccaagagtttgtcacaagtgtcaagagccaattttaacacaagagtctactgaacactctattattgttcaggggtcaatcacccagtcaagcattatgggatagaaagtgggctgcctcaggttagrcattatttaaaacatttttggggggtggtaattgcatgggtaaatgtatattttgctattatttaaaactatttaaaagacaactgacttttataacaataataatacattgtagaatttataacatatataagtaaaatatattatagcattagcataaaggcagggaaaggcaatagaagggcacagttttaaggtttttacactatcgatgaatactgaaaagtagactgtgaaaagttagtgttatgctgtaggtcccaaagcaacaactacagtaaccatcactaaattactttaaaaaaaaaacaacaaga

SEQ ID NO: 90963 - DNA, 1136 bp, Homo sapiens
gacccttgaatgacatgaggttagagttgccaaccccccatgtggtcaaaaatccatgtataacttttgacttcccaaaaacgtaactactaatagttcatcattggccaaaagmcttactagtaacatatcaacatacattttgtatgttacatgtataatatatttttacaataaagtaagctagagaaaagaaaatattgagaaaaccataaggaagagaaaatatatttactattcattaagtggaagagatcatcataaaggtcttcatcattgtcgttttcatattgaataggctgaagaggaggaggaagaagaggaggggttggtcttgctatctcaggggtggcagaggaagaaaaaaaattagagtgtaagtgaacccgcacagttcaaacccctgttgttcaagggtaaactgtagtttaaatctgagtgtcaactccaataaattggtagaggcttcctggaatgatgtattaatatgattctaagattgcatctcagtgcagaagaaagcgtactgtgatagattaacaatgtctgctgaggcaaagataggaatttggagtcaacatgccatgaatttatttgttatttcatgaactgaaataaagccaaaatcttatagatacccctgtagctataagactaccaggcaatcatcacgtagtgcatcgaatcatgaaaccaacaggaaaaataagacatccagctgtctggaagatagaacaaaggaaatggtccattttttcgtcgactctgcaaggcacaacagtgtttaagttatccatcatatgagcctttccacacagacataatacacaggagatgaagaacgagaaatgctttagtgtaggttactgcttggatctggactgagagacaagctaattgagcaattgcctatgaaaaatgcttgagaaatttttttgaaaaactagaaatctatcataaacatgtaacaaaaatagagacacttatatttgtcccagtgtttcatagagaagaataaaaggaatattttgagaaattactttgaaagagaatttaaacttatccctccccttttcccacacctctgaccctctccccagcagcatgctcaaaaatttgaaattaatattttttag

SEQ ID NO: 90964 - DNA, 1136 bp, Homo sapiens
gacccttgaatgacatgaggttagagttgccaaccccccatgtggtcaaaaatccatgtataacttttgacttcccaaaaacgtaactactaatagttcatcattggccaaaagccttactagtaacatatcaacatayattttgtatgttacatgtataatatatttttacaataaagtaagctagagaaaagaaaatattgagaaaaccataaggaagagaaaatatatttactattcattaagtggaagagatcatcataaaggtcttcatcattgtcgttttcatattgaataggctgaagaggaggaggaagaagaggaggggttggtcttgctatctcaggggtggcagaggaagaaaaaaaattagagtgtaagtgaacccgcacagttcaaacccctgttgttcaagggtaaactgtagtttaaatctgagtgtcaactccaataaattggtagaggcttcctggaatgatgtattaatatgattctaagattgcatctcagtgcagaagaaagcgtactgtgatagattaacaatgtctgctgaggcaaagataggaatttggagtcaacatgccatgaatttatttgttatttcatgaactgaaataaagccaaaatcttatagatacccctgtagctataagactaccaggcaatcatcacgtagtgcatcgaatcatgaaaccaacaggaaaaataagacatccagctgtctggaagatagaacaaaggaaatggtccattttttcgtcgactctgcaaggcacaacagtgtttaagttatccatcatatgagcctttccacacagacataatacacaggagatgaagaacgagaaatgctttagtgtaggttactgcttggatctggactgagagacaagctaattgagcaattgcctatgaaaaatgcttgagaaatttttttgaaaaactagaaatctatcataaacatgtaacaaaaatagagacacttatatttgtcccagtgtttcatagagaagaataaaaggaatattttgagaaattactttgaaagagaatttaaacttatccctccccttttcccacacctctgaccctctccccagcagcatgctcaaaaatttgaaattaatattttttag

SEQ ID NO: 90965 - DNA, 1136 bp, Homo sapiens
gacccttgaatgacatgaggttagagttgccaaccccccatgtggtcaaaaatccatgtataacttttgacttcccaaaaacgtaactactaatagttcatcattggccaaaagccttactagtaacatatcaacatacattttgtatgttacatgtataatatatttttacaataaagtaagctagagaaaagaaaatattgagaaaaccataaggaagagaaaatatatttactattcattaagtggaagagatcatcataaaggtcttcatcattgtcgttttcatattgaataggctgaagaggaggaggaagaagaggaggggttggtcttgctatctcaggggtggcagaggaagaaaaaaaattagagtgtaagtgaacccgcacagttcaaacccctgttgttcaagggtaaactgtagtttaaatctgagtgtcaactccaataaattggtagaggcttcctggaatgatgtattaatatgattctaagattgcatctcagtgcagaagaaagcgtactgtgatagattaacaatgtctgctgaggcaaagataggaatttggagtcaacatgccatgaatttatttgttatttcatgaactgaaataaagccaaaatcttatagatacccctgtagctataagactaccaggcaatcatcacgtagtgcatcgaatcatgaaaccaacaggaaaaataagacatccagctgtctggaagatagaacaaaggaaatggtccattttttcgtcgactctgcaaggcacaacagtgtttaagttatccatcatatgagcctttccacacagacataatacacaggagatgaagaacgagaaatgctttagtgtaggttactgcttggatctggactgagagacaagctaattgagcaattgcctatgaaaaatgcttgagaaatttttttgaaaaactagaaatctatcataaacatgtaacaaaaatagagacacttrtatttgtcccagtgtttcatagagaagaataaaaggaatattttgagaaattactttgaaagagaatttaaacttatccctccccttttcccacacctctgaccctctccccagcagcatgctcaaaaatttgaaattaatattttttag

SEQ ID NO: 90966 - DNA, 666 bp, Homo sapiens
tttttgaatttttagtagaggtggggtttcaatatgttggccaggctggccttgaactcctgacctcaagtgatccagccgcatctggcttccaaagtgctgggattacaggcataagcccccaacgccggcccgcaaatatacccttcaaactacttaatgcactatgtgattatcttcatttagtgttcccccttatcatccctgatacggattaggaaactatgaaagacttagaatataatcaggaagagcgacaccatggggcaaggctgaagtcaataggctcaactcaaacagtgaggtaatcaagcagtatgacttagcacaaatcatttaacctccttagggcatagttttctcttctgcaaaatgaaattaatcccacttgcctcatagattgttatgagattatctgtgaagtccattgtgtatgttaaaccatgacrtgctacagacacatcaaatgttttgtgggatcttatttaaaacaatgttattaaactctttttgccaaaggcatgagacctaatatcttttcttcattaaaaggggagatctacaagtgttggggagctgttaaaggcaggaaagcactaaaaatcagattttcttcttgttgcaatcagaaggatggaaaaagaactgaatcagaaagggcagtta

SEQ ID NO: 90967 - DNA, 1533 bp, Homo sapiens
tcccacctcagcctgctgagcagctggaactacaggcacatgccactgtgccagactaagttttttaaactttttggaagagatggggtctcactatgttgaccaggctggtctccaactcctgggctcaagtggtcctcctgtttcagcctcccaaagtgctgggattacaggcatgagccactgggtatttgttttctgtttacaaaatttagtttccttatttcttgcttcagttctctctaccttagtgtctcacatttttctttctctgaatgccttggcccagatggagttaagagaagtaatatgcctctctttgcttccctggtcccatttgctggttctctttatttgaaaagaagtaacatcaaaatgaataaggagagatgaagtctctggttcaccatggttcctctgttctttcttacctatttttcacattctcttcgcctccttcccttttcttcaatttaattcagggctacccttctgaatggtcagaaacctggaggactagcaaagcaacatgatagccatggccagcagacaggccacatgccactggtggccaccatcaagatatttcatctcaattgatgttatctgtgcttcttcaagaagaaaaaagactaaacaatccaaaattccctaagaaagaaccatatgcttttaactgttaatgaatcattgaaaactattattttaaagatattcctgggagtgaaatgttttccatgtgtgtgattgtccaagacatcttgatagtgcctgccatctggaatggttatttgggatctctagccatgcaactttcacaactctttgtaacatctccagaaaccatgcttgtcttgaaatgctcatttctctgaatttgaattaacaacgtaacagctgagaacatggttgattggagaggacagcagatgagagttctgctctgtctgggtgtcctgatgtcaggtgtgacagcaaaactgtcctgtcaccttcttttctcctcttctgttctgcacggttggcttgttgtgtgcacaaggccctcctcctttcagaaggcattgctctgacatcatgtataggaccagcaatgtcaaattcatgcagttgtgaaagattagaactgagagaagagtaggggtgaggtggtggggaaaccatcacgcgtgattactagcttcctcatacatatttcattaaactgcaggttggtggtcttccctgcttttcctttctgctgaccctccttggaaggtgaagaaaggttgtgcatgtgtgtgtgtgtgtgtgtgtgtgtgtgtctgagacaggattattacaaaagggattctgtcttagagttggctgaaggcacacaacaattggtgtcaacacattcacattccaaagccaggtgctctctcagcctcctaagctgacatttaggtactgatatagagaccactgactcccatctacaagaagttggagatgccacaaaagaggttgaagatgaggtcaagaatttctytggagagagaactttgtgtt

SEQ ID NO: 90968 - DNA, 1712 bp, Homo sapiens
gatccctggcaagggggtgggggagatgggtgctggggctggcagaggagccacccggagcctgctcagagcaccctcggctacggccattccaagccatacgctcagcacagcctccaactcccagtgtgctaagtgacatgtccccaggtcctgtcattgatctaggccagccgtggtttgtttgttttgatcttttccaatctcccattcagttttgatcacacacacaggagcccaataactcgctccaaaaaaaaaagaaaaagaaatcaatgtcggcttcagtgcaggctgccacggagggcattgtaaggcaggtgtggccaagggcagaggggagaggttcaatggggctgcctagtagagagcccggctcagggggacctgcagaatctctgtgttcgtgtgaccacaggagggacggtcctgagccagcttcagggccttgctaagctgtcagaacaaggttagcttgggacgcctttgcagcaggtctttctggattcatttattaagcactgactgtatgtccggcctgtgctgagcactgagagcccccaagttcttctcagcaggaagccacccctgcgcttcccagggcaccgggccccacagcccctcctttccttcccgcccgtcccattgcctcagtgttggaggagggaagggctgtgtggaggttggccagctctcaacctgatgcgtgaatgccctgccaggctgtgttcccacccactgggagaccacatgagttctgggaccccttccccagctcggaggcttctggcctgctctgaccatggcctgccttccagagcccaacatctgcctcctcctttctgacccgcttcctataaaagtctcaggtcagctcacatcagacaccagacaccaaaaagggggccagcgctactcccaccaccccaggaagttcatgtttgaaggggtgatataattaggaaaacactgtcatttacaaacagcagcaagcttagcttagcgtttcaaagtcctttcccatcatctaaacagcgtcaaggccatctagatattttataaggatcccacggaatctttttttccagaaggtggaaatatccaaaatgcataaaaccgtgtgggtgcaggcagtgatccgcccgccgccagtggtgcaataaacatcaacgccccttccagtcacttctcagtgtgaggagggaccttcccaggaccgagaaccgttgtctgttccccttcagccttcactccccaagtggagcctccggcagaaactgccagcatcccccccacctctttcccaccacccattcagctacgggccgctttagagtgtcttttccagcggcccaggctccttgatgttaggaattctgtcaggacgacatgtgacagatgctygccaaaccaaagggaagtgccagcgcgggcccaagtccctacgccaagaccccttaaatagcatccgcttcccacttcccgggggctgcatcagaggcatttgggacggcagtgccagatctgtgcccatcgtccagctctaccctgaaccgagaggccctcttcactgggaagctgatgaaagtaatcgggacagttaggaaaatcccacgttctcagtaaactgcaccacatgtggctgaaatgcggtgcagaggttcagacagccagtttttcttatatgggaagctgtgttgggcctcggtttc

SEQ ID NO: 90969 - DNA, 2051 bp, Homo sapiens
ttcctttctttgacagtccaaagcacgggcggggctggaggtagcctgagggagtgagatccaaactgccgtggcaggcacctgcctgcctccctgggggttagacatctgtctttacccaattttgccttgctttttgtcagtgcacatccgtgaccagacgcccagggtctggccgggtaaacagtatgtgagtgtagtaatcaactgagaaataaatactggctccaggaaaacttaacctcattcaaattgttttgctcagggctcccagggagaagtgaatttaggcacccgctgcggtgatcaattctgttctatgcgcttgtaagtgaagctcttaggcaaaaaacaatttcataggagatcagggttagggagggtatcccattgagagttgtgacaggttttcttaccccctttaatccttcttctgcccctcctcttccttcacttcttccccctatccccacccaacattttggccatacacttgaaaagaaatacccaatgcattttatctttgtcttcatgcaggacagaatgctttgacctccaagctgttttaaatctagtagataagccaggtgagtaagtggtttacacacattgaaagtaaagtttctgaagaattgtacagccttaatggaggatctgaagtggtaagatggcatttgtgtatctcagagcagagcttaggtatcctccacaaaacatggaaagttaaggttggaaccagaatattagtgttttatacaccattaggaggaaaaggtttttgaatcttactttgaatatcatgtcaaacattcttaagaaaagaaactgtgaggccgggcgcagtggcttatgcctgtaatcccagcactttgggaggccaatgcaggtggatcatctgaggtcaagagtttgagaccagcctgaccaacacggagaaacctcgtctctactaaaaatataaaataagccgggcatagtggcgcattcctgtaatcccagctactcgggaggctgaggcaggagaatcgcttgaacccaggaggtggaggttgcggtgagccgagatagtgccattgcattccagcttaggcaacaagagcgaaactccatctcaaaaaaaaaaaaaaaaaaaaaraaaaaaagaaagaaagaaaataaactcattggaggtaattttatcaaactcaaaaccacacagcgtctctagaaaatgttcaaggatatcagatacttatataatagagttgtctggtgtgtcttcttttttctgttaccagcttttcctattggacagttgattgcaaaccatcctgaaacagtaggatattacaccttttacatattgaattacatattgaatattgaattacatatgaattgaattacatgcatttttgtcttcaacttaaagaacactaaactgtagttaagcttattggaggaaggatttgaaatcattaagtcatgaatatatgatgttgatgtctgctctgggacattttaccaagtgtgttatatgtcatagccaacatgtaattaaaaaaaaaaaacgtagagatttgtgaatcagagtcctctgttcaaataccagcccttccacttagccacacaatctttggtaggttacttcatcttcttgagactgggtttcttcatctgtatatgcatatgaagcacctgagtgctttttaaatgtttagtaattgtgttctataagtgtacatgtaagttatgaaacttagttttgaaatctaaaacttaacaactcagatgcgaaatctttccaatgtttaacttttgaactgtctctttcatctgatttgtagatcctgtgttgccataagcccttggcccacatttaagtgggaatgcagctagcttggatgtctgaaactttgtaggcgcctctgtctgaatcctgaacacaggcaccaggactactgagagctcgtcatctgtgcaggatagccacacagcaaacatgtttgcaaaactgaagaagaaaattgcagaagagactgctgttgctcagaggccaggaggtgctacta

SEQ ID NO: 90970 - DNA, 710 bp, Homo sapiens
ttgcaatgccatcatgctcaggggttttcatcttgaatataggaagatgtttgttattgcttgcttgaatatctgtagatgccactcagatttaacatttcatttctttgtccttttttaaaattctagatgaaagatccaatatctttatttttccccagattcccgctgggaacaggagccattcataaacttcctctgaaaggtagtcctcctgcgtcacctccttcaggactcacagcaagtgtcccaagaggacggcaagatgtgacggtcagatcacatgccttccgtcttgtctttccaatcacctttcttggcattctataaatcatccctcctgcaaagccaacacctagtttctagattaggtgagaaaatgattatgcaaattagtgtcttatctatggctgcataaaaaattaccccaaacttagcagctcaagacaacaaacatgtattatgttgcagttttgctttgttttgagatggagtcttgctctgtcacccaggctggagtgcaatggcactttaaactcatgctctcagctcaccgcactctctgcctcccaggtttaagcaattctctgcctcagcctcctgagtagctaggattacaggtgcatgccaccatgcctggctaatttttgtatttttagtagagacaggctttcaccatcttagccaggctggtcttgaactcytgacct

SEQ ID NO: 90971 - DNA, 2401 bp, Homo sapiens
gcatgcctcccaaaagcatagcatagcccagaacaaatttttcatttactttgttttcatgaaaaaaaaaatgaagcttccaaatatgcaaaattgcataataacaggctatcgctaggagaggaagccacacattaagaagtatctaatggcaaaaatgcagtcattgtatgagcagggtaggggggccccaggcagagggcctgtccaaccatttacaatgcttggggcttacagagtgggccaacagtacagctttctcaaaaggatgccttttattcagttagttagggaatgtctacaagtaatcatatccacctgaagactcctggattccagtcattcctccacacttagcatgagcaagttagctaaaatatctatgactcagttttctcagctgtaaaatgggaacctctaacccatagccatggattcaatgaattatatgtttagtgtgcttagaacagtgcttgatatgaagaaaatgctatgtaagtgttactgttagcattaattttctattgtttttatttgttgatgttattgttattcaggggcttattgaaccacctaccctcacaagaacaaagaggtcattatgtaacttctctcttcatattttttgtctctttttctttctgctcatttgatcttctctccatgtgggcctgtttcattttattgtgtacatgacccatcactgttgtgttaaaatggaagcccaggccgcagcacacatcctctgctaggacaacacccctcagacagcaaatcagaggcctaccaccctgcaccttcaggatccttgtaagagatggcatcttctggtccataaggtgaccctttccacgtccccaggcagccccaagtctccaaaaaagaaacatacttagtggggtgaaaataacagctatgtctggtgctgtgtccctaggctaagttcaccccaggcacactggacaccaggtcaagacagcagacattagctagaccctgagtcaacaatggagaggaaattcccattccacccaactgtctgggcttccattgactcaggacctggggaagactcagcacacgtagcagaattttacagcagacctatgggtatgcctggggtggttgcaactggtaatatgtacaaaaataactagcacatggaagaatttgcttatttccatccrtttgctcacttgttgaacaaatatttattgagtgacttctcagtgtcatgctagggaatatgcattttaaacatttcatgagtagaacaaataaacatttttaaagagataaaagatatttttataatctcattagtgatactctcaacctaatcctttatgtgagtagttcattcattctggagattcctgaggataacaacaatatatattgtttatcttattcatatactttaaaattattattattgaatcaacatgctacaatcctcatacaaaccaatcactagaaattgtcaatgacatttattatagaatatttaattcatgtagtaataaaataatatataaaacatattgatatgtatttaataataatattgaatatgcaatacatatgaaaacccacacattccccattaagcctaagaaattgaataatgccaattcctctgaagctccctgtatgccctcccaggttggatcgccatccctctcccaagagtagaccattttcttgaattgctatggatcatcctctcgtgtttcttcataggttttattttatgtgactatatctctaaacaagatatcacttagttttgtctgttctggaatttcacatcaatggaatcatattgtatgtgtttttcctagatagatggatttttatatctatagaaattttatagatatatagagatataatacatatatctaaatacattatgtataatatatacgtatatgtataaaagatgtatatatacagataaatctatattgtatatatattcagatatatatttatataaacagatatatatgtgaacattgactacattatatttctttgttttgagacagagtctcgctctgtcccaggctggagcgcagtggcacaatctcagctcactgcaacctctgcctcccgagttcaagcaattctcctgcctcagcctcccgagtagctgggattacaggcatgtgccaccatgcctggctaattttctgtatttttagtacagatggggtttcaccatcttggccaggctgttcttgaactcctgaccttgtgatctgcccgcctcagcctcccaaagtgctaggattacaggcatgagacaccacacccggccaacatgatacatttaaaatttattcagataaatacaaatagctggaattcagttattttactgcataatattcca

SEQ ID NO: 90972 - DNA, 824 bp, Homo sapiens
cagaatttctcaacttgaagtgacctagaaatgcagtctaacaggaaagatcaggtgccagcctgtaggtgacttggagaggcaagaatgtgagtcctctgtctcccggggttcctctgccacctctgttccagctcctattgcgactcrtatctcactacaccatgagtcacttcatccaagtctctgcttggcctaaggtcacacccagaatttctaccctgggagtttctccactgaaggtgtctgatttcaagatctgggttgtgttttcaaacaacacttcagcacctttcaaagtgacgtcatggtaagagtgatggtattaactccagccctggtactaggggatggatggcaagagctcagactcccggcaagctggctgctcagagagggacacaagggaaagctccacctattagctgtgtttttccaactaaagatttaattaagccactgctgtgtcaatattcttagcatgccacccacctcttcccttggatgaaaacattgtttggttgccaagcacggattcagaggggaattgaagctcgctagagggaaaacagtatcgagatgcaacctatagtccctccatggaagggccatttggtgtgggcttctggttgctttgtggtttctgcaggctgtgcacacagctgcactccagacctggaacagggcctcaaacctttcaaagggctcctatggaattacttgacttcctttttctcttctgtcagcttctgtctttctctcaggaaagagtgtccagtgggcaaactgggtttgccaccctggttccttaaaaccataattgt

SEQ ID NO: 90973 - DNA, 591 bp, Homo sapiens
tttcttcatttgttcaggctgtcttcagtttctctcagcagtggtttgtatttttcagagtatagggctagattcggcagttggtactgaactttattccagtgctttctctgttttcctagtcccatgtagtttacaaccgtctttccccacttgtttgaaatgcgtagaagttgcaaaattcttgtatgtacaatcacatgtcacttaatgatggggatacattctcaraaatgtgtcaggcgatttcatcatcatgccaacatcatgagaagtaagagtgtacttagaggaacctaggcggtgtagcctaccacacacctagtctgccaacctgtacagcatgttaccgtattgaatactgtaggtaattgtaacatggggaagtatttgtgtatctaaacatagaaaagatacagtaaaaatatattataatcttatgggaccactgttgtatatatccggtccatcactgaccacaacatcattatgcggtgtataactacttggatctgtttccgaattttcttcgggggttttgaaagttggaaacaaatgagagaaatttagttaaaaaccagaataggccag

SEQ ID NO: 90974 - DNA, 2310 bp, Homo sapiens
ggtaggaaaatagctgaagattcatgtgcattatttgacatttcctttgtcatctgctttttaagcaaaaaagggttttgtgttagaaattctacttgagcagattataaagagctttaaaaaacaactttcggttgccaaaagtttgagcatttgatttcattacctgtgtctccctcactggtgtccagacggtcaactgaatactcctgaaacccagggagcaggtgacttcctggagtgctttgtccccagagtcagccactgcttcctctgtgggggtggagagtttgtctttggccatgcagtgtgcgacagttcaggacgggtagggatgggtcccattctgtctgggtcaagggctctatcagcttcttccatgtgcctttgggaagaaatctcgttactttaagtttgctttcctgttatcttgatgaagtgcccattttagcagacacttgtagtgctgaccacttagggaatgtacaaactcctaagcttctaaagggaggcatggcaaaaacgttggggtcaggatgtctctcacgctgctcatgttaatactattaacacatgatttgagaaataagttttctctaaaatgcatattttgccgccacacactgaacaatattatttccagtgaagtttgatgcctgttcttacgttgtgttcacctgttggttcaccactcagcagatctgattctgcaagaattaatggtagaactagatcatcctttctaacagacgagcctgtgtcctgtgacggcctttcacagcggaatgcagttgtacctcacattacttttgaaacttcactcgttccagttggtacaagtatttgccaaagccatttcctatgttcaccgtggcccctcctgatgtggctgtcagcgcagcgttgttgaacagggctattctttttacaaggtgtgaagtgtggctcttcgcttcgtctttgccatggcattaaaagaaagttccctgtcttctttcaatattagttatttcaaatgaatatgtgctacttaaaagcttgttttgtttctttgtatataatttgccttggatttattgtgcacagtttgttgagttgtatgtttttgtgaattatcaggagtaaatttgacaagtacatgtgaataacctcctgtaaatgaattttataacaaaaatgtactgaactattttttaaagttgtgcagattagcaattttttgctatagctttgacttttctatgctgtgaattaatagctgcgatttggcaaacagccctgttgtctttgttaaaccctaaattttaagaggaaatggcagaattaaaagcagaaacaagaagatggacatggattagaggttatgtattatgaagtaaactacaaggtactaacatcatttcgtctgccatttggtttgctttatgctgaaattacttggtggggatttgtgcaattcagatataaaaagtttcattatccagcccggccctccttcctagctccttttggaatcttctctgtacagtaatgaggtgcattgaggccagctgtgctgtttagttacagactgaagtttggtccaacagaaatatgtgctgatcattaggctggaattggggtggaggtgagataggaggaacagatgaacagtgacccgtgaaaggagctgccagaagcactggtggagggacagggtagaattgcccttgccaggggtaattgctgatggttatggaagtggaacacactttataaaacaataaacttcaggaaatgtagtcagcttccccacacttgtgcctgttaaaaggcacttgacctccgcctctgtgtctccttctgtacccagaagtgtgtgcacacagcccacttggcctgcttggcttgttcagtatgcatacacaaattaccagggagggtaaaatggtgtgtttgggacttagggggagtaataaatttgcccaatggccwggcgagagatgagtgctgcatggtggtcatttgtggaattggttatgcagcagccttagtgatggtttttgaagtcaccagacatctctttcctgacccatccgcccccacaatcgcccccacctcctgggtttcaccattcattgaggaataaataattgagggacgaaactaaaatttagcctcagctcaaatagaattgataatgttgtacagcaccacaaaggcagtttctgtacacaagggatccctccatgactccaaagacgtgagttatcgtcaccctgtcctactacacagaaggcatttgccaagtcaaatggcagaaatggcata

SEQ ID NO: 90975 - DNA, 2310 bp, Homo sapiens
ggtaggaaaatagctgaagattcatgtgcattatttgacatttcctttgtcatctgctttttaagcaaaaaagggttttgtgttagaaattctacttgagcagattataaagagctttaaaaaacaactttcggttgccaaaagtttgagcatttgatttcattacctgtgtctccctcactggtgtccagacggtcaactgaatactcctgaaacccagggagcaggtgacttcctggagtgctttgtccccagagtcagccactgcttcctctgtgggggtggagagtttgtctttggccatgcagtgtgcgacagttcaggacgggtagggatgggtcccattctgtctgggtcaagggctctatcagcttcttccatgtgcctttgggaagaaatctcgttactttaagtttgctttcctgttatcttgatgaagtgcccattttagcagacacttgtagtgctgaccacttagggaatgtacaaactcctaagcttctaaagggaggcatggcaaaaacgttggggtcaggatgtctctcacgctgctcatgttaatactattaacacatgatttgagaaataagttttctctaaaatgcatattttgccgccacacactgaacaatattatttccagtgaagtttgatgcctgttcttacgttgtgttcacctgttggttcaccactcagcagatctgattctgcaagaattaatggtagaactagatcatcctttctaacagacgagcctgtgtcctgtgacggcctttcacagcggaatgcagttgtacctcacattacttttgaaacttcactcgttccagttggtacaagtatttgccaaagccatttcctatgttcaccgtggcccctcctgatgtggctgtcagcgcagcgttgttgaacagggctattctttttacaaggtgtgaagtgtggctcttcgcttcgtctttgccatggcattaaaagaaagttccctgtcttctttcaatattagttatttcaaatgaatatgtgctacttaaaagcttgttttgtttctttgtatataatttgccttggatttattgtgcacagtttgttgagttgtatgtttttgtgaattatcaggagtaaatttgacaagtacatgtgaataacctcctgtaaatgaattttataacaaaaatgtactgaactattttttaaagttgtgcagattagcaattttttgctatagctttgacttttctatgctgtgaattaatagctgcgatttggcaaacagccctgttgtctttgttaaaccctaaattttaagaggaaatggcagaattaaaagcagaaacaagaagatggacatggattagaggttatgtattatgaagtaaactacaaggtactaacatcatttcgtctgccatttggtttgctttatgctgaaattacttggtggggatttgtgcaattcagatataaaaagtttcattatccagcccggccctccttcctagctccttttggaatcttctctgtacagtaatgaggtgcattgaggccagctgtgctgtttagttacagactgaagtttggtccaacagaaatatgtgctgatcattaggctggaattggggtggaggtgagataggaggaacagatgaacagtgacccgtgaaaggagctgccagaagcactggtggagggacagggtagaattgcccttgccaggggtaattgctgatggttatggaagtggaacacactttataaaacaataaacttcaggaaatgtagtcagcttccccacacttgtgcctgttaaaaggcacttgacctccgcctctgtgtctccttctgtacccagaagtgtgtgcacacagcccacttggcctgcttggcttgttcagtatgcatacacaaattaccagggagggtaaaatggtgtgtttgggacttagggggagtaataaatttgcccaatggcctggcgagagatgagtgctgcatggtggtcatttgtggaattggttatgcagcagccttagtgatggtttttgaagtcaccagacatctctytcctgacccatccgcccccacaatcgcccccacctcctgggtttcaccattcattgaggaataaataattgagggacgaaactaaaatttagcctcagctcaaatagaattgataatgttgtacagcaccacaaaggcagtttctgtacacaagggatccctccatgactccaaagacgtgagttatcgtcaccctgtcctactacacagaaggcatttgccaagtcaaatggcagaaatggcata

SEQ ID NO: 90976 - DNA, 2310 bp, Homo sapiens
ggtaggaaaatagctgaagattcatgtgcattatttgacatttcctttgtcatctgctttttaagcaaaaaagggttttgtgttagaaattctacttgagcagattataaagagctttaaaaaacaactttcggttgccaaaagtttgagcatttgatttcattacctgtgtctccctcactggtgtccagacggtcaactgaatactcctgaaacccagggagcaggtgacttcctggagtgctttgtccccagagtcagccactgcttcctctgtgggggtggagagtttgtctttggccatgcagtgtgcgacagttcaggacgggtagggatgggtcccattctgtctgggtcaagggctctatcagcttcttccatgtgcctttgggaagaaatctcgttactttaagtttgctttcctgttatcttgatgaagtgcccattttagcagacacttgtagtgctgaccacttagggaatgtacaaactcctaagcttctaaagggaggcatggcaaaaacgttggggtcaggatgtctctcacgctgctcatgttaatactattaacacatgatttgagaaataagttttctctaaaatgcatattttgccgccacacactgaacaatattatttccagtgaagtttgatgcctgttcttacgttgtgttcacctgttggttcaccactcagcagatctgattctgcaagaattaatggtagaactagatcatcctttctaacagacgagcctgtgtcctgtgacggcctttcacagcggaatgcagttgtacctcacattacttttgaaacttcactcgttccagttggtacaagtatttgccaaagccatttcctatgttcaccgtggcccctcctgatgtggctgtcagcgcagcgttgttgaacagggctattctttttacaaggtgtgaagtgtggctcttcgcttcgtctttgccatggcattaaaagaaagttccctgtcttctttcaatattagttatttcaaatgaatatgtgctacttaaaagcttgttttgtttctttgtatataatttgccttggatttattgtgcacagtttgttgagttgtatgtttttgtgaattatcaggagtaaatttgacaagtacatgtgaataacctcctgtaaatgaattttataacaaaaatgtactgaactattttttaaagttgtgcagattagcaattttttgctatagctttgacttttctatgctgtgaattaatagctgcgatttggcaaacagccctgttgtctttgttaaaccctaaattttaagaggaaatggcagaattaaaagcagaaacaagaagatggacatggattagaggttatgtattatgaagtaaactacaaggtactaacatcatttcgtctgccatttggtttgctttatgctgaaattacttggtggggatttgtgcaattcagatataaaaagtttcattatccagcccggccctccttcctagctccttttggaatcttctctgtacagtaatgaggtgcattgaggccagctgtgctgtttagttacagactgaagtttggtccaacagaaatatgtgctgatcattaggctggaattggggtggaggtgagataggaggaacagatgaacagtgacccgtgaaaggagctgccagaagcactggtggagggacagggtagaattgcccttgccaggggtaattgctgatggttatggaagtggaacacactttataaaacaataaacttcaggaaatgtagtcagcttccccacacttgtgcctgttaaaaggcacttgacctccgcctctgtgtctccttctgtacccagaagtgtgtgcacacagcccacttggcctgcttggcttgttcagtatgcatacacaaattaccagggagggtaaaatggtgtgtttgggacttagggggagtaataaatttgcccaatggcctggcgagagatgagtgctgcatggtggtcatttgtggaattggttatgcagcagccttagtgatggtttttgaagtcaccagacatctctttcctgacccatccgcccccacaatcgcccccacctcctgggtttcaccattcattgaggaataaataattgagggacgaaactaaaatttagcctcagctcaaatagaattgataatgttgtacagcaccacaaaggcagtttctgtacacaagggatccctccatgactccaaagacstgagttatcgtcaccctgtcctactacacagaaggcatttgccaagtcaaatggcagaaatggcata

SEQ ID NO: 90977 - DNA, 460 bp, Homo sapiens
ctaaaataataatattaattgaatattatgagaagagccaagcagatggtttttgaatggtcaagaattgtgaagggtctgatattttaccctacttacaagctaacaagttagcctgctacagttctatgaatgctggtagaatatgagtctcttgggtcagagacaaaagatagtttattacagcaatagcagtagcyagaatgtcagcatttgcactggttccccaagctccaattcccacaaagtgacataaagaggctcaggtgacatctgcacatggagtaggctgtattacagaagaaaaaaaactgaagttagtgaaaccaagccttttaaaatgaacactaatagagcctattctttgctccagagggagatactgtctccatctttcaaggctgtttactataggaatactgaagaaatagccgggaacaaaagcggtcagtgcttaact

SEQ ID NO: 90978 - DNA, 973 bp, Homo sapiens
cagattttatctctgtaggcctctgggaatacttttagagattcacagtgaaaaatcagagtcaactcatgaatttctactttattgcataaaaacaaggggactataaaatgtgttcaaagggtataggatggaaatatacagaaatatagatcacacataacctgaatcagttgattcatctaaattatagtaatatctaaacaattgatgttacattgacgatccctttatttttatttttatttttttgagacaaagtcttgctctcatgcccaggctggagtgcagtggcgcgatcttggctycctgcaacctctgcctcccaggtaggagtgagtctcctgcctcagtttcccaagtggctgcgattacaggcacctgccaccaagcccggctaatttttgtattttttttttttttcagtagagacaggggttttaccatgttggccaggctgtactccgactcctgacctcaaatgatccacctgccttggcctcccaaagtgctgggattacaggcatgagccactgcacccaacctgaagatccatttaaaaagttatctccttcattagagatttccattctcctcttgctcttttgttgacctgagtttcctctgggcactttaatttctgcagttgtgaaaacagctgcatcttaaacagagccaccagagaactacagaggaagctacatttgatttcttttcatgagacacttaagagggaaagctgggtgaagagtatatgaggactctgaactatatttgcaaatattctgtaaatctaaaactattcaaaaagaaaattaggaaacttgggttttattacctctaagtagccaaaggctctaggtggctgattaaagcatcgaagctttaaaaattactatagcaattttgaatttgttacgttcctttctgacaataaattattacttaattcttttctagtgagtctggattc

SEQ ID NO: 90979 - DNA, 973 bp, Homo sapiens
cagattttatctctgtaggcctctgggaatacttttagagattcacagtgaaaaatcagagtcaactcatgaatttctactttattgcataaaaacaaggggactataaaatgtgttcaaagggtataggatggaaatatacagaaatatagatcacacataacctgaatcagttgattcatctaaattatagtaatatctaaacaattgatgttacattgacgatccctttatttttatttttatttttttgagacaaagtcttgctctcatgcccaggctggagtgcagtggcgcgatcttggctccctgcaacctctgcctcccaggtaggagtgagtctcctgcctcagtttcccaagtggctgcgattacaggcacctgccaccaagcccggctaatttttgtattttttttttttttcagtagagacaggggttttaccatgttggccaggctgtactccgactcmtgacctcaaatgatccacctgccttggcctcccaaagtgctgggattacaggcatgagccactgcacccaacctgaagatccatttaaaaagttatctccttcattagagatttccattctcctcttgctcttttgttgacctgagtttcctctgggcactttaatttctgcagttgtgaaaacagctgcatcttaaacagagccaccagagaactacagaggaagctacatttgatttcttttcatgagacacttaagagggaaagctgggtgaagagtatatgaggactctgaactatatttgcaaatattctgtaaatctaaaactattcaaaaagaaaattaggaaacttgggttttattacctctaagtagccaaaggctctaggtggctgattaaagcatcgaagctttaaaaattactatagcaattttgaatttgttacgttcctttctgacaataaattattacttaattcttttctagtgagtctggattc

SEQ ID NO: 90980 - DNA, 729 bp, Homo sapiens
agctttctgaaatgtaaatgagatcacctcacatccctgcttaaacgcttccagtggctcctgtcaccctcttttccctgtctataagatctaccagatctgttccagaaagctctcttccttttcaccctctccaaccacactgggcccttgtggctctccaaacactaagcactcagatattcatatatttttttctattctcaaattaggtctctgctaaaaaaaatcatttccccataaagccttctttgatcaccatattcaaataacattttccttgcttcttcttcttttttttctccctcaataacacttaccagtgcctaacattatgtacctgtgtcttgctcatcaccatctgcaagcagataagcttttcatgggtaggaawtgtgtcagcttcattgttgtatcctcaaaggctagaattatagagttcgtagaagaagctcaatacacatttgtagaaggaatgaatgaaagaatgaaggaatgaatgattggccacatactctgggattttagagttttacattttcaacagctacttccagggcatgcctgattgccgtttccacttttccctgtgatcctgtgagatggagcctgcatctcacatattggacacttctcccacacttcctctctccccctttctctctcccaaaaatttgagcctcaggaaaggcatttcctaaatgaggaaaggggcaaagaaaatgagct

SEQ ID NO: 90981 - DNA, 695 bp, Homo sapiens
gatcccttcagaatatggcttgcaggtgtaaattctacagattcagataacctcattcagtgctatcttttaaatgtttcaaggctcagagcagtacttatgatcttagaatttctcatcttttatactgttcattaatwcttttatagtgtctcatataacctcatgttctaaattgaaaactggtctcggccaggcagagtggctcatgcctgtaatccccagcactttgagaggctgaagcaggtggatcatttgaggttaggagtttgaaacctgcctggccaacgtggtgaaaccccgtctctactaagaatacaaaaaattagcccggtgtggtggcacgcatctgtaatcccagctactcgggaggccgaggcagaagaattgcttgaacccaggaagtggaggttgtagtgagccaagatggtgccactgcactccagcatgggcaacagagggagactcaatataaaaaataactacatacatagatacatgcatacatacatacatacaaacatacatacataactggtctcaatgcagttaatttaccatagtgctttcatataacagccctgatccaagaatttggttttactagtctcttgcttgaaaaacaaacaaattcatctaaatggggagaaattcccagtttttcttcctaaaaatttaaccaggctcctagttat

SEQ ID NO: 90982 - DNA, 1006 bp, Homo sapiens
ttcattaatacttgaaaatatatctttgaaaaacagtaaaaagtgttataggttgctaattggcatattagatttctttcataatattgtgttttggtggtttgatgtgtgtatatttctagtaaatactaacagtataaatttctagatttttgtcttatttttctrtattctcaaactgaacttaataaattgtgcataatgaatagtcaaatccaacctcccttctcacttcaaatattggttgtatcctcaaccaatccagtaaatatattttgttaattagctgtcaccagtgtattggcataggtatatatttttgtctgcagaattaattcctaaaatgttattggggcatgccctctggtaattattgatttctactgattaaaaacacatttatattcataagttattcattgcccacaggtacaataatgaagcaaagcacatcaagattttaacaagagatggcttttttcacattgcagaaaatagaaaatttaaaagtttaatggtaagcattgattatttcttttcaatctgggatccttatttttcttttgttagaaaggtcattttaattctatagtttcttggaaattttgctcactgaaaagttatttaaagataatcatattctaattttgcaacaaaatcctgaaaattctaatttataaatctctaagttttatattgctcgaatcgtaatcttcattgtaaattgtttgcaggtttagatagagttttggtttgtgtttaaatgatacagcagattttaaatatacctttctttcctctttttttcttcctttgcctctatgtcctgattcaggcagaggacagtattttaaattataacacaaaaagttgtaattagtaaaatatgtctaacatttaggttcattttttataaaatgcaatataaagtcaaattgaaaagatttttgtattttttgctattttaagtgatctctaccatggttctcattcattaccttagata

SEQ ID NO: 90983 - DNA, 1006 bp, Homo sapiens
ttcattaatacttgaaaatatatctttgaaaaacagtaaaaagtgttataggttgctaattggcatattagatttctttcataatattgtgttttggtggtttgatgtgtgtatatttctagtaaatactaacagtataaatttctagatttttgtcttatttttctgtattctcaaactgaacttaataaattgtgcataatgaatagtcaaatccaacctcccttctcacttcaaatattggttgtatcctcaaccaatccagtaaatatattttgttaattagctgtcaccagtgtattggcataggtatatatttttgtctgcagaattaattcctaaaatgttattggggcatgccctctggtaattattgatttctactgattaaaaacacatttatattcataagttattcattgcccacaggtacaataatgaagcaaagcacatcaagattttaacaagagatggcttttttcacattgcagaaaatagaaaatttaaaagtttaatggtaagcattgattatttcttttcaatctgggatccttatttttcttttgttagaaaggtcattttaattctatagtttcttggaaattttgctcactgaaaagttatttaaagataatcatattctaattttgcaacaaaatcctgaaaattctaatttataaatctctaagttttatattgctcgaatcrtaatcttcattgtaaattgtttgcaggtttagatagagttttggtttgtgtttaaatgatacagcagattttaaatatacctttctttcctctttttttcttcctttgcctctatgtcctgattcaggcagaggacagtattttaaattataacacaaaaagttgtaattagtaaaatatgtctaacatttaggttcattttttataaaatgcaatataaagtcaaattgaaaagatttttgtattttttgctattttaagtgatctctaccatggttctcattcattaccttagata

SEQ ID NO: 90984 - DNA, 790 bp, Homo sapiens
cttgcaaatacaaatgctttcttgggtatatcaagaggcattctttgtcacctccctagagatcttcaagtggtcagatgctcagcagttctgtaaaggtgagtaatcctgtaatagaggcatatttgggtctgtcgctgtatctggatgagataacatgttatgtttaagataaaagaccagtaaattcacatgtcatctcaagtgaagagggctcctgagtgctccatgcttccttttactcctaggggcactgggtatgagggttaagtcatgatagctggccaaacctattcatcctgtgatctttatgactttgatctatggtatccatactgtgttagggtgaggttagaagttagagacaagagatgttaatattacctcatcctcatcccattcaattcaaaaaatacttttaagtaactactagatactaagctctagaccagacagtggggcctgggagtgacataaaaatgaatctgatagtctttgcctttgagaaactcctacactagttgtaaaggccractcttaaatatatattgtactatgaggtagttctcttatttaagaagtgctatgaggtcatagagaaataaatcataaatgctacctagaagaattagagaactataggccctctgagcagaggaaacagcatttgcaaaagcataagtgtgcaagaacatgatgtctctggaaaaaatcagtgttgttggagtataggctacatagtgaggaatggtagttgattaaatggattggagcttacttgtaaaaaaat

SEQ ID NO: 90985 - DNA, 790 bp, Homo sapiens
cttgcaaatacaaatgctttcttgggtatatcaagaggcattctttgtcacctccctagagatcttcaagtggtcagatgctcagcagttctgtaaaggtgagtaatcctgtaatagaggcatatttgggtctgtcgctgtatctggatgagataacatgttatgtttaagataaaagaccagtaaattcacatgtcatctcaagtgaagagggctcctgagtgctccatgcttccttttactcctaggggcactgggtatgagggttaagtcatgatagctggccaaacctattcatcctgtgatctttatgactttgatctatggtatccatactgtgttagggtgaggttagaagttagagacaagagatgttaatattacctcatcctcatcccattcaattcaaaaaatacttttaagtaactactagatactaagctctagaccagacagtggggcctgggagtgacataaaaatgaatctgatagtctttgcctttgagaaactcctacactagttgtaaaggccaactcttaaatatatattgtactatgaggtagttctcttatttaagaagtgctatgaggtcatagagaaataaatcataaatgctacctagaagaattagagaactataggccctctgagcagaggaaacagcatttgcaaaagcataagtgtgcaagaacatgatgtctctggaaaaaatcagtgttgttggagtataggctacatagtgaggaayggtagttgattaaatggattggagcttacttgtaaaaaaat

SEQ ID NO: 90986 - DNA, 3309 bp, Homo sapiens
tgatgagtggctgacacaggacaagtgcttaattaatatatattgactaaatgaatgagcaacccttcaaaatggctatttttctttttcaaatgttttgctacttcattaaagttgtaaagtttccattgtccaggaaccgttactatccggaagattcaggatagacaagtctcttttgtactttgcaatacactttcattgatatctcatttaatccaactcttcaaagtcctaatgtctactgtcatctccttagcatattttcagcaacaccaatcatagcaccctgtaattgcagaatacctctggtgaaactcctgaatgaaacttagagctttcatgttttttctagaaatcttttgtccaagtcctccagttattcctaatgggagacacacaggaaaacctctggaagtctttccctttgggaaaacagtaaattacacatgcgacccccacccagacagagggacgagcttcgacctcattggagagagcaccatccgctgcacaagtgaccctcaagggaatggggtttggagcagccctgcccctcgctgtggaattctgggttagtgctcatttccccacatcccaaatgggttcagaatatctaacccaggccctccatatttccgtaattacaatgtggtatttatttgtgcatttgccacaatggaatgccaaaccaatgatagatggttctaaggtaggtcaacacataagatcctkatgacctttgcagatggagggactgatgaaaaaagagggaggcggtgagtggtgggaaagtccttcattagaatcatatgaattaaaaacagatgcctgtgaatctccttattgaaatgtttggtttagaaatctgacctagaaaatcggtggctccttctgccaggaaacgtcttgagttcccgcccatgcttgacagcctctcattggagttttgatgacttgaagtacaaggaaaccagacaggaaaggtggaacctgggcagaaaaactctttctggcttcctaaaaatgtgaaaaattaaatgggagctatctttacattaaattatatgagcattagctgagcgtggtggcaattgcctgtggtcccagctactcgagaggctgagatgggagtatcccttaagcctgggaggcagaggttgcagtgagccaagattgtgccactgcactccagcctgggtgacagagcaagaccctatctcaaaaacaataaaaataggcattaggaggccaaggctggtggatcactagaggtcaggagttccagaccagcccgcaaacacagtgaaactccaactctactaaaaatagaaaaaaaatttaaaaacaaaaataaattatatgagtagaaagaccagatagcaggctagtcttccaaataatatacttccttataagcctatgctaatggaactttcctttctattttacagggaagttttttttttttcataactaaaattttcttttcttctggcatcaaatctaccaaggaagagaaaagaggaaacacactgggtatctttttattaactcaaatattcttgatttcttggtctctaggtcactgtcaagccccagatcattttctgtttgccaagttgaaaacccaaaccaatgcatctgactttcccattgggacatctttaaagtacgaatgccgtcctgagtactacgggaggccattctctatcacatgtctagataacctggtctggtcaagtcccaaagatgtctgtaaacgtgcgtaaacttgcgttggatctttcccatgtctgcaaaagcttcttatggaattatttcaaatgtgggatatgagaaaccttttctgaaaagtgttcggatagatggatgtaagagtttttcttgtaggcatccttgattgttgcttgaaatgttaacttcatgagaatgtttcaagaaatagttgtagagaaaatcttcattccctatgggaaagaaaataataaatgactagatcaggaaaaaaatggtgtaggaagacaaattctgtttgaataactaggtgggaagaaatcctttgcaaactttgaaatatattgatagtaaataatgccataaatgacctttacattttgataagggatgcaaggtctctacacagatctaaatctagatctagatagatctggagggaaggtctttttgaaagtggggcttagtaggtggctgatcctcagcgctctgatgagttttctcaaggtgccaaaatctgtggaaccatcagaaccgcgtgttttcttcaggaagctacatgcaggttgagaccttacgtactgaagagagttcagattactctacctggctccaaaacattttctttcccacaggtaaatcatgtaaaactcctccagatccagtgaatggcatggtgcatgtgatcacagacatccaggttggatccagaatcaactattcttgtactacagggtgagttggcagcaacatctcttggtttaagagttccagcacagtgatagtactttctagccacatctcagcaaggaaactaggctattgccacctgctcttaagaggcttgaacacaggtgttaactcctgattgaaatgaacaaagataggagaagattagggggaaaatctgtatccttgctggaaaccagggcagtgcacatataaagagtatgctgttcactggatgggaaggaaaaaaaattagaagtgtagtagtcaaagcacacaaacaaccctaacccagagtagacattgctggaagaaagggaagaccatgtagcagctgtgtgagagaatgaatcttaatgataacagcatgatcccttgctagggctgccatcaaaaagtacaggccttcctcgttttattgtacttcgcagatgttatgctttttacaaattgaacgcttgtgggaacgctgtgtaagcatgttcgtcggcatcatttatccaacagcgtgtgttgacttcgtgtctctgtgtagcattttgattattctcacagtatcccagatgttttcattattatcatgtctgtgatagtgatctgtcatcagtgatctttgatgttactattgtcattgtttggggtccctacgaactgcacccatataagacagaaaacttaatcaataaatgtgcgtgctttgactgctccatggactagacattccccttctgtctccctctcttcaggactccctaatccctgagacacaataatactaaaatgactccaattaataaccctacaatagcctttaagtgttgacatgaagggaagagtcatgca

SEQ ID NO: 90987 - DNA, 3309 bp, Homo sapiens
tgatgagtggctgacacaggacaagtgcttaattaatatatattgactaaatgaatgagcaacccttcaaaatggctatttttctttttcaaatgttttgctacttcattaaagttgtaaagtttccattgtccaggaaccgttactatccggaagattcaggatagacaagtctcttttgtactttgcaatacactttcattgatatctcatttaatccaactcttcaaagtcctaatgtctactgtcatctccttagcatattttcagcaacaccaatcatagcaccctgtaattgcagaatacctctggtgaaactcctgaatgaaacttagagctttcatgttttttctagaaatcttttgtccaagtcctccagttattcctaatgggagacacacaggaaaacctctggaagtctttccctttgggaaaacagtaaattacacatgcgacccccacccagacagagggacgagcttcgacctcattggagagagcaccatccgctgcacaagtgaccctcaagggaatggggtttggagcagccctgcccctcgctgtggaattctgggttagtgctcatttccccacatcccaaatgggttcagaatatctaacccaggccctccatatttccgtaattacaatgtggtatttatttgtgcatttgccacaatggaatgccaaaccaatgatagatggttctaaggtaggtcaacacataagatccttatgacctttgcagatggagggactgatgaaaaaagagggaggcggtgagtggtgggaaagtccttcattagaatcatatgaattaaaaacagatgcctgtgaatctccttattgaaatgtttggtttagaaatctgacctagaaaatcggtggctccttctgccaggaaacgtcttgagttcccgcccatgcttgacagcctctcattggagttttgatgacttgaagtacaaggaaaccagacaggaaaggtggaacctgggcagaaaaactctttctggcttcctaaaaatgtgaaaaattaaatgggagctatctttacattaaattatatgagcattagctgagcgtggtggcaattgcctgtggtcccagctactcgagaggctgagatgggagtatcccttaagcctgggaggcagaggttgcagtgagccaagattgtgccactgcactccagcctgggtgacagagcragaccctatctcaaaaacaataaaaataggcattaggaggccaaggctggtggatcactagaggtcaggagttccagaccagcccgcaaacacagtgaaactccaactctactaaaaatagaaaaaaaatttaaaaacaaaaataaattatatgagtagaaagaccagatagcaggctagtcttccaaataatatacttccttataagcctatgctaatggaactttcctttctattttacagggaagttttttttttttcataactaaaattttcttttcttctggcatcaaatctaccaaggaagagaaaagaggaaacacactgggtatctttttattaactcaaatattcttgatttcttggtctctaggtcactgtcaagccccagatcattttctgtttgccaagttgaaaacccaaaccaatgcatctgactttcccattgggacatctttaaagtacgaatgccgtcctgagtactacgggaggccattctctatcacatgtctagataacctggtctggtcaagtcccaaagatgtctgtaaacgtgcgtaaacttgcgttggatctttcccatgtctgcaaaagcttcttatggaattatttcaaatgtgggatatgagaaaccttttctgaaaagtgttcggatagatggatgtaagagtttttcttgtaggcatccttgattgttgcttgaaatgttaacttcatgagaatgtttcaagaaatagttgtagagaaaatcttcattccctatgggaaagaaaataataaatgactagatcaggaaaaaaatggtgtaggaagacaaattctgtttgaataactaggtgggaagaaatcctttgcaaactttgaaatatattgatagtaaataatgccataaatgacctttacattttgataagggatgcaaggtctctacacagatctaaatctagatctagatagatctggagggaaggtctttttgaaagtggggcttagtaggtggctgatcctcagcgctctgatgagttttctcaaggtgccaaaatctgtggaaccatcagaaccgcgtgttttcttcaggaagctacatgcaggttgagaccttacgtactgaagagagttcagattactctacctggctccaaaacattttctttcccacaggtaaatcatgtaaaactcctccagatccagtgaatggcatggtgcatgtgatcacagacatccaggttggatccagaatcaactattcttgtactacagggtgagttggcagcaacatctcttggtttaagagttccagcacagtgatagtactttctagccacatctcagcaaggaaactaggctattgccacctgctcttaagaggcttgaacacaggtgttaactcctgattgaaatgaacaaagataggagaagattagggggaaaatctgtatccttgctggaaaccagggcagtgcacatataaagagtatgctgttcactggatgggaaggaaaaaaaattagaagtgtagtagtcaaagcacacaaacaaccctaacccagagtagacattgctggaagaaagggaagaccatgtagcagctgtgtgagagaatgaatcttaatgataacagcatgatcccttgctagggctgccatcaaaaagtacaggccttcctcgttttattgtacttcgcagatgttatgctttttacaaattgaacgcttgtgggaacgctgtgtaagcatgttcgtcggcatcatttatccaacagcgtgtgttgacttcgtgtctctgtgtagcattttgattattctcacagtatcccagatgttttcattattatcatgtctgtgatagtgatctgtcatcagtgatctttgatgttactattgtcattgtttggggtccctacgaactgcacccatataagacagaaaacttaatcaataaatgtgcgtgctttgactgctccatggactagacattccccttctgtctccctctcttcaggactccctaatccctgagacacaataatactaaaatgactccaattaataaccctacaatagcctttaagtgttgacatgaagggaagagtcatgca

SEQ ID NO: 90988 - DNA, 3309 bp, Homo sapiens
tgatgagtggctgacacaggacaagtgcttaattaatatatattgactaaatgaatgagcaacccttcaaaatggctatttttctttttcaaatgttttgctacttcattaaagttgtaaagtttccattgtccaggaaccgttactatccggaagattcaggatagacaagtctcttttgtactttgcaatacactttcattgatatctcatttaatccaactcttcaaagtcctaatgtctactgtcatctccttagcatattttcagcaacaccaatcatagcaccctgtaattgcagaatacctctggtgaaactcctgaatgaaacttagagctttcatgttttttctagaaatcttttgtccaagtcctccagttattcctaatgggagacacacaggaaaacctctggaagtctttccctttgggaaaacagtaaattacacatgcgacccccacccagacagagggacgagcttcgacctcattggagagagcaccatccgctgcacaagtgaccctcaagggaatggggtttggagcagccctgcccctcgctgtggaattctgggttagtgctcatttccccacatcccaaatgggttcagaatatctaacccaggccctccatatttccgtaattacaatgtggtatttatttgtgcatttgccacaatggaatgccaaaccaatgatagatggttctaaggtaggtcaacacataagatccttatgacctttgcagatggagggactgatgaaaaaagagggaggcggtgagtggtgggaaagtccttcattagaatcatatgaattaaaaacagatgcctgtgaatctccttattgaaatgtttggtttagaaatctgacctagaaaatcggtggctccttctgccaggaaacgtcttgagttcccgcccatgcttgacagcctctcattggagttttgatgacttgaagtacaaggaaaccagacaggaaaggtggaacctgggcagaaaaactctttctggcttcctaaaaatgtgaaaaattaaatgggagctatctttacattaaattatatgagcattagctgagcgtggtggcaattgcctgtggtcccagctactcgagaggctgagatgggagtatcccttaagcctgggaggcagaggttgcagtgagccaagattgtgccactgcactccagcctgggtgacagagcaagaccctatctcaaaaacaataaaaataggcattaggaggccaaggctggtggatcactagaggtcaggagttccagaccagcccgcaaacacagtgaaactccaactctactaaaaatagaaaaaaaatttaaaaacaaaaataaattatatgagtagaaagaccagatagcaggctagtcttccaaataatatacttccttataagcctatgctaatggaactttcctttctattttacagggaagttttttttttttcataactaaaattttcttttcttctggcatcaaatctaccaaggaagagaaaagaggaaacacactgggtatctttttattaactcaaatattcttgatttcttggtctctaggtcactgtcaagccccagatcattttctgtttgccaagttgaaaacccaaaccaatgcatctgactttcccattgggacatctttaaagtacgaatgccgtcctgagtactacgggaggccattctctatcacatgtctagataacctggtctggtcaagtcccaaagatgtctgtaaacgtgcgtaaacttgcgttggatctttcccatgtctgcaaaagcttcttatggaattatttcaaatgtgggatatgagaaaccttttctgaaaagtgttcggatagatggatgtaagagtttttcttgtaggcatccttgattgttgcttgaaatgttaacttcatgagaatgtttcaagaaatagttgtagagaaaatcttcattccctatgggaaagaaaataataaatgactagatcaggaaaaaaatggtgtaggaagacaaattctgtttgaataactaggtgggaagaaatcctttgcaaactttgaaatatattgatagtaaataatgccataaatgacctttacattttgataagggatgcaaggtctctacacagatctaaatctagatctagatagatctggagggaaggtctttttgaaagtggggcttagtaggtggctgatcctcagcgctctgatgagttttctcaaggtgccaaaatctgtggaaccatcagaaccgcgtgttttcttcaggaagctacatgcaggttgagaccttacgtactgaagagagttcagattactctacctggctccaaaacattttctttcccacaggtaaatcatgtaaaactcctccagatccagtgaatggcatggtgcatgtgatcacagacatccaggttggatccagaatcaactattcttgtactacagggtgagttggcagcaacatctcttggtttaagagttccagcacagygatagtactttctagccacatctcagcaaggaaactaggctattgccacctgctcttaagaggcttgaacacaggtgttaactcctgattgaaatgaacaaagataggagaagattagggggaaaatctgtatccttgctggaaaccagggcagtgcacatataaagagtatgctgttcactggatgggaaggaaaaaaaattagaagtgtagtagtcaaagcacacaaacaaccctaacccagagtagacattgctggaagaaagggaagaccatgtagcagctgtgtgagagaatgaatcttaatgataacagcatgatcccttgctagggctgccatcaaaaagtacaggccttcctcgttttattgtacttcgcagatgttatgctttttacaaattgaacgcttgtgggaacgctgtgtaagcatgttcgtcggcatcatttatccaacagcgtgtgttgacttcgtgtctctgtgtagcattttgattattctcacagtatcccagatgttttcattattatcatgtctgtgatagtgatctgtcatcagtgatctttgatgttactattgtcattgtttggggtccctacgaactgcacccatataagacagaaaacttaatcaataaatgtgcgtgctttgactgctccatggactagacattccccttctgtctccctctcttcaggactccctaatccctgagacacaataatactaaaatgactccaattaataaccctacaatagcctttaagtgttgacatgaagggaagagtcatgca

SEQ ID NO: 90989 - DNA, 772 bp, Homo sapiens
acctttgtgctcaaataaactctatccttaaatatattttctgaatctcattatttaaggktgaaaatgtgctaacctaaataattcacaggatttgttttttattctcattttttcctaacctatccacctggttcaaggcacatagattaagaaggaaaatggaaatgggactaatatcccaggcttcactgtccctcttcggggccctggggaggagactcccaaaagtctagacatgttcacccacatcctgtatgtggtttctggaaacgaaatgatcatggcttttcctgaaccatggcttaactttgtgaatccacaactctctcttccccaggagatccaaaaaggtagggtaggatgtaaaggcttcaatctgttcaagtggatatgagactccctggctccccttacaataagtagcatggattttctctctctgccttacttcctccaaacattctgaatgagaagtgttcaaaccactatttgttcaattgcttaatctactttgggacacaagtttaataaattaaaatattcttctatctgttccccttgatcagtgaacataaagttatcttttgactcatatttaaaatgttcagtattacaacactgaacaatagtatggaggaaaaaaaatgccaacttaagtttgaacttgcttcaccattcctatcccaacccccatgattagaaaatcaaaaagaacactttgagaaataacctcagtggggtcaaaagccagaggagcctccaggatccc

SEQ ID NO: 90990 - DNA, 772 bp, Homo sapiens
acctttgtgctcaaataaactctatccttaaatatattttctgaatctcattatttaaggttgaaaatgtgctaacctaaataattcacaggatttgttttttattctcattttttcctaacctatccacctggttcaaggcacatagattaagaaggaaaatggaaatgggactaatatcccaggcttcactgtccctcttcggggccctggggaggagactcccaaaagtctagacatgttcacccacatcctgtatgtggtttctggaaacgaaatgatcatggcttttcctgaaccatggcttaactttgtgaatccacaactctctcttccccaggagatccaaaaaggtagggtaggatgtaaaggcttcaatctgttcaagtggatatgagactccctggctccccttacaataagtagcatggattttstctctctgccttacttcctccaaacattctgaatgagaagtgttcaaaccactatttgttcaattgcttaatctactttgggacacaagtttaataaattaaaatattcttctatctgttccccttgatcagtgaacataaagttatcttttgactcatatttaaaatgttcagtattacaacactgaacaatagtatggaggaaaaaaaatgccaacttaagtttgaacttgcttcaccattcctatcccaacccccatgattagaaaatcaaaaagaacactttgagaaataacctcagtggggtcaaaagccagaggagcctccaggatccc

SEQ ID NO: 90991 - DNA, 656 bp, Homo sapiens
tagggtaaagctgcttagtgtcagcctctgacttgaacacttacaagcctagatcattcattttttatgtgcctttccaaaaaatggagttacagtgtttacacttcataggataaaaacaataaaaatgaaatcatcacagaaaaccaaacaccgtatgttctcacttgtaaatgaaagttgaacaatgagaacatgtgggcacagggagggraacatcatacactgggacctttcacagggttgggggttaggggagggatagtattaggagaaatacctaatgtagatgacgggttgttgggtgcagcaaaccaccgtggcacatgtatacctatgtaacaaacctgcacattctgcacatgtatcccagaacttaaagtataatttaaaaaaatgaaatcatccacaaaagtacttaccatgtgttgggaattatggaaagcaaacaactgctacattgaaacatggtcaatgagtaaagatattacatttttctttcttcttctgtttagcaattattatacagatacaagccagaaagaagcttttcatttagaagcacgagaagtatattctgttgatccatacaacccagccagctgatcagaagacaaactggtggtatgtaatgaaatggaatattattaatttac

SEQ ID NO: 90992 - DNA, 1470 bp, Homo sapiens
ttttaactgagcattttatatgatgcaattctctcttacttattaacatataaattatagttctttttttcacatttttcaggggttgtcctacatttgcaatatctatttgcagctaatctaagtcctctttcaaatagcactataccactttacgggtactgtgagtaactcataataacaaaacaatcctagctcctctgctattttttgtcgtatgcaatctgtttctagattcactctttaagtgctagtaaagccatatacctttcactcatcctttcctgatcataggagttgagatttctcgcttttcggtgatcctgcagtcttgcacgacttcttagtcatggtttttcagacatgcatgggggttttcagattacaaaacactgtcacatgcattacaccatctgattttcaaaacgtctctctcagagatcaggatgtcagttatgctcattttatacatgtggacactgaaggtcagtgatgtgacttaacttactgggtccaagacaccagctggtaagtagcagaggctggaaaaagcagaacgctggcttcctaataagtagatttcataaaactccaccacctacttctatatgcatacactttgggtgcagagctcttatacttctttaaaattccaaaggaccatgcacactggaagcatccatcagcattttaaaatttaaattatgtcagcaacaaaatttctaggtagtttagtttaggctgtttcacatttggaagttattgtgataacctcagtaaattttttttttgcaattaatagtgtctgggattgtttataacagtaacttaatcaacataggctaagtaaaacaacattctagtaagaagagggccagtactcccaaagatgacacaaattcctaagcgttgacaacagattgcttaacttactgggcatgcttctctcctaaaaataagattgtacgttttatcacatctctgcacctgacaggttactttcyggtgcctaaggagatcaaatattaataacaactcttgcgggacttggttctactttattttattttatttactcttttagagaagaaggaacactcaaataatgaatgtaaaatgtctagtggcagagaagggcgaacccggagttgtcaggaataggctggacaaaaacaaccaagactgtcacttcaaatgagatgttgccagtgagtctaggcaaccaagaagacttctggggagccgaaaaataataatagaagggttctaactgaagatgtttacctatttgaagttaagaaaaaggaagagatgtggcctcaaaatttccataataattataataggcgttattttgtactaaacacatcactaaaatgcgaactgtaaacatatctactgtcccttctacctgcaacggttacattgcatgttctggggcttcccttgctcttctaatccgcaagtgcc

SEQ ID NO: 90993 - DNA, 1023 bp, Homo sapiens
aatacatatgctcaataacttgtagactacaaatattgttttcctacacagtttattttcctggtagggaaggacaatggaaacccttagaacttcctctacttaccaaaagactaaaccaaaaacaatactactttcctggaaaaattgcacarattaatgtaaccatcacttatgatttctgcaacatattcattcatctcacctgcttggccaatgcagaaaatgatattggcttaacattaacttaatgaaagcctgaatccaattagagccaataagcatgtacccttctacctgcaatgcagctgttgattcaaagtatttttctcttgacctgttaataaaatacaccagaaacagtttcttttcacctggcgtggttattaacacatcttttctgttctactttgggttgtatcaattctctgtctgtcttaatctatctgtagggaccttgttcacctcttcattctaaagaatattatagccctacggcatgactagggcagagagaaacccaggaggatagtataaggagagctacaatgatcatcaagagcccgacaatgcagcttcttggaaccaagaactttgaggatattaaggatgttggtccatagcttaaaaacaatggaaagcctttaacaattttgaaagcttcagggatagataaaattgtgtgtgcaaggggagtgggggtgacttttttgtgatttcaataacaaggaggaatttattctatcaaatagaacaaaatgagatttgcattttgaagatatcactctctgtgtgatgtcaaaaatgaatatgaatgggaggcacaaaaattgaagggacatcaattaaaagaaaagtgcattattttaagatagagatggtagcttggaatatgctggcagaagatatgggaagtatggataaagaggtattttgaacaaaaaatagatggatctcaaagatggattagatattggagaatgaaaagcatgagatatcatggatgaacctgagatttgtaaa

SEQ ID NO: 90994 - DNA, 543 bp, Homo sapiens
tcatgctagatgagaatgtcttcaaataaaataacgtagttgtggaagaatcacctgagcccaggaggtcgaggctgcagtgagctgtgattgtgccactgcactccagcctaggtggtgggagcctgtcttgaggccaccctggccaacacagtgaaaccccctatctactaaaaatacaaaaattagcagggtgtggtggcgggcacctgtaatcccagcaactcgggaggctgaggcaggagaatcacttgaacccgggaggcagaggttgcagtgagccaagatcgcaccactgcactctagcctgggcgacagagctagactctgtctcaaaaaaagaaaaaaaaagagagagaagaaatgatatcatttcaaatttttaaactaaaacgyataaaatgtagctgtacagaggattcgctacttatttttctgcttcacctcagactggtacaagcattatcatggaccaaaacacttctgtgggcctgaattagacccaggtctgtcccaagcagcccatgctctggtctaaggtgg

SEQ ID NO: 90995 - DNA, 543 bp, Homo sapiens
tcatgctagatgagaatgtcttcaaataaaataacgtagttgtggaagaatcacctgagcccaggaggtcgaggctgcagtgagctgtgattgtgccactgcactccagcctaggtggtgggagcctgtcttgaggccaccctggccaacacagtgaaaccccctatctactaaaaatacaaaaattagcagggtgtggtggcgggcacctgtaatcccagcaactcgggaggctgaggcaggagaatcacttgaacccgggaggcagaggttgcagtgagccaagatcgcaccactgcactctagcctgggcgacagagctagactctgtctcaaaaaaagaaaaaaaaagagagagaagaaatgatatcatttcaaatttttaaactaaaacgcataaaatgtagctgtacagaggattcgctacttatttttctgcttcacctcagactggtacaagcattatcatggaccaaaacacttctgtgggcctgaattagacccaggtctgtcccaagsagcccatgctctggtctaaggtgg

SEQ ID NO: 90996 - DNA, 950 bp, Homo sapiens
gaaggatctagggtcaaatcccagctctgttgtttggtgatgtcacattggacgagtttcttaacctgttgagaaagtggggacactaacagtatctactctgtaacgttgtaaggaataaaatgaacggatgcacaaggagcgcttagattatgcactcgggtattagctggagctttcattgtgtacccagctgcctgggagcaaacaggaagcatgagtgcaaatgtttgttgttataaaacagctccatcactacatgtcatatcatttaaacgaacccttcagtaactcaagatgacgaaactgagattggagaaggtaaygactcacacaaggtcacccacccagtcagtggcaaaggcaagctttcaacccatttcgaactgagtccagggcttgtgtttttcctgacacacactggcttataatgtagttggagtagttggagagagtcaagatgttcaagtgagtaacagtaaggatgcagagcagcgatgtgcagcatgtgtaagcatgggactgtaggggcttgggcttattttccacttttgccaccttttagctgtgtgatcatggacaagtcacttaccctctccaagtctcatatatgtcagattcttggtacagtaaatggtgttccatgagatacttctcactgttgctgttaaaggcagggtgtgctgtgtgctgaaggatggtgctgtggccacgcataagtgctggaagagttggcctgtggaacatcactctgggttggaggtgatcaggcaagataggtaggaatgacatttaaatgggactttgaaggacagagaggctttggatgagtggagccaagtgggaggacctcctgggcagaagggatgatgcacagaaaggagctaggtatgaagtctcaggaaaattcgaggtgaggtggaagctggaaacccacgaggaaatgctcc

SEQ ID NO: 90997 - DNA, 950 bp, Homo sapiens
gaaggatctagggtcaaatcccagctctgttgtttggtgatgtcacattggacgagtttcttaacctgttgagaaagtggggacactaacagtatctactctgtaacgttgtaaggaataaaatgaacggatgcacaaggagcgcttagattatgcactcgggtattagctggagctttcattgtgtacccagctgcctgggagcaaacaggaagcatgagtgcaaatgtttgttgttataaaacagctccatcactacatgtcatatcatttaaacgaacccttcagtaactcaagatgacgaaactgagattggagaaggtaacgactcacacaaggtcacccacccagtcagtggcaaaggcaagctttcaacccatttcgaactgastccagggcttgtgtttttcctgacacacactggcttataatgtagttggagtagttggagagagtcaagatgttcaagtgagtaacagtaaggatgcagagcagcgatgtgcagcatgtgtaagcatgggactgtaggggcttgggcttattttccacttttgccaccttttagctgtgtgatcatggacaagtcacttaccctctccaagtctcatatatgtcagattcttggtacagtaaatggtgttccatgagatacttctcactgttgctgttaaaggcagggtgtgctgtgtgctgaaggatggtgctgtggccacgcataagtgctggaagagttggcctgtggaacatcactctgggttggaggtgatcaggcaagataggtaggaatgacatttaaatgggactttgaaggacagagaggctttggatgagtggagccaagtgggaggacctcctgggcagaagggatgatgcacagaaaggagctaggtatgaagtctcaggaaaattcgaggtgaggtggaagctggaaacccacgaggaaatgctcc

SEQ ID NO: 90998 - DNA, 1224 bp, Homo sapiens
tgcatggagcagcctcccttctccatcaccatgtctcatgagagttgcccagcctggataaggcttacttcccttggaattcggttaattcaccttttcccctcaaggatgcacatggtttccacttcacagagtatccctggcacatcactggcccactcctgcttcgcaccaccagaatcccctgaactttaccgagatgatacagatgtaattaaacctgaattctagtctctccttgtgacaactcagtggacaattaatgatgataaaagagcctgccagctgctgcctgacataccaatgtgagcttccaactccgaggaagatggagggtgaagggcaggtccctctggctycatttcaatctgtcttttatctcacactagctaaaaagtaacacttactttggggaaatttagattctttcttctcctctcttaaaagcaccaaacagacagtcagaggtaatgcaaggtctatgaaataaataagaatgcttccgggaagagtaattgaagcttcatcaccagggaccgtagagtcaggcctaaagccagaggagcaggctgcgctcccacccctgatctcaagcaggggatacacccaccgcctctttgccacagggacccatcagttggtagggaggggcttcataagggagacacttaatggatttttccacagtaatgctgttcattccaaactgacttcaatcacgtttgtccttttctctctcaattttaggttgagccatgactacagtctagtgcaataaaatgcttggagggagtccaaggcttgagggagacatggactgtggagggatacagctggagagaaaataatcaaaacaaggcagatgagagggagttagaggaacctgttcaacgctgacacttcaaaagctcgtgcagaggctccgtggcaacagtactgccggcttcctgtgtggctttccgtttattagcttgttgtttggggggtgtgagaatccatttagataattcccacaagaaaaaagtgcaaatgactcataaacatacgaaataaatgttcaacaacacttgtaatcaaagaaatgcaaatataaaacaagatagcgttttcacctatcaaattaacaaagattaaaaggaattctaatactcaacagactggtgagatggcccatctcacacagctgacgtgttaattggtataacctttctcctggcaataggt

SEQ ID NO: 90999 - DNA, 1552 bp, Homo sapiens
tggagcaagaactctaggacaggcaagagagtgacattacttgtataaatggctctttagcacccactgtccactcaaggtgtgctgccctataggcatattcaggctcaaatagtactgctatgtgtggcacatcagtctgttgtgtttattaatagtttattaatgaaagaggccttgctggatgctctgtcagtgcatcactcctgatcactctgttctcgtactgtgctgcagctaaagtcatccaccatggttctaggattgctcagagtatgagcaggagaggaagatgtcagtgaggctctggctgcatcccttcctgtacagcccttccagacccctccgtcctaattacatcaccttctccaaatcatgcataccccacttatgaagtatctaccgtatgccaggcactgagccaatgactggtccagtagtaagtcctaattctccttggccatgcatctgcccacataccacttaaaattccttggaattgcagaactccatgaagtcagattcctttctatttatttatataaaagtctgtctcctgtaccaggtcataagattcttgaaatcacgaaccgtgttttagacatctctgcatctattgagttccttgcacaatgtctggcacatcataggtgttcaacaaatgtttgctgagtttaaaataattgtgcaagcatgttcaaccagaggagccattgagaaattacttcattgcaacccttcgatgttatatgtgagcctgctacctgagctggactgtgatttcaaaatggagcactgaatccaaaggaaattaggattcccagacttccaatagagggcagtaccattgtaatatcaagatataatctgatgtctaatcaccattctgtgatggtagaaaatgtgacccagcccaatagacagaaggaaagctgcaaagaaagcatttatggctataaacaatttttctttattcctcatctgggtcctgaggcctgtgatttggctccaatttttcatttgtggttgtttgtttcagataataaaactgttcctttaaaataatggtgactatattgtatctaaaaataaatatcaaaagatcaaagtcccttagtgggagcaattattgcaaaaagaccagccaagctcaaaacagctgttaagtgatcctggcccaagcaagaggagcctggcctccttggctgatctggaatcacatgggcaggctgacaaaccaaaattgagaaacttctaaaatatggaaaacacacatggcaatattaatggccctatgaaaattgctcttatttgattattattggtcactaactacttgcagtattgttaagacacttcacaaaatggacagaaaatgagtattcaatgtgtgagmcaaaaaaaaaaaaaaaaaaaacagaaggaagagctcctcgtgaatttccaagagaaataacactagggttcagttttgctgttagatataataagtcccagtaaggaagcaaatgagaagccaagatgatgtggctttatttcaatactctctttg

SEQ ID NO: 91000 - DNA, 658 bp, Homo sapiens
tgaacaaatggcagttccctgaaatagcaggagaccaagggaaaagaacagcaatcagcattcagttctggcaggtctgtccacaggaacaaaaccccagctggggaagggagcatggggaacagagctcagcttcctggaggacagggctggcaaggaagtagcaggtttccaggacttcagccaaggaggctggggatcggaatggggtttcaatcccaacagggaatgcgagtgtcgaatggggtcaactcagcaagcttagaggaaacacgtgcaggctcatcagaacaccatggccctgggcaggatcaaccaggagtgagcagggagcactgcagagaaggggccctccrgacatgccccaactggggagtgctggcacccctctccagttcgcatctactgcctttcaaaactggctcctgtatggcagttaatgcaagcccccaccctcgtagaaagatcactgacaaggcggcctcatcagaagcaccagactccagtcccagccctgccatgcccagaatgcgccctcaggcaaggcatttaactccttcaagtcacagatccctcctcataattgggagcaatggttaaatttattggagcatttgaggataaagaagagcacacatacggaagttctctgtaaaga

SEQ ID NO: 91001 - DNA, 540 bp, Homo sapiens
tgtacttgaaatccataataatctcgtggaaaatccaaaaacctttttcatgtaagtgaaagaaataagtagaaagtaatttacgctacagatataataaactcaatttttatgatagaaacaatagcctcccctaaattagttccctcttaagtgcttaagaaaagcaaaattttgctcaataacatttaaccaactctataacttacaggctcctatcatgttctaagttaaacaacttttcattgtttctccttttctttcttcctcaaggtgtcaggtaactatttactaagaaaatatcacctgtacgtaagttacagtagtatccatttttaacttgttctttcataggctgcaaaatttccattcctagatttaaataaaaccaagagtattcagctatttctttacctatacaaatataaaacctatttgcattctaaygtttagataaaaatcgttcagcactcactattgtactgtttacagaaatgcattgatttggaaacaaaacgacttaatatctctaagatctcc

SEQ ID NO: 91002 - DNA, 599 bp, Homo sapiens
gggaggtgctagaaataattaggtttatttaatttgttactattgagttccttgggaaaagttgtcaaatcagaagaggtgataaatttgtatgagtaaaatgctattaatataaatacttcagaaattgtgtgctatataagaagttcatagagatttgtcaatgtcctcactatccatgttatatttccatttctcagagtcttggtgctgttttgccaagatattagrcaaaaaaatggtataataacactggtcatattttgagttattttttaaagtgttaagttagttgcaactttaatttgaatctagcatcctcttgtccagaggttttcaactggggattcatatcattaacctacgaagatttatcaaattcagatgtttaggatctactcgagattttctgagtctctttccttgataaacttgatatattctcggtgtagtctaactatatgtttagtatatccatggtatattgtgtctcaggattattatatgttatattgaatattttttcctctgtgaagattacattcacttattttcaaaatgtagatgtattatctactcttctttgaaaataggattaa

SEQ ID NO: 91003 - DNA, 499 bp, Homo sapiens
tgcctgaacgcttgactagctcccttagactctggagaggtactaaacatttgtacgcacaggtgtgaacagcatcattaaatctgtgtgacatgaaggattctcttgcctggaagttatcacactctggttttattattattattttttctttttaggatgtgcatatagccttgtgtttgtagcagagtgaaaactggatttggtagcaaaacatctttcaaagcagggactaacaatctgacccaagccacccactgctcttcccctggacgtggcgtggaggagaagggaggcgttgggactcactcacagggcttgcagagggctaacaaacacrcaggtgagttccctccagcctgaacctagggagttctccagagagcacaggctgccctcatccctacacagcctctgactcaaggccattattcacaaacactactggggaacttctcttgataatcatgatgcgtaatggccacgaaattgtgtctcc

SEQ ID NO: 91004 - DNA, 897 bp, Homo sapiens
atgggcatgaacttcaaattccagagaccgagttcatttgctgctacattaaggatccaggtggaggagaataagtcaccgagattcaatcatcttctgaaatattgcttacctgagagtcccttcaagatagagtaactgctggagacccccatgtgcctctaacagctggactttggtccttcaaagcctaaatgatccatttggctacattttattttyttcaactcttttcactcttccagatggtaaaatgcaaaaatcttaatattctgcaatggccaagtagctgccacacagtttcatgacccatcactcactctctgattatcctgtctttatgtatgaatgagctcctacataatgccatcagagtacacgacactgcacatcagtatctagcagagtacctacaggaccaaaacaggccagtaaatctaagagatttccgagaagagctgcaaaggtgatttaagaatattgaaagttgatttaggaaggaagataaaaagatctcttgcttaagccaactatgaaaatgtggtaaagcaggtacatccatacatctgaagttcagaaatgcttctaagcagaaggattggaagccatactaaaggcaactgcaaaattggagcttaggaaagagagagactctcaaactgcatgatacatcctctgtgtgattctaagatgccaagaacgcttcaggagctgatgttgcccaagactgacacgagctctttctgcagtgaaaaccaggatgagagacaagaattcttcaggagatcattgtttatggttgtggaagctgagtagtattgagggataatatcatccatattgcatggtgagaggcaatgcaagcatagggcttggcacacacttaagtgctgaatg

SEQ ID NO: 91005 - DNA, 897 bp, Homo sapiens
atgggcatgaacttcaaattccagagaccgagttcatttgctgctacattaaggatccaggtggaggagaataagtcaccgagattcaatcatcttctgaaatattgcttacctgagagtcccttcaagatagagtaactgctggagacccccatgtgcctctaacagctggactttggtccttcaaagcctaaatgatccatttggctacattttattttcttcaactcttttcactcttccagatggtaaaatgcaaaaatcttaatattctgcaatggccaagtagctgccacacagtttcatgacccatcactcactctctgattatcctgtmtttatgtatgaatgagctcctacataatgccatcagagtacacgacactgcacatcagtatctagcagagtacctacaggaccaaaacaggccagtaaatctaagagatttccgagaagagctgcaaaggtgatttaagaatattgaaagttgatttaggaaggaagataaaaagatctcttgcttaagccaactatgaaaatgtggtaaagcaggtacatccatacatctgaagttcagaaatgcttctaagcagaaggattggaagccatactaaaggcaactgcaaaattggagcttaggaaagagagagactctcaaactgcatgatacatcctctgtgtgattctaagatgccaagaacgcttcaggagctgatgttgcccaagactgacacgagctctttctgcagtgaaaaccaggatgagagacaagaattcttcaggagatcattgtttatggttgtggaagctgagtagtattgagggataatatcatccatattgcatggtgagaggcaatgcaagcatagggcttggcacacacttaagtgctgaatg

SEQ ID NO: 91006 - DNA, 897 bp, Homo sapiens
atgggcatgaacttcaaattccagagaccgagttcatttgctgctacattaaggatccaggtggaggagaataagtcaccgagattcaatcatcttctgaaatattgcttacctgagagtcccttcaagatagagtaactgctggagacccccatgtgcctctaacagctggactttggtccttcaaagcctaaatgatccatttggctacattttattttcttcaactcttttcactcttccagatggtaaaatgcaaaaatcttaatattctgcaatggccaagtagctgccacacagtttcatgacccatcactcactctctgattatcctgtctttatgtatgaatgagctcctacataatgccatcagagtacacgacactgcacatcagtatctagcagagtacctacaggaccaaaacaggccagtaaatctaagagatttccgagaagagctgcaaaggtgatttaagaatattgaaagttgatttakgaaggaagataaaaagatctcttgcttaagccaactatgaaaatgtggtaaagcaggtacatccatacatctgaagttcagaaatgcttctaagcagaaggattggaagccatactaaaggcaactgcaaaattggagcttaggaaagagagagactctcaaactgcatgatacatcctctgtgtgattctaagatgccaagaacgcttcaggagctgatgttgcccaagactgacacgagctctttctgcagtgaaaaccaggatgagagacaagaattcttcaggagatcattgtttatggttgtggaagctgagtagtattgagggataatatcatccatattgcatggtgagaggcaatgcaagcatagggcttggcacacacttaagtgctgaatg

SEQ ID NO: 91007 - DNA, 543 bp, Homo sapiens
tggccagaatttttttttttttttttttttttttgagacagtcttgctctgtcgcccaggctggagtgcagtggcacgatctcggctcactgcaagctccgcctcccgggttcacgccattctcctgcctcagcctcccaagtagctgggactacaggcgcccaccaccacgcccggstaactttccgtatttttagtagagacagggtttcaccgtgttagccaggatggtctcgatctcctgaccttgtgatccgcccacctcggcctcccaaagtgctgggattacaggtgtgaggcaccgcacccggccagaaatttgtttttgattgttttcttggcactccaattttagggaaaagcagcaaactcacagcactagttttcttcaaaatatgcatgttccagattgtgtgtctttggctaagtatttatttgactttccaacttaaacagaggttctcattcttttggggacccaagaatcctttaagaatataatctgatacaacttatgggcataaaacaataaatataacttta

SEQ ID NO: 91008 - DNA, 543 bp, Homo sapiens
tggccagaatttttttttttttttttttttttttgagacagtcttgctctgtcgcccaggctggagtgcagtggcacgatctcggctcactgcaagctccgcctcccgggttcacgccattctcctgcctcagcctcccaagtagctgggactacaggcgcccaccaccacgcccggctaactttccgtatttttagtagagacagggtttcaccgtgttagccaggatggtctcgatctcctgaccttgtgatccgcccacctcggcctcccaaagtgctgggattacaggtgtgaggcaccgcacccggccagaaatttgtttttgattgttttcttkgcactccaattttagggaaaagcagcaaactcacagcactagttttcttcaaaatatgcatgttccagattgtgtgtctttggctaagtatttatttgactttccaacttaaacagaggttctcattcttttggggacccaagaatcctttaagaatataatctgatacaacttatgggcataaaacaataaatataacttta

SEQ ID NO: 91009 - DNA, 2736 bp, Homo sapiens
aattacactctttttgagttatcaaaggggaaagaaatcaataatggctaagctggatcaaggtgctccagaggagagttgaaagggtgatagaaatacatatgcacgcacacaccacacacactcacacactaacatgtgaagtcaacagacaaaagtaatctggtctagacaaacatacttgacgaaatgaaaaaatggtagaaacagtggactaatttggggtacaagaaagcatccagaaagcagttagtggatttttgcctctgaaaagtatttaatccctaaatgccctttatattttgtagcagcccacacataatttaatgtcatgtttatttatgtaaaatcctctgcatggcactgaaattgagtgaaacagccactgcataccccttgaggaaattaaaaggcaagccaaccaacagtgttgcagacagagctagggacatacagataaccgaatcaacattagacacagcaaattgtagcacatggagagccctcgtgaagagcaaaaaactttttgtaaatttgctataccctcctgactctgtttctccacagagccagaggtcatttgtagctaagacataaaatctgcacctgagttgcaggactcttcctgtgccaggagctgccatgtgagaaatactgcagctctcactcaagggaactcatgggttttctccctttgctgaaagctaagttccttcctgctagtaacaaacccaaaaaataaaaataaaaataaaaaataagcttataataaggttaaaccaaactatcagactctagtcatagagtcaggtctttatattcagtaaataaaactaaacttgtcaaatccactagacttaagttgctttttgatgcaaatcttgaaaataggggacacatttaacctttgacaggttcttctatttcccaagttcagagatgctatccactcaaaaaaaaaaaaaatgcactccctccaaaatctattaatttcacattgccaaaccagagagtctgaggacacttgtcttgtttcctcccctgccacctccttctcccgttctttattttgaataataaaaagagcataattctcaaaatatatatccatatataatacatagctgaccactgcatattcttcttcctcttggtaaattattctgccttaaatgattttgactttttttttacattaaaccaggaaaataagggagatgctaaattaaatattttttctagaaaaaaaccaaatagctgcaccaatgtaatcccaaaagagtagcaagatgagataattatacaaaatgtgaggaaaatgcatattcaagacaagatctttctacatatggatagtaaaatagaaaaatgaaacaggcctacagacccaaagccaaggcttcaagacctgaaattaactggggccagggaayagggggagaagctggcaacttagcatggttgtctccagagctgcagttggaggaaaccacgtagcatatcttgcgcaagcccattgttttatagttaaagaaacaagcgataaatcctgttctcattcccctccagtgcttagaaggggagagagattatattcaaccttctttaagctagtacctactcaaattagctcacctgatacacagctgctcaaacacagaaaatgcacagaattctcagtttagagctgtaaaacaataaggaaatatttattgtattatcttctctctgaaagtctattaaaaaaaaaaagacaaaaaatgccgggtgtggtggctcacgcctgtaatcccagcgctttgggaggccgaggcaggcggatcatgaggtcaggaaatcgagaccatcctggctaacacggtgaaaccccgtctctactaaagaaaaaaaaaaaaaaagttagctgggcgtggtggcgggtgcctgtagtcccagttactcgggaggctgaggcaggagaatggcgtgaacccaggaggcggagcttgcagtgagccgagatcgcgccactgcactccagcctgggcgacagcgagacttcgtctcaaaaaaaaaaagagaaaagatgtaccaatacttaagagggatacaacccaggttttgtaggagcgagatggaagggaagtaagagctggagaaattctcttccaacttccctgatgtgatgatctgagaaagacagatttccatgctctcaaatcagtatctgtctgaattatagacactatctaaatattaatattctttctatgtgagaacccacacacaaagtgaacacactattaagcagcaaactgtgtgttaacgatgaggggcccttctgttcctatgcctttatatatttagcttcaacaggaagaaatgaagcaagtctttccatttccacttcgccatcttgtttttttatgctgtttattcacaggtctgaagaagtcaactcaattctaaaaagtattatttttcaaggttaacacaagacacttgcaggaagccaataaataatgctatgcatattactgtgttccaagtgtcagaacataaacctcaataagaaactggaataaaaactgaaaagaatgcaagcttttaactttttttttcattatctcctctcatttaccataaagtacaactaacaaaagcaacaagaataaaaccccagagagagtcaataagcaagtatcagatcttatcttttactatgggaaagtcttaatgtaggcaagggagcaagaa

SEQ ID NO: 91010 - DNA, 2736 bp, Homo sapiens
aattacactctttttgagttatcaaaggggaaagaaatcaataatggctaagctggatcaaggtgctccagaggagagttgaaagggtgatagaaatacatatgcacgcacacaccacacacactcacacactaacatgtgaagtcaacagacaaaagtaatctggtctagacaaacatacttgacgaaatgaaaaaatggtagaaacagtggactaatttggggtacaagaaagcatccagaaagcagttagtggatttttgcctctgaaaagtatttaatccctaaatgccctttatattttgtagcagcccacacataatttaatgtcatgtttatttatgtaaaatcctctgcatggcactgaaattgagtgaaacagccactgcataccccttgaggaaattaaaaggcaagccaaccaacagtgttgcagacagagctagggacatacagataaccgaatcaacattagacacagcaaattgtagcacatggagagccctcgtgaagagcaaaaaactttttgtaaatttgctataccctcctgactctgtttctccacagagccagaggtcatttgtagctaagacataaaatctgcacctgagttgcaggactcttcctgtgccaggagctgccatgtgagaaatactgcagctctcactcaagggaactcatgggttttctccctttgctgaaagctaagttccttcctgctagtaacaaacccaaaaaataaaaataaaaataaaaaataagcttataataaggttaaaccaaactatcagactctagtcatagagtcaggtctttatattcagtaaataaaactaaacttgtcaaatccactagacttaagttgctttttgatgcaaatcttgaaaataggggacacatttaacctttgacaggttcttctatttcccaagttcagagatgctatccactcaaaaaaaaaaaaaatgcactccctccaaaatctattaatttcacattgccaaaccagagagtctgaggacacttgtcttgtttcctcccctgccacctccttctcccgttctttattttgaataataaaaagagcataattctcaaaatatatatccatatataatacatagctgaccactgcatattcttcttcctcttggtaaattattctgccttaaatgattttgactttttttttacattaaaccaggaaaataagggagatgctaaattaaatattttttctagaaaaaaaccaaatagctgcaccaatgtaatcccaaaagagtagcaagatgagataattatacaaaatgtgaggaaaatgcatattcaagacaagatctttctacatatggatagtaaaatagaaaaatgaaacaggcctacagacccaaagccaaggcttcaagacctgaaattaactggggccagggaatagggggagaagctggcaacttagcatggttgtctccagagctgcagttggaggaaaccacgtagcatatcttgcgcaagcccattgttttatagttaaagaaacaagcgataaatcctgttctcattcccctccagtgcttagaaggggagagagattatattcaaccttctttaagctagtacctactcaaattagctcacctgatacacagctgctcaaacacagaaaatgcacagaattctcagtttagagctgtaaaacaataaggaaatatttattgtattatcttctctctgaaagtctattaaaaaaaaaaagacaaaaaatgccgggtgtggtggctcacgcctgtaatcccagcgctttgggaggccgaggcaggcggatcatgaggtcaggaaatcgagaccatcctggctaacacggtgaaaccccgtctctactaaagaaaaaaaaaaaaaaagttagctgggcgtggtggcgggtgcctgtagtcccagttactcgggaggctgaggcaggagaatggcgtgaacccaggaggcggagcttgcagtgagccgagatcgcgccactgcactccagcctgggcgacagcgagacttcgtctcaaaaaaaaaaagagaaaagatgtaccaatacttaagagggatacaacccaggttttgtaggagcgagatggaagggaagtaagagctggagaaattctcttccaacttccctgatgtgatgatctgagaaagacagatttccatgctctcaaatcagtatctgtctgaattatagacactatctaaatattaatattctttctatgtgagaacccacacacaaagtgaacacactattaagcagcaaactgtgtgttaacgatgaggggcccttctgttcctatgcctttatatatttagcttcaacaggaagaaatgaagcaagtctttccatttccacttcgccatcttgtttttttatgctgtttattcacaggtctgaagaagtsaactcaattctaaaaagtattatttttcaaggttaacacaagacacttgcaggaagccaataaataatgctatgcatattactgtgttccaagtgtcagaacataaacctcaataagaaactggaataaaaactgaaaagaatgcaagcttttaactttttttttcattatctcctctcatttaccataaagtacaactaacaaaagcaacaagaataaaaccccagagagagtcaataagcaagtatcagatcttatcttttactatgggaaagtcttaatgtaggcaagggagcaagaa

SEQ ID NO: 91011 - DNA, 617 bp, Homo sapiens
taaggttaaatgcagtcatgagggtggagccctgatgcagtggagctggtgtctttataagaagaagggattacggtacggatctgtacacagagcccatgtgaggacacagccagaaggcagctgtctgtaagccaaggagagagtcctcaggagaagccaaacctgctaaccccttatcttggactttcagcctcaaaaactgccagaaaattaattcctattgtttaagccacataatcagtggtattttgttgtggtagctctatcagactaatacaagtcttagtctgctaagttttgggataatttgttacacagctatagatagctgatacagtcatcaacatgcatcaattttccatttaccctgagctggggacaagacaaagtctctggtctttaagaatcttacactcagcagagcatgatggctgacacctgtaatcatagcactttgggaggctgagacaggyggatcacttcaggccacaagtttgagaccagcctaggccacatggcaaaaccccatctctacaaaaaaggacacaaaaatttgttggtcctggtggcgtgcatctgtagttccagatactcgggaggctgaggtgggagga

SEQ ID NO: 91012 - DNA, 766 bp, Homo sapiens
ctctggagtaggtaaggtaagtcgccagcgtgattttttaatagcagtcctttgaaggatgagtagctcccttgaaggagatgagatcattgaatcagaaacaaactggggacatctgacctgaaagtgaacttagattagggagtgagactatagattagatcacctctccaagagccaaccaggtagccttcatcggaaaaatgaagatataatatgcttatagcaccagtatattaattggcctttatatttattccaagataatcccaaggaaaacatggtaatatctcaggaagtcagaatcctgggtaggttggtggacacaggtgtgtgttgtaggcgtgttttgcaaaagttccatgtgactgtttttacttaaagatattggctcacatccctgttyttttgtttttttgtttttttgttttaaatttatttttttattgataaatcttgggtgtttctcagagagggggatttggcagggtcatgggacaatagtggagggaaggtcagcagataaacaagtgaacaaaggtctctggttttcctaggcagaggaccctgccgccttccgcagtgtttgtgtccctgattacttgagattagggattggtgatgactcttaacgagcatgctgccttcaagcatctgtttaacaaagcacatcttgcaccgcccttaatccatttaaccctgagtggacacagcacatgtttcagagagcacagggttgggggtaaggtcacagatcagcaggatc

SEQ ID NO: 91013 - DNA, 766 bp, Homo sapiens
ctctggagtaggtaaggtaagtcgccagcgtgattttttaatagcagtcctttgaaggatgagtagctcccttgaaggagatgagatcattgaatcagaaacaaactggggacatctgacctgaaagtgaacttagattagggagtgagactatagattagatcacctctccaagagccaaccaggtagccttcatcggaaaaatgaagatataatatgcttatagcaccagtatattaattggcctttatatttattccaagataatcccaaggaaaacatggtaatatctcaggaagtcagaatcctgggtaggttggtggacacaggtgtgtgttgtaggcgtgttttgcaaaagttccatgtgactgtttttacttaaagatattggctcacatccctgttttyttgtttttttgtttttttgttttaaatttatttttttattgataaatcttgggtgtttctcagagagggggatttggcagggtcatgggacaatagtggagggaaggtcagcagataaacaagtgaacaaaggtctctggttttcctaggcagaggaccctgccgccttccgcagtgtttgtgtccctgattacttgagattagggattggtgatgactcttaacgagcatgctgccttcaagcatctgtttaacaaagcacatcttgcaccgcccttaatccatttaaccctgagtggacacagcacatgtttcagagagcacagggttgggggtaaggtcacagatcagcaggatc

SEQ ID NO: 91014 - DNA, 504 bp, Homo sapiens
ttattgtagctgcagtaagtattgtattgcacagattgtaatccattatcttgaagaggattgcaaagcacagaaggtctgtgtcatgagctactgttataccctggtccctcagagctttcagtytataccaaagacccaagttggttccaacatctcaagggtggccttgccgctgcctctggctgctatgccctcttaaacttggccatggccaggtcatgaggtagacgtggccctggagggttaaacgttattgatcatccccagggtcctgaaagcttatgtcagtgtggccaatgcattctgttgctgaattagggcctgtgtacactacttcacctttcctggctgatttggagccatttctttgtaatttgttcagcataaatgaatacagtcatttgagcactgatattgacccttttgtattatatgtatcaatattatgcattatccaagtgagcattcaaattatatttgatatatctaaaacatggagga

SEQ ID NO: 91015 - DNA, 1074 bp, Homo sapiens
agctatggcacagttgaaaaacgtggctcattttcagaattaaaatgacaggggggcttctgggttgcttagaatgtgttatttttggtggggggaggttgttgcttataagaaatagtatattaattttccattgatttccactgacacaaacttaccatgaacgtagcagtttaaaacagcacatgtttattagctcatgcttttgtaagtcagaaatataggtatggcatgtgtatcagtccattttcatactgctgataaagacatacctgaaactgggaacaaaaagaggtttaattggacttacagttccatatggctggggaggcttcagaatcatggcaggaggcaaaaggcacttcttaaaaaatgaggaaaaagtaaaaagagaaacccctgataaacctatcagatcttataagatttattcactatcatgagaatagcaggggaaagaacagctcccatgattcaattacctccccctgggtccgtcccacaatacctgggaattctgagagatacaattcaagttgagatttgaatggggtcwcagccaaaccatatcagcatgtacctggcttccttgcgtagggtctcctaaggctaaaaccaaagtgtctacctacagggcagcattgtcttctagagcttgggatcctcttccaagctcacacagtcgtggcagaattttattcctcgagtatgtgggactgatgtcaccttccttgccctgtgtccctccccatcttaaagacagcaatagaggttttcctttgcatgtttaaaatctctgtcctcagaatgagcccagtccctatgaagcactcacttaattaagtcaggcctatccaagatacctctttttcataaagtcagctgggacatatagcatgtcctaactacagaaatgaaacttatcacattcacagtcctaagaattaacaaaaaaaagcatgaacaacagggacaagatattttagaattattcctaccatcatgggtttattgtgtgaagttttattgacctatactcttactaactgtatactctgtattcaatttaaaaat

SEQ ID NO: 91016 - DNA, 779 bp, Homo sapiens
tataattcaaatggttaatattttcttttttagttacttactccagcaccatttatgtgaaaagtcatctttcctttgttgcttttcagtgtcaccttgtcctaatccagtatttgtatatgcaaggaattgtttttggattctctattctattctacttggtctccacttccaccaaaatccaacttttatgattactgtgcctttaaaataagccctgatatctatttcaaaaggtatttctacctccttcttgttcataagtattttcgttattggtgctttccatttctgtataaatgtcataattggcttttaagctttaaaaaatcctgataagattttsgttgtagttacatcgaatctatagatcaattaggggatatttggtattttaacaatattgaataataagcatacagtatttcttcacatttaaatctcaaagctttcatttgtctatgctgcatatacatatgtgatttatttttgtatatatgtttgctatagggcaactaatatactctcttaataatccatattatttgttagtagtttttgcattgtctacatgcacagttttcggttaagtaatttttgtttccttctttcaattctttatgtcatctttttatccttaccatattctaccgacaaagacatctagtgcaatgttggatagaactaaaagataaatttatctttctcttattcctaatccaaatagaaggttttaaaatgtttaccattagcaccaaccaattattattattaagtgc

SEQ ID NO: 91017 - DNA, 1708 bp, Homo sapiens
aaaggccattcttaattgctcttcctccgttactcactagtgacagaatacaaccttcttataacaaaagaagtttgcactgactcccatccagagaaatctaggtagaataggggctacaaaacaatggtactcagggccaggaatttagaagttagatgaaaagttaagacaaatactaaatacctgccaaaggccccactgtctaataccatcccctttgagatgactatttcaacatatgaattttgggggaataaagcagtcagatgatagtactatacaaagcttgaaaaggtacaacacttcgccttttgaaacatctataactagaagccaaataacaaaggtctttgggagttgattaggtcatgagggtgacacctgcatgaatgggattaacaacttcattttaaaaaaggcctgagagacaacccttgccctttccaccctgtgaagacacaaaaagaaggcattgactatgaaatggaaaccctcaccaaaaactgaatttgccagggccttgaacttgaacttcccagcctccagaactgtgagaaataaatttctgttgtttagaagccacccagttcatggtattttgaatgtacaaagaataccgaatgtactaagacagtattgcacataaattaccaggagacacagaagagtagctatagaacatgcttcatgcgaccagatctcagcaatgagatgtgctgtggaagaaccatgcgttttgttctgcagctgggattttcttatgctcttcttgcctttcagtgactctagctggagctgtggtcttctccattttgaaggagacaccctcgaaggctgccttttgccagctgagatctgacactgatttgtataaattgagaggggatttagtctattgtcccagaactgaggatggagtccctgaatggcaagcttcagatgaaaatacagtctgatgattatccatgtgtgccctgtacgctgccttgagaaatgcatcctaatgatgatggcttcaagttaaggtggtcatcataacaccaggtaattttcattttggcgtttcacggaacatctacctttccagaggacagttctaaattttaatagcttcacgttctggctgattagctgacaaatgaagttaaataaccagctttcactcagagagatgatgcagaaagaaagctgccctctgatatccccactgataataatgtgaagtgtggaaggcctcagatgtcttttctggatacctatgtgtaatkttcatctatattaatggaactcgtaagcgcaccacgtgaataagaaaatgaatctgtagaaggtagtccctgttgactaggctggttttgaatttcagaaagttgtgtaacgcttccatgaatttttctttatcttggaaaaacattgccatgcaatgtattttataattactttcagaaatacagcgtttctaattgagaagtttgtgaacgtggcctgaacattctagctcatgtgcgtaattgatagcaatgaattattttacaaggtaaagatgtttcccccttggctcaataactattaatatcaaatgaaagcacacactggcatcagggggaacacagcctcctcacccttccaatttcatttcacattacctgccaacttccaggaaatcctttaggcatcattacactttttccctaggccccctatc

SEQ ID NO: 91018 - DNA, 559 bp, Homo sapiens
tcctgcaggcagcctcttcctggcagtcaggctgggctccttgctgaatggtctgtacagtgtgctccttggtacctgttttgcttttacctatgctatggtcactggctgtaacatccttctcctgtcctgcttcccatggtcaaatgtttgtcattctcaaggtccttttaggttctgccccacctggctctttaggcccacacaacctctccccktttctaaaaagtgtttatagattacagcatgaattttgctgtggttgtgtgtttttatgagcatgtgtgactatgtatgtatctatagatagacactgcttgtaatttcttaaagaaaacagcttctgcttgttttgttcaaaatgtctgaagccaattgtttttgtttgcttttagaaaaaaaaaaaactgacatcaaggagagagcataacacagcccccactaccaccaattatgcagccgagtgagtttccacattggggaaatcacggaaatcagcacatcagaatgcatgggtaagctcaccctgggaaaaaccattttcatgatcatgccatct

SEQ ID NO: 91019 - DNA, 559 bp, Homo sapiens
tcctgcaggcagcctcttcctggcagtcaggctgggctccttgctgaatggtctgtacagtgtgctccttggtacctgttttgcttttacctatgctatggtcactggctgtaacatccttctcctgtcctgcttcccatggtcaaatgtttgtcattctcaaggtccttttaggttctgccccacctggctctttaggcccacacaacctctccccgtttctaaaaagtgtttatagattacagcatgaattttgctgtggttgtgtgtttttatgagcatgtgtgactatgtatgtatctatagatagacactgcttgtaatttcttaaagaaaacagcttctrcttgttttgttcaaaatgtctgaagccaattgtttttgtttgcttttagaaaaaaaaaaaactgacatcaaggagagagcataacacagcccccactaccaccaattatgcagccgagtgagtttccacattggggaaatcacggaaatcagcacatcagaatgcatgggtaagctcaccctgggaaaaaccattttcatgatcatgccatct

SEQ ID NO: 91020 - DNA, 761 bp, Homo sapiens
tccctgagtagcttggatttctgatatgtctgcctgaatgaactagttgcaaaatatacacccctccctgatcctcatctaatgaaagtcacctgttacaagaatggtttaaaaagaacccattgaattccraagaatacctgtcaaaagtgattgatttttagtgaaaatagttttattctgaaaatagttagctttcagaataattttctattaaggccactcagccttggttcataaaatgagaccatatcaacagcctgtagaggctctttctcctctatggcaggagggtctgaatccaattcatctaaaaagactccaaattgtctgtatattaattgcatatgggataggaagcaggttcttgatctgttttacaccattgataattatttttcagatctgttgagaatttctgcaaacacagtgatattaaaatgcaggttttctgtgagcatcagttactggcgggggctggggagctgtctgtatcacttggccagtgtctggtttacatagttgaaaggcagtaaaaattcaatatgaactgcaaaaaatttcctattatgcttggcagagttctccgcaagatggcagacagtataataatgattgataactgtgcatatgattcctgcagtccctctcagtcaagctgcaagatgtgtaattatattcctaatctatcctctgagcacaagctgtttgctctgcctagaaacaatacttcctcctcccttttttctctcccccacacc

SEQ ID NO: 91021 - DNA, 603 bp, Homo sapiens
tggcacaataattgctccttaatgcaaattagtttcttttcctttggtcatttccacccccattaatttattctgcatatatctatcaaactcatgaggctgtaaactcctctgtgtccccagatctggaacagcaccctggcacagagtaagttcaccaggcgtgtctggtgaatgaacacaatcccatgacaaacggaaagtgagttcagggtaaacacagcatccctgcctccataaatagtatactgtcccagaatggtcctcagaggaaccctatgatttaactagtgtgcgagtgtattatttctagttawagttaagaaccctactcattgtcactgagtaatgaggccagtctcaggacatatccttaaattcttagagaatttaatgtgtgtgtagttgacaaccatttttatataattcatgtttcactcctgtattatttttattattattattattaatgtagagagaacaaagctgagaatatgcaggtggagtaattaccccaagatcatgccacttacaagtgacagagccagaattcaaaaccacttctgtctggcttcaaagcctgtggccctgaccactaagaca

SEQ ID NO: 91022 - DNA, 1200 bp, Homo sapiens
ttacatacatagtttaygtctattccagagatggttgaggaaataaaacctttctttacagatcaagtaagtggaaacgtcagaaaaaagaaaacgtgttctcaacgtagcccctaccctactttttaggaaattggaaaactgcctcttccctttcggatcaatctctcaaacaggtggggagcaacaggaaaggagtgagtgattaccttgaagtttgagtgtagtccgactttgccatgctacaggcatcatttctcttcgtgtcttcaggacaaattgactgttgataaatctgcggatgctgaaaatgttgaaggtaacttgaggatgaatgatggagaaatactcatccagttgaatattctgggtttggagtcctggtacgtacttctgaatgttcactctggcttgcttcacctgtagctatccacagaggacagatataagctgaggaatagaaagcaacctcccttcccataaacttccccttggaaataacattctagccatgttctgtggctcactatcgggaaagggggtcagtaatggaatcaacatcatggaagtaataaatttttttgaaacaatcaaatctgtgctaatgtctgaaagagaaaagaataatacgagagtgctcagaggcttatttccgactaaagagaaatgaggttacagctctctgttggctaatagttcctccttgctctctgagacaacatctttctcactctctctatcatttactaatgaagaaactagcaaattctatagcattggatctatcacccaggcctgggtgaagaaatccatcaagggggtgggggaatacctttcactgctatctccagtgaacacacagaaggaagaagtaaaataggtgtcctttaaatgagttcctaatcaattcagttgacatatattttatccatagaaatggattaacaatcaaacttaaatagttatgctcacaactcttacagagcagtggcttgagttggcatgaccccttccccatgttcaagaggcagaatgtgaagctgggtgggatggagacatacatggtggtcacaaggatgggaagagttcatgggtagaattccaccctattgttgctactgactgtgttctgctgtctctttatgtagtgaattttagtgtcacttccttttccccttttttctaatggtaaactttccc

SEQ ID NO: 91023 - DNA, 1178 bp, Homo sapiens
gcatgcactgtttgtaatagagaaaaactggaaaaaaaggtgaaatgtctgttacaagaaagtagttaatagtatttacatagtttatttcaccataaaaaatggtgagtttctcatttaacatactcactgttaaatgagaaaagcaagggggcagaatgatactttatggtcctatttatgcaacaaaacaagatatctttgtacataggtgcctctctctctctctctctctttctttctctccaaatgcacagaagaggatggaaggagatacatcaaattgttgaaagtggctactctcctctggggcaggggcatgattggtagtaggtgagagaaaatgtgtgggctgcttacattttgctatgtatattaatgtattgttcaaactatggcaaaatgtacccatgaatcacttatgcagttaaaaagagacaaaacccaccaccccaatgaatctatgactttctgaactccatattaagggagagaacctaggaaggaaggcctgtcctcccttgactaacttagtcctcttcccgttaacctctctgcctctttcctttattgtcagctccatcccttactagctccatcccttactagcaataaaggaatattgcgtatgaatatgagcaatattcataagtttcagtttcttcatctgtagtaggggtattataataataatagtgcctctatcaaagttagctattatgatgatgacggggactctacttctttgactcttgctggcctacrgtctgtgcttagatacacagtcactggcagtgggcttctctgtttgccaccagtcctttcaggcaatcctatctctgtccaagcattgacacctgactttgggaagtccccatggcactcctagttgaagtccctggccacccttttggccttgttcaggtagctgccagggtcctgctgttactagttttgccaccgaaactgcctgggctgggcttttgttcatgagatgcctcatcagtgacatagcctagatgtgcttgggagcatctctgctttttcaatgttgcccagtggcagtcatctacctgccagaaggggagtgctgagtccctgaggatggacaagtgtctgcgtggtgtttcactatctcctctgaaggtctgtgctttaacaaacagcttgctgtaggg

SEQ ID NO: 91024 - DNA, 1270 bp, Homo sapiens
  misc_feature (1)...(1270): n = A,T,C or G
aggttttcccgtgggtcaggctttctccaatgcatgctgtcaaactactgtgggtatgggaattggagtaaaggcatatctaggccagcagtttggaaagcaaagaataaaaggtttctggaggatcagagaaagaaatggtcagagaagaagtgagagacagtggcaacttcagacaattttggcagtagagaacagtctcctagatcttgtggcacacattctgaatggaagcattataatcattccctctgttagaagcttctaattacccctggaaataactattccactctttttgttattgagccggctccttccaattgtgcacataaagagactccctccttctcctttgtctgcaaccaactaatcgtgttcagggtcaaaagtgtgctgcttatgaacttcacttctcaggctcttaccccagagttaatcttctccgtctcaggagatgctcacctgttgaagcagtgaggtgcttcaaatgtggggtgaccaacctttatgagcatcccctgcaggatctattgcaattgaagtgttcttctgttgacggtgaagccctttgagaccaaattacatgccatgagggatctcctgcaatacctccacaagattttgtcacctaagaatacccaagattcaggctgtaggaagcaagtgtcccataccttcagagccattctgtctcagtggttcacatatagaatgtaaagggttggaccagacaaaagagctttgaaaacactcggctgatcaaagaaaccgccactctaacctgcagcaatgcttagttgacctgtttcctttcttccttcctagcaatttagaataataataacaagcataggaagaatttagcaaacccaggatttactactccttttactgattctggaaatatctcagacwaaagtgaaatagacctctaccagtaaagagagaggtccagattccatgccactcaccctgtatacccagtggctccttcagagtcagttcaaacacaataggttcattctggtacttagtactgatctccatagattgagtcctgagtgaccatgaattctgctagaatcctgccaactatgtcatctgtggtcccaaaggttaaagatactggcactatagacttaacgaaatcaaagttaattttattctgacccaagtttagaactatagcttgaancaaactcatggacactgagaggcgtccctaattgctacagtagcacagtattatatgtttgcaacacagaaa

SEQ ID NO: 91025 - DNA, 1270 bp, Homo sapiens
  misc_feature (1)...(1270): n = A,T,C or G
aggttttcccgtgggtcaggctttctccaatgcatgctgtcaaactactgtgggtatgggaattggagtaaaggcatatctaggccagcagtttggaaagcaaagaataaaaggtttctggaggatcagagaaagaaatggtcagagaagaagtgagagacagtggcaacttcagacaattttggcagtagagaacagtctcctagatcttgtggcacacattctgaatggaagcattataatcattccctctgttagaagcttctaattacccctggaaataactattccactctttttgttattgagccggctccttccaattgtgcacataaagagactccctccttctcctttgtctgcaaccaactaatcgtgttcagggtcaaaagtgtgctgcttatgaacttcacttctcaggctcttaccccagagttaatcttctccgtctcaggagatgctcacctgttgaagcagtgaggtgcttcaaatgtggggtgaccaacctttatgagcatcccctgcaggatctattgcaattgaagtgttcttctgttgacggtgaagccctttgagaccaaattacatgccatgagggatctcctgcaatacctccacaagattttgtcacctaagaatacccaagattcaggctgtaggaagcaagtgtcccataccttcagagccattctgtctcagtggttcacatatagaatgtaaagggttggaccagacaaaagagctttgaaaacactcggctgatcaaagaaaccgccactctaacctgcagcaatgcttagttgacctgtttcctttcttccttcctagcaatttagaataataataacaagcataggaagaatttagcaaacccaggatttactactccttttactgattctggaaatatctcagaccaaagtgaaatagacctctaccagtaaagagagaggtccagattccatgccactcaccctgtakacccagtggctccttcagagtcagttcaaacacaataggttcattctggtacttagtactgatctccatagattgagtcctgagtgaccatgaattctgctagaatcctgccaactatgtcatctgtggtcccaaaggttaaagatactggcactatagacttaacgaaatcaaagttaattttattctgacccaagtttagaactatagcttgaancaaactcatggacactgagaggcgtccctaattgctacagtagcacagtattatatgtttgcaacacagaaa

SEQ ID NO: 91026 - DNA, 1216 bp, Homo sapiens
tgcataaataaaatatatactttcaatttttaaaagagtactttaaaaatattgagtgataactgctttattttggttattcattcaataggtatgaataacgaaattcattcaataggttgttcgtacctattgaatgaataaccacagtaacttaaaatgaggcattcaaataatctaatgaaaggttcattagaagtcttggtttcttggagataattgggaaaatatttctatgacttgctatgagatctcaggatagaggcagaaacatcacagcgtcacacaatggctaattataatgactaccattaattgaatagcgtattagagagtatgtattcattcatagctgttcttttcctcctttcctggccatagattccctgtgagtggaatayacttccctgtcacaatgactttggggttatccatgtggcttgctatagcagtgagcagaagtgatagtgtgtgaggtccaagtaaagttttcccagcctttttgcacttctgctatccacagtgaaaagagcatgcccaatgtaagcactgtcctttcattctgaatcctggacaaagagacttatggagcaggtgtgaacccagtctgcatactggagccacatgcagtttaactggccaggtaagctcaaccactttcaggagagccacagacaaactgaagattcctgagtgagaaacaaatgtttgctgttgtaaaccatcaaaattttgaggtagctgaagcttctttacttaagcaagtctgactggtacaaatgcccaatattttctaagaactgtgctaggtgcttaatttttgttatttcaaacttacaaaaagtattataaaattatcatctcataacaatattataattattaaaaaataaagtgatatcaatatctcagtgttataaatgaagagacacatctggagattttaaaaattaacttacacaatgcaggtaataagtggtttaactaacactggaatctgaatgtggttctaaatccaatagcagtgttcttttcagtactttgcataaattgaggaaggggctcttaattacttttccttgtgcacattgaaaagtcatggtgagatatgcttcatgttgtaaggaccagaatgtatttggaaagagaggttttagcttttgaatcaagcagtacttcttgagtatgtctgtggatatgaggtgtgtgcaaatgc

SEQ ID NO: 91027 - DNA, 1216 bp, Homo sapiens
tgcataaataaaatatatactttcaatttttaaaagagtactttaaaaatattgagtgataactgctttattttggttattcattcaataggtatgaataacgaaattcattcaataggttgttcgtacctattgaatgaataaccacagtaacttaaaatgaggcattcaaataatctaatgaaaggttcattagaagtcttggtttcttggagataattgggaaaatatttctatgacttgctatgagatctcaggatagaggcagaaacatcacagcgtcacacaatggctaattataatgactaccattaattgaatagcgtattagagagtatgtattcattcatagctgttcttttcctcctttcctggccatagattccctgtgagtggaatatacttccctgtcacaatgactttggggttatccatgtggcttgctatagcagtgagcagaagtgatagtgtgtgaggtccaagtaaagttttcccagcctttttgcacttctgctatccacagtgaaaagagcatgcccaatgtaagcactgtcctttcattctgaatcctggacaaagagacttatggagcaggtgtgaacccagtctgcatactggagccacatgcagtttaactggccaggtaagctcaaccactttcaggagagccacagacaaactgaagattcctgagtgagaaacaaatgtttgctgttgtaaaccatcaaaattttgaggtagctgaagcttctttacttaagcaagtctgactggtacaaatgcccartattttctaagaactgtgctaggtgcttaatttttgttatttcaaacttacaaaaagtattataaaattatcatctcataacaatattataattattaaaaaataaagtgatatcaatatctcagtgttataaatgaagagacacatctggagattttaaaaattaacttacacaatgcaggtaataagtggtttaactaacactggaatctgaatgtggttctaaatccaatagcagtgttcttttcagtactttgcataaattgaggaaggggctcttaattacttttccttgtgcacattgaaaagtcatggtgagatatgcttcatgttgtaaggaccagaatgtatttggaaagagaggttttagcttttgaatcaagcagtacttcttgagtatgtctgtggatatgaggtgtgtgcaaatgc

SEQ ID NO: 91028 - DNA, 682 bp, Homo sapiens
  misc_feature (1)...(682): n = A,T,C or G
taaacaaagcagattaccataatgtaggtgggcctcatccaatcaggtgaaggccttaagagcaaagactgaggcttcctgaagaaagagcaattctttcttaatactgcaacatagaaaccctgcctgagtttccaatctgaagattcaggctcaagagtgcgacattaactcttaccttaatttttagcctgccagcccgctcgacagatttcagatttaccaataacttaggtgccgattccttaaacacttttctctgatctctctctctctctaacatatatacacccatagcttatatatacatncaccatatataatncacacacaacacacacacacacacacatatatatatakagagagagagagagagagattctatacgcacacatttctctgaagaaccctgactacgcaggatataaagcacttggcacacttcttcctggcacacaggcatccattttatgagaaactgttattattaagcttcctgaatctaagagtcctcatttacacaataaggggttgagccagtaatctctgggatatgatccaactctaacattctaatactcaaaaaacttaatgtattagagtcctacatcataaaagttcaccttacatgtaggaaaaacaaattaaagtgcctaaacaaatttctgacataattgca

SEQ ID NO: 91029 - DNA, 650 bp, Homo sapiens
ataaaatatgttccccagcatcaatgtataagaaacataaaatatgtttctcaacatcttgaggtctgccaggggcaccaagtgcagtaacatgttgtaaaatggtgaatataatagtatctaagctcagatgatgattataaggaaactgtctctgcttcccatccccaataaccattttcaagaagcagatgctgctacaatcagctaagttcaatgatacttattagatgacaatagtaaaaataaccataattgccgttattattattattatattacaaatacttactgggtccaagatatagtgttaaaaccttgatagacattcatgtcagttaatgctcacagtcakgatgtaggtatggtgatgagctccattttacaggtgagagaggttcagttttcaagagtcatactcttaccactactctgtacccactaccatataagggaagcatgagaatgtagtgtgcctatttttaaattactgttctcaagttagggactcctgtatggtgctatattcatttctggatttttttaaaggcgtggcagggaaaaaaaccggggaaagaagaagaggtgtatttctttccattgttaagaaaaataagcaaatggaaggaaggaaggaaggaaggcatgaa

SEQ ID NO: 91030 - DNA, 541 bp, Homo sapiens
cttgagtctatctcaatgatagtttctttgcttgcatggtgggaattgcaaygtgggcaaatgtcaaccctagtcctctttcattctggcaaacgtgttccttctctcataattcttagcttctctacaggtgtccagtgttctatggctgcccctactctttgcagtctcagccacacagacctatgaaaagctgctattctggagtccccagaccatcctcttatcaaagtttacattgtggatagccatgaccacgttgtggagatgggtgttgaaaatgtcttgtatcatttaattgtagttgcttacatgacttcgttgaagagtaaaactcacattagactgtagttggagagtttctagtaaatttttcttatggcaacaggatttcattcaagcttattaaaacagaaaggtgtagggatagatcatggtacccaaggatcaggtagtaagagctagaactaggtgctacaataccaacaggctctttctgtgtctctcatcatctactctggttgattctgtataattatta

SEQ ID NO: 91031 - DNA, 541 bp, Homo sapiens
cttgagtctatctcaatgatagtttctttgcttgcatggtgggaattgcaacgtgggcaaatgtcaaccctagtcctctttcattctggcaaacgtgttccttctctcataattcttagcttctctacaggtgtccagtgttctatggctgcccctactctttgcagtctcagccacacagacctatgaaaagctgctattctggagtccccagaccatcctcttatcaaagtttacattgtggatagccatgaccacgttgtggagatgggtgttgaaaatgtcttgtatcatttaattgtagttgcttacatgacttcrttgaagagtaaaactcacattagactgtagttggagagtttctagtaaatttttcttatggcaacaggatttcattcaagcttattaaaacagaaaggtgtagggatagatcatggtacccaaggatcaggtagtaagagctagaactaggtgctacaataccaacaggctctttctgtgtctctcatcatctactctggttgattctgtataattatta

SEQ ID NO: 91032 - DNA, 792 bp, Homo sapiens
aggagcttaagtaatgtcagtgggactttgtcttgctctatttctccagttcagatttgccctgtgctgccttccttttcaagtaggtgacaaaaatggccttggcagctctagactgctgagctcttactaccctgagggagtatctttttccttatagtgtttagtaaagatctgatggaaggttcacactgatctgactggggtcacttttgaattaatcgccatagccaggataattttctgctctggtgggctaagactgggtgatacaacccattctagagccaggtttgtggtcagcttcacccaaaccatatagattataggggtggggtagttccccaagggaaaattaggattctgggcaggctcaagtcacagatacccacagtattcggacagtgtggaccctgctgccyaggtttgacccttgctttttccacatgccagctatgtgaccttggcaaagttctttttttttttctttttttttttttttcctgagatggagtctcattctgtcacccaggctggagtgcagttgtgtgatcttggctcactgcgacctctgcctccggggttcaaacgattctcctgcctcaacctctcaagtagctggattacaggtgcctgccaccacacctggctaatttttgtattttttggtagagatggtgtttcaccatgttgggcaggctggtctcaaacccctgacctcaggtaatctgctcgcctcagcctcccaaagtgctggtattacaggtgtgagccactgtgcccagcctcccc

SEQ ID NO: 91033 - DNA, 792 bp, Homo sapiens
aggagcttaagtaatgtcagtgggactttgtcttgctctatttctccagttcagatttgccctgtgctgccttccttttcaagtaggtgacaaaaatggccttggcagctctagactgctgagctcttactaccctgagggagtatctttttccttatagtgtttagtaaagatctgatggaaggttcacactgatctgactggggtcacttttgaattaatcgccatagccaggataattttctgctctggtgggctaagactgggtgatacaacccattctagagccaggtttgtggtcagcttcacccaaaccatatagattataggggtggggtagttccccaagggaaaattaggattctgggcaggctcaagtcacagatacccacagtattcggacagtgtggaccctgctgcccaggtttgacccttgckttttccacatgccagctatgtgaccttggcaaagttctttttttttttctttttttttttttttcctgagatggagtctcattctgtcacccaggctggagtgcagttgtgtgatcttggctcactgcgacctctgcctccggggttcaaacgattctcctgcctcaacctctcaagtagctggattacaggtgcctgccaccacacctggctaatttttgtattttttggtagagatggtgtttcaccatgttgggcaggctggtctcaaacccctgacctcaggtaatctgctcgcctcagcctcccaaagtgctggtattacaggtgtgagccactgtgcccagcctcccc

SEQ ID NO: 91034 - DNA, 754 bp, Homo sapiens
cttgtgcccaggagatcaaggctgcagtaagctatgagcatcactgcacgacagcctgggcaacagagactctctatcaaaaaaaaaaaaaaaaaattagtaggaagggcaaacagctaaatgtaactactccacatcctttttttattgttcccctttctcacraacaaaatttccatcctaagtagaattccccttcagaaggcttacattcaaggggatacagtactaatgaaaatgtaagtgctctgcctctttttcagctatcagtgatataggattctaggcatggcagtagcacatcgctttacacaggggttccactgacctaaaaatctactgttgaggaatcttaattaaattgataagttccatttctgttgaagaatctggcttctaacctttctatcaaaagggtgattaccatcccagtgggatatagttttccatttagatatagctgatttatggactcagaccagaagtacctgtcactttcacaaaaggagaaaaaaaggattatggctctaagactgcctctaggtccaaatcccatcttttcacacccatttttattagagtctaatagccaacatgctaatgaactcttttctcagttaattccactaattagttatctcttcttgttctgccagaatcccaacccttttacaatctactcatcaaatccatcaggccacatattatgccttcctagaggaacacttttcgtgatgacactttgtaaacaagg

SEQ ID NO: 91035 - DNA, 642 bp, Homo sapiens
attgctaaaagagtagattttaaatgtttttaccacaaaaaatatatgtgatgtgtggatttattaattagcctgatttaatcattccatattgaaaacatatatcaaaactctacatcgtaccccataattacatatataatcacttatcaagttttaaaaatttaaaaattataaatttttctgttataaaaaatatcaggtctttttttgtttctcaatctgggaaaaatgtttcttcatatgcaacatggaatttagttgttttactatatcatgagcatttagaaatcaatgagacaatctagcaagtgtagaaaataggcgtagaacataagtgaaaagataaatcaatacggcttttatacatatgcacagattgttatacttatttgtaatgcaaactaatgctgcaatattacaccattttacccacgatattggtgaagataaaaagattatccaaattctcagtgttgtctaaaaagtttttaaacgtwttttccaatatattcctggtgagtgtgtaaattggttcaatctttttggaggtcacttttttttttttttttttttttgagagggagtcccactctgtcactcaggccggagtgccgtggtgcgatctctgctcactgcaac

SEQ ID NO: 91036 - DNA, 758 bp, Homo sapiens
cagaactctcaatcttgctccaacacatcttgccttttcatggcacctcactttctactctatgtaaagcagcatatataaaaacagaacaaaacactcaatttcttatggraagagatgttacctagttttatgtgctgatatctgtgtctcagctcttacccaggcaggagaaactagagcttttttcagtgctttactatattttatgatagtcatataaaatattttttcagaataattttctttaaaccaaaatgtcccaaatgaatgtatagcactgagaacaaaataaatgaggagaatggtattagaaaaaaataccttatatcaattcatagttttccctttacgtaggtgtattgtctttctataataaaactagcatgaggcatacgggcatgtggagcagatgaatcagcccctctgtccacttgcctggaagtgtggccttgaagaaacagcagaactgctttggataagatgaaaattgggccccacgtggaactcattaacttaggaaaatagaaaccagattatctggggattcaaaaactgtattgtgttgcgttcttcaccttgtgtttaagattctcttggattggtttgtaaactttggctccactgggcttctgtaaggtcagaggcatgctgagaattttgataccaggaatgccaccaggagcttttgtgttccaggatgatatctgaaggaaaataacttgtctcggtggttaattgcttttattttgggatcc

SEQ ID NO: 91037 - DNA, 581 bp, Homo sapiens
gcatagaggacccagccgtattgagtgtagcagcatttagagaagcctccagaccctgtgacaagggggacaatgtccctgtctggctgggtcattttcttccagtctgggttcatgtgagaaatattaaaatgcaaactggagcctggtctgggtccctctgagtctaccgcagtagctggtggtgctggggacctctggaggcccctctgtcacctccaggaggccacacagccttcccttgctcctgcggctcggttgccggaactggaactcagcgggcctcctttctggaggagtgttttctaaaatgttgggaagtgggcgtttaagaaagactgcggggctgatcttctgtgcggaatgctcatttcaccatcttcccatctgaagatcacaagagtgtggaaagagcccgkgagcaggaccgcttctgtcagacttacatcatcactactattttgtttattgatgctaatcattttcccaacaataggaatgcccctggtcttcatgaatctacataaaacgcagaaagggaagtcagtgaacgagaagcagttcatgttttagttatccaa

SEQ ID NO: 91038 - DNA, 658 bp, Homo sapiens
gggatccatcatattaaaacggcacttaggagctgggtgaggcagtgaggaggacaatggaaagactgagcagcaagaagagaggagggtgaggtgggaacccacatggctgagtggaaaaagttaactgaactgccttggaaataggctccacatatttttggatcaagccttagtgttctatctcgtgtgtttgacagagcggattatgttttaacttttcttcctctacmtgacaaagttattttgaggaataatcatgaaatgaaacaaataattaatggccaggaaactttaagtagtgaacattttctttcactaacccttatatggtcatgtcagtaaaaataaataaatgaaaataaacatgccatttcagattaggaagagtgaatttttttcattgacctttccatatacaatcataccactgcaaaagtttttaaaaataaaaagtaaaatgaataagaatagtaccaaatagggtagtgaaaaggtaataaattcttattaaatatattaatatatatttttaaaagacataggaaaacttacttcatattgtgtccggaattggtggcttcttggtctcactgacttcaagaatgaagccgcgaaccctggtggtgagtgttacagttcttaaaggcggtgtgtg

SEQ ID NO: 91039 - DNA, 658 bp, Homo sapiens
gggatccatcatattaaaacggcacttaggagctgggtgaggcagtgaggaggacaatggaaagactgagcagcaagaagagaggagggtgaggtgggaacccacatggctgagtggaaaaagttaactgaactgccttggaaataggctccacatatttttggatcaagccttagtgttctatctcgtgtgtttgacagagcggattatgttttaacttttcttcctctacctgacaaagttattttgaggaataatcatgaaatgaaacaaataattaatggccaggaaactttaagtagtgaacattttctttyactaacccttatatggtcatgtcagtaaaaataaataaatgaaaataaacatgccatttcagattaggaagagtgaatttttttcattgacctttccatatacaatcataccactgcaaaagtttttaaaaataaaaagtaaaatgaataagaatagtaccaaatagggtagtgaaaaggtaataaattcttattaaatatattaatatatatttttaaaagacataggaaaacttacttcatattgtgtccggaattggtggcttcttggtctcactgacttcaagaatgaagccgcgaaccctggtggtgagtgttacagttcttaaaggcggtgtgtg

SEQ ID NO: 91040 - DNA, 1497 bp, Homo sapiens
ccttcagtggcagtagcaaaagtcctccttctctttaggtagacagtcagccactacaactgtggcttcctgaaatcctcagtggagctgtgtacttggcacagatttgtcttgaagaagggactccatttctgagccagttgttgaatggggatacttagcagtacagtgaggcatttccagtaggattgttcaaccacaattgcccactttccaggcccaaaggaataattgaaggctatgtagacttttttttttttttttttttttttttttttgagatggagtctcgctctgtcgcccaggctggagtgcagtggcacatctcggctcactgcaagctctgcctcccgggttcacgccattctcctgcctcagcctcccgagtagctaggcctaatatatatatattatacatatatatttatatttatatatatatataccaccacgtccggctaatatatatttatactttttttttttagtagagatggggtttcaccatgttagccagtatggtctcgatctcctgacctcgtgatccaccmgcctcagcctcccaaagtgctgggattacaggcgtgagccaccgtgcccgaccatgctatgtaaactttttagcagaagctttagctattgtgtcccgaagggccccaggtcatgatgaaatgtctttttttttttttgtctcttttcttcttaattactgagactgtcaaagaatatgtcaaagcatgacatattccaactccaggatccataaaacaccccaagttctgtggagaccctatcacatctgcaaaactctccaggaagtccagagccctcctggttaatttgttttagggactaggcatgcggtatcccctgacaacactggatcagcaattctcctacctaagtcagtcccacaccatgtgcagcagagtatccagtgcccctgccctggtctgctcacattggtttgctctccagaataataattcctcaatatccacaagagattgattccagaactactccgaggataccaaaaatcctcagatgctcaagtacctggtataaaatggcacagtatttggcatatgacctaggcatattctctcccatatactttatttatttatttatttcgggacagaatctcattctgtcgcccaggctgtcactcgcttattgcaacctctgcctcccaggttcaagcaattctcctgcctcagcctcctaagtagctgggactacagacgcatgtcaccacgcctggctactttttgtatttttagtagagacagagtttcaccatgttggccaggctggtctcaaacacctgacctcaagtgatccgcccaccttggcctcccaaaaagctgggattacaggcgtgagctaccacgtccagccccccatatactttaaatcatctctagattacttataatacctaatacaatgtaaatgttatatagttgttttaatgtattgctttttttattt

SEQ ID NO: 91041 - DNA, 563 bp, Homo sapiens
ggacatgatctcgttcctttttaaggctgcatagtgttccatggtgtatatgtaccacattctctttatccagtctatcactgatgggcatttgggttgattccatgtctttgctattgtgaatagtgctgcagtgaacatacacatgcatgtatctttataatagaatgacttatattcctttgagtatatacccagtaatgggattgctaggtcaaatggagaaaaaaatcttaaaatatcctaattagaatatttcatctatttccattagaccctaattgacacagaagctactacttaccaatatctactacrtatcctgtactttacattttttactcaaatcacccaatggcctttttgtgattagtattattttcatttaagaaatgagggtgaaaaagcaaagtaatatgcccaaggtgacatatagttagtagcagaactaaaatttgaattcttactggcctcacttcaaagatcagacactttccttaacaccatattcctgaagagatttcatgattcaatttttgtatgcatccaataatattttagat

SEQ ID NO: 91042 - DNA, 535 bp, Homo sapiens
aagagcatgggttattgaaggcaaagagagagtcctttccgtgaataacgtcatgaccaagtcagatgaggaataaaaagtagctataaccatgtagtttaaagtagcttagtccctttgatgaacttagtcaattggttgaagcaggtgccaaacttccagttaagggttcaggggaaatcgagmcatggattcatgaaggacagctccttcgagaaagttggttttgacaaagcagagagggagatggcaatgaagctacataccaaatacaataatctgctccaaaaaccagtccttaggtctctgagtcctctctaccctctttggaagaggtcttttgaataattgggaggggtggccaaaaaactgctaaagttgttacattatagtatttactccagaaaccaatcacatgggtctgttgccttcctgataaccatttgcaccccactcttttctttgctaacaaagccctgcttttgttcaggacatgaatctgccctgcctcagtagatagatctgatggacataa

SEQ ID NO: 91043 - DNA, 535 bp, Homo sapiens
aagagcatgggttattgaaggcaaagagagagtcctttccgtgaataacgtcatgaccaagtcagatgaggaataaaaagtagctataaccatgtagtttaaagtagcttagtccctttgatgaacttagtcaattggttgaagcaggtgccaaacttccagttaagggttcaggggaaatcgagccatggattcatgaaggacrgctccttcgagaaagttggttttgacaaagcagagagggagatggcaatgaagctacataccaaatacaataatctgctccaaaaaccagtccttaggtctctgagtcctctctaccctctttggaagaggtcttttgaataattgggaggggtggccaaaaaactgctaaagttgttacattatagtatttactccagaaaccaatcacatgggtctgttgccttcctgataaccatttgcaccccactcttttctttgctaacaaagccctgcttttgttcaggacatgaatctgccctgcctcagtagatagatctgatggacataa

SEQ ID NO: 91044 - DNA, 898 bp, Homo sapiens
tgcattttatagatgctgaacctgagcctcagagaagaaacgtgaattgtttgtagtggaatataaagctgaaagaaaaactgggacttaaagtatagtctttggactctgaagtctatgattttttcattatatgtcagctgttgctcaactgacccatcaatcaaatgggagccaggagtatcccctcagaatttctccagacttaatgttccaggaaagctgatcacactttactccttttggcagcccatataataatagtgcaaccaaacaggaaaagaataaagaggagagacagagaacattaaggtagtaataaaattcatccacaagctgaccacccagaaataatcaattttgtgcatatcctttttgtcattattttagaatccattatatttcctggmtgatattatttccttaagttctaatcatggggaactatttttgtctttgttccatagaacattagaacagaaagtgacctctgagactatttagtcaaacttccttaatattcagatgaggaagtcacaactagaaaaatgtatctatagaccaaagcaaagtcctaagaagaaaaacaattaggaatttaatgaattattttctgtaagtaattgcttacaaaatgaatgctctatggcttgaccataagataataactaagattttgcctgaatgtaaatttagatgagattttgatgtgttacatcattgttttgggcccaaaagagatttttcagggcttaatatatggtaggcttacagctgcatgaatgaatgaataaagcacatatgatttacctgtatactttgaaaataataaatacagtttactaatctaagaccattatgttcatattcagtcatattagcatcgtcatcatcaagg

SEQ ID NO: 91045 - DNA, 553 bp, Homo sapiens
tttcctacacttctctccatgtcttgcaggttgtttttctgcatcagttcttctatgctccaggttaatttttattcttctggctctctaaaaactctaagggtttttatgcaactttgttttcccttcacaccttcctctccaactctcattaaaaccatgatgaatattaccagtcagactctctccttttcccaatagcagcaatacatttgacctatgtggtagttagaaccctcatttcctagaataacttacataccatatttgtaartaagattcttcacattctcttggcactgggtgtcatagaacttctgatccattatgtttttaggtatttttgatgactacttttgtagtgatgggtggagaacacaatttctactatcccatggaaacaaaaaggataaaaatgaattaaaatgaatacatggaaacttagcatactacttttgaaagggtaaatgcttcagtcacttcagccagctatattttcctgtcaaggcaaaactaatgaagaaaattcatcatgggtatatagctggatgat

SEQ ID NO: 91046 - DNA, 1019 bp, Homo sapiens
ggggccttgagaggaccttaaaaagatgaacagtctttctctggagaacccgaaactgggtatattagtccgttttcatgcttctgataaagacatacctgagactgggcaatttacaaaagaaagaggtttaatggagaactcacagttccacatggctagggaggcctcaccatcatggcagaaaggcaaggaggagcgtcacatcttacgtggatggaggcaggcaaaatgagggagaacttgtgcaggggaatgcctctttttaaaccgtcaggtctcatgagagttattcactgttatgagaacagcataggaaagacttgcccccatgattcaattacctcccaccgagtccctcccacaacatgtgggaattcaagatgagatttgggtggggatgaagtcaaaccataccactggggcataattaaaagtctggtggtggaccatatctgtagagacttgccagatatgttaaaatgtggagggaaaagaaagccyggtgtctgcagtgtgaccccaaaatctgaagtcctagaaggacactgattgtgactgctggtttgtgaatgtgtttctccccaagggagcaacgctatgcagcatcatctgcagagagggacaccctgggtataaaataaaccagtctatgccacttcaaaatacatctctttggcataggactattttgccctcttcccatctacctaaaagcaggatatatggttccttttgtgaaggtattgcctctgccctccattataccaggatcaaaacaatccttatcactgcagacagaatgtcagcatcaaaatgagtctgcacagacaaactttataaaaatcactcttatattttattgttttctcttacatgtttcttcccaccatttattgcccttaaatgttcaacctcttctcttttgacttgtcacttcttcacaaatttatcatcctttgttaaaatggcatagatgcccctgtgtctactcattctttgggtctctacttcatttc

SEQ ID NO: 91047 - DNA, 1019 bp, Homo sapiens
ggggccttgagaggaccttaaaaagatgaacagtctttctctggagaacccgaaactgggtatattagtccgttttcatgcttctgataaagacatacctgagactgggcaatttacaaaagaaagaggtttaatggagaactcacagttccacatggctagggaggcctcaccatcatggcagaaaggcaaggaggagcgtcacatcttacgtggatggaggcaggcaaaatgagggagaacttgtgcaggggaatgcctctttttaaaccgtcaggtctcatgagagttattcactgttatgagaacagcataggaaagacttgcccccatgattcaattacctcccaccgagtccctcccacaacatgtgggaattcaagatgagatttgggtggggatgaagtcaaaccataccactggggcataattaaaagtctggtggtggaccatatctgtagagacttgccagatatgttaaaatgtggagggaaaagaaagcctggtgtctgcagtgtgaccccaaaatctgaagtcctagaaggacactgattgtgactgctggtttgtgaatgtgtttctccccaagggagcaacgctatgcagcatcatctgcagagagggacaccctgggtataaaataaaccagtctatgccacttcaaaatacatctctttggcataggactattttgccctcttcccatctacctaaaagcaggatatatggttccttttgtgaaggtattgcctctgycctccattataccaggatcaaaacaatccttatcactgcagacagaatgtcagcatcaaaatgagtctgcacagacaaactttataaaaatcactcttatattttattgttttctcttacatgtttcttcccaccatttattgcccttaaatgttcaacctcttctcttttgacttgtcacttcttcacaaatttatcatcctttgttaaaatggcatagatgcccctgtgtctactcattctttgggtctctacttcatttc

SEQ ID NO: 91048 - DNA, 629 bp, Homo sapiens
ggcatagagaaaacactcaatatgaataagctatttttattagccccattttcagatggagaaactgaggcctagggagattaaagatcaagatcaagattattcagctactaagctattaatctgggaagtaccattattagagccagattccttatttttagaaaccaaggccttcatctttatactgtgttgaccttcaggcaaagcagaatcaaatgagatatgcagttaaatttttttctaaatagactaacaatctaaacattttgcaatttgcctgcttgcattgcagagccagagctctagtggggcattttgaaccactttaccttgctaaaatcaccagggctttgaatgtcaggcaggaagaaatctattatttctccccaacataatcccaacttgctttctcttgtttcagcagttctaggaaatgtccaaaatataggctaagcrctctggtaagtgcttaaagtatatgaggaaatttagctatagaaaatgctacataaaaaccatgcagtgggcactgagaattccgaggtaacctcagtctactaagtttattttacttcattccattgggcagtgagacctagatgggtttgtaagacattgagagatgt

SEQ ID NO: 91049 - DNA, 582 bp, Homo sapiens
atgcaactacatattgaaaaatcactggctctggaagagcaattgtcaggcccatttcctgctgcagacgagccaggagacactcggggcttggcaacctgacagyggaggagcagccagggaatttagcaggagacagagaaaatgagccctgcggggctggcgaagccccatcaaaagcagactcaggcagagtctcccttccccgattcaggggccaacaccggggtggggtgccggctctgcttgctcaggtcctctgtaagccagagcgtgcgggagtcagggagaacaatgcatcattttggaagctgatgcttcagtctgaggccaggcatagcttgagggccacagaaattgttgcctgaggagagcacagatgtgtcagtcctggcacctgccatgccaggtcaaagttggcctttggcctcagcgggtttggggctggggataacccctgtatgcaccagcagagggcaccttaattgcaatctatccataggctggccactgatgtgtgtggtgggcatcgcagcctccactccagcatggttttcaccccagaggacctgcatagtcact

SEQ ID NO: 91050 - DNA, 582 bp, Homo sapiens
atgcaactacatattgaaaaatcactggctctggaagagcaattgtcaggcccatttcctgctgcagacgagccaggagacactcggggcttggcaacctgacagtggaggagcagccagggaatttagcaggagacagagaaaatgagccctgcggggctggcgaagccccatcaaaagcagactcaggcagagtctcccttccccgattcaggggccaacaccggggtggggtgccggctctgcttgctcaggtcctctgtragccagagcgtgcgggagtcagggagaacaatgcatcattttggaagctgatgcttcagtctgaggccaggcatagcttgagggccacagaaattgttgcctgaggagagcacagatgtgtcagtcctggcacctgccatgccaggtcaaagttggcctttggcctcagcgggtttggggctggggataacccctgtatgcaccagcagagggcaccttaattgcaatctatccataggctggccactgatgtgtgtggtgggcatcgcagcctccactccagcatggttttcaccccagaggacctgcatagtcact

SEQ ID NO: 91051 - DNA, 1402 bp, Homo sapiens
ggtctctcttataaacattagcccaagttctgctttcagccaccacacatctctctctcctgtggttccaaatcatgtaagtgatccttctgctaataaactctctttggccttgggctgggcacactgagtcctggcacccactccctggatgtccccatagggacatgttctatatgcaaaaatggtgacgatgaaaaagggctgggacttcatggattttggtttggtgagctgttaccactcctctggcttctcctgacagagccttcacttagcagatcatcacatttcacccttcagagcatgagacttgtactaatgctgcagcactacccagcagggagccagctttcccatggtcactggatgtgtgtggtgttccacagagccagggctgcgccaagatcttcagctccaagtaaaatcttggagacctttgccttaaatggtaattactctggcaaaggtcctttataccttgctctaaatgttatcccacccaaagtagaaaatgacttgtggaaagtctttcttgttttaaaaaatagctatagctatagtaagggcatagcagctttagaaatggaacacgtatattttttataggccattatgaaataaacttgcagtaactaattctttctcacacccatttgcctctttcagagaccctgcaggatttaacatcccaaaccaaatatactgttatgtgttcccaaactattttttctcagggctaaagggaaattcccatgaagtgctatttttccagaatgtagccccctgtcaatgccaaagagaatactttaaaaatgatatttctcaatattagggcacattatggatacaaaatcttagcccaaatccccttggtcatataaaacatgtcacataattgtattttcggttaggaaggagtgttacaaaataaatatttccccattagaacatactgggaaatgtttgctgacacctacactcaaacccagcaggttcccttggaagagtttggcaaagaacaggcccctccttaatgaggtgctggagttggttgaaaattcaatattaatttacaaaaaatggttgcatttaagaagtcaaaactgaggcctgcttgtgggcgtctgtgccttctgcattctgggtctgtgaaatatsctgggtcaaccgaggatcactgtccttgattggattgcatcagtctttctctttctaaagcagtctgtggaaaacatcaagaagggttttgttttgttttctcagaattttttttcctttctctatttctcctactggaaaattcttaccacaattgttgatggttgtttcatttgattttaagagatgcatggccgcaagggccgtgggagtacaaatcaatagctgtgatcactgctgg

SEQ ID NO: 91052 - DNA, 2292 bp, Homo sapiens
tcgagttcaagtttattttgcaccattcccagtttctgtactagttgacctcttaaagtaagtacacctccacaagacaaacattaattttctcagattgcaccaacctaataatacaatctaaaccaatgattctcaactctgattgtacctaagaatcaaccagggagttgttttttttttttaaatgctgatgcctgggctacacccagcattgggttttggcccagccattgttattttttaaggtttcccaggtgaatctaatgcgcagccaggtttggaaaccaccagtctaaatccacggtggggaacgagcagttccctaatcagcaggcttggtctcagaattgggcctttgttctcatgtcaaagaattggtcttttaaaaattcctttgattcagtagtcctcctctgattgaagtgtcaggtgggaaggagaagacataaattaccagtccttccaacatgcacagttcacttggtcattaatctttcygctttacctagtgattcagacataaactcaaactttgtaactgctaaaaggtagcacagctgatcagtttgagttttatctctcgtcttgacttttccccctttgaggtcctaattatcaaaattacgaagagaaccagtagataagcatgagaggagcctaagaaaaaacaaacaaaaacaaagagaaccagtagaaaacagtagaaaaaaattttgaagacccaattaattgactgtttgaatcattgccttataactgtccttcaccgtctgcccttggctggacagacagagagattctcatacttcccagtaacttacatgtcattggaccagggcaccccaaaccaaattttactgtcctatttccattgacaactacctctggaagtttctgtagccattcatcccaaatcagtaggaatttctcctcctaagaccttggccttacattcattgagttcttcactgagttcattgaggtcctccggtggcctccatccccttccatgaccagaacagtccagactcagagagaggcttcccttcatagggagctgcgtgaggggagagaaagagtttgtcccaaaaatcctgaattagagtggagataccctaccgaggggtcccagagtagaaagagccagagagctgagttggagcaaagtctggaaacaggacagaaattgaagatgagaaccctgaggtctagaagaataagtggagctgaaaagggatccatttgctacattcaagaatgggattcatgcacaatgatgtcaagtagaggttcctaactcagctagaggacactgggcttggttggggtggcggagaagaaccaggtgtcaaaagaaggcttggagacttgcccaacctagatttgaactactctcagctcaacagaatctctcatcactctgaaaattgatttcatttccaggaaaaaaattatgaaaactttcctgtcagtgtgacaggtgaggtataaatactgaaaatagattcatatttgtggagataaatccaagtgttttgtttcccatgtaaaatttaaacaaaacacccaaacagaaaaaaaatttccatttggaatgcagtctgggttccccagatgttttgaaatgctttgccagatatttaaacacaacccaaagtatgtttggctagtacttccttattaaaattttgggtaaatttgagggaaggtgtatccatatatttctgattcatttgcatttaactcatcaaaccaatatttagatgccacttcatttcaaaaaatctttacagaattaaaaaccaggaagttctattttacaaagcgtaaacaaatttgaacatcaaactgttcttattggtgggatttgcctagactaaagagactgaattaattctaaacttggcaaaatacaaccccccacctctgtaccagactgactctgtcatttgcagaaggtcacaaagttgtgctcttgggagaatatatatatatatatgtatatatatgtgtgtgtatatatatatatatattttgtttgtttgttttgttttgttttgttttgttttgagacggagtttcactcttgttgtccaggctaaagtgcaatggcgcaatctcagttcaccgcaaactctgcctcccgagttcaagtgattctcctgcctcagccccctgagtagctgagattacaggcatgagccaccacacctggctaattttgtatttttagtagagacggggtttctccatgttggtcaggctgctctcaaactcccaacctcagag

SEQ ID NO: 91053 - DNA, 2292 bp, Homo sapiens
tcgagttcaagtttattttgcaccattcccagtttctgtactagttgacctcttaaagtaagtacacctccacaagacaaacattaattttctcagattgcaccaacctaataatacaatctaaaccaatgattctcaactctgattgtacctaagaatcaaccagggagttgttttttttttttaaatgctgatgcctgggctacacccagcattgggttttggcccagccattgttattttttaaggtttcccaggtgaatctaatgcgcagccaggtttggaaaccaccagtctaaatccacggtggggaacgagcagttccctaatcagcaggcttggtctcagaattgggcctttgttctcatgtcaaagaattggtcttttaaaaattcctttgattcagtagtcctcctctgattgaagtgtcaggtgggaaggagaagacataaattaccagtccttccaacatgcacagttcacttggtcattaatctttctgctttacctagtgattcagacataaactcaaactttgtaactgctaaaaggtagcacagctgatcagtttgagttttatctctcgtcttgacttttccccctttgaggtcctaattatcaaaattacgaagagaaccagtagataagcatgagaggagcctaagaaaaaacaaacaaaaacaaagagaaccagtagaaaacagtagaaaaaaattttgaagacccaattaattgactgtttgaatcattgccttataactgtccttcaccgtctgcccttggctggacagacagagagattctcatacttcccagtaacttacatgtcaytggaccagggcaccccaaaccaaattttactgtcctatttccattgacaactacctctggaagtttctgtagccattcatcccaaatcagtaggaatttctcctcctaagaccttggccttacattcattgagttcttcactgagttcattgaggtcctccggtggcctccatccccttccatgaccagaacagtccagactcagagagaggcttcccttcatagggagctgcgtgaggggagagaaagagtttgtcccaaaaatcctgaattagagtggagataccctaccgaggggtcccagagtagaaagagccagagagctgagttggagcaaagtctggaaacaggacagaaattgaagatgagaaccctgaggtctagaagaataagtggagctgaaaagggatccatttgctacattcaagaatgggattcatgcacaatgatgtcaagtagaggttcctaactcagctagaggacactgggcttggttggggtggcggagaagaaccaggtgtcaaaagaaggcttggagacttgcccaacctagatttgaactactctcagctcaacagaatctctcatcactctgaaaattgatttcatttccaggaaaaaaattatgaaaactttcctgtcagtgtgacaggtgaggtataaatactgaaaatagattcatatttgtggagataaatccaagtgttttgtttcccatgtaaaatttaaacaaaacacccaaacagaaaaaaaatttccatttggaatgcagtctgggttccccagatgttttgaaatgctttgccagatatttaaacacaacccaaagtatgtttggctagtacttccttattaaaattttgggtaaatttgagggaaggtgtatccatatatttctgattcatttgcatttaactcatcaaaccaatatttagatgccacttcatttcaaaaaatctttacagaattaaaaaccaggaagttctattttacaaagcgtaaacaaatttgaacatcaaactgttcttattggtgggatttgcctagactaaagagactgaattaattctaaacttggcaaaatacaaccccccacctctgtaccagactgactctgtcatttgcagaaggtcacaaagttgtgctcttgggagaatatatatatatatatgtatatatatgtgtgtgtatatatatatatatattttgtttgtttgttttgttttgttttgttttgttttgagacggagtttcactcttgttgtccaggctaaagtgcaatggcgcaatctcagttcaccgcaaactctgcctcccgagttcaagtgattctcctgcctcagccccctgagtagctgagattacaggcatgagccaccacacctggctaattttgtatttttagtagagacggggtttctccatgttggtcaggctgctctcaaactcccaacctcagag

SEQ ID NO: 91054 - DNA, 2292 bp, Homo sapiens
tcgagttcaagtttattttgcaccattcccagtttctgtactagttgacctcttaaagtaagtacacctccacaagacaaacattaattttctcagattgcaccaacctaataatacaatctaaaccaatgattctcaactctgattgtacctaagaatcaaccagggagttgttttttttttttaaatgctgatgcctgggctacacccagcattgggttttggcccagccattgttattttttaaggtttcccaggtgaatctaatgcgcagccaggtttggaaaccaccagtctaaatccacggtggggaacgagcagttccctaatcagcaggcttggtctcagaattgggcctttgttctcatgtcaaagaattggtcttttaaaaattcctttgattcagtagtcctcctctgattgaagtgtcaggtgggaaggagaagacataaattaccagtccttccaacatgcacagttcacttggtcattaatctttctgctttacctagtgattcagacataaactcaaactttgtaactgctaaaaggtagcacagctgatcagtttgagttttatctctcgtcttgacttttccccctttgaggtcctaattatcaaaattacgaagagaaccagtagataagcatgagaggagcctaagaaaaaacaaacaaaaacaaagagaaccagtagaaaacagtagaaaaaaattttgaagacccaattaattgactgtttgaatcattgccttataactgtccttcaccgtctgcccttggctggacagacagagagattctcatacttcccagtaacttacatgtcattggaccagggcaccccaaaccaaattttactgtcctatttccattgacaactacctctggaagtttctgtagccattcatcccaaatcagtaggaatttctcctcctaagaccttggccttacattcattgagttcttcactgagttcaytgaggtcctccggtggcctccatccccttccatgaccagaacagtccagactcagagagaggcttcccttcatagggagctgcgtgaggggagagaaagagtttgtcccaaaaatcctgaattagagtggagataccctaccgaggggtcccagagtagaaagagccagagagctgagttggagcaaagtctggaaacaggacagaaattgaagatgagaaccctgaggtctagaagaataagtggagctgaaaagggatccatttgctacattcaagaatgggattcatgcacaatgatgtcaagtagaggttcctaactcagctagaggacactgggcttggttggggtggcggagaagaaccaggtgtcaaaagaaggcttggagacttgcccaacctagatttgaactactctcagctcaacagaatctctcatcactctgaaaattgatttcatttccaggaaaaaaattatgaaaactttcctgtcagtgtgacaggtgaggtataaatactgaaaatagattcatatttgtggagataaatccaagtgttttgtttcccatgtaaaatttaaacaaaacacccaaacagaaaaaaaatttccatttggaatgcagtctgggttccccagatgttttgaaatgctttgccagatatttaaacacaacccaaagtatgtttggctagtacttccttattaaaattttgggtaaatttgagggaaggtgtatccatatatttctgattcatttgcatttaactcatcaaaccaatatttagatgccacttcatttcaaaaaatctttacagaattaaaaaccaggaagttctattttacaaagcgtaaacaaatttgaacatcaaactgttcttattggtgggatttgcctagactaaagagactgaattaattctaaacttggcaaaatacaaccccccacctctgtaccagactgactctgtcatttgcagaaggtcacaaagttgtgctcttgggagaatatatatatatatatgtatatatatgtgtgtgtatatatatatatatattttgtttgtttgttttgttttgttttgttttgttttgagacggagtttcactcttgttgtccaggctaaagtgcaatggcgcaatctcagttcaccgcaaactctgcctcccgagttcaagtgattctcctgcctcagccccctgagtagctgagattacaggcatgagccaccacacctggctaattttgtatttttagtagagacggggtttctccatgttggtcaggctgctctcaaactcccaacctcagag

SEQ ID NO: 91055 - DNA, 1303 bp, Homo sapiens
gaaaagggactggacttcmcagagtgattggtgttgcattttgtctgtgattttccatagatggcagcctctcctgataaattcccaggcacttcttgggggtgtaagtgagtgaaggctctttgccaaggacctctgactcccaaagctggcgaggctgggaggcatttctcagtctccctcccactctgtcttggctgtgcctcttccctgctacccccctgaccctgaggacaccactgcactgatgtagcgccagagcaatgcgaaggcacctgagaataacagagatggacagccatcttctttcatttttgacctcttggagctaagacatgactttgaaaaagctcaaggcccttcattgtacaacacaaagcaggctcagggcaccagctgcttcatgattgttctcttgctatggaaggcaaccccagccccctggagtcttatgccaagaaatcaagatgtatggattatttggatggaaggaaggaaggagggagggagggtaggaaggaaggagggagggagggagggaaggaaggaaggaaggaaggaaggaaggaaggaaggaaggaaggaaagaaggaaggaatttaggtcaggagaggaaagtttgaccttgtagtttggaggcaggtctattctagataggcaatatatctgagcaaccagcaaagccatcgagagagccctgtggctgatgctgtggccggcacaacataaagagctaaaagtgccagtgaaatggatgtggctgctgaccaataaccatcatcccctgacagcaggtgcagggggcagagggacaagtggaacctctttgtcttgtcattgcagaccagagtgcccacagcgatgtgaaacctatttgtcctggaggaggagggaggagggaaagggaaaaaaaacaactggctcactctggctccataaatcactggaagggagagcccttgcctggtgaagttggagattctacctggaagctccctgatggtgcactgagccggggtgtcgtaaatcaccagggctccgccaatggcagccctgcccactggcccattgaaaaggggctggttgttttgctggcagctgatgcagtgcactgtcccagaaagccggggacaggtgtctgccaggccatggacccaggcctactttgtgtgcttcccttgggtgtgatggggggagagaggcggtggattgctgtccctgggaacttggcccggtggcctggcatagccggaatgtccttggccagctctttgtgaacagccagaggcagtcaggagatgca

SEQ ID NO: 91056 - DNA, 598 bp, Homo sapiens
gtatacacacgtaacaaacctgcacgttgtgcacatgtaccctaaaacttaaagtataataaaaaaaatgcacacacacaaaaaaggggtctccggagaatctctgaacagccccacaagtgtttacatcagatgctttcgtgcagatgagggaacctgcccatgaccttgtctgagcatgcccacatgcgcactgggggaacggggtggagccaccagtagcaaggaggatcctggcctcctcagttcctgtgtggtggcctgggattcaacctgtgaggttgggggcctgttagcaggagtccatctcactgtgctgggttttttgtttctttttttcccttttagcctaataatatcctgttctactcacctttcaatgtgtctgcatgcctaaatttccctggttgcgtgacaagagcccggttttagctgaactaaggagcaaaattcggcaacagcttgatgttcaatktccttatctacagggaatttcaaatccaatactgcatcttcaactatatgtttgaaaaaagcagcatctgtgagggcccaaatctatgtatatagaatctattgctttctgatttctcctcct

SEQ ID NO: 91057 - DNA, 744 bp, Homo sapiens
tttgtttcatctttcttgtttttgttcttggggtctctgactttttctattgctttttagtttcttggactcgatttacccacttttttttcayagtatattctttccactattttcttttgttaagcaacaacagtttctggatcagcctttcattcaatagttcacattttaaaatcagaccaagaaatgatttgctccatctagcaacatctgtgcctgcgcttttcaagtatacaaatacccacttgctcccatgagagagactataaccatctctccatccctcacaaaagccaggatcccaggttcatttccagaatggatatatataatatgactgttgaaccacagggccagccttacattatacctttcaacaaaatatatttcatggctcatggctcataaatgtagtttcactgtagacagtgcacaatgagtaaatctaccctttttcatggcaaggagcccaattcatatttttattggcttactactaactaaattaagccccaatttctttaaaaaagaaaaaaacactcatgactgaaaataaacgccatttcaatatggctgccaaggacagacttctaaaagaacgaatgtattccaggctcaatctcaagagacctaacaagtccacagaaaaattaatgtactaaataaaacaatttggtattgagtactgttcatttttcacaaaacagtaaagttctataaactgaaaatctaagaatgtta

SEQ ID NO: 91058 - DNA, 1030 bp, Homo sapiens
accatggtagtacaaagaagtacaaattcataagtacttaagcagcttctttaacagcagaattttaatcaagatctcaccagattgtttcttaacttggatgagttcatccaaggctttgacttactttacattcttgtttactgctcccagtaattctacttgatgaccagaccaatgtttgtcttttcatgtattcactagatgataatctgcttaatagaaattcccataaagtatgaacccaaaaaagaataaagttagttttaggttccctgttatctggaaaatgcaattatcctttaagtaatcctttaatgactttaaaagtcattaatatttcttaccagaccatgtcattatttctgattagcctatttatggcttaaaacagatcattttccctttgttttttgacaacttaacattttggcagattctacatccagatttaagaaatgtttatcttatatttggagccagtcacctaatcactctctttctttttactttgttgctgttcttggtttctttttatttgcttgtttttaagttaatctaccatgttatccatggaggaactcatctttgcatttgacaacatctaagaaggctgctcaaagattgagcatttcattatattatcttattctcacaaacaatacactgtaaggttattccaarcatgaataaggttatttgcccaagtcccaaaagcataactcacagagccagaatttgaagctctcaaacattaaaacccaacacctatctcactgctattctgcctatcttctgtataaaggcaaggaaaaaagtctcttggttgtgccatgaaacatagtaacaggaggctacaattattccccattagttctcattctcaactcaaatgctcctagtggaaaagtacatgttactactatgcagaacatggaaaataacttgaatacctttgataaaacagtgaaactttgctagaatgggtaacagcaatgaaaaagtatgtgttatttaccatttcaaggat

SEQ ID NO: 91059 - DNA, 603 bp, Homo sapiens
ttgtagtcaaattcagaaaaaaaattgggggaaatgaacaagacaaagcagtagatgaggttcaaatgagtggtattcatttgttagttcagcagacatttattgagcatctgtttttagactatgtactgggctagatgctgaagatacagagtgtggttgaaaggacagacaagcaaggaaagctttctctcagaagtaatcacttccagaggaggtgatgtgggctcttgataattcaaccaagtgaagtctggaaagagggcagggagacgtcatgggtttgtcctgggaggaggagaaagggaaggatagcctgcctttaagagcagagagagcaacagctgcccagacacccaaggacctatccaaccttaagaataactcctgtcactgggatcacctttaggccatagtcaaarcctatgaaccaatcaccaatttaagaagagattagctactgctcaacaactttcctgccaaattcaggtgtcatgccccttggcaggcctatgctattactagttaattgcatgtgtgagtatgtgttccactctcatatcctttcccaccaaagaaaagaaaatggtgccatggagtgtt

SEQ ID NO: 91060 - DNA, 665 bp, Homo sapiens
  misc_feature (1)...(665): n = A,T,C or G
atttgctaaggtgtcatagaagctggcctaagccttgatatataggtagtattttaatggatgggaaaaaggaaaagcatcctaaacaagagaatacatctttttccagaaggtaatttgactgtttaattactagttaagtacaattaatatcctccacaaggctgtcctaaaanccatgacccaacttttgttctgtggtcaagttcagatttatcatctgaatttccacgttttccttccagggggaagagacacggcaggcctgggtggcaaaggaggcccttaccggctggatgcaggccatacggtgtaccaggtctctcaggctgagaaagatgcagttcccgaagaggtcaagagagctgctagagagatgggccagagagcattccagcagaggtcagtgctcccatcrcatttagaccagcactactgctatggtgaaatgtcatgatggactgtggggaaacctagatttgtgtgtgtttccacctccacctcatgcagcaactcggacctcaaactgaaatccacagccatccccgtccctaacggaaacagccaaataaacaaaatcacctgttctttctactcaggctccttaaaatctaaagctcaaatcgccccatccatgtctatctgttcctaggcaacatagggaa

SEQ ID NO: 91061 - DNA, 1852 bp, Homo sapiens
  misc_feature (1)...(1852): n = A,T,C or G
tcaagagctcgagaccagcctgaccaacatggtgaaactccatccctacttaaaatacaaaattattcaggtgtgatggcatgcacctgtaatcccagctactcgggaggctgaggcaggagaattgtttgaacccaggaggcagaggttgcagtgagctgagatagtgccactgcactccagctggggcaactagagaaaaactccatctcaagaaaacaaaacaaaacaaannnnnnnnnnnnnnnnnnnnnnnnnnnnnnnnnnnnnnnnnnnnnnnnnnnnnnnnnnnnnnnnnnnnnnnnnnnnnnnnnnnnnnnnnnnnnnnnnnnnagctaagtctcctactatgtactgcaaatcttctgttctaaaatgttaaaatcctgtcctacctttagtattaccattattattaatatctgaaatgtaacattcctttcctactttcaattatttcctagagactgactggcaaaaatcaggagtttaactatttttctttattcaatgtttcttctttcttaaaatttttaatttaatgggagggaatttttaaaccactttattggggcctgattggcataagaaagctgtatattcaatgcatacaacttaatgagcttggagataaatgtacacttgtaaaaccatcatcacaatctatgccataagcactgccgtgccttccaaaactttccacccattcttttatttattattattaccattattatttgcatgtgataagaacatttaagatctaccatcttagcaaatttttaagtaaacaatgcagtattgttagctataggcaatacagtaaatgtctacggctttagtcatattgcataactgaaaatttgtatcctttgaccaacaccttcctacttcctcctgctcccagcgccttgcaaccaacatttgaccctctgcttttatgaattcgactcttggattccacatatgaatgaaagcaagcagtatctgtctgtctttggtttggcttatttcatttagcataatgtcttccagattaaaggctgtaacaaacagcaggatttcctttcttttcaaggctgaataatatgccattgtatgtaagtggcacatttctttattcatccatttatgaacattctgattgcttccatgtcctgtctattctgaataattaaatttattttacaagtgatcttgtttgacctctgataagacataatttaagtcctatacactcaccccttttgcttaatatgtctctgaattgtggtttaatttttaaatcaaaattgcaccaattgttttatctctttatattatgttatccctcrttctacatatccaatttatttcttaaaaaacatttgagaaaaaatttaattaccaatccttatatgccaattgtacatcttaccatttccatgtctgtaccttgctccaaaaatatttgtgctcagaactgtaaccatatacgaatttgtaaaggatagaccaaataatttttctgttactatgtttaaataaaaataatagcaaactttgaaactttatcttttctgacattgattctatttgttctttttaaatgaaaacccaagtataaagaatactggaatacctctggaaattttcaatagaccacataagtattcaaattagattatgaagctaaaataaaattaatggaaaggatataaagtcctagttcaccctgaaaaatgttttcttcttctaactggataagattaaataaaataaccgtataaaaagtatagttaatctctgtgaattgatgatatattctgcatctcattcaacaaaaatatatataaataacatatgtattatt

SEQ ID NO: 91062 - DNA, 3276 bp, Homo sapiens
ttttttgcagagaataaaactttaatcctcagtgtttctgaggttgtaaactacagcactaaaaaattagttttactgtttgttcatttccctgtacattcgtaaccatcaagaagagagttttgatgttttgtaaaaaaaaaaaaaaaaaaaaaaattaaaggatacagaacagttgtaattttccccattgattattaagatctctttgcatggtttcagcttgcacagtcatttttaaggtcctttactactgtataacacctggacagcctgtatttcaaagaaggggcttaactgttccctcaagaagacatgtgtgctaaaaactctcactagtcttctgagttttaggccttagaaaagcatttgatatgctccatgacagcaaagattaaaggatacaagaataaatcttcttagtaccagttttacaaatatgtcgcaaaccccattttactctaatctacagaaaggtttatactttctaatcttccttaagaaataaattttaatatagtaagtaattcaaccattactcacagataaatagtaaaagcaagttctgagagttaaaaatattttaaatgctcatctcttagcctccatgaacggcagcacattttggagctgtaaaatatcctccctccaagctttgttcctctccattggcaaacattagctgtgcatgccccatcctcctgttacacacactttacttatacaacacaggccaatgtgtttttttcttctgatttcttttggatcatcataagcattatagacattttcatcagtgatgccaagagaactgggaatatgtgagtttacttttgcttcctctgttgcctagttggctgcttctgtagcaacagaacaaaaagaggatcatgcatgaaatacagctattatttatgagagaatgactgcttttaaaacaagatagatgtttagtattctgtggatactcccgcaccaaattgtaacagttctgaaggaggttaaattgcaagccaagactgtcaaaattctctcttgatatagcaccaaaatagcctgatcagcccaaaagctgctgagcctcactattaggaattgcrgctactctgcaatgtgaaagatagggaatttggtctatttcatagatttttttttttttttattccctgagatttactgcctaaagaataagaatttctgcttggatggcttgatgtgacatttacctctagttttgccaatgaggtcgtggtgtggtttaatacattacattaacccatgcctcttggatctcaaatcattttagattgtgatttagttttacccagcatctatcagttagcatgaaaacaagttcaggtaatattctaagtcaagactagaccgcaggccatacattcactcaccaaattttatcaagcatctactatgtgccactgatacatctcgcatagagaattcattagggacaaaacaggctttttccttacagaccatcacccaggattcttcctagaaggttaatataaaataacttagatttttaccaaaagtcgtaagaaaatcctaatcatgagtgaagtatctcatctaataaatttaaacatctgacagattggccaacttgttttcccctaaagagggagagttattactattctttagaaagtctaaggaagaattaggcaaatagtataataattatattgaccagggaaaacgtgtgtttaatggattgaagcataatataacatcaggctccagagtatctgagttaagaactaggtgtcctaagttctgtaacatcttttgctttatcaaacacgtcttaaaatactactgagcagtttaactatgcaattctacttttatttcaaagaacactacaaggaagacaatgattgcagttcaagtctctgacacttgaattaatacaactatatctaatttgtggcatgaaagaagagtaagagcagtagctgtaagattagaaaacacaactagaaagatgacagaatttgaaagcatataaacaagcatactctattttcttgcatatttcccttgtatatgcattgccttcatcaaaattttttcacccagtgaagttttaaggttatttctgactacacatatcaaaattaggaaaggtaaaggtcattaataatgcctgcatcactttctaaatccaattccacactgagaggcagaatatcattaacaataaaaagaaatagtgtgtaggggatgtttaattagagattcaaatatcacattttcacttttattatatacaagtgcagaaatagaattgtccatttatatgggattgtattttatttggctttttaataagttatctgcttattaataaaacccaagaaatataatgtctttggtccttctctcattgatgagatagcatagcagtgattcacctgaagtagcgtaagactccagcgaatggatccaaaggctacagacaagtttcattcaattcattcttattggacatgtacttatttttccacatataccatacccatatattgcattaggccatgaatacaagaaagataaacatatttggactctgccgtcaagcaacatagagttttgtgaatattttgcaattttttaaataaaaattcatcatacttggacaaaaaatgagctccagaaatgtaagtatttagctatatgttatacttaaaattattttaaatacacaagggaaacaatgttttaaaagacctctttggtcaatagtcaatcctctagaacatgaaatttttcacttacgttcacctgcatttcagcatttattttttgttccttttcagatgttgatagagagatccttagatgaaaaatagagattctatatgtggtgtcatttctttacccttcttgtttctggagtcagcgtttcctgtacatgtaactacaatgattcacacttgctatgtagcattaatagcaccccaaatgcacaagattggccgtttttatttttcttaattggttttgcaagttttccacaagcccacactaaagagctcatgtctgttgagacttgtcattcaaaatcaaccttagcccctttgcgttgaccataatctcaaactattagaatggaagaatttcaggaaaacaaaataagtatttaataaatatctgttgaatgaatggactaaatgattactaatgaagactacagttgaacaaaaatgttttagggcagtctttctcaaatattaatatgtatatgaatca

SEQ ID NO: 91063 - DNA, 623 bp, Homo sapiens
aggttaccccttatctccttaagcatttgctgagcacttactaaggacaaggcaatggtcaggacctaagcacacatcaaggaaagactacagtgccttccctcattagccctacagtcttgtgggaggtgcataaaaagcaaatattagattgtaatatgtaggatatgtagatttttgtttgtttgtttgtttaagagcaactgcgtgggccagcgtggtggctcacacctgtaatcccagcactttgggaggctgaggcgggaggatcatgaggtcaggagatcgagaccatcctggctaacacggtgaaaccccgtctctactaaatacacaaaaaaaatcagccgggcatggtggcgggcacctgtagtcccagctactcgggaggctgaggcaggagaatggcatgaacccgggaggcggagcttgcagtgagccgagatcctaccactgcactcyagcctgggcgacagagcaagactccatctcagaaaaaaaaaaaaaaaaaaaaaagagcaactgcctgaaggtgttaaggagggtctcctgggcaactatttaaactggcattttaagaaggaagggaagattctcatgagaactttgtgagggaggacatt

SEQ ID NO: 91064 - DNA, 710 bp, Homo sapiens
aagcaattctcgtgcctcagcctcccatgtagctgggacctcaggtgcgcatcatcatgcctggctaatttttgtattttttggtagagacggggtttcaccatgttgggcaggctggtcttgaactcctgaattcaagagacccacctgcctcagcctcccaaagtgctgggattacaggcrtgagccaccatgcccagcctcaagaatgctttaaaaacatgttagtatgtggttgtatgtgtatgtttaacaggtgtcacatactcaccaggttaggattctgtgtaggtctttggtgcgaataacttctgtgagaataactttggctattctcatacctttattttacatggtcactcaaagatctaagtaccatcacactggcaaataagagctggagacagaaacagcccgtgatgctgtgccctgaaatttagcatttacatatttccaacctcaagtgattttctttgttctgaaacctaagacctggtttgatatgtaaattacactccatttttttttcagttctcagataggaaacctcttagattaataacaggccagtatgctgtgacttagatatcgggaataatttctggtgtttccctcctatgttgatcctgtaagtatcactaggtttacggtggtcttaaagcggcctaaaagaactggacatgcaagaaatacatgctagtctacaatga

SEQ ID NO: 91065 - DNA, 602 bp, Homo sapiens
cacacacaaatacaccaataagatatttgtacttcattgtatgtaaatctcatattttaaaaactaaacaaaattttaattcatcttaaattactgactttatatctggtacattcttccacttgaagatgctatgccgtaagatacaatgctttggctgtatccaaagtcaccaaactaaatcatttgggggaaaaaaatctcttatgggttcttctcagggaaaggaaattcaacagagtaaccatgaagcaaattcatataaaaagtatcattaaatcaaactaaattaaattaaaacagacgtaattagggctctctgaaagtarttttggctaacactttgtttacatgcaatatagatgtagcaactactgacctcaggcacttttagctgctgttacattaattattacatgtgctttttatattccagctcaaaatatcctttagagtctgactaactaaggtctttctgccaaggttacttcaaatgaatctcaggtcccacagaagaaggaaaaaaatcctatgaaatccacatactgatacagatgtaacatttttcttttcttaaccatgattttattctacttagaata

SEQ ID NO: 91066 - DNA, 1078 bp, Homo sapiens
ctgacatgcaaatgtctccttatattgctgctgccctttaaaccgttccatggcttctcatcgccctcaggaaaacttacgctgaacctcttacttgtgcacaaggccctacttgttctggctcctgccgaggtcgcctggctcacctgctacctacctccacccccactgcagacttcttccacgtgcctctggacatgtgacctctgcacctcggctgcctctgtgcagtgggctgggacccgtccactgtgtccacagtgtagctggggcctagcaccctggctgcagtcaaggagggacccagtcagtatttgaggtgaatgaatattctttcctgatcaatttgtgttgttttcttcttgacttttacttaattaaaaaaaatacgattaagggaagcatgacatgagaaaggattgtaggtgtcttctcttaggagagtaaacacraaacaatggaggctgaatgtgtttagaggataaatatgctcaccagtatctcagctggaattgccttagtgacgacatcatcactttccctcagatgtggatgtcgagtttgtaataccaagaaccgttgggagaagctcccgtcgtctgctttctcgtctctccccaccattctccctgggtggccttatccgtgtccagctccagctcaccccttattcccccatgatctccatttccagcccagattatttcctaagctccacgctctagtggcctccacgtgtttccacccaaagatttcccatattgaggctccttacttgggctcaatgtgccttaacctagttttcttaacctcacactttcttaacctcacacttctgtattttcctatctcagggaaggtccctggactagtttcctaggctgccataacaaactaccacaaagcaggtggctttaaaacagcagaaatgtattctcccccagttctgaaggctggaagtccaaaaccaaggcggcgttgtggccatgctctccccagaggctctggggaaggattcgtcctcacctcgtctgtttcaggcgctgccagcgggctgtgctggtccttagcctgcgga

SEQ ID NO: 91067 - DNA, 834 bp, Homo sapiens
ctggaatgcctggaacaaaggtaggctgtgtaatttactccaagagtgagtggggctgtctctgccctggccaactgagtgtggcatttccattactaaatcaccaaaagatttatttagctagctttggctttttcccttcctttaatttttgaatcaagtgtcaaatatgaaatacttactagaatagtataattatttgcttggtttcaggaactcagtaaaattgccctgttgatgaaagtaagttgagagagactgtgcattttggttgaattatgtcctatttcccaccctactcccccaccctaaattaagtcactttataaaagtgcatgtaaagtcagctrttgggacaatccttttacttaaaacgtctgtgctcctccgtttcttaaaagaaatacagcagctcatacaggttcaatcatgtgataaaagctttttttgcagggtgaaccaggaaaacctgggcctcctggtgatgcaggattgcaggggttaccagtaagtatttgattctttacatgttaattggtttatatacatgttttaaagatatacattttggggagagacatgctacctaatctgataagttctggggaagatatgatgttttacttttacatttttacaatttacatttgtattttatattttatactttttctctgaatagctatttgtgtaataactgtaaataataggctttaattttatgctttggattccttttctctctttagtttactcagtctttttttacatattttttaactaaccctaagctgtaggccagtgtgatatatttcattccactttaaaccggtt

SEQ ID NO: 91068 - DNA, 1767 bp, Homo sapiens
tgctgtcacccacctccttagcacctgcctcctactccacgtgcccacgcccatcctgctgccctgcttcctcttgtcctctccttggcaggcatgtgaaagaccgttttcacaaaggtgttaagaacttcccgggttcccccactgagggcacatgcatttgaggaagtgctggggaaagctcattggagtgggaagccagggctttgggtctggctctaccagctgtgtgaccccaacaaatccctctgagcctcactttccttatctgtattatgaggctgcttataggggcctgtgaattttattaggcgggtgcaaaagtaattgtggtttttgccatttaaagtaatgtaataccatgtcagggactcggggactctgtcactgaccagaaaaaggagaggaattctgaaatagcttcagcatgaggagcagggtaagagagcctggtgacagaccctggccagcaccccttccatcccagccagcaagggccgtggccacacttaccatgtgcagcatgtctgaggccgtcggggatacctgggcccggtagaggttgtgcagctccaccatcaaacgtttctcctcatctgtgagggctccaacggggcctgtggtggccaccagcagtagcagtagcggcagcagaagcatcaggaaactgcaggagccgtgcatggtggccagccgtctctccttctcccgtccaggggtctggcagctggatttaaagtccttcccacacaagcaccaccctggctggggtggggcagtgggggccgtgtttgaggcccagcccgactcacacaatgtctcagggagggctgggcgctttgggtcccgaccagcatcaagtgcactccccttggagtccttggcaaaaacctcctttctcttggtaacgggggctcaggccaaaagctgtgtgagttcctaagttgtggacagatccttcaggggcaaaatcacagtaacctctgcagagctgtgactggttgcacccaggtcacacccactgtgtgttgaagatagataagagaaaggaaaccacagaccctacccacagaggagtgggcaagatgaggaagctataggcttttgaaaggacagaggaagaccagatgtatttgataaaaggctgagccaacctaaatcagaatcctggttctgccccttgctatctgtgttttggcagctttctcaagtgaatcagtgacaataatagtacctatctcacaggactagagggaagattcaatgacatataatgtatgtaaagcacctagtatggtgtctggcacatagtaggccctcagtaacagtagacaacccactcatgtggcctgggccttagcaggctaccagccccctgtggaggcaacattcttgcctgcggggggagaggccaaggtcttccccactctagctgtattcaggaataaggcctttcactatggcaaaattttggcttccaggtatcctctctgaatgcatgtgcttgacatgctcatttggaagtggkatgctgggacccctgtgctctaactatgtagaaatataatgtgtctgtttcttaaatcaagagagagcagaaaagcagaaggttgaatgagctgatgcaccaggagctctgaggggaaggtattggaagggaaatagccttagcagtcaggtgctggcattataatgaccttgaccttgcaggggccatgaccggttcatgaagcaggaagctggaaccagtactcttgaggacagctg

SEQ ID NO: 91069 - DNA, 858 bp, Homo sapiens
ttctgcctcagcctcccgagtagctgggaccacmggcatcaccatgcccagataatgttttaccattattattattttgtagagatggggtcatgccatcttgcccaggctagtctcaaactcctgggctcaagcaatcctcccacctcggcctctcaaagtactgggattataagcctgaaccactgtgtctggcctatactgctatacttctacaaataaagtctaagtttttatatagcaatttttgccaagttattatatattacatggttgtttttattgaactattcagcttaaagtcactaaatccctagatattttatcttataacatttaaaaatatgtaagtacttgtggtggagacatctgtgacctatatctgtgtgtacatgtgctattgaattgattttgtaaaatactaaatggtttagtaaaggaccttgaaatgcacgtgggccctacattgtatgccaaattttacaattatatttttttctctaattagtctaacctcatccatctgagttttggctcacttttggcaggataaataaaggccttgctacaaagaaagaataagttaaatgaagtctttgattattgtccatatccataaaatacacagatgtggccataatgtatactagaaattccacaggttttataaatcaagacgtttggaacagctcagtaacctttttggaggggaatatcaatcatcatgatattggttaaacaatagttctcgaatctacactgaccagcttttatcaagtacgttcagatccacttatgtactgatgtcatttggaaaagctattaacacatgggtatatattttcagtgttagaagga

SEQ ID NO: 91070 - DNA, 703 bp, Homo sapiens
ctgacatctaagcataaagtaaaaaaataagcgtaaagtatggcacataggataattggtaaatagatcagtgtgctgtgcagtagactttgaaaggaggtggttggtcacttaactgaaatactaggaaatattaatccgttcatctctgttagtcctacctctgtaagttctaggactgtgggcttccacatcggaaagggttacacatttgtcctgttacctgtcactcacgttctggctctctactctcctttgtctctccttgatccccagtctctcattctgtcttccttttttcctcctacacttttctcctacaacacactctgatttgcagcagttcactttacaagggcctgacatgtgaccgcgacttattgcttagtaaccttagacctggaggtaataggcaaatatgttctatttcttttcttctctaaacatcctatgcaggtagaatacattsatgcatatgcagaaactataacattaaaaccttcgccaaatttgatctcaaataattgcttgcaaagatttgcctagactaagaaaattatcaaggaaataatatctattcagctgagtttgacgttcttatttctatcccggctgtgtgatttggatagcaaaagtgcaatggctaggaacctgtctttaattatttctcactccacctactccatttgtatattgtatctgt

SEQ ID NO: 91071 - DNA, 1997 bp, Homo sapiens
  misc_feature (1)...(1997): n = A,T,C or G
gcatactgcttttatattcaaaaatctagtgttggggtggatgtctcaggactgtgattgttcaatacaagggaggagaaagtccccaggaagatagcttacctcgaacgagtacgctttcccaattccatcgcctgctccagtgatcactgtgaaaagcaagaatgcttttaaaagacagaattcatctttaaacttctctttctcactggccacgttttctcacaagcctagtctccagggcagtcagtactccaaaggttcatccctttgctctccagcccacgcccttgaagcccctcactaaacattcaggtgaaaggattgtttggttggtgggtggattnnnnnnnnnnnnnnnnnnnnnnnnnnnnnnnnnnnnnnnnnnnnnnnnnnnnnnnnnnnnnnnnnnnnnnnnnnnnnnnnnnnnnnnnnnnnnnnnnnnntctgtcatgtaagtacatttcaaggttcttttaaaagggagctgtgctacttctcaccccaacgcacatcagcaattaaaggcctatggaaggtagggatttagcaaagaggtaaataccaaaatgcaaaagaaaatgcagtgaaatgaagaaacctgaagaatttgtactcaatagagctatctgttaatatacaccagtcaaataggtctgctagtcctttcatatcaacattacagacatatttaatgattgagctgtagtatacgcttcattcgtgagaacgtcacaatttcaaaattcactacaattcggtatatcgtaaaacttacaatttacccttgcaacaacaattaaagggcatgctttcaaaaagtgtgaacaaaaggtacatttagctcacctgagagtgagtgcaggccaagctgtacaagcctcacggaccacactggctttaataattactaatgatgtgtctgttcgtttaggaacttctaagaggctccatgcacaccgtctgcagctctgggtggaggaactatgctcagggcatcttgggccttaccttcccctccctgtggggaatcttcaattcacccaatacagggcctacactacaggcaagatgataccatcaataataacgacggataacggtcacacactcacttcttgccatgtactgcttctagtgttttagatgcatcatctcatttaatgttcaaaacaaacctaaaatgcagggaccatcattatccttagtttataaatgaggaagccaaggggaaaaagttcgtaacttgattaaggtcacactgctaaaaatgatgacacaaggatttgaacccaggctgtctgactttggggccctgagtctatgaatatacactaagaaaagaattaggaaatccagcacagagctcagggtactctatctgaggaattaaaaatttagcctctagttcttgcgtttcttttttgtcccctacttgaaatatattatctccctgatatctgcctctgcccaaacatattttactcctgctagaggtaactctatccatcttgactcataaaaacaggttaagatcatgtttttcctttgagtcaccaaatgctcttagtctctgtccccatttgaacttcttttagaatgtaggtttttagaagggctttccctacacaaacgacagcagctgtgcagagtgctacgtccacccacacgtgggcatctgaatctgtgtggagtggggtatttaaatccagaacactcaggtcaagctgctgagcaagttcaagcaagttcactcctgacagcataataccccaagaggacacacacacacacacacacacacacacacacacacacacacacgcacacagcaaatataagacgcagaagktcaaaatccatttgtcatcccaaacaatttctcacacggtatttttttaatttccattgctaagtttttaaggttgccaggtttagcaaataaggatacagaatgcccacttaaatttgaaattaaggtaaattatgaattgttt

SEQ ID NO: 91072 - DNA, 1997 bp, Homo sapiens
  misc_feature (1)...(1997): n = A,T,C or G
gcatactgcttttatattcaaaaatctagtgttggggtggatgtctcaggactgtgattgttcaatacaagggaggagaaagtccccaggaagatagcttacctcgaacgagtacgctttcccaattccatcgcctgctccagtgatcactgtgaaaagcaagaatgcttttaaaagacagaattcatctttaaacttctctttctcactggccacgttttctcacaagcctagtctccagggcagtcagtactccaaaggttcatccctttgctctccagcccacgcccttgaagcccctcactaaacattcaggtgaaaggattgtttggttggtgggtggattnnnnnnnnnnnnnnnnnnnnnnnnnnnnnnnnnnnnnnnnnnnnnnnnnnnnnnnnnnnnnnnnnnnnnnnnnnnnnnnnnnnnnnnnnnnnnnnnnnnntctgtcatgtaagtacatttcaaggttcttttaaaagggagctgtgctacttctcaccccaacgcacatcagcaattaaaggcctatggaaggtagggatttagcaaagaggtaaataccaaaatgcaaaagaaaatgcagtgaaatgaagaaacctgaagaatttgtactcaatagagctatctgttaatatacaccagtcaaataggtctgctagtcctttcatatcaacattacagacatatttaatgattgagctgtagtatacgcttcattcgtgagaacgtcacaatttcaaaattcactacaattcggtatatcgtaaaacttacaatttacccttgcaacaacaattaaagggcatgctttcaaaaagtgtgaacaaaaggtacatttagctcacctgagagtgagtgcaggccaagctgtacaagcctcacggaccacactggctttaataattactaatgatgtgtctgttcgtttaggaacttctaagaggctccatgcacaccgtctgcagctctgggtggaggaactatgctcagggcatcttgggccttaccttcccctccctgtggggaatcttcaattcacccaatacagggcctacactacaggcaagatgataccatcaataataacgacggataacggtcacacactcacttcttgccatgtactgcttctagtgttttagatgcatcatctcatttaatgttcaaaacaaacctaaaatgcagggaccatcattatccttagtttataaatgaggaagccaaggggaaaaagttcgtaacttgattaaggtcacactgctaaaaatgatgacacaaggatttgaacccaggctgtctgactttggggccctgagtctatgaatatacactaagaaaagaattaggaaatccagcacagagctcagggtactctatctgaggaattaaaaatttagcctctagttcttgcgtttcttttttgtcccctacttgaaatatattatctccctgatatctgcctctgcccaaacatattttactcctgctagaggtaactctatccatcttgactcataaaaacaggttaagatcatgtttttcctttgagtcaccaaatgctcttagtctctgtccccatttgaacttcttttagaatgtaggtttttagaagggctttccctacacaaacgacagcagctgtgcagagtgctacgtccacccacacgtgggcatctgaatctgtgtggagtggggtatttaaatccagaacactcaggtcaagctgctgagcaagttcaagcaagttcactcctgacagcataataccccaagaggacacacacacacacacacacacacacacacacacacacacacacgcacacagcaaatataagacgcagaaggtmaaaatccatttgtcatcccaaacaatttctcacacggtatttttttaatttccattgctaagtttttaaggttgccaggtttagcaaataaggatacagaatgcccacttaaatttgaaattaaggtaaattatgaattgttt

SEQ ID NO: 91073 - DNA, 1161 bp, Homo sapiens
cccaaaagcccctgagccccttgtcagcacaagggtccctgcacctctcccagcacagaaccctagtgtcatcattactcccacacaggtaacacattaagagtcaaattctggggccccaacttactgccattgtcccactgtggcataaagataccattacacaatgataacaacacccattgaaaatgacacagttgtaccgttgacaatgacacacagggatgttgacagtcaccacgatgacaataatgcagtgagtgacagtcacatacattgacaycaacaaacggggcaatgataccagttgacactgacacagtcacagtgatggtaacctcagaatcaaagatgcaatgagactcagtcacatcgagtcacactgacggtgacatcaacacagtgacacagcaatgttgatagactcagtaacagtctcacagaatgatactagtccacagcaatactggcagccctgaagtctgacagccgccgtcggtaacaaacagacacagcgacaggctccaggtcaggaacccctgttacccagtttaagaatctggcttaggacccaagacccaagaaccgtcttgccagtcccagcaatgttccgggttgccctgtacccctcccctcaccccatgcccagctgagggcagaacctgggggaaggaggtgtgagttttggaaagcctctatttatccctgcagaattacagcagtttagattgtagaaggccaaccctggggaagccctgccgccatcaggtcagggtgggggataatgagcaccactaactgcgtctcagctgtaattgtgtgtgcgggttgatctgtaatagtgtgttgcgcacttcagggtttgggttgctgtgggcacgccgaggctcaggtaggctcagtctggcctggacaatgaaggatcaggggggcctcaaggcaagtgacctcgaagcaaggttactactccaactccgaggcagggaactgaaatccaaagaaggtcaccggatggactccccccattgccaggcgtcagggtgggttcagaacatccatctgatgaagggcatccggcccagcacagagcggaggggactccccacagcttccagtccccgctctgactcccacagcccagactccagaatcccacagtga

SEQ ID NO: 91074 - DNA, 1161 bp, Homo sapiens
cccaaaagcccctgagccccttgtcagcacaagggtccctgcacctctcccagcacagaaccctagtgtcatcattactcccacacaggtaacacattaagagtcaaattctggggccccaacttactgccattgtcccactgtggcataaagataccattacacaatgataacaacacccattgaaaatgacacagttgtaccgttgacaatgacacacagggatgttgacagtcaccacgatgacaataatgcagtgagtgacagtcacatacattgacaccaacaaacgsggcaatgataccagttgacactgacacagtcacagtgatggtaacctcagaatcaaagatgcaatgagactcagtcacatcgagtcacactgacggtgacatcaacacagtgacacagcaatgttgatagactcagtaacagtctcacagaatgatactagtccacagcaatactggcagccctgaagtctgacagccgccgtcggtaacaaacagacacagcgacaggctccaggtcaggaacccctgttacccagtttaagaatctggcttaggacccaagacccaagaaccgtcttgccagtcccagcaatgttccgggttgccctgtacccctcccctcaccccatgcccagctgagggcagaacctgggggaaggaggtgtgagttttggaaagcctctatttatccctgcagaattacagcagtttagattgtagaaggccaaccctggggaagccctgccgccatcaggtcagggtgggggataatgagcaccactaactgcgtctcagctgtaattgtgtgtgcgggttgatctgtaatagtgtgttgcgcacttcagggtttgggttgctgtgggcacgccgaggctcaggtaggctcagtctggcctggacaatgaaggatcaggggggcctcaaggcaagtgacctcgaagcaaggttactactccaactccgaggcagggaactgaaatccaaagaaggtcaccggatggactccccccattgccaggcgtcagggtgggttcagaacatccatctgatgaagggcatccggcccagcacagagcggaggggactccccacagcttccagtccccgctctgactcccacagcccagactccagaatcccacagtga

SEQ ID NO: 91075 - DNA, 1319 bp, Homo sapiens
gttcatctcagtggcacccgctgcctcattaagccgcctcgtaaacaggggcagccggcaggggcggaggagggggccgctctgggccacgtctggcttcagggcttttttggtccctgttccaaccttcccccgagaaaactggggtctgggctatctgacctgacaggctgtgagtgcatgcacacgtgtgtgtatgtgtctgggcatgtgcggtgggtccaagcggggcaggaagcccctccagttcctgctcagcctgtggccctgatacggtggtaaaggtcagggtcatggtgagacaccttttgggcccagaccctgggctcagtaaatcctaatctcagccctggaagatcggagggtcccaaagaccctcttctcctggagccagggtcccagttccacctctggcaccccagtccctttctgctcggcaaagataccctctggctgagtagccacggctccttcggctctgtctccctcctgccaggattagaccgcagatctccacgtcagtctctccccacagggagggagccacggggaacagatcaaattgccrcctcattgtgggcttatggtgggcaccatacctccaggaatgtggcccccaggaggtcagtgctctcctcggggccacatatcctagaccaggatccttcttgctaggttatcagtgatcccttcatcctgcctctcaagagaaaggcttctcaattggcaggaactccctagtcactgacattggcctcccctgggagtcctccgtggtctgctggagcagatgccagacacgccctccaggccatcgcaggagctgcagggaacccatgctgggtcccagtacttgcctccctcttgtccatgctgagacagcccctgcccagggcccattcttttgcaattcctgatctgtattttcctcctgaaaatccaaatgatgtttttctttgttctgcccttctcgccccctcccagtcatacacctgcctctccccaaggtcaaggactggggagaatagactctgttcacagcaaaacttcagctgaaaagaaccataaatctaaccaaccccagtgccagtgagtcacagaatggggctaggatgcactacaggccacgcatgttctcgccacggagcctgcacactttgcttctcccacctcagtgtgggggtcagttttgcgcatggtctcggcatgttagttgcacacacgtatggtgtacggttcccgctgggagccgcgtgcgtgtgcatgttcccgtgtgtgtggtgggcggtgtgccaggtccactgcaaggcgtgtgcgcc

SEQ ID NO: 91076 - DNA, 1264 bp, Homo sapiens
gtgtttgttcccttgaaatggggacatcagaacacaatatgcctggaggagttatgtgcctcccatatccaagcaggcaccaagttctgcccattttgccttctaggtctccatccccaaagcctctgttggtttgtgccactcattatcgctcagcagtttccatactcatcgctgtgcttcactccccttggagctctcccccaaaccaagccactggctattccctttgtttagaatgctcttccccccatacttgcatggttatctccctccctcctttaagtctttgctaaaatgtcaccttcatgaggcctactctggccacttcatttaaaattgcagtccagcactttcgatcttccttaccctgcctttcccccactccagtttttcttaacctctatgatatttacgtctttaaaataatacttttgtttattgtctcctcctgatgagaatgtaagctccaaaagggaaagaatctttgtttcattcccttatgtaacctaaggatcttgaacatcacttggcacatagtaggtactcaataaatatttagtgagtaaatgaatgaatattgagccacccscccccaatatggggccatactcagatctgaccttgtcattcttctattcccttagcctccatgccaagattagaggacaggatccaagttcattcactacattcactagatgtttggtttttgtttcttttcctttttctttctttctttctttttttttttttgagatggagttttgcgcttgtcacccaggctggagtgcgatggtgcaatctcagctcactgcaacctctgccttccaggttcaagcgattctcctgcctcagcctctgagtagctgggattacaggcatgtgccaccacacccggctaattttgtatttttagtagagacaggggtttctccatgttggtcaggctggtctcaaactcctgacgtcaggtgatctgcccgcctcagcctcccaaagtgctaggattacaggcctgagccaccgtgcccagcccactgggtggttttaaaggaccccttgcttggcccctgcccatggcttagtccgtctttggccttgtcctgttggaccctaggctctgaccacagtcacacttcccaagtgccataagattttctgcctctgagtctttgttcttgtcattctgtctgcttggaactcatcaagaatgtttaaaggacacaggtgctggcctctgagcactcccttgggacctact

SEQ ID NO: 91077 - DNA, 1662 bp, Homo sapiens
ggacatctttgcaggggggccttattctgcctaccacacaccccctccaagtgcctcttgcatgacttaataagggagtcattaaacagctgctgtcttggagccagtcctgggctagactcatttaggacagcacagtaagagaggaagcctgctgtcagtggctggcctggtatccttgtctctgtagcgtggcatctacttcctcctgtccactgacctggcctgatgcccctacatgccctctgctttagcagagtgcccccaggtaggggctgcactagccttccacctctccagcttcggctcccctgagcttggtgaggaggctgggaggaccgagctggtggcggaagggctgggactatgttcatgactacatatcaggatgggcgccaagtacacagaaaatgaaagaaagagtgggaggcactcccttgacatggggctggtggggagaagggcctctgctgagtggtccattgttgattgccaaaagctgtgcccaggtcaagtgggcctgtggaagcctgactggctggcctgggacttctgggtttggggagcatgcctagatctagggctcaggctgaacctgggactgtggggatatgctcataggtggctagtttgggactcactgtagacaattcgatgttagttcaagcttagcccatatttagctggggggaggggtacatgggcattatccaggcatctatggaaagctgcctgcccttggctgggcatccaaaccccctctgagggttctgctccttcccaagctcacacaccttcttcacttagcagctctttgagccagcatccccctttcctgcaccttggggagaattaggagaataaacctggtcaccttgattggttgttggatctttccatgatctctgagaagggaaaggtcacatctcataattccacttcacagatggaaaagatgaatcccagagaggaatcccacactctgacagatgcagagcagggcagggcttgcccacctagtggggtaggggtgagggggcttctccaggcagggcagttggatcctccaacctcagcygcccatcttccctgggtagatgacttcatgaagcagagccggggcatgctgctgctctacagcctgaagaaccccagcttccctgagtacatgttcagcagcaacagcggcgtcatgtgtctcgacatccacgtggaccacccctacctggtggcagtaggccactatgacggcaacgtggccatttacaacctcaagaagccccactcccagccctccttctgcagctcagccaagtctggcaagcactcagaccctgtgtggcaggtcagcaaccaggctgggaggggtggggatgggagcagcatgtgggcctggagccactggaggagggagggagcttggggaggagaggaccacaggcaaggagatgaggatggcaggtaccatcaggtcaggatctgggtgtcagaaaagggcagaaggtgaaaatcaggaggcaagagggtctccagtgagagctggggtctgctgctccagagcttccctcaggagggcccccacctgtttgctaaagatctcttagatgtggcgatcagtaactcagaagacatagctggaaggctccagggcctgacaggctc

SEQ ID NO: 91078 - DNA, 1662 bp, Homo sapiens
ggacatctttgcaggggggccttattctgcctaccacacaccccctccaagtgcctcttgcatgacttaataagggagtcattaaacagctgctgtcttggagccagtcctgggctagactcatttaggacagcacagtaagagaggaagcctgctgtcagtggctggcctggtatccttgtctctgtagcgtggcatctacttcctcctgtccactgacctggcctgatgcccctacatgccctctgctttagcagagtgcccccaggtaggggctgcactagccttccacctctccagcttcggctcccctgagcttggtgaggaggctgggaggaccgagctggtggcggaagggctgggactatgttcatgactacatatcaggatgggcgccaagtacacagaaaatgaaagaaagagtgggaggcactcccttgacatggggctggtggggagaagggcctctgctgagtggtccattgttgattgccaaaagctgtgcccaggtcaagtgggcctgtggaagcctgactggctggcctgggacttctgggtttggggagcatgcctagatctagggctcaggctgaacctgggactgtggggatatgctcataggtggctagtttgggactcactgtagacaattcgatgttagttcaagcttagcccatatttagctggggggaggggtacatgggcattatccaggcatctatggaaagctgcctgcccttggctgggcatccaaaccccctctgagggttctgctccttcccaagctcacacaccttcttcacttagcagctctttgagccagcatccccctttcctgcaccttggggagaattaggagaataaacctggtcaccttgattggttgttggatctttccatgatctctgagaagggaaaggtcacatctcataattccacttcacagatggaaaagatgaatcccagagaggaatcccacactctgacagatgcagagcagggcagggcttgcccacctagtggggtaggggtgagggggcttctccaggcagggcagttggatcctccaacctcagccgcccatcttccctgggtagatgacttcatgaagcagagccggggcatgctgctgctctacagcctgaagaaccccagcttccctgagtacatgttcagcagcaacagcggcgtcatgtgtctcgacatccacgtggaccacccctacctggtggcagtaggccactatgacggcaacgtggccatttacaacctcaagaagccccactcccagccctccttctgcagctcagccaagtctggcaagcactcagaccctgtgtggcaggtcagcaaccaggctgggaggggtggggatgggagcagcatgtgggcctggagccactggaggagggagggagcttggggaggagaggaccacaggcaaggagatgaggatggcaggtaccatcaggtcaggatctgggtgtcagaaaagggcagaaggtgaaaatcaggaggcaagagggtctccagtgagagctggggtctgctgcyccagagcttccctcaggagggcccccacctgtttgctaaagatctcttagatgtggcgatcagtaactcagaagacatagctggaaggctccagggcctgacaggctc

SEQ ID NO: 91079 - DNA, 1993 bp, Homo sapiens
ccatgaatgacgtgttaagatttaaaccccaaaataatgatgacggagtagtgctgatgccctaagttttggtcacactgtctcctaggtgagagcatgacaaaaagggagaaattgttaaattaaatttataggaggtcattggtttgaactgagctcctgcaatatgcccaatagaccaaaccaaaatggtgtcactcacgctcaagttccataccactaagccaaaataagatttttatctgaccttcmgagaaatcaggagagagagagaatagccaaatccccaaacaggccagttgtagctggcatgataagaaagtcccctctgctttaacctttataagaaaagtaactctgaaacaaccaatctgctttttattttctgtttctgctttcctcagtccttttctttctataaaaccaacctcctctgcttggcccatcagaacactcaattctattcaagtgtttctcaattctggaatcacaagtaaaagccaattcaggtctttacattgttgtaatgttgtcttttgacaatacctttccaaaccccagatcccatccattcccaagtcctcttggagtttccattatatccagggaatctgtcccactgccaccacccttatctgcctgcaaatacaaggcagcttaagaattccattcttgccattccaaggctttctcccactgcagccagggcaatctcatcaatttttcaaagcacaaatctcgtatcctctcaatcagtttctctctctctctctctctccaaacacttaatggctatttagcttgagactgagtttaagtgttcttaaactcaaggctgtgacaggccctacaaaatccatctcaccccctctcccacctctgcctcaggtctctgcccactgttttctcacctagacagtatcctctccctccccaagggcccacctcacatttcacctactttactctgacttacccttcagatcctagctctgatctttcatagtatttactagtctgtaattacagggcaagggctgggggcagaggaattctgcctttttcagtcagggttccagcagagaatgaggcctaataccctagggcatgcattagatgtactgaatgaacttctctcccaagcatccagaaagcatcagctgtgtcacactcctggaagagctgaagagctgaacaaatagtcacagagttctgtgttgtatggttcagatggggaacccaggtttgaaaagctttgtgccaaatactacttgacacagagtaggtgctcaaaggtttgttaaaatgaaacagaaatgtaatcttgcaatgaacccaaggatggcacgctctcgctcactctgctgcagtcacactagattcgtgctgttccttcaatacctaccaggtccccctgcctggcatgcctgtgccccaggtttatctgcttggccaactgcttcaccttctcaagactggacgcagatatcacctttcaatgaggccaccccggacactctctttagctctgcaacctgaccccatgatccctggaattcctgatgcccccttatcctccttcctacagcactcatcaccttcacactttcttttttttttttttttatactttaagttttagggtacatgtgcacaacgtgcaggttagttacatttgtatacatgtgccatgttggtgtgctgcacccattaactcgtcatttaacattaggtatatctcctaatgctatcccttccccctccccccacccacaacaggcccccgtgtgtgatgttccccttcctgtgtccatgtgttctcattgttcacgcactttctttacatgcaactcactaacggataatgttgactgtctattgtgtattttcacctactagcaatataggtttcatgaggatatctgtaacccaagtggctaaaacaatgcctggcatgcagcacatgtctaatcaatgttcattagataaatgc

SEQ ID NO: 91080 - DNA, 943 bp, Homo sapiens
aaaaagtatttgacaaaatctaacatcattttcctttttttttttttttttttttttaaagagatgggatctcattatgttggccagcctggtcttgaactcctgggcttaagcgatcctctyacctcagcctcccaaggtcctaggattacaggagtgatctgccacctagcatccatttcagcctaacatccattcctgatttaaaaaaacaaacaaacaaacaaacaaaaacctcaggaaattaggaataagtgagaatatccttgtatgagtctgttaccatgctgctgtgaagaaatacctgagagactgggtaatttataaagaaaagaggttaaattgactcacagttttgcatggctggggaggcctcaggaaacttacaatcatggctaaaggcacctcttcacaaggtggcaggacagagaatgagcgccagcaggggaaatgccaggcgctaataaaaccatcagatctcatgagaacccactcactgtcaggagaacagcatgggggaaactgcccccatgattcaattacctcccactgggtccctcccatgacacataggagttatggagattacaattcaagatgagatttgggtagggacacagccaaatcatatcagttctcaaccagaagaaaagggcgtctattaaaaaaccttcagcaagttaaaactgaaatcagtaacatttacagacttctcagacagaaggctttagaagagggtgaacttgttttaaactaaatttctttttgtttgtgtgatctatggattttgtttattcagtttcctgcccctgcaagcacagaaagctgaaaactaatttgattcacttttcccagatgcaatctcatgtgtattttatgttagtttttaaagttttagaattttaaccaaattcggcacaaagtgactatgttatatgctccc

SEQ ID NO: 91081 - DNA, 943 bp, Homo sapiens
aaaaagtatttgacaaaatctaacatcattttcctttttttttttttttttttttttaaagagatgggatctcattatgttggccagcctggtcttgaactcctgggcttaagcgatcctcttacctcagcctcccaaggtcctaggattacaggmgtgatctgccacctagcatccatttcagcctaacatccattcctgatttaaaaaaacaaacaaacaaacaaacaaaaacctcaggaaattaggaataagtgagaatatccttgtatgagtctgttaccatgctgctgtgaagaaatacctgagagactgggtaatttataaagaaaagaggttaaattgactcacagttttgcatggctggggaggcctcaggaaacttacaatcatggctaaaggcacctcttcacaaggtggcaggacagagaatgagcgccagcaggggaaatgccaggcgctaataaaaccatcagatctcatgagaacccactcactgtcaggagaacagcatgggggaaactgcccccatgattcaattacctcccactgggtccctcccatgacacataggagttatggagattacaattcaagatgagatttgggtagggacacagccaaatcatatcagttctcaaccagaagaaaagggcgtctattaaaaaaccttcagcaagttaaaactgaaatcagtaacatttacagacttctcagacagaaggctttagaagagggtgaacttgttttaaactaaatttctttttgtttgtgtgatctatggattttgtttattcagtttcctgcccctgcaagcacagaaagctgaaaactaatttgattcacttttcccagatgcaatctcatgtgtattttatgttagtttttaaagttttagaattttaaccaaattcggcacaaagtgactatgttatatgctccc

SEQ ID NO: 91082 - DNA, 943 bp, Homo sapiens
aaaaagtatttgacaaaatctaacatcattttcctttttttttttttttttttttttaaagagatgggatctcattatgttggccagcctggtcttgaactcctgggcttaagcgatcctcttacctcagcctcccaaggtcctaggattacaggagtgatctgccacctagcatccatttcagcctaacatccattcctgatttaaaaaaacaaacaaacaaacaaamaaaaacctcaggaaattaggaataagtgagaatatccttgtatgagtctgttaccatgctgctgtgaagaaatacctgagagactgggtaatttataaagaaaagaggttaaattgactcacagttttgcatggctggggaggcctcaggaaacttacaatcatggctaaaggcacctcttcacaaggtggcaggacagagaatgagcgccagcaggggaaatgccaggcgctaataaaaccatcagatctcatgagaacccactcactgtcaggagaacagcatgggggaaactgcccccatgattcaattacctcccactgggtccctcccatgacacataggagttatggagattacaattcaagatgagatttgggtagggacacagccaaatcatatcagttctcaaccagaagaaaagggcgtctattaaaaaaccttcagcaagttaaaactgaaatcagtaacatttacagacttctcagacagaaggctttagaagagggtgaacttgttttaaactaaatttctttttgtttgtgtgatctatggattttgtttattcagtttcctgcccctgcaagcacagaaagctgaaaactaatttgattcacttttcccagatgcaatctcatgtgtattttatgttagtttttaaagttttagaattttaaccaaattcggcacaaagtgactatgttatatgctccc

SEQ ID NO: 91083 - DNA, 943 bp, Homo sapiens
aaaaagtatttgacaaaatctaacatcattttcctttttttttttttttttttttttaaagagatgggatctcattatgttggccagcctggtcttgaactcctgggcttaagcgatcctcttacctcagcctcccaaggtcctaggattacaggagtgatctgccacctagcatccatttcagcctaacatccattcctgatttaaaaaaacaaacaaacaaacaaacaaaamcctcaggaaattaggaataagtgagaatatccttgtatgagtctgttaccatgctgctgtgaagaaatacctgagagactgggtaatttataaagaaaagaggttaaattgactcacagttttgcatggctggggaggcctcaggaaacttacaatcatggctaaaggcacctcttcacaaggtggcaggacagagaatgagcgccagcaggggaaatgccaggcgctaataaaaccatcagatctcatgagaacccactcactgtcaggagaacagcatgggggaaactgcccccatgattcaattacctcccactgggtccctcccatgacacataggagttatggagattacaattcaagatgagatttgggtagggacacagccaaatcatatcagttctcaaccagaagaaaagggcgtctattaaaaaaccttcagcaagttaaaactgaaatcagtaacatttacagacttctcagacagaaggctttagaagagggtgaacttgttttaaactaaatttctttttgtttgtgtgatctatggattttgtttattcagtttcctgcccctgcaagcacagaaagctgaaaactaatttgattcacttttcccagatgcaatctcatgtgtattttatgttagtttttaaagttttagaattttaaccaaattcggcacaaagtgactatgttatatgctccc

SEQ ID NO: 91084 - DNA, 943 bp, Homo sapiens
aaaaagtatttgacaaaatctaacatcattttcctttttttttttttttttttttttaaagagatgggatctcattatgttggccagcctggtcttgaactcctgggcttaagcgatcctcttacctcagcctcccaaggtcctaggattacaggagtgatctgccacctagcatccatttcagcctaacatccattcctgatttaaaaaaacaaacaaacaaacaaacaaaaacctcaggaaattaggaataagtgagaatatccttgtatgagtctgttaccatgctgctgtgaagaaatacctgagagactgggtaatttataaagaaaagaggttaaattgactcacagttttgcatggctggggaggcctcaggaaacttacaatcatggctaaaggcacctcttcacaaggtggcaggacagagaatgagygccagcaggggaaatgccaggcgctaataaaaccatcagatctcatgagaacccactcactgtcaggagaacagcatgggggaaactgcccccatgattcaattacctcccactgggtccctcccatgacacataggagttatggagattacaattcaagatgagatttgggtagggacacagccaaatcatatcagttctcaaccagaagaaaagggcgtctattaaaaaaccttcagcaagttaaaactgaaatcagtaacatttacagacttctcagacagaaggctttagaagagggtgaacttgttttaaactaaatttctttttgtttgtgtgatctatggattttgtttattcagtttcctgcccctgcaagcacagaaagctgaaaactaatttgattcacttttcccagatgcaatctcatgtgtattttatgttagtttttaaagttttagaattttaaccaaattcggcacaaagtgactatgttatatgctccc

SEQ ID NO: 91085 - DNA, 943 bp, Homo sapiens
aaaaagtatttgacaaaatctaacatcattttcctttttttttttttttttttttttaaagagatgggatctcattatgttggccagcctggtcttgaactcctgggcttaagcgatcctcttacctcagcctcccaaggtcctaggattacaggagtgatctgccacctagcatccatttcagcctaacatccattcctgatttaaaaaaacaaacaaacaaacaaacaaaaacctcaggaaattaggaataagtgagaatatccttgtatgagtctgttaccatgctgctgtgaagaaatacctgagagactgggtaatttataaagaaaagaggttaaattgactcacagttttgcatggctggggaggcctcaggaaacttacaatcatggctaaaggcacctcttcacaaggtggcaggacagagaatgagcgccagcaggggaaatgccaggcgctaataaaaccatcagatctcatgagaacccactcactgtcaggagaacagcatgggggaaactgcccccatgattcaattacctcccactgggtccctcccatgacacataggagttatggagattacaattcaagatgagatttgggtagggacacagccaaatcatatcagttctcaaccagaagaaaagggcrtctattaaaaaaccttcagcaagttaaaactgaaatcagtaacatttacagacttctcagacagaaggctttagaagagggtgaacttgttttaaactaaatttctttttgtttgtgtgatctatggattttgtttattcagtttcctgcccctgcaagcacagaaagctgaaaactaatttgattcacttttcccagatgcaatctcatgtgtattttatgttagtttttaaagttttagaattttaaccaaattcggcacaaagtgactatgttatatgctccc

SEQ ID NO: 91086 - DNA, 1091 bp, Homo sapiens
gcattcaaatatgcacacatattcaccccacagggttcttgagatactaatggagggtaaagtgtgaaaaacctggagcctttgacaagaactctggaaaaggcttaaaagaggttggatgttgtggctcatgcctgtaatcccagcacttggaaaaggctgaggcattraggatcacttgagctaaggagttcaggactcctccaggcaacatagtgggacttgtctctacaaaaaaatttttaaaaattaatgggccataatggcatgctcatttggtggcccagctacttaggaggctaaggcaggaagattgaacccaggagttcaaggttgctattattgtgccactgcactccagcctgggcaacagagtgagagcatgtctctaaaaaattaaagaaagaaatacaataaaataaaagatcaattttcaacaagaatcctccaattccatgaggcactgaatacctacagaatgaaagcacagctcagaggttgcaataaatctttccaaccttcttcttatcaagaatactatgggcttatgtagtcatggagttttccttagcttttgtaaataactgccaaaccagagtagatgtaagtttaataaaaatgaagacactagtttttggaaatctcagacttcagtcagttcatttatgaaatttaaaagtgatttttcagaagggagtatatattacacttatgatgaaaaggagtaaataaaaggggaaaggtcatctgtttattcatttgtgcaaatgtgatgtcatttatcaaaataaactttcagctgtaatactagattaaaataaaattaataatcatctatgaaacggtgtttcagcaggctgctggtagcagaaacacccacttctaattggtttcagcaagaagaaaatgcattccttcatgtatggagcagtccagtggtagggaaggctccagatgtcagctcagggccctggctgcagcctctttgggatcctgttgccttaggcccttagcaagcccgccacagggcttccagctccacagccatatgcagccagactagagacaaaaaggtctctctcttgcagtgt

SEQ ID NO: 91087 - DNA, 2496 bp, Homo sapiens
tacgtgaattctgaggtatttttgcctttggggggtttttcacacgtactttgtaaaacttggacctgaagatatagtgcaaactccagaatcaaaagatcaattacatcactttggaggatgagtggtggaaaccaacaactgaaagaaaaaaagaaagcagtgggccttgggacatgcacattgtcaaaaaaaaaaaaaaaaaaatgcaagggactcaactgaatcctttcgaaygacacaaaaaaagacaagtgaaaagctggagtagaggaggctgaagaactaaaccaagacagaaaaaaaaagaagagtcagcaggaggttctcttaggcacaacatctgctttctattgctttcatttcaattaaggaatcatgctctctagctttagggtatcagccacataagacccttctctctcatctgtccccattccaggtatctaccatatttctccatctctcttcctctatagccatcatgcctcttgagcttctcacccccttactgctatattgctcccattgccccttacctttccgtaatgattcagccattctctgatcttcctctgtaaatcagatagcacttatagcacttaatacagtgcctggcacagagtaaggtgtcaaaaagtttggctaccatttttcatccctctagcctgacttcaaaaacatttattttatcatatttcccacataattgtaactcctcatgagttcctatctccaaacataaattccttggctggatatctgaggctcacttttaactggcctcgacgtaaattttcaagatcacctctcagcattgttgtctctgaccccatcaggctgacaaatggcttttgtttaggtctcatgcatccctgctcctgcatctttagctaactagcacttatataacactggctaacatttatgcttcatctcttttgtttctcataccaatactatacaatttatattatgatttttcattttacagattaagaaactaaagcttagggaggttgagcaatttatttaaaatgacaactaggatatggcttagccagaacttgacccagatttatccaagtccaaaactctaaatggtcaccaggacttcattcttttctctaagcaccaccaactgaaaaatcctccctactcgcagtctcaccttttctcataagtgtctcttgacaagtcgcagagacctcagtctttctctaactcttaatcatttgaagccacaatcttctactgtcttggcatttttttcatgttggatggtttgttgtccctattgtcatcccctcgatcatttatttcacttgtctatgacaaagattggtgtgtctttattttaattatcagagtatctagtttagcactttgggtgtagaagtttacaagaggtaaaatgaatgaatgattagtattggaagcattgagctttcagctgtatctttatttttcctttgaacacttggaaaagatgtttctgccaaactcagtgactaaatatgaggagataaatgttaaggggctgaaccaaaccttcttaaatcttaaccttgggaattctggcaagaaacatctgccctggctaaatgtgctgcacatgaccagattctccaaattatagagcagtatgtgacaaaagaaactagagaaaaggtctatggggttctggcttcatgttcccaggactgttaacaaggaattcctgttggaagtaaaaaggacacatccggcaggcaaaagcatcaacagctttgcagatctcagctgagaactgagcagaggctccaggaataactgtggactatgagttaaaaagcaaaccgctcaagcatgggctttgtttcctacctgcatgaattgaacctctctaaagtcttacctctgtgtaaacactgtatctaagatatgctaaaaaaatatagcctgtaagataagagattgtatatggtgttggaaaccgctgcattgtcagcaccagaaagcaaattcaaacttgtggcatgaaattaatgcatttgttactcttcatttgtattaaagagaatttaatacaaatagcaaaattgaagagctaactttcacacctgccacccaagcagggctttctagtttttggttggttgaatttggtcccccagtattccagagcagactgggagtgactgattgcaagctgctgttaacaaggctcagtgctgttattgtcctcaagggacagaagggattctctctggacttccaactaccaggccaggagtgaccgttaaagaaagaagagatgaggccaagaggaagcattaaatcatgttgggtcacgcccctttaagagtgcaggtactgacttgagatgattaactgcactggctatcagtttaagtggattcaaccagacaggaaaagagaatttgaatgggaccacttaaatggtcaagaattcaagagctgctatatgaattttaaacagaacttgaatgcttc

SEQ ID NO: 91088 - DNA, 2496 bp, Homo sapiens
tacgtgaattctgaggtatttttgcctttggggggtttttcacacgtactttgtaaaacttggacctgaagatatagtgcaaactccagaatcaaaagatcaattacatcactttggaggatgagtggtggaaaccaacaactgaaagaaaaaaagaaagcagtgggccttgggacatgcacattgtcaaaaaaaaaaaaaaaaaaatgcaagggactcaactgaatcctttcgaatgacacaaaaaaagacaagtgaaaagctggagtagaggaggctgaagaactaaaccaagacagaaaaaaaaagaagagtcagcaggaggttctcttaggcacaacatctgctttctattgctttcatttcaattaaggaatcatgctctctagctttagggtatcagccacataagacccttctctctcatctgtccccattccaggtatctaccrtatttctccatctctcttcctctatagccatcatgcctcttgagcttctcacccccttactgctatattgctcccattgccccttacctttccgtaatgattcagccattctctgatcttcctctgtaaatcagatagcacttatagcacttaatacagtgcctggcacagagtaaggtgtcaaaaagtttggctaccatttttcatccctctagcctgacttcaaaaacatttattttatcatatttcccacataattgtaactcctcatgagttcctatctccaaacataaattccttggctggatatctgaggctcacttttaactggcctcgacgtaaattttcaagatcacctctcagcattgttgtctctgaccccatcaggctgacaaatggcttttgtttaggtctcatgcatccctgctcctgcatctttagctaactagcacttatataacactggctaacatttatgcttcatctcttttgtttctcataccaatactatacaatttatattatgatttttcattttacagattaagaaactaaagcttagggaggttgagcaatttatttaaaatgacaactaggatatggcttagccagaacttgacccagatttatccaagtccaaaactctaaatggtcaccaggacttcattcttttctctaagcaccaccaactgaaaaatcctccctactcgcagtctcaccttttctcataagtgtctcttgacaagtcgcagagacctcagtctttctctaactcttaatcatttgaagccacaatcttctactgtcttggcatttttttcatgttggatggtttgttgtccctattgtcatcccctcgatcatttatttcacttgtctatgacaaagattggtgtgtctttattttaattatcagagtatctagtttagcactttgggtgtagaagtttacaagaggtaaaatgaatgaatgattagtattggaagcattgagctttcagctgtatctttatttttcctttgaacacttggaaaagatgtttctgccaaactcagtgactaaatatgaggagataaatgttaaggggctgaaccaaaccttcttaaatcttaaccttgggaattctggcaagaaacatctgccctggctaaatgtgctgcacatgaccagattctccaaattatagagcagtatgtgacaaaagaaactagagaaaaggtctatggggttctggcttcatgttcccaggactgttaacaaggaattcctgttggaagtaaaaaggacacatccggcaggcaaaagcatcaacagctttgcagatctcagctgagaactgagcagaggctccaggaataactgtggactatgagttaaaaagcaaaccgctcaagcatgggctttgtttcctacctgcatgaattgaacctctctaaagtcttacctctgtgtaaacactgtatctaagatatgctaaaaaaatatagcctgtaagataagagattgtatatggtgttggaaaccgctgcattgtcagcaccagaaagcaaattcaaacttgtggcatgaaattaatgcatttgttactcttcatttgtattaaagagaatttaatacaaatagcaaaattgaagagctaactttcacacctgccacccaagcagggctttctagtttttggttggttgaatttggtcccccagtattccagagcagactgggagtgactgattgcaagctgctgttaacaaggctcagtgctgttattgtcctcaagggacagaagggattctctctggacttccaactaccaggccaggagtgaccgttaaagaaagaagagatgaggccaagaggaagcattaaatcatgttgggtcacgcccctttaagagtgcaggtactgacttgagatgattaactgcactggctatcagtttaagtggattcaaccagacaggaaaagagaatttgaatgggaccacttaaatggtcaagaattcaagagctgctatatgaattttaaacagaacttgaatgcttc

SEQ ID NO: 91089 - DNA, 2496 bp, Homo sapiens
tacgtgaattctgaggtatttttgcctttggggggtttttcacacgtactttgtaaaacttggacctgaagatatagtgcaaactccagaatcaaaagatcaattacatcactttggaggatgagtggtggaaaccaacaactgaaagaaaaaaagaaagcagtgggccttgggacatgcacattgtcaaaaaaaaaaaaaaaaaaatgcaagggactcaactgaatcctttcgaatgacacaaaaaaagacaagtgaaaagctggagtagaggaggctgaagaactaaaccaagacagaaaaaaaaagaagagtcagcaggaggttctcttaggcacaacatctgctttctattgctttcatttcaattaaggaatcatgctctctagctttagggtatcagccacataagacccttctctctcatctgtccccattccaggtatctaccatatttctccatctctcttcctctatagccatcatgcctcttgagcttctcacccccttactgctatattgctcccattgccccttacctttccgtaatgattcagccattctctgatcttcctctgtaaatcagatagcacttatagcacttaatacagtgcctggcacagagtaaggtgtcaaaaagtttggctaccatttttcatccctctagcctgacttcaaaaacatttattttatcatatttcccacataattgtaactcctcatgagttcctatctccaaacataaattccttggctggatatctgaggctcacttttaactggcctcgacgtaaattttcaagatcacctctcagcattgttgtctctgaccccatcaggctgacaaatggcttttgtttaggtctcatgcatccctgctcctgcatctttagctaactagcacttatataacactggctaacatttatgcttcatctcttttgtttctcataccaatactatacaatttatattatgatttttcattttacagattaagaaactaaagcttagggaggttgagcaatttatttaaaatgacaactaggatatggcttagccagaacttgacccagatttatccaagtccaaaactctaaatggtcaccaggacttcattcttttctctaagcaccaccaactgaaaaatcctccctactcgcagtctcaccttttctcataagtgtctcttgacaagtcgcagagacctcagtctttctctaactcttaatcatttgaagccacaatcttctactgtcttggcatttttttcatgttggatggtttgttgtccctattgtcatcccctcgatcatttatttcacttgtctatgacaaagattggtgtgtctttattttaattatcagagtatctagtttagcactttgggtgtagaagtttacaagaggtaaaatgaatgaatgattagtattggaagcattgagctttcagctgtatctttatttttcctttgaacacttggaaaagatgtttctgccaaactcagtgactaaatatgaggagataaatgttaaggggctgaaccaaaccttcttaaatcttaaccttgggaattctggcaagaaacatctgccctggctaaatgtgctgcacatgaccagattctccaaattatagagcagtatgtgacaaaagaaactagagaaaaggtctatggggttctggcttcatgttcccaggactgttaacaaggaattcctgttggaagtaaaaaggacacatccggcaggcaaaagcatcaacagctttgcagatctcagctgagaactgagcagaggctccaggaataactgtggactatgagttaaaaagcaaaccgctcaagcatgggctttgtttcctacctgcatgaattgaacctctctaaagtcttacctctgtgtaaacactgtatctaagatatgctaaaaaaatatagcctgtaagataagagattgtatatggtgttggaaaccgctgcattgtcagcaccagaaagcaaattcaaacttgtggcatgaaattaatgcatttgttactcttcatttgtattaaagagaatttaatacaaatagcaaaattgaagagctaactttcacacctgccacccaagcagggctttctagtttttggttggttgaatttggtcccccagtattccagagcagactgggagtgactgattgcaagctgctgttaacaaggctcagtgctgttattgtcctcaagggacagaagggattctctctggacttccaactaccaggccaggagtgaccgttaaagaaagaagagatgaggccaagaggaagcattaaatsatgttgggtcacgcccctttaagagtgcaggtactgacttgagatgattaactgcactggctatcagtttaagtggattcaaccagacaggaaaagagaatttgaatgggaccacttaaatggtcaagaattcaagagctgctatatgaattttaaacagaacttgaatgcttc

SEQ ID NO: 91090 - DNA, 569 bp, Homo sapiens
ggtttgaagaagcaaacattttaatggaagaaagctgaaacaactgcatggcttcagcatgccaaaatctgtcaatagtcctcctacaacttgtgatgtggtccttattacaagccagctcatcaggtgattcactttgaaaacctcattttagaggtgctttcctaggaccatttatggtgccaaccatcttaggttggtttccaggaaagactctacgggtaatctgtctataggagatttacttgggamtcctcttagaaacaatccctgtaaacagtgagggaatcaggactgaacagaaggagaagttgaaaagcaatgtagttgcaaatgtgacctgagccacaaccatgggaagccctggtgctgagatgggcctttccagctgtcctgaattgaaacaaggactcagacctttgtggccttgcctagaccagtcactggatgtgggctgcctctggactgggggtctaaccttaggtgaagtgactctctttggaagggcgactcttagaggaggactcagctgtaagctttcagcagccggcatttctgcttagctggga

SEQ ID NO: 91091 - DNA, 1503 bp, Homo sapiens
ctaactatccagcaactttggtttcctatcccagaaatgggccacttcattcattttgttcgctcatttatttattggtcactatgtccagcactttaataagcactggaacttcaatggtgagcaaaacagaaatggcctgtcacctaagggggttacaatctggtagaggaaagagagagtgaccaacaaatcacacaaatagatgtacaattacaactcacaaacgccagaaacaacactagccagagctgtcctcagtgagagaccaggctgcattaaagaattttgtgatcatacttttgggatggggatttggggtcctctcacagtagcagcaataaatacgtaaactctcaacccaggtgacaattatttgtcagatagattacttccatggaaacaaatgggactctaagaaacttctctgattcttagagaacgtggaagttacacaagggcctttaccgccccgccgccgccggctcagggcctgctgtaggtgcctccacagtgccttgtcttgtgtgtgcagagcatagtgcagagcatcatgccctgtgctgtccacagcccccgcgtcagctccgtggctcaggagcagttcagccacctcggcactgcctttctcacaggccaggatcaaagccgatctgtgggttgagacaaatctgagcacagactttccacatggaacccagaagtcctggttccagacattccactcacagggtaagctctcattcagtggggtcaggagaacaacagaccaacattagaccagactagacttctctttttttttttttgagacggagtttcactcttgttgcccaggctggagtgcaatggcatgatctcggctcactgcaacctctgcctcccaggttcatgcgattctcctgcctcaacctcccgagtagctgggattacaggcatgcaccaccacacccggctaattttgtatttttagtagagacagggtttctccatgttggtcaggctggtcttgaactcctgacctcaggtgatccaccctccacagcctcccaaagtgctgggattacaggtgtgagccactgcaccaggccaggactaggcttttcaaatgccattccttagagctgcaggaacagaaattagggggccaactggatgagctccatttttatctgctctgtatatcaaggttctacatacttttttttttgagacggagtctcgctcctctctcgcccaggctggagtgcagtggtgcaatctcggctcactgcaacctccacctcccrgattcatgccattctcctgcctcagcctcccgagtagctgggactacaggcacccaccaccatgcccgaccaattttttgtatttttagtagagatggggtttcaccattttagctaggatggtctcaatctcttgacctcgtgatccacccgccttggcctcccaaagtgctgggatcacagggattctacatacattttttattggaaaaaa

SEQ ID NO: 91092 - DNA, 1503 bp, Homo sapiens
ctaactatccagcaactttggtttcctatcccagaaatgggccacttcattcattttgttcgctcatttatttattggtcactatgtccagcactttaataagcactggaacttcaatggtgagcaaaacagaaatggcctgtcacctaagggggttacaatctggtagaggaaagagagagtgaccaacaaatcacacaaatagatgtacaattacaactcacaaacgccagaaacaacactagccagagctgtcctcagtgagagaccaggctgcattaaagaattttgtgatcatacttttgggatggggatttggggtcctctcacagtagcagcaataaatacgtaaactctcaacccaggtgacaattatttgtcagatagattacttccatggaaacaaatgggactctaagaaacttctctgattcttagagaacgtggaagttacacaagggcctttaccgccccgccgccgccggctcagggcctgctgtaggtgcctccacagtgccttgtcttgtgtgtgcagagcatagtgcagagcatcatgccctgtgctgtccacagcccccgcgtcagctccgtggctcaggagcagttcagccacctcggcactgcctttctcacaggccaggatcaaagccgatctgtgggttgagacaaatctgagcacagactttccacatggaacccagaagtcctggttccagacattccactcacagggtaagctctcattcagtggggtcaggagaacaacagaccaacattagaccagactagacttctctttttttttttttgagacggagtttcactcttgttgcccaggctggagtgcaatggcatgatctcggctcactgcaacctctgcctcccaggttcatgcgattctcctgcctcaacctcccgagtagctgggattacaggcatgcaccaccacacccggctaattttgtatttttagtagagacagggtttctccatgttggtcaggctggtcttgaactcctgacctcaggtgatccaccctccacagcctcccaaagtgctgggattacaggtgtgagccactgcaccaggccaggactaggcttttcaaatgccattccttagagctgcaggaacagaaattagggggccaactggatgagctccatttttatctgctctgtatatcaaggttctacatacttttttttttgagacggagtctcgctcctctctcgcccaggctggagtgcagtggtgcaatctcggctcactgcaacctccacctcccggattcatgccattctcctgcctcagcctcccgagtagctgggactacaggcacccaccaccatgccygaccaattttttgtatttttagtagagatggggtttcaccattttagctaggatggtctcaatctcttgacctcgtgatccacccgccttggcctcccaaagtgctgggatcacagggattctacatacattttttattggaaaaaa

SEQ ID NO: 91093 - DNA, 629 bp, Homo sapiens
caaaattaaaaatcaaacctacaccaaaacaaaaccttaaacacaatyagcacaagatgacactgactatccctctatctatcccagggtttctcaacctcagccctcttacctttttgggcccaatataattctttgttttgaggggtctatcctgtgcactgcagcatgttcagcagcatctctggcctccacccactgcatgacagtagcaaccctcctccagcccctagttacaaaaatcaaaaatgtctacaggctgggtgtggtggctcacacctaccatcccaatactttgggaggccgaagcaggactgcttgaggccaggagtttgacaccagcctaggcaacacagtgagactctgtctctacaaaaaattaaaaaattagccgggtgtggtggtacagctagttgggaggctgaggtgggaggattgcttgagcccaggaggtggaagccgcagtgagccgtgatcatgccactgcactccaacctgggcaacaaagtcagactctgtctccaaaaaaaagataaaaaattgtctacagactttgccaaatgttccccgggaaacaaaactacctgaaattgaaaaccactgctctaggctatctcatttattgctca

SEQ ID NO: 91094 - DNA, 1608 bp, Homo sapiens
aatacatatttatttctagatattgcagtgaatatatgtacttcactgtacattcaaatttcacatggtagcacctacattttgtaccactgtagccttttaaaggcgtcaaaacactgaagtcatcactttttaaatataattactgggtgttcaactcatatcaatcattcaattaaaaaatatttaattagcaactgctatatagcaccagatagacatctctctgggacctttctaagaatcatgcaacttagaaaggtcagctgagcttaaacggtcacaaagtctttaagaaatctgctttttagctacttttattatgggtggtttgaacattttcctgtattagagttattgcaagtacaatacaatgatgaatgccttctctagcacctggtagagccaaactagataacattacttattgataaggaaaacattttattagatcaaagaagatgataaaataagtagagggagagaagcctactacatagtttcttcaggtggagcctgaaagcgagcagttcttaacctgatctcttcatctggatttaggaagataccctgatctccataaaatacttaagaaccaccctagtctcatcaataccaaaagtaggttactctgcatatgatttatctcacctgtttaatgatgactctaccagatttaatcacataaggtaacattccctgaccttgatttaatggggaaagacggatggtagggtgtaggaatggaataacacctttacactccatgacacagccctctgtggtgtactacccagtcattcatcatcaatgtagcacactaactccattagtcttggcttcacattgtctctcaataagataggtaaggtaagagtttctgctatggttttgaaaataataatctgaagttactttaagtatttattctataatctgatgaccaaaaaatctacaatggcattttacccaatcctacagaaacttaaaatcctgaggctccagactatataatcgaaatctctgattttaaaatccaagtttagtactcacaaaattttactaaagttattttcactgtaaataggaaaacacttttaataaggagaaagaaattcctaaaccaatactcacttggaatggagacttttttgaaacctaacagaaaacaatgccactaaatatgttttcattttaaaattcccttcatgatttctccttatttcttaatrtcctctttccaaatgaaccttttgtcctctttttgaatggtttttttttttttttgagatggagtctcgctctttttgcgagtgcaatggcacgatctcagctcactgcaagctccgcctcctgggttttcaagcgattctcctgcctcagcctcccgagcccagctcaaatcactaaattgcttagattagaggcgcccaccaccacgccaggctaatttttgtatttttagtagagacaggggtttcaccatgttggccaggctggttttgaagtcctgacctcaggtgatccgcccaccttggcctcccaaagtgctaggattacaggcactagtcaccatgcccggccctcttttgtcctcttatctgagtg

SEQ ID NO: 91095 - DNA, 970 bp, Homo sapiens
ctagtcccatttcaagggttcggtaaccatatgtggctgtggctaccgtatcagacaacactttttcagaaacttttgctggggattctatgaagagcatggcagatgtagtcctcagtcacatgtagtttatactttgacaaggagaacaacctttatgtaagtgattgttaatacaacaaatacaataaaagtaaacaacaagcaaaagccaggcaaaggaaagtgcaagtccagtctgttacatgcccaaactattctgaaggggcaggaggacaagagacacaagttgtctttatttcttcctctcactggctttgagattaactaattgtgtgatctcttctttctagactcagatctgaattattacccactgctcctagactctgcagaacctacattgaaacaaaacaaaacaatctacatttagcccctctgccccactgcctcccataattattatctgaaggtctgtatcccctgctggattgtaaataatgtgaggctagagactctgtcccattaatctgtttctgtctcttcagcaccatcacagtataataagccttcacttcatacttttagaataaatgaatgaattgaagatgtgaatgaagaatgaatgaagacttcccacttaaatctcttgttgggattacagttcatctgacattttacattgtcctgtatggtaaacttctccctgactccccttttctgtttcctcctttccttcttttctgtaatttcataactatttagctaaggtctgatttttttttaaactcagctgcccaactatcactagtcaggcctgattcttttgtcccargaattgtgcgaggcagtgtgtatgcaagatgaaaaaagacacagtcgctgccctcaaagagcttagaggcttttaatgtgttactataaataataccagctaacatttactgggtgctttctttgtgccaggcat

SEQ ID NO: 91096 - DNA, 546 bp, Homo sapiens
tgtacctaaactgaataagcttcaagccctacaaaacctttatcagaccctggctctgaggaaggaaagtggtaggcgtgaaaggagatcactatgtatggagcagaatgagcacatgacagagcagaactaagtaaaattgggcaggtaagtagggaatggctcatatagaatgttgcatgaaaagttagattttattttaatgtaatggaaaacctctggagaactttaagaagaaaaaaatgaaatttgatttatttttactctgaaggagacatataagagagtgttcactgggaaatttaaaacaacccactgtacataaacagaatgkattaataaattgataagttgtggtacattcataaggggcatattttgaagtagtgaaatgaataaattagttttatatatatcaatatagctaaatctcaaaaatacgttgatcgaaaggagaaaattttaacactaacatacagtataatttatgcatgattttacttatataaagtttaaagtcattcaaatcaatatcttacttaaggg

SEQ ID NO: 91097 - DNA, 1073 bp, Homo sapiens
cacacacacacacacacacacacagaatagtagggagattttaaactgaaagctgtgaagaaggatcaaaacatctccctcttcctcctaatctgtgttgcagcaaaacagcttggaaatttattctgctagggagatacctctgcccttgggtggccaagtggaaaccagggaacattctagagggaagaagaatagacaaggaatattcatatctgcccttaacctaggcctaaatacattagtgtctcaaggtttagtcatgctctaggctaaactcgtatcagaagtacccttcgtgccacacatccccttcaacccaccagaaccaagttgagacaggcaaaactttcccttctgataagatattaagtcaaatgaatctaaaaatataaaaatttaaccagttttagacaaataggaactacccttaggcaagtatttctagcccaagtttccttaactgtaaactattttatatatctgtaacttcttttctttacttatagaatctctaagtatctttcccttattctttttttttttttttttttttttttgagacggagtcttgctctgtcgcccaggctggagtgcagtggcgggatctcggctcactgcaagctccgcctcctgggttcacgccattctcctgcctcagcctcccaagtagctgggactacaggcgcccgccactgcgcccggctaattttttgtatttttagtagagacggggtttcaccgttttttagccgggatggtctcaatctcctgacctcgtgatccgcccgcctcggcctcccaaagtgctgggattacaggcgtgagccaccgcgcccggccctcccttattctttcctacttttctaacccagataggtgtcatggaagttaaaacagtatttcccagatctgctsagatctgggaaagtaaattgggtgtgaactatatacataattttctttcttttaaatataatgaatgcctacaggtataaagcagataatttctaatgatgtgcttcagtgattatttgtaacctggaatttactagttatgattgttggtattt

SEQ ID NO: 91098 - DNA, 1073 bp, Homo sapiens
cacacacacacacacacacacacagaatagtagggagattttaaactgaaagctgtgaagaaggatcaaaacatctccctcttcctcctaatctgtgttgcagcaaaacagcttggaaatttattctgctagggagatacctctgcccttgggtggccaagtggaaaccagggaacattctagagggaagaagaatagacaaggaatattcatatctgcccttaacctaggcctaaatacattagtgtctcaaggtttagtcatgctctaggctaaactcgtatcagaagtacccttcgtgccacacatccccttcaacccaccagaaccaagttgagacaggcaaaactttcccttctgataagatattaagtcaaatgaatctaaaaatataaaaatttaaccagttttagacaaataggaactacccttaggcaagtatttctagcccaagtttccttaactgtaaactattttatatatctgtaacttcttttctttacttatagaatctctaagtatctttcccttattctttttttttttttttttttttttttgagacggagtcttgctctgtcgcccaggctggagtgcagtggcgggatctcggctcactgcaagctccgcctcctgggttcacgccattctcctgcctcagcctcccaagtagctgggactacaggcgcccgccactgcgcccggctaattttttgtatttttagtagagacggggtttcaccgttttttagccgggatggtctcaatctcctgacctcgtgatccgcccgcctcggcctcccaaagtgctgggattacaggcgtgagccaccgcgcccggccctcccttattctttcctacttttctaacccagataggtgtcatggaagttaaaacagtatttcccagatctgctcagakctgggaaagtaaattgggtgtgaactatatacataattttctttcttttaaatataatgaatgcctacaggtataaagcagataatttctaatgatgtgcttcagtgattatttgtaacctggaatttactagttatgattgttggtattt

SEQ ID NO: 91099 - DNA, 1073 bp, Homo sapiens
cacacacacacacacacacacacagaatagtagggagattttaaactgaaagctgtgaagaaggatcaaaacatctccctcttcctcctaatctgtgttgcagcaaaacagcttggaaatttattctgctagggagatacctctgcccttgggtggccaagtggaaaccagggaacattctagagggaagaagaatagacaaggaatattcatatctgcccttaacctaggcctaaatacattagtgtctcaaggtttagtcatgctctaggctaaactcgtatcagaagtacccttcgtgccacacatccccttcaacccaccagaaccaagttgagacaggcaaaactttcccttctgataagatattaagtcaaatgaatctaaaaatataaaaatttaaccagttttagacaaataggaactacccttaggcaagtatttctagcccaagtttccttaactgtaaactattttatatatctgtaacttcttttctttacttatagaatctctaagtatctttcccttattctttttttttttttttttttttttttgagacggagtcttgctctgtcgcccaggctggagtgcagtggcgggatctcggctcactgcaagctccgcctcctgggttcacgccattctcctgcctcagcctcccaagtagctgggactacaggcgcccgccactgcgcccggctaattttttgtatttttagtagagacggggtttcaccgttttttagccgggatggtctcaatctcctgacctcgtgatccgcccgcctcggcctcccaaagtgctgggattacaggcgtgagccaccgcgcccggccctcccttattctttcctacttttctaacccagataggtgtcatggaagttaaaacagtatttcccagatctgctcagatcwgggaaagtaaattgggtgtgaactatatacataattttctttcttttaaatataatgaatgcctacaggtataaagcagataatttctaatgatgtgcttcagtgattatttgtaacctggaatttactagttatgattgttggtattt

SEQ ID NO: 91100 - DNA, 922 bp, Homo sapiens
cctttaaaatgaaaaaaataaaaaagagttttgtcttaaaacttaaaccctagagttttgtcctaaattctaagaccttttttttttcctgttgtttgtttccactagcacctcaatgagattgactagacctcataatgggtaacagtggcaatttgattgattgaaaggaaagacagagtgagcatcaacaggggtcttggtttagagtatgactccagagatatctgattaccaacaatctccatgtagtattttcagatgctccctaaacaaccaggtagctttcagattaatgatcagcaaagttcaatgaattcaatatgatctatctgagtagctgagctatctgcgtttgtagttgttgctgttttaaattctaccaatgttctttctggagtaacaaatgacagatttagtgaacagaagagactcatgcctgtctatgatcttcacatatttcttaatctatggcttttcagagtgaaaatatttctaggagcttcccaaaaactaaactattcctcacaatgaccaaatcccttttggatacatccaagacttgactttgcgggggcaaatgggaatgatrtccagggaccagtgctggaccccctcctaggctgtttcatcccctgatgattctaggacaagaatcaccagccatttctattttgcaaaagggctctcatgaggagtaaataatgagacatgactgtgaaaaacacgcacaaaatctcttagaatacgacagagagcatctactgccctgtatgaaagtggttgtaggttcatttttatctttgtgtatattgttctgcacgtaaagaggtgaaattccaggggaataaggatggccaagtactggggttggtgtgaggtagagaaagaaaatagctttcaaatgttttctttctaaaaa

SEQ ID NO: 91101 - DNA, 742 bp, Homo sapiens
tagtatatgaatttcagctcaagctggggcartgctagttattaattataacacattaattatgaaatttggtgaatgcttgaaacagaggactgtggcccactcccaaggccatagcttagtctcgtatttctcactcgaggccgtgactaagctgcagaattaaaggcagatgagccttcatgctggttggcattcagggtggagaggggagggagggaattgtgccattgctagtctttaaaatgctgacctttgcacacaagaagctgaaaagacatcacacatatagagaagtccagggaaatgtgataagaggttatgacccaaaaatgaacacaaaccttgcaataatttcagccactaaacagtgaagcagattaggcgtgagttttttacagaaagaacaagcttgtattttcaataattatcccaaagtgaagaaaatgaagaaactgggaggtgctactggccacttttctggtttgaccagtgtgcatttcatctttggaccattataaggggccagtggagatgacgctggtgtttttaaagaagaatttctaactctgaccttggctccccagaaggtaagaataaattcagcaagagagtctgcggtgagctccttctggcgtgtgggtatagcattaataacaacagctaacattcactgggcacctattatgtgccacgcagggttttaaggaatattaatagattaactcatttaatcctcact

SEQ ID NO: 91102 - DNA, 742 bp, Homo sapiens
tagtatatgaatttcagctcaagctggggcaatgctagttattaattataacacattaattatgaaatttggtgaatgcttgaaacagaggactgtggcccactcccaaggccatagcttagtctcgtatttctcactcgaggccgtgactaagctgcagaattaaaggcagatgagccttcatgctggttggcattcagggtggagaggggagggagggaattgtgccattgctagtctttaaaatgctgacctttgcacacaagaagctgaaaagacatcacacatatagagaagtccagggaaatgtgataagaggttatgacccaaaaatgaacacaaaccttgcaataatttcagccactaaacagtgaagcagattaggcgtgarttttttacagaaagaacaagcttgtattttcaataattatcccaaagtgaagaaaatgaagaaactgggaggtgctactggccacttttctggtttgaccagtgtgcatttcatctttggaccattataaggggccagtggagatgacgctggtgtttttaaagaagaatttctaactctgaccttggctccccagaaggtaagaataaattcagcaagagagtctgcggtgagctccttctggcgtgtgggtatagcattaataacaacagctaacattcactgggcacctattatgtgccacgcagggttttaaggaatattaatagattaactcatttaatcctcact

SEQ ID NO: 91103 - DNA, 674 bp, Homo sapiens
ggatccaaatccaagcccaaagcagaggcctyggcccagctaggaggaaggatgctgaggtctggcacccccacgcctcctgtaacggaaacagcactcctttcccccaccatattccataaggcaggtggcttggcagtgggagcggggagagcccaggcctgggaaggtttttagttcctcccgaggagcccctggggtgaaggcatggtggctcctgggctgtcttgtggtggtggaagagcaggggctgcacggaggagcctgctgggaggatgggggcttctcctggccatgcctcttcggccctctttgagactgaatgacgctgctggcaccaatgccttgaggagaacccagactaggcctctagttccatccagagctgggcacagcacagggaaacgcaatcaactggactgggagtggggactagggcccataaactgcgccccactctggcctgcctctccttggcttgctcacctcccacgctggagggctgcccctcgggggctccctctgccctttgcaccctccctgcctgcagtgcacatggcccactaatgttcccaagttctcacatgcctggctcccccagacagtgggcccttcacgttctccctcccttcctaccctcagccttcaacacaaaactgtgtgagtggcatcat

SEQ ID NO: 91104 - DNA, 761 bp, Homo sapiens
aattgtccaagtggccaaagctatatcccgagggtaaatacatcagagcttctcaactttaatgtgcatacaaatcttctgagagctatttaagatgcagattctgaattagtatgtctagggtgatctaagattccaaatttctataaagatcacatttgttaccaatgctgttggttactggacactgttttgagaacatggattgaaagacaatatttttgaggtaacaatactccccaaaatgatctgcaaattcactgcaatctgtatcaaaatccaagctggcatttctgcaaaaattgacatgcagattctaaaattcatatgaaaatgygagggatcaagattagccaaaacaatcttgaaaaataacaaaattggaggactcatcattcctgatttcaaaacttactgtatatgtatattctgaaaatggcaatgtaaaactgatacatctgttctattggacctaaatggctacttttaaggaaatgctttgtttagaaaaaaaaaggcaagactgcaaactgttttgcaatttggtaatatcttacaaaattacaaacatcaaacatttctaactccatttctaatatttcttacagatatgctttcacatatgtgaaatgacaaatgtacgtggttattctcagcagtattttctgaagatcaaaggagtaaataacctaaatgtccaccagaatggctcaggttaaaaaaattatggtgcaggtccacaatcccttacttacaaccct

SEQ ID NO: 91105 - DNA, 761 bp, Homo sapiens
aattgtccaagtggccaaagctatatcccgagggtaaatacatcagagcttctcaactttaatgtgcatacaaatcttctgagagctatttaagatgcagattctgaattagtatgtctagggtgatctaagattccaaatttctataaagatcacatttgttaccaatgctgttggttactggacactgttttgagaacatggattgaaagacaatatttttgaggtaacaatactccccaaaatgatctgcaaattcactgcaatctgtatcaaaatccaagctggcatttctgcaaaaattgacatgcagattctaaaattcatatgaaaatgtgagggatcaagattagccaaaacaatcttgaaaaataacaaaattggaggactcatcattcctgatttcaaaacttactgtatatgtatattctgaaaatggcaatgtaaaactgatacatctgttctattggacctaaatggctacttttaaggaaatgctttgtttagaaaaaaaaaggcamgactgcaaactgttttgcaatttggtaatatcttacaaaattacaaacatcaaacatttctaactccatttctaatatttcttacagatatgctttcacatatgtgaaatgacaaatgtacgtggttattctcagcagtattttctgaagatcaaaggagtaaataacctaaatgtccaccagaatggctcaggttaaaaaaattatggtgcaggtccacaatcccttacttacaaccct

SEQ ID NO: 91106 - DNA, 761 bp, Homo sapiens
aattgtccaagtggccaaagctatatcccgagggtaaatacatcagagcttctcaactttaatgtgcatacaaatcttctgagagctatttaagatgcagattctgaattagtatgtctagggtgatctaagattccaaatttctataaagatcacatttgttaccaatgctgttggttactggacactgttttgagaacatggattgaaagacaatatttttgaggtaacaatactccccaaaatgatctgcaaattcactgcaatctgtatcaaaatccaagctggcatttctgcaaaaattgacatgcagattctaaaattcatatgaaaatgtgagggatcaagattagccaaaacaatcttgaaaaataacaaaattggaggactcatcattcctgatttcaaaacttactgtatatgtatattctgaaaatggcaatgtaaaactgatacatctgttctattggacctaaatggctacttttaaggaaatgctttgtttagaaaaaaaaaggcaagactgcaaactgttttgcaatttggtaatatcttacaaaattacaaayatcaaacatttctaactccatttctaatatttcttacagatatgctttcacatatgtgaaatgacaaatgtacgtggttattctcagcagtattttctgaagatcaaaggagtaaataacctaaatgtccaccagaatggctcaggttaaaaaaattatggtgcaggtccacaatcccttacttacaaccct

SEQ ID NO: 91107 - DNA, 761 bp, Homo sapiens
aattgtccaagtggccaaagctatatcccgagggtaaatacatcagagcttctcaactttaatgtgcatacaaatcttctgagagctatttaagatgcagattctgaattagtatgtctagggtgatctaagattccaaatttctataaagatcacatttgttaccaatgctgttggttactggacactgttttgagaacatggattgaaagacaatatttttgaggtaacaatactccccaaaatgatctgcaaattcactgcaatctgtatcaaaatccaagctggcatttctgcaaaaattgacatgcagattctaaaattcatatgaaaatgtgagggatcaagattagccaaaacaatcttgaaaaataacaaaattggaggactcatcattcctgatttcaaaacttactgtatatgtatattctgaaaatggcaatgtaaaactgatacatctgttctattggacctaaatggctacttttaaggaaatgctttgtttagaaaaaaaaaggcaagactgcaaactgttttgcaatttggtaatatcttacaaaattacaaacatcaaacatttctaactccatttctaatatttcttacagatatgctttcacatatgtgaaatgacaaatgtacgtggttattctcagcagtattttctgaagatcaaaggagtaamtaacctaaatgtccaccagaatggctcaggttaaaaaaattatggtgcaggtccacaatcccttacttacaaccct

SEQ ID NO: 91108 - DNA, 629 bp, Homo sapiens
ggatcccaggttggctcaagacaaacttggtatattatataccactcagtagttttctcaatgcaggagtatattaagccctaatttggaaactagtaaatctcattagcagctgccttaaaattcttttgttgttgttgttgttgttgttgttgttgagacagagacttgctctgtcaccaggctgcagtgcatgcagtggtgygatctcggctcactgcaacctccgcctcccaggttcaagtgattctcctgcctcagccccccaagtagctgggactacaggcatgtgccaccacgcccagctaatttttgtattttttagtagagatggggtttcaccatgttggccaggatggtctcgatctcttgaccttgtgatcctcctgcctcggcctcccaaagtgctggaattttaaaattccttttgtaacgaggtatggtaatatagagaaaagcattacgtcccaaaatgcatttctttatcaagtagaatgtattcaggaaaatgagcttcagaaatgtgtcatttgcatcagcttctaggtgttccctgtaataatttctttctttttttggttttgggatttttttgagacaggatctgggtctgtcgcccaggctggaat

SEQ ID NO: 91109 - DNA, 749 bp, Homo sapiens
tagtgacacttcccaagcaaccaatgacatctgttagtggtggtagaggtgacctgctttggtcctggcccatagctttatgatcatcactataattagatataatgaatgttcatgagtagcggagcttctgttctgcagttaatgtttattccaccaattagcactgactgttcttagaatacaacaaccaagcatgttaaagttctgagaaattaaaagaaatggagggaaaggtgaaaaagagttgaaggagggactgatgcccttcctcatttaatgctactctatctgcaggcactaaataaaaagatcccattattggaaacagaatgtgagaaggcctggggaaatrcatgttgaatctcaggccagccaagaatatcagacacacacagaagaagaggacccatctacctttttgtttcctttcaatgagtcgcccatctctcatggtagggcaggtacaaccagaagcaactcattgttccccatgtaatgttgattgaagtgataagctatgggacacttcagttattttttaaaataacagaaatatttcagattcattctctagttggttacacactggaggattttacctgggggccttgaccactaaaccagtacttttcctactgcattagttcaattgctgcataacaaatcaccatagacctagcagctttaaacaacacatgttttatctcacaatttctgtatgttgagaatccaggcatggcttaacg

SEQ ID NO: 91110 - DNA, 692 bp, Homo sapiens
tacatatttttcaggtctcatctatgaactatgggcagaaaatctacgataaacaaaagatcaaaaaaattagawaaagacagcctgctgttatttgatttatgaccctgggttattgcacaacaggagttgatgaatgcatcttttaattacagccctcaagtgtgcagaggaggtggggatcacagtgagctcacctcctcagatcacttctctgtttaaccatcgctggctgcctctcgtctatacagtcctgacccctgagcatgcagctcttcatgaatggccttatgccctcaagccctgtgctgcccctttcccttccctcccaccactgtttctgcttcctttaacaccagctagtccaactgtgtccaaccacgctgatgtacttgacatttccaatcaacactgtttactttcaacacccaggtgagaggcttctctaagaaccccttccccaattcttctgagcccttgggaaaagtaagccacttcctttagtgtgatacttcctctgcgtgactcaggcactttatacaggcttctattatagcacttactgtattgttcatagttaacttctccattgcactaggaggtccctagaaggcagagcccttaaacttttcaattttgtattcctagcacatagcataatggacaactcacaggcggtacagaacaactac

SEQ ID NO: 91111 - DNA, 620 bp, Homo sapiens
tatttggacatgcctagtcatgcatgcattagacatgtgtctcagccaaaataaattgcatttcattataaaatggaaaaccaaagctcacaataggtccatttttcttattttgttctttttcaaatcaattattttacttcctccattctctgttttatttatttgtctttgtctttctctatctctgtctcttttaatgtaagaatatctttaagaaaagtttctaactatacgtttctaattatacatttaaagacagcatgtatgtgcatacattcgcacacacattttatatatatayacacacacacacacacatgctctttaaatgttaataattaatcacataaccctccttttggtggctttggtctcactgtcagaattgctaagtaggaaggtacaggcagccagtgatggctcccttgtcaatctcagtgagcctgagcagtcgctggagcttgcagtatcagttgctaggcaacctgttcatctgctgtgcctgatatttcaattcggcagcagtaaaggtctgttatgttatggcctttcagaactaccttcattacataatatctaccattataataaaggagctttaaatgtttaggggtgtg

SEQ ID NO: 91112 - DNA, 571 bp, Homo sapiens
agagtgagcaaacagacatacaggatctagagacagggctgcctttatggttgttgtcctaacataattactgctagtgacttctttgaatttctaaggttttctagtttggaaaataagtcatacagtatccctataactagaaggaagaaggctattggcctcaccccattcaaggccattggcctcgaaacatctgcaaaacaggtatttaggagcaagagcatactcaacggatctttcttccactgcaaaaggttgctgagtgaaacttgctattgcatgcccattgtgggcagtggaactttttcatgcatataaggagwtggtagtcattttcataagtatcatttgcgagcatgaggacaagccatatcttcaatccccatatattgctgttccctagagaaggaaagctccttgaggacagggaattttggtgtttatcactgtgtctctactgcctaaaatggcatttggcacaggacaaatgtttaataaatattttttgaatgaataattccagaagtcaatgctgtccttcatgactctttagagaacatgttatata

SEQ ID NO: 91113 - DNA, 522 bp, Homo sapiens
tgcycctaccagccatgtgacctttggcaagttgcataatatctgccttagttcagtgtcatcttcctgtaaaataggattataatagcagcaatacacaggcacgtaaaaattgtatgtgtgaatgtacccaacatgatcaatagcagtgtctgggacatggtcagccctatggcaatatttgctattattttccattattattattgttgttactgtcactcttctacaatgactcagtgagataaagcatgtgaaagcatgtgagatagtctttcttttttctttctattcctgactttgtctgtgctattctccttgacagcctggtaaacagcactcattcttcatacttttccctgtaaatgtgtgagaaggacagttcatttttttccctaccccaagggactcattttcaaatgaggagacaaataaataagaagttaatatatactttatattttcgaaaaataattgatatggagaaaataagagcttcttagaagaattcacaactgtgta

SEQ ID NO: 91114 - DNA, 522 bp, Homo sapiens
tgctcctaccagccatgtgacctttggcaagttgcataatatctgccttagttcagtgtcatcttcctgtaaaataggattataatagcagcaatacacaggcacgtaaaaattgtatgtgtgaatgtacccaacatgatcaatagcagtgtctgggacatggtcagccctatggcaatatttgctattattttccattattattattgttgttactgtcactcttctacaatgactcagtgagataaagcatgtgaaagcatgtgagatagtctttcttttttctttctattcctgactttgtctgtgctattctccttgacagcctggtaaacagcactcattcttcatacttttccctgtaaatgtgtgagaaggacagttcatttttttccctrccccaagggactcattttcaaatgaggagacaaataaataagaagttaatatatactttatattttcgaaaaataattgatatggagaaaataagagcttcttagaagaattcacaactgtgta

SEQ ID NO: 91115 - DNA, 844 bp, Homo sapiens
ctggaaagcacatttgattggtttcatgtattaagatctggcagtgagcatttttcagttacatcttctgcaatagtatttactttgtgcaatttttcccagagaccagaactttgcagtgactaattctatgaatgatcatggtaaaactcgctcgtaaaatgtgatgcctgtctttgattccactcttctaacaacatgcttttgcaacaagcaccatttgtttggttccacttgtgggcagggcctatgtgtttctaggacattagggccaccttaaatccatccatactttatttccttgaatttaacaagartgtacagcccccataatgctgtttaaagtgatggggtggtagtattggtgtgggggcggtctgaggagggaggtctagaacgtttattgctgcagtgctgtcacatagcaaattgcctaacctagtggcctctaataacaagcattgattttttgctcagacatctacagagaggctaggggttggctgatctaggccaggctccactgggcttgacttataagctacaggttggattcatattcactccatgtgtctcttagactgtgggcgtgttcttgttatggtagaagtcaggagcacaaagaatacacccagcatacaatcagtttcaaactccttttgtgtcacatacacaaacatcctgttggccaaaacaagtcacatggccaaggccaacaacaatggagtgttcgttttcttttgctacaaaacaaagtaacacaaactttgcagcttaaaacaacacatattgattatatcaccgtgtctgtgggcctgaagttccagcatgactgagctggatc

SEQ ID NO: 91116 - DNA, 844 bp, Homo sapiens
ctggaaagcacatttgattggtttcatgtattaagatctggcagtgagcatttttcagttacatcttctgcaatagtatttactttgtgcaatttttcccagagaccagaactttgcagtgactaattctatgaatgatcatggtaaaactcgctcgtaaaatgtgatgcctgtctttgattccactcttctaacaacatgcttttgcaacaagcaccatttgtttggttccacttgtgggcagggcctatgtgtttctaggacattagggccaccttaaatccatccatactttatttccttgaatttaacaagagtgtacagcccccataatgctgtttaaagtgatggggtggtagtattggtgtgggggcggtctgaggagggaggtctagaacgtttattgctgcagtgctgtcacatagcaaattgcctaacctagtggcctctaataacaagcattgattttttgctcagacatctacagagaggctaggggttggctgatctaggccaggctccactgggcttgacttataagctacaggttggattcatattcactccatgtgtctcttagactgtgggcgtgttcttgttatggtagaagtcaggagcacaaagaatacacccagcatacaatcagtttcaaactccttttgtgtcacatacacaaacatcctgttggccaaaacaagtcacatggccaaggccaacaacaayggagtgttcgttttcttttgctacaaaacaaagtaacacaaactttgcagcttaaaacaacacatattgattatatcaccgtgtctgtgggcctgaagttccagcatgactgagctggatc

SEQ ID NO: 91117 - DNA, 844 bp, Homo sapiens
ctggaaagcacatttgattggtttcatgtattaagatctggcagtgagcatttttcagttacatcttctgcaatagtatttactttgtgcaatttttcccagagaccagaactttgcagtgactaattctatgaatgatcatggtaaaactcgctcgtaaaatgtgatgcctgtctttgattccactcttctaacaacatgcttttgcaacaagcaccatttgtttggttccacttgtgggcagggcctatgtgtttctaggacattagggccaccttaaatccatccatactttatttccttgaatttaacaagagtgtacagcccccataatgctgtttaaagtgatggggtggtagtattggtgtgggggcggtctgaggagggaggtctagaacgtttattgctgcagtgctgtcacatagcaaattgcctaacctagtggcctctaataacaagcattgattttttgctcagacatctacagagaggctaggggttggctgatctaggccaggctccactgggcttgacttataagctacaggttggattcatattcactccatgtgtctcttagactgtgggcgtgttcttgttatggtagaagtcaggagcacaaagaatacacccagcatacaatcagtttcaaactccttttgtgtcacatacacaaacatcctgttggccaaaacaagtcacatggccaaggccaacaacaatggagtgttcgttttcttttgctacaaaacaaagtaacacaaactttgcagcttaaaacaacacatattgattatatcaccgtgtctgtgggcctgragttccagcatgactgagctggatc

SEQ ID NO: 91118 - DNA, 603 bp, Homo sapiens
cgccccttccttatttggaaatgttattgcttccttaaaccttttgtaagcaacttctttgttcttccctgcacttacctatttaggaaagttttaggctattagcaaatcgggtatcagtttaagattgtgaggtcccgctccagccagtggatgcaggacacagcagtaaggacgacccaagtgcgtaagggataaatatgtctgcttttcctgtgttcaagtgtgctctcacctttgttccatctgcaactgagcaccctttctacagaaagaaaagatggccttgctgagataccttttgtctctgtgctgacttttcttcgcagcaccgattatctatttctaacaatyttggtatttctaacacatattgaggctatcatccttaagtccttgctgccactgaccatcttttaaacctatggcgtcgtggcccagaatcttatctacgctcagcttgtcttcaccatgtacaggtgagcctcctgtacaccacccatgcccaccccaaagaccagctgatgatgctcactccacaaataactgctttgaccttctgcaagctggaaggaagctgtcagctcaggcaggaaatacaga

SEQ ID NO: 91119 - DNA, 527 bp, Homo sapiens
aaaggaaagacctctttaaagaagaagctgccgaaaccgtgcgggccggcagcttagcggtaagtgtgagggtgaggttcaaagtcagctggcctgaggctcttccgggccaggtggggttaagtgggagggaaaaatttgcctgaggctggtagctctgccyttcgggagattctacaaagtgccccacttgcatatttatcaccaggctggaaggacaattgcaacgttgttttgggagcctctgcagctagtttgcccctctgtcccccaattgcccagattcccctggagagaaagtgacagattctcatccagtctcttaacaaatattttaggcaaactcttctgcctcaggcacacagggccgttggaatcctggattaaaggaagacgtaaaccaatcttatttcctagattagttgcctgtgtgctgggggaaggggggcgggaggcacagttcactcctgaaccgttaagagtcttctttccatagtttccaggggaatttttatttactggggatg

SEQ ID NO: 91120 - DNA, 687 bp, Homo sapiens
gtgacctgtgtggcaagggcttccgtctgcagcgcatgctgaaccgtcacctcaagtgccacaaccaggtgaaaagacacctgtgcaccttctgcggcaagggcttcaacgacaccttcgacctgaagaggcacgtccgcacacacacaggtgagcrgggagtgcgtgctttgttctctgttttgttattctggccaagagctcctgtttctttcccaccaaaaaaccaggttgagaccgtggaacaatgttgtgtttctagaaagatcacaagatgcggatcacgaggttaggagtttgagaccagcctggccaacatagtgaaaccctgtctctactaaaaatacaaaaaaattagctgggcgtggtggtggcgcctgtaatcccagctacttgggaggctgaggcaggagaatcgcttgaacctgggaggcggaggttgcagtgagccaagatcatgccactgcactccagcctgggtgacattgcaagactccatctcaaaaaaagaaaaaaaaagaaagatcacaagatgatggggcgttagggccagcccttctgggttcacctcctgactctgccacctgccagctgtgtcaccttgggccaggtgagccacctttggtagcctgcctttcacccctgtaaaatggagatatcgatgtgagttctagcgaggctcaaaac

SEQ ID NO: 91121 - DNA, 687 bp, Homo sapiens
gtgacctgtgtggcaagggcttccgtctgcagcgcatgctgaaccgtcacctcaagtgccacaaccaggtgaaaagacacctgtgcaccttctgcggcaagggcttcaacgacaccttcgacctgaagaggcacgtccgcacacacacaggtgagcggggagtgcgtgctttgttctctgttttgttattctggccaagagctcctgtttctttcccaccaaaaaaccaggttgagaccgtggaacaatgttgtgtttctagaaagatcacaagatgcggatcacgaggttaggagtttgagaccagcctggccaacatagtgaaaccctgtctctactaaaaatacaaaaaaattagctgggcgtggtggtggcgcctgtaatcccagctacttgggaggctgaggcaggagaatcrcttgaacctgggaggcggaggttgcagtgagccaagatcatgccactgcactccagcctgggtgacattgcaagactccatctcaaaaaaagaaaaaaaaagaaagatcacaagatgatggggcgttagggccagcccttctgggttcacctcctgactctgccacctgccagctgtgtcaccttgggccaggtgagccacctttggtagcctgcctttcacccctgtaaaatggagatatcgatgtgagttctagcgaggctcaaaac

SEQ ID NO: 91122 - DNA, 687 bp, Homo sapiens
gtgacctgtgtggcaagggcttccgtctgcagcgcatgctgaaccgtcacctcaagtgccacaaccaggtgaaaagacacctgtgcaccttctgcggcaagggcttcaacgacaccttcgacctgaagaggcacgtccgcacacacacaggtgagcggggagtgcgtgctttgttctctgttttgttattctggccaagagctcctgtttctttcccaccaaaaaaccaggttgagaccgtggaacaatgttgtgtttctagaaagatcacaagatgcggatcacgaggttaggagtttgagaccagcctggccaacatagtgaaaccctgtctctactaaaaatacaaaaaaattagctgggcgtggtggtggcgcctgtaatcccagctacttgggaggctgaggcaggagaatcgcttgaacctgggaggcggaggttgcagtgagccaagatcaygccactgcactccagcctgggtgacattgcaagactccatctcaaaaaaagaaaaaaaaagaaagatcacaagatgatggggcgttagggccagcccttctgggttcacctcctgactctgccacctgccagctgtgtcaccttgggccaggtgagccacctttggtagcctgcctttcacccctgtaaaatggagatatcgatgtgagttctagcgaggctcaaaac

SEQ ID NO: 91123 - DNA, 687 bp, Homo sapiens
gtgacctgtgtggcaagggcttccgtctgcagcgcatgctgaaccgtcacctcaagtgccacaaccaggtgaaaagacacctgtgcaccttctgcggcaagggcttcaacgacaccttcgacctgaagaggcacgtccgcacacacacaggtgagcggggagtgcgtgctttgttctctgttttgttattctggccaagagctcctgtttctttcccaccaaaaaaccaggttgagaccgtggaacaatgttgtgtttctagaaagatcacaagatgcggatcacgaggttaggagtttgagaccagcctggccaacatagtgaaaccctgtctctactaaaaatacaaaaaaattagctgggcgtggtggtggcgcctgtaatcccagctacttgggaggctgaggcaggagaatcgcttgaacctgggaggcggaggttgcagtgagccaagatcatgccactgcactccagcctgggtgrcattgcaagactccatctcaaaaaaagaaaaaaaaagaaagatcacaagatgatggggcgttagggccagcccttctgggttcacctcctgactctgccacctgccagctgtgtcaccttgggccaggtgagccacctttggtagcctgcctttcacccctgtaaaatggagatatcgatgtgagttctagcgaggctcaaaac

SEQ ID NO: 91124 - DNA, 1621 bp, Homo sapiens
cagttttcagtggctggaggggtttgggaggaaatctggccccatcccttggggtctgggatccctccccacccgctccactggcttggggggttcccgatccggcctctccacgtgcccactgggtccggggctaagctaggggtgagggggtatcacagcgaggcttggctggaggcccctgaggacctcagaggacggaggtggacacgcagggagctgccaagctgaagcaggagcccacgccactgtcacgagggaggccaggtgggaattcaggagaaggcctgcgaatctcygagagctcccacagacgggacacagcttcactctcaccacatacaaacgattctgcgctctcttggcaaatgcatgggaattaataagcggaccttcaaccagttacaccaagatctatgctcacttgtggcaggaagataaactccatgagtcacagcaaggtggcccgcaatgcttgcagacctccaacaggaaatgcgactaaaatcagcacaggccggccgttgcactgcctgttggcaacacagtgggggccgatcaccaaacctgggtcagagagatacagacggccgggctcacgaaccagagatcctgagaggctcttccaggctgcaggggggcccacacccacccccctcttattatgaattaattgtggtttgttctgatttgaagatggctagtttcagccaggctcatgaaccagagatcctgggttcaaatcccagtgactcctcgaccttgttgaattcaggtttctgcacatcagcctctcctctgtaaagtgggggcaccactggttttcttggcggccccctggagagtgagtgagtgaagcctgtggtgtgccgtcccacggttctcactgctgcttgttcacggagctggagctcaacttgtaaaccttccagcaaaagagagacagggctgacgctgcctcccatcttcttacgatccctacaaactcgctctcctcctcttaaaatatactccccaagtgatgcatttgatggagctttggaaaacggtgcctggttttgctgtctagctgcccctcctctcagaggccgttcctgtcactgctggaggaggctgtgagcacagacccgctcccaatgggcctatctggcaggagctcagaagcagcgggacttgcagaaatatgcagccctccacacgtgctggaaattagtcatcatcacaaatgcgtcagggtaagcaaagagggaagcagaagtcctttctgatgggatgatcgcaaaagacactagccatcttcaaatcagaacagaccacaattagttcttaataaggaggtgggtgcgggcccccctgcagcctgggagaccctcctgtgttcccaccacaacctcaattctactcgcccttcaaggcccctggagctgcacccccgcagagctgcactgacctgggtttgctcccttcgcccactaagtgcggttgcctgtttgaactctgaattattcccttcattttcctgccagagtgggatgattataatcctgctttcccaacaagactgaagctccttcaggttaaagacctctaataagcagtacggggggttgttaagtcttca

SEQ ID NO: 91125 - DNA, 1621 bp, Homo sapiens
cagttttcagtggctggaggggtttgggaggaaatctggccccatcccttggggtctgggatccctccccacccgctccactggcttggggggttcccgatccggcctctccacgtgcccactgggtccggggctaagctaggggtgagggggtatcacagcgaggcttggctggaggcccctgaggacctcagaggacggaggtggacacgcagggagctgccaagctgaagcaggagcccacgccactgtcacgagggaggccaggtgggaattcaggagaaggcctgcgaatctctgagagctcccacagacgggacacagcttcactctcaccacatacaaacgattctgcrctctcttggcaaatgcatgggaattaataagcggaccttcaaccagttacaccaagatctatgctcacttgtggcaggaagataaactccatgagtcacagcaaggtggcccgcaatgcttgcagacctccaacaggaaatgcgactaaaatcagcacaggccggccgttgcactgcctgttggcaacacagtgggggccgatcaccaaacctgggtcagagagatacagacggccgggctcacgaaccagagatcctgagaggctcttccaggctgcaggggggcccacacccacccccctcttattatgaattaattgtggtttgttctgatttgaagatggctagtttcagccaggctcatgaaccagagatcctgggttcaaatcccagtgactcctcgaccttgttgaattcaggtttctgcacatcagcctctcctctgtaaagtgggggcaccactggttttcttggcggccccctggagagtgagtgagtgaagcctgtggtgtgccgtcccacggttctcactgctgcttgttcacggagctggagctcaacttgtaaaccttccagcaaaagagagacagggctgacgctgcctcccatcttcttacgatccctacaaactcgctctcctcctcttaaaatatactccccaagtgatgcatttgatggagctttggaaaacggtgcctggttttgctgtctagctgcccctcctctcagaggccgttcctgtcactgctggaggaggctgtgagcacagacccgctcccaatgggcctatctggcaggagctcagaagcagcgggacttgcagaaatatgcagccctccacacgtgctggaaattagtcatcatcacaaatgcgtcagggtaagcaaagagggaagcagaagtcctttctgatgggatgatcgcaaaagacactagccatcttcaaatcagaacagaccacaattagttcttaataaggaggtgggtgcgggcccccctgcagcctgggagaccctcctgtgttcccaccacaacctcaattctactcgcccttcaaggcccctggagctgcacccccgcagagctgcactgacctgggtttgctcccttcgcccactaagtgcggttgcctgtttgaactctgaattattcccttcattttcctgccagagtgggatgattataatcctgctttcccaacaagactgaagctccttcaggttaaagacctctaataagcagtacggggggttgttaagtcttca

SEQ ID NO: 91126 - DNA, 1377 bp, Homo sapiens
gggttggggctgggggcacccgtgtggctgaaagtgtgcacagacacgagaagtggccccggtcactgaggactggcttctcacccggtggggacctctccaggctcctgtcccccactgtgagcattaagacccaactcagtggggggcacacatactgcctgggaccttctgtgttttgctacatagaatcatttgcatatttacttccactcttaggaggcggcaatgtctctgaagtggcatttatttacacactgactgattgaccaaacacatttttagggacacgggaagcatgcttatgtttgtacaacatgaagggaaaatgcacgcagcaaacttgaatgcccagcatggtctcactctgcacgacagtgcgcacagagacagcaggatacaaccccatcctgacagcgacgtcttcccggcggtggggtcatgggcgttttaaattatcttgtttatacattttaaagcgagccttttattttagaatagttttagatttacagaaaagttgcaaagataacacagagcgatcctgccctgtttcctctgctgtttacatcttaccttagtatggaacacttgttagaataagtgccaatatgttgttattaatgaagtccagagttcattcagatggcctcagtttttccccaatgcctctttcccgtcccaggatcccacatgacatggagtcatcatgtgtccttaaacacctcttggctgtgacggttgctcagattttcctcatttttggtgaccttgatggtttgaggagtacgggtcaggtattttgtaggaggtacccttttttttcctagaaaaatcgtctgtttttcttaaagtgaaacctggtgcctgagacacagtgaacyccacctgtactgtgggttttacttaaaatttcctcctgcaaagtacagcaaacttctcagaagagcagcccggtcacgtgctgctggccagcgatctcccgtgctcccggaaaaccctccatctccatttggattcctggcttccaataagagctaaaaataaatcaaatctacttacaaagtagctgttgagtgagctaatttaacaccacgttatctgaagacggttattataatcaagatggctgcgccttgttctaccatctcctaattagatgtggtaccaaaagctattctagcttttagaaaaactacctttggggaagatgtatatatttatagatgtctgttgtgtatatgtgtatttgtatttatttttagttgttgcatctgactcaagaaactacattctgctaaacaatctcacacatgttgcaaactcatttaggaaaacaaaacactcaaaagtctcaaaacggggcatatttcactg

SEQ ID NO: 91127 - DNA, 1148 bp, Homo sapiens
ggaacactgcctttactgttggcctgtattttaaaaagaggtgtgaaaaatcacagcgaatggaatttattatyagacatgatggaaggatattaataaccatgtattaaagacagcacttggaataacaaataattgttgagataaaacaataactagctgtgtcatgcttggagaagagatggaacaatttagagaacacaatgctagcagaaatgggtattataaatgatctcatcaatttttcacgtgctgtatggttgatatctttcaggtgttctgctttgagaaacccttaagaagataaagcacttaaattactagaaacagcacacaatgccttgtcccctctgctgactgataaaagtaaattaaaaatatgctcccctgttctggcagaatctcttttgtaaagttagaaagccccaaagttaggaaggcaagatgaacaaaaagggtcttggcttgcaagtgaagcaacctcataaagcagacttcaacctgattaaatcttaccattgtctacagaaattccaagcacacttgatatctttctcacactgaaaacacagaaaaagtcactttgttattggatgcttttccacaccctcacaaattgattcatgggctttatgttttcacagtagtgcaaggattaacatccattcagagctggaatgtcagaatgtggacgcttgatcaattacatgcacaggatcagaaggggtgaaagaaatccatcccgaatgttctcagagttgcaggggaaagccaacattaagtcggttctaggtgatgaatccaaattttatgtttagaattcttgagaacggctggctatggacccagccgagttttgttttagggatgcagaaagggtcaggcacttttaggtttagtgctgtagttgagcacgttccacattgtgtcactcccaaatgctgaggacgctcctccaaggaagggaactgtgccatgagctcttcatcctacttgctttgagctagaagaaaaattgagttggtgatgtggtaggtgtggcctagggctctcccctctgagatggcacatgagatggctggctgttacgatggcatgtcatgggacttactgtggttaaaagtgagagagttatccaggctgcccag

SEQ ID NO: 91128 - DNA, 542 bp, Homo sapiens
tttctcttcagcagatatctagacgtggaactgcagggttgaatgaatggttctgtctgaataatctcccttactcattcataatgctctccatcctcatcctcaatcccaccttatcctcccaatgccagatcttcatcagcatcaccataaaatgtcatttcatattattgcagttagagagctaaacaaataaataaatcaaaatttaaaatgtctggtgaatctgttccacaggctatttatacttcaggggataagcagacttattgatataaaagtttccmagccactctgctaatctttatactctctgtcatctcgccactcctactaaagaacctactgtacctctctaggtctctaccagttcatctgctgcttggcttcacagctccccataatctcatctttgtttctgagctaatcttgtttttcactctttcccctctaatctcaatctatccagcctgaactctgccccagcggccttacctgggcctgagctatttcctctgcctggtactcattctcctatccct

SEQ ID NO: 91129 - DNA, 863 bp, Homo sapiens
acaatataaaggagctttcttctttaagaagtcttgctaaacattgtaacacatccagactaatactttttatcttttcaccccgaaaacttgcccaatagaagttcattgaattaaatatcaagaaagcacaaaatagtgttttatacataaaaactcacttcatgtaaaaagcaaaaaaagttaaaaaatgtaatatccaacattctcaagaataaatattggggatacagaaatccatcttttaacacttaaaaagttaggaaaatgggaggtattgatgatcaagcatagacactacttaacattttaaaaataaagaattctaattgtgacaaaacagtttagaggtctgagccttccctgacaatcgaagagaatatatttgccaaaattttttttaaaagtttgaggaccatgagacaaatgaggctagaaggttgtcatgttttgaatgaccatttttattttttaattaattaattaaataatgtttatttatttcttgagatggagtctcgctctgttgcccaggctggagtgcagtggcatgatctcagctcactgcaacctctgcctcccaggttccagcgattctcctccctcagcctcccaagtagctgggattacaggcacccgtttaccatgcccrgctaattttgttttttgcatttttagtagagacggggtttcactatgttggccagacaggtctcgaactcccgaccgtgtgatctaccatcctcggcctcccaaagtgctgggattacaggtgtgaccaccacgccaggcctgaatgaccattaaatactaactagaaataataagaaatgctatttagaaaggagggtgagtggggctcc

SEQ ID NO: 91130 - DNA, 619 bp, Homo sapiens
ctcccttgggcctctccccgaagcttccagctcaatgctgaccagagcacaggctgcctgtgacagtccttggggtgacctcccttatcaggaaaaatgcagaaaacctattaataccttagccttgtgattgttaatggtcacaaaactcctttagggtcctttggactcagcacctttatggtctcactttgaattttgaacctcccacctccccccatcccccagagtaaggcaaatggtcttctgattgttcctgcrgagggaaggctccacaggtaagcacacgatggccaggaagcagagctggagcctgcctgaaaggctgtggagaaatggagggagggctgccctgaggactctgtctggctttgaagttttctactgtttccttttcttctgtgcactgttttaggatgatggggtgatagttccaggctggttgaggatggatttggagacagtcctttgtaccctcagtgagcaagagtatctgtcaccctacctcagcagttgtctctgtcactggtccaagcagctggttcctacacaaggtcaagatcaactggggagaagcagactcctgggtctatcccattagtgaggacagctgcctggg

SEQ ID NO: 91131 - DNA, 654 bp, Homo sapiens
acagtcttttgcacatttttcattgacttgtccctttctgatcaatctgtagagtctctatagattctaagtcttttgtaggatgtttgtaaaacgtatatagacatacgtcagagatatttctagttcagttctggaccactgcaataaagcaaattttgcaatgaagtgagtcacataaattttttggtttctcagtacatataaaagttatgtttacactataatcaagtctactaagtgtgcaacagcattatgtcttaaaaattaatttaaaacactttattgctaaaaaatcctaatgataatctgagcctccagagagttataatctttctgcttatgagggtattattttgatgttgatggctgctgaccgatcagtgtggtggctgcttaaggttgggttggccaaagcaatttcttaagataacaatgacatttactgcatcagtagactcttcatttckttaaagttgtctctgtagcatgtgacattgtttggtaacattttacccacagtagaatttctttagaaatgagtcagtcctctcaaaccctgccactgctttatgtactaaactttattctaaatcctttgctgtcttttcaacaacattcacagcatcttcacccaggactagattccatctc

SEQ ID NO: 91132 - DNA, 1232 bp, Homo sapiens
acttttgcctcagagtattgggtgaaaataaaaagaagtgttatttaaattagacactctcaagtctagacacatccctggttgcttgaggaaaggaaccatattttctaaaaggtatcatatctgctacatgaaatataactagaagagtgctactggagtggtagaagagaatcagagatttagttgaaaccatttatgagctatctgaagaagctaagtccaaagaggttagcttgacttgctcacatcaaagatctgctcaggaacacagccaggctagagcccagctcttctgattctgattagtgctcattatacaacaacatgctaaattattttatttttaaagaaatgagcctaggttgtaaacaaaccacaaattttaatcatttaacaaatcttttttgaaagcttgtagtgaacatggcactgctaaatacttttggtgaacaaaaatgtgtcagatgtcttttcaagggattgttagttgaaaatagactgaaatgtatctttagaaagcattacaaagatgacttgcaaataactgggaaaaaacccacaacattaaatagtacatttctaaaaagaagtttattctgatgaatttacagaagcaaatgacaggtaaaattgaagcagcattagttatgcatttaggaaatatatttaatctatttaagtcaaatcaataacctgggaaatattaacctagaatcaatactgcaaaaccattttgtataaaagtgaatgacaccaactaaagccatatataagaacattcacagctatcagatcagaactctcaggcagaactcatcatattttctccaaaaagcagccmccatccctaatgtacctaatcataataatgacaccacacttatattagtcatcagagctccgaaaccctaagtaaaaacttttgactcatttttattacttgcactttctttccattctctttcaatgcttcatcagtctcttcttttacactcccccataattttgtgttgtgattattatgataaccttctaattagtcttcctaccttctctcattagtcttgcacatcactattaggtcattcttcccaaagcactattataaccatgtcattcttttgctcaaaagctttccaactttctccatttcctacaggataaagtccaacatcccagactgtcaccagtggcagagccagatattaacttcaaaagtaaggaaacct

SEQ ID NO: 91133 - DNA, 692 bp, Homo sapiens
cacacactgtgcaagacctttagatcaggcgcctccctcggttttcttcaccctgtgcagcaggtgctgttatttccttttttaaattattatttattwttattattttttgagacaggatctccctttgtcactcaggctggaatgcagaggcatgatcactgctcactgcagcttcgaccacccaggctcaaaggagtctcccacctcgggtgctgccacacctggccaatttttttgtatttttttggtagagaccggggtttcaccatgttgcccaggctggtcttgaacttttggactccagcgatctgcctgcctccgcctccctaagtgctaggattacagacatgagccattgtgcccgtcctgttgtttcctgtttagctgaggaggaagggttagataacttggccagtcggttgtaggaccagcagtagtacagtgttgggcacgtagtaggtgtttaatacatgaccgatgagcaaatggctccagatgtctctggttccataggcagccttgaatagggctttacacacctgatgagaatgacagcctgtgttgactgagccctgacttgtgtccaaccctgccatagtgccagtgccttgcatgaattcaataatttgagcctagcagcaaccttaagaggtaggtactgttacctccccgtttataaatgagaagac

SEQ ID NO: 91134 - DNA, 692 bp, Homo sapiens
cacacactgtgcaagacctttagatcaggcgcctccctcggttttcttcaccctgtgcagcaggtgctgttatttccttttttaaattattatttatttttattattttttgagacaggatctccctttgtcactcaggctggaatgcagaggcatgatcactgctcactgcagcttcgaccacccaggctcaaaggagtctcccacctcgggtgctgccacacctggccaatttttttgtatttttttggtagagaccggggtttcaccatgttgcccaggctggtcttgaacttttggactccagcgatctgcctgcctccgcctccctaagtgctaggattacagacatgagccattgtgcccgtcctgttgtttcctgtttagctgaggaggaagggttagataacttggccagtcggttgtaggaccagcastagtacagtgttgggcacgtagtaggtgtttaatacatgaccgatgagcaaatggctccagatgtctctggttccataggcagccttgaatagggctttacacacctgatgagaatgacagcctgtgttgactgagccctgacttgtgtccaaccctgccatagtgccagtgccttgcatgaattcaataatttgagcctagcagcaaccttaagaggtaggtactgttacctccccgtttataaatgagaagac

SEQ ID NO: 91135 - DNA, 662 bp, Homo sapiens
aggtttgttacatatgtatacatgtgccatgttggtgtgctgcacccattaactcgtcatttagcattaggtatatctcctaatgctatccctcccccctccccccttttttttctttttgagaatgagtcttgatctattgcccaggctggagtgcagtggcccgatcttggctcactgcagcctccgcctcccggattcaagtgattcttgtgcctcagcyttcctggtagctgggattacaggcgcctgccaccacacctggctaatttttgtgttttcagtagagatgggggtttcaccatgttggccaggcttgtctcgaactcctgacctcaagtgatctatctgccttggcctcctaaagtgctaggattacaggcgtgagccaccgcccccggccgatcatcttctgtctttctagagaagaagcagcccacttgcatctcttgagcatttacttcatgtttctaaatatatgtttgtattgtcatgtctttattcaccaactttaggggtcgactatggacttccattaatggtgaattagtgtaagatttagattagagaagatttttgttctcttatgttcatcctgccccaatcagaatgtatgttcttggccagggccagcagctcatgcctgggaggccgagatgaga

SEQ ID NO: 91136 - DNA, 746 bp, Homo sapiens
ttccatatcagataagcatcaattattcaatagtttatgctgaagagtacaggggaccaagagaccacccaaatgggttcatgagcccatcatgccacttctttgttggatctctttgggcacctcactgaatttttctgagctaggtcctctgcaccttgcttgtctatcatcaaagagtcacctgtgaggactataataatataagaggaaagaaatcgtaattattaaggcatatgctgaaccacatacctccattggcaacattaaacttcactccaaactctccccctggtcctccagggcagtgactggctgttagaatgattccaccagctgccttgatcttcctgataatgcaggagaccgcaggtgtcgacaagatgccattctgtccaataatcagtcgtccaatctaaaccatccaaaaaaaaaaaatcaatccagttgcttgggattaaaggcatttcaacaggaaagtgccccaggctctgttaacatacagccaatcacttgataaaagaaacagagtaggctttagattaggggaggcagggtagggggagcactgacattgtctctcctatctaatgtctctaagaccatttggtgcacctgcatctagtagtcaattattaacctgtaaataggatatgcctcattgatcttcagtagtttgaaacatctgcttctgataatcgagggcttagcttgaatcacacargaagttcttagtttgctactga

SEQ ID NO: 91137 - DNA, 757 bp, Homo sapiens
aagttcagtattcctgagtctaattcaggatgccaaatcaggagacaagcacattctcatcaattttcaatcattcaagaccaattttgcttataattatccagttcttttagaccacctttctcctgaagccagccttatggctattcacttcactttagcataagcccccaagaaggtgaacaaaatgaggaaaagattggttaaagttggctgtttgaaattctgaaacatgtccaccattcccttcacccatgcccacccctcttagaagtagtactttcagattatttaagagtcgatgcttctatgtggattttaatttgtcatctgtcctttataacagstagtaggtttaatttgaccctattttaagcatatattgacctatgctaattatctgttaaaataaattccactcttagagttaataaagtgtgtttgtcatagaagacccattgaagtaagaagctgaggagtccttatggtaaagtgggacaagaaataataagacataataattttcccatgcaaatcaacaaccgtagcttcaaaaatatcctgacccacaacaagtattggacaggccatgtttctctcactccctaaaaaattggctcgggaagaagtatgagagctcccatagctctcccaaggctcgttattctccatcactccacaggaacagcctgtcagagaagagtgaaagaccatttgtcaacctctcttcaactccctgattctagccaaacttcat

SEQ ID NO: 91138 - DNA, 514 bp, Homo sapiens
atccctatgtatctcgattttgttatctaaaagatcacatgatggaggatgtaagcaagtagcacagccaagacccagtttacagtgtctagtacctaacagactcttgacacgtttcacttgcccttgagtcartctttccatgtcactgaatattcttccacaacatgattttaatggatatagtcgtccattgtttaaatgtaccattattgaccaatgtaaaaatgttcttttacctcaaatttttatatgtaaaacaaaaacatgtttgaggactaaacccacactgtagtataaattaaactggatgtaggccaggcatggtgagtcacacctatagtcccagcactttgggaaaccaagacaggaggatggcttgaagccaggagctcaagagcagcctgggcaatacagcaagacctcatctctacaaaaaaataagaaaaattagctggccatggtggcgtgcacctgtagtcccagcttcttgggaagctgaggtgggaggatc

SEQ ID NO: 91139 - DNA, 514 bp, Homo sapiens
atccctatgtatctcgattttgttatctaaaagatcacatgatggaggatgtaagcaagtagcacagccaagacccagtttacagtgtctagtacctaacagactcttgacacgtttcacttgcccttgagtcaatctttccatgtcactgaatattcttccacaacatgattttaatggatatagtcgtccattgtttaaatgtaccattattgaccwatgtaaaaatgttcttttacctcaaatttttatatgtaaaacaaaaacatgtttgaggactaaacccacactgtagtataaattaaactggatgtaggccaggcatggtgagtcacacctatagtcccagcactttgggaaaccaagacaggaggatggcttgaagccaggagctcaagagcagcctgggcaatacagcaagacctcatctctacaaaaaaataagaaaaattagctggccatggtggcgtgcacctgtagtcccagcttcttgggaagctgaggtgggaggatc

SEQ ID NO: 91140 - DNA, 514 bp, Homo sapiens
atccctatgtatctcgattttgttatctaaaagatcacatgatggaggatgtaagcaagtagcacagccaagacccagtttacagtgtctagtacctaacagactcttgacacgtttcacttgcccttgagtcaatctttccatgtcactgaatattcttccacaacatgattttaatggatatagtcgtccattgtttaaatgtaccattattgaccaatgtaaaaatgttcttttacctcaaatttttatatgtaaaacaaaaacatgtttgaggamtaaacccacactgtagtataaattaaactggatgtaggccaggcatggtgagtcacacctatagtcccagcactttgggaaaccaagacaggaggatggcttgaagccaggagctcaagagcagcctgggcaatacagcaagacctcatctctacaaaaaaataagaaaaattagctggccatggtggcgtgcacctgtagtcccagcttcttgggaagctgaggtgggaggatc

SEQ ID NO: 91141 - DNA, 1398 bp, Homo sapiens
  misc_feature (1)...(1398): n = A,T,C or G
actgtttatgtgtctttttaaagtcagggaaacttttccagaagtcctcctgtgccatatatgtcctattttgtgtaaattcacctttgctgaggactaggtacctgaataaagtcatgattctcttaatatgaaaagcagtgggaatgattttgggtaggcaactgtcaacacctcntaattcattcataggttatttgcccattagccgggtgtgcctgtagtcccaactaccccagaggctgaggctgnaggattgcttgagccanggagttcaagaccaccctgggcaacatagagacatacagcgaccctatctctttaaaaagtatatataaatatatatatacacacacatatatacacacatacatgtgtgtatatatatacacatatatgtagtgtgtgtattaaatatataatgtgtgtgtgtgtgtgtgtgtatatatatatatatgattttcccaatatttaaggacaatctagaattctagaattatggatatttccctgaaaatgtcattacttttggatgtcccttgcttattacaacttactcacttgcttatcaataaacatttattgaaaaccttctctgggtcagatagtgtacgaataatgaaattcatgcttactgtcaaaaaacattttatgatttagtgacagagtcagatatcctcagcaacatttacaaaacaatgcatggaatgccacaatagaggcaatgaggatgcttagaggaaaccacttatattggcctggggaatcggaacttgtggctgtaataaagctttcttctcttagattatgaatgttgctcatggggagcacttaaatgagctccctgagaacagggaccacaacttctttgtttttattttttagtctgagtgtagtgctttgactatagtagttgatcaatgtggtgagcagaaaaggtagcttccctacattacagctagtagtggtgtttgctggacttcagcaggtctttgtaaattcaaagcccaggctctctaacaccatacatagcactttgttactcacaatgaatggtttgctayagaatgctttctcttttctaatctgcttcttgtctgattgtcatgcaaacttgaatgggataataaatgtaaagtaattagcatagaagaagcactcagtgactattacctgctattattactttataatgtagtctgcattatttttcttcctttatttaaatcttcaactttgctgaattgcttattgaagaaaatgctgtctctaaacataacattactggcagctgaaagtgaaccttacacatgatgcttcatggtatctgagagtcatgaagtttacaaagacatttctggtcttattctgataaatatcacatgctaatatttccta

SEQ ID NO: 91142 - DNA, 784 bp, Homo sapiens
gtgggatccctgatttatagctagtcagtcagaagcataggtgacacagcctggggctagccattggcatctaaaggtgggggccagtcttggggactaagccctcaacctgtggaatctgatgctatctctaggtacatagtgtcagaacataactgaattagaggacacctagctggtgtcaactgcagaattgcttgcttgcttgttggttggggagaaatccccacacatttggtcacagaaatcatctgtgttaattgttgttgaaagagtagaaaagtactttgtgagttttgttttccttccaaactatgaattggtttcagtgaggtagggtttgctagaatggayttggctcacagaaacatgtggtttgggaagagaaagaatgaaagtgacagcagcaggaggcagacaaaatgcctagacagataggggcgagtcctcagtgaaattgaccttcaagctgaagacagtttaaagcctacctacatgtcccgggtaaatccatggactggattgagaacctgtcttcctgtttggtgtgctttcctctgattgatccccgcccctcacctattttacatatacctacccttccctaattggttttctacactgttgtgcccacctttgagtggtgtcttcgctttaaccttttctgcatactcacaaaccaatcagcacacatgccccattctgaatccataaaataccatggacccagccacactgagagagacaaaccacccgactgcaggggtgggggggccacccgtgt

SEQ ID NO: 91143 - DNA, 683 bp, Homo sapiens
tttgccaccctgcttcagtcctgcagtcttagtttatttatctccaacatgttctttaaagcagtcttgggagccttccatgcccaagcatagtgttgtcaaagcctctttaatacagctctctcaaatcatttgtttcaatattttaaatatgttgtactatctttcctcccaaccaggctctgagttctttatcagcaggaaaagccttttgtaactgtgtatcccatcaagctctcaacatgtggcaaataaataaataatcacggaaagtgagaggatagtaatttctatactccttctttctcttcttctgaaaaatatttcttatgagtcattcctctatggataaaaggcattcggtacagtggtgcagggagacagtctacttggcaaatccaagccctgtcaatgtcaagttccaggttctttgtcagtgataattgctcatgtaccctggttcagggtgtggctgatggtattcatcccacaaacattctgtggctgctgggtatcaggactgcagctgggaatgggacaaagagcttccttgccctcaggaatgtacagagtggtcaggaagaaagctttcaaaagtcagtctgaggagagagtgaaaagaaagagcyacaggagcacagagcagaggaagccgttctgtgggagagaaagaggttaggaaa

SEQ ID NO: 91144 - DNA, 650 bp, Homo sapiens
gggtgagccttagagatgggcacagacactcatgtctgtgagctargaggtaatttagtcaagatagataaagagggaaatcagtttcgtgtttcaaacaacctttctggggtctagggagaaaagctagttacatgttgattgaaatatgtcaaatatcattgatcagccacggctgaaaaagacacatttacgttggaactaatcaaaaggcttattctttttccttcattttcggaagattgatagtgtttgaagattcccttaggagtgcatggcagcaggcaaggtggaaggagggagagtaaagggactagagtaggaaaaatcagccacagggtgttgtagaacccgaggcaagaggaaagatggcatggagggcatggtatttctgggaaaggaaagaaaggtatggaaagggagctattttgaaggggaagctgctggtaactgagaatgcatgaagttgaagttttcactaaaacatagagatttaaacagggaacatgctgtgaaaaatgctcaaataagatgaatatcaggtgccccagtattgcttcttcccctttttaataatcataataatctaaataatctgacatctgttcttccagttaaatcatacccaaacagcttgcttctcttttttt

SEQ ID NO: 91145 - DNA, 607 bp, Homo sapiens
tccagtgctatgttgataaactgatatttgttctctttaatctgtagcgccttgccccagtccttcccagcagcaggactcattcattcaacagaatgctcattcattcagcatactttagtatctattttatgccaagcactgtagtcagagcaggaaatatagactcagattccagcagagacagaattacacagtattagaaccatatttattcatccaactgctatgagtaaggggtgtagaagacactgtaragacacagagacctactgatggttagagataggctttttgagaaggtgacttctgagttgaattttgtaaaaaagaatagaaatttacaagtcaggaaagcatttactaggtagaggactgagagagtgcatttgtagagtattaagatcagtatgaatgggacagggtttgaagaagtggcgatgaaaaagtctaggaactcagagtcataaaagacttcatatgttcccaatactagtgcactcaagggttttacacagggcactaacgtgttcagaatctgattttataaagaccattttttcaatcagtgtggaagatagaaaatagaggcttttgctagaaatag

SEQ ID NO: 91146 - DNA, 831 bp, Homo sapiens
cacccccatcccatcccccaccaaaccccatcccagtggagggtaagtttctgaaattagaaaaacctacaatgccttgtcctgtaattctgggccagaagttctcagttggacaggttatgacattttgagtaggagaattctgtaaaactggccttgccaatgcattacaagacttttggtatccttgaccattgcgtcccccaacactaaatgccaaaatagttacacttactttttaatgctctcctctctacatgtccatttttcattgttaccaactgtatttccatttcctcagtctcactattaccttccttcataccttctttgaatgttttctttttcagacatttaataattcaaatgaataagaattagtgacattattattgggatcaataattgatgaactgtaacaatagtagggagataatttgaggtaaaataaacccttcatcttgtcaaataatataattcattgaactatacattaaaaaaatattatctgcaaggctttgttccaagagcagcacagagtgcaaagtgggaaattttggtgacttgaatttcagtggaaatgctgagcaactcctgtttctccctcctcttcctcygaataatctttaaaatgttctttttagtctagcttttctatctttcgccttgcttccccatgtgattgctcaagatgagagtgagaatctctcttaaaagtcatcttagacagtcatctctagttctgagtgaccagcactgctacaagctaatttatccccaattttacagtttgtatttgttaaaaacttgagtttctgtcattctgtttgg

SEQ ID NO: 91147 - DNA, 438 bp, Homo sapiens
agatttgtgaggctgtattttgtataatttgggagcagccatttaagaaaaggaatttttttttaaaagaaatcttttttatttttaaattttagcaaaacacatggccaagtgagcacattgccagtgcccctcccatgcaagttagaagtcctaatgcttttgctcattagcttcatggtgartctgtctctgccctttgagtcgttcatcccataaattaaccacagctcttttaaaaaggccaaactgtcaaaaagtataagcccaagtaagatattggctatcacatatgcatgctggtctggtatttacactaaattaatcagcattgtcttcattaagtaagaaatagttattgcatgcctcttttgtattaggtgctgtaataggcttatagttaagggtgcttatcttaatagaatatcacacctgaag

SEQ ID NO: 91148 - DNA, 832 bp, Homo sapiens
tgttcctccgccaccgccccttcagggatggggctgtaggagtcaagccctgggagaagggtgtggtgaggcccagcaccttctcccacggggctgtcgtcactgaggaaaacagagctctccttggatgagcggctgctcctaatggtagccagtccgctgtctgggctaacaaggtctacattggcatccacctgagcctggttagaatcattgagatctggagggttctctatgaaattcacagagctgggttgtggctctatgtcagaaccatacaattccataatcccagaagacccctgggagaggggggcactgcctgccacggcttctgttgaggatgtccggctattggagaccatctctggacacctcctgttgatgacttccttgacaacgagaaccacctgatcacaagtcactgaagggtcctcttgttggtacaccaggatctcatcacagccacagtcaaagggctccagttctaggcaagggttctgacactcttccagctcacagcaaatctgtcggaaggcacaggaatttgtgtcagcactcaagcactgttgcactttgcaattgcactttgcaatttatctcgcttaatttttaaatataaaattaatctgtgttcatctgtctgaaaaagaagatctcaaacttagaaagttctgattactgtaccaccaaccctttctccaattctatccaactgtctctctgtttaattcaaaatccaggtgctcgattttgawggctcctgaacgtttgggtaaaggagtttaaaccacctattctttcctaactgtaatataataccatcttccaa

SEQ ID NO: 91149 - DNA, 896 bp, Homo sapiens
tgcatatatatttgtgtgctttaggggagctgccctaggcttcacttgggttgattcatagtatacattataagcaccattttacctttctcaaattaaaaaaaaaaaaattcagtaacaaactatatccctggttccagggatttctggtaagcgattatatagacttatatttgggaaaggctcagtggtgcttgccaaccccattctttttgttatcatcattcatgatagcattaaagactattaatagtgtcatttattgagtacttcctgtgtttataggcatggctctaaaccgagagcttgaggctgtcacttttcacatcgagccacatcactactyaatgacagagctgcatgggctacagctggtatccaaaccaggaattctactcctgcactctagcatttatttttacatctactatatatttgtccatgagatttttctcttcctccttagtatcctgttttacttctgcagtttggtgttctttgtggaaaatgggataagaatagtggaatatacgaggtaatccatgcgtaatgtagtttggttgaggcccttaagctcttagctccctccccgtgtcagttttcttataaaattggattccaacaccagctctgcccacttcacagggtgattatgaggctgtgataagataataatatatttcaaagtctttcaaagggctttgaaaggttaatgtgctctatgacacatgctacctttgacttcatccctctaaaaatcttcctaaagcaaagtaatttcaattctaaaacatgagaagtatcaaataattcttttgtgcttaatgttcagacttctaaacagaggttacctagagttggttactcagaagaagaaggaagatgatgaaagccat

SEQ ID NO: 91150 - DNA, 896 bp, Homo sapiens
tgcatatatatttgtgtgctttaggggagctgccctaggcttcacttgggttgattcatagtatacattataagcaccattttacctttctcaaattaaaaaaaaaaaaattcagtaacaaactatatccctggttccagggatttctggtaagcgattatatagacttatatttgggaaaggctcagtggtgcttgccaaccccattctttttgttatcatcattcatgatagcattaaagactattaatagtgtcatttattgagtacttcctgtgtttataggcatggctctaaaccgagagcttgaggctgtcacttttcacatcgagccacatcactacttaatgacagagctgcatgggctacagctggtatccaaaccaggaattctactcctgcactctagcatttatttttacatctactatatatttgtccatgagatttttctcttcctccttagtatcctgttttacttctgcagtttggtgttctttgtggaaaatgggataagaatagtggaatatacgaggtaatccatgcgtaatgtagtttggttgaggcccttaagctcttagctccctccccgtgtcagttttcttataaaattggattccaacaccagctctgcccacttcacagggtgattrtgaggctgtgataagataataatatatttcaaagtctttcaaagggctttgaaaggttaatgtgctctatgacacatgctacctttgacttcatccctctaaaaatcttcctaaagcaaagtaatttcaattctaaaacatgagaagtatcaaataattcttttgtgcttaatgttcagacttctaaacagaggttacctagagttggttactcagaagaagaaggaagatgatgaaagccat

SEQ ID NO: 91151 - DNA, 743 bp, Homo sapiens
tgtgtttytaaaaaagtatttcagaaatttctactgaaagtttggggattgatagaatttaggattgcttatttgtatttgcttgatataattcacatattgttgctgtagatgaaagttctataaaagagcatcatgcctattttgcattagctctagaaacattgctgctgtttgaattcactatcttcctccctcctcaatgagatattttaatttaggcttcatttttagcctataaaataatgttcagtaaaatgaggttttatattttccttttgacagcagatcattgaactaaacatgagaacttccggttttgttcttgaacttttccctgagagaggctcgctagttaaggaaactttaaagatttatgaatttttttatgattctctgaaagtgattttggaaaaatgtaccaaaagtgatgaagaggtttaggaaagagattttctgactgtctgcttgctatcatataggaaagaacttaaagagaaaagggaggaaaaatcctagacactgtaggaacatgggccagagaagtatgctctgtgtatctcagagatgatcctggataaagtgtgactttcaacattcataagaatttcagctccaggaattcaggggagaaggattctcagtccattttgctgtcttgctgtttgtgaccatgtgtatatttgtaacatcattcatgatctccttttaatggtaattgtctaagattatactctgtatga

SEQ ID NO: 91152 - DNA, 1288 bp, Homo sapiens
gtcatgatcctgggattgaaatatataaacagaataagtttagagcaactctgagaatagaattggggtcatggtaggcttttccaccttttgttcctacagccrgtatttactcccagactaaaggcagaaatgcctgcttaggagagaagctagggctcctaaaacaatagaggccctgagatacggcccagttttgtatctgatgcttgagtaggcctgccaatttcccttatcattatttatacccttaaagaagtcaccaggtgatgtatcttacctgtagtcagaccttgcaagaagccctcagaccctggagaaggaccaaaaaatgagagtaatggtagaagaaaaccttgtgaactctctgaataaatcatccatatgatttatttataaactcatactccaagaaaaagaatcaaaggaaaatgaaagaaaagaacagggtctaggagggagtgaatagaattgatcccagaagaaacaaggataatcggacgggcatggtggttcatgcctgtaatcccggcactttgggaggccgaggcaggtgaatcacctgaggtcaggagttcaagactacctggccaacatggtgaaatcccgtttctactaaaaataaaaaattagccgggcgtggtggtacatgcctgtaatcccagctactctggaggctgagacaggagaatcacttgaacctgggaggcggaagtggcaatgagccaaaattgtgctattgtactccagactgggcaacaagagtgaaactttgtctcaagaaaaaaaaaaaaaaaaagaaaagaaaagaaaaaaaagaaaagaaaagaaacaaagacaatccagagaactaagaggtactttcaaacctctattcagagttagaagagaagaaattacattcgcaatttaagaacagactattgttcggaaggtataaaatcagaacatagaatcagttcatgggattaaaaatattgtacctaaagaaaacagttcaatagaactaatttataaagtaagaaatgtctcagtacaaagagatgagaaacatgacagagaaaactagagacagagaaaactagagacagagaacagagattgctcattcagaaatgctatcttctattaggagtctacaaaagtaaaagagagagaaaaaagggggagtttattatatgttttaaacaatgatagaaaaaaggaatatatacatattcaactagatcttcatttaggcacatcctaaggcaatttcagaaaactaagaataaaacaaagacactaa

SEQ ID NO: 91153 - DNA, 1101 bp, Homo sapiens
aatacttttgtctttcttcctttgtttgttttagtcgtttaagattgaacaacatggtgcctttgccagaagttaacaggaaacccaaaaggagatgagccagactggttagttcagaagagaatcgttggggaagacaatgggagctgctgtttgaatgtggccctgagattatttgtgcttttcaatcccatgttaccaaaacacatttcaagctggcctataaatcacaccttgtgcataattttaagtggataaatatttgtcgcccaagtgaatgatgcttccagctttcaaaaaattgtattaagtgtggttattattataatggtatgaatgtttactctcattgccttggctgtgcagatccaatacagtttctttttaaaatagaagatttcatcttcttcattgactcccatctcaccaggtaaagaggagataggagtccatcctctcagttcaggttcttcagaaaaaggctcaatgacaagattgtgagtgcaagtagtttatttgcaagatcatcctgggaagctgcaatgggaaagcaggcagtaaaatatgtgttagcaagaactttaagcaccgtgggcaactggagcccaaccccactggggagctttggaagacagtatagaacatgccttagaatgatccttcctgaggtgaggagctggggtatgaatacacccatcccactctcccactgtcagtagccgagggctgctcccgcagggtgttgattttctggtactttctgacctgctccacacatggctggagtgggctctggctaggagtggaagaggatctaagatgatstgagcaggctgctgcagagtcagctatactcagacatcacattgcatgtttaacatgtcgctgtctctttagatttgaatcctattgttttggtggtatggtctcttttttgcaagtgctctgccttttagattcccttcgtcccctttcccctgtccaatatgaaagcaagccaccagaggagctttctcagcctcctagtgggagaggaatgggcatcagatcttgtctctcttcttctgtggctgatccatggcttgtatctggtgaagtgtg

SEQ ID NO: 91154 - DNA, 933 bp, Homo sapiens
tgcaatgttttggataagtagtatgataagataatttattgtccactttgagactctttgtgaagacaggcactgtttgtaactaagtagtcatgccagaacaacaggcatagacaagaactgtccaggcatacaagaaatttggtcaccttaagacagcaaaatggatttctgtttagagaaaataaaaaccaatagcattgtaattcagttccttttatccttattcttcctttgtttctttatttctggtaaatcccacttcatgccataaattaactccaaacaattaarctacatcttttgtctgctttggaagtttcagaattcttttcatttccaagagctattttttataaaatgtgtttttatgttaatatgcaatgggtttattagtgttattcctgaattaataaatattttttcagtttatcaatattatttaccaatatagtaaagactgatataacccacataagcaaaagctcttttttgtcttcaataattttttttttttttttgagatggagtctccctctgtcacccaggctggagtgcagtggcgcgatctcggctcactgcaagctccgccttccggattgacgccattctcctgcctcagcctcccaagtagctgggactacaggcgcccgccaccacgcctggctaattttttgtattttttttttttttttttttttttagtagagttggggtttcaccgtagccaggatggtctctatctcctgacgtcacgatccgccggcctcggcctcccaaagtgctgggattacaggtgtgagccaccgcgcccgactggtcctcagtatttttgaagggtataaaggggtcctgaaatcaaatagtttgggaacctctgatctactgtaattaaacaccatcatttcaatagaaaactgaaacttagatttc

SEQ ID NO: 91155 - DNA, 1080 bp, Homo sapiens
atgatactctgggtatgtatttactggagtagaacaatgttcatataaggttcygtgaataaaggaggtttaaagaagaggaattaatgaatgatgaataaagatttgcattgtcttcttggattcaaaaaagagtatttctgagatagaaaaaaaaaataagctttcacctgtcagaatcctgcagcaagtatttcagagggaatgaaacctccaagattaaaactcaatattttagaatgacatttaaccttccaaaatggtattatgagtacaagcttaaattcttataactcttgcaaagtgaggcatttacaaccctgttagagatcctaatgaaattttgactacatcttcatttcaagatacagtgtagactctggggccagactgcctggcttcaaaactgggctcctccactagctgctcatgtgccattaggcattttcttaatttataaaagaacaaaaataacagttgcaccagatgctgttgacagcctgcttgtattgcatcagtctctctgaatgcccccccatcctgacccctcttcctgtattactctgcctgaaagtattctctggccacaggccatgcttgccctctctctaggcaggcagaagtgcaggaatcagtgccttgagaacaccatcaatcaacaagagctggactttcagcagggagaccccctgtcttaatggaggaggtgtgacttgtgtttcaaacagtcttacagagggtcctcgaaggatttgagccccagttgctcacagcggtattatgctcattattacacttttcccttctttttcttgtttcacttgtaattcttcttatcacttttcaaatcatctttttgcatccaaagctcttctccaaggggaatccaatctaaaccttatggagtcgtggtgaaaactgcatgaaatgatgcacatttagaaataagcatggtgcctatccaaagcgagtggccaataaatattgactataattatcaccataaatattatacaatcaatattacactggaatatctaacataaacaattatatgaaagaagtttgtaaaaatatgca

SEQ ID NO: 91156 - DNA, 1188 bp, Homo sapiens
atttgagataattttagatgtccagagcagttgcaaaaatagtaaggagagtggccatggccaagagaaaagatcagtgaattctctccccaaaaagcgaatataaggtgaaaaaaatcttcaataaccaccatttgttgctctggaaattggtgaactactcaattttgaataagawcagtggtgatgtgtggcattctggcctgggggactcagccccggatcagtcactatggagattctgctaggactgggctctctgtcttctgccatgatggaaggaagtccacttgacgtggagcagcagtgatgcccactgccaaggtgtcctctggggaagggactttggagaggttgggggcaagtgggagtctaacttttgtctctatgagcctgagtttgtggtcatggttgggaagcacatattcctggttcaggctgcacatgtatgcagtgaagaacagagggctcagtttatatacactctcctggctgaccctggggctacacatgtgtacacaggagactctctggggccccatgaaaagccaaagcctggcgacttgaaaatgacctgatctctgatccatgagcaggggatagaagccttgttggctgaaagtatttgagcaatagactactaagctaggctgacacaggtacaaaccctaggaagtaagtatgaaaacaaaaattcaagaacagcaacaaaaagcacttaagctgaattatcaatggctgcacatcacagaagacaagttattttgacccagtctttgatttagtaatcaaagacttcagagtaactattataaatacattcatagcattgaagttattcaagtttaaagaattaatgtatgataacaatgaattaacaaatcgagagtctcgataaacatatacaaattataaaaaagaaccaaatggaaattttggagttgacaagtaaattaacctgaaatgaagtttcctacagaggggacttcacagcaatttgagatggcagatgaagtaatcagtaaatttagagacagattaatagaaagtatccaatatgaagagcacagagaaagaaaaattgaaagtaaaaataaacattgtctcaaacacctatagaaatatacccagtatacccacataagcatatgagagtcccagaaaaaggactctaagaggaggaaaagt

SEQ ID NO: 91157 - DNA, 1188 bp, Homo sapiens
atttgagataattttagatgtccagagcagttgcaaaaatagtaaggagagtggccatggccaagagaaaagatcagtgaattctctccccaaaaagcgaatataaggtgaaaaaaatcttcaataaccaccatttgttgctctggaaattggtgaactactcaattttgaataagatcagtggtgatgtgtggcattctggcctgggggactcagccccggatcagtcactatggagattctgctaggactgggctctctgtcttctgccatgatggaaggaagtccacttgacgtggagcagcagtgatgcccactgccaaggtgtcctctggggaagggactttggagaggttgggggcaagtgggagtctaacttttgtctctatgagcctgagtttgtggtcatggttgggaagcacatattcctggttcaggctgcacatgtatgcagtgaagaacagagggctcagtttatatacactctcctggctgaccctggggctacacatgtgtacacaggagactctctggggccccatgaaaagccaaagcctggcgacttgaaaatgacctgatctctgatccatgagcaggggatagaagccttgttggctgaaagtatttgagcaatagactactaagctaggctgacacaggtacaaaccctaggaagtaagtatgaaaacaaaaattcaagaacagcaacaaaaagcacttaagctgaattatcaatggctgcacatcacagaagacaagttattttgacccagtctttgatttagtaatcaaagacttcagagtaactattataaatacattcatagcattraagttattcaagtttaaagaattaatgtatgataacaatgaattaacaaatcgagagtctcgataaacatatacaaattataaaaaagaaccaaatggaaattttggagttgacaagtaaattaacctgaaatgaagtttcctacagaggggacttcacagcaatttgagatggcagatgaagtaatcagtaaatttagagacagattaatagaaagtatccaatatgaagagcacagagaaagaaaaattgaaagtaaaaataaacattgtctcaaacacctatagaaatatacccagtatacccacataagcatatgagagtcccagaaaaaggactctaagaggaggaaaagt

SEQ ID NO: 91158 - DNA, 1188 bp, Homo sapiens
atttgagataattttagatgtccagagcagttgcaaaaatagtaaggagagtggccatggccaagagaaaagatcagtgaattctctccccaaaaagcgaatataaggtgaaaaaaatcttcaataaccaccatttgttgctctggaaattggtgaactactcaattttgaataagatcagtggtgatgtgtggcattctggcctgggggactcagccccggatcagtcactatggagattctgctaggactgggctctctgtcttctgccatgatggaaggaagtccacttgacgtggagcagcagtgatgcccactgccaaggtgtcctctggggaagggactttggagaggttgggggcaagtgggagtctaacttttgtctctatgagcctgagtttgtggtcatggttgggaagcacatattcctggttcaggctgcacatgtatgcagtgaagaacagagggctcagtttatatacactctcctggctgaccctggggctacacatgtgtacacaggagactctctggggccccatgaaaagccaaagcctggcgacttgaaaatgacctgatctctgatccatgagcaggggatagaagccttgttggctgaaagtatttgagcaatagactactaagctaggctgacacaggtacaaaccctaggaagtaagtatgaaaacaaaaattcaagaacagcaacaaaaagcacttaagctgaattatcaatggctgcacatcacagaagacaagttattttgacccagtctttgatttagtaatcaaagacttcagagtaactattataaatacattcatagcattgaagttattcaagtttaaagaattaatgtatgataacaatgaattaacaaatcgagagtctcgataaacatatacaaattataaaaaagaaccaaatggaaattttggagttgacaagtaaattamcctgaaatgaagtttcctacagaggggacttcacagcaatttgagatggcagatgaagtaatcagtaaatttagagacagattaatagaaagtatccaatatgaagagcacagagaaagaaaaattgaaagtaaaaataaacattgtctcaaacacctatagaaatatacccagtatacccacataagcatatgagagtcccagaaaaaggactctaagaggaggaaaagt

SEQ ID NO: 91159 - DNA, 812 bp, Homo sapiens
ttgctttcactttagatcatggtctgttgctccatttattctaaaccctttttttagtattggcagttcttctatgtttgtattcaaattcacattttatgatcaatttatagatgtatttaaacattttaaatttatatttgattgaaactttccagtgaattttttaaactagatattgttgttctataatggaatgacttcaaccgggagcctaaggcagattctgtcatgtagagttccatgagcatatgtagtatttttaaatgaattaaatttgcataatttttgacatggcattaccgttcagttcaattctctgttatcttacagatagtccacgcttttggacttacagatagtgtattggacttttctggcctcacagagtggtgagttttcagtcctcatggaactggcatccattaggacaaattttgctatgggtcagtcaccaataaaaccagatgagcgtctycttccatttaaatttttgtcctcagagcccaggcttcatccatagaacattttttttttctaatgttcttcctgctggatagtgaagattactgggtctacatttggagagggtcagctttcaggttggaggcaccagacatgaggtgcacaggcattaccttcttacagactgtcaccagtctcatgaagtcatcttgttactgcagcttggaccctgatttcttggctcgtgtgtaaatagaaattaacactggaccaaacagaaatttttatcaggcaacatttaataggcttgcagcctgagcaagtcaagggagcaacatacaggaaag

SEQ ID NO: 91160 - DNA, 976 bp, Homo sapiens
tcgacacgcgtgatttatcattcacatgcaccaggcactatgctgggtgccagggcaaaaagaaagaagccaggccctcaagaagctcccagcctacacaggagggcacagatacgcagactttcagaactcaagacagaagcagtaagtccaagaaaactatctgaaataaccacttgggatattttctcagaaattaaccaaagggatgttgtgttgaactgggattgaagagggtcaagatctcagagctcttcccttgggaattctcagcaggaggagcaaaagcagagggtggcaggattgagggttagaaacatgtgtcagtgtatccgagaatccagggctgttgtcacagcagtttgaggaggctgagcagaccgtacaagaatctggtgtggcctctgagaggctaagatacagagcacaggctttttgaattgaagggtaaaactgagcaaatgagaactgactcatttttattttcaccartcaggacccttttaaatcctatttcatgggtatatagtaatgtcacgaaatgcagattttattttcatcaattgatgccatagagagagaggactccagagagtaagctcacatctccccgcagaggttcactggctgcgggccagataccattcttttaagcaccaagcatcaattaaaggcaagctctccagcaattctgcttcctgcggacagattgggtccaaggagaaagcaaggaagaccctgagagaagaactttccctggtggtggagacttgaactccattcagcagcttagatgtcccccctgtctctccagcatgactgccaggctcttaccagcttggaaaggagccaggagatgggagccccctcctctagggccagtccttaggtctataataacactgtgacatttcatccctgacacttctgcctgacttcacctctacccccacccagagatatccctgagtcctag

SEQ ID NO: 91161 - DNA, 635 bp, Homo sapiens
aagagctgtgtgatcttggacatgtcatttagcctctctgagctgtggtctcttcacctgtaaagggggtagaatggtaatactaatgccccagggacaatatgtaagtctatagaatatatataaaatgcttggaactgtgcctggtgcacagtgtttgttgttgttgttattgtcrttaccatttacttattattgctcttagtggttaaaagtgtagactttggtttgagtcttggcgttgccacttaccactaactttgtgaccttggacagtttctcaacttttcaaagcctctatttcctcatctgttatttgaggatgtctcttacttcctggggttactgtgagggtcaaatgagacaatatgtgcaaaacacttagcatggtatccatcacagagaaagcacttcattgacgttatctattttatcatcttgagaacactattcattcatcaaatatttctgaagcctgtgctgagtgtaggcttggtactgtaataaaatttcttccttctttaatgaggaaatgtgcacatcttttctgtttgggaggaacatgtacttcctctatcctaggcaaagcattgtaatattgtacaaaaatctggaggagagtaaggaggggtggg

SEQ ID NO: 91162 - DNA, 859 bp, Homo sapiens
tataaactgggggcagtaacattccaggaagagagatgattttgtgcaagccctaaagcgctgagtgaaccaaaagagctatcctgtttcacagttgtgagttggggcaagaagagggcttattggtgatgcagccccggaagtgaccccctctcctctgtgtacatggacgtcagctgcagggtgcagcagtataaaaggccaggctctggcatctcctgagtttgaatccttgctctgttacttctaggcatatgactttgggcaaatttcttactgtctgtcaacctctgcattttcatctgtaaaacggggatgacaccacgtcctagctcacaagagtacagtggaattaaacaagggaattcacgcagcctgtttagcccagttttgggcacacagcatgggtctacaaacattgatgcttatcttaactggcatttctaagtgacagagtttatagatgacttagtgccagggagttacagtcatttctggggagttaggaagcacccaggagcaaaggagagagtgagatggaggggtgtggggtgctgtgacaagcaggtatggagcttcagctctgctgctcctgaattattcatagaaacaatctttgaataattggaggccatttttcattaccattatttcctggagaaatgactccattgctgaaatctgaggtgggggaagtacattctatttatgttagattgcttcttaaaaacttcccagggatggcccaaaacaggcgcctcgttttgggggctgtgactgcaagggcagaataatcccrccttgctaattacttcccaaagtgaaggaggagaggagagagggagggagggaggatcca

SEQ ID NO: 91163 - DNA, 924 bp, Homo sapiens
acttttttggtcaactctggggcatgtgcaccatctaatcggtcgattttctgagaattctaaagtttaaaaagttatttagaatacatgcagcattccataataatgacattgttatagcagatttttaaaggggacaacagtattaccggagatgtmaaaaaagaaaccctcattgccaattgcctgcactgcatctcaattttagaaatacataatttttttcttttctcagaaacacactgagaaaacactgcaacatctcaaagtcaaatcaggtcagtctaacataatacaaaaaagactgcccccacattggctggaatgaatctattactaagtataaatgaggtatttggggaactacgatgacacccatgggtgcctggaagcacaggtgtgcacctgcttcctaaaagtcattcatcaaaccagaaccagccagagattccattatgtccaggcacatgctctaaacaaccaatttaaccaactcagggaacactggggttccacagccacatatctgaattttgatcaagaagctctgattctggctgctggccctacacagtccatgctacttttctaagatgctggcaagcagctggcatggtcttctttctcagcatcggtgcaaaaatgagactatcagaagaaaggtggagggccagaaacagccaaacacctaatattcggggattagagagagggtaaagaaacaaaataggtagccccatggcaccctacaaatggataatctcttgtaccacctttatccttaccttgaaaaacagaaaagtgggaacagagctaatttcatatttttcagatacttcaggaacaccttcagcttccaactttaaaataaaagaattcaagcttgattattacaaggtcctttttcactactttaatatgtaa

SEQ ID NO: 91164 - DNA, 1088 bp, Homo sapiens
cactgtgcatattttaattggttttcatgctatatcactttctttgactagctgactttctcattagactgtaatcctctttgtagcaggattataacttccaaattyctagtatttggaaggttgcaaagaacatagtaatgataaaaaacacttgtgaaaaaaattaataaattaatgtcagaactaaaaaggatgtatactccatggaatactatgcagccataaaaaatgatgagtttatgtcctttgtagggacatggatgaaattggaaatcatcattctcagtaaactagcgcaagaacaaaaaaccaaacaccgtatattctcactcataggtgggaattgaacaatgagaacatatggacacaggaaggggaacatcacactctggggactgttgcggggtggagggagtggggagggatagcattgggagatatacctaatgctagatgacaagttagtgggtgcagcacaccagcatggcacatgtatacatatgtaactaacctgcacattgtgcacatgtaccctaaaacttaaagtataataataatttaaaaaaggatgttatatatcatccttcccttccttcttttactagatgagaaaaatatggagaagtttttaaaaatcaaaatcatgcaactctttattaacaaaattatgattaattctggtgttgtctggcgcactaatccatggtaatatccccacttcatgttgcttttttaaaatccctgaactattttagttataaatctattttgtcttttcattttctctcactgtatctgttcatttaatattaaactaatgtttattttgtcagtcttccaaagatttaatttgttttctggaaatcagaacactgtaagaagacaaagcctgagagaaaggttaatggatagaattaactgtgcaaaatcatcataacccttagtaccttacaagaaaagataaactgcaacatcctgaatttttctcatgtacaaaatctgcaatttcacattatattttttaccatactaagtgaattgtattactaattgagatggttactagcagacacaattgaaagtca

SEQ ID NO: 91165 - DNA, 1088 bp, Homo sapiens
cactgtgcatattttaattggttttcatgctatatcactttctttgactagctgactttctcattagactgtaatcctctttgtagcaggattataacttccaaatttctagtatttggaaggttgcaaagaacatagtaatgataaaaaacacttgtgaaaaaaattaataaattaatgtcagaactaaaaaggatgtatactccatggaatactatgcagccataaaaaatgatgagttyatgtcctttgtagggacatggatgaaattggaaatcatcattctcagtaaactagcgcaagaacaaaaaaccaaacaccgtatattctcactcataggtgggaattgaacaatgagaacatatggacacaggaaggggaacatcacactctggggactgttgcggggtggagggagtggggagggatagcattgggagatatacctaatgctagatgacaagttagtgggtgcagcacaccagcatggcacatgtatacatatgtaactaacctgcacattgtgcacatgtaccctaaaacttaaagtataataataatttaaaaaaggatgttatatatcatccttcccttccttcttttactagatgagaaaaatatggagaagtttttaaaaatcaaaatcatgcaactctttattaacaaaattatgattaattctggtgttgtctggcgcactaatccatggtaatatccccacttcatgttgcttttttaaaatccctgaactattttagttataaatctattttgtcttttcattttctctcactgtatctgttcatttaatattaaactaatgtttattttgtcagtcttccaaagatttaatttgttttctggaaatcagaacactgtaagaagacaaagcctgagagaaaggttaatggatagaattaactgtgcaaaatcatcataacccttagtaccttacaagaaaagataaactgcaacatcctgaatttttctcatgtacaaaatctgcaatttcacattatattttttaccatactaagtgaattgtattactaattgagatggttactagcagacacaattgaaagtca

SEQ ID NO: 91166 - DNA, 1088 bp, Homo sapiens
cactgtgcatattttaattggttttcatgctatatcactttctttgactagctgactttctcattagactgtaatcctctttgtagcaggattataacttccaaatttctagtatttggaaggttgcaaagaacatagtaatgataaaaaacacttgtgaaaaaaattaataaattaatgtcagaactaaaaaggatgtatactccatggaatactatgcagccataaaaaatgatgagtttatgtcctttgtagggacatggatgaaattggaaatcatcattctcagtaaactakcgcaagaacaaaaaaccaaacaccgtatattctcactcataggtgggaattgaacaatgagaacatatggacacaggaaggggaacatcacactctggggactgttgcggggtggagggagtggggagggatagcattgggagatatacctaatgctagatgacaagttagtgggtgcagcacaccagcatggcacatgtatacatatgtaactaacctgcacattgtgcacatgtaccctaaaacttaaagtataataataatttaaaaaaggatgttatatatcatccttcccttccttcttttactagatgagaaaaatatggagaagtttttaaaaatcaaaatcatgcaactctttattaacaaaattatgattaattctggtgttgtctggcgcactaatccatggtaatatccccacttcatgttgcttttttaaaatccctgaactattttagttataaatctattttgtcttttcattttctctcactgtatctgttcatttaatattaaactaatgtttattttgtcagtcttccaaagatttaatttgttttctggaaatcagaacactgtaagaagacaaagcctgagagaaaggttaatggatagaattaactgtgcaaaatcatcataacccttagtaccttacaagaaaagataaactgcaacatcctgaatttttctcatgtacaaaatctgcaatttcacattatattttttaccatactaagtgaattgtattactaattgagatggttactagcagacacaattgaaagtca

SEQ ID NO: 91167 - DNA, 993 bp, Homo sapiens
tatttgttcttatttctaatggtatcagactgattaggatagccagaaagatcagcagccagtatctccagcttcattcttcccrtgtcagaatgccagcaattgttcaaaggttagctaggagcagcagggagtcgttccagtaatctctccacacatccaacataactattaatgtgtcagtgagttccaggaaatctccttgcatatttattttgcatgggtaccaaaggcatatcttctctatccttcctgacatttctttctttgattataattggtagatgaacattaatagttgcatgtcttttgagtcaaaaaaatcaataatgtagttagtggctgcatgaatgagtgatataaggcacactttggatttgtactgtgttttgggcaagaggcaagaagtgtttgtaacacatgtgctacaaatccccagctaaggagctgagagacagggtaggataaggaagcattctgggcttcttagacccaggagttcttcatcttgaatcctagatctctcacttgttgtgtaatcttggaccagttactcaaagtttctgaaatgtaatcctaacattttttaaatgtagaggaaaaaaaataaacatttaaaactgagatagactcttgtgcatcaaacaacttttgttttgtttgtacatttaaaagattgcattccaacttcattaagaacatcatgcttctaattatcagtattttaaagatcagagcatatgatagcactttattatgttaaattttaatgtccacctgaaaactgtcattttgtcagttaggagactgaatagttataagatgtaaaactccaaagatctatttttaaataagaacaatgatttgttgtgataggcccttttctgataataggaatataaagctatattatcagcttactgtattatttgaaaccactaaatattaattaacattgtgataaaataaatatttcctgtctgcctacaaata

SEQ ID NO: 91168 - DNA, 993 bp, Homo sapiens
tatttgttcttatttctaatggtatcagactgattaggatagccagaaagatcagcagccagtatctccagcttcattcttcccgtgtcagaatgccagcaattgttcaaaggttagctaggagcagcagggagtcgttccagtaatctctccacacatccaacataactattaatgtgtcagtgagttccaggaaatctccttgcatatttattttgcatgrgtaccaaaggcatatcttctctatccttcctgacatttctttctttgattataattggtagatgaacattaatagttgcatgtcttttgagtcaaaaaaatcaataatgtagttagtggctgcatgaatgagtgatataaggcacactttggatttgtactgtgttttgggcaagaggcaagaagtgtttgtaacacatgtgctacaaatccccagctaaggagctgagagacagggtaggataaggaagcattctgggcttcttagacccaggagttcttcatcttgaatcctagatctctcacttgttgtgtaatcttggaccagttactcaaagtttctgaaatgtaatcctaacattttttaaatgtagaggaaaaaaaataaacatttaaaactgagatagactcttgtgcatcaaacaacttttgttttgtttgtacatttaaaagattgcattccaacttcattaagaacatcatgcttctaattatcagtattttaaagatcagagcatatgatagcactttattatgttaaattttaatgtccacctgaaaactgtcattttgtcagttaggagactgaatagttataagatgtaaaactccaaagatctatttttaaataagaacaatgatttgttgtgataggcccttttctgataataggaatataaagctatattatcagcttactgtattatttgaaaccactaaatattaattaacattgtgataaaataaatatttcctgtctgcctacaaata

SEQ ID NO: 91169 - DNA, 855 bp, Homo sapiens
tttgtcaaaactcgtaaaattggacatttaacatctgtgtatttgactatatataaaatatatttcaatttttaaagaggaaaaaattagaagagaaaataattaaaattaaaacaaaataatatggtagttcatgggaaatgcaatctggaacgcrtgcctgtaacatgtccagagtgttctttcaagggataaatcgcctcagtaccagtttctcctcaatgtaatcagtaatattatggcttctgattctgaattcaggagttatgaaacttcttcttcttctttttttttttttttttgagatggagtcttgctctgttgcctaggctggagtgcaatggcacgatcttggctcaatgcaacctctgcctcctgggttcaagggattctctcatctcagccttctgagtagctgggattataggtacgcaccaccacgcctggctaaattttgtatttttagtagagatggggttttaccatgttggccaggctggtctcaaactcctgacctcaagtgagccacctgccccagcctcctatagttctgggattacaggcgtgagccacggcgcctggctcaggaattgtgaaactattaaaggaccttaacttatttcaagtaacagaagaagctgaacaactaggtgcggtggctcacgcctataatcccagcactttgggaggctaaggtgggaagactacttgaggccaggagttcaagaccagtctgggtgacacagtgagactccatttctatttttttaaaacttaaaagaggcagcagcagccgctgaagggaatgtgacaaatccccagatctaccacatgggaagagaatgaactcttgat

SEQ ID NO: 91170 - DNA, 611 bp, Homo sapiens
ggtaagaccaatggggatttagttattgaaagatgctgctacagaaagttcctaaaactaattttgtcagtttattttatttatcaaggtgtttatatgtttttaatgctgcataaaaagttaccataaagtgagcagcttaaagcagcacagattcgttatcatwcggttcccattggttaggttcctaggtctgggttagctgggtcctaaactcaaggtttcaccactctaaaatcaagatgttggctgggtatagtggctcacgcttgtaatcctagcaatttgggtggctgaggtgggaggatcgcttgagctcaggagttcaaaaccagcctggacaacatagtgagaccttgtctcaataataataataatacaatgcagagatcatcttcaaaaaaatacaagtctacttgctgttatttgcattatctgacctctataaacaatcatgaccagagccatgtcttcataaagttaataataaaatattacatgtagaaatttatagtttcaaaaaataaaaataaaagcaaataaaggtctcacttgggtgtgatcttctcagaggctcagggtcctcttcaaagctccttaggattgttgga

SEQ ID NO: 91171 - DNA, 1059 bp, Homo sapiens
gcatgaatgtataacagtgtagggatgtctcagatacatctaaactggttgattggtttcaaattgtcgatayacagaagtggaatagacttagggatcaggagccaagagtgaaaccctcgccatatgtttactttcactccatgcctcagactctactgctccatttgaaagctgtcaccaacctcatagattcaaatgattctcattttaaatgtctaacaattgagctttgaaatatgttaaattaccatgtactaatgaggaatattaaataaaagcttagaaaggtcttttttttgtctttctgcctctaatatgtagtaagagattgactttccattaactttttattaattgaaagaatgaatgaaacacactccaagagttaataaaccaggaaaagagaacaaacagttctcatgcacactcacatgctttgaggtaccattttacatgttagaataattagtaactactcttacctaaattagggtaattactaggaaatgtttagttatttaaatttaattattactagtacttaaaaattaacaaaactgcatttatgaaagtctctataatgtagcttgacattatttaagaatgattttctatatcagatactgtgaattggtgaatttgagacggaacaagtacagagtacagcactcaacagtgcatgtgtgactattctcaggcttatatgaaactcctctattaaagattctttactcttctatgtcttggttttaggtttgatataaacaacatcgatgcttctatgtcctaaggtcaagtgatttctaaggctcgacccacaactcttgttttaaacatttcactcaggcctagcttaccttgtttcagcctctcaccacctaaataccttgagaaaacattcaccctagaaataagcactggcccttgcatatctgtatggggagagtgagaaaaaatagcttatttaagcaaactacaatttattcatttttattctacctggaattttttttgtttgcaatgtttccagtgctagaggatcatggctgtgtgtgt

SEQ ID NO: 91172 - DNA, 886 bp, Homo sapiens
cccctggatcccagcagaaacctctcctccgctgtccctggctcccttctccccaaaagatatctcaggacaaacgtctcctaggggacaaaatcagcacctgaggagaaactactgtcccagaaagtcccagggagggagaaggatccctacatcccctcaagcataaacagaactcaaactatactttatgagattggacacataatggtgtttttttttttttttaagaaaatagctaatcaagcaagaggactagcaataataatacaactaatgttctattccttgtagttggagactgcgtgtgtacttacctcttaatatccattacacttaattagaattagcattgcattacatttaataccatgttgccaattgtatttaactaaaaaatgcttttgaaaaatttagggtttttattttttcatccaatgatcagtttcctgctgaaggatactctttcatatcaggtataaagaaagcccttccaacagacctgaagaatgtttgctgatgaatcaaaaatagctctctaagaagaactgttccagaataatcacggaaagagactgcttttaagacagttcaaaaataagtattttattcattcaatgaccaactgatttttacgagtgcctgccatatgcggagaatttatagtagggaaatgtctaattccttataaatggagaggtgatctcctttgaagaagtaggaaatttttatgtttgaacttgtcagggagaagccagaagtaaaaggacrtttaattcaatttgacaattaagatttgtcttgcagcatctcacttggccaagctcaaaaaatcatcttgtggaaaagtctcatctagtatcgtgcatgcgtgtgtgtgtgtgtg

SEQ ID NO: 91173 - DNA, 743 bp, Homo sapiens
aggactgcttggggccaagagttcaagaccagcctggacaacatagcaagatcccatctacaaaaacacatacacacacacgcacacaaacacacacacacaaactgatgctcattgaactacatacttgaaatggatgacttttatgatatcttaattatacctcaataaagctgtttttttcttaaaggaaggaaggacaaaatccaccccctaaaaaacaagcaaaccctgggaggtgggcaccatggttattattccatttcacagaccagagatctagacccagagagggtcagccacttccctaaggtcactgtcacaggcagtggactggggtcctcagcctggtacctggctgggggacttccctctgagtccctccacatccctgcctctccatcagcccctgttctaagctctgatatgccatcaacccaggagtgggttctttacagtcggaaacctaaagccctggcatctggggctgtgtcctccccactttctgtatattctgagcctggtctgcaaaccagcctattcctgccctacttcccagcttgggtggcaaacacccgagctctcaaaattgagtttagcaaaatggaaaagcagggggaggctggactgcccttgatctgaaatgtggtgatgagagctgctcagcaccatcyctgttaggccaagcttctccccagtgtacattttgaatgagtctgatttattggccgcgtttgaaggga

SEQ ID NO: 91174 - DNA, 726 bp, Homo sapiens
atgtttcatgcctcccttaaattttgacctaggctgggtgcagcggctcacacttgtagtcctagctactcgagaggctgaggcaggaggtcacttgagcccaggaggtcaaggctgcagagagctgtgatcgcaccactgcacaccagcctgggcaacagagcaagatcccatttctaaaaaataaaaataaaaaattttacctttaatttccacagcttatgccaagtatttcactttcatatgtatctgtccccagataccgtcagactcaccgtgcacccaagacaaaccatgagtgggaccacgttttttcttaaatcccccctgacatgtcagctggtcacatggtcttcagctgagaatgcccttcctttagacttgtcatatggcacggagattctgcaccttgattctctcccaccaaagtgcttttgatgagggagctcagagtgyattcttggatgagaaggtctgcttccaattgggagtggagagctttgcctcctatccggtgccttctccttcctgggtatgtagaaaatgtcacatgattccagtgcaaggaactggaagctgatttcctcggctgccctcactgacaaaaacctaagtgtccgttcaacacatttctgggaggtgttttcatttttttgcttttttcttcttccatttttattgttgagtttcatctggtgcaaagatttccactagagaagtgatttg

SEQ ID NO: 91175 - DNA, 557 bp, Homo sapiens
agaaaaaccgagcaagagtctgtggtcacacacacacatacacacacaccacacaggaaagttggtagagcctggatgtactttggacagtctgactccaaacccacccccttaatgacargtctacactgtgagaagacatggactgaaattgttttgcattctcttgcacatctgagagtttgcttgactgctttttatgcctggaacattcttctcttggaaaacacctacttaactttcagggctcagttctaaaagctccttctcccgaacgtttccccctgaggagggactaggtcaggcacccagtctggggttccttcaccaacaaggtgttttccctaacagagatcatttctcatttactgtgattgcttcagtttctgtcttattgtggcatgagcatccatcacagccatgctaatacctggcacatgctaggcactgactaactgttgaatgagcggatcaatgaatggatgggtgtttccttgcttcccaattagctttatttctgaactttgcagttgagtctttttgatgagctaggcgct

SEQ ID NO: 91176 - DNA, 557 bp, Homo sapiens
agaaaaaccgagcaagagtctgtggtcacacacacacatacacacacaccacacaggaaagttggtagagcctggatgtactttggacagtctgactccaaacccacccccttaatgacaggtctacactgtgagaagacatggactgaaattgttttgcattctcttgcacatctgagagtttgcttgactgctttttatgcctggaacattcttctcttggaaaacacctacttaactttcagggctcagttctaaaagctccttctcccgaacgtttccccctgaggagggactaggtcaggcacccagtctggggttccttcaccaacaaggtgttttccctaacagagatcatttctcatttactgtgattgcttcagtttctgtcttattgtggcatgagcatccatcacagccatgctaatacctggcacatgctaggcactgactaactgttgaatgagcggatcaatgaatggatgggtgtttccttgcttcccaattagctttatttytgaactttgcagttgagtctttttgatgagctaggcgct

SEQ ID NO: 91177 - DNA, 1129 bp, Homo sapiens
gagataattttcttcctttttggggagcagtattggtatagtttctacagccaagaagtatccagaggtcttaaggccctgtaattttttgaatattatatcttataagcttttttgggagtmggggctggcattttatagctggtaaaagtgaagagctaagagtattaactaaaaggtgaaagaaaggacagtaaatgaaccttcctcctaactataatatagtttaacattttctcttctttttaaatatacatgaaagatactttgtctgcttccttctttccttacaacaaacatatattaaacacctattgtgttccgggctttgtgctagatactgtgtgtacagtgaaatagctcagagtctaacaaagataggcctacaaagagattattatatgatagtagaggtaccattgagcagtcagcacagttaccatgttctagacactgtattatgtgctttacatggattattttatttaatacataaaacaactctgttcaggtggatactaatattgtctccatcttacgaatgaggacaataaagccaacagaggttaggtacttgcccaagatcacacatccagagagtggcattgctaagtgtgtttgtattttaattactacaggatgctgctgtaatagtgatataaacaaacagctgtgggagccagaaagggctaaaggggacttggcttccaggcagtccagagatgctttacagaggagaccacatttgagctctaccttgaaagaagaaatagaggaaattcactgggtggagaagagtggaagagcattccaggctgtcaaaaaaagatatgctaaggcacagaggtgtaaaagggcatggcaaggttgaagaaacagttcaggatctgtaagaaatcaatacaccaaaagccagatgtggaagatttgcatgcttcaacaaggagcttggtctttatcttctaggctgcaaaaaactaagcaggtagaataaaaagtgtgtgtgtgtgtgtgtgtgtgtgtgtgtgtgctttaagtgggagctgaacaatgagaacacatgaacatagtgaaaggaacaacacacactggggcctgtcagtgtagtgggggagggagagcatcagaa

SEQ ID NO: 91178 - DNA, 1129 bp, Homo sapiens
gagataattttcttcctttttggggagcagtattggtatagtttctacagccaagaagtatccagaggtcttaaggccctgtaattttttgaatattatatcttataagcttttttgggagtaggggctggcattttatagctggtaaaagtgaagagctaagagtattaactaaaaggtgaaagaaaggacagtwaatgaaccttcctcctaactataatatagtttaacattttctcttctttttaaatatacatgaaagatactttgtctgcttccttctttccttacaacaaacatatattaaacacctattgtgttccgggctttgtgctagatactgtgtgtacagtgaaatagctcagagtctaacaaagataggcctacaaagagattattatatgatagtagaggtaccattgagcagtcagcacagttaccatgttctagacactgtattatgtgctttacatggattattttatttaatacataaaacaactctgttcaggtggatactaatattgtctccatcttacgaatgaggacaataaagccaacagaggttaggtacttgcccaagatcacacatccagagagtggcattgctaagtgtgtttgtattttaattactacaggatgctgctgtaatagtgatataaacaaacagctgtgggagccagaaagggctaaaggggacttggcttccaggcagtccagagatgctttacagaggagaccacatttgagctctaccttgaaagaagaaatagaggaaattcactgggtggagaagagtggaagagcattccaggctgtcaaaaaaagatatgctaaggcacagaggtgtaaaagggcatggcaaggttgaagaaacagttcaggatctgtaagaaatcaatacaccaaaagccagatgtggaagatttgcatgcttcaacaaggagcttggtctttatcttctaggctgcaaaaaactaagcaggtagaataaaaagtgtgtgtgtgtgtgtgtgtgtgtgtgtgtgtgctttaagtgggagctgaacaatgagaacacatgaacatagtgaaaggaacaacacacactggggcctgtcagtgtagtgggggagggagagcatcagaa

SEQ ID NO: 91179 - DNA, 747 bp, Homo sapiens
gatatctttaagaaatttatcagaaatgctcacatgaaatgtttcctgttgtagcctggtttccctttgccacatagaaaactctgcaacccccaagactcacagaggccagtgaacaaaaggggccctaaagcctgagtgtcgctagtttcatagcaaatgactctgactctctgacgccttcactgtggctttgggtgaagactccttgctttggctcagttccagagaaccataattctcagggggttgtgggagtgagggcaagtgtggataggagagagaggaagaggagagtgtgtgtgggagagagagagactgtgtgtatgtgaaaagagagaaagagaggcagtatgcrtgtgtgtgtgtgtgtgtgtgtgtgtgtatgcgtgtgtgaaacagagatagactgcaccgttccctccagcttgccagtcctctctcttctggtgcagaaccccactgctgtgtgattttagtgactgactgctctgctggaagactgaatgcctttatggagcttcctgtaatattgtggggtgtggccaggcataaactgactaaccaccttgggataggtcacacatggagaggcaagaacctagaacacccccagccaggccttggaggccccagaggtgtgttggcagctaggcagtggcatggtatccatggggctaggagacagacgagtgggatcatctgatgaagccaggagcattagggaggtcaccactggaaaaacag

SEQ ID NO: 91180 - DNA, 747 bp, Homo sapiens
gatatctttaagaaatttatcagaaatgctcacatgaaatgtttcctgttgtagcctggtttccctttgccacatagaaaactctgcaacccccaagactcacagaggccagtgaacaaaaggggccctaaagcctgagtgtcgctagtttcatagcaaatgactctgactctctgacgccttcactgtggctttgggtgaagactccttgctttggctcagttccagagaaccataattctcagggggttgtgggagtgagggcaagtgtggataggagagagaggaagaggagagtgtgtgtgggagagagagagactgtgtgtatgtgaaaagagagaaagagaggcagtatgcatgtgtgtgtgtgtgtgtgtgtgtgtgtatgcgtgtgtgaaacagagatagactgcaccgttccctccagcttgccagtcctctctcttctggtgcagaaccccactgctgtgtgattttagtgactgactgctctgctggaagactgaatgcctttatggagcttcctgtaatattgtggggtgtggccaggcataaactgactaaccaccttgggataggtcacacatggagaggyaagaacctagaacacccccagccaggccttggaggccccagaggtgtgttggcagctaggcagtggcatggtatccatggggctaggagacagacgagtgggatcatctgatgaagccaggagcattagggaggtcaccactggaaaaacag

SEQ ID NO: 91181 - DNA, 551 bp, Homo sapiens
tctatatcaggattcagactttctcataattcctggcttctaaaatgctccttattttcctacctaagccacacattaaaaatttttaattattttaggcagaacttatattgacatctagtctactatttttccagaaatacaagctcctctaaaagcatacttaattattcctctttagctggttagctcctattggtctgttagggcctcaacttacaatgtcacttcctcagaaaagttctccttgatcatcattcctcaatctaagttagcttcctactattttctgtcttaaaacaactttctgtttccttttgtaacatttatcacaacttgcgattttatattatttttgtgttatctgtcccttccattatcctgaaagcttcaggaggataggaatattttctgttatgatcataactgaatggagtgcctactgcagtactaggacctagtgggtacataataagtggtaaagattaagtgaaagaatgagtggatgccatgtaaatgatcatactgcactagagtagtyttaaattctg

SEQ ID NO: 91182 - DNA, 730 bp, Homo sapiens
ccaataagactaagaaggatttgaggaaatggaactttgggttgctggcagggcagaaatacttgaagaacactcccgttttaatargttatttttagtttgcagaaaaagagtagtttcttcagtgtcctggaatcttgtagttgtgtttgtaacctaaactaatcggcttagcctgtgccagaaaagtgtcaggtggcatgctcatttccttctaacttttagtactgcctggcttaactgctgtagttctgtgactaggcttcagggcgttggtaatggggactaactgggggaaggggcaagctgctgctggttgcatgctgctggtctgagcagagagaaccctcgtgctaagtcactgccctaatgcattcactctggctgtacatataatgtggtgcttgaatccagagtgttcacttgtggtaccctaagtatgactttgagtggaactaccttagaatcttatttttccaattaacttgacagtctctagtcatttcttttggctcttgtcctggatattttattctgccttaagtggtttttaatggattttaagctctcagttatcattcattcagcacaactttattgagtgcccactcaaatgtatgcctggcaccattgtaggtgttaagtgtcttttggtgtttctttattagaaactgttgattttataaatgttactcagttgaagaatgtcaattacttaaagtctttttaa

SEQ ID NO: 91183 - DNA, 632 bp, Homo sapiens
caaaacttattggtatagatttttctatgctgtaaatgctatcttaatgaaatatagaaggaagggaaggaaggaagaagaaattaagctttttctaaagacaggctatatgattcaactaagccaatttaacttaactgcattgatatttgccagattgctatcctcctctgcagaggaaggccctgaaaacactaatgttcatcacaaattctcctaaagtcacattaggatctgataaaatcaataattctttggcacattaaaaattgatctcaaggagatattgccttataattattcctttgccagatacccmtacaaaaacactttcataaattgttaaggttttacttaatattctgcatccttgaagttctcaaaaatatcagtaactatcacgttagttattcagcagcaacgctgtgctagtatttcatatagtaacagaatacatgccaactaattccaagaactgcttgtataactggattaaaaatttcactaataattattgtagagaagaccagcagcctagagtctgacaaagattgttgtctggagtgacttctcatctgtttaccttcctacaggctttggagaccatttcactggcaatgaaggaattctac

SEQ ID NO: 91184 - DNA, 515 bp, Homo sapiens
gctaaatatgcagttttctctatttgttgattgtcttcttacttggatttatagcatttttttttcccaattgaaaagctacttatttgtgcaatcaaatgtatcaatccttatagtttctggcttttacaattatacttggaaaaactttctccccttggattatagaaattgtccattarattttcttctaattctgtgattttaaaaaacatttaaagatttaatctttctggaattaattttgggggaagatacttagtaagaatccaaaattattttttctgtatgttaacttgttatcccaacaccattatttcagaatccgtggcttttccagtcatcatacactaagttcccctggatccttaggtcaagttctctttcctccattctgttccatatgtcaattaccatccactaattcagagataaaaaagtagattcacatatagaagtattagagttcactcacagagttaggtagagagtgtttggagaggattaagaatgag

SEQ ID NO: 91185 - DNA, 809 bp, Homo sapiens
ataaggttgtctgtcattgttgagaacacttaaatttatataaggcttgtaggcaaaatgttgcctggtatcactatctttctggatggtgttgaagaatatagctacaaagtcaatgcatttgccgcagtagaaatcctatctaatccctttagatactgagaaacaacatttttaaatatgaattttagttcccaaattcaaaaatccagtgggataacggctgcaataaaagaaattgaatgtatgaccatctgtatccaggcacgaaatgccaccagcagaactagcccacccacacgtcagtctcttagtggccagtaacaatgtccacgactgaactgaccatgaggtgaaccacatatatgcctgagggggccaacaaaatgattccaacattaccatgatctatctgtatgtactttaatctcatagtaacaacctacaaaacctaatttcaagacttactatgtaaagctacagttgtcaagacagtgtggaagttgtatatagacatataaataaatggaacacaatggagaatcccacatatatgtgctcagtttgggtttgtttcattggttgtttttttgtttgtttgttcacaaaggaccaaggtaatgtaatcggggaaaaaattattttttcaacaaatagtactcgtatcrgtgtgggataaaaatgaattttgacctctacttcacgttgtatacaaaaatcaactccaaatggaacatccactgatatggcttggatttgtgttcctgtccaaatctcaggttggaggcggggcctggtgggaggtgatg

SEQ ID NO: 91186 - DNA, 720 bp, Homo sapiens
ttcaactcctgcctgtgtccagtagtccttgaaatgtctgggtatttccatcttctcagtgtgtagccccctgagtcagtggcatagattttggtgggaaggactgggaaaatcattacactttacaattgctagcgagttgctgtgatgttcctccyaggagtgaggctgccttatagtcagtgggttccagagcttggcttgggtccagaatgaacaagggatgatgaatttttattgtactatctacccttagcctcctgcttctccttggtaccttcttctgattctacatgttaaaaatgcacacacatctgtttggcccctagagacaccatactatattaagctttctccgtaacttcttataatggtcttgaggtttctaaaatttcttttgttttgttttgtttgttgttttttgttttgtttttttttttgagatggagtctcgctctgtcacccaggctggagtgcagtggtatgatctcagctcactgcaacctccacctcccaggttcaagcaattcttgtgcctcagtgtcccgagtagctgggactacaggcacatgccaccatgcccagctaatttttgtatttttagtagagacagggtttcgccatgttggccaggttggtctcgaactcctggcctcaagtgatctgcccgcctcagcttcccaaaatgctgggactagaggcgtgagccactgcacccaa

SEQ ID NO: 91187 - DNA, 1119 bp, Homo sapiens
ccagcttagaaaataagaattgggaaggcaaataaaactggaaaagcttctgcagaggccacaatactttggacatcttctgcgatcaataattcatgagactgtttggcccagacgcataaggacaggaaagtgattggtcataggtaaattctcttgctgtgtatacggcaacttagaatttttggagctggacgggaccttgagattatttagtaaagaccaagaagctaagacaatttctgggcaaaatgccttgtgagttcaggttttacgtatcactcactatggcaaatggtagcaatgatagatgggaggatggaaggaagcaaggaaggcaggcatgtttaccaacagaacaaacaagacacatggtacaacaacagagcctggcgataaggctgaggccacagctctactgttcagaaacaggaagaggccaaaggcacaccccagttaggaaggatgggagcagaggcaaatggctccgagtatgacgcagcacgaaaccactgtggaaagaaactgaaaagaggtctgtggccactaccggaggctatggctgagataaagcccatccctggggcagcaggaggaagctcaagagcctgcagccttcgaagggaaaagattggccctctactcactactgagaagggcaggagcctgaacttccaaaataagatcatgtactaaactaggatcctggggaggacaatagcaaaaccactccagaaaggtgagggcacagagggggacaaagaagtccacttaagacaggcttctaaactaaaagcccaaagcttgtgagggaaaccaacttcaagaaagactgacggccaggcgcggtggcccatgcctgtaatcccagcactttgggaggtcaaggtgggcagatcacgacatcaggagatcgagaccatcctggctaacayggtgaaaccccgtttctactaaaaatacaaaaaaattagccgggtgtggtggcaggcacctgtagtcccagctactagggaggctgaggcaggagaatggcatgaacctgggaggtgcagcttgcagtgagccgagatggcgccactgcactccagactgggcgacagagcgagactccatctc

SEQ ID NO: 91188 - DNA, 719 bp, Homo sapiens
tcagggctgactccatttccacagccactgtgagttccagtgctatgtctggtagcttctcccatacctagtgaagacaaggatagatgttttatgtaacatttgcagaaggcagttagtgttcaaggatgcaggtccagggtggggctggaggaaaaatagtatatatcatctatatccctattttgtatgtgtaacttgacagtttattcttttattttttaatggctatattattcagatgatgtttcttttaatagaagtttaggtagtttccagatctcttaagttttgaataatattggtcatccatttaatgtttttcatgaggtttagtggcatatgttttgctgattttgtaaaacagattgggaaaccatctatattgtgttctgatataggatgacatgacattactaagaactctgcttttaaatatccgtttaatgttttgcatgcagtttagtagcaaargttttgttaattttgtaaaacagattagaaaaccatccatctatattgtgttctagtatagcatgacatgacattgctaagaactttgctttaaaatatttggaataaaaaatagataaaagatgatcaatgtatttcttactgaataccttttagttttttgttttgtaaaattaaatgatatatgcattaatttgcttaacttagaaatatccgagaaatagatctccataaattgcacagga

SEQ ID NO: 91189 - DNA, 719 bp, Homo sapiens
tcagggctgactccatttccacagccactgtgagttccagtgctatgtctggtagcttctcccatacctagtgaagacaaggatagatgttttatgtaacatttgcagaaggcagttagtgttcaaggatgcaggtccagggtggggctggaggaaaaatagtatatatcatctatatccctattttgtatgtgtaacttgacagtttattcttttattttttaatggctatattattcagatgatgtttcttttaatagaagtttaggtagtttccagatctcttaagttttgaataatattggtcatccatttaatgtttttcatgaggtttagtggcatatgttttgctgattttgtaaaacagattgggaaaccatctatattgtgttctgatataggatgacatgacattactaagaactctgcttttaaatatccgtttaatgttttgcatgcagtttagtagcaaaggttttgttaattttgtaaaacagatkagaaaaccatccatctatattgtgttctagtatagcatgacatgacattgctaagaactttgctttaaaatatttggaataaaaaatagataaaagatgatcaatgtatttcttactgaataccttttagttttttgttttgtaaaattaaatgatatatgcattaatttgcttaacttagaaatatccgagaaatagatctccataaattgcacagga

SEQ ID NO: 91190 - DNA, 1451 bp, Homo sapiens
aagtaccactccacttaagggatatttagaataggttatcttcaatatattttaattacttactctaaagaatgtttatatttttggtgggggtgaaataaatgaaaacacgggtagtttggatggaggcgaggtgttggtccttgttaactgttctaggagttgcatcagctaaagaagaaactctcgccctcatgattgaaggacataacttccgaatggaaaaaaatggctgagatttacttttcaaacagcatttggttgatgtgatatttcattttctatagcacttcttgttctcctctgagacatactagcttggaaaacatcactagtggcaggtagggtcagtgatgaaaataatcacggtaataactgcctttcattaaagacccaagatatgccaagcattgygcctgatgcttttcatacattgcattctttccaacagttttttatcacatgcattaacaaactcacccctaggatgaagaatctaagattcataaagcttgggcatgtgcttgagttcacaggtctcatatatgacagacctgagattaaacctgtggtctgaattcttctagagcctactctgttccacttctccatcctaatggccagtcttcttttttcttgattcagttgtcttttcactactacacagtgcatcttgggataaaaaggtccttccatctgaagtaccaaaagcaggtgtaaagaagaaaggtgaaagtgataaccaaataaaatttgaggattgtctgtgggcttcatttacatgggatcctgatgcccttagccccaggattcctttaaagttacctttgcccaggggctggcattatccagctctagctctttcctgcattaccacacccttcccctgggttttctctgatgtgcactcttgtccaaatggaaccctgacctgctgactagctgctcactgtgtcctctgaaggctgcaccctgctcccagtggaacaaaccgtccagaatcacctcccttcccccgacttagggtatccaaactcccaggtaggcccattcctcactttaaaacccctctgatagcaatatcttgttcaatgcaaaaggtcattttgacagtgaaatttagacctgttcatcaccactaaacatctccaacacattgtcaaaatgatttgcaaatgagctagtgaattataatctgatttggcaaagcatctactagttttggggctatatccccaagaaacaggattttgaaaaccaccctgatatttgcagtagaattttaatgggatttcttgtttgacacagtctactggccacataaaccagtgagtgagcttaccttagtgcttaaaagccaaagcttctcctgtaagtagcacatgagaaaagatcatcaaagtaactatgcaaacatctgtagtatatcaagtcctgaaaattctggagtc

SEQ ID NO: 91191 - DNA, 1451 bp, Homo sapiens
aagtaccactccacttaagggatatttagaataggttatcttcaatatattttaattacttactctaaagaatgtttatatttttggtgggggtgaaataaatgaaaacacgggtagtttggatggaggcgaggtgttggtccttgttaactgttctaggagttgcatcagctaaagaagaaactctcgccctcatgattgaaggacataacttccgaatggaaaaaaatggctgagatttacttttcaaacagcatttggttgatgtgatatttcattttctatagcacttcttgttctcctctgagacatactagcttggaaaacatcactagtggcaggtagggtcagtgatgaaaataatcacggtaataactgcctttcattaaagacccaagatatgccaagcattgcrcctgatgcttttcatacattgcattctttccaacagttttttatcacatgcattaacaaactcacccctaggatgaagaatctaagattcataaagcttgggcatgtgcttgagttcacaggtctcatatatgacagacctgagattaaacctgtggtctgaattcttctagagcctactctgttccacttctccatcctaatggccagtcttcttttttcttgattcagttgtcttttcactactacacagtgcatcttgggataaaaaggtccttccatctgaagtaccaaaagcaggtgtaaagaagaaaggtgaaagtgataaccaaataaaatttgaggattgtctgtgggcttcatttacatgggatcctgatgcccttagccccaggattcctttaaagttacctttgcccaggggctggcattatccagctctagctctttcctgcattaccacacccttcccctgggttttctctgatgtgcactcttgtccaaatggaaccctgacctgctgactagctgctcactgtgtcctctgaaggctgcaccctgctcccagtggaacaaaccgtccagaatcacctcccttcccccgacttagggtatccaaactcccaggtaggcccattcctcactttaaaacccctctgatagcaatatcttgttcaatgcaaaaggtcattttgacagtgaaatttagacctgttcatcaccactaaacatctccaacacattgtcaaaatgatttgcaaatgagctagtgaattataatctgatttggcaaagcatctactagttttggggctatatccccaagaaacaggattttgaaaaccaccctgatatttgcagtagaattttaatgggatttcttgtttgacacagtctactggccacataaaccagtgagtgagcttaccttagtgcttaaaagccaaagcttctcctgtaagtagcacatgagaaaagatcatcaaagtaactatgcaaacatctgtagtatatcaagtcctgaaaattctggagtc

SEQ ID NO: 91192 - DNA, 1451 bp, Homo sapiens
aagtaccactccacttaagggatatttagaataggttatcttcaatatattttaattacttactctaaagaatgtttatatttttggtgggggtgaaataaatgaaaacacgggtagtttggatggaggcgaggtgttggtccttgttaactgttctaggagttgcatcagctaaagaagaaactctcgccctcatgattgaaggacataacttccgaatggaaaaaaatggctgagatttacttttcaaacagcatttggttgatgtgatatttcattttctatagcacttcttgttctcctctgagacatactagcttggaaaacatcactagtggcaggtagggtcagtgatgaaaataatcacggtaataactgcctttcattaaagacccaagatatgccaagcattgcgcctgatgcttttcatacattgcattctttccaacagttttttatcacatgcattaacaaactcacccctaggatgaagaatctaagattcataaagcttgggcatgtgcttgagttcacaggtctcatatatgacagacctgagattaaacctgtggtctgaattcttctagagcctactctgttccacttctccatcctaatggccagtcttcttttttcttgattcagttgtcttttcactactmcacagtgcatcttgggataaaaaggtccttccatctgaagtaccaaaagcaggtgtaaagaagaaaggtgaaagtgataaccaaataaaatttgaggattgtctgtgggcttcatttacatgggatcctgatgcccttagccccaggattcctttaaagttacctttgcccaggggctggcattatccagctctagctctttcctgcattaccacacccttcccctgggttttctctgatgtgcactcttgtccaaatggaaccctgacctgctgactagctgctcactgtgtcctctgaaggctgcaccctgctcccagtggaacaaaccgtccagaatcacctcccttcccccgacttagggtatccaaactcccaggtaggcccattcctcactttaaaacccctctgatagcaatatcttgttcaatgcaaaaggtcattttgacagtgaaatttagacctgttcatcaccactaaacatctccaacacattgtcaaaatgatttgcaaatgagctagtgaattataatctgatttggcaaagcatctactagttttggggctatatccccaagaaacaggattttgaaaaccaccctgatatttgcagtagaattttaatgggatttcttgtttgacacagtctactggccacataaaccagtgagtgagcttaccttagtgcttaaaagccaaagcttctcctgtaagtagcacatgagaaaagatcatcaaagtaactatgcaaacatctgtagtatatcaagtcctgaaaattctggagtc

SEQ ID NO: 91193 - DNA, 1451 bp, Homo sapiens
aagtaccactccacttaagggatatttagaataggttatcttcaatatattttaattacttactctaaagaatgtttatatttttggtgggggtgaaataaatgaaaacacgggtagtttggatggaggcgaggtgttggtccttgttaactgttctaggagttgcatcagctaaagaagaaactctcgccctcatgattgaaggacataacttccgaatggaaaaaaatggctgagatttacttttcaaacagcatttggttgatgtgatatttcattttctatagcacttcttgttctcctctgagacatactagcttggaaaacatcactagtggcaggtagggtcagtgatgaaaataatcacggtaataactgcctttcattaaagacccaagatatgccaagcattgcgcctgatgcttttcatacattgcattctttccaacagttttttatcacatgcattaacaaactcacccctaggatgaagaatctaagattcataaagcttgggcatgtgcttgagttcacaggtctcatatatgacagacctgagattaaacctgtggtctgaattcttctagagcctactctgttccacttctccatcctaatggccagtcttcttttttcttgattcagttgtcttttcactactacacagtgcatcttgggataaaaaggtccttccatctgaagtaccaaaagcaggtgtaaagaagaaaggtgaaagtgataaccaaatamaatttgaggattgtctgtgggcttcatttacatgggatcctgatgcccttagccccaggattcctttaaagttacctttgcccaggggctggcattatccagctctagctctttcctgcattaccacacccttcccctgggttttctctgatgtgcactcttgtccaaatggaaccctgacctgctgactagctgctcactgtgtcctctgaaggctgcaccctgctcccagtggaacaaaccgtccagaatcacctcccttcccccgacttagggtatccaaactcccaggtaggcccattcctcactttaaaacccctctgatagcaatatcttgttcaatgcaaaaggtcattttgacagtgaaatttagacctgttcatcaccactaaacatctccaacacattgtcaaaatgatttgcaaatgagctagtgaattataatctgatttggcaaagcatctactagttttggggctatatccccaagaaacaggattttgaaaaccaccctgatatttgcagtagaattttaatgggatttcttgtttgacacagtctactggccacataaaccagtgagtgagcttaccttagtgcttaaaagccaaagcttctcctgtaagtagcacatgagaaaagatcatcaaagtaactatgcaaacatctgtagtatatcaagtcctgaaaattctggagtc

SEQ ID NO: 91194 - DNA, 519 bp, Homo sapiens
tatttctttgacatatttggagatggctagtcagaggagctgtatagctctgaaaatagctctgaaagkctgtcctttcttagggaagatttacacctgtagaaaaaaatctacattagtaaggcgaacgggatgcttggcagaggctttctctgaggcccccttatctgcctaagaagtttgtaaaaaagattcactcacagaaaaaggaggctaaaggtctgataacttttaaatctcttacagagaaacttttgccacaggatacatctattctttcttaggactagtacctaggacactatctgcctaacaagaaagcctttgcttgccatgcttctcttcaaccttacataatttcaaggagcttcaagcccctacccctttctgtatggtataaaaacttcagttacctggcccttctttgaatttcatattttgtgtaacagcagtgctcttgcaccttaatacatttttatgagtttttcctgttaatctgttcattgtcagtttatttca

SEQ ID NO: 91195 - DNA, 519 bp, Homo sapiens
tatttctttgacatatttggagatggctagtcagaggagctgtatagctctgaaaatagctctgaaaggctgtcctttcttagggaagatttacacctgtagaaaaaaatctacattagtaaggcgaacgggatgcttggcagaggctttctctgaggcccccttatctgcctaagaagtttgtaaaaaagattcactcacagaaaaaggaggctaaaggtctgatarcttttaaatctcttacagagaaacttttgccacaggatacatctattctttcttaggactagtacctaggacactatctgcctaacaagaaagcctttgcttgccatgcttctcttcaaccttacataatttcaaggagcttcaagcccctacccctttctgtatggtataaaaacttcagttacctggcccttctttgaatttcatattttgtgtaacagcagtgctcttgcaccttaatacatttttatgagtttttcctgttaatctgttcattgtcagtttatttca

SEQ ID NO: 91196 - DNA, 519 bp, Homo sapiens
tatttctttgacatatttggagatggctagtcagaggagctgtatagctctgaaaatagctctgaaaggctgtcctttcttagggaagatttacacctgtagaaaaaaatctacattagtaaggcgaacgggatgcttggcagaggctttctctgaggcccccttatctgcctaagaagtttgtaaaaaagattcactcacagaaaaaggaggctaaaggtctgataacttttaaatctcttacagagaaacttttgccacaggatacatctattctttcttaggactagtacctaggacactatctgcctaacaagaaagcctttgcttgccatgcttctcttcaaccttacataatttcaaggagcttcaagcccctacccctttctgtatggtataaaaacttcagttacctggcccttctttgaatttcatattttgtgtaacagcagtgctcttgcaccttaatacatttttatgastttttcctgttaatctgttcattgtcagtttatttca

SEQ ID NO: 91197 - DNA, 668 bp, Homo sapiens
atacagataagtcacaatttctacctgtatgatattccctcataattcagatccatcctcagagataatcacaataaatagggtatatcattttaaagctaatgctagggtttctyatacatagaggtgctataaaaatatattgtgattattaatcataatggctagtgaggtgcatattattttgccatattattttgctacttcataacatgaatgcaggatctttctatgataacacatttagatgtacttcacctgtggaactacccagtagcatgtatgtgccatgattaatttagccatctccttccagtgtgcacataattagtttactcatttattgctataacttacagaactgaaatattctgaacataaaatattaagctaaagcctattctgatagcaaagtggaaattaggttaaagtgggtagtgtgtggagattttaaatttgtataaatattacaaaaatttcatcccccaaatgtttacccattcatattctcacaaagcaatgcatgtaaatattataaatatacatattttattttataaaccaaaatgcttaattttagtgcttctcaaattagattcaattagaatgaccaggtgatagggaatggggccagatgagacactcacacttagtattggatgaggatc

SEQ ID NO: 91198 - DNA, 668 bp, Homo sapiens
atacagataagtcacaatttctacctgtatgatattccctcataattcagatccatcctcagagataatcacaataaatagggtatatcattttaaagctaatgctagggtttctcatacatagaggtgctataaaaatatattgtrattattaatcataatggctagtgaggtgcatattattttgccatattattttgctacttcataacatgaatgcaggatctttctatgataacacatttagatgtacttcacctgtggaactacccagtagcatgtatgtgccatgattaatttagccatctccttccagtgtgcacataattagtttactcatttattgctataacttacagaactgaaatattctgaacataaaatattaagctaaagcctattctgatagcaaagtggaaattaggttaaagtgggtagtgtgtggagattttaaatttgtataaatattacaaaaatttcatcccccaaatgtttacccattcatattctcacaaagcaatgcatgtaaatattataaatatacatattttattttataaaccaaaatgcttaattttagtgcttctcaaattagattcaattagaatgaccaggtgatagggaatggggccagatgagacactcacacttagtattggatgaggatc

SEQ ID NO: 91199 - DNA, 853 bp, Homo sapiens
tgcatgtacttcctcatgatgctataagaggtatctggtttatttttcatctgctaataatgctgtcctatgctgtgcttttcaattttgggacctggctcagtagtttttagctctaaaaaccgacaatttagctgcatgatggagtccttccagaagactttacatgccctgtgaaccccagatacctgagacaggtctcaatcaatttagaaaggwtttttttttttttttttttttttttttgccaaggtttagggtgcacccatgacacagcctcaggaggtcctgatgacatgtgcccaaggtgtttggggtacaacttgcttttatacattttagggagacataatatatcagtcaatacatgtaatggcttacaatggctccatctgaaagggcaggacaactcgaaaggggagtggactttccaggacataggtagatttaaaaattttctgattggtaattagttgaaagagttattattaacagaaaagaatgtctgggtaagataaggaattgtggagaccaaggatttatcatgcagataaagcctccaagtaacaagcttctgcgagaatagattgtaaaggtttcttatcatacttaaggtctctgttgatggtaatactggaggggtacaatgaggcatgtccaacaccctcttccatcatagcctgaactagattttcaggttgactccccaaatgcccttgtctgagaggagggatccattcagatggttgaggggggacttagaatttcatttctggtttgcattctcccgcttctggccaagatttgccaaatgcaagatttgccaaatgccacgaaatttttactctgtcct

SEQ ID NO: 91200 - DNA, 853 bp, Homo sapiens
tgcatgtacttcctcatgatgctataagaggtatctggtttatttttcatctgctaataatgctgtcctatgctgtgcttttcaattttgggacctggctcagtagtttttagctctaaaaaccgacaatttagctgcatgatggagtccttccagaagactttacatgccctgtgaaccccagatacctgagacaggtctcaatcaatttagaaaggttttttttttktttttttttttttttttgccaaggtttagggtgcacccatgacacagcctcaggaggtcctgatgacatgtgcccaaggtgtttggggtacaacttgcttttatacattttagggagacataatatatcagtcaatacatgtaatggcttacaatggctccatctgaaagggcaggacaactcgaaaggggagtggactttccaggacataggtagatttaaaaattttctgattggtaattagttgaaagagttattattaacagaaaagaatgtctgggtaagataaggaattgtggagaccaaggatttatcatgcagataaagcctccaagtaacaagcttctgcgagaatagattgtaaaggtttcttatcatacttaaggtctctgttgatggtaatactggaggggtacaatgaggcatgtccaacaccctcttccatcatagcctgaactagattttcaggttgactccccaaatgcccttgtctgagaggagggatccattcagatggttgaggggggacttagaatttcatttctggtttgcattctcccgcttctggccaagatttgccaaatgcaagatttgccaaatgccacgaaatttttactctgtcct

SEQ ID NO: 91201 - DNA, 1147 bp, Homo sapiens
ttgggtagtgaaggagcttggaagaattttgaggaacatggtaggaaaggtttacgttgccttgaacagacctgttaatagaaatataaacaataaagactgcttgtgaggacccagaagactgcttgtgacgagcatggtagagagaacataaatagccttagagaatatctcaactgtcaaggacacaggaaatcacaaataccatgattctacagcccatttgctgcctactgtgcaccaagcaagtggagctccaaggcgggcaaaggccctaacaactcagggacaactctgtcactcagcaggtgtactgtattgtctgtttcatctcacgctgagagtaaagccattttccttacatgttactaattttagccctgtgacctggggcagaccacctctctgaacgtcacttggagatgatcatagtacctstgaggtcacacatgaaaactcacagtacagtgcccagtacagagtaggcaccaaaaatgtgagctatttctctatctggagagaaagaagtgtgggcaggaatagatccttcctttctcccacaggaaagcccccgaggactcttctcccagggaagacgtagggcctttgcataagggaaggaaacagatgcaaatgtaggggatcctcaagaagccacatacatcaaaggcaaggtttggggacctaatggggttattccaaaagcaagggacataggtactgaggtctgaggaaaactgccctcagcaactgacaaagaaaaaagagaggcgtgcggcagtaaccattgggtgactctattgctggaaacttgcccactgcagtctgagaacactgggcagagttactgtgccactctcagtgccaacttggacaggaagtgatgtggccaatcccacggctgcgaggcccagcaggaggggcaaagggggcatcctcaaagaaagacatcattttaaattctctggtctggcttcttacctcagcttcccctcggcccaacctccacccatctccatccatggaattacaatacacaactcaaattaaaagactaattgttcccacatgggcaaaattttacataaacttatagaattttctacttaagatgaataaacagctttcttattgtaaacatgtttta

SEQ ID NO: 91202 - DNA, 994 bp, Homo sapiens
caatttttgttagcatggaaacaaacagaaaaaacaaagggaaggcaaaataagaaaaaaccagagacacaggctttatgtgtttcatgttttcagacaacgccatggccagctcagggaagacctaaggacatcaaaccctaaagctcagtagagaaaccatggtttctcctcatggcggcatcctctttggtttgggacacagagatggcttcatatcccacaaggccgcatgcacctggtgagaagacccgaatgaagggtgggaactggacccatttttgtccgaaaaaagcctctctctcactatgctcctaacaaaggacttaagaagataaggcctctttgttttgggcaatgccartcctgattctgggcaggctaaccatcccagcactaaggctttcagaactcactgctgtatttggctcctgtctgctgagtttggccatcctacaaccaaatacataattctcacaataccatacttccaaccaatggcctctttccagactgtcagcagcttgccagctactgtgtcctccagatctccagagaagaacatccagtagaaacactagtggaggcctggccctgttgagtggggcgaggcacagaaatctttccccctatatgggcctttgtggcccatttaaagtaagggtacctctaaagaaccccttaatgtggaacttcatgtcctgagtgagtaaactaggtcacccatttatctctatttctccaaggtctggctcagcagtttctagaagcacagggattttattcattagcaagtgtgaaagtcgcccaagcattgtgtttaacagctctaatgccaaagtggttgttcattagcgcttgggcactgacacaactagagggtgttaaattgcccaggttgttggctaaggccaaggaagctgttgtctttctcaagcttcttggaaaaaaacaaaacaaaactgttttggttttcaaataacttcctgggcat

SEQ ID NO: 91203 - DNA, 735 bp, Homo sapiens
tggggacagcacagccatgcctgcggttgcctaggcactctctctgcagaaattcactgtatttttatactcagaaaaatccatgaggctgcaggcagagttcacaggttatgtacattttttgatgtcactgcttcaaaagtaattgctcttatgctctcaaacacagacaacacacctagcaacaggctgtcataaactaagttttaacccgagaaagcagcagcaccggcctctcctgcatttgcccacatcatcctcactggactgcctcttacacaaacattggaaataagtggtaaaatgtcaatggtccccaggcaggaaaataatgggagaactttcctttttccactccagttctgagtttatttactgagagattaaaatgctacaactctaggggtggtgggctgctggcctatcaccaccattactggccacaaccttgggctcgagcccaggggtgcacctccttcttaactgcaggccggatgacccagccaccgcctcccttctgacctcaaaggaggctcagggagcaccctgcaggcctgggccaaattccgcccacagggtagcactcgcttttgctacaacaaagcacgaggcctgctctgagagtcccgagagtcctgttggtcagagtgtgctgatgctgagtgcaagtggctgtgagaagggtggyggtgaccaagctggtggcacaggaaggcagcctgctgtgggggcggt

SEQ ID NO: 91204 - DNA, 1272 bp, Homo sapiens
aagatatgtatatgagatactgtcagacagaaatttgtctgctcaggmtcagaatgataaagagggaggaaacaaggaaaagtagataaccaagcagttcccatagcaactccctgcagttcttagcaggcttgacctgaagccttgtctcgccagtaactgaattatgcccagaggatagaaattgaagcctgtcaggcacggtggctcacccttgtaatcccagcactttgggaggctgaggcaggtggagcatgaggtcaggagttcgagaccagcctgaccaacatggtgaaaccccttctctactaaaaatacaaacattagccaggcgtggtggcacgcacctgtaatcccagccactcacaaggctgagtcaggagaatcgcttgaaccagggaggcagagttacagcgagctgagatggtaccactgcactccagcctgggcaacagagcaagaccccatctcaaaaaaatatatgtatagaaattgaagcctgttaccaccttttgtagcatcactgccttctccaggtcttcttgcttacaatgagttaatgctaggaaaacttttaactcttcaagaatagcaaaagtagataacctgaagccacaaaataaacttgagacacactatttgatctaaacattgagaatactccccttccaagcctaagacctcaggttacttcacaactgggctggaagcaagcccataaacagcaagccacttgtgtatagatagttctgttcctactacagaagaagaagaacgtgaactatctctagatcttctagttcttgtttttttaatgtatgtgtgttagttatttttatgcccttctatacgtgtactattattcagtctagacctggatgttttcatcaataaagtgagactaagtgtttaactgtcccctgtataagaccacggagaacaaaaatttaattaattgtaagtgaaaatgctttgaacataataaacagttattcagaaaaaagtaagtttactaggcctgttagtggtaatattacaatgacatttataagggactagggtgaacattatatttgtgagctcagcaaattgttctaccctttcttgtgctaatgtaaccagtttgtcttcacctcaaaacatcacccacggatacaggcacatgacccacacctagccaaataatacctctttccctagctaggttaagggaggatctgatagatgacccaacagggctaggcagtgtccctccattggattgccatatgc

SEQ ID NO: 91205 - DNA, 431 bp, Homo sapiens
tcactagtggccaagtctaaatagagcagagtcccagtgacatcccaaaagaggcagatggtggtcaaatgcactccgactaactcaccaagttccraagtttcaaagttccaaaattccaaagtttgtcacttctctaaaagtcactttcagtgcaccagtgaaatattggaggtagcaggcactgcagcaggaagagaaagagaggatccccaagacaaaagcatctaggcagctgcaggagactccctagcattccagccaaggggtcaggtagccacaagcaactggagcctacaggcagccccacaggccctgtccaatagaaaccagaccatgggcttgggcccccagagcacactgtatgggccactaaaattgtaactgaatgcaggtccacatgctcactgcctgcagagtccagttaacaa

SEQ ID NO: 91206 - DNA, 1432 bp, Homo sapiens
atgcccctgcttacgctcagctgcaggaatctaggaaaagaataagtgaagttcgagaaattgcatatttttatttctgcttaattcaagcagagagtagttaagctgaaagatttgtttggggctgtcttgatgaccaaagaggtcaatccagtgttaataaagaagatcaggctgggcgcagtggctcacgcctgtaatcccagcactttgggaggccgaggcaggtggatcacgaggtcaggaaatagagaccatcctggctaacacggtgaaaccccctctctactaaaaatacaaaaaattaactgggtgtggtggcaggcgcctgtactcccasctacttgggaggctgaggcaggagaatggtgtgaacccgcgaggcggagcttgcagtgagccgagatagcaccactgcactccagcctgggcgacagagcgagactccgtgtcaaaaaaaaaaaaaaagaagaaaatcattaatagtaagaaatcagtggttaggagctgtctccttaaggggctcccttccctagtgttagaaaaactctggaccacatgacccagtgggctgtgtttttaatgaaaaaatggattacggcacatgccacgttctaagtgtaggtattattttggtaactttttggtgtgtgtgtgggggcactggtttgtgatgtaaaatgtgcttcttcccatgcatcacggttaaaacactggacagcatctgctctaccccataatgactctggggagatattctgagttcctacgtttctgagaatttccctgacgtgtgagtgatatagaccacatgctcagcagagtatgggctgcagcggcaagagctcacaaaactgatttcctccgcagactggctgccctgcagcccagtgttaatttatttaaataaagatggagtaggcaggtgacagagatggatgcccgtaataagattaaattagtgggaactggcaagaaggcatgctcttttttggaactgatagtggagagatgagggaatatcacattagaaaaattggaggagggccctaattggaaagaggaatccagatgcaggaaatctgggttctggtgggaaggctgccgtgataatctaatcaggatattgctgatgtgtaggggaaggcccctctgggaagatgccctatttcattagaagagcaccttgagaatgcctcctgttaatggttgaactgtaaaaaagaatcacaaaacaaaacaaaaacattctttgatttctttcttgctctagaaatcaactgatgagccttctgagaaggatgctctgcaaccaggccggaacctggtggcagccggctacgcactgtatggcagtgccaccatgctggtccttgccatggactgtggggtcaactgcttcatgctggacccggtgagagacctcacagga

SEQ ID NO: 91207 - DNA, 621 bp, Homo sapiens
atgcacctcactttttaaagaaataaaaccaatgaacacatttttttaaatttgcttgatttctttgaatgttgacattgttaactatgttgtttttcacacaattttttccttagcttttatgaactttcaatttcttcattaaaaaaaactgccttctgtgtactatttttaatgtgtggcatttaaaaactattgttgagtatatttttgtctgcttttaaaattgtgtcaggagggagtrtaaatctagtttctgtcacttcatgaaggtgggaagtagatatttgagtattcttttaaagtattaaaaacaattttcttggtattggaggaacattcagcatgaacgttgttattattgtacttctacttttttttgattagtgttataatggtagatctttttctatccttttacttttaatcaatatgtgtctttacatttaaagtgggtttttttgtagacaacttatcagtcttgttttctgttccactctgaccatctctgttttaattgtgtatttaaatcattaacatttatgtaattattgatatcattagattaatatctatgatatgtactactgttttctatccattatctttgttcatggatcc

SEQ ID NO: 91208 - DNA, 621 bp, Homo sapiens
atgcacctcactttttaaagaaataaaaccaatgaacacatttttttaaatttgcttgatttctttgaatgttgacattgttaactatgttgtttttcacacaattttttccttagcttttatgaactttcaatttcttcattaaaaaaaactgccttctgtgtactatttttaatgtgtggcatttaaaaactattgttgagtatatttttgtctgcttttaaaattgtgtcaggagggagtgtaaatctagtttctgtcacttcatgaaggtgggaagtagatatttgagtattcttttaaagtattaaaaacaattttcttggtattggaggaacattcagcatgaacrttgttattattgtacttctacttttttttgattagtgttataatggtagatctttttctatccttttacttttaatcaatatgtgtctttacatttaaagtgggtttttttgtagacaacttatcagtcttgttttctgttccactctgaccatctctgttttaattgtgtatttaaatcattaacatttatgtaattattgatatcattagattaatatctatgatatgtactactgttttctatccattatctttgttcatggatcc

SEQ ID NO: 91209 - DNA, 633 bp, Homo sapiens
aagagtctatgttccacattaagtcgactgctggatcaccgggtaaagagaatgtgcatctttgatatgatacaaagatcatatctttacyagaaattgttaaaattgttttgaagaagttgcaccagcgtagcctttcaccactcctgtgtgagacttctggcttgtttttccacatcccaactcagactcggaattacgagacttttaagttttcaccaatctgctgggtataaatccgtgcctttaatctgtatttccctagttactggggagactatgctttgcttttggattttggatatgctatgtggccatgtatgtttcgtcttctgtgaattgtttgatcacatcctttgcaaattttttcaaggtcttgtatttctttaaaggtttgtaggaattcttgatgtattctgcatacaattgctttttcagttttatgtgttgcaaaaaccaccttccagtgtgtggatttagtactaccattttaatttgcacttaccattcttctcctcatcgtcctcctcctcctcactcttatgtttgctccattcttgccttctgttgtacttataacatttataaatatatacatatgtgaaaggaaaataaatcttgggataagccaaa

SEQ ID NO: 91210 - DNA, 734 bp, Homo sapiens
ctgctatattgcctaggctggtctcaaactccggagctcaagtgattcttccacctcagccttgcaaagtgctgggattacaggcgtgagccccagtatccagctggaatgtatgaatcataaatggtttttttaaagtactttttaaattgtgttaaatataccataaacttacattttaactatkttaagcgtacaattcaatggcattacgtacattcacaaagttgtgtgaccatcaccactatccattttcagaactttttcatcatcccaaacaaaaactctatatccattaagtaactctccatttttcccagcccctggtaaccatcataatgacttcttgaaaatatcaagtcagcttacatccctgatctaataaaccatgttgacaatcaccttcattacttgtgttctaatgtcactccttctcaaccctggctgcatagtgtaatcacccgctaaggtgaatgctcagggcaccacggctaaacaattcaatcaggattgctgtccctgggatctaagtatttgcagcttttaaatgctccccaagtgattctcatgaacatctaggtgagagccgctgttctatgccaactgttctcaattttcactgtgcctaagaatcatcagagaagcttgctaaaaacctagattcctggcctctttgccctataattctggctcagctggtgcaaacagggccctggattttacattttaaaaaa

SEQ ID NO: 91211 - DNA, 571 bp, Homo sapiens
gaagtcaactaatgcattgtagttgttaaaacattaaaggatttgaacatagtacaagtcaatccattaacagtttaagaggtatttacaaaaatagaaaaatatttccacagcatttggaatatgtgtaattttagatatacactgcaaaatatattgctttacataatcaaattcaattgtgagaatgggttttgtattgacatattaaacattttataaattactaactttatctccattataaattatatattgttttgaaaaacagccatttattataaaatatttattctaaattttaagttcaggttagtaaagacaattttaaatttttgagcgccattaaaatgaatgacacattatttttactctttaatcgatagtggcatcaactatgcatatacaatatctacaaaaatgatttaagcatttactttagaaagagagtttagacaatcctgtgtttcttatcaatatcractttattaagaaaaatatccacaaataaggcaatagaaaattagaaacttaaacagataatggtataaaaaatagactttgggccggg

SEQ ID NO: 91212 - DNA, 414 bp, Homo sapiens
tcccaatttacatgatcttatttcttcgtatcttaatcctgccctttcttttaacaccactaactaaaaattatgattattaatttttaaggaaataatatttacttaaatttacctcaaaattgtctctttgactatccctctgttgtcatttatgaaagcacaacttctagaagcttctttctttcttttctctttcttttttttttaatatgggtttcttgctctgtcacccaggctggcatgcagtggcatgataatggctgactacaatctcaaattcttgggttcagggtgttggaactgtttgttccccagtgmtgcaaagaaatagcattcgaacataaacttaattctctcagcaaggcagtttttactttctgcagaaagggtgctctctgcagatatacaagg

SEQ ID NO: 91213 - DNA, 658 bp, Homo sapiens
tgcatgtgaatgtaattcaagatgcttgttttaattttaaatgcctacatgctctggcttctaactacagartatttaaggttttctgattatccatatttattatttccaggggagtccagaagaatcactgaacagccagattttttttctgtttaactttagtgcatttatgttgtttcagtcgctctgagggtacatactttagtttatctttttggatataatcaaaactgttcaacctgaggagtaaaacttgaaaagcataattaaattcattagttgctaaacttagaagaagagtttatattaagaaaaataattctaaaaatgttgatacctatattttgaaaaacacatataatagcaatagcagactatgtggtgagcaccgtaataaattatttatatgtattaatgtattttattcccccaaataagcactctactccatttagcagatggggaaaatgaagcacagtgagtaaatcgtccaaggtcaagcagctggtaaatgccagtttcaggctttaaatccaaatagcccagattcataagttgtatattgccaaacaatattacttctcaggtagttgattaaagtgaggcagtggggaagagtggactggagaggccataagcccagatgtggaggaag

SEQ ID NO: 91214 - DNA, 658 bp, Homo sapiens
tgcatgtgaatgtaattcaagatgcttgttttaattttaaatgcctacatgctctggcttctaactacagagtatttaaggttttctgattatccatatttattatttccaggggagtccagaagaatcactgaacagccagattttttttctgtttaactttagtgcatttatgttgtttcagtcgctctgagggtacatactttagtttatctttttggatataatcaaaactgttcaacctgaggagtaaaacttgaaaagcataattaaattcattagttgctaaacwtagaagaagagtttatattaagaaaaataattctaaaaatgttgatacctatattttgaaaaacacatataatagcaatagcagactatgtggtgagcaccgtaataaattatttatatgtattaatgtattttattcccccaaataagcactctactccatttagcagatggggaaaatgaagcacagtgagtaaatcgtccaaggtcaagcagctggtaaatgccagtttcaggctttaaatccaaatagcccagattcataagttgtatattgccaaacaatattacttctcaggtagttgattaaagtgaggcagtggggaagagtggactggagaggccataagcccagatgtggaggaag

SEQ ID NO: 91215 - DNA, 670 bp, Homo sapiens
ctgcgttttagaacttatcattgctgcttttgattaagatattggtcaaagagtacaaactttcagctataatatgaataagaacttggaatcaaacatagagatctagtgatatttagagctaataatattgtattgtttatttgaaaattggtaagaaagcagattttaagtgtcctcaccacaaacacacacacacatactcacacacccacytacacccaatgctaagcataggtgatgaagaatgtgctaattaatttgtggtaatctttgtagcataaatatatcaaaacaacatattgtcaaacatgaaaatatatttttatttgtcaactaaatgctttaaaataaaatataaatataaagataaaaattactttttttgttgtttttattgagacggagtctcgctttgtcacccaggctggagtgcagtggcgcgaactcggctcactgcaagctccgcctcccgggttcccgccattttcctgcctcagactcccgactagctgggactacaggtgcccgtcaccatgccggttattattattattttgtatttttagtagagacggggtttcaccgtgttagccaggatggtctcaatctcctgacctcgtgatctgcccgcctcagcctcccaaagtgctgggattacaggtgtgag

SEQ ID NO: 91216 - DNA, 670 bp, Homo sapiens
ctgcgttttagaacttatcattgctgcttttgattaagatattggtcaaagagtacaaactttcagctataatatgaataagaacttggaatcaaacatagagatctagtgatatttagagctaataatattgtattgtttatttgaaaattggtaagaaagcagattttaagtgtcctcaccacaaacacacacacacatactcacacacccacttacacccaatgctaagcataggtgatgaagaatgtgctaattaatttgtggtaatctttgtagcataaatatatcaaaacaacatattgtcaaacatgaaaatatatttttatttgtcaactaaatgctttaaaataaaatataaatataaagakaaaaattactttttttgttgtttttattgagacggagtctcgctttgtcacccaggctggagtgcagtggcgcgaactcggctcactgcaagctccgcctcccgggttcccgccattttcctgcctcagactcccgactagctgggactacaggtgcccgtcaccatgccggttattattattattttgtatttttagtagagacggggtttcaccgtgttagccaggatggtctcaatctcctgacctcgtgatctgcccgcctcagcctcccaaagtgctgggattacaggtgtgag

SEQ ID NO: 91217 - DNA, 582 bp, Homo sapiens
caggcatgagccaccatatctggcatatttattttttaatttttcaaatgagaaggttgggttaggtaatttttaaaaatcgcttcaagtttcttaactccacaattattttcctgtgactcttgcaagcaactgatctttataggtcatgcctcaaattcccaattgawgtcatctgggcaaatcagtccaatgacagccacaagtggtcagaaagctttcttagcagccctcttggtcactaggcacactacctaggagtcaagctgtgacaagaggctgcttcttaaacttacaaaagataggatcttccaggatgtgctgctctgatgtttttgaagggcatagagaaacacacgggcaatgtttgcagaggcaacagactaaagaaagcacatctatagttgtattggctttgtgtgggttgtatggtaaacaggtagtaaactattacaatttgggtatcccatttaccataaatatctatttcaccaccccaaaaagccctcttatcatgaaattaatcatctgatgcacttcaagtaccagtcacaaaaatgatgaactcaggcagaattccac

SEQ ID NO: 91218 - DNA, 460 bp, Homo sapiens
cataatggtgatgtgagagtcaaatgagttaacacygagaaaccttaaatgctatacaaatataagggatggcattgtaactctttagttaagttcttgccactcacttctgtgcaagagaagctgatgtaataaagtatttcctaggtcgggtgcagggcccacacctgtaatcctagcactttgggaagtcgaggcaggtggatcacctgaggtcaggtcacctgaggtgaggagttccagatcagcttcactaacatggtgaaaccccatctctactaaaaatacaaaaattagctgggcatggtgatgcatgcctgtagtcccagttactggggaggctgaggtaggacaattgcttgaacctgggagatggaggttgcagtgagccaagattgcaccactgcactccagcctgggggacagagcaagactctatctcaaaaaaaaaaaaaaaaaa

SEQ ID NO: 91219 - DNA, 460 bp, Homo sapiens
cataatggtgatgtgagagtcaaatgagttaacactgagaaaccttaaatgctatacaaatataagggatggcattgtaactctttagttaagttcttgccactcacttctgtgcaagagaagctgatgtaataaagtatttcctaggtcgggtgcagggcycacacctgtaatcctagcactttgggaagtcgaggcaggtggatcacctgaggtcaggtcacctgaggtgaggagttccagatcagcttcactaacatggtgaaaccccatctctactaaaaatacaaaaattagctgggcatggtgatgcatgcctgtagtcccagttactggggaggctgaggtaggacaattgcttgaacctgggagatggaggttgcagtgagccaagattgcaccactgcactccagcctgggggacagagcaagactctatctcaaaaaaaaaaaaaaaaaa

SEQ ID NO: 91220 - DNA, 460 bp, Homo sapiens
cataatggtgatgtgagagtcaaatgagttaacactgagaaaccttaaatgctatacaaatataagggatggcattgtaactctttagttaagttcttgccactcacttctgtgcaagagaagctgatgtaataaagtatttcctaggtcgggtgcagggcccacacctgtaatcctagcactttgggaagtcgaggcaggtggatcacctgaggtcaggtcacctgaggtgaggagttccagatcagcttcactaacatggtgaaaccccatctctactaaaaatacaaaaattagctgggcatggtgatgcatgcctgtagtcccagttactggggaggctgaggtaggacaattgcttgaacctgggagatggaggttgcagtgagccaagattgcaccactgcactccagcctgggggacaragcaagactctatctcaaaaaaaaaaaaaaaaaa

SEQ ID NO: 91221 - DNA, 987 bp, Homo sapiens
gtacatgttaatgtgtaaagatgaatacatctatatatttttttaagcacttaattttatttaagatgagaattttatggttaacttagagtttgttgtcttttggtaatcttccatgtattaaaaataaatagtgtggcttgagtaagaatttttgcacagctccatcactccaaaaaactaagtgacatctgggacccattcaataatataacactcagtaataaacaattgaatgaaaataaatctcctttaaataatcattgtatttttggaaattaaacaacaacaagaaaaagcatgccagaagccttcctctaaagaaaattaaaatctacctaatagcattccttcattttcctgggaactttattgctttcagtaataaggtaaaaaagtattttcttttggccagaagcttagaaaaatggatcctacaaaaatgtttcaggccgctatttttatttttagtgtttccagttgtatatacttaacatcagaatccaggtggatttttaccgttctcgtattgattttgytttaaaagattaaagcattttacaattctgaaataaatatagtttattagcactgaatttgatttgtttaatgatatcacctacacttatatctgagagataaaacattcataacactatatggcaattcttaaatttttagagagcgtattaaaatagcaatcatacctaagtgtacaaataggcatggtgtattttaagagtttctgatgtttaaagacacattttataactaaaattaaaaaattacttttgtttttatggcatttgatttttgcatagcttttgctttacatattctaattaaaaattgcatatatatgttttaatttagaaaacacatacttaggaggaaaaaaaatccatttcaccccattagatttcacttctctgttaggaatgttccttgagccttgtgtgttcttttagaccttttcctatgtgtttc

SEQ ID NO: 91222 - DNA, 919 bp, Homo sapiens
tgcataataatcacattggagtaaatggggtagctatcacctcaattatttatccttttcttctttgtgaattactttgtgtttttgtgtgtgttcatatgtgcatgtatacctgggcaatctatgtatgtggatagttactattagcagaaacatatactaaactcagattaattcagcaaatttattgaaatatctactatacrctaggcattaatgttagatgttgttaagctataagtaataaagaaccatcctttgcactctaggagcatcaagtttgcttgaggacaggaacagataaatatgtaataatgattacatgtaaaaagatttacatattttatttctccttacatcgataagacattatgtgttaatgtcaaacgactactcatcattgggctgaagcttcctgtctacaggcagacattcaggaagggaagatcataagcaaattgaaccccatgggcactagctgaagctgtttgccacttcagccatataagccagcaaacctaatggtactttaggtatcattgccatatagcaccattgtttggagccattggcagatttcctatagatacattgcatctcagaccctcaggttttggagtaaagcccaatcatcgtatggagataagtaggctccttttgagagttaacttatggcatgctactgggcctcagtaaaaacctaatgcttaattataggtcatcaagctatcctgcaatctaaactgcgcgtcatgaagtgggatttttctgacccaccaaggcacagagttgaacatacattacagcagtctattatcaaatagaagaggtatgtatgagatggggtttgagcagaaactgaaggaaaaaatgtaagctatatgaggccatggtccaaatgtccatagctcctattatt

SEQ ID NO: 91223 - DNA, 1005 bp, Homo sapiens
ctcacccaaccccagtaaggcaccagaatataagaagtgctgattgatgcttgttgaccttctttcttatagatacccccattgatgggaagtggaattgctggtcaaattggtcttcatgctctggaagacgtaagacaagacaaaggcagtgtaacaatccacctcctcaaaatgggggtagcccctgttcaggccctgcttcagaaacacttgactgctcctagcagatgatacagcagtgggctacatacaatgagagccctgagccctcaagaactcaygccagctcagccctacaccagtttccacctggagttcatgcaagggcaaaaggcagtgccatgcaagctgtttaaaataaagatgttaccttgtaaaatgcaagttgatttaaataaatactgagttaaaggcttaagcatctttgtaatcctcaccttactcactctacaattttatttcactcatattgactaccagccaggaattgtgttggaagttgttcacatttcagttccactctctagccgtgactggtataaataggtgcttaataatgaatcaatgaataaatattaatgcattctttccttgatgagtacaaggtcttgttcaataataatggtagttactgtttattggatgactactatgtgtcagccatggattctgtgtattaatcccttccatcctcatgacaaccttataaggtagatgctagaacagctggggggaactgaggcttagagcacttaagcaatttgtccactgttacacagttagaaagcggcagacctgggctacaaagtcaggctctagagttttaaattcttaactatgatgctgtcttacctctcagtaaatgagtatctgattaacaaagaatttttcatgaaataaaatgcagcagaaattactctgtgtgtgtgtgtgcgtgtgtgtgtgtgtgtgtgtgtgtgtgtgtgattgacaaatctccagccactcccttctgaggagaga

SEQ ID NO: 91224 - DNA, 1005 bp, Homo sapiens
ctcacccaaccccagtaaggcaccagaatataagaagtgctgattgatgcttgttgaccttctttcttatagatacccccattgatgggaagtggaattgctggtcaaattggtcttcatgctctggaagacgtaagacaagacaaaggcagtgtaacaatccacctcctcaaaatgggggtagcccctgttcaggccctgcttcagaaacacttgactgctcctagcagatgatacagcagtgggctacatacaatgagagccctgagccctcaagaactcacgccagctcagccctacaccagtttccacctggagttcatgcaagggcaaaaggcagtgccatgcaagctgtttaaaataaagatgttaccttgtaaaatgcaagttgatttaaataaatactgagttaaaggcttaagcatctttgtaatcctcaccttactcactctacaattttatttcactcatattgactaccagccaggaattgtgttggaagttgttcacatttcagttccactctctagccgtgactggtataaataggtgcttaataatgaatcaatgaataaatattaatgcattctttccttgatgagtacaaggtcttgttcaataataatggtagttactgtttattggatgactactatgtgtcagccatggattctgtgtattaatcccttccatcctcatgacaaccttataaggtagatgctagaacagctggggggaactgaggcttagagcacttaagcaatttgtccactgttacacagttagaaagcggcagacctgggctayaaagtcaggctctagagttttaaattcttaactatgatgctgtcttacctctcagtaaatgagtatctgattaacaaagaatttttcatgaaataaaatgcagcagaaattactctgtgtgtgtgtgtgcgtgtgtgtgtgtgtgtgtgtgtgtgtgtgtgattgacaaatctccagccactcccttctgaggagaga

SEQ ID NO: 91225 - DNA, 1005 bp, Homo sapiens
ctcacccaaccccagtaaggcaccagaatataagaagtgctgattgatgcttgttgaccttctttcttatagatacccccattgatgggaagtggaattgctggtcaaattggtcttcatgctctggaagacgtaagacaagacaaaggcagtgtaacaatccacctcctcaaaatgggggtagcccctgttcaggccctgcttcagaaacacttgactgctcctagcagatgatacagcagtgggctacatacaatgagagccctgagccctcaagaactcacgccagctcagccctacaccagtttccacctggagttcatgcaagggcaaaaggcagtgccatgcaagctgtttaaaataaagatgttaccttgtaaaatgcaagttgatttaaataaatactgagttaaaggcttaagcatctttgtaatcctcaccttactcactctacaattttatttcactcatattgactaccagccaggaattgtgttggaagttgttcacatttcagttccactctctagccgtgactggtataaataggtgcttaataatgaatcaatgaataaatattaatgcattctttccttgatgagtacaaggtcttgttcaataataatggtagttactgtttattggatgactactatgtgtcagccatggattctgtgtattaatcccttccatcctcatgacaaccttataaggtagatgctagaacagctggggggaactgaggcttagagcacttaagcaatttgtccactgttacacagttagaaagcggcagacctgggctacaaagtcaggctctagagttttaaattcttaactatgatgctgtcttacctctcagtaaatgagtatctgattaacaaagaatttttcatgaaataaaatgcagcagaaattactstgtgtgtgtgtgtgcgtgtgtgtgtgtgtgtgtgtgtgtgtgtgtgattgacaaatctccagccactcccttctgaggagaga

SEQ ID NO: 91226 - DNA, 1005 bp, Homo sapiens
ctcacccaaccccagtaaggcaccagaatataagaagtgctgattgatgcttgttgaccttctttcttatagatacccccattgatgggaagtggaattgctggtcaaattggtcttcatgctctggaagacgtaagacaagacaaaggcagtgtaacaatccacctcctcaaaatgggggtagcccctgttcaggccctgcttcagaaacacttgactgctcctagcagatgatacagcagtgggctacatacaatgagagccctgagccctcaagaactcacgccagctcagccctacaccagtttccacctggagttcatgcaagggcaaaaggcagtgccatgcaagctgtttaaaataaagatgttaccttgtaaaatgcaagttgatttaaataaatactgagttaaaggcttaagcatctttgtaatcctcaccttactcactctacaattttatttcactcatattgactaccagccaggaattgtgttggaagttgttcacatttcagttccactctctagccgtgactggtataaataggtgcttaataatgaatcaatgaataaatattaatgcattctttccttgatgagtacaaggtcttgttcaataataatggtagttactgtttattggatgactactatgtgtcagccatggattctgtgtattaatcccttccatcctcatgacaaccttataaggtagatgctagaacagctggggggaactgaggcttagagcacttaagcaatttgtccactgttacacagttagaaagcggcagacctgggctacaaagtcaggctctagagttttaaattcttaactatgatgctgtcttacctctcagtaaatgagtatctgattaacaaagaatttttcatgaaataaaatgcagcagaaattactctgtgtgtgtgtgtgygtgtgtgtgtgtgtgtgtgtgtgtgtgtgtgattgacaaatctccagccactcccttctgaggagaga

SEQ ID NO: 91227 - DNA, 1121 bp, Homo sapiens
atctattattgggggtaaaatacctacctcacagggttggcatgagaactaaaataatgtttataaagagcttagtatagtgtttggcatactagttctaattaaccataaagctcctatttaytggagtgttgacatgctattgctatccataaaacatacatgaggtagagcttaatatctctcattttacaggtgcagagattggggcttagagaatgatttgtgtaaaatcacatagctaattcaagtgttgagatctgaattgaaaagcacatgcttctactccactgcaccgttccagacaaagatggggttccagtaatttttccagtgggggctcaggtcaggcactttaaaattgtgcctaaacacgtattttcttgaacttttccatgttagtgtaatgtgggggacatgaattatacacctttttctggttattcctctcattagctggctgtgtccattgttgacatttcagggctagcatcagcaatgttactgttttttttttttaaataaagcccagtgtgcccttgaagaatatgcctttccctatgagataattggtttggaatcctgatgccattatttatcatcacgtggagctgatttgcaaggaatatggttttgatgcttgaggattggctttgcgccaagaagtcattgttggggattctggctgtttgatgttaagatgcaatctgctgagatgctgactaggcctattaatagaagttcaaacacagtgtcacaggcttaactatgagggcctggaaagagaggcctgaataacaattctgacagagccaggaggtgtcactggacaggacagtgtgacctcgacaccatgttaaggactcacgaaagcatctgaaacatgccgacagttcctctccatactcactctcactcaaattcactattttgggcacatggtatgccccaattaggtgtctttctttcccacaggatagagctccttagaggcagggattatgtcattaattcagaaagcattcactgagtgcctcttgccactgccaggcattgtacaaggagccagtagtcttattcatctttgtacccagcatctcacacagaggctagcacatggc

SEQ ID NO: 91228 - DNA, 1121 bp, Homo sapiens
atctattattgggggtaaaatacctacctcacagggttggcatgagaactaaaataatgtttataaagagcttagtatagtgtttggcatactagttctaattaaccataaagctcctatttattggagtgttgacatgctattgctatccataaaacatacatgaggtagagcttaatatctctcattttacaggtgcagagattggggcttagagaatgatttgtgtaaaatcacatagctaattcaagtgttgagatctgaattgaaaagcacatgcttctactccactgcaccgttccagacaaagatggggttccagtaatttttccagtgggggctcaggtcaggcactttaaaattgtgcctaaacacgtattktcttgaacttttccatgttagtgtaatgtgggggacatgaattatacacctttttctggttattcctctcattagctggctgtgtccattgttgacatttcagggctagcatcagcaatgttactgttttttttttttaaataaagcccagtgtgcccttgaagaatatgcctttccctatgagataattggtttggaatcctgatgccattatttatcatcacgtggagctgatttgcaaggaatatggttttgatgcttgaggattggctttgcgccaagaagtcattgttggggattctggctgtttgatgttaagatgcaatctgctgagatgctgactaggcctattaatagaagttcaaacacagtgtcacaggcttaactatgagggcctggaaagagaggcctgaataacaattctgacagagccaggaggtgtcactggacaggacagtgtgacctcgacaccatgttaaggactcacgaaagcatctgaaacatgccgacagttcctctccatactcactctcactcaaattcactattttgggcacatggtatgccccaattaggtgtctttctttcccacaggatagagctccttagaggcagggattatgtcattaattcagaaagcattcactgagtgcctcttgccactgccaggcattgtacaaggagccagtagtcttattcatctttgtacccagcatctcacacagaggctagcacatggc

SEQ ID NO: 91229 - DNA, 1121 bp, Homo sapiens
atctattattgggggtaaaatacctacctcacagggttggcatgagaactaaaataatgtttataaagagcttagtatagtgtttggcatactagttctaattaaccataaagctcctatttattggagtgttgacatgctattgctatccataaaacatacatgaggtagagcttaatatctctcattttacaggtgcagagattggggcttagagaatgatttgtgtaaaatcacatagctaattcaagtgttgagatctgaattgaaaagcacatgcttctactccactgcaccgttccagacaaagatggggttccagtaatttttccagtgggggctcaggtcaggcactttaaaattgtgcctaaacacgtattttcttgaacttttccatgttagtgtaatgtgggggacatgaattatacacctttttctggttattcctctcattagctggctgtgtccattgttgacatttcagggctagcatcagcaatgttactgttttttttttttaaataaagcccagtgtgcccttgaagaatatgcctttccctatgagataattggtttggaatcctgatgccattatttatcatcacgtggagctgatttgcaaggaatatggytttgatgcttgaggattggctttgcgccaagaagtcattgttggggattctggctgtttgatgttaagatgcaatctgctgagatgctgactaggcctattaatagaagttcaaacacagtgtcacaggcttaactatgagggcctggaaagagaggcctgaataacaattctgacagagccaggaggtgtcactggacaggacagtgtgacctcgacaccatgttaaggactcacgaaagcatctgaaacatgccgacagttcctctccatactcactctcactcaaattcactattttgggcacatggtatgccccaattaggtgtctttctttcccacaggatagagctccttagaggcagggattatgtcattaattcagaaagcattcactgagtgcctcttgccactgccaggcattgtacaaggagccagtagtcttattcatctttgtacccagcatctcacacagaggctagcacatggc

SEQ ID NO: 91230 - DNA, 1121 bp, Homo sapiens
atctattattgggggtaaaatacctacctcacagggttggcatgagaactaaaataatgtttataaagagcttagtatagtgtttggcatactagttctaattaaccataaagctcctatttattggagtgttgacatgctattgctatccataaaacatacatgaggtagagcttaatatctctcattttacaggtgcagagattggggcttagagaatgatttgtgtaaaatcacatagctaattcaagtgttgagatctgaattgaaaagcacatgcttctactccactgcaccgttccagacaaagatggggttccagtaatttttccagtgggggctcaggtcaggcactttaaaattgtgcctaaacacgtattttcttgaacttttccatgttagtgtaatgtgggggacatgaattatacacctttttctggttattcctctcattagctggctgtgtccattgttgacatttcagggctagcatcagcaatgttactgttttttttttttaaataaagcccagtgtgcccttgaagaatatgcctttccctatgagataattggtttggaatcctgatgccattatttatcatcacgtggagctgatttgcaaggaatatggttttgatgcttgaggattggctttgcgccaagaagtcattgttggggattctggctgtttgatgttaagatgcaatctgctgagatgctgactaggcctattaatagaagttcaaacacagtgtcacaggcttaactatgagggcmtggaaagagaggcctgaataacaattctgacagagccaggaggtgtcactggacaggacagtgtgacctcgacaccatgttaaggactcacgaaagcatctgaaacatgccgacagttcctctccatactcactctcactcaaattcactattttgggcacatggtatgccccaattaggtgtctttctttcccacaggatagagctccttagaggcagggattatgtcattaattcagaaagcattcactgagtgcctcttgccactgccaggcattgtacaaggagccagtagtcttattcatctttgtacccagcatctcacacagaggctagcacatggc

SEQ ID NO: 91231 - DNA, 1088 bp, Homo sapiens
tctagagaatttatattgagtagtcaaaagcctgggaaggactgaactctgttgaactcagaaatcctctcttgagagttctagctaaactagaactaccacagataggtgatagcagaatgctatatttgaaatgctgcaaataaataaatttatacatgcaaatcaaaatcttttagtaaaatcacacaattaacctctcactggggagaaagagccaatgtagatatatgctttagaaagttgttaatcattttctcattgcaacctactttgaaatcaccttggcctattgtctctcatatatatatgtttatatatatatatatatatatatgtatatatatatataaacttattttacacaatgtagatttattttatgctgatatactagtaatgttcttccctacattttacaaacaatgagattttcatttattgatggctggtctttgcaatggtcagtactctttgtaactctgactttttacagcacagcctttggcctcccctgaatttagtgtctttgaacacctgcttcattttgttggtgctgagatttcacatctcatgtgcactaactgctgtcatgttatatgaagttgaagtcatgtgttttgtaacaatgagctctggaactatcccttactggcagtgtgactttgaaccttactgctgctccatttaaccaactgtaaaatggtgataatggtagagctgcttcactgatactattatttagttcatgtttagaataaggtgtttaaaacaggtcttgcaaaagaaagtgctcagtaaaatggtagctaaattgatatcacgcgtgtccccacagtgggtctccaatgtgacagtcaatatcatttgcgtatgagcagacaaaactctctaggttttaggggttcatggttgatatttccwttttgcccttcagtgtgaaatttcactcacgtaggacttcatggaaagaatctaccatctttcaaggacttacacaatcttatgccatcctacctgccaagacattccagctgcaagtccattttcctgtattgctgactttcctgggtcttttcaggattatg

SEQ ID NO: 91232 - DNA, 2546 bp, Homo sapiens
ctgttcctccttctacaaaggagagattccatttgtggattttttttccaatttccacctgttttaggaatatccctccttctccttatccatagccaaatatccaggagggtgactgcggtcagtacctggtcattccatagaggctttcctctgcattcccatcactactacctgcaacttggcccattaaataatctcctaacagcctctcttccctcctggctcacaacagtttagtctgctcttctcccacagccagaatgactttattaccatcctgttaggctcctttcgcatccagcataaattccacagtccttgttatgtcctcctcctctctgccccttgggctcttcatgaggtggttccaggctmctggtccaacctcatctctgtaatcctcatctgcaccaggtgactgatgctccattctagcccatttccctacattaactgtgctccacagcagcacctttgcagagccctccccgacctagcccctgtgctcacactcatccttatgactcagcacaattgtccttctctataaagcctttctggcctcctgctatttcctgcatggtacccatagtggtagccatgtacacgaatgtgttgcattcactcagtctgtctaattctattagactgtgagctccttgtagatggagcctttacttttcttatattccaagtggtattctaaggtttccatgccttactttccttgtattctaagtggttgtcgtgctgtttggcatgtagtcaacagacaaattgtatttaatgcaagaatgaatggataaatcgcaattttatcttgttcctccttggaaatttatttgcaacttgattatcttgacactatattctcaactattacattcagaaagtcaaggcaacctgagaagatacagtgcccaaatccatttgtcttgccatcaaatcttagtggtatataatagaatagaaaaaaacgactcttaaagagcttgacccacttactctcactccttcagggttattgtttccagaggtgagtagttaagtgtgattttctcctagcttgttttctcttatggccaaaccttgctttagtttttattttctcaattattacatattatctgttatcttttttaaagggtcaaatgaaatattcagaaggctttactttatagatgggttcctgttgaaatggatcttatatctctaaccattgtacaggaggaattcattattgcctgatggcaaactcatgtctctggaccaagtgggccaagccctccccctgaggatgggtgtagtggttccatttaactgatggaatctcttgtatgcatgactaatgtgaacatttctcttctttctagaatctcttcattctaactctactttttttcctgaagttcaacataaaacctttaccacgaactcttgagcacttggtagattataagtgatgcttgcgtccttgtcctctagtgaacctttaccacaaactctcgagcacttagtggattatagctgatgtttgtgtccttgtcctctagtgtgttcctcaagtgtttgcttccagtgtgcatcacacttttatcatcagaaaagacaaacaaaaaatcttttaactctgttttgaacatagaagaaagtagttggatacctccttggaggcccttcttagctttagaaggaactgtcaagaactcaatggtcttatctgaaatttgctttgaaatttagagattgatgtatttttacaaagatgatccagttctctttttaaaaactaatgtttactttttaattattaaaatttcaataggacagcctgatgtggaatgatagccaggtgaactcaccctgctaatgaatgtccagaggtggccagcagggtgagcagcacctgaaagaccaaggtctgttccctcacccaaggctcccagagcctgtgtgtcatggccaaaagagactgtaaactgccaactgctctcaatctaatgaagacgggaaccggggtcaaaaattggagcaattgtttccaaaacaggtgcacacaaaacagtttactggagtgtgggaagaacatattataatttctattttatgcttcaatttcatccatttatattttatcttcaaaaatgttttatatgtatgtagtaatacatgtataccacttgtgaaacaaatattggagtttcataattttcttactgatgagtgcacacagtttaaattagagagtgttgaaaaaatattcatttacttatgttctaatattaaaccatagcagtctccataaaatattcactgtcggatttatacacttttgaactttgaagctatttgactattttgaccaattttacaagagaaacaatgatttacattaccttatcagtttgaaatgcaaactgtaagaaaatataaagcgcttaattctacaaagttaagtgaaatcattaatttgataatcattgatttttgcatttaacttttaccttatctcatcagaaaaatcttaagtatgcttaaaataa

SEQ ID NO: 91233 - DNA, 1082 bp, Homo sapiens
tttttacatataatcctttcatgaagtcattttcctgagagtatgggaatgttcaaagggctatcatgaaacgttctcaacctgtgcaattggagggtcttgagctcaagggggatccagagctcagctcaacattcaccagacagggaagtgacttggaaggcaccagcattctgaggttggccttgtaaggtaaggtgttcactggaagtatagggaaggtggcaatagcgacagataaacaagaaggctgatgagatgccagtgaagatgttatggacccgcagagctgaaatacagttgcatctgacaccagtgctttgaaattttggctacttgtatgctcttggctttgcctatactattttttaaggatttatgtaaagtttgttgttggttttgctttttgaatgttaaccagtttcaactgtggtgagtcaatgcaaaaaaaaaaaaaaaaaaagtttttggttcaagccagggccccagttctcacgaggctacaggatatctccaggaaagacagaaggttgagtctaagtctcccagggaccttgggaatcacagagagtggtatcaccaaaaaaaaaaaaaaaagcagcacaggatgaggtcatggtgactactttaccgcaggagattctagaggaaataacttatttaaaatgcccagtacataaattatgtttcaacatttggtagctggaaagattcactgaagtgtytgcttactgattattaactagtaaaatgaggctaataaagttaagttacatgtaagggcaatttaaatgtaatcaaaatggacataaagtattttttaaattataatgtgtcaatgcaaaaatatgttttgattcatagtctacacattgtttcatttgggtaaaatgtgatatactcataatgattagtgcacatgaatagagggaagttcaggctgtttattatatactcatacttataaaatgttatacactcacaacttatactatactttaagagtataatcagattttatggtataaacatcagtaagtatttggtactgataataagtcagaaaaatacttagaaatgca

SEQ ID NO: 91234 - DNA, 450 bp, Homo sapiens
tcctgccattgtaaatgttacgtgtaatgctgtatttccttcctaaattgtccttttattcagtaatctttatttgaatctcaagtagagatgtcacaaggtattccatatattctttctgcttttagaaataacatgattgtattgaaaacatttccattatcaaatagctctctgagggtaaaaraataattccaagtttttccaagtcattagaaataatcaaatttggtttcgaattggtcctgagattttacagatctcttgttaatgagctgaaattggaaggaagtagatttggcaccactgggaaggagaaccccagaagacatttaattctctgatctggccgggtgcagcagctcacgcctgtaatgccagcactttgggaggccaaggtgggcagatcacttgaggtctgaagtttgaggccagcctggccaacatggt

SEQ ID NO: 91235 - DNA, 1817 bp, Homo sapiens
atatggaaaatcttaagtaaaccagaatgctttcagagtaatctctacattgccttcagaaacacattttttttaaagtcatagaacagctagtaatttatttccaccttatcttatatggactggcttccaattgatccaatgtgggctatttagtaaacaaggcaatcaaaattataggttattaatgatttttacagttttaaaatttatttgctttggttacctgaaggtatagaactaagtgtgtagatattttttcctcctttgctaaggaacttgccaatttacttgaataccaaaaacattttctaaattcaaagtcattggttattattgttaaaacttatttttctattatacgggcaaaataatttttggcattaatttcaattaaacttagagctacaatcttcaaggatgtggtaccaatgaaaggaaattcatccttttataattttgggaataaaatccaacaggaccttttaaaactatcccaaagtaatacttctaaaagtactgatttattaaaatgtcatatacttaggttacaatagttagatgtttttctttttagtcatatatttctggattatttgtttcccaagccttttcatcattattggctgttgtatagtatatcaccataaaagttgtaccagatcaaataattttccagtattagatgcatagctgttcttttaaatttttgaaatattatataagattacaaaaagtttacatacaaaaacccccacacagcaaaactctatgtgtacacaaatgggaatgaaacaaagatattagttcactctttatctaaaaagcaaacagtaagaagccctttcttaacatctcaccagcattgtttgaatcatacaaagtaaaggttatcaaaatcagaaatttgaaagaggaagagaaattaaagagaactgagctcaataaaacttcttccaaaatctcmtggccaagcatgggaacctaaatcacaagtcttcttcatttgtacacctttgaaatctaggctgtttggtgtaacgggttttcctgtttataacagagagaaatatttgataagaatgtggaaatgtctcttgacactttaaagttcccaaatgtgtttggaattaaaatgtcagtgcatcagcccaaggctaatactgtagttgactacaaagaaaattattaaagtgagatcctgtaagtgtatctacacttacctaaagtgcttacctaaagtaagcactgacctaaagaataaagtcactatacagaatgatgtactattatacagtgatgcttcgcttacatgcttccacttattacagctagaaacatccaaaccataagggaacaagaaacaaatgggctttcatattttataaaatcatataagaagaagcatgcagagacttaaaagcatactgtactttgagccaaatattctttagaaatatgtgtgcaaatgcagaaaaatattttacttaaataggtacaatgtaatttgcttaacagtatttaggaaagcatcaatttctttaaatagttttaattctaagcatattgttgcatattgctttttttattaaatgacttatacaaaaagaaattagtcaagaacacagtattgatacatgtgaaaaaataacttttaaggtttcatataaaagttgtcccttcaacaggataaatgagggctttggagatacataacttgatgtcagtaaaaataacaatcttggatatgaaggcctttcgtcttcagagagatccaaaagcctgataacatttggctagtctttaatgggtttata

SEQ ID NO: 91236 - DNA, 1817 bp, Homo sapiens
atatggaaaatcttaagtaaaccagaatgctttcagagtaatctctacattgccttcagaaacacattttttttaaagtcatagaacagctagtaatttatttccaccttatcttatatggactggcttccaattgatccaatgtgggctatttagtaaacaaggcaatcaaaattataggttattaatgatttttacagttttaaaatttatttgctttggttacctgaaggtatagaactaagtgtgtagatattttttcctcctttgctaaggaacttgccaatttacttgaataccaaaaacattttctaaattcaaagtcattggttattattgttaaaacttatttttctattatacgggcaaaataatttttggcattaatttcaattaaacttagagctacaatcttcaaggatgtggtaccaatgaaaggaaattcatccttttataattttgggaataaaatccaacaggaccttttaaaactatcccaaagtaatacttctaaaagtactgatttattaaaatgtcatatacttaggttacaatagttagatgtttttctttttagtcatatatttctggattatttgtttcccaagccttttcatcattattggctgttgtatagtatatcaccataaaagttgtaccagatcaaataattttccagtattagatgcatagctgttcttttaaatttttgaaatattatataagattacaaaaagtttacatacaaaaacccccacacagcaaaactctatgtgtacacaaatgggaatgaaacaaagatattagttcactctttatctaaaaagcaaacagtaagaagccctttcttaacatctcaccagcattgtttgaatcatacaaagtaaaggttatcaaaatcagaaatttgaaagaggaagagaaattaaagagaactgagctcaataaaacttcttccaaaatctcctggccaagcatgggaacctaaatcacaagtcttcttcatttgtacacctttgaaatctaggctgtttggtgtaacgggttttcctgtttataacagagagaaatatttgataagaatgtggaaatgtctcttgacactttaaagttcccaaatgtgtttggaattaaaatgtcagtgcatcagcccaaggctaatactgtagttgactacaaagaaaattattaaagtgagatcctgtaagtgtatctacacttacctaaagtgcttacctaaagtaagcactgacctaaagaataaagtcactatacagaatgatgtactattatacagtgatgcttcgcttacatgcttccacttattacagctagaaacatccaaaccataagggaacaagaaacaaatgggctttcatattttataaaatcatataagaagaagcatgcagagacttaaaagcatactgtactttgagccaaatattctttagaaatatgtgtgcaaatgcagaaaaatattttacttaaataggtacaatgtaatttgcttaacagtatttaggaaagcatcaatttctttaaatagttttaattctaagcatattgttgcatattgctttttttattaaatgacttatacaaaaagaaattagtcaagaacacagtattgatacatgtgaaaaaataacttttaaggtttcatataaaagttgtcccttcaacaggataaatgagggctttggagatacataacttgatgtcagtaaaaataacaatcttggatatgaaggcctttcgtcttcmgagagatccaaaagcctgataacatttggctagtctttaatgggtttata

SEQ ID NO: 91237 - DNA, 652 bp, Homo sapiens
tgcataaaggaatcacattttcaaaaaaccgtcagcttcaatagatcagaatgtcctagtctgctattaatcttttgcctgacttctaaaaaccaacttctggcttgttcctatgatgaaggatctatcctgtacctagttcctaaaactggagcctgtatatgaagtccctgacttgataattctttttagttaccagggtcttaacagaccaagaactgccttgctggggccacttttcccggggctctcttcccagtggctttctaatgctgacctcttgcttgcctgcatctcagcacatttcaccttgcggaatttccgatttgtgtcctgagcatttctgccaraacagtttctcagtcactgtcatttggctgctactataagaaacccacttgaactatgttaactaaaatagtaagtttattctacagttagtttcctcagaattgaagggcagggagcttggggattaggcccatgaatggaaagtcctcaggaatccaggcaacagctgtcaccatttcattctccctctttccctggagtcatactgtctttcatctcagtttctctttgtatgcctttctgccagccagtgctcctgattccgagcatacatgatttccccagttgtcttcaagaagct

SEQ ID NO: 91238 - DNA, 652 bp, Homo sapiens
tgcataaaggaatcacattttcaaaaaaccgtcagcttcaatagatcagaatgtcctagtctgctattaatcttttgcctgacttctaaaaaccaacttctggcttgttcctatgatgaaggatctatcctgtacctagttcctaaaactggagcctgtatatgaagtccctgacttgataattctttttagttaccagggtcttaacagaccaagaactgccttgctggggccacttttcccggggctctcttcccagtggctttctaatgctgacctcttgcttgcctgcatctcagcacatttcaccttgcggaatttccgatttgtgtcctgagcatttctgccagaacagtttctcagtcactgtcatttggctgctactataagaaacccacttgaactatgttaactaaaatagtaagtttattctacagttagtttcctcagaattgaagggcagggagcttggggattaggcccatgaayggaaagtcctcaggaatccaggcaacagctgtcaccatttcattctccctctttccctggagtcatactgtctttcatctcagtttctctttgtatgcctttctgccagccagtgctcctgattccgagcatacatgatttccccagttgtcttcaagaagct

SEQ ID NO: 91239 - DNA, 998 bp, Homo sapiens
agcttctctgaccagagtttggggatgcaggaaacattccatagccttccacatggagtaagttctcctagccatgtggagccatgtgaagatcccttgattcaggaggttatgatgctttgtgtgcaactggtacagagtagaatctgaatgttgtcttgttgcaatcatgaaaagtagggacaataaaggcagtgcttttaagagagtctggtggatatatggagcttgatggtagctatatatgaatgtttagggtggaagtggggagtagaaaatggagattcccttttgagataatttctcaatattaaccagcggtaacacaatagctggagaacaccaaggtaaagcccttggtctctggaacccactgcctagatcttccartcttctatctgccactactcactgtgtgaccattggtaaatacttaacttattttttgtttcagtttccatatgggtaagtggggtaataatagtgtatacctatgagacaacacatgtaaagtgctcagaaaaatatgtgacataaagtttccactaaataaatgtcagctgcaagtgttatgtttcccgaagcaccttaatgatcaccttgcctccatgttgcaatcctgaggttggtagactggggattgccatggccattctacaggtgagacactgacaggtccaaaagttagttggttggagtgtctggattgggatttaactgtccaggttctgattagaattttctctccatatcatttttttccttttccagggagtgagagaagcctgtggcatgtttgcatgcagtggtgaagggcacatgcctctggccaagagagagatttttcaaggaaaggtgttcagggagatcattagaaaacttgcaagatcagaccctcaagtttcaacagctggcagtgtcatttgttaagaaataaaagaacattactagggagtccagcaggggaattttccaactaacctccacattgctgggta

SEQ ID NO: 91240 - DNA, 548 bp, Homo sapiens
caaggctgatggctttgagggaagcccagagcacagaaagctgtgaagcaggctcaagctgcagttcaggyagccctgtcatttgtaccacatgatcatccagagcttatgttactgaaagtttctaggatggacaagatgccacatggaatttatcacgagcttcaaatggagacccacaatagagttttctagagtcctggagcaaggctgtgccaaccacagcatgaatttgtacactcctctaaaaagcatgttactaggtcttggtaaaaatggagcattgtgagatggtggaaaggaagacccagtagcaatttattgtgagatggaaatgtcacatccgggacagggcccaattatgctgcacaaccagttcactcaccttcatgtcatccatcagttgcaccagggcctctccctcagctcacactcagggctacataagacagaggtgatctttatggccaactgagaaaggcaaacggtgcttcttcaaaattaaaatgaactaatacatagaaagtgcttaacacagagatagcaga

SEQ ID NO: 91241 - DNA, 548 bp, Homo sapiens
caaggctgatggctttgagggaagcccagagcacagaaagctgtgaagcaggctcaagctgcagttcaggtagccctgtcatttgtaccacatgatcatccagagcttatgttactgaaagtttctaggatggacaagatgccacatggaatttatcacgagcttcaaatggagamccacaatagagttttctagagtcctggagcaaggctgtgccaaccacagcatgaatttgtacactcctctaaaaagcatgttactaggtcttggtaaaaatggagcattgtgagatggtggaaaggaagacccagtagcaatttattgtgagatggaaatgtcacatccgggacagggcccaattatgctgcacaaccagttcactcaccttcatgtcatccatcagttgcaccagggcctctccctcagctcacactcagggctacataagacagaggtgatctttatggccaactgagaaaggcaaacggtgcttcttcaaaattaaaatgaactaatacatagaaagtgcttaacacagagatagcaga

SEQ ID NO: 91242 - DNA, 868 bp, Homo sapiens
gacacacacatacctttgcagtcttgtgatgagtctgactaccttgaagatgtcacgctggaaataacattcaggaactgcatggagatagacggaggtagagacataaggaaagtctcagctgttctagtccctagcagttcaagtcttccctgcccaggcaccagacatgtgagtgagcacttactcattaagtgaatacagaccccaatctttgagatactctatctgaagtttagtggaacagaagtctgaaccccgcccatcattcagatctgcaggcaaagtaaatgttatttccactgactttgttttttgtttgtttgtttttgagacggagtctcactctgttgcccaggctggagtgcagtggcgcgatcttggctcattgcaagctccgcctccttggttcacgccattctcctgcctcagcctcccgagtagctaggactacaggcttcccccaccacgcccggctaattttttgtatttttagtagagacagggtttcaccatgttagccaggatggtctcgatctgctgacctcatgatccgcccacctcggcctcccaaagtgctgggattacaggcatgatccaccgcgcctggcctgactttggttttaataaactttccttgtatctggaccagagtggttggtacaatgggttggatgtttgagtttatgactttcaagaaccatcccaaattatacagaattgggactatgtttgtgaaaagttgctttctgtyttctcttgtatataaaggatgctatgttttatcatttggtcctaaagtaattcacaaaagaaaaattctgcttttctaatcatcttaactttgaatatggcttcaggcaggaat

SEQ ID NO: 91243 - DNA, 522 bp, Homo sapiens
taatcataacaacaacaaaagaatgataagtgcaacatgtctactttttccttttctccayctctcatagctggttttcctgtaagagtctcccatcttcttccagatatttttccaaccagcatctttcatatgaatctacaatgttatcccctgtaccagccccctacaggtaatagcttcagagaacacaatgggaatggctgattagataacgaaagcaccaagacctacattccctggttgtacaggatttgtgtttccctgggccagttcaggacacccttatcaccacctatacaaactttcgctaatccaacaggccacatttttactaccctcacagattatgtttgttcaatttgtgtttctcacaattgttataaatattttcatattgtatatgcaatattgcaactttttttttcttcaaacatctggtttggggatttagttaagtgataggtagctttaattactccattaccattggcatagagcttccattatgtgagtatgtat

SEQ ID NO: 91244 - DNA, 522 bp, Homo sapiens
taatcataacaacaacaaaagaatgataagtgcaacatgtctactttttccttttctccacctctcatagctggttttcctgtaagagtctcccatcttcttccagatatttttccaaccagcatctttcatatgaatctacaatgttatcccctgtaccagccccctacaggtaatagyttcagagaacacaatgggaatggctgattagataacgaaagcaccaagacctacattccctggttgtacaggatttgtgtttccctgggccagttcaggacacccttatcaccacctatacaaactttcgctaatccaacaggccacatttttactaccctcacagattatgtttgttcaatttgtgtttctcacaattgttataaatattttcatattgtatatgcaatattgcaactttttttttcttcaaacatctggtttggggatttagttaagtgataggtagctttaattactccattaccattggcatagagcttccattatgtgagtatgtat

SEQ ID NO: 91245 - DNA, 522 bp, Homo sapiens
taatcataacaacaacaaaagaatgataagtgcaacatgtctactttttccttttctccacctctcatagctggttttcctgtaagagtctcccatcttcttccagatatttttccaaccagcatctttcatatgaatctacaatgttatcccctgtaccagccccctacaggtaatagcttcagagaacacaatgggaatggctgattagataacraaagcaccaagacctacattccctggttgtacaggatttgtgtttccctgggccagttcaggacacccttatcaccacctatacaaactttcgctaatccaacaggccacatttttactaccctcacagattatgtttgttcaatttgtgtttctcacaattgttataaatattttcatattgtatatgcaatattgcaactttttttttcttcaaacatctggtttggggatttagttaagtgataggtagctttaattactccattaccattggcatagagcttccattatgtgagtatgtat

SEQ ID NO: 91246 - DNA, 522 bp, Homo sapiens
taatcataacaacaacaaaagaatgataagtgcaacatgtctactttttccttttctccacctctcatagctggttttcctgtaagagtctcccatcttcttccagatatttttccaaccagcatctttcatatgaatctacaatgttatcccctgtaccagccccctacaggtaatagcttcagagaacacaatgggaatggctgattagataacgaaagcaccaagacctacattccctggttgtacaggattygtgtttccctgggccagttcaggacacccttatcaccacctatacaaactttcgctaatccaacaggccacatttttactaccctcacagattatgtttgttcaatttgtgtttctcacaattgttataaatattttcatattgtatatgcaatattgcaactttttttttcttcaaacatctggtttggggatttagttaagtgataggtagctttaattactccattaccattggcatagagcttccattatgtgagtatgtat

SEQ ID NO: 91247 - DNA, 1186 bp, Homo sapiens
aatgcagactcagccctactccagacacactgaaccagaatttggatattaacagactcttgttgttttctgtacacacattagacatttgagaaactctgcttcactaaactgtactttcttgagkgtggcattgtgtctgccttcttcagcatttatcctaggttcctaataatgtagctgttatatagtcagcacccagaaaataagttgatcaaacacacacacacacacacacacactacacacaatatgataaagtgccagtgatttagaaaaatgttgtacgttagtcattgaacacagagaattttgtaactttttgttaatagattactgttccatgagaccagcagtgttctaggcccattggctagtgtgccttctgataaattgatctgatgtactgctttgggacctgttgttgagaaactcttattataacaaagtgagcagtattttatttagatttttgggcagcttatgatgtccaatcgagctgtagctccatgctacgatctggtctgggaggatttgcatggtaaatgtgcttgcccatcagggcgtgccttaagtctgaaagtgtgccttttctgttggtacttgcagaatttccaattcacagagctggaagagggagggaaaaaatcacagctacttaaattcaaatcctattaggcttatctatgatcactttgtaagtactagggataatcagcagttacttagcatttaccttgtagaggcagtagaactctgcaattattattatctaggcttgatatctggctcattttaaggcctatgtatctgacaaatccacacacccctgcacaacagattctattttggcttgtctattccagatatgtgatttattcttacaattataaagtgtttcaaatctgatacattcagaggatttttgtttgacctttagatttagcatcaaatgtttctgttttaaaacagcagggatttaggtaaatctattcaataaaattggatgccatctatctttttggtatgttatccctttgttttgtatggatgacacataatatgatgtgatttaccacagtaggaagagatggaaaaaggctgctttctaaatatacactagttgcagcatacccacatctatctatgaaaaactgaagttcattattattatatttttgctaaa

SEQ ID NO: 91248 - DNA, 1186 bp, Homo sapiens
aatgcagactcagccctactccagacacactgaaccagaatttggatattaacagactcttgttgttttctgtacacacattagacatttgagaaactctgcttcactaaactgtactttcttgagggtggcattgtgtctgccttcttcagcatttatcctaggttcctaataatgtagctgttatatagtcagcacccagaaaataagttgatcaaacacacacacacacacacacacactacacacaatatgataaagtgccagtgatttagaaaaatgttgtacgttagtcattgaacacagagaattttgtaactttttgttaatagattactgttccatgagaccagyagtgttctaggcccattggctagtgtgccttctgataaattgatctgatgtactgctttgggacctgttgttgagaaactcttattataacaaagtgagcagtattttatttagatttttgggcagcttatgatgtccaatcgagctgtagctccatgctacgatctggtctgggaggatttgcatggtaaatgtgcttgcccatcagggcgtgccttaagtctgaaagtgtgccttttctgttggtacttgcagaatttccaattcacagagctggaagagggagggaaaaaatcacagctacttaaattcaaatcctattaggcttatctatgatcactttgtaagtactagggataatcagcagttacttagcatttaccttgtagaggcagtagaactctgcaattattattatctaggcttgatatctggctcattttaaggcctatgtatctgacaaatccacacacccctgcacaacagattctattttggcttgtctattccagatatgtgatttattcttacaattataaagtgtttcaaatctgatacattcagaggatttttgtttgacctttagatttagcatcaaatgtttctgttttaaaacagcagggatttaggtaaatctattcaataaaattggatgccatctatctttttggtatgttatccctttgttttgtatggatgacacataatatgatgtgatttaccacagtaggaagagatggaaaaaggctgctttctaaatatacactagttgcagcatacccacatctatctatgaaaaactgaagttcattattattatatttttgctaaa

SEQ ID NO: 91249 - DNA, 1147 bp, Homo sapiens
atggatagatgatagagaaagagatttattttaaagaactggttcacatgattatgtaggcagagatgtttcaagatctatactcagcaagctagagacccaggagattacatggtgtagtttcagtacaagtctgaagcttgagaatcagcggggagcagayggtatagattccagtccaagtaaaagttcaaagggaggagaagactgatgttctagctcaaagacaatcatgtggagagagtgaattctcccttgctcaaacttctcgttctaatcaggccttcgacagattggataggcccacctacattgggaggacaatctgctttagtcagtctactgattgaaatgtcagtctcatccagaaacaccctcacagtcatactcagaataatgtttagccaaacatgggggcaccctgtggcccagtcaaggtgacataaaattaaccatcacaggtggtccagtgaattgtgatgttttcacaagcaggaagagaagaaatattggacttatagacatgcacagtgtgtcatggaatatccagttggaaacatagatttgagcccagaaaagattttacattctagccttaaatttggtgagagctgaagacatagacatggatgaaattgcttaggaagaacacatagatccatcgactccattatgtattgaacatctattatattaagagtaaataggcactagaaatataattaacaaaataaagacaattcttaccataaagaaacttaacttctagggagggagaaaaaaaatcaaacaactgagtaaagaaacaaagagattataccatcaaaagtatggtaagtacagaatagaaaaaatgtcctatccataagaagatataacaagagaatctgacttaatctggagtaatttggaagacttccttgggtgagtgacatttacacaaagacctgaagtttgcatagactaagcaaaaaaaggatggcattagagagactaaaatacagatttatgtctgcaacattgcaatgaagagaagaaatgtcaagacccaagattatagaggtagttacggtcagctcattcagggtcttctaggtaattcgaaggtttagcagactgaattactggtcacaattcctcactcccc

SEQ ID NO: 91250 - DNA, 1147 bp, Homo sapiens
atggatagatgatagagaaagagatttattttaaagaactggttcacatgattatgtaggcagagatgtttcaagatctatactcagcaagctagagacccaggagattacatggtgtagtttcagtacaagtctgaagcttgagaatcagcggggagcagacggtatagattccagtccaagtaaaagttcaaagggaggagaagactgatgttctagctcaaagacaatcatgtggagagagtgaattctcccttgctcaaacttctcgttctaawcaggccttcgacagattggataggcccacctacattgggaggacaatctgctttagtcagtctactgattgaaatgtcagtctcatccagaaacaccctcacagtcatactcagaataatgtttagccaaacatgggggcaccctgtggcccagtcaaggtgacataaaattaaccatcacaggtggtccagtgaattgtgatgttttcacaagcaggaagagaagaaatattggacttatagacatgcacagtgtgtcatggaatatccagttggaaacatagatttgagcccagaaaagattttacattctagccttaaatttggtgagagctgaagacatagacatggatgaaattgcttaggaagaacacatagatccatcgactccattatgtattgaacatctattatattaagagtaaataggcactagaaatataattaacaaaataaagacaattcttaccataaagaaacttaacttctagggagggagaaaaaaaatcaaacaactgagtaaagaaacaaagagattataccatcaaaagtatggtaagtacagaatagaaaaaatgtcctatccataagaagatataacaagagaatctgacttaatctggagtaatttggaagacttccttgggtgagtgacatttacacaaagacctgaagtttgcatagactaagcaaaaaaaggatggcattagagagactaaaatacagatttatgtctgcaacattgcaatgaagagaagaaatgtcaagacccaagattatagaggtagttacggtcagctcattcagggtcttctaggtaattcgaaggtttagcagactgaattactggtcacaattcctcactcccc

SEQ ID NO: 91251 - DNA, 375 bp, Homo sapiens
gaattccaaaatattttttaaaagcagctctgtacatgtcgataarttatttgctcattgtaattttttgaatctgtttgtcaaagcaaatgtagacgggctcgaactcctgacctcaaatgatccacccgcctcagtctcccaaatgctggtattacaggcatgagccaccgctcatggcctgttatcatttttaattgaaaattttactgagataattgtagattcacttgccattataagaaataattcagagatatcacttgtatacttagcccagtgtcccccaaaggtaaaattttgcaaaattatagtctaatgtaacagcatgaatattgacattaatacaatccactgagtttattcagatttccc

SEQ ID NO: 91252 - DNA, 375 bp, Homo sapiens
gaattccaaaatattttttaaaagcagctctgtacatgtcgataaattatttgctcattgtaattttttgaatctgtttgtcaaagcaaatgtagacgggctcgaactcctgacctcaaatgatccacccgcctcagtctcccaaatgctggtattacaggcatgagccaccgctcatggcctgttatcatttttaattgaaaattttactgagataattgtagattcacttgccattataagaaataattcagagatatcacttgtatacttagcccagtgtcccccaaaggtaaaattttgcaaaattatagtctaatgtaacagcrtgaatattgacattaatacaatccactgagtttattcagatttccc

SEQ ID NO: 91253 - DNA, 1760 bp, Homo sapiens
caatctccgcctcccaagctcaagtgattcttgtgcctcagcctcctgagtaggtgggattacaggcatgtgccactacggctggccaatttttgtattttttttttttttttagtggagacggggttttaccatgttggccaagctggtctcgaggtcctgacttcaagtgatcccccagcctcagcctcccaaattgttgggattacagacgtgagtcaccacgcccagcctacagtctctagtatttttaacacattaactttctgaagtctggaacttgaagtctaagatagttcagttacttagtcctctcttatacaaatgaatatacttttatgtaataggtatatttgtagaggagttgctcattcaaaaagtcaggagtcatgctccataaagacttctattacgactcttttttgcaaagtgaagggaatcttcacaccatttgaaaataactgtcttctgctggattgtcctagcagagcttcttcaagtggtaatatggctgaataaacagtgaatacaactaacagttgcccatttgtggatactgaaactataatttctgtttccctttattcttgttgaggtgtccacaacaagaaaacttgtgtctactgaggatgagaggaaaatctcattacttcagcttatttctaagcatttagtttttcttttactaaccactaaattcatcataaattcacgtgaagatctaaagaacctgactgtctaattgctcaaaaaaaagtcacatatgcaaagacatttttgtgtccttagtatcaacaggcaactgactaatgttaaattattagtcagaggaagtttgtatctggcttggatcccattgtggacatttgcagataggtccgtggaattgtatatgtataaatgtcttgagtttacattcacattagttatttgtatgctaaattccttcaagataaccaccgaattttcaattcccaattctaagccttaaacactccctgccattgccatacacacagaggtaaaccatggtctgtacccaggtgtgtgctgcgagcagagatatatatatatatayacacacacatacatacacacacacacacacacacacacacacacacacacacacacacaaatagtgtacccctaagggaggcccactcattcaacattttgttgttgtattaaacaatattcttctttaggccaggcacggtggctcacgcctgtaatcccagcacttggggagactgagatgggtggatcacctgaggtcaggagttcgagacaagcctgagcaacatgatgaaaccccttctttactaaaaatacaaaaattagctgggtgtggtggcaggcgcctgtaatcccagctacttgggaagctgaggcaggagaattgcttgaacccaggaagtggaggttgcagtgagccaagatcacgtcattgcactccagctggggcgacagagcaagactccatcttaaaaaaaataaaaaataaaaagcaatattcttattttataaagagtgattattggccgggctcggttgctcacacctgtagtcccagcactttgggaggctgaggtgagtggatcacttgaggtcaggagttcaagaccagcctggccaacatggtgaaaccccttctctactaaaaatgcaaaaattagccaggcatagtggtgtgtgcctgtaatcccagctacatgggaggctgaggcaggagaatcacttgaacctaggaggaggag

SEQ ID NO: 91254 - DNA, 1858 bp, Homo sapiens
ttctttagactttgtttagaaattaactttctccatgagttatgtatggtctgattactgtgagggacagcctttatcagggtttaaaatacctcagtatgccaaccctcctcccatttttggaacataaatttgcagtgaaaatggcatatattttaatgaggaaatgataccaatttcaatattgaggaactaaggcacaggtacttctggaaaataggattgatttcaggtgggttcccttaccataccacttggggaggggtgtgtgtgagtgtgtgtgtgtgtgtgtrtgtattgtgcatgtgtgtataatcccacatcagcacagaagaataaagagataatcaaatatcaatgcaggagttggtgggtttttttgtttttttttttttttgccccatagagatattttcaaactagctttccttagtatcaaatgtccccaagtccaacagttacaatttccaataattaattgtccgcaggcaaggtgattcaggtgttttttgtgttatctctgtgcagggcttgtgttgtccttactggatgcctgcatcaggttgcctgggagagcctagagctggggaggtggaaagatgaggcttcctgtagatttggcactctttgcccagtgctctggattctctaagacggccttttcctatgagtgacttccagggggcactggtgttttgtcacttaacctgtgtacttatagaaaattgcaggtgtttacagaatttatgatttagtaaatttagtaactcagtaatgctcatataccaaagtgagcaatttgcatgcttgtagctctgtgtgagcgagtctgggtgggagagtgtgagtgcttcggaatgcaggatcccggtgagtgccatgtacggcaggtaatgggaaagacttctgcaggactggtgtatccagtggtgtcagaggctcttccctgaaatactgccatcgctggaaatgccctgagttcggggaaggaggaggggagcagccagctctttgaagacctcaaggccccttcaggggctgctagagactaaaaatggaactcgcataaacccactgccctttctgtgtgctgcaggcttttgggagcaaagggtggttttgtgacaaaatcatctaactgcttgtcaaggacttccaataaccctgtgactgacaataatagagtgttttgggggagcagtgaggtggaataatgtgtgtctggctggagtgaatagaagctggtattttccagataaagttcaagtaatttacttccaaagtatatttaaacatttatttctacaaggagtgctccaaagaattttgattagatggctcaaagtttaaagataatccttgcttgaagataatccttggcaagtcaaaaatttttccccacctccatgtataccttcttttcctgattctaatccatcttctctaattgcgatttctttctcatagtcagctttttcaaattacaggtaaatgtcttagttgctacacaagtttctaagtgaccaccaggaagtgagagttaagccctagatatggagttttattcttgggatatttgcttctgtgacacacggtcttcctcattaatacttcccgatgggaacatgaagtgtctcattttgaaatacgtgtcatatctggggctggttgactgatatggttttgattgaaaacaatcaataggagtggtattgctgtaagaaaacatttggtgaaaatgtagaaggaaaatattccaatgcacatttttgcctaaataatatttattcatatatttacttcagggatttataggaaatggcctatcttctttatatgaagacaattctagtaattt

SEQ ID NO: 91255 - DNA, 473 bp, Homo sapiens
caccgtgttagccaggatggtctcgatctcctgacctcgtgatccacccacctcggcctcccaaagtgctgggattacaggcgtgagccaccgtgcctggttacagtaccctttttgatagcaggagaaaagatggtcattaatgtatcctcttataataagagtaatatttaagaaagccacaaaatatgaaaagcttttctatccagatttacattctgttgtagaccatctttattctgttatttactgtacgttagaccaattgatacctttcattttcctctggggtttgcatttcscagatcacttttaaaaggaaaacataggagcctgaaacagaagtgggaaacaaatatttactcaaactaagagactaaactcagtagccagcaacaagagatcaaggtgtgtgtgtgttttctggttgtgcagatattgtctgaaataagatggctgaaaagttcaagtga

SEQ ID NO: 91256 - DNA, 558 bp, Homo sapiens
atacccaatgcaaaatggaacaaaaccactaaggaccgagtggttaagattgtgtattctgattgctgcagaatgagggaaaggaaattaaattcgatcttataattgaaagtccaacacttgatgagttattttcccctggcagccgtaaacccctgctaccgtatatcagatagtcctggcttcccttggctacacctacttacagcattgaaacaactttcctggctggtggggcccttctgacttttgggccctgggacacgttctctgtttcaaatactgtttaatactcatttcctgatcactctcggacttgattcttcttatactacttactcctgcacatctaattgactctagtyaagcatttcaaccaggtttctgttacttgtgttttctatgtattttatactatctcccattgaattaattcctccactagagtcttggtgtttctctcaatacttctgtctttgcacctcctgccacctccctgaccatggtgcttactgtgggtggtccctgtcaactgactagctgtcatattagctatgt

SEQ ID NO: 91257 - DNA, 558 bp, Homo sapiens
atacccaatgcaaaatggaacaaaaccactaaggaccgagtggttaagattgtgtattctgattgctgcagaatgagggaaaggaaattaaattcgatcttataattgaaagtccaacacttgatgagttattttcccctggcagccgtaaacccctgctaccgtatatcagatagtcctggcttcccttggctacacctacttacagcattgaaacaactttcctggctggtggggcccttctgacttttgggccctgggacacgttctctgtttcaaatactgtttaatactcatttcctgatcactctcggacttgattcttcttatactacttactcctgcacatctaattgactctagttwagcatttcaaccaggtttctgttacttgtgttttctatgtattttatactatctcccattgaattaattcctccactagagtcttggtgtttctctcaatacttctgtctttgcacctcctgccacctccctgaccatggtgcttactgtgggtggtccctgtcaactgactagctgtcatattagctatgt

SEQ ID NO: 91258 - DNA, 2144 bp, Homo sapiens
aagatgaagagaagacttacaaggggcagaaaaatgggaggaaaatgggagcagccaagtgtcacatgtgttgaggttttcaatattaattttgatagacttcttattaacaaatactgttgattgtctactatgagctgggtactattttagtcagtacatttataagactgagtataaaagtccctggctttatggaggccacctgtcggtggggtgagtgcaagagaggttgaaatactataacattgtgtgatacaatacacaggcattttaactaaatgacatagatatgaagattcatactatgagtgtaacccccaaatagtataaaatatattttaaaatggaacatttttcctcttaggtttatgattcagtaatctcaatgataataaaatagacccataaaataaagataagttgaaatgtggaatgaacagaacctgaggtgtatgacttatgcccatcaccatcatatataatacagcttctttccaagtctatacagtgttcaagtccttgaaagagggagtcggtaaagggacagggcaggactaggcacttgagatgtgtttgttactctggggaatgaagctgctgagcaggccttttctgcattgttagaaaagtgtgtaataaacaaagggaagaagcttcagtaagctggacaacacacacgagtgataatcagaaggtctctcctttgcaaatacacatcttgcttttgcaaggatagtgttgtatctcatggaaagctgtgtaaatatcaggatcctgtttatactagttagacacatgaaacatgcttgcacatgctcacatacatacacacaaacacagtcacayagttggctcttgggtaactgtcatcctttctcgtaagtttttccatggaattgatgataattcaggtaacggttaagtatggccctacataaatgcttgcttgtttagccaggaaacatttggtatgaacagcaaggtgtgactgtgaaggggttgctgatatgtatgtgtggagtcaatgtatgtttcgtgagttaagagatgatttgttgcagggctaatgatattttgaaagacaagaataagatacaacactatccttggaaaagcaagatgtgtatttacaaaggcgagaccttctgattatcactcgtgtgtgttgtccagcttactgaagcttcttccctttgtttattacacacttttctagcaatgcagaaaaggcctactcagcagcttcattcctcagagtaaagaaagaagctgtattatatatgatggtgatgggtgtaagtcatacacctcaggttctgttcattccacatttccacaagaataagaatgcctttgctaggtggcatggaaaaggaataaagacattttgaaacttttaaacacctatatgataggtctctgatatagtcattaaaatcatcattaatttactgaatagtcatcaaactataactatttatgaggtttggagagggtttgaaagaaaactaacaaaataagcctttgcaaagtgccaaatgatagtgcagaaaataaaaatgatgggagtttagaaagggtggagaataatgatataaccaaatatgaaaaataattgacagtatcttaaccaatatggtagtgcgtgtcatgtaagataaagtgaatcctgtagagatagcagttcatgctggacgagtgattttattctcacctccttggccctagggaggtgagagattcttttgaagggaggctggatttagcggcaactttaagcacaggaccttattgagtatcaataagatacgtcctgggggaggtatcagtgtttggcttgagggaatttctcagttcaacagtagacttttcaggcgaagaagaaagaaatcaaatatcctagtacgagcagagaggcgagagctgaaaatgttggaagagacaacatatgggggatctcgtgaccaaaggcagcaaagccctgcaatgctggtgattcattcatggtcctttatatcataagaattaacacccaggctataaagttaattatattatatcacttgagcatttgggagaacataatttgacacagcacattaaaaatccctggcataatgaatatattactctaggattct

SEQ ID NO: 91259 - DNA, 722 bp, Homo sapiens
agttagcygggtagatgctaggatttggctctgtcaatggggtatgcggagggagagtcattcaggttttaatctaagctaggattcagaaacacgtaaatattttgactgcatcgtgacctccaatccagtgactcatcactttttctcaaatttcagcttcctcctgtcctctcttccttgtccagcttaggttccatgagccattattataagcacttcattgcaactccctgatctgtgctcttctcccccgaccctagtctgtggctctctctctctctcccctcccccatagtattcacctggcaaaagctcaactctgattgaacccagcccctgagccaacatgtttctagagacagtcacagaactggaatacctgccttcactttaaattcatgatcacagatatcgaatgacacttaataccacaagtcaatcctggtacatttccctggtaagttcattttctcattatccataacatttatttcataccttatcctctgtctccttaagcctcatacacccctcattctcagctgatgacctcattttatatttccttgagataacagaagaatcctctccttactgcagttatctatcatcaccgtccacctccaccagtcattcctagttattcactgaagatttcaatacctgccttcgtgtcttctcagccaaaactactggtatttctggtcacttcaaagtat

SEQ ID NO: 91260 - DNA, 1179 bp, Homo sapiens
ttttttttttttttgagaccaagtctcgctcygtcccccaggttggagtacagtgggacaatcttggctcactgcaacctccaccttccaggttcaagcgattcttgtgcctcagcctcccaagtagctgggattacagatgtgtgccaccatgccaggttaatttttgtatttttagtagagactgggtttcaccatattggccaggctggtctcgaactcccaacctcagtgattctcttgcctcagactcccaaagcgctgggattccaggcatgagccaccacgtcggccttttggcctgcttctttactgcaacctgttttatcagcaaggtgtttgtgacctgtatcttatgctgatcttctatctcatcctatgactaagaaggcctaacctcctggaaatgcagcccagtaggtttcagcctccttttacccagtccctagtcaagatggagttgctgtggttcgaatgcctctgacatttctgctcatctctgttttctgacttttctttcccaagagtgcattacatttgaaataaagatcgtaaaacaaaagccaattaaagaaacaatatagaagttggatctaggtttatctgaaatttttgtttagaaaaacccttaggaaattggtgtggccagtgagcaggcttttgaagactaggccaaatgtacggcaggggggcctgactactgtcattcctggaccaggtcaggtgggcctgttgaggtcctgaaacctactcagcacctgagtgcaaatgcatgatgctttttgctgggtttgggctgttaggaatagaaaagaaaaaaaaaatcccggctgggcacggtggctactgcctgtaatcccagcactttgggaggccaaggtaggcggatcactcgaggtcaggaatttgagactatcttggccaacatggtaaaaacccatctctactaaaaatacaaaaattagccgggtgtggcggcacacgcctgtaatcccagctactagggaggctgaggcaggagaactgcttgaactcagaaggcagaggttgcagtgagccgagatcatgccactgcatgacagagccagactccgtctcaaaaaaaagaaaaaaaaaaaaaaatctaaaatgtcaggcattggcttcaggcataaaccagcttgcatttaaattaaatat

SEQ ID NO: 91261 - DNA, 1179 bp, Homo sapiens
ttttttttttttttgagaccaagtctcgctccgtcccccaggttggagtacagtgggacaatcttggctcactgcaacctccaccttccaggttcaagcgattcttgtgcctcagcctcccaagtagctgggattacagatgtgtgccaccatgccaggttaatttttgtatttttagtagagactgggtttcaccatattggccaggctggtctcgaactcccaacctcagtgattctcttgcctcagactcccaaagcgctgggattccaggcatgagccaccacgtcggccttttggcctgcttctttactgcaacctgttttatcagcaaggtgtttgtgacctgtatcttatgctgatcttctatctcatcctatgactaagaaggcctaacctcctggaaatgcagcccagtaggtttcagcctccttttacccagtccctagtcaagatggagttgctgtggttcgaatgcctctgacatttctgctcatctctgttttctgacttttctttcccaagagtgcattacatttgaaataaagatcgtaaaacaaaagccaattaaagaaacaatatagaagttggatctaggtttatctgaaatttttgtttagaaaaacccttaggaaattggtgtggccagtgagcaggcttttgaagactaggccaaatgtacggcaggggggcctgactactgtcattcctggaccaggtcaggtgggcctgttgaggtcctgaaacctactcagcacctgagtgcaaatgcatgatgctttttgctgggtttgggctgttaggaatagaaaagaaaaaaaaaatcccggctgggcacggtggctactgcctgtaatcccagcactttgggaggccaaggtaggcggatcactcgaggtcaggaatttgagactatcttggccaacatggtaaaaacccatctctactaaaaatacaaaaattagccgggtgtggcggcacacgcctgtaatcccagctactagggaggctgaggcaggagaactgcttgaactcagaaggcagaggttgcagtgagccgagatcatgccactgcaygacagagccagactccgtctcaaaaaaaagaaaaaaaaaaaaaaatctaaaatgtcaggcattggcttcaggcataaaccagcttgcatttaaattaaatat

SEQ ID NO: 91262 - DNA, 721 bp, Homo sapiens
tgtggggattctcatggggagagggaagggggktgtgcagggcaggcctcctgcagttctgtatctacctggtggtcttcagtgtttaccttcttggggttcaggtgatggaacgaagacacagcagttgagctatatgttcatcatagttatactgagttaggatgggcaaagtcatgccactgtaacaaacaaccccaatagcgaacgtgagttagttggagccttgtcctcctgtgtcgtaactccaggactgaaggtaatgaagcctccactgtgtggaaagttgcaatcacattggtgaggaagaggctgtcacaaattaaggactgggtcttgaggctttcgtcgggaaccaacaggaggagttgagcccactttcattggccagaagtcacatggccacactcaatgtgaaagcatgggtgtgtcctcctacctcatgctgaaaggagaggaccctgaaatatttgatgactgtcactgccacagtagttatttaaatagagaattctataatatttttatagaaaagagtattaggaattgagtcatttgctatctcaaaggctctacattatttacacctgaaagaagttgagattgtccatgtaaccacctgacatactgttttgcttaatttaaagcacactgtccagaaggaaataaataaaccttgccaagtgtaattcatcaaataatagcatgtcaggtgcccaaa

SEQ ID NO: 91263 - DNA, 721 bp, Homo sapiens
tgtggggattctcatggggagagggaagggggttgtgcagggcaggcctcctgcagttctgtatctacctggtggtcttcagtgtttaccttcttggggttcaggtgatggaacgaagacacagcagttgagctatatgttcatcatagttatactgagttaggatgggcaaagtcatgccactgtaacaaacaaccccaatagcgaacgtgagttagttggagccttgtcctcctgtgtcrtaactccaggactgaaggtaatgaagcctccactgtgtggaaagttgcaatcacattggtgaggaagaggctgtcacaaattaaggactgggtcttgaggctttcgtcgggaaccaacaggaggagttgagcccactttcattggccagaagtcacatggccacactcaatgtgaaagcatgggtgtgtcctcctacctcatgctgaaaggagaggaccctgaaatatttgatgactgtcactgccacagtagttatttaaatagagaattctataatatttttatagaaaagagtattaggaattgagtcatttgctatctcaaaggctctacattatttacacctgaaagaagttgagattgtccatgtaaccacctgacatactgttttgcttaatttaaagcacactgtccagaaggaaataaataaaccttgccaagtgtaattcatcaaataatagcatgtcaggtgcccaaa

SEQ ID NO: 91264 - DNA, 721 bp, Homo sapiens
tgtggggattctcatggggagagggaagggggttgtgcagggcaggcctcctgcagttctgtatctacctggtggtcttcagtgtttaccttcttggggttcaggtgatggaacgaagacacagcagttgagctatatgttcatcatagttatactgagttaggatgggcaaagtcatgccactgtaacaaacaaccccaatagcgaacgtgagttagttggagccttgtcctcctgtgtcgtaactccaggactgarggtaatgaagcctccactgtgtggaaagttgcaatcacattggtgaggaagaggctgtcacaaattaaggactgggtcttgaggctttcgtcgggaaccaacaggaggagttgagcccactttcattggccagaagtcacatggccacactcaatgtgaaagcatgggtgtgtcctcctacctcatgctgaaaggagaggaccctgaaatatttgatgactgtcactgccacagtagttatttaaatagagaattctataatatttttatagaaaagagtattaggaattgagtcatttgctatctcaaaggctctacattatttacacctgaaagaagttgagattgtccatgtaaccacctgacatactgttttgcttaatttaaagcacactgtccagaaggaaataaataaaccttgccaagtgtaattcatcaaataatagcatgtcaggtgcccaaa

SEQ ID NO: 91265 - DNA, 721 bp, Homo sapiens
tgtggggattctcatggggagagggaagggggttgtgcagggcaggcctcctgcagttctgtatctacctggtggtcttcagtgtttaccttcttggggttcaggtgatggaacgaagacacagcagttgagctatatgttcatcatagttatactgagttaggatgggcaaagtcatgccactgtaacaaacaaccccaatagcgaacgtgagttagttggagccttgtcctcctgtgtcgtaactccaggactgaaggtaatgaagcctccactgtgtggaaagttgcaatcacattggtgaggaagaggctgtcacaaattaaggactgggtcttgaggctttcgtcgggaaccaacaggaggagttgagcccactttcattggccagaagtcacatggccacactcartgtgaaagcatgggtgtgtcctcctacctcatgctgaaaggagaggaccctgaaatatttgatgactgtcactgccacagtagttatttaaatagagaattctataatatttttatagaaaagagtattaggaattgagtcatttgctatctcaaaggctctacattatttacacctgaaagaagttgagattgtccatgtaaccacctgacatactgttttgcttaatttaaagcacactgtccagaaggaaataaataaaccttgccaagtgtaattcatcaaataatagcatgtcaggtgcccaaa

SEQ ID NO: 91266 - DNA, 588 bp, Homo sapiens
aaaagaatgatccaaggccacatggcttggtgaaactgttcattgcatattcaatagccatttcttgctccttattccttcccagcagaaccccagttttgattgatattgggcttccatggtttgatggaagaccttacccctctctgtccctagagaataaatcttggttagtttgagccaatcataatcattttatcctctttgccagggactggtttgggatgagcatgtggttgaattctaaccaatgaaacatgaagtgggggactttggggaaagttttcccccatcttaaagagcagtgacagtaagggctacacaatcttagtctctatggttttagagtttgctgratgaggacagggtgcttgatgtacttgcaaccaaaagagtcacaccgaggacaaatgccgacacactgtggttggccaatttgcatgatgaaaagaacctgaatccatggtggtgtcactgagccactgaattaactagctctggaaatgttctacctctggacttcttatcaaatgagacagcaaaatgtctttattgtttaaaatagttgacttgagctttctatgatca

SEQ ID NO: 91267 - DNA, 545 bp, Homo sapiens
tccaacccagtacacacatacgtatgttattgaaaattaaagtttcatgaaaaaatactatgtgtgatatgctttgatacttttgcttctcttcaactctatctcatttatttaggaacaaaaaagcatcaaaactcattgaagagggccatttgattctcagttctaatcactatgagtatgcttcacacattgaggtcttcagatcatctgcaacaartcacttgaaggtgtctggtcccaaaccctcccccagacctattgaatgagagtccgtattggcaacttctaggaatacatagtttaaccagttccttggtgtggttttaaaggttaaaaactagccccagatgttaacatcttaacattatctactcacaaaaagctatctcctttgctagttgatttttttttcttttgtatagctatcaatggctagagcaagggctctgatcactttttttcccccttctagagatagggtcttgctctgttgcccaggctagagtgcggtggcatgatcttggctcactgcagcctcggcc

SEQ ID NO: 91268 - DNA, 545 bp, Homo sapiens
tccaacccagtacacacatacgtatgttattgaaaattaaagtttcatgaaaaaatactatgtgtgatatgctttgatacttttgcttctcttcaactctatctcatttatttaggaacaaaaaagcatcaaaactcattgaagagggccatttgattctcagttctaatcactatgagtatgcttcacacattgaggtcttcagatcatctgcaacaagtcacttgaaggtgtctggtcccaaaccctcccccagacctattgaatgagagtccgtattggcaacttctaggaatacatagtttaaccagttccttggtgtggttttaaaggttaaaaactagccccagatgttaacatcttaacattatctactcacaaaaagctatctcctttgctagttgatttttttttcttttgtatagctatcaatggctagagcaagggctctgatcactttttttcccccttctagagatagggtcttgctctgttgcccaggctasagtgcggtggcatgatcttggctcactgcagcctcggcc

SEQ ID NO: 91269 - DNA, 589 bp, Homo sapiens
cagggggcttattgcttccatccctgctcagayggttttgcatttccgtggcagcattttactccaccctccattgtgcatcctagattctctccagaacccctcccagcggaggcctgaggttagcttttgtgtgacatcgggtctctattcttccatgtatttaagctcaaaatgtttccttatggggaattttcttaaaagtcttcaatattgttaactctttgaaaccactgctgtgtgaaggcagctgattgttccattgtgggtcccataggaagaagttctatggttcctccttattgccttcttggtgggcatcccctatgaagcaatgcagggaggactccatgatagtgcaggcacttggcctttgatttccatccagggaactccctccacctgtctatgagagaactgtgttgtggaagctcaccgggaagcctatggaagaccaacacatagaatgggcagaggaagacaaacctccaaaacacaccgactacaacaaatacaggacaacaaacagcaataacattgagaataggaagctcatcatggaggagaaccaggacagacatccacgaaa

SEQ ID NO: 91270 - DNA, 621 bp, Homo sapiens
gatccttttcccaaacttcctctcctttctctagactgttcatgccacttcaaatcctaatktgagaattagccagagctatgaggggggatatgtaaaggaagatttgatggatctgccaaagaaaggagatcaaaaacacaggccattaacctgtcggtgcctcagggtcccagctcatcctgtctccttcacttcttcagcagaagctttcccccatttttctgttctttactctcctcttgcttcttatcaacctaacccccagccccacaccccaagtgaatggcttttggcttaatgaatgtttactaatggataagctactgtcctacactttcagaataaatgttgagagtctgacaaatagtcacagcttttacaatatacttctggggcatatcctaaggaaccaatcagaggccaaatatttatgttcactgatgtgcattacaatattacaatctgagatgctcatgcaacaaaatactatccaaccatcagaataacattttctgggaatatttaataacagagggaaatgcttgtgattgccatcatgaaaatcaaaataaaagattctaagttccaaatagtgttatgtatgtatgtatgtataga

SEQ ID NO: 91271 - DNA, 720 bp, Homo sapiens
tgtgttcatgtctctctgtggaatgacagttaatgaagagaaagtgaacgtgttatcacggccaacactgagattgcaggaggaaagatatgaaagccacaggaaagatatgaaagcctcaccaaagaggaaataaaccacctaaaataaaaggcaattttgtttgtgaaatgtgaaaaatgtgataatctactttatttatgatggactacatgttaaagtgtggggtgatgaaaagagccaccttctgtcctctgccctccgccttcaagctggtcttgaccatcattgtcgtccttcaaatgatgaaatcgctgcagtaacttcagggctgtttgctctgctgctgacctcactgtacrcaaattagcccttcttctgaggctcaactatgctatgtccattaccctagttactgctcacaatctacataatgtgacagatcatgaaacatgaactagtaaaatgtgtatttataaaggaggcaataccgttattgttttcagaggaaatgacagtatgtctagagagctcatgaaaaatagaagagatagaaaatgggtattccaaagcctagactttttaaaagcaattatcaatcataagctataatgaaaagaatgtgattcacaacagtggttcttctgtgagccagatgggtgtggattccattcagaagtagtgcatagtccccaagcttgcacctcacttgagccctgg

SEQ ID NO: 91272 - DNA, 720 bp, Homo sapiens
tgtgttcatgtctctctgtggaatgacagttaatgaagagaaagtgaacgtgttatcacggccaacactgagattgcaggaggaaagatatgaaagccacaggaaagatatgaaagcctcaccaaagaggaaataaaccacctaaaataaaaggcaattttgtttgtgaaatgtgaaaaatgtgataatctactttatttatgatggactacatgttaaagtgtggggtgatgaaaagagccaccttctgtcctctgccctccgccttcaagctggtcttgaccatcattgtcgtccttcaaatgatgaaatcgctgcagtaacttcagggctgtttgctctgctgctgacctcactgtacacaaattagcccttcttctgaggctcaactatgctatgtccattaccctagttactgctcacaatctacataatgtgacagatcatgaaacatgaactagtaaaatgtgtatttataaagkaggcaataccgttattgttttcagaggaaatgacagtatgtctagagagctcatgaaaaatagaagagatagaaaatgggtattccaaagcctagactttttaaaagcaattatcaatcataagctataatgaaaagaatgtgattcacaacagtggttcttctgtgagccagatgggtgtggattccattcagaagtagtgcatagtccccaagcttgcacctcacttgagccctgg

SEQ ID NO: 91273 - DNA, 720 bp, Homo sapiens
tgtgttcatgtctctctgtggaatgacagttaatgaagagaaagtgaacgtgttatcacggccaacactgagattgcaggaggaaagatatgaaagccacaggaaagatatgaaagcctcaccaaagaggaaataaaccacctaaaataaaaggcaattttgtttgtgaaatgtgaaaaatgtgataatctactttatttatgatggactacatgttaaagtgtggggtgatgaaaagagccaccttctgtcctctgccctccgccttcaagctggtcttgaccatcattgtcgtccttcaaatgatgaaatcgctgcagtaacttcagggctgtttgctctgctgctgacctcactgtacacaaattagcccttcttctgaggctcaactatgctatgtccattaccctagttactgctcacaatctacataatgtgacagatcatgaaacatgaactagtaaaatgtgtatttataaaggaggcaataccgttattgttttcagaggaaatgacagtatgtctagagagctcatgaaaaatagaagagatagaaaatgggtattccaaagcctagacyttttaaaagcaattatcaatcataagctataatgaaaagaatgtgattcacaacagtggttcttctgtgagccagatgggtgtggattccattcagaagtagtgcatagtccccaagcttgcacctcacttgagccctgg

SEQ ID NO: 91274 - DNA, 604 bp, Homo sapiens
catattcttgtctgattttacggaggttgatgtcgctactgtgttaaataaccagtactttggttttcattcccttactaagtactttaaggtcttatatgtcataattttattgctaacatcaaatatttattttattttttagaaaaataactaaacatgggcaaaggagatcctaagaagccgagaggcaaaatgtcatcatatgcattttttgtgcaaacttgtcgggaggagcataagaagaagcacccagatgcttcagtcaacttctcagagttttctaagaagtgctcagagaggtggaaggtaagagggcttaaaacatgctaacaaggtaattaaaagacagtttccaattgaggatgcaaaaaaaagcctagttggcattctcgtagtgggacgctattacatagcaaaagacattggttttgaggataatttacttaaatgttacaacttaaacttacaaataattattttgtagaccatgtctgctaaagagaaaggaaaatttgaagatatggcaaargcggacaaggcccgttatgaaagagaaatgaaaacctatatccctcccaaaggggagacaaaaaagaagttc

SEQ ID NO: 91275 - DNA, 787 bp, Homo sapiens
aggttacaggcagaaaaatctggattcttattggatgccagggccacaggctatgtcctgacccaacctatgggacaactccaatgccagctgaagtgattggaatggagggttcacctttcctttaacttgtgaaattggatctaaggcaattactcattcctccctgaatgtccctgagtgttctcttcctttaataggtcatgatttattatccaaggttggagcctcagtttccctccaggggaatctcttacaagtctcagtccccccttgagaaggagatccatgtactggcccttttggttacccaagatcagaagttgcccccatcctggaagacacagtggcttgagtggcaaagttcatatggaataacagtactctgggacaagccatcaatggagagcctattaacataaagcattagccaggccttccctacccatgcaagcaccaataccctttgagaccagaagccctacagaagatatggcccctcctggaaaaatttctattgtacaggctgactcagacttgccagccttcttgtaaaactccaatcctgcctgtgaaaaaaacacatgaggagtagcacttagttcaagaccttagggcagtgaatgactcagtttattctcatttatcctatggtccctaatccatacactatcctctcccaaatccctgggtacacttagttctacactgtgctagatctaaaagatgctttcttttgtataccactgcttyctaactccacctacatgtttgtcctttaatggaa

SEQ ID NO: 91276 - DNA, 637 bp, Homo sapiens
ccttgtcagcctttcatcctaccccactaaagtttccagtaattcagctgtcccagaatgatacattttacagcatttctgtaattgcaaaccagctggtagaacttcgagagaccaacaaaaatattttaaacggttactttaaaaactattagttgctaaattacacttgtttccctcatcacttgaagtatcctgcacgtaaaatatgcccaggattacctaattaaaasagagaaaaaatttttctttgcaatttacgtttaagcaaaagcatatttttataaccctgcagctgtatttttctctagtgccttttcctaacaaaatgtatgccatattcaataatcctttcacctataggtctattgggcactgctaataataactagacctttcctatttgtaaagaaatcagctcagtgaaaatggggtcagaaaaatctctttttcaatgtatgcacaacttcctatagaaaagaaaagaaggcatgtttggatatctccccaataaaaagaaacaaaattcctaaataccttaattctatttgattatttttatggaaatatattacataatttcttattttattattaaattacaaaatatgtgccgaagagtattattcaggagtaa

SEQ ID NO: 91277 - DNA, 930 bp, Homo sapiens
gaacagtaatcagaaagatccaaactaaagtaatcctgagttatcacttctcacccatcagaaccacaaaagttaaatttctgttgacagaaatgtgaacttaaaccacttggaatcatgtttaccatttggggaagacgtttgaaagcaaccctttaatatagtggtcaaggaggaaattatgtggcattgcaatgcaccaaatataactacactattttgaaagttcagcttttcatgaaatggattttgacaagactctgacttaggctgctcgttgtatctcccacagtgtatgttcctctcggctccaaactcagaattttgcaactactttttgtcactgsacagcgttttctcatttcatgaccactccaacccttgaatacatggaagctcctaacggcactgcctggcacaccctaaccacacaagttctggcagccctggttgaactctggctaactcgaccttttcagatctgtgactcgtatggctgtctacacctgattctgattcttcacctagtttctcagcccctactttctccacttactcctactcttccccactccccatccttcttgagaacctctcagcacatggatacctactgtagtaaataaattagaccaagtgctaatggtgtcctggagctaatttcacccagttcccaccaccacacctttcacacagagaagcatagtttgatgagcccacttactctggagatggggagaatcacttcaaaagcaggtaacagtggaggggggcgggctactagctgaaaggctattacgatgttcctaatgaaagatgacagctccagaaagatggtgaatggagtttatagtctaataaggagaagcgcatgtgaaaacaagaggtacaacagtgtgttactgctggtgagatacaattactcatatg

SEQ ID NO: 91278 - DNA, 930 bp, Homo sapiens
gaacagtaatcagaaagatccaaactaaagtaatcctgagttatcacttctcacccatcagaaccacaaaagttaaatttctgttgacagaaatgtgaacttaaaccacttggaatcatgtttaccatttggggaagacgtttgaaagcaaccctttaatatagtggtcaaggaggaaattatgtggcattgcaatgcaccaaatataactacactattttgaaagttcagcttttcatgaaatggattttgacaagactctgacttaggctgctcgttgtatctcccacagtgtatgttcctctcggctccaaactcagaattttgcaactactttttgtcactgcacagcgttttytcatttcatgaccactccaacccttgaatacatggaagctcctaacggcactgcctggcacaccctaaccacacaagttctggcagccctggttgaactctggctaactcgaccttttcagatctgtgactcgtatggctgtctacacctgattctgattcttcacctagtttctcagcccctactttctccacttactcctactcttccccactccccatccttcttgagaacctctcagcacatggatacctactgtagtaaataaattagaccaagtgctaatggtgtcctggagctaatttcacccagttcccaccaccacacctttcacacagagaagcatagtttgatgagcccacttactctggagatggggagaatcacttcaaaagcaggtaacagtggaggggggcgggctactagctgaaaggctattacgatgttcctaatgaaagatgacagctccagaaagatggtgaatggagtttatagtctaataaggagaagcgcatgtgaaaacaagaggtacaacagtgtgttactgctggtgagatacaattactcatatg

SEQ ID NO: 91279 - DNA, 930 bp, Homo sapiens
gaacagtaatcagaaagatccaaactaaagtaatcctgagttatcacttctcacccatcagaaccacaaaagttaaatttctgttgacagaaatgtgaacttaaaccacttggaatcatgtttaccatttggggaagacgtttgaaagcaaccctttaatatagtggtcaaggaggaaattatgtggcattgcaatgcaccaaatataactacactattttgaaagttcagcttttcatgaaatggattttgacaagactctgacttaggctgctcgttgtatctcccacagtgtatgttcctctcggctccaaactcagaattttgcaactactttttgtcactgcacagcgttttctcatttcatgaccactccaacccttgaatacatggaagctcctaacggcactgcctggcacaccctaaccacacaagttctggcagccctggttgaactctggctaactcgaccttttcagatctgtgactcgtatggctgtctacacctgattctgattcttcacctagtttctcagcccctactttctccacttactcctactcttccccactccccatccttcttgagaacctctcagcacatggatacctactgtagtaaataaattagaccaagtgctaatggtgtcctggagctaatttcacccagttcccaccaccacacctttcacacasagaagcatagtttgatgagcccacttactctggagatggggagaatcacttcaaaagcaggtaacagtggaggggggcgggctactagctgaaaggctattacgatgttcctaatgaaagatgacagctccagaaagatggtgaatggagtttatagtctaataaggagaagcgcatgtgaaaacaagaggtacaacagtgtgttactgctggtgagatacaattactcatatg

SEQ ID NO: 91280 - DNA, 930 bp, Homo sapiens
gaacagtaatcagaaagatccaaactaaagtaatcctgagttatcacttctcacccatcagaaccacaaaagttaaatttctgttgacagaaatgtgaacttaaaccacttggaatcatgtttaccatttggggaagacgtttgaaagcaaccctttaatatagtggtcaaggaggaaattatgtggcattgcaatgcaccaaatataactacactattttgaaagttcagcttttcatgaaatggattttgacaagactctgacttaggctgctcgttgtatctcccacagtgtatgttcctctcggctccaaactcagaattttgcaactactttttgtcactgcacagcgttttctcatttcatgaccactccaacccttgaatacatggaagctcctaacggcactgcctggcacaccctaaccacacaagttctggcagccctggttgaactctggctaactcgaccttttcagatctgtgactcgtatggctgtctacacctgattctgattcttcacctagtttctcagcccctactttctccacttactcctactcttccccactccccatccttcttgagaacctctcagcacatggatacctactgtagtaaataaattagaccaagtgctaatggtgtcctggagctaatttcacccagttcccaccaccacacctttcacacagagaagcatagtttgatgagcccacttactctggagatggggagaatcacttcaaaagcaggtaacagtggaggggggcgggctactagctgaaaggctattacgatgttcctaatgaaagatgacagctccagaaagatggtgaatggagtttatagtctaataaggagaagcrcatgtgaaaacaagaggtacaacagtgtgttactgctggtgagatacaattactcatatg

SEQ ID NO: 91281 - DNA, 521 bp, Homo sapiens
acatctacttcagtaaacctgttaacattttatttaaactggattttgttttgaggcttgtggcgagggttgagaacctacaaaaagatttatatgagggaacttggtcctcgttgtgtatgttctggggaacatgttcataartgatgctgttaagagttggaacttgtaaattaagtcctctctgaacctacgcccttagctttagtaagcagatgttccagagtccccgttgtcgtcttctgaaatgctcaacatacaaatggcttcatggcttgtgtatataggacatagatttatgtatatgggaaaatctcactaactgggatattttactttagcctcaattagtaaaatcgatatgtgtaacaggagtggaattctatggaatctcagggttggaaagggctttaaaggttaagcgccagaggagggattctgcaaagaaaaacagacaattaagaaattcaaagactgcactgtatttgactagctgattgaaagacctgaaagttaattta

SEQ ID NO: 91282 - DNA, 846 bp, Homo sapiens
tccttctacctcctggctagcgtgaacagtactgctatgaacatgggtgttcaattatctcgacgagatcctgctttcaatctgggcatgcccccaaaggaggattgctggatcatacagcaactctattttacatttctttagaactgccataatattttctacagcagctgcaccatcttacattctcaccaacagtgcacagagtaccaatttctccatatcctcatcagtactcgtttttttctgttttttttttttttaatagtagccatcctagtaagtgtgagctggtatctcactgtgattttgatttgcatttcttaaatgattagtgatgttccccaacatagcttctggaagcctgagtgaatgctaggataatggtgaagacattttttcaacgtggactaatccatctaaagaacagacatttgccggaatgaacatgaackttagaaatgcaacaggaggccagggcgcggtggctcacgcctgctatcccagcactttgggaggccaaggcgggcggatcatgaggtcaggagatcgagaccatcctgactaacacagtgaaaccccgtctctactaaaaatacaaaagaacttagccgggcatggtggcgggcgcctgtagtcccagctactcaggaggctgaggctagagaatgacgtgaacccgggaggcgtagcttgcagtgagccgagatcgtgccactgcactccaatctggacaacagagcaagactccatctcaaaaaaaaaaagaaagaaagaaagaaatgcaacatgattggttgagaggtgctcctggtagctttcaaactcgcactctcccactactga

SEQ ID NO: 91283 - DNA, 669 bp, Homo sapiens
agctctggatcctgtggcgtggggatgccgtcacagacttcacagtctgatagaggaggcagctgatrtaagtgccacctccatatgtcaagctgcatgtcagatggtacgctgggactagttgattctctgtgacttgccgcaaaagttccttgccacagtaatcccttgtttcccaagggtgatgtagatcatcctatgtgacagtaacaataggctaaaaacagccaaaggacttgaaagcgcttttttttcccatttttttttcctagagtgactgaataatgagggcaaaatgggtgtcagtgggcatgaaatgaatgaatgccatttgcaccaacctgttttagatgaggagggtgggacctggtgaggagtgaccactgggtgagcattctgtgtcaatggatttccagctcacattggcagcgatttgtacattatttcatcccattcctgtgtgatccatctgaaaagccgcgagacagagggacacacattcattttggtgtcaaagatctgggcttcagtcccagttcggccacatactagctgtgtggtcttgggcaggtttgctctctgggcctctgtcctgctctgtaaagcaggattcacaatagtgaccttgtcctttggaggaagtaggaggtgaagtccctgggcccagct

SEQ ID NO: 91284 - DNA, 669 bp, Homo sapiens
agctctggatcctgtggcgtggggatgccgtcacagacttcacagtctgatagaggaggcagctgatataagtgccacctccatatgtcaagctgcatgtcagatggtacgctgggactagttgattctctgtgacttgccgcaaaagttccttgccacagtaatcccttgtttcccaagggtgatgtagatcatcctatgtgacagtaacaataggctaaaaacagccaaaggacttgaaagcgcttttttttcccatttttttttcctagagtgactgaataatgagggcaaaatgggtgtcagtgggcatgaaatgaatgaatgccatttgcaccaacctgttttagatgaggagggtgggacctggtgaggagtgaccactgggtgagcattctgtgtcaatggatttccagctcacattggcagcgatttgyacattatttcatcccattcctgtgtgatccatctgaaaagccgcgagacagagggacacacattcattttggtgtcaaagatctgggcttcagtcccagttcggccacatactagctgtgtggtcttgggcaggtttgctctctgggcctctgtcctgctctgtaaagcaggattcacaatagtgaccttgtcctttggaggaagtaggaggtgaagtccctgggcccagct

SEQ ID NO: 91285 - DNA, 669 bp, Homo sapiens
agctctggatcctgtggcgtggggatgccgtcacagacttcacagtctgatagaggaggcagctgatataagtgccacctccatatgtcaagctgcatgtcagatggtacgctgggactagttgattctctgtgacttgccgcaaaagttccttgccacagtaatcccttgtttcccaagggtgatgtagatcatcctatgtgacagtaacaataggctaaaaacagccaaaggacttgaaagcgcttttttttcccatttttttttcctagagtgactgaataatgagggcaaaatgggtgtcagtgggcatgaaatgaatgaatgccatttgcaccaacctgttttagatgaggagggtgggacctggtgaggagtgaccactgggtgagcattctgtgtcaatggatttccagctcacattggcagcgatttgtacattatttcatcccattcctgtgtgatccatctgaaaarccgcgagacagagggacacacattcattttggtgtcaaagatctgggcttcagtcccagttcggccacatactagctgtgtggtcttgggcaggtttgctctctgggcctctgtcctgctctgtaaagcaggattcacaatagtgaccttgtcctttggaggaagtaggaggtgaagtccctgggcccagct

SEQ ID NO: 91286 - DNA, 2266 bp, Homo sapiens
  misc_feature (1)...(2266): n = A,T,C or G
aannnnnnnnnnnnnnnnnnnnnnnnnnnnnnnnnnnnnnnnnnnnnnnnnnnnnnnnnnnnnnnnnnnnnnnnnnnnnnnnnnnnnnnnnnnnnnnnnnnnctcagggttggtcacaaattttgaaagaagtggacacatttaaagataatcgaggaggaaaatcaacaaaatgtgacaataaaggcagacaggtagaacgaagtgtcaggaatgattcagaggttactggctttgatcattgagagaggaaacactgtagaaggctccgatgtgagaaaagacgaatgagtcaatttgggatttgtttgttttagactttatggtaatggcaaataaacacttgttggagaggactgtagttcaaatataaggtcttgaatagaaatcgtggaaaacactggacttgtgtatatttaaagctgcccagaccctataattctagtaattgtgttcctaggtatctgtattgaaagagtttatgtgcatgtggattggaatgttgtacagaaacatttataatggcacggctcataaaaatcaaatattggaaactatttaaatggtcatccacaaaattgtggtgcattcatgaactgcatagtatacagtaattaaatgaactacagctattgtgctctaaatctagagctgagctatatacatctgcattaatctgttctcacattgttataaagaactacctgagactgggtaattcataaagaaaatagatttaattggctcatggtctgcaggctgaaccggaagcatggctaggaagcctttgggaaacttacagtggtgggcaaaagtgaaagggaagcaggcatatctgcccatggcagagcaggagagagagagagagagagcaaaggaagaggtgctacacacttaaccagatctcaagagaactcactatctccaaaacagcaagggggatatccacccgcatgacccaatcaccttccaccaggcccctcctgygacactgaggatcacaatttcacatgagatttgggtggggacacagaaccaagccataccaacatctctataaaatatacttcatttatagatcagccatctgggcattcactctttaagaattctttaaactcaacattcattttttaaataattttatatatattttacatttaattatatgatatgtattatatatatataaacataaatgtatatgaacacaaatacaaatgcatgtgcatatttatataaaataacaaggtataaaatgatactctaagaactatatgaagtacatttttaaaagcttcttatcagcacaaaacataccttaaacaagagaaatgagataaaatgatgttggataagaagattttcaacattgtgaaataattctccgttagttaacttataaatttaacaatatcctgattaaaatatcaagcgaaattatttttaactgtttgatttttaagtttatatggaagaaaataaacaaataataacaccaagggaaactctaggaaaaaaagaacagtaagtagtcactacaactagcctaaatggaaacatattgtataaactaaaaaacgtaaaatgttgtgattctggtatagtaaagtaatggaatagtagaagaaagaacatactagcagtccagagataaacctaaataaacataggaattagtattcattggcatatcaaatgaatgttttggaagctaagaaaatttgacaattggtttaaaatagtgcacacggcgttgttttgcctcctggcaaaataataaatttgcatccatatttcctgctataatcaaagatgattgttaatggattaaaacttttaaatgttaaaaataaaatcatcaaagtactacctatgtgaattattataagcatttaaaataagaaaggcttttctcctgtgatttaaccaagaagtcagggaataaagattaaagtttattcatctcatattaatgtcaaaagaccaatttccctgaaatatgtatagctattgtaaatgtacaataaaagattgaccacccaatagaataagtagtaaatgttgctgattcaaaaacaacagaaaccctcttaagtatttgaagagagcaccaggcatgctcataagaaaaacgcacattaaaaccacacagatacacaagtttacctatcacactggcaaaaatataaaaatgtaataacatagtgtcttgaagccagaaattgcctatactataaccccacagaggcagtttggcaattat

SEQ ID NO: 91287 - DNA, 1223 bp, Homo sapiens
attcaaccctgttttcatgacaaccttagaggatatttcttaaagttgtatttatgattatctaaatttgcacttgagataggaaatgtgaagcagatgtgtgagaattttcctctacaggtgtattttctccctttgttgagagaccacagcactgatcaaagtttagttagtaggtatgtttcagatcaaaatgtaccatgaatcaaaatgtaattttgtaccagcaaatgaaacccagctagatatgtgttctaatacattaatgttacttccctgcataagatgaagtcgttaagccaacagcatacatcctacttcttctgccatggtcttagaatggaataagccccaygtgatctgacagaaccacctcaggggagaggggtgacagggaggctaatccattttgatgaacacaagtgaagtggtggggggtgggcgggtggttcttacacaatgtcaatacagtattacacacgcacatatagtctggtcagtcaacctccaaacctatcagtcccagacaaatcaggacaattttcccagcactatcccaattttaaaataaaactccacattctatcccctgccccagtcctggggaaactgggctgactggtcaccctggccctgaagcctaattctactcatctggccccacttatgctgtgaaacatctgcacagtcaagctatggttcagaaggtgcaatcaaagccacatttcccgtaagcctcgtctatcccaagtgtaaatatatataaatactcatgcaaatattccactctggtgaaagaactggaagaagaagggcagctgatgatataggctattcctttcttttttccttttttatacttgaatcatgtaactctagctttttaacatcctgagtaagaatgcccaatagagtcaaatcacgaagtgagatagagattggaatagctgattattattggagctgtttcacgaaaagcactgaggcacaatccattcttgacatgacttgctttgactttctgacttgctcccccattcctacttcgccttaaactttcgataaccagttttaacatgactgaaagcctgaggattgatttctacacatggccacagtccatgttacctgcaccaagataccagctcatctctggctctcctaggtgttcagtctcacctctagtggccattaatggtggaatccatcaacacctgtaaagg

SEQ ID NO: 91288 - DNA, 1223 bp, Homo sapiens
attcaaccctgttttcatgacaaccttagaggatatttcttaaagttgtatttatgattatctaaatttgcacttgagataggaaatgtgaagcagatgtgtgagaattttcctctacaggtgtattttctccctttgttgagagaccacagcactgatcaaagtttagttagtaggtatgtttcagatcaaaatgtaccatgaatcaaaatgtaattttgtaccagcaaatgaaacccagctagatatgtgttctaatacattaatgttacttccctgcataagatgaagtcgttaagccaacagcatacatcctacttcttctgccatggtcttagaatggaataagccccacgtgatctgacagaaccacctcaggggagaggggtgacagggaggctaatccattttgatgaacacaagtgaagtggtggggggtgggcgggtggttcttacacaatgtcaatacagtattacacacgcacatatagtctggtcagtcaacctccaaacctatcagtcccagacaaatcaggacaattttcccagcactatcccaattttaaaataaaactccacattctatcccctgccccagtcctggggaaactgggctgactggtcaccctggccctgaagcctaattctactcatctggccccacttatgctgtgaaacatctgcacagtcaagctatggttcagaaggtgcaatcaaagccacatttcccgtaagcctcgtctatcccaagtgtaaatatatataaatactcatgcaaatattccactctggtgaaagaactggaagaagaagggcagctgatgatataggctattcctttcttttttccttttttatacttgaatcatgtaastctagctttttaacatcctgagtaagaatgcccaatagagtcaaatcacgaagtgagatagagattggaatagctgattattattggagctgtttcacgaaaagcactgaggcacaatccattcttgacatgacttgctttgactttctgacttgctcccccattcctacttcgccttaaactttcgataaccagttttaacatgactgaaagcctgaggattgatttctacacatggccacagtccatgttacctgcaccaagataccagctcatctctggctctcctaggtgttcagtctcacctctagtggccattaatggtggaatccatcaacacctgtaaagg

SEQ ID NO: 91289 - DNA, 1132 bp, Homo sapiens
agctcattcggctgacagattaatggggttgtagaaaaggccagatagcagtaaattaggcagctaaacactgcaatctctggcataacatcagcactaaatagcacatcttttgtagcgtgttgggcacttctcacagattcttagaagtgtatctgttttatgaggtgttttccttttaaggaacctcagcataaatacttttgtgggcaacttggcctactggtattcagcactttcattgccccagctatttcagagtcacctacttaatatctgtataatatactgtcacagtctattattggaagaacagctaaatataacaacaatgacttcttagtagcagtcatactcttgctaactagctttaaaaaaagactgacaagttcatgattattgtacatctgtttttatgaccttggtaaaagttggtaaaaaaggaaagtaaatttcagagtgttcagatggatgaaacaaatgaacctgagtgatttgggtattttcattctagataggacagctcaccaagatgacacaatgtcagaattcacgcccatagtgctgacagtaggatcttctctcccagggtctcttaattcttttccacctcttttcagatttctacaattttgagagcatttttccaatcccacagcacctttctgcctattaatgagtttcctccttgcctatgtctctaacccttctctaaatcagaggtctttgaattatttgtttgtgtataccctaaaataattttttaactacatttttaagaagacacctaaatttcatcaacatatgtttaggttgttatgaaggatgtaccacctgacagcctgtgcactctgcttatgctttagctatattttcatcaaaacttccttgcaaaagatttaggtgattctgtttatgtctgccatatgacytaaatggtaaagcagtcctcactgtcaatccaattagccaaatcatactcactttctcgtggagaaattctaacttcattttccaattcaaatgagtgtgttaatatgtctccccagggcaactaattcatttctgaagtgtcatcctgatagacagatggataaatgggtagatggatagttatgacactacatacatg

SEQ ID NO: 91290 - DNA, 578 bp, Homo sapiens
tgctggggactaggaggtgctcaatcaatggcagtgacgactggggctgtgtgtgcaccacgcttcgcagtttacgcaaccctttcccgtctgttatttcacaagcctctgtccatcctgtctgttctctccactttaaagatgagaaaayagagacacagagggagtaggcagcatgtctgggtcacacaggggaggagacaggaggcaggaactcacctcgcgtcccgaggatggtttggcctgggaaagttgtgctcaacagatgatgcttctctggtgtgggagcccacagtctgctggatgtgagggcagcccttctctctataaaaatacaattttttaaactgttagaactaataaacaaacaaagttgcagggtacaaaatcaatgcacaagaatcagtagcatttctatatactaacaacaaactatctgaaaagaaatcaagagtcaatcccatttacaatagagagcaaaaaaagaaaatgcttaggaataagtttaaccaaggaggtgaaagacctgcacactgaaaactatgagacattgatgaaagaaatcaaaggttattgtt

SEQ ID NO: 91291 - DNA, 1063 bp, Homo sapiens
taataactcccccacccccacccacattcccaggtgaagaccattatctgcgtttcctagctagggaagctgagcctgtggtccattgaaatcctagctcagccatattcaagcggtgtaacccggtcagttgttcctgagcctcagtttccctatctgtaaaatgaggacaacagtccctacttcgtgaagctttgtggaggtcgtcggattgtgtacctgaagctgggtgsgtcggtgtatgggagctgtgcctcatcattaccaaagagctgaggtactgtcctgggaccacattgccaacaagtggctgcgccaggatcccatccaggtttctctgtccccagagctgtgttcctggggtgggaggctcccctgcttagtaggagctctgggtggcaggtgtctcctggtgcatagtggggctgggcgtgggaggccctgcccagagctcctcgctggtgttgcagcaggggcaggggcaggggcaggggcaggggaagggtcagggatgctggccccgtcgagagttccagggcccgtgtgctcagtgtggcaagcggtttcccaacagctgccgctccgctaatgggcctcccttcgtagcaatctgctgtgataacagacaggtttaattaaaaagaacacgcgtcctcctctgcaggaaggctgcggccaggatgtggggcctgcaatgaaaacttagctccataaagcccacacacaggcatgggtgcccggagctgccgagttttctaaaaggagcgcaccccgccccctgccatatctgttatttatcgagttaattttgtcctctggcagcagcatgaaccaactccgagtccctgagccctgaccctgacttgcctcccattcccaggctgtgccaggcacgggcttttgcctcctgtgggacaagagaggccgggaatgccagctttgaaccaggaaaacctgggaggggggacctgtccctgactttgtgatgctgggcaactgactcagccctctcagagctcctgtttctgcatccaggaatggggcagaggctgatgccgcctcc

SEQ ID NO: 91292 - DNA, 850 bp, Homo sapiens
taaatgcataaagtcaaatacaggattcaaaaggaaatgaattatactgaaatccagctaccaaaatactttaaaatgtgatctacttgcttcttttttaataatatgctctggcrgcagatctgatagctgtagtttccaagtcatgataagtcagccgatattttaaagtctgtaacgagcatgatgtgatgtgagaatcgctgtgatttctgctgagaagtccttacatactgctgatgtggctgtgtttgttgcctgcatgtacacccgaaggaaatgcttcctttcagttagaggttagtggggaaaaaaatgtaattcttttcttatcatccttccatctggatggacccttcaaagttgatcagactaagaattactattttaaaggaaagggaccttgtatctccagcatcttgcatagtgctttataaagttgccatcaaacatgtttatagcattaatgaaggagacaggactcttggtggtaaatgacagaaattcagctcatactattggctcacttgcgtctaaaggtgctccaggtacagttagatccagggacttggatgccattattaaatatccctcttctctcggctctctgactctttccctctttctctctgattggccctagctctgtttgggtgttggttttatcctctcctgtcacaaggctcctggccaccaaactctaaaatgatgacaaagactctttctctttatattgcaaatctcatggaagaactttgattggctctgttggctctcatgccaatcccatttacccaaaattccagagaaggatgagaaaccacaaccggtcagacctgggccacatgca

SEQ ID NO: 91293 - DNA, 850 bp, Homo sapiens
taaatgcataaagtcaaatacaggattcaaaaggaaatgaattatactgaaatccagctaccaaaatactttaaaatgtgatctacttgcttcttttttaataatatgctctggcggcagatctgatagctgtagtttccaagtcatgataagtcagccgatattttaargtctgtaacgagcatgatgtgatgtgagaatcgctgtgatttctgctgagaagtccttacatactgctgatgtggctgtgtttgttgcctgcatgtacacccgaaggaaatgcttcctttcagttagaggttagtggggaaaaaaatgtaattcttttcttatcatccttccatctggatggacccttcaaagttgatcagactaagaattactattttaaaggaaagggaccttgtatctccagcatcttgcatagtgctttataaagttgccatcaaacatgtttatagcattaatgaaggagacaggactcttggtggtaaatgacagaaattcagctcatactattggctcacttgcgtctaaaggtgctccaggtacagttagatccagggacttggatgccattattaaatatccctcttctctcggctctctgactctttccctctttctctctgattggccctagctctgtttgggtgttggttttatcctctcctgtcacaaggctcctggccaccaaactctaaaatgatgacaaagactctttctctttatattgcaaatctcatggaagaactttgattggctctgttggctctcatgccaatcccatttacccaaaattccagagaaggatgagaaaccacaaccggtcagacctgggccacatgca

SEQ ID NO: 91294 - DNA, 734 bp, Homo sapiens
  misc_feature (1)...(734): n = A,T,C or G
cgcattgggcactgctctcccattcacctcaatccccaccagaccccagctgaggacacctggctgctttgttcatttacatcaccctcctgtcacctgcagacatttgcgcttacaatcaagaaactgaagtttgaagcacaaaataaaggggccaagttcctaaagatgaagccaaaaaggttgagcatcatttgtgtctcagcttgtgcaggacagtgtcctatgtcagcacagggctcttggagcactctgggctggcccgtttccaaaaggtttcatgttgccctcactattctccctcgtccagccccttctcgggccagaacaagtcttctcgggggtcctctgttgggttttcttcggtccaaaaaagctcttgaatgatagggggcagcagcaactcagtgacaatagtacattaactcaaaaggaagccaggttttcatgcaggacacataaaagctattacttaaaacccarcaggtgcatctcagatgccttccagcatgtgaaggacaccattgcattggctctcaccaccaccatgccctcctccttacccagggtgaagcatgaatctgcacatggggaggcttcagaggacaactgagacaagaagcaggaagctgagaaaggaggacacctcccacacacacatctagcaaaagctggacatttctggtcagtcatccttatgcaaagactttctggaaggagcagttattnttggg

SEQ ID NO: 91295 - DNA, 734 bp, Homo sapiens
  misc_feature (1)...(734): n = A,T,C or G
cgcattgggcactgctctcccattcacctcaatccccaccagaccccagctgaggacacctggctgctttgttcatttacatcaccctcctgtcacctgcagacatttgcgcttacaatcaagaaactgaagtttgaagcacaaaataaaggggccaagttcctaaagatgaagccaaaaaggttgagcatcatttgtgtctcagcttgtgcaggacagtgtcctatgtcagcacagggctcttggagcactctgggctggcccgtttccaaaaggtttcatgttgccctcactattctccctcgtccagccccttctcgggccagaacaagtcttctcgggggtcctctgttgggttttcttcggtccaaaaaagctcttgaatgatagggggcagcagcaactcagtgacaatagtacattaactcaaaaggaagccaggttttcatgcaggacacataaaagctattacttaaaacccaacaggtgcatctcagatgccttccagcatgtgaaggacaccattgcattggctctcaccaccaccatgccctcctccttacccagggtgaagcatgratctgcacatggggaggcttcagaggacaactgagacaagaagcaggaagctgagaaaggaggacacctcccacacacacatctagcaaaagctggacatttctggtcagtcatccttatgcaaagactttctggaaggagcagttattnttggg

SEQ ID NO: 91296 - DNA, 736 bp, Homo sapiens
ccaagggtcctgtgaaccgcatktgtaaggaaaggtgccgtccagggtgtttggttctgacttgccggctggccttctttcctgcctccagcatgttgcctgggattccatcccagtcatgccagagttaacctccgagtacagttatgacgattttcactcagtcacaggcgcagaccggcgtcagatggcaagaggaggagtgcaggaatcaaaggtcacagtctcaggagcaaagccccacagacgtctggcttctggatctgtgaccatatggtcaaagattgctctgcacaataacctccagagcagtcaggttgaggatgtctggtactgaagttactccatttgagaagttttatatatttttgttaaataaaattgaattgtaaatgtttaattgcagtaaagcatagtgaagaaaattaaaaatcacttataatctcatcactccaagatacaatcaccattcctactttgtgactttatacagtgatagtcgtgtacgctgaaagtttttgcaaaattagaattgcacaatttcgtattttgctttttttcacattatatcatgccgggaactactcttcagaactcctttttatggttgcataatgtttcatttctggttacaccatgatttaacactagccccctataatgttttctaatttttcactattttaagaaacattgcaataaatatttgattatcatatacatttttgaatggcgt

SEQ ID NO: 91297 - DNA, 1448 bp, Homo sapiens
gtgctggccttggttcagtttcagggactgcgatggtccgggccgcgcaggcgacagagagctgggttgcaggcgtggagcggacccttgacttagtgaacttttggagttctttttctgcacccaccagccttcgaccaggtctggttactgctgactccaggattcaaggccacggtggaaaagcagatccaagggctagatgagcttcctgggttccaaccttcttccagaccttggctgggtgatttttcaccaacctgatcactttctgatgccctggagcagcacaccgtattttatattgtgtgagcttttctagttctcctctgtaggacagttgatctaaattactgcatccaccactatcagaggcagaagctctatgttctttatggagaaagctttcaaataatgcagaagcgtgcccacaggaaaagtgaacattggcccttccggctcactgccaacccatttctatggggagcagctgctgcagttggtatggagtctctgtgtgtgcatacatgcataggtttttattcctcgactgaacaatctcctcaccatgggaggaccagggggcgtgacagctccactctgggagttgctgctccctgacgaccatcagcactcccggcctctctcaggaccgtcccgtgtggctcgccatcccaggtggccmtgcccccaccccttctccagaggatctggcagctgtattttcattccaaggtacctgacctaaaagtgtattggccgcatgttggcatctgtcctgacacagggaaatctgtcaggggagaaacagacttgtccacactgcgtgatcatcctctgtgttgtgccattttggttgctgaggacaggaaggcaggcagacgtgccgcctccacggggatttttatagcaaggcctgagggctccaacgcctcttcggctggctgaggcatgcagagggatttccaggcacagtgtgttttccagtgcatgaacaggagcaagtgctgcctgagatgggcggccagcaatagtgggagcctgtcacgccctgtacacctgcatcctgtctggtccccgttttaacaagcacaagtattaatggcttggccttagcaggtgccctgggaggctggggcaggttgaggtctgagcagtgcagccagcctgtcacctgactcacagcccccatcagctctgctttcagagcagggacagtggctgtcacacacatcgcagagcacaggccagcactgtctagctcttggggccctcaaggcttacagcaacaatagaattgtctcttcacttaggatggatttgtgcccgtttctctctccatctccagacacgctggaaacacacacatcaaacagggccaactgagccttctgtccccatcttcactactgaaagagcttttcagctgacttttaaaaaaaattctt

SEQ ID NO: 91298 - DNA, 740 bp, Homo sapiens
tttgagaggtgatgaagttgtgaaggctgagcccgcttggatgggaccagggcccttctaaaagggcttgagggagtgggttcgccctcttccatctctctgccatgtgaggacaagcgttcctcccttttgcctttgtgaggatgcagcaatgaggtgccctctagaaagcagagaacaaccttcacagatgcccagcctgccagcaccttgatctgggacttcccagcctccagaactttgagaaataaatttctattctttatacattccccagtctcctgtgtttattttggtgtcaggaatggtccaagacagcctccctcagcctttgggcttgtaggtctgctcgccataggaaacggctcctggacctaggtgtatgcgggagtgtggtgcaggttgaaggctgcgggttgggtgaaggtatggaggtgagggggwgatggctgttgggctgggcaccagcaaactgtggaatggagcaatttggtggactgctatggagtcaccttagtgaagcttccccacattgttcagagttagcgtggaccatgctatttgtaaggcagaagggaagcacagaaatgtttcttttatgcttggaaggcggggccaggtccactagatgctactgcagctcacatgtcttggctggtctgctggtgcacaggctggggtgggcagtggctgggcctgtggctgctccagaaatagccagatccctccaccccaagctt

SEQ ID NO: 91299 - DNA, 737 bp, Homo sapiens
ggaatacgatatttgaaatcttcttatataatgtcaagttcagaaaaatggctattttctctggtgccagcagtgggtaacacaaaagcaatggtaaggcacaagtgggaaaccctcacaatattcttgctccataatataacaatatttaataaagaagctccccaggcccagcccattcctcttcaactcagagggaaaattgaagtccctatatttcatttcaaaggctctaagtgaatcggaaggaaaaagtcctcttcttgaaagcatttcacgtggacagagtggactcattccatgctacgctgctcctgctaagcagaaagctgtggttccttcttcattaagtaaagtggtttgcaaagctccagcatcgtagccatgtgctaatggtattaggaccragggaccattggcagctcaaggttggagagtgaagtggagccaggaaaaagtgggccttgacaaagcctactggtattttttttattagggatgcaatggtgtctctattcactgcagcagatacagaatgcagcaaaagattgtgctggaaaaacccagttaagagagaaagacagaatccctcagtcgaaatgtattttccaggagagataaagggtgagcctccgttgtggggttgcatactggccccactccaggatgcccacatattggggtcaggttttcatgctgcccgcccccacaacctgacttcagccctgaggcagaga

SEQ ID NO: 91300 - DNA, 676 bp, Homo sapiens
acaccccacttgtcttttagagataaacgccttcctgttttcttgtaatcacacccagaatcaccactgccactttttggattagttttacaatttttttatccatcaaatccgaagtcatttaacaaaaaaaatctggaaatcagaatgttgctaactgtggacagaggtcccaatcacccagattcattattctttgttcattctaatgtggatactgtgtttctccctcaggaaggccctagctttcttcagccccttggtcagggtataactgaagcatttgaacataatcaagcatatgtttgaccactttgctgactgtattgaaaaaaccctcaccttactctgaaagaagcatggcaccagtccaatattgccgatgctttggtagtgataaaaagaggtgatgggtgatataaaatcagccactcttaagcttgctggaamtggtggtagcatgtgtgaatgatgcatatttccctagagctaatgaagaagttaaaaaaaatctgagtgtctgcaaaacaggtgggtttaagatttattgatattagggaaagtgaaattaatgagctactcaagtttctgtctttggtcatcactgagagtctatttccataggaagaagtctttgcagaggaaattgaatgctgtctgatgctacaattcatat

SEQ ID NO: 91301 - DNA, 1096 bp, Homo sapiens
gaactctaaaatgtgaaaaaaaggtgtgtcagaactatgataaaatgtaatggagaagaaacgtagaaagcttgatcttgtgtgaacaccggaacaccactttactttaattcccttactatttctttagaatatatttatttactattccttcaggttactcatactgcctacttaatgtcaaagcagcaacactgaaaaaaaaagttagattgataaaattccatctattttatccagacccaggatgggtgtttgagctggtctatctttgtgtaacagatgcagtaagagaacattttcagtgagcaaaatttgggcacagtaccgtaaatttgtaaggaaatgctcctatttacgtgtatttaggtctttagcaaactactaggttttcagtaattattttgtaatgggatccgtctttttgtagaggcattatcattctacatatataaattttcacatgctgagagttcttacagtgagggagggctgagttttatcatcttattacttctgattggcttgatttttgtaagagtcttgtacaatttgtactgctagtataaaacataactatacggggcctgaccccataagtgagaagagaataaattggaggccactggggtacaattctgtatattaactcacccctgatttaaattccagcctaatggaatgaagccatagctgggtggagagaagaacggtttcctgccagtccatggggctgcccaggcaggacgaaaagtgagaggaccggagcatcctgggcaatggctaaggctgagcatgcgcggaagagttaaagcgctccatgctcacctagagccacacagscgcgcatgtgcaccagctggattgtagtgcttagcgtagaaatttagccgtgggcaacaaagatccaaaaagaatcagagttttcagaaagaaatttatttctcacacataaacaggcaattcaagattgtcgggtagctcctcctttatctgggactcggggtgcttctgtcctttctctcctccgtcactgggacatgattaccaacctcatggtccaggatgtgataccagcaatcattccactttcgaa

SEQ ID NO: 91302 - DNA, 1096 bp, Homo sapiens
gaactctaaaatgtgaaaaaaaggtgtgtcagaactatgataaaatgtaatggagaagaaacgtagaaagcttgatcttgtgtgaacaccggaacaccactttactttaattcccttactatttctttagaatatatttatttactattccttcaggttactcatactgcctacttaatgtcaaagcagcaacactgaaaaaaaaagttagattgataaaattccatctattttatccagacccaggatgggtgtttgagctggtctatctttgtgtaacagatgcagtaagagaacattttcagtgagcaaaatttgggcacagtaccgtaaatttgtaaggaaatgctcctatttacgtgtatttaggtctttagcaaactactaggttttcagtaattattttgtaatgggatccgtctttttgtagaggcattatcattctacatatataaattttcacatgctgagagttcttacagtgagggagggctgagttttatcatcttattacttctgattggcttgatttttgtaagagtcttgtacaatttgtactgctagtataaaacataactatacggggcctgaccccataagtgagaagagaataaattggaggccactggggtacaattctgtatattaactcacccctgatttaaattccagcctaatggaatgaagccatagctgggtggagagaagaacggtttcctgccagtccatggggctgcccaggcaggacgaaaagtgagaggaccggagcatcctgggcaatggctaaggctgagcatgcgcggaagagttaaagcgctccatgctcacctagagccacacaggcgcgcatgtgcaccagctggattgtagtgcttagcgtagaaatttagccgtgggcaacaaagatccaaaaagaatcagagttttcagaaagaaatttatttctcacacataaacaggcaattcaagattgtcgggtrgctcctcctttatctgggactcggggtgcttctgtcctttctctcctccgtcactgggacatgattaccaacctcatggtccaggatgtgataccagcaatcattccactttcgaa

SEQ ID NO: 91303 - DNA, 730 bp, Homo sapiens
  misc_feature (1)...(730): n = A,T,C or G
atayatatatatacacacacatatatatatatatatatacacacacacacacacatatatatatctcctcataaaaatgccatggggtagataatattattatatcctttttgcaaatgagaaactgaggcataagaggttacatgcctttccaaggccacagaactagtaagtggcaggccaagtttgaaccaacaacccttacaccagagtccacaatattaactatcatgtttggctatgtccaccaataatataacaacaatattaataatatctaaaattcaatgatccaggctagccaccgtgcatagtatgtttaatccttaccacagcccaatgaggaaggtacaattattactccttttatacatgaggaaactgaggattagggagattcaataatttgtccaaaaactcacaaccagcaaatggtggagcttgggctgaatattgnttggggggggaaagggaaatttaaaaaataaggggcaaaagggctaaaaatttggggggaaaaaaaaaaaaatgaaaaattattctgttcaagtttataatcatttataaaaggagatatttgttggtccggaagcatttggaatatttttagaagtgtgatttttactatccctagaaatggaaagtgaagctgaaattttgcttttctggccttcctgagatattatgtctcattcctaaaggatttggagatttagttgttactctgtta

SEQ ID NO: 91304 - DNA, 730 bp, Homo sapiens
  misc_feature (1)...(730): n = A,T,C or G
atatatatatatayacacacatatatatatatatatatacacacacacacacacatatatatatctcctcataaaaatgccatggggtagataatattattatatcctttttgcaaatgagaaactgaggcataagaggttacatgcctttccaaggccacagaactagtaagtggcaggccaagtttgaaccaacaacccttacaccagagtccacaatattaactatcatgtttggctatgtccaccaataatataacaacaatattaataatatctaaaattcaatgatccaggctagccaccgtgcatagtatgtttaatccttaccacagcccaatgaggaaggtacaattattactccttttatacatgaggaaactgaggattagggagattcaataatttgtccaaaaactcacaaccagcaaatggtggagcttgggctgaatattgnttggggggggaaagggaaatttaaaaaataaggggcaaaagggctaaaaatttggggggaaaaaaaaaaaaatgaaaaattattctgttcaagtttataatcatttataaaaggagatatttgttggtccggaagcatttggaatatttttagaagtgtgatttttactatccctagaaatggaaagtgaagctgaaattttgcttttctggccttcctgagatattatgtctcattcctaaaggatttggagatttagttgttactctgtta

SEQ ID NO: 91305 - DNA, 730 bp, Homo sapiens
  misc_feature (1)...(730): n = A,T,C or G
atatatatatatacayacacatatatatatatatatatacacacacacacacacatatatatatctcctcataaaaatgccatggggtagataatattattatatcctttttgcaaatgagaaactgaggcataagaggttacatgcctttccaaggccacagaactagtaagtggcaggccaagtttgaaccaacaacccttacaccagagtccacaatattaactatcatgtttggctatgtccaccaataatataacaacaatattaataatatctaaaattcaatgatccaggctagccaccgtgcatagtatgtttaatccttaccacagcccaatgaggaaggtacaattattactccttttatacatgaggaaactgaggattagggagattcaataatttgtccaaaaactcacaaccagcaaatggtggagcttgggctgaatattgnttggggggggaaagggaaatttaaaaaataaggggcaaaagggctaaaaatttggggggaaaaaaaaaaaaatgaaaaattattctgttcaagtttataatcatttataaaaggagatatttgttggtccggaagcatttggaatatttttagaagtgtgatttttactatccctagaaatggaaagtgaagctgaaattttgcttttctggccttcctgagatattatgtctcattcctaaaggatttggagatttagttgttactctgtta

SEQ ID NO: 91306 - DNA, 730 bp, Homo sapiens
  misc_feature (1)...(730): n = A,T,C or G
atatatatatatacacacacayatatatatatatatatacacacacacacacacatatatatatctcctcataaaaatgccatggggtagataatattattatatcctttttgcaaatgagaaactgaggcataagaggttacatgcctttccaaggccacagaactagtaagtggcaggccaagtttgaaccaacaacccttacaccagagtccacaatattaactatcatgtttggctatgtccaccaataatataacaacaatattaataatatctaaaattcaatgatccaggctagccaccgtgcatagtatgtttaatccttaccacagcccaatgaggaaggtacaattattactccttttatacatgaggaaactgaggattagggagattcaataatttgtccaaaaactcacaaccagcaaatggtggagcttgggctgaatattgnttggggggggaaagggaaatttaaaaaataaggggcaaaagggctaaaaatttggggggaaaaaaaaaaaaatgaaaaattattctgttcaagtttataatcatttataaaaggagatatttgttggtccggaagcatttggaatatttttagaagtgtgatttttactatccctagaaatggaaagtgaagctgaaattttgcttttctggccttcctgagatattatgtctcattcctaaaggatttggagatttagttgttactctgtta

SEQ ID NO: 91307 - DNA, 730 bp, Homo sapiens
  misc_feature (1)...(730): n = A,T,C or G
atatatatatatacacacacatayatatatatatatatacacacacacacacacatatatatatctcctcataaaaatgccatggggtagataatattattatatcctttttgcaaatgagaaactgaggcataagaggttacatgcctttccaaggccacagaactagtaagtggcaggccaagtttgaaccaacaacccttacaccagagtccacaatattaactatcatgtttggctatgtccaccaataatataacaacaatattaataatatctaaaattcaatgatccaggctagccaccgtgcatagtatgtttaatccttaccacagcccaatgaggaaggtacaattattactccttttatacatgaggaaactgaggattagggagattcaataatttgtccaaaaactcacaaccagcaaatggtggagcttgggctgaatattgnttggggggggaaagggaaatttaaaaaataaggggcaaaagggctaaaaatttggggggaaaaaaaaaaaaatgaaaaattattctgttcaagtttataatcatttataaaaggagatatttgttggtccggaagcatttggaatatttttagaagtgtgatttttactatccctagaaatggaaagtgaagctgaaattttgcttttctggccttcctgagatattatgtctcattcctaaaggatttggagatttagttgttactctgtta

SEQ ID NO: 91308 - DNA, 2991 bp, Homo sapiens
tgtgcacttgacccttgtgaccttcactgtccactcctacgaggccagtggggcacagaggctgaggtgcctgagctcaggaatgtgatcaaacctccctaatggatgaggaaaccaagacttagagagaggacctgatgaagtagagcttggtttgacatctgaagacaagtagtctcccatctctgccttttattagctgtgtgactctagggaagtaacccagcctctctgagcctcattggaacattagaaatcataagactgaaccagcttgatccactrggctcagacttgagcacagtctgaaaatatgctgctggaaactctcaggaagccagcttggccagtacaactacacggcaagtgtgggtgaatgctgcgacttgctggaggtcaccagcagggaggacatatgtgggatgtgtttcctgagactccagcatctcgccctatggcacggctgtgtgaccagggctctggatggggcatctaaggacttggcgtcttttcccagcgctggcccagccatgtaactttaggaaggccctctcagggactcagcgtttgtgaaatgagagggcaggtttagatagcctgtgagatcccttccaacactaacaaccttcgcggagacttcccaactgtgccctggggctccccagcagccccctggagcacctgctggcacctggtgcaaatttcattcttatggtgtatttcaagctctcttttaatgtaatgaaaagatagcacccacagactttaatatctttaacaagatattaaaatttaaatattctacatttaaaaatttaactcattagaggccatcaatatttacttgtgtttttaatgactggcttataagaagttaaaatatgaatttacaggctgggcatggtggctcatgcctgtaatcccagcactttgggaggccgaggcgggtggatcacttgaggtcaggagtttgagaccagcctggccaacatggcaaaatcctgtctctaccaaaaatacaaaaattagccaagcatggtgggtggcgcgcgcctgtaatcccagctacttgggaagctgaggcaggagaatggcttgaacccgagaggtagaggttgcagtgagccaagattgtgccactgcactccagcctggatgacagagcaaaactccatctcaaaacaaacaaacaaacaaaaaagaacttacagaataaatgcataccactaaaacattgcctttattttttattgcctttatcttttttttttaaaaaaaaataggggattaacataaggttccatttgacataaaggtattcctgtttttaaaaatgttaggaaatgtggctgatggtattaagactttgatatcctaacattctacaaatctaagggtctaaaattccaaaactatgattagatcagcctatggttcttgtgttgtggcattctacaattctatccttccaaatgcagcagtgactggggtcccacctgagtcccccaggattgctgttggcggaccctgggaaccagtagcctctgtgggtgtctactgtttgagttaacatcagtgaggtctttggttctggcattgggaggaagcaggagatttgagcctttgcacagaacctggagacaaggatgagtgagtgaaagagaaaggcaagaagaacaaggcctcctctccctcactagactgagaggcaggtgtcaagcctggttgaaggagagaggggttagggacacatgatataacagccactagctccacccagaccctcgtgtgggaactcaggcaaggattcccaagctgtgaagtggtgggatgctgcagaaggccccaacagcagtggtgtcctctcctgtggccttatgccatgacacaggacaagaatgacaagggtagtagagcatgagagcctcattcctgagcgcagtgcgaccctctgacgactctaggagaaacggaggcggcatggggagcattgccatgaaggtgggaaccccagctacaagcatggtcatgaacagtgaggaggctgcttttgccttataaactatgcatgagagctgggtcctgcaggttacagagcagcctacgtgccaagatgctgagaccctgtaggtctcacctgagccctgctgctatcttcccatctccaccccagggccagctcctccactgccaaatccccccttgaactcctgggatcaagtaatcctcccactttggcttgccaaagcaccaggattacaggtgtgagccactgcaacaggtccctaaggccccccgttgacctttctggtagcccgcagaaaagccatggctggccacatgcttgtccgagtggaagatgacagacatgacatgccaggaggaggtgaagggcggcgggggcaccttgccgcagaacctccccagcaggttgcccttgtctggtgaggccccattgtagatctccagaaagtcgaagctgcaggtgtcgtggtactctaggtcaaaggcatggaaggtgagcagcaccgaggatccctcggccaccacgatcagccagctgcactctgtgttgtaggggtacagtctagggaagttggggctggagaagtttccagaaggtgctgagagcacacccccacatttgacacctggggcaagagagaagtatggctgagactccgtgctggggtcttgggtacatgtggtaagggcagtgggcccagctacaaagctgggttcttgggatgggatgagggaacacatggccatgtgtttatttgctcatgcatctacttattcttcagatgctgaccaagcatgctggtattcattccacaaatactgtttgagtgctagacattgttctaggtgctggggtcacagcagaaacaaaacagacaaaacccctaccctcatggaacctacattctggcagggaagacagacaataaacatagcaggtaaaatatagagtttatggggccaggt

SEQ ID NO: 91309 - DNA, 2991 bp, Homo sapiens
tgtgcacttgacccttgtgaccttcactgtccactcctacgaggccagtggggcacagaggctgaggtgcctgagctcaggaatgtgatcaaacctccctaatggatgaggaaaccaagacttagagagaggacctgatgaagtagagcttggtttgacatctgaagacaagtagtctcccatctctgccttttattagctgtgtgactctagggaagtaacccagcctctctgagcctcattggaacattagaaatcataagactgaaccagcttgatccactgggctcagacttgagcacagtctgaaaatatgctgctggaaactctcaggaagccagcttggccagtacaactacacggcaagtgtgggtgaatgctgcgacttgctggaggtcaccagcagggaggacatatgtgggatgtgtttcctgagactccagcatctcgccctatggcacggctgtgtgaccagggctctggatggggcatctaaggacttggcgtcttttcccagygctggcccagccatgtaactttaggaaggccctctcagggactcagcgtttgtgaaatgagagggcaggtttagatagcctgtgagatcccttccaacactaacaaccttcgcggagacttcccaactgtgccctggggctccccagcagccccctggagcacctgctggcacctggtgcaaatttcattcttatggtgtatttcaagctctcttttaatgtaatgaaaagatagcacccacagactttaatatctttaacaagatattaaaatttaaatattctacatttaaaaatttaactcattagaggccatcaatatttacttgtgtttttaatgactggcttataagaagttaaaatatgaatttacaggctgggcatggtggctcatgcctgtaatcccagcactttgggaggccgaggcgggtggatcacttgaggtcaggagtttgagaccagcctggccaacatggcaaaatcctgtctctaccaaaaatacaaaaattagccaagcatggtgggtggcgcgcgcctgtaatcccagctacttgggaagctgaggcaggagaatggcttgaacccgagaggtagaggttgcagtgagccaagattgtgccactgcactccagcctggatgacagagcaaaactccatctcaaaacaaacaaacaaacaaaaaagaacttacagaataaatgcataccactaaaacattgcctttattttttattgcctttatcttttttttttaaaaaaaaataggggattaacataaggttccatttgacataaaggtattcctgtttttaaaaatgttaggaaatgtggctgatggtattaagactttgatatcctaacattctacaaatctaagggtctaaaattccaaaactatgattagatcagcctatggttcttgtgttgtggcattctacaattctatccttccaaatgcagcagtgactggggtcccacctgagtcccccaggattgctgttggcggaccctgggaaccagtagcctctgtgggtgtctactgtttgagttaacatcagtgaggtctttggttctggcattgggaggaagcaggagatttgagcctttgcacagaacctggagacaaggatgagtgagtgaaagagaaaggcaagaagaacaaggcctcctctccctcactagactgagaggcaggtgtcaagcctggttgaaggagagaggggttagggacacatgatataacagccactagctccacccagaccctcgtgtgggaactcaggcaaggattcccaagctgtgaagtggtgggatgctgcagaaggccccaacagcagtggtgtcctctcctgtggccttatgccatgacacaggacaagaatgacaagggtagtagagcatgagagcctcattcctgagcgcagtgcgaccctctgacgactctaggagaaacggaggcggcatggggagcattgccatgaaggtgggaaccccagctacaagcatggtcatgaacagtgaggaggctgcttttgccttataaactatgcatgagagctgggtcctgcaggttacagagcagcctacgtgccaagatgctgagaccctgtaggtctcacctgagccctgctgctatcttcccatctccaccccagggccagctcctccactgccaaatccccccttgaactcctgggatcaagtaatcctcccactttggcttgccaaagcaccaggattacaggtgtgagccactgcaacaggtccctaaggccccccgttgacctttctggtagcccgcagaaaagccatggctggccacatgcttgtccgagtggaagatgacagacatgacatgccaggaggaggtgaagggcggcgggggcaccttgccgcagaacctccccagcaggttgcccttgtctggtgaggccccattgtagatctccagaaagtcgaagctgcaggtgtcgtggtactctaggtcaaaggcatggaaggtgagcagcaccgaggatccctcggccaccacgatcagccagctgcactctgtgttgtaggggtacagtctagggaagttggggctggagaagtttccagaaggtgctgagagcacacccccacatttgacacctggggcaagagagaagtatggctgagactccgtgctggggtcttgggtacatgtggtaagggcagtgggcccagctacaaagctgggttcttgggatgggatgagggaacacatggccatgtgtttatttgctcatgcatctacttattcttcagatgctgaccaagcatgctggtattcattccacaaatactgtttgagtgctagacattgttctaggtgctggggtcacagcagaaacaaaacagacaaaacccctaccctcatggaacctacattctggcagggaagacagacaataaacatagcaggtaaaatatagagtttatggggccaggt

SEQ ID NO: 91310 - DNA, 2991 bp, Homo sapiens
tgtgcacttgacccttgtgaccttcactgtccactcctacgaggccagtggggcacagaggctgaggtgcctgagctcaggaatgtgatcaaacctccctaatggatgaggaaaccaagacttagagagaggacctgatgaagtagagcttggtttgacatctgaagacaagtagtctcccatctctgccttttattagctgtgtgactctagggaagtaacccagcctctctgagcctcattggaacattagaaatcataagactgaaccagcttgatccactgggctcagacttgagcacagtctgaaaatatgctgctggaaactctcaggaagccagcttggccagtacaactacacggcaagtgtgggtgaatgctgcgacttgctggaggtcaccagcagggaggacatatgtgggatgtgtttcctgagactccagcatctcgccctatggcacggctgtgtgaccagggctctggatggggcatctaaggacttggcgtcttttcccagcgctggcccagccatgtaactttaggaaggccctctcagggactcagcktttgtgaaatgagagggcaggtttagatagcctgtgagatcccttccaacactaacaaccttcgcggagacttcccaactgtgccctggggctccccagcagccccctggagcacctgctggcacctggtgcaaatttcattcttatggtgtatttcaagctctcttttaatgtaatgaaaagatagcacccacagactttaatatctttaacaagatattaaaatttaaatattctacatttaaaaatttaactcattagaggccatcaatatttacttgtgtttttaatgactggcttataagaagttaaaatatgaatttacaggctgggcatggtggctcatgcctgtaatcccagcactttgggaggccgaggcgggtggatcacttgaggtcaggagtttgagaccagcctggccaacatggcaaaatcctgtctctaccaaaaatacaaaaattagccaagcatggtgggtggcgcgcgcctgtaatcccagctacttgggaagctgaggcaggagaatggcttgaacccgagaggtagaggttgcagtgagccaagattgtgccactgcactccagcctggatgacagagcaaaactccatctcaaaacaaacaaacaaacaaaaaagaacttacagaataaatgcataccactaaaacattgcctttattttttattgcctttatcttttttttttaaaaaaaaataggggattaacataaggttccatttgacataaaggtattcctgtttttaaaaatgttaggaaatgtggctgatggtattaagactttgatatcctaacattctacaaatctaagggtctaaaattccaaaactatgattagatcagcctatggttcttgtgttgtggcattctacaattctatccttccaaatgcagcagtgactggggtcccacctgagtcccccaggattgctgttggcggaccctgggaaccagtagcctctgtgggtgtctactgtttgagttaacatcagtgaggtctttggttctggcattgggaggaagcaggagatttgagcctttgcacagaacctggagacaaggatgagtgagtgaaagagaaaggcaagaagaacaaggcctcctctccctcactagactgagaggcaggtgtcaagcctggttgaaggagagaggggttagggacacatgatataacagccactagctccacccagaccctcgtgtgggaactcaggcaaggattcccaagctgtgaagtggtgggatgctgcagaaggccccaacagcagtggtgtcctctcctgtggccttatgccatgacacaggacaagaatgacaagggtagtagagcatgagagcctcattcctgagcgcagtgcgaccctctgacgactctaggagaaacggaggcggcatggggagcattgccatgaaggtgggaaccccagctacaagcatggtcatgaacagtgaggaggctgcttttgccttataaactatgcatgagagctgggtcctgcaggttacagagcagcctacgtgccaagatgctgagaccctgtaggtctcacctgagccctgctgctatcttcccatctccaccccagggccagctcctccactgccaaatccccccttgaactcctgggatcaagtaatcctcccactttggcttgccaaagcaccaggattacaggtgtgagccactgcaacaggtccctaaggccccccgttgacctttctggtagcccgcagaaaagccatggctggccacatgcttgtccgagtggaagatgacagacatgacatgccaggaggaggtgaagggcggcgggggcaccttgccgcagaacctccccagcaggttgcccttgtctggtgaggccccattgtagatctccagaaagtcgaagctgcaggtgtcgtggtactctaggtcaaaggcatggaaggtgagcagcaccgaggatccctcggccaccacgatcagccagctgcactctgtgttgtaggggtacagtctagggaagttggggctggagaagtttccagaaggtgctgagagcacacccccacatttgacacctggggcaagagagaagtatggctgagactccgtgctggggtcttgggtacatgtggtaagggcagtgggcccagctacaaagctgggttcttgggatgggatgagggaacacatggccatgtgtttatttgctcatgcatctacttattcttcagatgctgaccaagcatgctggtattcattccacaaatactgtttgagtgctagacattgttctaggtgctggggtcacagcagaaacaaaacagacaaaacccctaccctcatggaacctacattctggcagggaagacagacaataaacatagcaggtaaaatatagagtttatggggccaggt

SEQ ID NO: 91311 - DNA, 2991 bp, Homo sapiens
tgtgcacttgacccttgtgaccttcactgtccactcctacgaggccagtggggcacagaggctgaggtgcctgagctcaggaatgtgatcaaacctccctaatggatgaggaaaccaagacttagagagaggacctgatgaagtagagcttggtttgacatctgaagacaagtagtctcccatctctgccttttattagctgtgtgactctagggaagtaacccagcctctctgagcctcattggaacattagaaatcataagactgaaccagcttgatccactgggctcagacttgagcacagtctgaaaatatgctgctggaaactctcaggaagccagcttggccagtacaactacacggcaagtgtgggtgaatgctgcgacttgctggaggtcaccagcagggaggacatatgtgggatgtgtttcctgagactccagcatctcgccctatggcacggctgtgtgaccagggctctggatggggcatctaaggacttggcgtcttttcccagcgctggcccagccatgtaactttaggaaggccctctcagggactcagcgtttgtgaaatgagagggcaggtttagatagcctgtgagatcccttccaacactaacaaccttcgcggagacttcccaactgtgccctggggctccccagcagccccctggagcacctgctggcacctggtgcaaatttcattcttatggtgtatttcaagctctcttttaatgtaatgaaaagatagcacccacagactttaatatctttaacaagatattaaaatttaaatattctacatttaaaaatttaactcattagaggccatcaatatttacttgtgtttttaatgactggcttataagaagttaaaatatgaatttacaggctgggcatggtggctcatgcctgtaatcccagcactttgggaggccgaggcgggtggatcacttgaggtcaggagtttgagaccagcctggccaacatggcaaaatcctgtctctaccaaaaatacaaaaattagccaagcatggtgggtggcgcgcgcctgtaatcccagctacttgggaagctgaggcaggagaatggcttgaacccgagaggtagaggttgcagtgagccaagattgtgccactgcactccagcctggatgacagagcaaaactccatctcaaaacaaacaaacaaacaaaaaagaacttacagaataaatgcataccactaaaacattgcctttattttttattgcctttatcttttttttwtaaaaaaaaataggggattaacataaggttccatttgacataaaggtattcctgtttttaaaaatgttaggaaatgtggctgatggtattaagactttgatatcctaacattctacaaatctaagggtctaaaattccaaaactatgattagatcagcctatggttcttgtgttgtggcattctacaattctatccttccaaatgcagcagtgactggggtcccacctgagtcccccaggattgctgttggcggaccctgggaaccagtagcctctgtgggtgtctactgtttgagttaacatcagtgaggtctttggttctggcattgggaggaagcaggagatttgagcctttgcacagaacctggagacaaggatgagtgagtgaaagagaaaggcaagaagaacaaggcctcctctccctcactagactgagaggcaggtgtcaagcctggttgaaggagagaggggttagggacacatgatataacagccactagctccacccagaccctcgtgtgggaactcaggcaaggattcccaagctgtgaagtggtgggatgctgcagaaggccccaacagcagtggtgtcctctcctgtggccttatgccatgacacaggacaagaatgacaagggtagtagagcatgagagcctcattcctgagcgcagtgcgaccctctgacgactctaggagaaacggaggcggcatggggagcattgccatgaaggtgggaaccccagctacaagcatggtcatgaacagtgaggaggctgcttttgccttataaactatgcatgagagctgggtcctgcaggttacagagcagcctacgtgccaagatgctgagaccctgtaggtctcacctgagccctgctgctatcttcccatctccaccccagggccagctcctccactgccaaatccccccttgaactcctgggatcaagtaatcctcccactttggcttgccaaagcaccaggattacaggtgtgagccactgcaacaggtccctaaggccccccgttgacctttctggtagcccgcagaaaagccatggctggccacatgcttgtccgagtggaagatgacagacatgacatgccaggaggaggtgaagggcggcgggggcaccttgccgcagaacctccccagcaggttgcccttgtctggtgaggccccattgtagatctccagaaagtcgaagctgcaggtgtcgtggtactctaggtcaaaggcatggaaggtgagcagcaccgaggatccctcggccaccacgatcagccagctgcactctgtgttgtaggggtacagtctagggaagttggggctggagaagtttccagaaggtgctgagagcacacccccacatttgacacctggggcaagagagaagtatggctgagactccgtgctggggtcttgggtacatgtggtaagggcagtgggcccagctacaaagctgggttcttgggatgggatgagggaacacatggccatgtgtttatttgctcatgcatctacttattcttcagatgctgaccaagcatgctggtattcattccacaaatactgtttgagtgctagacattgttctaggtgctggggtcacagcagaaacaaaacagacaaaacccctaccctcatggaacctacattctggcagggaagacagacaataaacatagcaggtaaaatatagagtttatggggccaggt

SEQ ID NO: 91312 - DNA, 2991 bp, Homo sapiens
tgtgcacttgacccttgtgaccttcactgtccactcctacgaggccagtggggcacagaggctgaggtgcctgagctcaggaatgtgatcaaacctccctaatggatgaggaaaccaagacttagagagaggacctgatgaagtagagcttggtttgacatctgaagacaagtagtctcccatctctgccttttattagctgtgtgactctagggaagtaacccagcctctctgagcctcattggaacattagaaatcataagactgaaccagcttgatccactgggctcagacttgagcacagtctgaaaatatgctgctggaaactctcaggaagccagcttggccagtacaactacacggcaagtgtgggtgaatgctgcgacttgctggaggtcaccagcagggaggacatatgtgggatgtgtttcctgagactccagcatctcgccctatggcacggctgtgtgaccagggctctggatggggcatctaaggacttggcgtcttttcccagcgctggcccagccatgtaactttaggaaggccctctcagggactcagcgtttgtgaaatgagagggcaggtttagatagcctgtgagatcccttccaacactaacaaccttcgcggagacttcccaactgtgccctggggctccccagcagccccctggagcacctgctggcacctggtgcaaatttcattcttatggtgtatttcaagctctcttttaatgtaatgaaaagatagcacccacagactttaatatctttaacaagatattaaaatttaaatattctacatttaaaaatttaactcattagaggccatcaatatttacttgtgtttttaatgactggcttataagaagttaaaatatgaatttacaggctgggcatggtggctcatgcctgtaatcccagcactttgggaggccgaggcgggtggatcacttgaggtcaggagtttgagaccagcctggccaacatggcaaaatcctgtctctaccaaaaatacaaaaattagccaagcatggtgggtggcgcgcgcctgtaatcccagctacttgggaagctgaggcaggagaatggcttgaacccgagaggtagaggttgcagtgagccaagattgtgccactgcactccagcctggatgacagagcaaaactccatctcaaaacaaacaaacaaacaaaaaagaacttacagaataaatgcataccactaaaacattgcctttattttttattgcctttatctttttttttwaaaaaaaaataggggattaacataaggttccatttgacataaaggtattcctgtttttaaaaatgttaggaaatgtggctgatggtattaagactttgatatcctaacattctacaaatctaagggtctaaaattccaaaactatgattagatcagcctatggttcttgtgttgtggcattctacaattctatccttccaaatgcagcagtgactggggtcccacctgagtcccccaggattgctgttggcggaccctgggaaccagtagcctctgtgggtgtctactgtttgagttaacatcagtgaggtctttggttctggcattgggaggaagcaggagatttgagcctttgcacagaacctggagacaaggatgagtgagtgaaagagaaaggcaagaagaacaaggcctcctctccctcactagactgagaggcaggtgtcaagcctggttgaaggagagaggggttagggacacatgatataacagccactagctccacccagaccctcgtgtgggaactcaggcaaggattcccaagctgtgaagtggtgggatgctgcagaaggccccaacagcagtggtgtcctctcctgtggccttatgccatgacacaggacaagaatgacaagggtagtagagcatgagagcctcattcctgagcgcagtgcgaccctctgacgactctaggagaaacggaggcggcatggggagcattgccatgaaggtgggaaccccagctacaagcatggtcatgaacagtgaggaggctgcttttgccttataaactatgcatgagagctgggtcctgcaggttacagagcagcctacgtgccaagatgctgagaccctgtaggtctcacctgagccctgctgctatcttcccatctccaccccagggccagctcctccactgccaaatccccccttgaactcctgggatcaagtaatcctcccactttggcttgccaaagcaccaggattacaggtgtgagccactgcaacaggtccctaaggccccccgttgacctttctggtagcccgcagaaaagccatggctggccacatgcttgtccgagtggaagatgacagacatgacatgccaggaggaggtgaagggcggcgggggcaccttgccgcagaacctccccagcaggttgcccttgtctggtgaggccccattgtagatctccagaaagtcgaagctgcaggtgtcgtggtactctaggtcaaaggcatggaaggtgagcagcaccgaggatccctcggccaccacgatcagccagctgcactctgtgttgtaggggtacagtctagggaagttggggctggagaagtttccagaaggtgctgagagcacacccccacatttgacacctggggcaagagagaagtatggctgagactccgtgctggggtcttgggtacatgtggtaagggcagtgggcccagctacaaagctgggttcttgggatgggatgagggaacacatggccatgtgtttatttgctcatgcatctacttattcttcagatgctgaccaagcatgctggtattcattccacaaatactgtttgagtgctagacattgttctaggtgctggggtcacagcagaaacaaaacagacaaaacccctaccctcatggaacctacattctggcagggaagacagacaataaacatagcaggtaaaatatagagtttatggggccaggt

SEQ ID NO: 91313 - DNA, 2175 bp, Homo sapiens
tcccttgtcctttgagaggttggttttgggtgtaactgtagcccctgcttctaggggcaaaggtaacccctaatcccagctattatagcttgctgctggacaaccatggaaaaatttccatggtcattagctggcaatgagagaggtgacactgggaaatgatggcagggctaaaataacccttgttgcaacctaatgaaacctgaaagtaatttttcaaggttttaacaaagtcacacatgtctgtccaaccctgggtgacgaagcaatgtctcaataactaagagtccttctggaagacaggaggagactgacttcagctcagtattgtttggctcaatcatataaattcggttttaatcagtaccatggtctaaatgtttgtgcccatctctcaggttcatttattaaagtcctaacctccaaagtgactgacagtgttaagaggcagggtctttgggaggtcattgggtcatgagggcagagccctcattaataggactagtgcccctgtaaaagagagaccccttgctcctttcaccatgtgagaacacaatgaggagagagctgtctatgaaccagggagtggctctcaccagacaatgaatctgctatgccttggtcttagacttcccagcctccagacctatgatcaataaacttctgatatttgtaagccacccagtgtatgtgtttagtcatagcagtgcaaacagaccaagacaatcagccacatcttttgagagctatcttgaaaccagctgacaggaatacagacaagtgtaggagctggatcactagtgagcaccttgaccactccatagcgtccccctctccagcatgtcggcttatcccagtgtccgcagtacagtgataactgaactttggacagtgatgttagggaagaaacaacatgcctcagctcagcttctctaactgtggtgttcagggaggactgacttccaaacgtggctgaatattcaaaagtgattgacatgtcatcatctgtggtagattctttcctaagaagatggacacatcaattccttccatccattataccctttgcagtgtgacattgccatctctttacgaagaagtggggcctatcttcctttccttgagcctcagcaggccctgggactgccactgattcaaagaatgtgacagaagggaggttgtggaacttctgtgtacaggccttaagaaacccggcagcttccctttttgtcctctggacatgtaaagaaatccaagccatcttgctggagagggaggccatgggggaaaagaagctctgggggagaagagaggccatgcagaagagaactgaggaccccagccaaaagccacaccaaagcactagacatgtgagtggggccatcttggcttctccagccccagtggagatccragccaacaaagcatggagcagagaggatccatctccccttgcttacgagccccacccaaatctctgacccacagaattgtgcacaataaaattgatgatgtttaaaccagctgagttgtggagtggctgcatgttaacagaaaactcatccaccctctcttcccacttggaagaattagtcccacaaattgggaagttctgcccaaatctgggaccgtcacaaggatcggaacatgctttgtgtcgttttcactagcttcagagcatttctctcagcagactaaaaccaaaactaaatgagttgagttgcttttctgtagggctgggccacgctcttcaaattcacaactggtttatttcgtgctgaaaactgttccagtggccctttgggggtcggtgagcagccccagtttcctgagagccactgggtgccgttttagcaaccctgagtctcttcgacctttattgatcttcttacagagtttgacaaatggctgttgacagaaaatgtttaaaatatgagattcagtctctcactgggtatacctctgcaacaaagtttctattggatatcaatgggaacattcaggccgctgaactcagcatcctaatcatttcccatatccatatcaacacctacactctgaaagtgatcagttctgcccattggtctctatggactgaggagaactttccagcagcttaggcatgtcctctcattatcaagtgatcaataaatcatttgcctaggtgcattttat

SEQ ID NO: 91314 - DNA, 532 bp, Homo sapiens
tttcataacacataaagtgagctacatacgaaaaatcttatggatacctcaagtgtgtcaaggtacttaagtagccagaccatggttctgtactctactcatctacagagagtgtggcccctgagaacatacatgctgtcacatgtgggaagtttaccctccacctggctgggtgtatttcctgraaaagacattctggaaagagagaaagcaagttggggaactgagaccctaagggcatagccattggtagcagaactttaatctcctcgaggtgcaagtggaagttagcctgtcatgacaatgatcaggacgcttttggccacgctgctgttgtggtttgtgctgctgctcttttgattgtgttagaggggatgagtcatccctctcatgccctgtggtcacctggttgtgatgatcctggtgggatcctggtggctcctggtgctccttggggttgagaaggataactcttccccctaagcatattgtttcttgtttagctttatttatttatttatttatttattta

SEQ ID NO: 91315 - DNA, 532 bp, Homo sapiens
tttcataacacataaagtgagctacatacgaaaaatcttatggatacctcaagtgtgtcaaggtacttaagtagccagaccatggttctgtactctactcatctacagagagtgtggcccctgagaacatacatgctgtcacatgtgggaagtttaccctccacctggctgggtgtatttcctggaaaagacattctggaaagagagaaagcaagttggggaactgagaccctaasggcatagccattggtagcagaactttaatctcctcgaggtgcaagtggaagttagcctgtcatgacaatgatcaggacgcttttggccacgctgctgttgtggtttgtgctgctgctcttttgattgtgttagaggggatgagtcatccctctcatgccctgtggtcacctggttgtgatgatcctggtgggatcctggtggctcctggtgctccttggggttgagaaggataactcttccccctaagcatattgtttcttgtttagctttatttatttatttatttatttattta

SEQ ID NO: 91316 - DNA, 828 bp, Homo sapiens
gatctagggggtattgccctggtgattgatgaaaatgagagagaaatagtaaagtgtgactttttgaagggagggagtaaagattcttctactcttcctcttttttctctccttggttccacacccatttcttatgcacagtggcaggcctcgctttctgttgacattccattgttaatgatccagagaaagttcctctggatttcaaggatggattgaaaacaaattttggaagtttgaagacaaacatcacagataaaaaaggatctgtgtgcaggtaggttttgttttagtattaatgttttgtatatgcctccgtgtattaaaaagagggaatttgcctgatttgagcttatgagcaaaccccccaaaggatgtagactctgggagaagataccgggaagatgaggagaggccaatttcaccaacagaagggagatggctgcctgccgaaaagaaagcggttagcatgaacgtgcgtcaggagttgcctgttattgttgcaaaatgaaattgtttgctcactgcagatatagcaggtttgtaagcatgctgtcagtgctaaggttttttttttttttaagtaccaccaaagacaacagcggatggcagtgtctacatattcgttaygcgctcatagcatttgggtttttgttttaattccctttaaaaagaaagcaatctaatcagctcactcccaggattacagcctgggtgtcaggcagtgaggaagactcagagataagaaagaccctggccttggccttcaggcatccagaaaaggggcacaaagtatagataggcaagcaggatgaagcccagggagaa

SEQ ID NO: 91317 - DNA, 596 bp, Homo sapiens
tctgtctcctcattgggaacattggtacgccatgggggtggggtcaccagatgtgtttgcaccctgtccccaggacacggggaacatgcagtcaccagggctcaagatgctgctatggagcagatgaggctaaacagaaaacagtacacatttcctgggtttcagtgagaaactaaaatgctcattcacaaaatctccttccacaataaaaagccaaagctcaaagacacatgtgtttttaaggagcgctcagccttctcccaaacatcagtcataaggacagccacacccctgtttcttaccactgtgtcttggtgatttctgaaatgtttgtggacagtgagggctttcctttccaagggacacctggacctgatcccaggaaagactgcgagcaggactgaccacaggaaaaaaattaacctgaatccatacctcacaccatatacamaaatcaactcaaaacggatcatggacttacatgtaaaacctaaaattacaaattttctaggagaaaatgtaggaaacaaagtcactatggcctcatttttctgcctctgggcattttctccggccattctctctacctggattaa

SEQ ID NO: 91318 - DNA, 728 bp, Homo sapiens
atgtaatagtaatccacaataatataaactgtaattatgatctaaatatggtaatataatcatgatctaaatattatggtatgactatatttagaggatgcagtgacaggagaggagagttggcaaragagttagatcttcactttttatagtaggaagtcatctggtaatgtttaaaataggtaaatcaagaaacagaggtataggcaaagtacttagacatatggcactaagaaatagcataggagttaaagttgtaggaaattatgttattcagaataaaccttttggtacttttggatatattttttaactgtgagtgtgtattatgtgatattttttgaattatgcatcaagagaataagagagaaaagagaaagaacaggacaatgttgtcaaagatgaaggcagacaaggagagtggccagtcatgatctgatggaataaataatatattgcatgcttactcagagcagggcttgaggcaaataccaggcatgcaggtgtggcaggagaatttagtgaaatagagagttttgttttttctgcctatgtttttcttttcactatagagtaggcaagagttttggcagggctgggagtgatgtcctgatgtcaaagggagcctgacgtcaaaggccttttgtaaatgtcttacaccaggggaaaatgccgggcatagaggctcacacctgtaatcccagcaacttggagcctgaggcaggagg

SEQ ID NO: 91319 - DNA, 544 bp, Homo sapiens
tgtcagaacctcctgaggctgtatcatgtcatgagtgtgtgctcaaccttggcaaaataaactttctaarttgattgagacccatctcagatacttttggattcacaacatgaactcagcttcctttacagacccctgagacctgcacattgatccctgccatgcccctccgtaccgtttaacccctgccccattttactcactcatggcaagaaaaccaatatgctgagaagaggagtgttgccacacacacaagaggccatggaggatgagcagagatggacaaatgaggagagtccctgggagcagcaggtgtgcatgggtgtgcaggagtccttctgcttgtgtggagtctgtgagactgtgtgtgaggttggatggggagagcaagcaggagagggatcatgatcatgagggcgagggagtccttggaagactgagggtccatgagtgtgtgtggatctgtaggaggctgtggctgtctcctatttatggccccctaaaactttcattttctacgttcagaaacttccttccctaatgg

SEQ ID NO: 91320 - DNA, 538 bp, Homo sapiens
gaatcgcttgaatctgggaggcggaggttgcagtgagccgagatcgcaccactgcactccagcctgggcgactgagggagaccctgtctcaaaaaataaaaaaataaaaaataaaataagaaggccgggcgcggtggctcacgcctgtggtcccagcactttgggaggccgaggcgggyggatcacgaggtcaggagatcgagaccatcctggctaaaacggtgaaaccccgtctctactaaaaatacaaaaaattagccgggcgtagtggcgggcgcctgtagtcccggctacttgggaggctgaggcaggagaatggcgtgaacccgggaggcggagcttgcagtgagccgagatcccgccactgcactccagcctgggcgacagagcgagactccgtctcaaaaaaaaaaataaataaataaaaaaaaaaataaaataaaataagaaaaccaatacaagaagagaataataaatgtcagctaagtcccagaaccagttgcagaactactgactgtaacttttatccatattccct

SEQ ID NO: 91321 - DNA, 1628 bp, Homo sapiens
cacacacacacacacacacactccatacccttgaacactgagagacaatagactgatcaggaggctcttacatctgcaagaaacaaaactggagactagcaggacacatagcttctgagtgatggcgtaacaagttgctatttataccccatcttccattcaccaatgtgaactaggggtctatccctgcaagagagtaattttagagaatgagcttccgggtgagctcacagsttaacactgcttgtatcaccatcttgagtcagcagtggataatgctgtgcagaataaactaattttagtcctctgcggtatccttgtaaacacttcatagtgattctttaaaaagtcagtgggaacttgctatctctgcttcatttcctactcccaataatttgctagggttatttttaggtaactgtgtcttacaggatttgtttaggtgagctcctctgtttcagaatggccatgtgaaaattctgccacagattttgaagtcagaaggctgtctggttaaatggatccagaaaaattactaacagatatggtgacaaaggacatggaaatgtaagtgtcctgtatgtgctacaggaaaaagtgctgcccatctttccctcatttcagcaacactttcagtgagccccagctcatggaaagagagacgaggagagaaaaaggcttattcctgaagctaatagctttccttctctctctaatactatatgtttgcagtgacaatgatccctcagcttctgaatcatctcctcattctgtgatgtacccctgggttctgagtttcatttctttggcagtcagtcacatgctgaatatagagcacctctaatttgttcagtgtctcatggatcactgagaaagaatagggccttatgacaaactccactggtcagagcgcccggatctaggtgtgtgatcacagcctttaacacttgaccaggaactcatatttcatggagtgagaattgtgagaccttgcactagggttttgtgattctgagaaagatgctgggtttggctgtatttatcaaggaatgtggataccaagagaaggggctgagttgggaagaagggggtaaagagaattctaggcaaattaaacctctcagcaacgagtatcccataggccagaaagagtgtgaagggattcagtcatatgtgaaagaagttctgtggtttttgtcttgtctttcttgaaaacctctggccctggaatgtttgatatcgattttccctggtctaaaaagagaattagagaatttcaaatgaagtgtatgtgacacaaagtgagaagagaaggagggagggagaaaagagaggcagaatcggaaatgttaataggaaaaaggaagaaaatggtgtgtcctgtaattacttatataagaaaggcagctaataagtgttccagggtagaacttctatttcttgaattcattaaaagtaattttgagactcctggattggtggcagtggaggcaagactttgctaaggagaactttgtttaaatgtctctttccaaagcaaatacacatcataccaagatatacaacctatgtgtagcttcactgtgctgctggaaactctgcctcactaggtgattcttctttactga

SEQ ID NO: 91322 - DNA, 588 bp, Homo sapiens
tgcaatcttgttgaacagacatctaaatccataggcaagatttacacattcccaagcatcaaccctgaagtattgctctccaacactggagtccaacaaattgcttcttatgcagagatcaaggagcaatattttayagatcctttcagtgtgcagggaagtagtatttgtccaaataagctcaaatgtgaaacagaacctagtatgggaaaacactgaatctttgggttattaatttcatcctagtaaatataatgagggtgattgaaagtgccaattccatttacaataagtgtgttcaattaataaagaagatgaatacaagcaaattatgtcttttgtttagctatagaaaaacctgaagaaattaaaagtagtggagaataaaattatgatatttagaacacgtaagttttacctacatccagaatggagctctgcccactttaaatattgagaaaacaaaccaaaaattatgcatctgcatatatgaaatagaagttacatatagaaatattcattataatatatatgtaccttcccatgcacagtaaagaccttgggttgttcttgcttttcaatccaaaa

SEQ ID NO: 91323 - DNA, 697 bp, Homo sapiens
tatacaaagcacagcaagcctgtaggagaaggacgtgagccggatggggtaggagtgggcactgcggattatggattcacagagagagcatctgagccgagacctgctggaggagaaggaatttgccaggcagcacagctggtgactcagcgacgggggaaggcatctagatacaggagtgagtctatggagtctttggggttttattattagtagcaaatggcctgtgacccacctcacaactcacagaaacacatcagtgaggcaatccgtggtaaggctctcttacgaaggttttcagcatagcagggatctttcagattggccattaaagacagcatgagttcacwctggcggctgtatggtggagacagcatctagaagctgccacagtgttggggcaaaatgggatgagcccagatctgaaacaacactggtaagaatcagggtgtggagggcaataatgaggccaaagcagtgggacccggtgatgaaccaggcaggtcacaggtgccttgggctgtaagccacgagatctggacggactcaagtttccaatcagtggttgtggctgtctgcatcacccaaaatagaacataggttgagtcttgcactcaaactaacttgaaggcagaatgatgaatagccggacattaaagtactgtgatgacatgaagtgggatattttcaaaataga

SEQ ID NO: 91324 - DNA, 761 bp, Homo sapiens
atagagccagattatatgccatcttcctccaagctcttgcaaatttaaattgtatagttgaaaataccccccaaaatggtcagtttagggttttgcctttctctgcccctgtcccaccaccatcaccaccacataccaccctgtagctccaaatcctggtttgagtcacatgagaatatagaagagagagagagatmcaaagatgaagtagagttaagagggtggtgagacttggagctgggcattggctctgaaaccaaataaattcaatgtcacatttggtgcctgtggagaaccagagatgactttttttgcttaaggtagagagcaagatggaattattatcagttaactaactggctcttattgataatcttgcctttgaaatttattgatgtttgtcttgtgacctcatgacccagattgggaaagagtttaatgatgttgctgctgttaatactaaatctcatgggagccttctggtttagagcttagtggaaaactcccaacacctgtccagaaaaaaaacactattgaagcccctgtgtatatttgctttggttctcttaaaaggtgtcttgggtcttccataacttatgaccttgaagttgccaaggaataataactgttaggaaagaaaagttgataaccaagggcttgttttcttctctcccattatatgatacttactgagtgaagtgcaagctagtttgggtttcaggatgaaataacatgtttccaaattatcttgacttggatcc

SEQ ID NO: 91325 - DNA, 713 bp, Homo sapiens
tgcccacatgcccctgaccacatatttaggcccctacctgctgcctgagcctccacccactttctgctgagaaccccctgctccagtgctctggcccctggctgaccacctctgtagccctgtctgatgtttatttgcccacgttatagttccagacacgtgaggagactaattagctgccctttacctccaggtcccaattctcaggaragagaacatgattggctgagcctgggtaatgtgactgcccttaaggtcactgggtacggctcacccatggggtgatgaacagctgccggaggatagggcttacttttttctactcggacttcagtaatttcagccccacacattccacccacgcaccaaagtcttcctccttcccagggctggcttctgtgctactctctccctgctctgctatagcgttaggatgcccttcccaactaagctccttgagacagtctttttttttttttttttttttttttttgagatggagtctcgctgtcgcccaggctgcagtggcaccatcttggctcactacaacatctgcctcctgggttcaagcgattctcctacctcagccttctgaggagctgggattacaggcgtgtgccatcacgcctggctaatttttgtatttttagtagagacgaggtttcaccatgttggtcaggctggtcttgaacttctgacctcatgatcctccc

SEQ ID NO: 91326 - DNA, 636 bp, Homo sapiens
ttcattcattcatatattcagcatatgttaattgtcacattctgttatttactgtctgccaaacagtacagataggtagcttgcgctgggggctgcctgagagctgggagaactggttgccagagctgggagaactggttgccaggtctagcctgatgaaagatggttgtgtggcctaggagaattcctgcctgtctcaggatgtctatctgactactgaatggaagggggctaggatactttcaagagaacacattgttgattctctggattgaagaaaggggctgtattctttagcctctgcatcctttttcatgtatctacctcaggaaaaggggacaccctcgtgccctgtgctgggaactttatacattttattactttgaaaacacaacctcccagtggcacagatacttttattagcatcattctataagatgaggaaactgaggcacagasaggttcaaaaaatgatttggctaaggtcactccaagtggtggagtcaggatatgatctcagagccagtgggctgttgactgtaagggaagaagcatggagaatcccctccctacccttttatctatcaatcatatctatctatatcccccaaaacttagctgatactaacaatttaa

SEQ ID NO: 91327 - DNA, 720 bp, Homo sapiens
cagaaatgattttggtagtaacagacttggtggatagaactggcttagcaattttatccagtaattcaattattcatcaattctcttgacttaactcatataaagtttatagcagccattgattcacatacttttcttgaccatcagcattaataatgtacacctcattcaggaagcttcagagagatagccagatgatacaagggttcaggagtagcagctcatctctgtgctaccatgagaagatcatgagtttattgtggacctcaccaaccttgagaatggctttgctcaagaatatgctggcccatgtatctgatcaacacgttctcctcctcagggaaagttcatagcacaagtccttactcctgtacttctgctcagaatgacttgtagggttaagcaygggatttgttatttgacatccagggcagacactgtagggaaccccaaggttattcagcacacaggactcagtcaggcaacaagagttattcatatcaggggcttctgtatggtcatcattgatttaaaatcctgcagtaaggccagaagccagatgccatagactgaatgcttttgttcccctcaatttcacatattgaaattctaactcccaacgtgattgtattgggggggggggggggcgggtggcgcattggcagttgattagatcacgaaggtagagccctcatgaatggcattaagtgcctttataaa

SEQ ID NO: 91328 - DNA, 1013 bp, Homo sapiens
atatatatatatttatatgtgtgtatatataatttagaggaagtcatactgagtagaataacaattaaatgaaatgtgtatcgcatctcagtagaggcatttacaaatcttattasatttcttattttatggcaaagtcttaaaatacattagcattacatcaaaatagtcttgaaatgacctaacataccttagtcttatttcatacgtttagtcttgaaaagaacaatcctgaaccccgttagctctctaacatactagaccgggttaaaaataacatgatgtattattttcatttaattcaccaacccaactctgaaaggcacaaatgaaagaacaagtcagagagccccaactgtcctttataattaccttgggatcaccagctagaggaagagcagcaagggaggcgaatatctttctacacgtttctctaaggaatagcgacaggctatgtcgagggaagaagccattagttctttccatgtattttcaaagaacttactcaaagatgaatgagattaactgaaactaaattcagtagaattgaggggtaaaatattcagatagcatatatctgcataaacaaatagtggacattgcagcggaaagcagtagaaaatcacaactctctttctcacagtaggttttgtgtgtgaagtaggctccaactggggcatagggaaatttcaatgctaaattaagtttcaacttttgattaatatcttagatttggagattctaatttctgatttgagatgactttgtgacttaaagtagaattttctgttaccaaaaagttaacatgaaaatcatgaacgttgggaatttttatttagggtcagagaaagaccttctcttaagcaaaattttaaagaaatagtgagagataaatataaagtgtgttttgattacgtcatgagtcatattaatcaatgtactagtctcacacatgttgtatcttaagcaatttgccttaaattcaggaagtctaatgagccagagctgaacta

SEQ ID NO: 91329 - DNA, 728 bp, Homo sapiens
agatttaaaaaatcttaacagcattttcttttgttcttttttttttttttttgagacaatgtctcactctgttgttgcccaggctggagtgcaatggcgcgatcttggttcactgcaacctctgtctcccgggttcaagcgattctcctgcctcagcctcccgagtagctgggattacaggcacccgccaccacgcccagctaatatttgtatttttaatagagtcagggttttgctgtgttggccaggctggtcctgaactcccgacctcaggtgatctgcccgcctcggcctcccaaagtgctgggattacaggcatgagccaccacgcccagcccttagcatcattttcatcgttctatgaaagggttcgttcaaataatctaataaaaatataagacaaatgtttatttttataacgatcccagcggatattcacatcatgaccgtgggtctttgctgaggtctaggcatcttcggttaccaagcaaacctcccctcccaacctaacgtkaacacctggggtgtgtggaccacatttcacaaaacactcctctatataacccagaatatttggagttttagagggtggtcttagagagaggtgagaaggaagtgaggtgggagggagcaggaagggggatgcatgcacagtggggtagaggccaacggcctttccaggagcaaagatgcctaagattgcctgtgcggttattattgtcggatcc

SEQ ID NO: 91330 - DNA, 959 bp, Homo sapiens
acatttatggaagagcggcagcaacagtgactgtacccatgctgcccctcaaccagcttcaccctcttccttctcttcttgcaaaaacactgctcttycattggagcttaattcaagtctttctgagcagacactcctagtcagataagcggttttctcctcggcattcttgcaggatttcctgacacttctcttaggacctggtttttttctacccgtgggttcagtatagcagatcaccccactcattgtctattttgacttccttctggcaccttcctggatgtagagattgaagagttaaacgccagtgcctctggcagctctaggcttccaggtgcgattcagtttccactaatcaaatgaaactgaacaagatctggggtcaggatttggttaagtgggaagtgaggttctgctgtgagagtcgtcattttactgctgtggagctaatgggtgtggcatatttctgggaccgaaagttgtggtgccttcctgtcccccggagggagtatagcaggtgttgcctgatcacagagccagtggtggggtcggtgggtttctgaacacagtctttttttttttttaatttaaaagtaaactttaatgtcaaaaatgcaaacttggggaggacagaaagatcacacataaggctgccacttcacacttggagggttgcacagcagccgggcagagaggctcctcatgtcccagatggcaggggggcagcagccaggcagaggcgatcctcacttcccagacgggaacacggtcttttttgaactgtgttttttcgaactcagttcttgtttttgtcacagtaggtgttcccttgctgggctgtctctgtggggttattctgggagtgacatcctgagacccggcctggagcccattcttccagtctcttgatgattttataagcagtcaatttcttgtttgaaaattatttctgctaa

SEQ ID NO: 91331 - DNA, 677 bp, Homo sapiens
ccttggtggttggtgcaggttcagcgcagaatagcagatttctggaggttattcctctcacttaacattaacagaaacttttctctgttgagagctcccacttcctagccctggaagcctcccttccagtctttattgttgtgatttgactattttcaacacctcatagaactggaatcrtgcagtactcgattttctgtgcctggcttatttcacttagcatggtgtcctcaaggtccatccaggctgcaaatggcagaagcacctgtgtctcgcggctgagcggcattcgtcagatgtgcacaccacattttctttctttttgagatggagtcttgctgccacccaggctggatggagtacagtggtgtgatctcagctcactgcaacctctgcctcctggggtcaagcgactctcatgcctcagcctcccaagtagctgggactacaagtgtgtgccaccatgtccagctaattgacaccacattttctataaacattcatcacctgtttattttaaggctttcctgtggatcagacaaactggagtgcatatgtttcagggagtggagagctggctgggtccgggtgggctggagtgggtggtaggtgccagtgggaacagccagggtggggaaccctgagaggaggtgagaggatgagggcggctgtatgca

SEQ ID NO: 91332 - DNA, 1201 bp, Homo sapiens
tgtaaaacagtcactcttcaacttgagcattcatcagtcacctgaagggctggtttacatactgtggctgcgtcccatcctcagcatttctgattctgtagatgtggggctgactccctagaatttgcattttaaaaaatcccccacttatgctaatgctgttggtgccttgagaaccactgccataggagatgctgtaaatactctgcctgtaaccctttggatttcttaaccgtatttttacacaagagttctcggtgtgcttctactctcatcatgaagaacctgctctgcctgaatacaggatgagctgtaatctcatcattctaactatcaaccaatggctgatggtatagagatcaatctgccttatccccattaaagggactcagatgtgacttgcaagactaagctaaagctactttccgtgggactttacttgatattgcccatttgccagctccttctattcccagttcagcttcctcactaccagtttttccaggggcacatttaatagatcacctccccacaaatctttagagaacccgatttaagcatgtcaattgtgtctgcacattcttctgaatggtgaaataatcctgggtactaaagggagaagcatagcaagaattacttctcctcccttgctcagtctaaagggtgaatttcagggatattggggggcattcatggggtgcccagggcacctgaaagtcagtgtagataggcagcatctgtcctgacttcctgtcgctcagctctgcattttccacacctgtggatcacatttgccaatctgcaaataattccattttttcatgtcagaatgtaaattccttgagtttagggattcttttccactgtttgttagctgttacattataagaccttagaaagatccagtgcacagaagacactcaaatatctgttgaataagtgcattctgggatatcaaataataaaaaatggttgcaaaagaaaagcgatattttgcggtgagtgctcgaatgctggaaagttctatcactgggaatttctatcaggtgcatgcgtgggctcttcagctcatttctaatctacttgggtactgaagttggcatcagaaatgaagtgtaaaacccaacatgtaaccaaacaaagcttacagctctttttttctcytttcttcctttgtcaataaaacactcttgcacatgca

SEQ ID NO: 91333 - DNA, 833 bp, Homo sapiens
tttttgtagagataagatctcactatgttgttcaggctggtctcaaactcctgggctcaagtaattcttctgcctccgcctcccaaagtactgggattagagacatgagccaccacgccctgccaatgtataatcttagagttaatttttatgtaagatcacacacctgactcccactaactgaaccagacagcttctttcctaattcctagagccttgaaagagtatgatgactcccaaatatctccccaatttgcctcaaaatagttaccctagaatacttccttggggataaaacattttctctggaaaatggtaatgagtagcagcggataaactcatgaacatcatggtccaggtgagttcatgaaattaaccagatttaggaagttgggaaccaaggcaaaaagtaacaggtttgtcaaagctcaagtgggaggatttgtgggagcagaaaggtatgattgacagacctgtctttggacctggttctaatactcccttgctaagtaamcttgagtccaccatttaacttcagtacttcatttggtaaaatgggagcaatgagacctgtctaatggaattgccgtgaagataaactgtgaaaagacttttttaagcagagaaggtttggggtaaatattagttatttttttggcccactgaacccaatgcctcactcactacaatggcctggcttttactgagaaaatatttacttgagaactaattatattccaggcactataataactgtaggaacataatacttataaatggatggacgaaggagtgactggatgccttctagtagcctatgaactggtaaaggc

SEQ ID NO: 91334 - DNA, 1212 bp, Homo sapiens
ggataataattttaactttaaaataaaactattcagtcatctgctaaagcgattgaaattatattactccacttttttaaatgaaattttaaacttgttataaaataattggaaaagggaaatagaatttctgttgataagaaggtgaatttttaagttttaatattatcaattcatgtattcagttccaaagaatatgctaattataaaatcccctaaagtaataaaatagaaatgatgtgtttttatgtctcttttcccttcaccttttccaagccctaaagcctggtattttgctcacctctcataagagagatttcttaaaagtgagttatttgtttgagcctggtgggaaacccattaccaatttactgtgactattagcttcattcttcttgatagttgcttagtccagaaattctttgtaaagaatattcaacagtgcagaaaagcaaatccttgagaacaggggctgtttgttaccgtaggaccaatgcctagaatgagaccagacaagtaagttctagttctggttgcatacctactgtatggcatgcatatatggtatgcatccagaactagaacttactttgcatacctactatatggtatgcaaccagaaccagaacttacttcaacaatttttggagtgtagatctgttgaaaacaaattatctcagtttttctttttctgaaagtttttatgttgccttcatcttggaaagatattttactaggtatagaattcaacattgacaggtttagcttctttttatcactttatagatgttattccattttcttctggcttgcctagtttgctactgtcattttcatctttgttctgctgtacatatttcttttgcctcctgctgatttgagattttttttttccattgtcactggtttttagcagtttaattatgattagcttcagtgtggggttgtttgtatttatcctatgcagtgtctcttgagtttcttggatctatgggtctatagttctcatcaaataatttgaaaaaaaattaatyaattttttttttttttttgagacagagtcttgctctgtcacctaggctggagtgcagtggcacggtcttggctcactgtcagctccatctcctgggttcaggccattctcctgcctcagcctcctaagtaggtgggactacaggcacctgccaccatgcctggataattttttttttt

SEQ ID NO: 91335 - DNA, 1352 bp, Homo sapiens
aataaacattgcctgtttctgaattaaatttatgtttgcctttcatatgctacatgcgcaatattcagtatctccacaccccaccccagcctgctttctgccagatctcacatgaacctatcttaaattgagttgcataacacaaacaccagaccactcatcacttaagaagcttaatataacagaaatgccctgaagacagagtcagaagttaaagtggaaggagaaatgcctaaacaggaaagactgttcattctacagtgccctgagtatggctgttttctaagcacagcccaaatagccatagttaaaggtgcagatgagaagttaaagatacaataagacaagcccaagagctcctccagacatgcatccaactgttacctttttataagggaatgtgaacctgtgataaaagactgaattatagcttctccaggacctgtgcatgggaattaatgctttctttctttctttctttcttttttaattgagacggagtttccctcttgtcgcccagattggagtgcagtggggcaatctccgctyactgcaacctctgctttttggcttcaagtgattttcctgcctcagcctcccaagcagctgagattacaggcatatgccaccacgcctggctaatttttttgtattttttagtagagatgggccttcaccatgttggccaggctggtctcgaattcccaacttcaggtgatccacctgcctcggcttcccagagcgctaggattacaggtgtgagccaccactcctgggcagggaatgaatgctttctaagaaccatactgcttctccttttaaatatcaaggatttaatgacaattataaaacacttcagttttatttggttaattgttcatcatatttaagcctcagtgaaagtttggcttcctccagaaactccctccagaatacctgccatttttcattacagagcttgaaaacatggcagatctgatgactactcctttttctttttcttttttttttttttttagcaattttttcttgcgtgaagtaattcttctggtaagtgatttctggattcactctcgaaattctcataactctttcactagtctttttaggataatcttctattctaagactaagcctcacataagtaaaattgtgtacaaatacatgcaacattaaataaaaccgaatcttaaatggagggtgaataaggagtgtaacaatgggccttcagggggaaaatatgcattagaagggaaagagaacagagttaagatactggtggaagtttaaattctgagaatgagttatgaatatctgagaataatatttttgagaactatttttaattctca

SEQ ID NO: 91336 - DNA, 1352 bp, Homo sapiens
aataaacattgcctgtttctgaattaaatttatgtttgcctttcatatgctacatgcgcaatattcagtatctccacaccccaccccagcctgctttctgccagatctcacatgaacctatcttaaattgagttgcataacacaaacaccagaccactcatcacttaagaagcttaatataacagaaatgccctgaagacagagtcagaagttaaagtggaaggagaaatgcctaaacaggaaagactgttcattctacagtgccctgagtatggctgttttctaagcacagcccaaatagccatagttaaaggtgcagatgagaagttaaagatacaataagacaagcccaagagctcctccagacatgcatccaactgttacctttttataagggaatgtgaacctgtgataaaagactgaattatagcttctccaggacctgtgcatgggaattaatgctttctttctttctttctttcttttttaattgagacggagtttccctcttgtcgcccagattggagtgcagtggggcaatctccgctcactgcaacctctgctttttggcttcaagtgattttcctgcctcagcctcccaagcagctgagattacaggcatatgccaccacgcctggctaatttttttgtattttttagtagagatgggccttcaccatgttggccaggctggtctcgaattcccaacttcaggtgatccacctgcctcggcttcccagagcgctaggattacaggtgtgagccaccactcctgggcagggaatgaatgctttctaagaaccatactgcttctccttttaaatatcaaggatttaatgacaattataaaacacttcagttttatttggttaattgttcatcatatttaagcctcagtgaaagtttggcttcctccagaaactccctccagaatacctgccatttttcattacagagcttgaaaacatggcagatctgatgactactcctttttctttttcttttttttttttttttagcaattttttcttgcstgaagtaattcttctggtaagtgatttctggattcactctcgaaattctcataactctttcactagtctttttaggataatcttctattctaagactaagcctcacataagtaaaattgtgtacaaatacatgcaacattaaataaaaccgaatcttaaatggagggtgaataaggagtgtaacaatgggccttcagggggaaaatatgcattagaagggaaagagaacagagttaagatactggtggaagtttaaattctgagaatgagttatgaatatctgagaataatatttttgagaactatttttaattctca

SEQ ID NO: 91337 - DNA, 1536 bp, Homo sapiens
ttgccaaatggacagattggtggcctcatgtataaatgttcttttaaagatattcatacatatccatttgtttctatcatatttttctccattttgtcttccaagaaaataaatggagttggttattctgaggaaaaactaagatctgcgttatattaaaactacctcacacaaacacacacttcacttcctttattacatttgaaatctaggtctaacattttatgaaggttaaaaggcaaccagattaactgttcaaataatattacacttgaggttgtttattatgtgcatataagtttttatcaaaatatgctaaaacagttttcctgagacttctgaaggaatagtcttcagtcttccttgttgaaatcaatctaaaaatatttagcattgtgtaaatctcgtaatagccacatgcatctttattaggtcatgccaatattaaagagattaacaagaaaaaaattcagtccttgtagcatgtatttcctacgttgttactattaaattattctgaaatttggaaaattaataaataaaccctgtagtgaatctacgctcttgggtgaggttaagaatttacatgtcaccacaattttatcactaaagagatgagctaacatctttattaattcacttaaaaccattatttcacttcaaagagmtctacatacatttcaaaatatgttgctttaacacattttcagtacattttcatcaatattttattttgctatcacccagccttacccctcatcacaaataataaagcagggtagccaggcagtttaacacagcttgaattcagcaaccgccttccactactatcttaattcaaataccaaaatacactccaagggacaaaagaagttatctgcagtcagaaaacatgactctgtaaatcgctcagagtttataaaagctccaaccacactcactatatatgatttcttagattccatgttctatttggctcaaaacctatatttgtacagataacattgctattcatgaagagtaaaaaggaggctgtcacaagtggaaatccacttaaactgcctttctgttgaggttgaatgctgcccatcaactcattcattcatccacacaatacaattatgagagtgcgctatacacacagtgttctgcagtgctctatcctcagactcttaaaagaaaatacatcctaagttctcccacccacaggcattgtacaggcaatgtaaagagtgacgacaagccttacatttctgccattagttctcttcagggttaagacctatgcctttgctaaaagacagtgatagccattaaataccatagcatgattttgattatcagaaaaaccagcagaaagagatgcaccatggaacagaagtcaggactcataactctcagcagcatgacagagcaccaggcaaaatataaagtaagtgaatttcatggggagtacttagaacagcagagagagcaggtgtctggagtcaaggacatgtgttgactgctagcatcactgtcactagctgtatgatg

SEQ ID NO: 91338 - DNA, 781 bp, Homo sapiens
ttatgtagataaaactatatgtaatttttttcattcagtattcatttattcaattcaattcagtagataataatggagaacctgccacatatgaagcactgtgttaggcaccactagagaagcacagataagtaagatatggtctctgttctgaagtttattgtctggtgggggaggtggacaaaaactagatgtaatacaggtctggctgtgaccagagctacatgatataatagcacaaaagaaagtgtcattgattctacccagaggagtcaggaaggcctcaccattcactaaggtgaatggtgagtagaacttctataggtagagaggaaataaaggctttccaagtagaggggtaatataatggaacgtgtttaattgtggctggaacayagagccctgatagggagtgactagagacaaatctacatgggggatgggttggaggtggaagatactggacctggtggaagatagggatatatattcaaagtagggtattgacagtcggaatgggaatgaaacaggggctttgggccatttgtgattctgtcttgattgggctctctgtgcctgaaatgatctctgggagattttctgcttattttttaaaaatcagctccaataggctcttacagaggaagacttcctccatcttgtcaggcagcaaatgtccctctacccttgggggtcccatagcatttggatcacatcattcatagaattcttataggctacagcccatatgagcagcaggcttggaggaaggcttcatttt

SEQ ID NO: 91339 - DNA, 1822 bp, Homo sapiens
cagctttttaaatgtttggaatatttttcctaattatttcctcccrcttgggatcagaaaactaaacaaagtcatttgttttctcttggacatgtttaaagacgtccactcatccctccactttctgggccttgagtcctcatctatatagtaaggaaacttgactagggacctctgacgttatcctccagctccagccttctgggactgcctcagcctaagcacacaatggcatctttcccaagacatgttcctccaattccctatttccagtcagaagcaagagaggagtgggagagaggcctgggtaggtaacacagcagagaatttgtaccttggagaatcaggagtcagcagagttctcatcttgacctcccctccttctttctttcttcctgctttgctcacctctctgaattggcatttacacatttgatcctctctgggtctagttccttttcattttttggttagtagctccaatagaggcctgcaataaaccaaggaaaggctcattgaaagagaaacagattcccttagatgtaccatgagggatggctacatttggggcattccaactcaactaaatgacccacctggaaaagaaacacttccacatttgaccagacaccctcccaaaatgtgtgtgtgtttttttttagatggacttttgctcttgttgcccagactggagcacaatggcatgatctcagctcactgcaacctccacctccaaggttcaaactagtctcctgcctcagcctcccaagtatctgggattatagtcatgtgccaccacacctggctagttttgtagttttagtagagatggggtttcaccatgttgatcaggctggtcttgaactcctgatctcaggtgatccacctgcctcgccctcctgaagtgctgagattacaggcgtgaaccaccgcgcccagccccaaaacgtcttaaagacttaaaaagacagttctgccagctcactatttactgatcagtgtccatgtgcatttccagtggtctgtcattaaacacactggatcaaaaatccccatcccctgccactgccagctcaagccagcctacaattatttccagtagctggctgtgacttaaaactctggttagaagaaaggcgagacgtcactttaatgcaattcttgtgttatctgtggaattcggtttttcatgcatactcctatcttccatcatcaaagcatcccttaaaggcccatttggttctttatcaagaccaacactaagatttacctagaaaattttcaggttagctttgagactcacacattcagaagacctgaggcttgaaaatgacaggactgtaggtgatactagaagtgagacaggtttcaagccattcaggtcaataccgtacaatactgtggtggtgacaccctagttagttgccgtgaagccattccaagaggccattaattgatcccaatggacacctaatggcctcttaaaatagaagactgtacttaagtggagataggaacatgctaattacataactcttttattcaaggtagtctttggatttggcctctaattctgattccttccctgccatctctactagaaagttgtaagaagtgaatctccattccacgttataaaatgattttaggttgatacacagggacattttatcatttatttcaggcattgacatacatttagtgtttttgatttgtgaagacgtaacaaaataatttctaaagacaagaatgtcagcacaataaataggtttgtttctaggatatatcagatgctcgctaaatgtgatcacttcctttcaaa

SEQ ID NO: 91340 - DNA, 1822 bp, Homo sapiens
cagctttttaaatgtttggaatatttttcctaattatttcctcccacttgggatcagaaaactaaacaaagtcatttgttttctcttggacatgtttaaagacgtccactcatccctccactttctgggccttgagtcctcatctatatagtaaggaaacttgactagggacctctgacgttatcctccagctccagccttctgggactgcctcagcctaagcacrcaatggcatctttcccaagacatgttcctccaattccctatttccagtcagaagcaagagaggagtgggagagaggcctgggtaggtaacacagcagagaatttgtaccttggagaatcaggagtcagcagagttctcatcttgacctcccctccttctttctttcttcctgctttgctcacctctctgaattggcatttacacatttgatcctctctgggtctagttccttttcattttttggttagtagctccaatagaggcctgcaataaaccaaggaaaggctcattgaaagagaaacagattcccttagatgtaccatgagggatggctacatttggggcattccaactcaactaaatgacccacctggaaaagaaacacttccacatttgaccagacaccctcccaaaatgtgtgtgtgtttttttttagatggacttttgctcttgttgcccagactggagcacaatggcatgatctcagctcactgcaacctccacctccaaggttcaaactagtctcctgcctcagcctcccaagtatctgggattatagtcatgtgccaccacacctggctagttttgtagttttagtagagatggggtttcaccatgttgatcaggctggtcttgaactcctgatctcaggtgatccacctgcctcgccctcctgaagtgctgagattacaggcgtgaaccaccgcgcccagccccaaaacgtcttaaagacttaaaaagacagttctgccagctcactatttactgatcagtgtccatgtgcatttccagtggtctgtcattaaacacactggatcaaaaatccccatcccctgccactgccagctcaagccagcctacaattatttccagtagctggctgtgacttaaaactctggttagaagaaaggcgagacgtcactttaatgcaattcttgtgttatctgtggaattcggtttttcatgcatactcctatcttccatcatcaaagcatcccttaaaggcccatttggttctttatcaagaccaacactaagatttacctagaaaattttcaggttagctttgagactcacacattcagaagacctgaggcttgaaaatgacaggactgtaggtgatactagaagtgagacaggtttcaagccattcaggtcaataccgtacaatactgtggtggtgacaccctagttagttgccgtgaagccattccaagaggccattaattgatcccaatggacacctaatggcctcttaaaatagaagactgtacttaagtggagataggaacatgctaattacataactcttttattcaaggtagtctttggatttggcctctaattctgattccttccctgccatctctactagaaagttgtaagaagtgaatctccattccacgttataaaatgattttaggttgatacacagggacattttatcatttatttcaggcattgacatacatttagtgtttttgatttgtgaagacgtaacaaaataatttctaaagacaagaatgtcagcacaataaataggtttgtttctaggatatatcagatgctcgctaaatgtgatcacttcctttcaaa

SEQ ID NO: 91341 - DNA, 523 bp, Homo sapiens
cccctccccaggccatgactgaggctacacatgcgcatagcaccttgcacttttcctacttaatgttgtataagtacatggataattatttttaaatgtctctttctcccaacactataatccccatgggagccaggactgtkattatctgattcaccatctagcactgaactgattctcggtgcttaatacatattgattgactggtggaataaattaaataggattgtttaagcaacacccaatagatttgccttttaagctgggtgcagtggctcaattccagcactttgggatgctgaggcaggaagatcgcttgagctcaggggtttgagaccagcctgggcaacacagggtgtcccagatctttactacttaaaaaaaaaaaaaaaaatccaggtgtggtggtgcatgcccatagttccagctactatggaagcggaggtgctggaatccttgagccagggaggttgaggccacagtgaaccgtgatttcaccactggtccagcatgagtgacagag

SEQ ID NO: 91342 - DNA, 523 bp, Homo sapiens
cccctccccaggccatgactgaggctacacatgcgcatagcaccttgcacttttcctacttaatgttgtataagtacatggataattatttttaaatgtctctttctcccaacactataatccccatgggagccaggactgttattatctgattcaccatctagcactgaactgattctcggtgcttaatacatattgattgactgrtggaataaattaaataggattgtttaagcaacacccaatagatttgccttttaagctgggtgcagtggctcaattccagcactttgggatgctgaggcaggaagatcgcttgagctcaggggtttgagaccagcctgggcaacacagggtgtcccagatctttactacttaaaaaaaaaaaaaaaaatccaggtgtggtggtgcatgcccatagttccagctactatggaagcggaggtgctggaatccttgagccagggaggttgaggccacagtgaaccgtgatttcaccactggtccagcatgagtgacagag

SEQ ID NO: 91343 - DNA, 738 bp, Homo sapiens
ggcagtggcaggcgtgtctttgttgaatggaggaagatatactgagcccacatctgcatttctacagcagcaggagactggtatgttagatgtggacccaaatagcacacaggtaggccatataacaacctgatacacacattgcccaggagcctgtgtgctcctgactaactctgcccatccccgctagcagccccaacagctgaggcaccctggtccaagttcatggctctgcagagctgcccatataaagctgaccacggaaaggaaaaaaagcagaaacaaagaagaacaatggacttttccagtccagtattcataaccatttagaccaaagatgacatttatatatttttaattcagaaaatatattctcttcccaaaggaaagaaataggggggtgcctagagaagacaggaggtgccctttcacagtctctttacagaattagaatctgagcacagcacaagcaaatacaacctcaaataaggcccckcaaagtccttcctagctggaacaagtttggagggcaagctgtccaaaaccgtcatcttatacttgtcttagagttgaaaatgtggtcattgaactccagtaccaagttaggtgacatatttacacatctgcagtttttaacaaccattctggcttcaaatattctgtgtagttgcttccaaaaacaaatatttaccctggttataaatttggatttggaaaatgcaacctggtaaacatgga

SEQ ID NO: 91344 - DNA, 1039 bp, Homo sapiens
agataaaacaaagacagtaagagacaagttaaacttcacagatgggggtggccggtggtgtaaggaaaaaaaaaagacttcacagatgggggaaaaaaactgatgctagaaacagttttccccttgactaatatttcccaaaacacaagctttttgcaatactcaggtcctttgggattgctactattccaaataaacctgttttatttagctccgtgaataaggcccttctagccagagaagatatattttatatgcacacataaaaatactctgtgtttatgtaacactttccttataaggagctcacagcaattccacatactctctttattcctatgaacaccctggggaggtagctaggtggtagaggaaataggaaggaatgaacaaaaaaaagagttgaattagaaatcatggcattgccttgcctcagtaccataaacaagcataggaaagcctaacttcaggactataaagtgtcttgctcaagaagtttctagaattggactcccatcactggcatttttccataggcatggcctagaagcagggaaaacctcccattagctaccttttttttgcattcccttgctattttggctttagcccctaacttgggccggagctggagtttgcagtccaagcctgtctgactccacagcctctgggaggtcaccaaagggccagcggcaggaaaggagatgggcctgccaagaagcagcagggacctatgttagggctcattcccatgtgactccagtggtccctgatgatcattcctgggctcctcgccagtgacaccactgtcccctctgcacctgctgcatcatccccctggggatccaaatggcctctctgaatgtccttggcaattcctcctgaggctctggacaatttcaaatcagtcctttggaatacaagtcagcttaactttaatgcttggtatcctccccatttacccaagatttgtctgtgctgcagagcagaaggtacacggctgctgataatgaaagttgggggaaaraattaactgggt

SEQ ID NO: 91345 - DNA, 631 bp, Homo sapiens
acactagasaaccaaaacaaacaagtcaattaagtggaaagtcactcccttcggaggcaggagacaggctgtaatcttcctaatcccatctaacttcagtagatctgtgctcctctgtgagatgccagggtgtgagtagtcacagttattcactcaacaatcaattctgagcccctgctgaatggcaaggactgccctgggcactgaggactcaatggctataaaaacaaagagcaaaatggccaacatggacccaggaatagtgggcttataggagatgctctctgatgtcccttctcatctaatattctctaaataattcctaagtggcaggagggcttccctacatctccccagctaatgaattcggccgctactgagtaagagatcggtttgttttctttacatttgagttctcaaacttaactactttgcacttgcagtgtgggtgtctgaaatgttaattgagcctcaccacagcccctggaaagaggtaagtgttgcaacatctgccacaatttaaaacacttactcaggtgcctgtctgctcagtgcctatgcactaagtcaaagaggcacaggccagctgtccagaagcggccagaaacgctggaactcacccacacaaagg

SEQ ID NO: 91346 - DNA, 662 bp, Homo sapiens
tctagcacctctgtaagccccctatcctactccacccttacccctctgcttcacccgaaactgacccctcactctttccccacctcatgtcttatttttgttagaaaagcttactccccacttacccatttctttcaagatctaactctagttttgcttattccaaggtttcccatgctagactctacccatgccccttacgtgtgtattttttaaccacttaagagatgtgccaaagcatgtatcaatttttatttttcagacaattgaatcagaacttagtcatccaaatagatgttgccactttgaaaatattcatcttgggggattaatcacttccttcaatgcaaccactgcccatcataatttagggattcctctttgkggtttgccctcagtgtatgcatcacccactgttgaacacggtagcctacagcaatgtctcagaggttttagaacatcattcagaaccatgactggtgattgcaggttactaagagcacatacatagatattttgtagttccacaatttacacatctccagctgtcccttgttgagtgaaaccctttctctcattatgctgctctaaatccaaccaattccagtgatggcaaatggttgctctgtgaaagtgacttttctttcctctttgagacattt

SEQ ID NO: 91347 - DNA, 778 bp, Homo sapiens
ggtttttgcaagtgcataagttttcaacttgagtaaatacgaatgtgattgccagaacgtatggtaaragtatgtatagttttataagaagctaccagactatcttccaaagtggctgtaccgttacatattcccacttgcaatggataaaggtttctgttgctccacatcctcatcagcatgtggtagtgtcggtagtttgggttttgccattctaatagcaataatgaggctaacaagcctaacagctgtttcactaggttcactgataggtgtgtaacggtacctcattgtttccattgcagtttccagatgatgtggaacattttttcacatgcttatcaatttgaaactttgctaaagcatatcacatttgttccttgagtttgtaaactgaagaattggaacttacccttttctttaggattcagagttgttatgaggtcagtcagtcccttgttttatgccactctctgcagttagtggaggggtagcacagcttttttttttctttaaagctctctcactgactggtctttgaattttgatgtttgcttttataacatttccactggtctcttatcagcctttcttcctcttcagtgtcctatttctagtcttcagtgaacctagagaaatagttgttaggcttgttagcatcatgtgtaaatgagtactgcagtttagggatgaggagtggtagggaggtctattctttgggctctagtgctgtgtgtcgtttctctgggctatccgcggcctttttacctctatcttt

SEQ ID NO: 91348 - DNA, 1649 bp, Homo sapiens
ctgctctccacttctcagctgagcatgtggagggtccgagaggctagtaaccaatccaagggagttgaacccaggtttaccaaactctgaaattctaccagtttgctactactccaggagcttagcatccactgggaagaagggaatggtacacacacaaatagacacagctgaagaaaagggccatttactgttatgagttacacaaatagcagtcaccaagctaatggaatccagagaagtaagacctcacttccggatgggtggtcctcgaactgcttctgcattgagaagatcagccgtaagctgaagttttaaaaagagaagggatttcaggaagcaaaaaactaaaatggaagaaaaacatcccaggaaaaagtgatggcttcaaatgagaaaggcatagacaagggaagatgaggatgtgagaaaataaagcagattccaagccagtgcacatgtgtcaagagggcagagctgtgtttgatagaagccaaagtcaatgttcatatgctttttgaggttaaaggaagtatcaagaactgtgaactgaggaagtcccataaaacttcccagaatgtgattcgaggtagattgtaaaagataggtatgaattgtaaggaaaggtcttgaacagaatgtcaagattgaaagacccaagacctaaggtgtgctcgcccagtgggaggctagaggacaggttttctctggagagagsttgagatgggcttggatagtagccatgtaggcggtaaaggaccactaaaaatacttttgttcaaaagctactctcagcagggtcaccagtggcctctttgttgtaaatacaatgaataaattaaaataagtcctttccatcccttcttctgcatgatcactctcagcttctgataatgcattgaccagtttctctggaaaatcctgctgcactggtttttgaaacacccctctctcctggcttccctctcactatgactcagtcccctccatagccccttctaggcttgtccctttgtcccagcattgcataatctggccctgtcctctactcatcttcatcttctcctgagtggggatgacacccacatacgtgtctggggcccacccccctgccaggaccccatggggaccatcctacctgcctagtatacagttcctttggaagagtacgatcgctgctgtcagtctggccccctccagcccagctttctcccagacacagatctggtcatgcctttccccgaaatccatggctttagcatacagtggcattagaatttccatgatcccacctcccccatgtggcccagccgaggtccaccttcagaacctgcctgcatgatgaggaggccaaggttgccttctcacccacatttcagtccaattatgaacctttaaaatactccctctcaaactgctaggcatgttgcccctggaaatctttgtttcttccagatttgaccctcttccagcctggcaaaggcaatggctgccactctagatttctgcttgacagacatgacctcaagacctgcagacttgaccaggcatggtggctcacacctctaatcccaacactttgggaggccaaggtggaaggattgcttgaggccaggagtttgagaccagcctgggcaacatagtgggac

SEQ ID NO: 91349 - DNA, 1039 bp, Homo sapiens
cttagttggttaaatccaagcagatcagttgattactttcagttaaggcaggtaacaatgtcacctttgagaaaaataaaaatagattctcatctatgttattgacacttgtatttctagaacccagaaaagttcttgccacataatcctcaactaatatctattgaatgaatattaatatcataacctccttctagaggcattgtctagcatacttgtaaaaataaggctttcagagagatggaacgaccctctcaaggttgtttaactagaaactagttgaattccaactggcatcccaatgtttgatttctgagattccaaagttggtcattagaccagatcatgttatactgctcagatcttgattctggtcttattgatgcaaataaatgcagagaaacaagtatagtgaatctatagccatggcacctgcctttgccgcagagcctcactctgtccaccttctgtctgatggtatctgaagggttccatgataatcactgaattacataaccacccaaatgagattgttcttccatctgttaagggccatcagagcccccgtgcaatgaatttcaatttaaggagctttatgttccatctggagcaagaggattcattcctatataagaggaaaagatcactgtgattttaacctggttttaatgacaatgactcaattcaaatttaaaattttaaatgatgtttcaatattgtatgtttcagcacactgagagaatcaycttgccaacaatttccaaagtcacattttcacagcagtaaatgctcattaaaccatatatacatgaactctcattgcagtattgtctgtaacaggaaaaaacttggaacaagcccaactgtccatcaaagatgggataaaaaaaaattgtgttatgttcataccatacagctattaaaaagaatgaggtaaatctacatatgccagtgtgacaagatgtcaaagatatcacaataaatggaaaaaaaaacaagatgcaaaacgccatgcgtgtttttaatacagagaatgact

SEQ ID NO: 91350 - DNA, 768 bp, Homo sapiens
aggcctgaagcaggaaaccagccaggaggcttctctgctggtcccggcaagactcacaagggctggaacgagggtgatgcccacrgaaggagacatttcggaacactgcagcctcagaccctaatgcctcccctagcaggccatgccgccctcatctgctgggcctctgctgcactgtgctttctctctccctgcgatgcccctgcactccctctcttcacctggctggctcttccctggtccctcagactcagttcaggaccacctcctccaggaagcccagggctgagtaaggtgaccacaccactgagatgtgtatctcccctgtggctgtgagcccctctgggctgggatcgtaccgtcattgtctcaggatacccagtccccagcacaacaggaacatggaacattttccctgcacatgaggcaggaaaggaggatttggagaaagccagggagggaaggtttgtccccaccttgaataccagagagagactgtgctgctatgacaaataggtaccaccacaagcaattattgggtttcagctacaggagtgcctttggacgtcggcattaatgccctgtaaagttgactggggaaatggcagctattgagtttcaccagccctgcatcaaggtcagggcagctgagccaaaggcctagctctttgtggagagaaagcaaagagagggaggaagagtcccagagtgtgtatgttagggcagaggctgtgtctggagggggtggggctcttagaggtttggatc

SEQ ID NO: 91351 - DNA, 1055 bp, Homo sapiens
ttgagttgagtatcaggtggctccggagagagaagaagccaaaagagggttaagctggggccctggatggagaatcaggcaggaagaggcagaccaaaaaaaaagctggagaaaggcccaggaaagcagcgaggtgagcagtgccctgcagagctaagaggaggacggggcatgctctctggccacagtccctgctggccctacccgctgccttctaacctcctgacgggtctgtgctcacaacacactggtggttaaatattttgaacgtcgcccctggagatgggtatctcaagaaacataacatcaaccaattgttcccttctcttcttcaaacataagcaggcttctaggtgtgggcttactgctaaagcagattcctattggggggattggagttatcctcatgggcttcactttaactcagcccccagtaccttagggagtcaaagaagtttatagctgcaaggatgcttatagatcatcagtgcacacactctcccattaggggaactgaggcacagagcaaggaaagatttgcccaaggaatttcaggacagatctagaacaaaaaccagcgttcttcttcagatttacgagaggaggatgaccatttctaatcgttgtgtgctccctgttccctgcatttgcagagctagrggaatacatgggtggctggtatgggcagaacatcacccaaaagatatgcaccctcaaactgactaaactgaagagtcattccacctccaacctttttttttttttttttgagatggactctcgctctgttgcacccaggctggaatgcagtggcgcaatctcggctcactgcaacctctgcctcccaggttcaagcgattctcctgcctcagcctcctgagtggctgggattacaggtgcctgacaccacgcccggctaattttttgtatttttaatagagacagtgtttcaccatattggccaggctgatctcgaactcccaaactcaagtgatctgcctgccttggcctcccaaagtgctgggattaccgttcccagccccactttcaatctt

SEQ ID NO: 91352 - DNA, 441 bp, Homo sapiens
ccacagggaaggcctacagattttcattaccataaagggttttaatggcagtaagatgctggggcatgttctggccccagaaaggctaagtattgcgatagaagaaattcaggggttgtaactgaggggagaagggtttgcaaactctcatctcttttcgaatctatctggtagaggycacggatttagttaaagcagagtttctcaacctcagcacaactgacattctgggctggacacttccttgttgtggaggccactctacccactggagattgtttagcagcctttctgctctctatctcctagatgctagtagcactgcccccagttgtgacaaccaaaaatgtctccaaacattgccacatttcttttattttcttccttttttttttttttttttgagatggagtctcactttgttgcccaggctggagtgca

SEQ ID NO: 91353 - DNA, 876 bp, Homo sapiens
caccatcccctatgatgacataagattattcataatctgtgtgatagttgaaaacaatataatgaattagaatagaaaaagctagaacctctgtttctgcaaacctaataaacaactttaaagatgcccagtattttaagataatcgattttgacctgaagttatttcaagtgacagcaaatttctttaaaatggtctgcttatgttttgtttctaatttagagrtaattactccaagggtgatgtaaaatgtgtatagaagtatacaggaatagtacagatttccttttttttttaaagtgtttaattcaagcctatatttgtagtttctaaactgttgatccatccagcgttttcttgtcacaaatgtgcaccaatgaaaaaataaaaagtcaaagagaatcactgtcatccctatcaaaggaatggctcctttcctaaaattcttcgaaaatatgtgttttacaatccttacacctcaacaaaagcggcaatggagtaaataccctggtttatgttgttctcacaattaaatggatatccacaaactacctgtcataaaagccctctctttttttcccggtgcttcttcattgttttcttgttttccctgggacattgggacagaaccactggccctttggtttatgactgagtcccagactcagtcataaaccaaagggaagtggaggccactccctggggcactcgtggttgtcacagccgctcctttctctgtagacctgaccagcacgctgtctgtctccttgcggtccatggcaaggtctgcgggggcctctgctgtagcactggagtggttctttttcttcaaggtctttgctttcttgccttggccgttcctgtggtgatctcgtc

SEQ ID NO: 91354 - DNA, 876 bp, Homo sapiens
caccatcccctatgatgacataagattattcataatctgtgtgatagttgaaaacaatataatgaattagaatagaaaaagctagaacctctgtttctgcaaacctaataaacaactttaaagatgcccagtattttaagataatcgattttgacctgaagttatttcaagtgacagcaaatttctttaaaatggtctgcttatgttttgtttctaatttagagataattactccaagggtgatgtaaaatgtgtatagaagtatacaggaatagtacagatttccttttttttttwaagtgtttaattcaagcctatatttgtagtttctaaactgttgatccatccagcgttttcttgtcacaaatgtgcaccaatgaaaaaataaaaagtcaaagagaatcactgtcatccctatcaaaggaatggctcctttcctaaaattcttcgaaaatatgtgttttacaatccttacacctcaacaaaagcggcaatggagtaaataccctggtttatgttgttctcacaattaaatggatatccacaaactacctgtcataaaagccctctctttttttcccggtgcttcttcattgttttcttgttttccctgggacattgggacagaaccactggccctttggtttatgactgagtcccagactcagtcataaaccaaagggaagtggaggccactccctggggcactcgtggttgtcacagccgctcctttctctgtagacctgaccagcacgctgtctgtctccttgcggtccatggcaaggtctgcgggggcctctgctgtagcactggagtggttctttttcttcaaggtctttgctttcttgccttggccgttcctgtggtgatctcgtc

SEQ ID NO: 91355 - DNA, 2262 bp, Homo sapiens
cccagggaaacagggatggtttcctgagggctcctgggggcatctcaagcatggtccctgtggccacaattccctaagtgtgtttctaaggtttaacagtgaatgccctgcctgaaaaggagcggacgccctgtccctggagaagcgtcygtgctatagaacggcctgggtggaattggatctgagcagctctcacccagagatgccttccccttgttctcactgggtcccacctcggggcaccagggaaaggagccatggcagtggagggagcagtactcgctgttgactccgggaaaccctctccgcacaccagcagggtggcatctcctgcccagcttcctgaaacctgaggccccctagaaagccaagtcctgagacacagcgtggagaggccgggccactcacatctgggcaggagcaccaccccgcaccctgcaggcccaggtacaaaccctcagccacaaacagagaccctgtcttgcgcatgtggccaaatgcaggcatccaggccacatgtgtgtgcctgaatgtgtggcacaggcctgcccaggagcacagccaggcacacacatggacagtgtcctggggtagcttcttccgccggccccccattcctgggccagcggggctcttctctctggagagaatttccctattctcaaggtaggaagactccttccttctccagcgccagcaggagcagatgggacagacgggggatgtggccggacaagcatggactgtgccatctttgaggggacaacccctctgggcctgttccctcctctgcccctggcaacaccagctcccagagctaagagcaggatggaggccagggcatgccttggagtggggggtcccacttcccccttcccttgctggggagcagcactagccaccccagggaaggctgctgggccaggccaagggcaggggtcagagtgctccaggtcaggagcccccctgaagatcccagctttccaaagcccaggctccagaatctcccatgtcgctggctgcaacataaaataggtcattggcataatcctggccaaattggcctcttgcagatcagccaggccacgctccccaggcctaattatcccatatttggtcaataagccattaacacagcgccatggatgttaataaccgtttcatgaaaaagtcggtgtaatttatgagatcaacactagttaacaaaattaataaatatttcattcggggagatttatcccgatgtgctctcagcaggtggaccaagagcccttgggcagccctggggagccggcggttgggagagaggaagtcctggctctcacttgggccaataaacatttacctcaaatcctatcgccataaatccacgggctggacgagggagtccagtaaaacctgacttaacattatgttcgggccattaacaatatttatatcgatgtcacttcggggagggttagagtcgccaggcagggcccagcggccatgacgggagcaagctgggatcctgtaggaagatgcatgcccagggaggcccagggcatcgggaagagtcccagagtggctctcagaccccttgggattagtggttcccagttatgtgacccaggatgagtttctccactgcccagagccacagtctcctcatctgtaaatcgggaatattaaaaataaccatccgggctgggcgtggtggctcacgcctataattctaacactttgggaggctgaggcaggtggatcatttgaggtcagaagttcgagaccagtctggacaacatggtgaagcccggtctctactaaaaatacaaaaattagccgggcatggtggcacacgcctgtaatcccacctactcgggagtctgaggcaggagaatcgcttgaacccaggaggtggagattgcagtgagctgagatcgcaccattgcactccagacagagcaagactccatctcaaaaaaataaaaataaaaataaaataaataaccatccagtgggctgctgggcagattaagtctcacgacacaaagtaatccccaggcaccaagggaggactcagtccatggaaacggctgtaagaaccattatccacagagagagccaggggatgcagccctctgcccagacgagaaccctgggaagtgcactctgcctcctccattggcagcctgtcgtccactgggtgttgtgcacacgtgacctaccatcccacaacagtcctgcagggtgaacactcctgagagccccattttccgaaag

SEQ ID NO: 91356 - DNA, 1402 bp, Homo sapiens
cctgaggtcaggaatttgagaccagcctgaccaacatggtgaaaccccatctctactaaaaatccaaaaatcagccgggcaccgtggtgcacgcctgtaatcccagctacttgggtggctgaggcaggagaatcgcttaaacccaggaggcagatgttgcagtgagccgagatggcgccacttcactccagcctgggtgataaaagtgaaactctgtctcaaaaaaaaaaaattgccagaaggttccagtgtgcagccaaggccgagacccaaacccctatatcaccaccatcccattcctccctccctgtagccaccgcctaacttatacctcaccctttctgtccgggaccaagaaagtcactcagtctcaagtctgacccactctggcccatccaacttatgacagtccgagcccacctgaccatggcactctcctgcctacacattcgatggctcccaaggccctcagggggaaggcgatcttcctgccctgctcccaccgaggcaggagagggccacaggtagcatgatgccctgcggggagccacctgcaggacagagccagacccagaatcctcctcccggcccgatccacgggaaccccaccagccagcttccctgaccagagtgagggcttagttccagggccgccctcctacctgggcagaaggaaggcccatggcaggggtccctggggagtgagtttcacctgccactcaccactcaacagggtgatgggactctgctcactcacgcctgcacctcaggtgtgggtgacatcattgttcccatttcacagataaggaagctgaggctcagaggggcacacgtctggcctgaggtcacacagctgggcagcagaggagcccggggacatctctggctccagataccatgctaagggctcagactgtggcctcacaccagaggcgggtgcagcctcctgggctcccagcagctaggcatggagaacacagacggcaggagccatccaggctcggggacctgccggtggaagacggagcagggaagctgtgggaggcagaatgtctttcggcagcaatagaaaacsaacacaggcctgggtacctggaagcagggcgccgctgtagcaaatgcctaaaagtgtgcaagcggcctcggaattgaccagtgaacagaggctaaaaaaatctggagacgcatgatagaaaaggcctaggttgcctggaacaggctttgggtagaaatgtagctgttaagtagacgctcctcgctctcctcaacctcaaccctcactggcagaggaggatgggggtcaggggccaggcagaggagggaggtgtggaggtctcagtagtggagaagtttcaggggtgagtgcagagatggacaacacctggagaactgagactgctaa

SEQ ID NO: 91357 - DNA, 1402 bp, Homo sapiens
cctgaggtcaggaatttgagaccagcctgaccaacatggtgaaaccccatctctactaaaaatccaaaaatcagccgggcaccgtggtgcacgcctgtaatcccagctacttgggtggctgaggcaggagaatcgcttaaacccaggaggcagatgttgcagtgagccgagatggcgccacttcactccagcctgggtgataaaagtgaaactctgtctcaaaaaaaaaaaattgccagaaggttccagtgtgcagccaaggccgagacccaaacccctatatcaccaccatcccattcctccctccctgtagccaccgcctaacttatacctcaccctttctgtccgggaccaagaaagtcactcagtctcaagtctgacccactctggcccatccaacttatgacagtccgagcccacctgaccatggcactctcctgcctacacattcgatggctcccaaggccctcagggggaaggcgatcttcctgccctgctcccaccgaggcaggagagggccacaggtagcatgatgccctgcggggagccacctgcaggacagagccagacccagaatcctcctcccggcccgatccacgggaaccccaccagccagcttccctgaccagagtgagggcttagttccagggccgccctcctacctgggcagaaggaaggcccatggcaggggtccctggggagtgagtttcacctgccactcaccactcaacagggtgatgggactctgctcactcacgcctgcacctcaggtgtgggtgacatcattgttcccatttcacagataaggaagctgaggctcagaggggcacacgtctggcctgaggtcacacagctgggcagcagaggagcccggggacatctctggctccagataccatgctaagggctcagactgtggcctcacaccagaggcgggtgcagcctcctgggctcccagcagctaggcatggagaacacagacggcaggagccatccaggctcggggacctgccggtggaagacggagcagggaagctgtgggaggcagaatgtctttcggcagcaatagaaaaccaacacaggcctgggtacctggaagcagggcgccgctgtagcaaatgcctaaaagtgtgcaagcggcctyggaattgaccagtgaacagaggctaaaaaaatctggagacgcatgatagaaaaggcctaggttgcctggaacaggctttgggtagaaatgtagctgttaagtagacgctcctcgctctcctcaacctcaaccctcactggcagaggaggatgggggtcaggggccaggcagaggagggaggtgtggaggtctcagtagtggagaagtttcaggggtgagtgcagagatggacaacacctggagaactgagactgctaa

SEQ ID NO: 91358 - DNA, 1040 bp, Homo sapiens
tctatgttaaatatatacgctaagtatatatctttaaaatatatgtaatatatctagttaaatatatccatgtgtattccaaaaccccaaaaggaaggacaatgtgcaggagagcaatgggtgctcacaaccctgacctagctccaatctgattccctggttgctgggaaaaagccaaaaatcactgttggtattttttaggagctgtgcttccagtggcctctggtccagtctgttcaactcaagatggtatgagcagcgggctccgtcagcaggcctgagctggacacacgtgacaccagtcaccatgcagaacaaggagttcctgcccttgaaacccacaggtcatcaacatctttgcatctggcctcttctacgactgggtattttccaatcatccactgcctgcaacttctctcccggaagtcacagttgccaactgaaaacttccaaaggggtgaagagaaacccctctctgaacctaaataaaaacagagatcrcctttgccagagaaagggcgcctgctcagaagctctgatttcaaattatgaagagcacagagccacagtccaggcttaggagtgacgctggtaaatggtggtggtggtttcactttgtgtttttcctccccagtaaattctactatcctgttttattttccttcctcctccaaccctttggtgctgttaggaaatagttttgggaaacacttgttcaaaacacaacagcagaaaacgggtaagctgccagtaagtttttcaaaagaactatttggcagccctgaaacagattacaacgctggtacaaaccttgactgactgcagggttacagatgtcagaatcgtgtgtcttcagaaatatgcacaacaacaactggattccctgtcataatgcctggccctaccaacattgcaaaatgctggccggcagagaggacagaaaccattcggtcacagcctttttcctgagtaatagtggggtcctgcaagctacaactcagttgtcaataggactggaaattccttgactaaactcatat

SEQ ID NO: 91359 - DNA, 542 bp, Homo sapiens
tcccaacactttgggaggccgaggtgggcggatcacttgaggtcaggaatttgagaccagcctgctcaacaggacaaaaccccatctctactaaaaatacaaaaattagcctggcatagtggcaggcgcctgtaatcccagctacttggaggctgaggsaggaggatcccttgaacccgagagacggaggtttcagtgagtcgagatcccaccactgcactccaacttgggtgacagagcgacattccatctccaaaaacaaaaaacaaaagcacgacaacaataagcttttggtcttgtcaggaataagccataaaaattgatcattctactgaaagttttggttttttctttttgaagaaaatctattaaagctgtctaaacatgagaaaaatgctcaatagaaaatgtaggaagtggcagggcacagtggctcacacccgtaattccagcactttgtgaggctgaggccggcagatcacttgacgccaggaattcaagaccagcctggccaacatggtgaaaccctgtctctactaaaa

SEQ ID NO: 91360 - DNA, 563 bp, Homo sapiens
ctctcagctgtctgccctccatatctttgatgagggagatccagttggccctctgtatctatgggttctgcaactggggattcaaccaaccacagattaaaccaaccacagattattagttgttcactgatttattttactgaattgatagtgtacactggagcataccataaaaaaactaaaactaatatgagctcatttccagtagtccattcatgaaatcctataagtaccatcatacttaatggtgaaaatttgaaaatttttttcttaaaatcaggaacaagaaaaagatgctcacttttttttttcttttcttttyttttcttttcttttttttttctttttgagatggaatctcactctatcgcccaggctggagtgcagtggcgcgatcttggctcactgcaaactctgcctcccgagttcatgccattctcctgcctcagcctcctgagtagctgggactacaggcgcccaccaccgcacccaggtgattttctgtatttttagtagagacggggtttcattcaccatgttaaccaggatggtctcgatctcct

SEQ ID NO: 91361 - DNA, 452 bp, Homo sapiens
  misc_feature (1)...(452): n = A,T,C or G
tactgtgtgcaggaagcactaagccctgtgttttatgcagataaacctgcctggtaaatgaaacttgaaaacagaaaatgatgcagtgatgcagtgtggtaccccctgcnctggccgtttagaagcttattttcagaagaattaggtaaagcataactttgttaagctttgttgtaaacagaagaggagactgcagctgtgccaggcacttcctagccttgatsgaggactcagctccattgcattgacaagtctgtttccggagctttttgtgggttccactgacttcatgggagacttgcatacagcattttgattgttcctatttagaaggctgcagtcatttttaatggcctctgccttttctgattctaggctagaagcaagaatattcctcctgcctgcttagtgaggtagggtgtttggtttgtattagaagcagtaaccagcct

SEQ ID NO: 91362 - DNA, 807 bp, Homo sapiens
cttgaggccaggagttcgagaccagcctgtgcaaatggagagcccccctcatctctgcaaaaaataagacaattagcagggcatgatgttgtgcacctatagtcccagctactcagggggctgaagtggtaggagtttgaggttacggtgagctatgattgtgccactgcactgcagcctgggcaacagagcgagaccctgtctctctaaaacaaacaaacaccccaaaaccatcaaaataaattttggtggctcagatatttaaacatggaaaatgaaaccataagctacaggagactgtacttataatcttggaatggcaaaggcctttctaatatgacaaaaaaaaaaaaaaacccagaagccataggaagatttataaattcaactacattttttaacatttgtaaagcaaaaaccataagaagttaaatcccaagaaactgcaaactggatgggattatttgcaactcataaaacaaatgaagcattcctgaaaattgaaaagaataagagcaaccccaagaggggggaaatgtacaaaggctccaatgcatacatttctcaaagggtgtgatatggcccccaagagagcaaaaattgcttcttgagggacaaagtatctcagtcattgcaatggtctgtggccctccaaagctgttgtcttaatccacttatttttccagatgagttttaraataaaatcccatgtgttgcttggagtttcaaaaactcttagattaattgggggagaattaacatctgcacagaaaatctgcagtcaactgttctcattccggaacattt

SEQ ID NO: 91363 - DNA, 1309 bp, Homo sapiens
tgctgctctttggttaatgacaaccccttggccatctgcagcgtccccagtggccactctgtccccatgccccgtgcatcacggagcagaygctgaccctgtgggggcgtgacctggctgtgcagttggccgtatccgggcgtctcctgatgtggagtcggcaggtgggtttccacatcacctcaaatgatttttaagatgattgaactggaacagctgccacccacagcccaaggcagggccccaggccagccccaagcagcgacagccagtgtggctggacaccgagagcagggagggggttgcgggagaggaggtcggagaaggggggcagggaggggagcagattgtggagggctttggggttgtggctggcctttgaagtgaggtgggccccctggaggagggcttggagtgaagaagcagcagtgtcagccctgtgttgtgagaggtgcctgggactcatgcataaattgctggatggaggcagagagataggtaggaggctgccctggccatccaggttgactgtgactgacacaggcttgcactagggtggcagtggtggaggtggccttttgaccacttttgtggtctggttggggatgaatgtcaagggaattgctgatgagtttccttatgggttggaggtgagttgagggagaaggggaggtgtcaagaatatctcccaggttttggcctgagcagctgggacaatggggttgccatggaggagggtttagggaggacaatcaggagcgtggctgtggccatgtcaggtatatggtgctcagtgcacagtcacagggaattgtggaccgggcccctgtgtgtgcaggcttggaggcagggggaggccagggctggaggctaaactcagggactcagccatgtgacgggattggaagacataacacaggaaggggccacctgaggagtgtgtgcagctggaggtgtctgaggctgagccctgagcacgtcggggttttaggatgagaagaggaggaaccagcaaaggaggccagggaggatggtcagagaggtgggagcacaactgagagcatcttggaagccaagcagaggcagtgttttcaggaggaaggtgcgaatgaccatgtcaagtgctggctagaggacagatatgagtggattgggcaacaaggaggtcaggaggtcactggagaccttgaccgagggcactttggtgtggtagcagagtgaaagcctggtaagactgggggccagagaggatgtcggacccctcctccaccctctcagcagttattccaaacttttcctatgtccccaa

SEQ ID NO: 91364 - DNA, 1309 bp, Homo sapiens
tgctgctctttggttaatgacaaccccttggccatctgcagcgtccccagtggccactctgtccccatgccccgtgcatcacggagcagacgctgaccctgtgggggcgtgacctggctgtgcagttggccgtatcygggcgtctcctgatgtggagtcggcaggtgggtttccacatcacctcaaatgatttttaagatgattgaactggaacagctgccacccacagcccaaggcagggccccaggccagccccaagcagcgacagccagtgtggctggacaccgagagcagggagggggttgcgggagaggaggtcggagaaggggggcagggaggggagcagattgtggagggctttggggttgtggctggcctttgaagtgaggtgggccccctggaggagggcttggagtgaagaagcagcagtgtcagccctgtgttgtgagaggtgcctgggactcatgcataaattgctggatggaggcagagagataggtaggaggctgccctggccatccaggttgactgtgactgacacaggcttgcactagggtggcagtggtggaggtggccttttgaccacttttgtggtctggttggggatgaatgtcaagggaattgctgatgagtttccttatgggttggaggtgagttgagggagaaggggaggtgtcaagaatatctcccaggttttggcctgagcagctgggacaatggggttgccatggaggagggtttagggaggacaatcaggagcgtggctgtggccatgtcaggtatatggtgctcagtgcacagtcacagggaattgtggaccgggcccctgtgtgtgcaggcttggaggcagggggaggccagggctggaggctaaactcagggactcagccatgtgacgggattggaagacataacacaggaaggggccacctgaggagtgtgtgcagctggaggtgtctgaggctgagccctgagcacgtcggggttttaggatgagaagaggaggaaccagcaaaggaggccagggaggatggtcagagaggtgggagcacaactgagagcatcttggaagccaagcagaggcagtgttttcaggaggaaggtgcgaatgaccatgtcaagtgctggctagaggacagatatgagtggattgggcaacaaggaggtcaggaggtcactggagaccttgaccgagggcactttggtgtggtagcagagtgaaagcctggtaagactgggggccagagaggatgtcggacccctcctccaccctctcagcagttattccaaacttttcctatgtccccaa

SEQ ID NO: 91365 - DNA, 1309 bp, Homo sapiens
tgctgctctttggttaatgacaaccccttggccatctgcagcgtccccagtggccactctgtccccatgccccgtgcatcacggagcagacgctgaccctgtgggggcgtgacctggctgtgcagttggccgtatccgggcgtctcctgatgtggagtcggcaggtgggtttccacatcacctcaaatgatttttaagmtgattgaactggaacagctgccacccacagcccaaggcagggccccaggccagccccaagcagcgacagccagtgtggctggacaccgagagcagggagggggttgcgggagaggaggtcggagaaggggggcagggaggggagcagattgtggagggctttggggttgtggctggcctttgaagtgaggtgggccccctggaggagggcttggagtgaagaagcagcagtgtcagccctgtgttgtgagaggtgcctgggactcatgcataaattgctggatggaggcagagagataggtaggaggctgccctggccatccaggttgactgtgactgacacaggcttgcactagggtggcagtggtggaggtggccttttgaccacttttgtggtctggttggggatgaatgtcaagggaattgctgatgagtttccttatgggttggaggtgagttgagggagaaggggaggtgtcaagaatatctcccaggttttggcctgagcagctgggacaatggggttgccatggaggagggtttagggaggacaatcaggagcgtggctgtggccatgtcaggtatatggtgctcagtgcacagtcacagggaattgtggaccgggcccctgtgtgtgcaggcttggaggcagggggaggccagggctggaggctaaactcagggactcagccatgtgacgggattggaagacataacacaggaaggggccacctgaggagtgtgtgcagctggaggtgtctgaggctgagccctgagcacgtcggggttttaggatgagaagaggaggaaccagcaaaggaggccagggaggatggtcagagaggtgggagcacaactgagagcatcttggaagccaagcagaggcagtgttttcaggaggaaggtgcgaatgaccatgtcaagtgctggctagaggacagatatgagtggattgggcaacaaggaggtcaggaggtcactggagaccttgaccgagggcactttggtgtggtagcagagtgaaagcctggtaagactgggggccagagaggatgtcggacccctcctccaccctctcagcagttattccaaacttttcctatgtccccaa

SEQ ID NO: 91366 - DNA, 601 bp, Homo sapiens
cttgttatcttatgtcattcctgtgaagaatcattaccagcccatttctcagatgcagaaattaagatacggaaggactaaagaacttgtctgtggacttgaaagtgtgtaagcagcaaacctgtcccaaacccaggtcatcatccaggaaccccagggcctgccttgccccactgccacgtcacttacactgctgagagacaccatccaatccagctgcctagccacaggcgtctcccctttgaaacctgatcactccaggatcaggcagagaagcaggtcatccagccctgctttgatgacaaccccaagggtatctaattataacagggaagggaggagtcaggattctctcgctatttctcaagaccaaattaattttaattccttttgatacagtgtatacacacagggcaggaaaagcactggttgaggagtgaagaaatctgaggcttttagtcccacttccgcttgttcactgaggtcttgggtaagtcactccaccttcttcccaaggcctcagtttctctgtctctctctctctctctctctctctctctctctctctstgtgtgtttgtgtctcgataaggaaggaaaaa

SEQ ID NO: 91367 - DNA, 824 bp, Homo sapiens
aaagtcatctttaagccgattgcctttttaatacagtagaccctgggagcagagtttttatattgcatgtagttgcaaccacaatagatatatgactgctagtatgtattaagatactattatgtgccagcaactctaaaaggctcattaaatgtgtctgatctcatccaacatcctcattaactagagattattcatctactttccaacaggggaaactgatgtcctgagatgtgccttgctgttttagggaatggaattcaattgagaatgtttgtaggtgagcagtccaactgcatggcaagtctrgaatgtgaatgtgggtcaggcatccttagtaaaccattttgtcctcaccacttagtgtgtggtagaacatactactgtcactttcctgagacttctcagagttcctaaaactaccatgattttatagattaaaaaaataagtttcagagaggtgaagacatttatccaaaatcatacagctagttagcagcagggcctggacttgaacccaagcttatctggccccaaggcccatcactcaaccatcatgccatccctaactcccccaaaagggaatgcaatgagaggactatgaggagtcagactgcacccccaaacaaggaaatacattcagagtcacagtcagagttagtcctgaggcggtatgcttcccatgagaggctgtcatcagggggtggacagacacccagtggggaaaaaaatcaatcattttgagcaaaaggacagatcagctactcagtgtgcagggaaggggtggtaaaaggtggtattccttgccaggatattccaattct

SEQ ID NO: 91368 - DNA, 556 bp, Homo sapiens
catcttcagaataggattcatgaatattactcactgcagcttatggaatccaaacaaaagcacagccaagagcccaaggcatggttgatatgcaggaaatagccagaccaggctgtttggtcagcagcctcaacgctccaactggagactggaatgggactcaaaggggcctgggattacgcttcccaaaacatgccaaagacsgtcatctggctcaagaaatctggaaattcaatttcttcattcccaataatgcccttaaaaaaagtcagctttaataagtatcaagagtgtatccagttttgatgctctcctgcgtacttaaaaatattacataccaaccttctgttttcatataatctccattacatagttgggctttgcccacattctggtaatgatgtctgtctttcaaaatttgcttttctcacaaataaagaaaagagtccctgttctccaggcagcctctccttttacctcctagctaggctcaaccccgccattcccttccttagtcctttgaaactgggtctcacctgaggtggatttgctgccc

SEQ ID NO: 91369 - DNA, 730 bp, Homo sapiens
aattactttgatggagtctttggtggattatagtccatgaaaggttgagatctaccatagagttcattcttacctattcctaaataattttgtttcatttccagttggcctttcttttttctttttcttttcccttctccttcacttctctccttctttctttgcctccttccttccctcccttctttcttccttctttccttccttcctctctctttctctctctctctctttctttcttcaaatatcaacttgtataaacatccacatttttaaatgtatacatgaaaactggccataaccatattatgacatgtatamccacggcagggggggagtgcatattttcttgaaatcctcttcatttacctgaaatccactggtttaaattatatcaaaatgttcttgcagcagtcagtcatttctgactcatcagtataactgagtcttttttcattacagtggtgtccacagtcctaatgatttgttttccttgaagccatgagtctaaaatctgtaagtaattggtctcattcctgctggaatcagaagagccaggtttaagaagtggaatccagattactttctgtctagctgatctccctgtgttgtaaaatgtgtgtggtttttttggaaaagcatgaaaccccacactatatattttcagttttactgctttgaaggctcatgaatcagttttctcattctctttttttctttcctccaaata

SEQ ID NO: 91370 - DNA, 1716 bp, Homo sapiens
gcatttaactaaaatattttccagtgaaatatatgtaaagatttataaaggaaggtattaatagggtgagactagctatccagaatttacaaggtgatattttattttattttatttattttttattttttagttctttgagaaatcttcaaactgcttaccatggtgcctgaactaatttacattgccaccaacactgtgtgtgtgtgtgtgtgtgtgtgtgtgtgtgtgtgtgtgtttattatactttaagttttagggtatatatgcaaaacgtgcaggtttgttacatatgtatatatgtgccatgttygtgtgctgcacccattaactcatcatttaacattgggtatctctcctaatgctatcccacccccctcccctcaccccacaacaggccccggtgtgtgatgttccccttcctgtatccatgtgttctcattgttcaattcccacctatgagtgagaacatgcagtgtttggttttttgtcacaaggtgatattttatataaaccagttaaaataccaatacacagctcttctgaagcttttagcacaatggaataaaaatcagaaagtttttttcttttttttctgtcatctggaaattgtggcagcaaataaattcctctgtcttatttttggaagacgctgataaaatttcacgcatcatcatttgaattatttatttcacaaggttagatgaaaaacttacctgcaagttaaatagaagagacaccagagtgagctttcacaggcttgctggctttcataatctcaagagagaaatgactaaaatcaaagcgttctatggacctataagcagcttctctccaatgccctctgtaatctaaaagctgactgcttttagagatagttctgagttatataaatgatatttctattggtctcgtttagcccaaggtcaggtaactagtatgcatgtgtatttcattaagaagaattctggttttgcaccattggatatacttgactcacaggaaagagaaatgaatgaagtaaagtttgcacttacatttttttcctggctcttaggtcttgttactaaactgttgaaccacctgaattaagtctatgggaataagtttgaagtctttataatagcaaattataacctatgttttaaggtagctactctccagctaccttaaaaagtggcgtaaaattatcaatacaatttatttttatttattttaaaagattgacctctattatgaaaaagagggactcaggtgttgatgtgagaataattattatagccaatgtagttaatattaatctcagatgtgcaaataagtagaccattataataatattaacaacttgacctaaaatatactttgaatttccattccaccaagataggataaacttaatctcacatattttggggttctatacctcaaaataataaaatccatatatgacaaacccacagccaacattatactgaatgggggaaagctgaaagcattcctcctaagacctggaacaagacaaggatgcccattttcactgctcctattcaacatagtactggaagtcctagccagagcaatcaggcaagagaaagaaataaaaggcatccaaatcggaaaggaggaagccaaccaaattacctctgtttgctaatgatatacctagaaaaccctagggacacctctaaaagactcctagatttgataaatgaattc

SEQ ID NO: 91371 - DNA, 610 bp, Homo sapiens
aatttgtcagaaatgcagactgccaggcttcacctcaggtgatttgtatgcacactacagtttgagagaatggcaggcagtgctcagctaacccctaagggattaggaggacttagggaaagtgggaagggaagaacagagggaattctgatgttttctcatgattaacagggcttatgggttttggggaggaaaatagtgctgttctacccatatcgtatcaagagtacatactatcaatgtgacttatmactattgatgttaaccttgatcacctggctgagatagtgtgtgtcagatttctccactgtagcaaattacttttgtccctacccccttccgtactttggaaggaattcactatgcacattcctcacttaaggaatggggagacatgctccgacttcatggggtcagggggactatcaatttaagttatttggaattcttctgtacaggagattcatttcttctccctcatttatttacttagtcatttatgtcagtatggactcgtagatgtttattatatactttgggttataatccaatactactatattttgctcaaattgttccagccttggccattgggaactctttcagttgg

SEQ ID NO: 91372 - DNA, 610 bp, Homo sapiens
aatttgtcagaaatgcagactgccaggcttcacctcaggtgatttgtatgcacactacagtttgagagaatggcaggcagtgctcagctaacccctaagggattaggaggacttagggaaagtgggaagggaagaacagagggaattctgatgttttctcatgattaacagggcttatgggttttggggaggaaaatagtgctgttctacccatatcgtatcaagagtacatactatcaatgtgacttataastattgatgttaaccttgatcacctggctgagatagtgtgtgtcagatttctccactgtagcaaattacttttgtccctacccccttccgtactttggaaggaattcactatgcacattcctcacttaaggaatggggagacatgctccgacttcatggggtcagggggactatcaatttaagttatttggaattcttctgtacaggagattcatttcttctccctcatttatttacttagtcatttatgtcagtatggactcgtagatgtttattatatactttgggttataatccaatactactatattttgctcaaattgttccagccttggccattgggaactctttcagttgg

SEQ ID NO: 91373 - DNA, 610 bp, Homo sapiens
aatttgtcagaaatgcagactgccaggcttcacctcaggtgatttgtatgcacactacagtttgagagaatggcaggcagtgctcagctaacccctaagggattaggaggacttagggaaagtgggaagggaagaacagagggaattctgatgttttctcatgattaacagggcttatgggttttggggaggaaaatagtgctgttctacccatatcgtatcaagagtacatactatcaatgtgacttataactattgatgttaaccttgatcacctggctgagatagtgtgtgtcagatttctccactgtagcaaattacttttgtccctacccccttccgtactttggaaggaattcactatgcacattcctcacttaaggaatggggagacatgctccgacttcatggggtcagggggactatcaatttaagttatttggaattcttctgtacaggagattcatttcttctccctcatktatttacttagtcatttatgtcagtatggactcgtagatgtttattatatactttgggttataatccaatactactatattttgctcaaattgttccagccttggccattgggaactctttcagttgg

SEQ ID NO: 91374 - DNA, 564 bp, Homo sapiens
catttcacttagcacagagttagacacagagcagttattcaactgaaaattattaaattgatttacccctttgatgctttattgtcagttatcctttatttattaaatatcttagatagttcagacaaggcccaacagttccataatcaaacaaaatatatcattgctttaagaaattttcttgtgactcagcctttcagacacccttagaataagatatcttttgattttttttttttwaaaaaggcttagttatatttctacatggctcagttaggcatgattgttggtttatttcctcaaggtacagttgaaaatgtcttttattaaatttccatcaggattactggttgatgttttctgtatgtttaccaaagggtcagctggacataatttttggtttgattacttcaaccagtcaatacactgagaagagcaagcccagctgaaacacagggaaaaactaatgcgtgttgaagcatataactaccattattgaaatattagggtagcttgtatctgattctaggtgctttcgtttaagagtttatttaatcttatagc

SEQ ID NO: 91375 - DNA, 1117 bp, Homo sapiens
gcgctcaacttgcaggaagggaaaaaaaggaaagaaggatgaaagaaagaaatttggagaggattagatagtatttctgagcctaattaaaaatataattgaaagaagtctctaaaaaattatattttaagaaatgacatagaacagagggaagatgtgaatatgaagaaaatctaaggcaacataaattcataaatcattgcgaagcggtcacagactgtactggaagtgttttaaagattcaacattgatactttaatcatttctcaagctcttcaatagagttttctaattatctgcctatgccttcttcttccctacmccttccacgttgctatcaatctaagctacttttatgacatgtcttaagattggaacaccataattaggtgaatttcttacatgcagactattggatcataatgtcccttgcaaaagagaaagctgtaaaagtaaataaagatgttaaattccctttgtcagagtgctgatgaagaatgcttcaagaaatagaataataatgctgaagatcattaaaataaatctaaatttaacctgtatattctttatgattatgattaaatggaaaattaaaatcagcttagtagctgtgctgttgaaatattttgtggtatgttatcagcatacttcaaattttagtaccaaactcattagaagatatttcaaatatctacattttgcctaaccagaagaccattaaaatgcacattgtctttttcctgtgggaattatatgccacatcttatttactagccttggagcatgtttcaaagtacttagtattgctatttatgatccaaagtagacaaaatgaactacagtgtctattaagttgtaaaatgtagtcaatgttatgtttttgttttttcttcttttgttttctttaaaaatagcgtttatcttgtttctatttacagagtgattcaggctcattatttaacattttgaagcaaataagagtaaaacaaagtaaaaaaactcataatatcatggcattttattattttatgttttgtttaagcttttatttcctatgtggaaatacattaatttaaagaaacatcctccagatattgttacatccctgcaatttcaa

SEQ ID NO: 91376 - DNA, 666 bp, Homo sapiens
cacactattccaggcaccacttcctgcaaaggcagccatttctcaagtaactcttctgtgtgactaaggctgtttatagtggtagttgagactggcagttcaatagttaatgcctggtggcataaagcatcccacagagtggaaccactgagtgagaatttcagcatattggactttggcagacacagggtgaagcaaatgagcttcctgacataggcaggtatcccattccatttgacatcaattgaaaagcttaaagaatgttctaaaccttcccaatctcttctcctgcagggataatatcacatgatttctgaggagaacagaaagtttattttgtgcactttgaaaatttaagaactcaggtataagttcttataatttgaacagttcaacagaatgttcagataaaaggttgtgaaagctttttccttcctgttgtctctttcagttataatggttgagaagccacttyaagtgaaagacatttctttcctcttttcaagataaaggctcaagccctaagaatctgccaaaataaactatttcacataacaatttattcagaaaagaagcacatgtgaaaatttcttaattgttcacaaagctctcctactttcatatgtaaaggaagtatgaaaatgtaataatagtaagttggagcct

SEQ ID NO: 91377 - DNA, 552 bp, Homo sapiens
cagctgccagcaggcaggaaaaggtgggaggaacagacttgctgagtcttccagccttcatctttctcccatgccggatgttttctgccttcaaatattggactccaagttctttgacttttggactcttggacttacactagtgatttgccaggggctcttgggcctccagccacagactgaaggctgcactgtcagcttccctacttttgaggttttgggacttggactgatccactagtggcttccttgcttctcaacttgcagacagcctactatgggactttaccttgtgatcatgtgagtcaattctccttaataaactccctttcagatatacrtatatccatataccctagagaaccccgactaatacagagtggttaatggaagagtagaaagagcataatttacgtgtagcttatctacttagtggctgttgagaacgtgttcagatggagtacacctgcagcttgtttcctcactgtcacagtaaagggtcatgtgaagaattgtttcacattcctgtgttagctgtgcattgatatggcc

SEQ ID NO: 91378 - DNA, 454 bp, Homo sapiens
gtgatggccaagagctgcactctacacatgacacgcgaacagtttggggaatagaaaattgctttctcaggaagcccagccaattaaggacttgaccatattgaatgtcaagtgttaatttaggtttttcttcattttcccagtagtaatgygggtcctgtgatgagcaaatacatgtcaagtaaaagttgattgcatgaaggacctgggtattatatgtcactgacaagtcacaaatgtactgaagtcttttaaccccttaggtgagttgggagggggaggggagaatgggattaatggtaccataatgataagaatagatagtttatgtgggggtggcttggatgggacagacaggaatggtaattcatgcaaaaactggggatagaacaaatcctactctgagggcataaatagagacccttgaaaagcatacatgcatatatataattcc

SEQ ID NO: 91379 - DNA, 958 bp, Homo sapiens
  misc_feature (1)...(958): n = A,T,C or G
gtnnnnnnnnnnnnnnnnnnnnnnnnnnnnnnnnnnnnnnnnnnnnnnnnnnnnnnnnnnnnnnnnnnnnnnnnnnnnnnnnnnnnnnnnnnnnnnnnnnnntctgttttttacttatccgtggatggatgtctggatagcaaatctatttatttctttagcaatgatgtacctagtagaaacgttgtcttgggaattaggagaatgaggcttaaaaaactcattcttggcactaactttgagacttcaagagactaacatttgaatctgtactctttgtaaaatgaggaagctgaatgaaatgacttaagatattcctttcttcttatcgttgttttatgatttgtgaggatcctggtcaccttttaggaactgggagctagtgaggaaacctgattttcaggatgagttagcaaagtttcctaagatgtgccagacatagacttggtagtggtggtgctatcggtagctaagtagctagggattgtcaaggacaaagagattaaagacttgttttattcagatatttgggtactgtggggttggcaatttcattttctatttttgctgttactttcatatttttctacatccagaaattaatcttttgaggaactggcaaagcactgcttagaagccatttcatctcaagatttagccatgagaggatggtcttttctgctgtcttcacttaaccctcaagggctgtctactctcaatttatacataatctatctataaactcatctttgatctgaagactggagacctggagtccagataccagaaattgcctagaatagtctagtaaaaacactcccacttyagaagatgggagatgtgacggtttaggaaaccctataaggttaaggaaggggacatgggtgtgtgtgggggtgggtgtctgcagggggtacagcttttctcttattctccaagcagtgacactcacctttac

SEQ ID NO: 91380 - DNA, 596 bp, Homo sapiens
ggaccctgctaccatttggtcaatttaatattatgcaagagaaattccatttccctagtagttacacaatgcccgctttcagaccagctagtcaaccctgtgagggtcagatagagtagtttatccatttggttgtcagacaactgcctcgaacagccaggccatttctacatgttctcagttactggttaacaaatgttgccccagaattcagcacctaataggaaatacattcatttccaaattcctactgaaataggatttttctcattcctagataaaacagaggcacccagattttcctggaatggcattyagaaatagagaaggaatcatagagaaatgtctgcccaggcatctctgagtctcatgcctttttgctgttgctgctgttatgactcctaccttggaaagtttcagtcatccttgaacatcctccccacccccatgctttcctgtcttctgtttcataactaaatgccatttaaaactctagctatagataccccttgctgatataagcaacagaagtagagagtccttagattctagactgaatttagggcccaacagttagacaattggaacttgataat

SEQ ID NO: 91381 - DNA, 646 bp, Homo sapiens
tttatttgagacagagttttgctcttctcgcccaggctggagtgcaatggcgtaatctcggctcaccgcaacttccacctcctgggttcaagcgattctcctgcctcagcctcccaagtagctgggattgcaggcatgtgccaccacgcccagctaattttgtatttttagtagagatggggtttctccatgttggtcaggctggtctccaactcctgacctcaggtgattcgcctgccttggcctcccaaagtgctgagattacaggcatgagccaccgtgcccagccaattttttgtatttttagtagagacgtggtttcactattttgccaggctggtctcaaactcctggcgtgaagtgatctgcctgccttggccaaagtgctgggattacaggcgtgagccaccacgtctaaccaactttacatattaaggttatatatagaatcatatatatgtagtatatatggtataaatacatacaaatgtatcatatatgatatcatcagctatataacatttaggagactggatatagggagtgggggagtggraaatgttcaagataactctcaggtttctaatagtttattttatttttcccagtgacacagaacatgggagcaattgaggaagggcaagag

SEQ ID NO: 91382 - DNA, 621 bp, Homo sapiens
gggcggatcacctgaggtcaggagtttgaaaccagcctggccaacatggtgaaaccccatctctaccaaaaatacaaaaattagccaggtgtggtggcacgggcctgtgatcccagctactcgggaggctgaagcaggggaattgcttgaacctgggagttggaggctgcagtgagctgagatcgcgccattgccctccagcctgggygacagagcaaaaactccatctcaaaaaaaaaaaaaaggcaaataagtatagattcaaaaattgtgatctgaggggaccatgaaagaaaagggagtgaatgacatcaatctggatgtctgggtctgtgaagggatgtccactcctcttagagaacatgaggatctcaccttttagggagcacactgggttttcatgtatttcttaaactgtttatttgaaagcagttaaattaagagaattctcgcaaagatagtacagagttgtcaatgtaccccacgctcaatttccctgttatgactgtcttacattggatggtacatctgtcacagttagtgaactaatattgatgttatgattcactaaagcccatactttttacagatgccttttcctaatgtccattttctgttgca

SEQ ID NO: 91383 - DNA, 621 bp, Homo sapiens
gggcggatcacctgaggtcaggagtttgaaaccagcctggccaacatggtgaaaccccatctctaccaaaaatacaaaaattagccaggtgtggtggcacgggcctgtgatcccagctactcgggaggctgaagcaggggaattgcttgaacctgggagttggaggctgcagtgagctgagatcgcgccattgccctccagcctgggtgacagagcaaaaactccatctcaaaaaaaaaaaaaaggcaaataagtatagattcaaaaattgtgatctgaggggaccatgaaagaaaagggagtgaatgacatcaatctggatgtctgggtctgtgaagggatgtccactcctcttagagaacatgaggatctcaccttttagggagcacactgggttttcatgtatttcttaaactgtttatttgaaagcagttaaattaagagaattctcgcaargatagtacagagttgtcaatgtaccccacgctcaatttccctgttatgactgtcttacattggatggtacatctgtcacagttagtgaactaatattgatgttatgattcactaaagcccatactttttacagatgccttttcctaatgtccattttctgttgca

SEQ ID NO: 91384 - DNA, 621 bp, Homo sapiens
gggcggatcacctgaggtcaggagtttgaaaccagcctggccaacatggtgaaaccccatctctaccaaaaatacaaaaattagccaggtgtggtggcacgggcctgtgatcccagctactcgggaggctgaagcaggggaattgcttgaacctgggagttggaggctgcagtgagctgagatcgcgccattgccctccagcctgggtgacagagcaaaaactccatctcaaaaaaaaaaaaaaggcaaataagtatagattcaaaaattgtgatctgaggggaccatgaaagaaaagggagtgaatgacatcaatctggatgtctgggtctgtgaagggatgtccactcctcttagagaacatgaggatctcaccttttagggagcacactgggttttcatgtatttcttaaactgtttatttgaaagcagttaaattaagagaattctcgcaaagatagtacagagttgwcaatgtaccccacgctcaatttccctgttatgactgtcttacattggatggtacatctgtcacagttagtgaactaatattgatgttatgattcactaaagcccatactttttacagatgccttttcctaatgtccattttctgttgca

SEQ ID NO: 91385 - DNA, 1014 bp, Homo sapiens
accatctctttataataatagatagatgtaattgagcactaaccggcgcaggtagtgcgtgtgcattatctctgctcctcacaacagccttgcaaggggaaggcttttgcagatggggaatctgaggttcagagagacagagtgacttgcttggtctcagagggcagtaggacctgatcactgtgcccagtcctgcagcagtcatgggttcttagtttctgtttctggttgggccagtgaagccccttcctcatccctcttttctgcttatcactagagacagaaactaaaaaccatggcttcaggctgctgaaagcctaaaacaaaacagaacasaaaaacaacaacaacaaaataaggtgggttggacaagcttgttaggcccaagaatgattactcaggcctgtctttccctcttgccagctcccccatttgaacctcacatcctaagcacagaatcagcatggtgccatagaaagaatgtggctttggaggctgggtgtgatggctcacgcctataatcccagcactttgggaggccgaggccggcagatcacatgaggccaggagttcgagaccagcctggccgacatggtgaaaccccatctctactaaaaatacaaaaattagccgggcatggtggcatgcgtctgtattcccagctacttgggaggcagaggcatgagaattgcttgaacatgggaggtggaggttgcagtgagccaagatttcaccactgtactccagcctgggtgacagagtgaaactctgtctaaaaaaaaaaaagaatgtggctttggcatcatataaaaaatggttataataatgctttaaaacaatacagtagccgtgtggttaaatgagataatacaagtaggggacctggcgcatagtaggtattcaatatgtgtttgctttaaagaacaacttgttagtggtgcatataatcattcctcaaaatcatcccagaggtcacatttgtcagctaaaaatcagaagaggaagcgacaacat

SEQ ID NO: 91386 - DNA, 1897 bp, Homo sapiens
tacttagattgtgtagtgaaataagaaatttggttattgtccctagcactcacctttagacatagaagtttctccatttcttttcagggcctggggtaaggcaaagtgtgcacatctgctctgtatattaaaatatcccctcaactcattgaagtggaacaaaaacaaggtcacttgacaggactgtaattgtaatcacactatacagctttacttcctgccctttagtagtaggaccattcccttgtccttaaacatgcttctaaaataccagttttaatggctatatagtctttcatttatgattgtataaggattcattctgtcattgtattgtcattcacataggttgttttcaatcataaaatactgtaatgaacatctgcaagtttagatttttgctctcacctattgtttcctcagacaactgtaagtagtagaattgatggattaaaagatactttttaaaggctctgactcttctaaaatgtgttgttaaactcctcagatctgctaaccagatctttatgctgtacttgtgtgatttatttcgaatctaagtgaaagcctttgtattagttaccctgttaaatcccatcttgccatttgggcagcctattcttagtgtgttttctctgatatcagttaacattatattggctaattccatagaaactaggagactggaaaatgaagataatgtggaaaaacaagagcttgtgaatttgggagtgccctgttcttttaagrtgtgatgtgggttaaatgataaacaatgcatcttaaattctttaaaagtggcagaagtaaatggaatttatctggaaaaaaatcaggcgtttattctgatgccctaaattcaggggtgaaatattatctggactagaggaaaattttatgtacattatatggtgttctctattttgacaagcttactttgatattactgctgcaaggtagccccaggagggttgaattgagaagaactgagtattttgaggaacaaaacctaggatagtaggctggagggaattggaggtcagggttttacccatgtacacagagataagcaacatatttaataaaaagaaaaggagaatctatatagtatgctttactccaaagctggatgagggagaaaagaggacacgtctccttgagaagggggcatgtgttgagaatggagaaaaggggtaaggcagattactcagaagaactggggtagaagaataggttggatgataaaaggggctgacattagtccctgaaagttttttttaaataacttccaacttttgccttcacctttgccagcagtgatgtgatctgctttcagctgtagtgaagcaaactgcataaaggacattgtgcatgttaggtcttttacttgcctgttggtacatgtttgtaatatttggaaatactctcactgcgaagaaaagtatagttgtgctgtagtgggtagggtgaggaaaataagggtcatcaccagcaaagtcagagtgatgaaaaaactggattacaacactctgcttgactttgcatagataagtaagccaagcagagtgtttcctggatgtagttaaaatacaagcttggagcacaggtaaaaggccaagaggcttggagatgtacatctgagatgtaccaaagggccaagtgcaaagtaagtttgggaagtttagtgtcatataaaaactaataaagaaagggtggtactctgtctcatatcctgaaacgttttgaaaagaatattgaatttgaccagaagggcattgctagtgaatttcaaagagagatttcagttgagctctgaactggaggaagatgggtgatagaaggctggagagggccagtaacaagggttgaaaaaggaaagagtattcaagcgtatgca

SEQ ID NO: 91387 - DNA, 1897 bp, Homo sapiens
tacttagattgtgtagtgaaataagaaatttggttattgtccctagcactcacctttagacatagaagtttctccatttcttttcagggcctggggtaaggcaaagtgtgcacatctgctctgtatattaaaatatcccctcaactcattgaagtggaacaaaaacaaggtcacttgacaggactgtaattgtaatcacactatacagctttacttcctgccctttagtagtaggaccattcccttgtccttaaacatgcttctaaaataccagttttaatggctatatagtctttcatttatgattgtataaggattcattctgtcattgtattgtcattcacataggttgttttcaatcataaaatactgtaatgaacatctgcaagtttagatttttgctctcacctattgtttcctcagacaactgtaagtagtagaattgatggattaaaagatactttttaaaggctctgactcttctaaaatgtgttgttaaactcctcagatctgctaaccagatctttatgctgtacttgtgtgatttatttcgaatctaagtgaaagcctttgtattagttaccctgttaaatcccatcttgccatttgggcagcctattcttagtgtgttttctctgatatcagttaacattatattggctaattccatagaaactaggagactggaaaatgaagataatgtggaaaaacaagagcttgtgaatttgggagtgccctgttcttttaagatgtgatgtgggttaaatgataaacaatgcatcttaaattctttaaaagtggcagaagtaaatggaatttatctggaaaaaaatcaggcgtttattctgatgccctaaattcaggggtgaaatattatctggactagaggaaaattttatgtacattatatggtgttctctattttgacaagcttactttgatattactgctgcaaggtagccccaggagggttgaattgagaagaactgagtattttgaggaacaaaacctaggatagtaggctggagggaattggaggtcagggttttacccatgtacacagagataagcaacatatttaataaaaagaaaaggagaatctatatagtatgctttactccaaagctggatgagggagaaaagaggacacrtctccttgagaagggggcatgtgttgagaatggagaaaaggggtaaggcagattactcagaagaactggggtagaagaataggttggatgataaaaggggctgacattagtccctgaaagttttttttaaataacttccaacttttgccttcacctttgccagcagtgatgtgatctgctttcagctgtagtgaagcaaactgcataaaggacattgtgcatgttaggtcttttacttgcctgttggtacatgtttgtaatatttggaaatactctcactgcgaagaaaagtatagttgtgctgtagtgggtagggtgaggaaaataagggtcatcaccagcaaagtcagagtgatgaaaaaactggattacaacactctgcttgactttgcatagataagtaagccaagcagagtgtttcctggatgtagttaaaatacaagcttggagcacaggtaaaaggccaagaggcttggagatgtacatctgagatgtaccaaagggccaagtgcaaagtaagtttgggaagtttagtgtcatataaaaactaataaagaaagggtggtactctgtctcatatcctgaaacgttttgaaaagaatattgaatttgaccagaagggcattgctagtgaatttcaaagagagatttcagttgagctctgaactggaggaagatgggtgatagaaggctggagagggccagtaacaagggttgaaaaaggaaagagtattcaagcgtatgca

SEQ ID NO: 91388 - DNA, 1897 bp, Homo sapiens
tacttagattgtgtagtgaaataagaaatttggttattgtccctagcactcacctttagacatagaagtttctccatttcttttcagggcctggggtaaggcaaagtgtgcacatctgctctgtatattaaaatatcccctcaactcattgaagtggaacaaaaacaaggtcacttgacaggactgtaattgtaatcacactatacagctttacttcctgccctttagtagtaggaccattcccttgtccttaaacatgcttctaaaataccagttttaatggctatatagtctttcatttatgattgtataaggattcattctgtcattgtattgtcattcacataggttgttttcaatcataaaatactgtaatgaacatctgcaagtttagatttttgctctcacctattgtttcctcagacaactgtaagtagtagaattgatggattaaaagatactttttaaaggctctgactcttctaaaatgtgttgttaaactcctcagatctgctaaccagatctttatgctgtacttgtgtgatttatttcgaatctaagtgaaagcctttgtattagttaccctgttaaatcccatcttgccatttgggcagcctattcttagtgtgttttctctgatatcagttaacattatattggctaattccatagaaactaggagactggaaaatgaagataatgtggaaaaacaagagcttgtgaatttgggagtgccctgttcttttaagatgtgatgtgggttaaatgataaacaatgcatcttaaattctttaaaagtggcagaagtaaatggaatttatctggaaaaaaatcaggcgtttattctgatgccctaaattcaggggtgaaatattatctggactagaggaaaattttatgtacattatatggtgttctctattttgacaagcttactttgatattactgctgcaaggtagccccaggagggttgaattgagaagaactgagtattttgaggaacaaaacctaggatagtaggctggagggaattggaggtcagggttttacccatgtacacagagataagcaacatatttaataaaaagaaaaggagaatctatatagtatgctttactccaaagctggatgagggagaaaagaggacacgtctccttgagaagggggcatgtgttgagaatggagaaaaggggtaaggcagattactcrgaagaactggggtagaagaataggttggatgataaaaggggctgacattagtccctgaaagttttttttaaataacttccaacttttgccttcacctttgccagcagtgatgtgatctgctttcagctgtagtgaagcaaactgcataaaggacattgtgcatgttaggtcttttacttgcctgttggtacatgtttgtaatatttggaaatactctcactgcgaagaaaagtatagttgtgctgtagtgggtagggtgaggaaaataagggtcatcaccagcaaagtcagagtgatgaaaaaactggattacaacactctgcttgactttgcatagataagtaagccaagcagagtgtttcctggatgtagttaaaatacaagcttggagcacaggtaaaaggccaagaggcttggagatgtacatctgagatgtaccaaagggccaagtgcaaagtaagtttgggaagtttagtgtcatataaaaactaataaagaaagggtggtactctgtctcatatcctgaaacgttttgaaaagaatattgaatttgaccagaagggcattgctagtgaatttcaaagagagatttcagttgagctctgaactggaggaagatgggtgatagaaggctggagagggccagtaacaagggttgaaaaaggaaagagtattcaagcgtatgca

SEQ ID NO: 91389 - DNA, 1212 bp, Homo sapiens
cctggacatccgcctggagtaccaacccctgtcactcagagaccccagaaagatgaaaaacggggtggaaaatgcattggaattgtttacagggaggctattctgtggctagaacatttcaataaacctcttttttaggggggaaggggtaagaaggcgctgagggttgtgcttgagtaataaactgcctcagaggaaagcgggttcagtagctgcagggtttgtggtttgctaggaggtggtgtatatttggagagagagctcaccttgtcagcaagaaaaggagaagctgagctgagggccattaccagcaatcctcctccaaaccaagcttggcctctttaaagtgtagctgtttggtacagcatcatttatgtgaaaatggagagggggctacatgcatggttggatatatgtgtttatgtacatatgaatgcattcatgcatgcatgcctgtatgcatttgttagtttatgcatgaaatatccctggaagaatccagcaatatggttacattggttgcctccaggaaggtgagctgaatagcccagagattatatcaattagcagacagactaggctgtctgtcataagaagtgaccccaaaatgcaaggcttaaacaagatagcatttcaattctgtctcacaaagcagggcaggtataatggtgacgaagtgtcagggacccaggatcattccattgtgtggctctgccatcactacagtgttgccttcctcwgcagggaggaggatggctcaccatcacctctgcaatccagccaataagaaagggggagtaaagaaagtgaaaggcacatccacgccctctaggagagccactgaacgttaagcacatggcctccactcacctcccactggccagaactcagtgacttggacacaactaggaaacgccctccttagctgagcattcatgagtatagctaaaattggagattttgtttctaaagaaagaagggcagaataaatataagaggacaacctgtagtctttatctgggataggatgaaagggacattttcactttatatatccttttagtacctttaaaaattttttcctgtaccctcttgatagacctttcagtatcttctgaaccatgtgaattaggaaaaaaaattaagtttgaaaaatatattagtttggaagtcacaaattgagcacatgcatccacctctccactacaccat

SEQ ID NO: 91390 - DNA, 578 bp, Homo sapiens
ctcattcaaacacaaataattaatgttcattttatagtggaagaaaattagttctgtaaaaactgagaaacttgctaatatcaattgccaaataagcaatactgagcgtcttgagccagtgattgccagtctctctcccagcaccaaacatcctgaccttttaagcataggaggggtcatcaaaacatcactgagatggggttaagaacacacctcttgttaaacgtattgatgaatataagtaacaaaagagaatcccttcatgtttttcttcttttacttaatttattttactacagcaacaaaaaattccaaaggatggatgaatgagctctaacaacacatttcatttggatttcttttcaattcttaaatgcattaagtacaaataatctggatatgtgttagaattacttaaatacaacagaagaagaaccagatagacatcatgtattttgaggacctataacttatyattagcttactccaaaggattgtaatgataatagttaactgatgataataactgaacatgtactgtgtattaggcactgtggtattttacatggattatttca

SEQ ID NO: 91391 - DNA, 577 bp, Homo sapiens
tccagaacagaagcagagatcaggacagagccagaaacagggctctcagctgccacttagtgaacactgaggagaagagtttctccagaagcaacttactccccagataaatctaacactttgcctgaaaattggaggctgagcctgtcacgatgactgctgtgggcacasccatatgctgagaggaccacatgcctgggctcaggcatgcggtgatgaatgagcttgtgagattttggaatgagaaggcgggaggggaaagaggctgtcctctagggtttggacacttgtacatcccattggtgctaccgtctgagctcagcccagctgctagaacgcccagcctccttttaggaagggattcctgtctgcttgccccaccagagggccctcactaaggggtgagggcatgtcacttgagggagaggcaaaaagccactccggaaaggaatccaagccgcaaagaagacatcatagtggcctctaaccccaagcacgcagggtggcctcctattggtctgcagggtcatggggggcttcggcagacaggctgcctgtgaggctgcaaagaatctgt

SEQ ID NO: 91392 - DNA, 654 bp, Homo sapiens
gagagaggacttcccactagtccaagatgtggtgactagtttcaagccagagattgaggagcagacctgatgccctttcgggcccctgctaagaacctgattcgaggaaaaggaagtgaagacagtaacgcgtgggcagtggcctcatgtctgaaatgcagagtgagccgagctgggctgsgaacagcgagggtgccaaaggctgcgctgagcagcctgaattccgccagtgctgatgcccacaccaggggtgtgccccgcagtccctccagcaaactcagcttgtgtctcagcccctgtgtccacccagcatgaagcatgggcatcagggggtccagcctgccctgggagagccagcacctcacttactctcccaggtgggagcagctggaggggaatttgaaaggtttccagccgcggttgaggccggcgggcgggggttgggggcagggggcctcctcagctggacacttcccagcccagccagcccaagccccacagggcctgccccactgacggggggctccctgagagccggagcctggcaaagaagcagagaagctagttcccgcaggctggctcttggcaccttctagacccaggcagggcctctttggggtggggaggagggggcatgtgcagaagaggagaggg

SEQ ID NO: 91393 - DNA, 662 bp, Homo sapiens
agccttcacttgcccaacaccaacagacattaggattgatgtggcatggatttcagcccacaacccagctccctgtgactcttcttgtccaccaactgtgatgctcctgggttgttcatgcctgtagcctygcgccccacccctatctgaccaagtcttcatccaaattctgctttcttgaaaaccctgtataatttgtcttgagacttgaatttcatattattctgattgttggccttctaggctttggcaaagttgaaataattaggcactgacttggcatctagccccaaatcacactgttaccctatgaactcctaaatatcgtgagtcttggacctcccactaatgtcacagagttttcacgcaattgcacaagtatctgtgaggcctacaccttacatcttcataactgaggaggctatgcttcttttcatacccaattaaattttttcctgtgtattttacattcatgttctttgcctaattttgtattaggctgtttctatatcttatagatttaaaataaattctagatcctaattatttataaattatacacaatgcaaatatcttctcccattatgttgcttaacatttcattttgaacagacactcttaattttatgtagtcagacttgtcaattgtgattgtgctgtct

SEQ ID NO: 91394 - DNA, 1118 bp, Homo sapiens
tattcaaagagttttacctgtttttatttgatgctgtgggcaaacaaataagaatataaaaagaaaggagtatatgtttctccttatgcctaaaatcacaacccaaactctcacttgttcttgattttacttctctcctgactgcccctgaactagcagagttgtgatgcccttgcttctactgaggccaatcaaactcattgtcctctgtgccatccacttcatttgaagcccatggcttccatgtagccttctctgaacacctctaatcatttctgcctacatcaacatttaaccgaatactatatatatatatatatatatatatatatatatatatatatatatatgtagtattatatatatatagtatttatatatatattattaactaagtccctatattaactgactatatatatatatatatatatatatakagagagagagagagagagagagagagttcactcacatatttaagtcctttactgtaatgataggtacactcacatatttaagtcctctactgtaatgataggtacacttgaccttcctggagagtaggagccacatcattattcttttactaccttaacagtgatggtgtaggatcaggtatatacataggaaatcctcacggattattgacaaccccagacagtgtagaacactaatatcttctgctctgactcattttctaacctgtattcttagagccaactggctacttgatatcctcagcaattagtcatttcaaataaaagagacgaagcagagctcttattttctctttcagacatgagtgtcatcccctgcatatggtaacattatcatcccagtttaaagcaaacaccttgatgctatccttgatttttttcttttccttctctcacatccaatccactagaaatgctatgggtgcaacctccaaaataaaacctgaatctcaatacttctctctatcttgcctgctactctcctggttcaaaccaccatcatctttctctggatcactaaataatatcctaccaattttcccttttttacttaatccccctataattcattctccatgcagttgtcttgctgtttttctaaaacattgatctgatgca

SEQ ID NO: 91395 - DNA, 763 bp, Homo sapiens
catacaattgctacatactacaacatggatgaatcccaaacgtaaacataatactcaatgaaacataatgttcaatgaaaggagacagacaaaaaagaatacaatgtgtgtgattccacttatacagwgttttaaaattaacaaagatcaaagtaaactacagtgttagaagtaagagcagaattagcttagagggaggggtagggatccaaagagaacacaaagtgggggctttttcaagtccttgccatgttctagttcatgacttaagtggcagttacacaactatattttgtgacaattaatttagctatattttagtttattgtactttttgctatgtgttatatttaattttttttgcttttaaaaacttacttctgtaggatttgcagaaataaatatttataaaagtctcattctactatatctgatgactataatgtaataggtttctttgtgccttatgagtatgttctgttctgcacaaatagattctcttgcattgtagcaactagaatatggccaccttgcccttaagtcttagctatagcctgggctagagagaagatgtttgcaaccagaccttgaaccctgttggagtcctagtggagataactgatctaacactttcctgcagggaaaagtgagaacgtggagagcagcctccaaatagaccagcaagcattagactacacagacacataaaccacatcaatatctagagctcagggatgtgaagattttcttccttgtcctcaaa

SEQ ID NO: 91396 - DNA, 1776 bp, Homo sapiens
aaggcatttaccggtgaggatttcaacattgtgccacagatggtaacttgctggcccaatttcccacctccaactcgctcttctgtaaaagctcagctaaatctaatcagaaacatcacgtaaaaagagacctatattgtccaatatacttttaacattttcaaagaaataattgccatcctttttctctctcatcaaacataatgtgtttatgttcatcaaagttaagatatttgaatgaaaataactcaagagaaagagggactcccaagctaatgggacacctttacatgagtggttgttacatgatagttgaccaaactgccttctttgtcaagggtcataggcatagagaaatcaaagatttgtcatttaaattagggaagataagatgtactgtgtttgtctgttgtggatatatctgggtaaaatcttgaacaacaaataagccagaatgcattcagatctgtttaatggaagactgtgtggtgcagctctccaccactgtgcatatgagataagccgtcagcagtagagcaacagctcacatatagtacttagatatgcataattttgagagccctagtggtaagcagggaagaatggatgactggcttggaaaatgtcaaagctgcagtggaattcatctccagctgcttagtagatggctcccaaggccccatcaggaaaggatgcagactctcaaacaaattgactcccatgcttaaatttgttcctttctatctatyttcttagaaacctgagccaatttcagaggagatatctatttgagatcctggagcaaagaaaatcctagaatgatgacatgactatttgtttcctattctctctaaacaatggaacatgttggatacatccccttatgtggtagactgaataataacaagactgtatgatttaagaaagaaaaattataaaaaaccaaatatgtatactttcgttacaagtttctttaactctggctagatttctgtggcaaaaatgatgctttgtggtcatcaaaattaatttgttacttttcccagcctctcttgcactcagacggccatgttgttgagcttttgtcagtggaaaataagcagaaacgttataggttacccccaagcaaatcctactaaaacctactgtgtgattcagcttacccattccttacccactacctgaatgaagaggactccattaaggcaaaggaggcaagatccacatgatggaagaagcctgcatccttgagtcactcttcagtgcaaagcttgtgacctaggtttattggttggtttggtgagacagaaacttatcacggcaagacagagagacttgagcatcatcttttataacagtttgcttatcctagttaatacaatcactgttatgtcacaaatatctataccttggtaattaaaatctgttgatatacagagtgaagataggagtgggaaacagggaggaagctttttcaaaattaagtgagtaatatttgtaaggatctcatacttctctacctgggtacattacatcttgggtttcttcctccaggctcagtcatagacccaactcccttgtcactttatagtatttccctaggcaatttcatctatatctatgagatctatttcctctggtgatttgtcatacagtttataggtctaacttatcctttaaggtcaaaaccagcaaagtcaattttgcacttgacattaactctcaaaaacatttcaaatttaacatctaaaggtaaacgaatgctcctcccatgca

SEQ ID NO: 91397 - DNA, 1776 bp, Homo sapiens
aaggcatttaccggtgaggatttcaacattgtgccacagatggtaacttgctggcccaatttcccacctccaactcgctcttctgtaaaagctcagctaaatctaatcagaaacatcacgtaaaaagagacctatattgtccaatatacttttaacattttcaaagaaataattgccatcctttttctctctcatcaaacataatgtgtttatgttcatcaaagttaagatatttgaatgaaaataactcaagagaaagagggactcccaagctaatgggacacctttacatgagtggttgttacatgatagttgaccaaactgccttctttgtcaagggtcataggcatagagaaatcaaagatttgtcatttaaattagggaagataagatgtactgtgtttgtctgttgtggatatatctgggtaaaatcttgaacaacaaataagccagaatgcattcagatctgtttaatggaagactgtgtggtgcagctctccaccactgtgcatatgagataagccgtcagcagtagagcaacagctcacatatagtacttagatatgcataattttgagagccctagtggtaagcagggaagaatggatgactggcttggaaaatgtcaaagctgcagtggaattcatctccagctgcttagtagatggctcccaaggccccatcaggaaaggatgcagactctcaaacaaattgactcccatgcttaaatttgttcctttctatctattttcttagaaacctgagccaatttcagaggagatatctatttgagatcctggagcaaagaaaatcctagaatgatgacatgactatttgtttcctattctctctaaacaatggaacatgttggatacatccccttatgtggtagactgaataataacaagactgtatgmtttaagaaagaaaaattataaaaaaccaaatatgtatactttcgttacaagtttctttaactctggctagatttctgtggcaaaaatgatgctttgtggtcatcaaaattaatttgttacttttcccagcctctcttgcactcagacggccatgttgttgagcttttgtcagtggaaaataagcagaaacgttataggttacccccaagcaaatcctactaaaacctactgtgtgattcagcttacccattccttacccactacctgaatgaagaggactccattaaggcaaaggaggcaagatccacatgatggaagaagcctgcatccttgagtcactcttcagtgcaaagcttgtgacctaggtttattggttggtttggtgagacagaaacttatcacggcaagacagagagacttgagcatcatcttttataacagtttgcttatcctagttaatacaatcactgttatgtcacaaatatctataccttggtaattaaaatctgttgatatacagagtgaagataggagtgggaaacagggaggaagctttttcaaaattaagtgagtaatatttgtaaggatctcatacttctctacctgggtacattacatcttgggtttcttcctccaggctcagtcatagacccaactcccttgtcactttatagtatttccctaggcaatttcatctatatctatgagatctatttcctctggtgatttgtcatacagtttataggtctaacttatcctttaaggtcaaaaccagcaaagtcaattttgcacttgacattaactctcaaaaacatttcaaatttaacatctaaaggtaaacgaatgctcctcccatgca

SEQ ID NO: 91398 - DNA, 3156 bp, Homo sapiens
ggatccacccacccatccacccaaccatcatgcatccacccatccacctattcatcatccatccacccatctacccatccctccatctacctatccattcacccttatgccatacacactcgactgttaactgtgcagccggatttgatatgtacatgtaattcactaagggcagggaccagagtttatacctggacactcacaggttttttagggctgagtctgttttcctcagtcttacctcctaggggcccttccttttgtggagaaggccttggagctgagatgcagcaaaacctgtttggaacccctcactccactgatcccagccccttccttcctttctatcccgtatcaacaggagaacagtgccccagacttccccacatttccatccctttccctcatcctcgttgacaccctgggccccacccataagaatggccacagaagtcatgggaatcctcacaaaccactttgattttgcttttcctgaacagcctcatcagcctcgcactccccatacaaaaacaagtgctttgcactttttccagcatcctcctagagtgctggacaaagctttggatgtttccctcctcttttggcaatggtacctccagtattcggtagggaaccactcctttgttatcttggtccatttggtgaatgggctgacttcacccttggctccatcaggggacacgtgatgctggtctggccagtgcacagaggccatggcctagaccccatgaccaggtcagaggtggatatatgactgaggctgggacaatgacagtcactcccaatattttcctggaactatgggggaagaaaacagtttttctcttcctactgaactttaaggacagaagtcagaagctgttggggaccagcatgggggtgaggacctgcctgagcacagagtcaactcaaagggaagcagcgagagcttgttggtggtgttgcagagcacctgagtctagccattcctgaaatccatatttccctgcatgtcatgtggcagccatgctgtccagctactcggagctatggttttattgcctgcaattggaaatgccctggccagcatctgcctcctgtcagcaccacctttgggggtcatgcattcctcatactcattagatcagctcctgctagaaagggtattaatgctgcagcctggccgatccacacagctcgagggtccacactgtctcaggctgcctcccatgcttggagctcaggtccaccagtgacctcatgggagcagaacccgctcttctatttgctcccagagccgtgtcctgcatagatttatacaatttatttatactgaaatgtcacatcccatcctggatcagtctctcaaaaatacagctgtcagaagttattttcattaaagtcttttgtagcggagggtacgggaagattgagagggaggaccctcttttgccagcaaaaggaagagcatttaaagaaaaagatcactctggctcagtggtagatttgactttcaggaaagagcttctcttctccaggaacattacacaccggataagtttctgatgggatttgagccacccttcttcagttttccttccattctttacttcctctgggcttgaaaacaggggctgaggcataggccacctaagttccaattaaatcgacagcctccactcctgctgaaaccctcagaggctcccagtgatgtgagaataaaccctaagttccctcctgggtgcattctccctccaaggccctctgtggcctgggccctcctccaggctcccattcccatcccgccggtcaccagatggtggacctgctaggctttgccctggcccaggcttgccttggcacttgtggtgctcgctgtgtggggtgccggtgctgcatcctccacgggactggctccctttaactctccaggcccacagtcacatgtctttggggaagcctgtcctctccatcccatagtgctctgaatgcccttcacagggaattattgccccgaggtgtgcccatgcccgctccttaacttactgctggagaacgtgggttccaggaggcccagggctatggcaggcaccatccccgagggtgaaggaaggacctgacctgccgccggcctgccgcagccctgagcttcgctggacaggggtcctcctggaacacctgtcccactggcttcccagggttgtcccaaggacagactggagagaggggctggcggacggtgctctgatgagaacaggcgggtgctggtggaaggcacccgggcctgctggtggatcctaagtacgttttccttgcatcctttcctttctccctggatgattctgcaatagcactcagcagtgggaagcaagaagcggtaagtggagggcccaggggcctggaaccagcatccccctggagtgcagacatgcagtgcaaccttctctgaagacctgggctttgatcctacagcagtgaagctcccaggctgcttaaccttgggtgtgccatttcacctctctgaccccagtctctttttctctcatggggctgggggaatgtacacaggaggagttgccctggacagcagtggccagcaggtgctrgcagcctggacaacccagcaccatcagactccacagcatgcacatgggccccagtggtgagcacgccccacgacagcctccagcaggggcagctggttccacagggcactgctttggcttctaaaatctggattcaccgtgtgttctcagggtcatgtgcagagggttttgtgcttccttttccaggcaggtgcatcctctgcggcttcggggcagcctgggctaaattccccctgcctgcacatgcatgtgcgtgtctgtctgtcaatagagggataaacatccacccacatgcacacacccatttgcacctacagcttccagctcctcccgctagataaatacacactaacacatgggcgcacacagcataaaagctcggcttccctgggatgatacccaacctgacctctggaggagaatagggcttttcttctcttagggttggagaatttaaaagatagcagggacctaacaaattaggaatgctcactcttttcaatatagaagcacttagcatctctctggtcttagaagccttgggcaacaa

SEQ ID NO: 91399 - DNA, 551 bp, Homo sapiens
caaggaatcctcccacctcggcctctgaaagtgctgggattacaggcatgagccactgcgcccggcctcatccctggctttgaagagagaaggagaggcttcccagcactcagagggacaggaaggaagtgcctttccagcctcagttgtgtacccagcacagcaatactggtaagaaatcaagatagcaaagtcctgcttctgcctttttctagaacagatgtcagcaagctgttcctgtaaaggaatcaggatagcaaagtcctgcttctgcctttttctagaacaaaygtcagcaagctgttcctgaaaaggccaaagtgtacatattttaggctttccacaccctgtggtctctatcgcagctgctcagccctacactttagcatgaaagcagccataaacaatatctaacgaacaggctgggagctggagttagcacacaggccatagtttaccaacccctgttccagaggaaatgaaaaatctctttctgggctaggcatggtggctcatgcctataatctcagtactttgggaggctgaggcag

SEQ ID NO: 91400 - DNA, 658 bp, Homo sapiens
agggaaatataccctactggtggccacgtatactggcgtatctttttacaaggcttctcaccataccctctgacccactaattcttcttgtaggaggctttttaaaaacactacaaagatgttggctgggtacggtggctcacacctgtaatcctggcactttgggaggccaaggcaggcagatcacttgaggtcaggagttcgaaactagcctggccaatatggtgaaaccctatccctactaaaaatacaaaaaagtagccaggtgtggtgacgtgcacctgtaatcccagcaactcaggaggccgaggtaggasaatcatttgaacccaggaggcggaggttgcagggagccaacatcacgccactgcactccagcctgggtgacaaaatgagactccatctcaaaaaaaaaaaaaatttatgagcactgaaaatatatgtacagtgaagcactgcttgaattaatataaaacgaaagaacccagccaataaaggactgcctaactatagctgagaacatccatgtgatcaaatgatacagagatgcaagatggagatcttaggagaataagggtaactgcaggtgctggccaggccgtgcatcacatgctgttaggtaaaagatgacgctgaggagcagccaataatgtgatcc

SEQ ID NO: 91401 - DNA, 658 bp, Homo sapiens
agggaaatataccctactggtggccacgtatactggcgtatctttttacaaggcttctcaccataccctctgacccactaattcttcttgtaggaggctttttaaaaacactacaaagatgttggctgggtacggtggctcacacctgtaatcctggcactttgggaggccaaggcaggcagatcacttgaggtcaggagttcgaaactagcctggccaatatggtgaaaccctatccctactaaaaatacaaaaaagtagccaggtgtggtgacgtgcacctgtaatcccagcaactcaggaggccgaggtaggacaatcatttgaacccaggaggcggaggttgcagggagccaacatcacgccactgcactccagcctgggtgacaaaatgagactccatctcaaaaaaaaaaaaaatttatgagcactgaaaatatatgtacagtgaagcactgcttgaattaatataaaacgaaagaacccagccaataaaggactgcctaactatagctgagaacatccatgtgatcaaatgatacagagatgcaagatggagatcttaggagaatragggtaactgcaggtgctggccaggccgtgcatcacatgctgttaggtaaaagatgacgctgaggagcagccaataatgtgatcc

SEQ ID NO: 91402 - DNA, 749 bp, Homo sapiens
tgactcacacctgtagttccagctgcttgggaggcttaggtgggaggattgcttgagcctgagaggtggaagttgcagtgagttaggattgcrccactgcactccggcctgggtgacagcaagactgtctttaagaaaaaaaaaaattgatgcgtccgattaattatctgatctattaaatgatcaaataaatagaatatttgtttacataggctaaaattatcttcaatgtgtagattcagttaaaaaccatatccagtaaacatatgtgtgcgtgtgtctgttggaagcgaggggctaggggagggatagcattaggagaaatacctaatgtagatgactggctgatgggtgcagcaaaccaccatggcatgtgtaacaaacctgcacgttctgcacatgtatgctagaatttgaagtataataaaaaaaatttttttaactatccagtataatttttcaaagaatattatatttgcttttggaaattgtttttataagaaaattcattgaaaataataatctttcaaaaatgtaacagtaataataattagtatatatttagcttctattatgtagtagggattcttcttacaactttatgatgtaggttctgttgggttccattccagttggacagataaagaagactcagagaagttagtaagtttcacatttctggtgagtagtggagctgggaatcaaatctaggtctgcttgaccctaaagcccacgctcttaactgctgt

SEQ ID NO: 91403 - DNA, 749 bp, Homo sapiens
tgactcacacctgtagttccagctgcttgggaggcttaggtgggaggattgcttgagcctgagaggtggaagttgcagtgagttaggattgcgccactgcactccggcctgggtgacagcaagactgtctttaagaaaaaaaaaaattgatgcgtccgattaattatctgatctattaaatgatcamataaatagaatatttgtttacataggctaaaattatcttcaatgtgtagattcagttaaaaaccatatccagtaaacatatgtgtgcgtgtgtctgttggaagcgaggggctaggggagggatagcattaggagaaatacctaatgtagatgactggctgatgggtgcagcaaaccaccatggcatgtgtaacaaacctgcacgttctgcacatgtatgctagaatttgaagtataataaaaaaaatttttttaactatccagtataatttttcaaagaatattatatttgcttttggaaattgtttttataagaaaattcattgaaaataataatctttcaaaaatgtaacagtaataataattagtatatatttagcttctattatgtagtagggattcttcttacaactttatgatgtaggttctgttgggttccattccagttggacagataaagaagactcagagaagttagtaagtttcacatttctggtgagtagtggagctgggaatcaaatctaggtctgcttgaccctaaagcccacgctcttaactgctgt

SEQ ID NO: 91404 - DNA, 749 bp, Homo sapiens
tgactcacacctgtagttccagctgcttgggaggcttaggtgggaggattgcttgagcctgagaggtggaagttgcagtgagttaggattgcgccactgcactccggcctgggtgacagcaagactgtctttaagaaaaaaaaaaattgatgcgtccgattaattatctgatctattaaatgatcaaataaatagaatatttgtttacataggctaaaattatcttcaatgtgtagattcagttaaaaaccatatccagtaaacatatgtgtgcgtgtgtctgttggaagcgaggggctaggggagggatagcattaggagaaatacctaatgtagatgactggctgatgggtgcagcaaaccaccatggcatgtgtaacaaacctgcacgttctgcacatgtatsctagaatttgaagtataataaaaaaaatttttttaactatccagtataatttttcaaagaatattatatttgcttttggaaattgtttttataagaaaattcattgaaaataataatctttcaaaaatgtaacagtaataataattagtatatatttagcttctattatgtagtagggattcttcttacaactttatgatgtaggttctgttgggttccattccagttggacagataaagaagactcagagaagttagtaagtttcacatttctggtgagtagtggagctgggaatcaaatctaggtctgcttgaccctaaagcccacgctcttaactgctgt

SEQ ID NO: 91405 - DNA, 860 bp, Homo sapiens
agtgggagataaaagaatcatggaggtggtttcccccacactgttctcatggtagtgaataagttttataaggggaatggttttataaggggaaacccctttcacttgactcttattttctctcttttctgctgccatgtaagatgtgcctttcgccttccactatgattgtgaggcctccccagccacttggaactgtgagtccattaaacctctatttctgtataaattactcagtctcaggtatgtctctatcagcagtgtgaaaatggactaatacatctgatatgcacttttacccaggatacgcaaagtattataaatcaataataagaaatagtcaactaactttagaacgtcagtgaaagtggaacagaaaaaaaatgaacattgttactaaagaagaaacatggatggcaaatagcacatgaaatatattagatcacatgtagcactgaaacttttaacaatttgaaaggcaagaaagtatattcttttataattgaatacttggcaatgtttttaagtaattttttaaaagtttttatattaatgtattctctagcaatattacattattcttgkttattatcttattctttgtatcaattttggcaaattgtatttccttaaaaactgataatatgcactgtttttcaagtttatgacgaaaaattgtataaattatttttagtttaaaaatatctaacattatttatttatttcaagcctttttattttatacatgtgccttacaatcaatatatccaaataaggccaggtgtggtggctcactcctgtaatcccagctctttaggaggctgaggtgggaggattgcttgagctcaggagttcaggac

SEQ ID NO: 91406 - DNA, 860 bp, Homo sapiens
agtgggagataaaagaatcatggaggtggtttcccccacactgttctcatggtagtgaataagttttataaggggaatggttttataaggggaaacccctttcacttgactcttattttctctcttttctgctgccatgtaagatgtgcctttcgccttccactatgattgtgaggcctccccagccacttggaactgtgagtccattaaacctctatttctgtataaattactcagtctcaggtatgtctctatcagcagtgtgaaaatggactaatacatctgatatgcacttttacccaggatacgcaaagtattataaatcaataataagaaatagtcaactaactttagaacgtcagtgaaagtggaacagaaaaaaaatgaacattgttactaaagaagaaacatggatggcaaatagcacatgaaatatattagatcacatgtagcactgaaacttttaacaatttgaaaggcaagaaagtatattcttttataattgaatacttggcaatgtttttaagtaattttttaaaagtttttatattaatgtattctctagcaatattacattattcttgtttattatcttattctttgkatcaattttggcaaattgtatttccttaaaaactgataatatgcactgtttttcaagtttatgacgaaaaattgtataaattatttttagtttaaaaatatctaacattatttatttatttcaagcctttttattttatacatgtgccttacaatcaatatatccaaataaggccaggtgtggtggctcactcctgtaatcccagctctttaggaggctgaggtgggaggattgcttgagctcaggagttcaggac

SEQ ID NO: 91407 - DNA, 730 bp, Homo sapiens
  misc_feature (1)...(730): n = A,T,C or G
tttaccccatagaaattctaaagttccaagggaagctttgcaattaaggatagcttttcacagcatcactggtcagcttgtcctgctgtctacactgctggaaatctcactgaattctccaggtattcagtagcattctctgacaggaaaggggagaaggaaatccttccttgtttccaagttaaagcttcttcatcatcaaaatcctgagtttccttctgcccctctttaactcctgcaggttgcctttccccccacaggacatcagggtcctgaaatcctgttcaagggatgctttcccctctaacagcactagattcttagctgttcccttcttcctgaccctctctcttcctgtggcttctccatcacttcttgagcctggttttccttgagcacatctgactctccttctcaacttgtcttgccttcttatctttgaaatgttggtgttscagatgtttcatcctcagtcctcttttgtgtcctatattctcttctaagctaggtatttttaggtaagtcacttaccctctctgatactcagttacacatatgtggtaggggtgaaagagagtggactgaatagtttctaaagtttaatcccatactaaaattcagtgataataactcagaaggaagaaatgacagtggagatagagaactgcaaatcctgaatgaaaatagatgggcttgggagaatggatnttggtaagaatacctgagagaa

SEQ ID NO: 91408 - DNA, 686 bp, Homo sapiens
accaattccggacacactgggaagttaggttatcataagatcattcagcagatattccaaacatctggcctttgatttgctctatctccatcttgccatgaaggagcttagtctggaggtagaggagcagaaagcagggctcctgctgagaccaactcctgttgtcaacctgttctagtacccaagctaacaggcattaatttttttgttcaatttcttaatgagaggaaagtggaaaaaatcctrtatcagacacagggaatgtgaataaataaataataattaaaaatacatcaaaaggccgggcacaatggctcaggcctgtaatcccagcactttgagaggccgaggcgggcagataacaaggtcaggagatcgagaccatcctgtgaatgatgaaaccacgtctctactgaaaacacacacacacaaaaaaaagttagctggacatggaggcgggcgcctgtgtcccagctactcggaaggctgaggcgggagaatggcgtgaacccggaaggtggagcttgcagtgagccgagactgcgccactgcactacagcctgggtgacagagtgagactccgtctcaaaaaaaaagaaatgcatcaagaatacatgaacatatatattcattccagatacctaactttgaaatattaaaggcaaatgatttactatcttttaaaa

SEQ ID NO: 91409 - DNA, 953 bp, Homo sapiens
agactaaatttaaattatgatgataattttgataataaaattccaaaagaaaacatggctgggcatggttgctaacgcctgtaatcccagcactttgggaggctgaggtgggtggatcacgaggtcaggagatcaagaccatcctggctaacacagtgaaaccccgtctctactaaaaatccaaaaaataaaaataaaaaaataaaaaataaaattagccgggcatggtggcaggcacctgtagtcccagctactcgggaggctgaggcagaagaatggcgtaaacccaggaggtggagcttgcagagagccgagagcgcgccactgcactccagcctgggcgacagagcgagactaggtatcaaaaaaaaaaaaaaaaaaaaaaaaaagaaagaaagaaaacattagagttgttttaaaaaaaactaataacctaataacaataatagaatgaggagtcaagatattttgaaagagtagcagacacaacctttgtcttggaaacctgatacacaagaaatttttgaagtataatgtatttgatttttagtgacaactggaatattttaagattgtaactctgaatctctgtttatattcagttatattttattagtattttcrtaactaattgagataggtctgtgcttgagatttttactagaaaatgtatgtaaaattgtatttatgacacgtttaatatattatgcaaataaaacaggttttgtattttttatttcagaaaataagtgaatgctttttgtatttttattttatgaaattataaagtattagttataatcatttaaaaataatataattttgattttatctattattttctgttatgattaaacagaaagttgtttaggtaaatcatacccttattttatattttttaaaatatataatatttccttattagtttatagcagaaagaaagtacttttttt

SEQ ID NO: 91410 - DNA, 1439 bp, Homo sapiens
tgtccattatgataaayatggactcactgacatttccacattaagttaaaatgattttgcagagtatagcctgtacacatcaaaatccttagaggctctaaaactgtatcaagttgagcagcaagtattagctttaaggacattgcttgttagcatcagccaattagatattctggacacaaatagggaacacacttgggcaatcaatataaaaagcatctcttttgtgaaattaattggaaaattagattttgtgcctaagtataaattctaaacgattcactaaaatggatcaaaacagctttcaaactaaccacttctgttgactaagtcagcttccttcaccacttgcatcttaattttaaaacaaattaaaagacaccagagaatgaaggcaaatatcctgatatttcaggtctgcttcctgaggaagtccttttatattttagttaccaagttatctgctttaatgtccctcattgctttagcatgccttttttcaccttgacggatggtctctattatgaaaaatgtattataaagctcggaatttgctttcatatgcactgaaattcaacctttgcaggccaaagtaatatcatttacactatgttccacatattattacttaagttagcagagcgtttgaagatgggaagtttaaaaatatgcttttctgaaagggtaagaatttatcagaacgggagagacactaaatgatcctgagctcaagaataactttttgtaagtatgtacggtggaaaaaaacactagacagaaattaggagtcttggattctagtttggcctcagtggtaactatggcagcttaggaaaatcatttggtttcatttgtttttggaaacatacgtactcgagtattttgaatattcattcatataacgcagtggtttaatgtatatttgcaatgggaaagctgaattctatgaaaatttttttgatttcacttttaagcatgtttcaaagagtctatgggcttaaatacgtgtttcatttaatgtaataaaagcacccagaatatgtgaaaacaaaaatcatgattttggggccaggtgtgtcttcaaggaaaaaggcttgtgtatctacacagcagacaaatacctctgaaagtctgatccacaaacagcatgaagaaattcaactggtgatttgacaaaataatttcaggcaccagttgatggtatggttggtggaacttgtaactcctgattctgccaaaaatgtaagttcatatgccaaaggcatatagtttgatgtaaaatttggaagtatagctgcttttgtttgatcacccaaataagtatgttcccctatagaacaccccagctcaataaacaaatttgccattagcaaaaattcaagcactgtcaaaattgtgttgcttcctcctattgccaaagcttttgcactgtgggtgca

SEQ ID NO: 91411 - DNA, 507 bp, Homo sapiens
ctaacttcctaggctgtaaatttggtttggaatggtacaaatctcatatggaagtttgtaagggtaaaatcaattattctctataaatcactcacaacagtagctggcactgttagccatttttastttttctggtataaattaccaaactcatatgtaaggcgtggccaagtgctacggtgaaatcatcatcagagccacttcactctcaaattttatatttttgaacttaaatgtctctctttccaagttagcactcatctttctctttcttaataaagtctgtttgaactcactatgatcctttagaaaaccagctatggttccaggccattgtgggtgacctacattcctttgtttaattgagcagatattgatggactcatactctgttgaacatatatgctatctgccccatattttgtaattttctttattatatcaaaagccacagccacctctttttgattgagatgagtgtttctgatttacatttccattcattta

SEQ ID NO: 91412 - DNA, 507 bp, Homo sapiens
ctaacttcctaggctgtaaatttggtttggaatggtacaaatctcatatggaagtttgtaagggtaaaatcaattattctctataaatcactcacaacagtagctggcactgttagccatttttactttttctggtataaattaccaaactcatatgtaaggcgtggccaagtgctayggtgaaatcatcatcagagccacttcactctcaaattttatatttttgaacttaaatgtctctctttccaagttagcactcatctttctctttcttaataaagtctgtttgaactcactatgatcctttagaaaaccagctatggttccaggccattgtgggtgacctacattcctttgtttaattgagcagatattgatggactcatactctgttgaacatatatgctatctgccccatattttgtaattttctttattatatcaaaagccacagccacctctttttgattgagatgagtgtttctgatttacatttccattcattta

SEQ ID NO: 91413 - DNA, 507 bp, Homo sapiens
ctaacttcctaggctgtaaatttggtttggaatggtacaaatctcatatggaagtttgtaagggtaaaatcaattattctctataaatcactcacaacagtagctggcactgttagccatttttactttttctggtataaattaccaaactcatatgtaaggcgtggccaagtgctacggtgaaatcatcatcagagccacttcactctcaaattttatatttttgaacttaaatgtctytctttccaagttagcactcatctttctctttcttaataaagtctgtttgaactcactatgatcctttagaaaaccagctatggttccaggccattgtgggtgacctacattcctttgtttaattgagcagatattgatggactcatactctgttgaacatatatgctatctgccccatattttgtaattttctttattatatcaaaagccacagccacctctttttgattgagatgagtgtttctgatttacatttccattcattta

SEQ ID NO: 91414 - DNA, 507 bp, Homo sapiens
ctaacttcctaggctgtaaatttggtttggaatggtacaaatctcatatggaagtttgtaagggtaaaatcaattattctctataaatcactcacaacagtagctggcactgttagccatttttactttttctggtataaattaccaaactcatatgtaaggcgtggccaagtgctacggtgaaatcatcatcagagccacttcactctcaaattttatatttttgaacttaaatgtctctctttccaagttagcactcatctttctctttcttaataaagtctgtttgaactcactatgatcctttagaaaaccagctatggttccaggccattgtgggtgacctacattcctttgtttaattgagcagatattgatggactcatactctgttgaacatatatgctatctgccccatattttgtaattttctttattatatcaaaagccacagccacctctttttgattgagatgagtgtttctgatttacatttycattcattta

SEQ ID NO: 91415 - DNA, 965 bp, Homo sapiens
tttgtttcctggacctgggcaagattctgcatttgtgccagttcttaggtgtagtttcaggagcagggtgccccctggtgagagagagttcccttgggtgaagtgttcaccatgggactgagttgtacttttgttccagctgtttttgaaacttttatggtgatgtgcgccttcagacaaggagctaagttaagaattggctgtggagagggaagttggagagttactgtttaacgagtacagggttttagttgcagaagatgaaaaagttatggaaaatgcgtagttatgaaattgcagatgttcttaatgccacaggactgtacccttaaaaatggttaaaatgtccaggtgtgggtcaccatgcctgtaatcccaggactttgggaggccaaggcaggaggattgcttgaagacaggagtttgaggctgcagtgagctatggttatgctattgctcttcagcctgggcaagtgagcgagactcctttctctattaaaaaaaaaaaaaaaggaaaaaaatagttaaagaaaaataataggccgggwgtagtggctcatgcctgtaatcctagcattttgggagaccaaggcaggtggatcacttgaggtcaggagttcgagaccagcttggctaacatggtaaaaccccatctctactaaaaatacaaaaattaactgggcgtggtggtgggcacctgtaatcccaggctgaggcaggagaattgcttgaaccgctcgggaggtggaggttgcagtgagctgagattgccccactgcactccagcctgggaaacagagtgagactctgtctcaaaaaaaaaaaaaggaaaaaaaaataataaagagctgtagggcaggaattgtacaaggctaatatccaagatattatgtaattttccttgttttcctttctttccattcaggcagatgtgattctccttgtcacgtgctctatcaggtgcg

SEQ ID NO: 91416 - DNA, 672 bp, Homo sapiens
acattgcatttagtatatcctgctttttagattaacaatatgtcacaacttacacaaataaatagcctttatggagactggagttatgacaactaaatgcatcgcacggtcctcgattgggattctgatcagggaaaaaaatgttataaagaacattatttgggctgggcgtggtggctcacacctgtaatcctagcattttgggagaccatggtgtgcagattgtctgagctccggagtttgagactagcctgggcaacttggcaaaacccgtctctactaaaaaatacaaaaagttagcctggcgtggtgacacacgcctgtagtcccagctactcagraggctgaggcaggagaatcgcttggacctgggaggcggagattgcagtgagccaagatcacgctagtgcactccagcctgggcaacagagtgagactctgtctcaaaaaacaacaataacaacaacaacaacaacaaaacattatttggactattggtaacatttgatttatggaaagtagataatagtgttgtatcaatatttctgattttgataattgtcctgaaattatataggagaatgcccttgtttttaagaaatatatactaaaatatttggaagtaaaagagtatgatatctgtgactttttctcagaaggcttaaaaaaaaa

SEQ ID NO: 91417 - DNA, 811 bp, Homo sapiens
tagctggaatcacaggcatgtgtcaccacacctggctaatttttttttaaattttactttctttttcttttttttttttgagacggggtcttgctctgtccctcaggctggagtgcagtggcgcaatcttggctcactggaacctccgcctcccgggttcaagcaattctcctgcctcagcctcccaagtagctgggattacaggtgcccacgaccacgcccagctaatttttttctgtatttttagtaaagacagggtttcaccatgttggccaggctcgtctcaaactcctgagctcaagcgatccacccactgtggcctaccaaagtgctgggattacagacatgagccaccgcacaaggccgggaactgcattttcaatagtgtggaagtttggaagctcatacagcctctgagtagttagtgtgattggaccagagggtgagattagggatatggcaagaagtgaagccagggaggaagacaggacctgygggcagggcccatgtcctagagggcattgaagttaggcaaagggtgcaggggaggcagagcagggctttgagcaggacgtggccacttgtagcaaggagatgtagcagttgcaccattgggggctgtatttgtcaggatgcttttgactgcaagtaacaggaatccaattcaatgaggtttaaacatcaaagaaaatgtgttatcctcccgaacatcttgagacagcatggctccagggaagattaatttaggggctcatggtatcatcgaaaactcaggtctctccatctttctgcttcaccatcctcaatgtgt

SEQ ID NO: 91418 - DNA, 744 bp, Homo sapiens
gttcattgtagcactatttgcaacagcaaagacatggaaccaaaccaggtgcccatctgtggactggataaagaaaatgtacatatactcaccccatgaaatacaacacagccataaaaacatgaaatcaagccttttgcagaaacatagataaaactgaaggccattttcctaaggaaattaatgcagaaacagaaaacaaaatatcacatgttttcacttataagtgtgagctaaacaatgggtagtcatggacataaagatgggaacaatagaaattggggatactaagggagaaggaaaggagtgggggcaagtgttgaaaaactattgggtaccatgctcactacctggatgacagaatcatttgtatccccaaaccatggcatcacgcaatatacccaagtaataagcctgcatatgtacccctcaaacataaaacaaaaattaaaaaataaaagaggatwaaaaaaatgggacctgagtcttggtatagaaaccgtgttcctcctataccctcttggctgtagaaatgcttcttatattcccaattggacaatgccttcaccttgaagtccaatacaggctctcaggatcctccataacacctcttccactgctgccagaacaataaccaaggtcaagtcacaatgtagcatgtcagagttatcctgggtttgcacagaaggaaaggaactctattaaatggtgctgcagaaccttgtgtacagggaacaagagagt

SEQ ID NO: 91419 - DNA, 715 bp, Homo sapiens
aacccatcataactcttttgtccatgcttttatgaatgtaccgttagaaatttcaagaatgggccgggcactgtgactcacgcytgtaatcctagcactttgggagggagaggagggtggatcacaaggtcaggagttcgagaccagcctgacaaatatggtgaaacaccatctctactaaaaatacaaaaattagctgggcatggtggcgggcgcctgtagtcccagctactcgggaggctgaggcaggagaattgcttgaacctgggaggtagaggttgcagtgagccgagattgcaactctgcactcaagcgtggctgacagagtgagacttggtctcaaaaaaaaaaaaagaaatttcaagaatgctgacaacactcaagtatcagtagtctttcctggcaacagtttcatatgtacaatattctaatttactaactaagactgcaatactgaccatataaaccatgatggccaattgcaccaatccacataaatctattccaccaaagagagaccatattgaaggtgagctgtattaaaaataaaaacagaagggaaaaaataactttccgctcttcctcctaggaaaatattcaaagactttttcatgtgagaagcctttcagtttatatcatttgtaataactcctttcatttattccatcacaatccatgaaaaactgtaggatgattaaatgaaaaaaaaaaaagg

SEQ ID NO: 91420 - DNA, 739 bp, Homo sapiens
aggtgttctttatatcacccaagctgtagatctttcagattatgttaaaaaactatatagtatctgttttcctaatcatgttccttaatagatgaacattttaaagattttagaattaataagagattctcctcccttttcaatgatgtcaatatcctaggcaacatgttatagcattttaaattacattatgagataatttttctttagattcatgtaacttaggaattgcaacacatataaacataagtaagaaacaaataagagtaattttcagcagagggttatataacttttttagatctgctgtcatcctgatcttgaaaattaagatggcatctagaatgcctgaaatatagaaaggtatatttggtttggaaagaagggacatgataaacagaggaacttatttaacaagtatctattatctattgatttagatgctattcgtacattcattgttcattaactgtattgttatcacattgctgtaaaggactgcccaagactgggtaatttacgaaaaaaaaaaagttttaattgactcaacagtttcacatgactggaggagcctcaggaaacttacaatcatgatggaagggaaagaggcacatcttacatggcagcaggtgaaagagagtaaatatgtgtagaaggaaatgtcagacrcttataaaaccatcagatttcataagaactcactcactattattagaacagcatgggaacactgccccca

SEQ ID NO: 91421 - DNA, 709 bp, Homo sapiens
ggatccaccacaagtagactcacccataaaataaagcacaagtggtttgtacttttataacatttcttttcatggcagggcatggtggctcgcacctgtaatcccagcactttgggaggccgaggctggcagatcacaaggtcaggaatttgagaccagcctggccaacagggtgaaactccttctctactaaaaatataaaaattagctgggcgaggtggcacactcctgtaatcccagctacttgggaggctgaggcaggagaatcgcttgaacccaggaggcagaggttgcggtgagccragatcgcgccactgcactccagcctgggtgacagagcaagactccttcttggaaaaataaaataagacctcttttcatccaaggagagggaaagtggcaattctaacataatggccaatatgatcagtaggatacagctggcaaaaacttagcctcacttctagcatttattcctatagctccatatattgagagcattttctttccattcaccaatgacatgtcattcatatcattaacagaaataagtttagttcttagattttgacttgaaatcccctgggtagtccctttttactcagtatcaacgactgttggagaaaccataaagaactccccctaacactggttctgactacacagcttttctaggagggctgaggttgccggtgtaagagaaggagtt

SEQ ID NO: 91422 - DNA, 706 bp, Homo sapiens
gactgggaaatacacatatgtgctgtatcacttgcatacatttgagaaactaatgattatccataggcacaaatacagacacacaccatatacacacacataagagcattgccttctcctcaaaattcactgattcccatactttattttttagataagctgaacacacaatagcaaattaatgttttaagaaccataacagatggctggcaagatggctaggaagagctctggtctgcagctcccagtgagatcaaagaagaaggcaggtgatttctgcatttccaattgaggtacccacttcgtctcattgggactggttagacagtgggtgcagcccatggagggtgagcagaagcagggtgrggcatcacctcacctgggaagtgcaaggggtcagagaacttcctcccctagccaagggaagctgttagggactgtgccatgaggaacagtgctatctggcccagacactatgcttttcccatggttttcgcaacccacagaccaggagattccctcgggtgcctacaccaccagggccctgggtttcaagcacaaaactgggcagccatttgggcagacaccgagctagctgcaggagtttttttcataccccagtggtgtatggaatgccagcgagacagaaccattcactcccctggaaagggggctgaagtcagggagccaagaggtcttgctcagt

SEQ ID NO: 91423 - DNA, 706 bp, Homo sapiens
gactgggaaatacacatatgtgctgtatcacttgcatacatttgagaaactaatgattatccataggcacaaatacagacacacaccatatacacacacataagagcattgccttctcctcaaaattcactgattcccatactttattttttagataagctgaacacacaatagcaaattaatgttttaagaaccataacagatggctggcaagatggctaggaagagctctggtctgcagctcccagtgagatcaaagaagaaggcaggtgatttctgcatttccaattgaggtacccacttcgtctcattgggactggttagacagtgggtgcagcccatggagggtgagcagaagcagggtgaggcatcacctcacctgggaagtgcaaggggtcagagaacttcctcccctagccaagggaagctgttagggactgtgccatgaggaacagtgctatctggcccagacactatgcttttcccatggttttcgcaacccacagaccaggagattccctcgggtgcctacaccaccagggccctgggtttcaagyacaaaactgggcagccatttgggcagacaccgagctagctgcaggagtttttttcataccccagtggtgtatggaatgccagcgagacagaaccattcactcccctggaaagggggctgaagtcagggagccaagaggtcttgctcagt

SEQ ID NO: 91424 - DNA, 1193 bp, Homo sapiens
tttgaaagtagagacaggagattttgttaacatactgaatgtgagataaatatatatatatataatattgaatgtgatatatataattgtatatattgcaaatatattttgaatgggttcaaagaggatgtgaaaattggagtataatatttttaaagaaatttgatgaagaaaattgggcaatagctaaaggagaaagttatatatatattgaatagtcataaatgattccatgtttttttttttttttttttttttgagatggagtctcgctctgtcgcccaggctggagtgcagtggcgcaatctcggctcactgcaagctccgcttcccgggttcaygccattctcctgcctcagcctcccgagtagctgggactacaggcgcccgccaccgcgcccggctaattttttgtatttttagtagagacggggtttcgccttgttaaccaggatggtctcgatctcctgacctcatgatccacccgcctcggcctcccaaagtgctgggattacaggcgtgagccaccgcgcccggccctccatgtttttataatctgtgcagctaggaaggtgagggtgaattgtttactgttatcagaaagactgcaggaagagcagattttctatataatacaggatcttttggacataagtttgagatacaaagaaactgacaggagacatacagtcagaaattctatgtatatatgattatattttatatatatggaatttggaagtttatgggagagttctggcaggaaacacgtatttggaattattctctttacaaatgatattaaagctataaataggatgagattaataaagggttacttgcagattgaaaagttatgatttccaaagactgaatctgggatatttcaacatcaagaagcaaataatcaaagaggaaactttaaaggagacaaagaataagtggtcagtaggataagaggaaagtcttgagagtattgttctgaaatccagtggaaaaaaatatgtaggtacatgtgtatagaaatcactaatacttttgggtttctcagtctccttgtatttccttagttgttttcttaatatttaaatatttatctatctacctatccctccatagatatagatatacctttctgtatatatagtgagagagcaatcattttaaggaatctatttaaatgaatgtatgaa

SEQ ID NO: 91425 - DNA, 1899 bp, Homo sapiens
aagaagagagcaacataatctatggtgataaacatcagaatagtgataaactaaggggagaagggtgggattgcctggaaagggactcttggacctttttaaatattttttattttttgaatttgaaaaaaattttttatagggatgggggtcttgccatgttgcccaggctggtctcaaattgctgggctcagtcaatctttccacctcagcctcccaagtgctgggattacaagcatgagctaccatgcctggcatccacagacatttttgggatgatggaaattttctataacttgatctgggtgatgatttcatttgtcaatatttaataacctgtcctagttaatatatttgaattttacactgtgtgaattacatttcaatagtctgctctttagcataaacatggcgggtgggggatggaagatggagacaagccagtgtagaccatggcaaggagtttggattttattttaaactcagtaaaagctcactttcatcccccctcaccccccacaaaatccctcctaatatctcaaacagaagaacagctatgactcacaatttcattagtggaaactgcaggcaagcctctttgagaagaggcatttcaccttggtgtggtggttcaatgcatgcccagatgtaaggcacctccaaagttccaatgayctagtgcaggtgtgtttttgatggccctggctgtatcatgctggcaattcagtggtaagccttgttctctagtcacaaataagggttgcagccattgtaaggaacagtaaaaaccagttatgaccacaccactgcattagtggaagctaccaacatggcggtttgaaaggtgacattttaccctttgggatattttctgctcaatggtgagacatagggcatgtcctgggccctaggtatgtgcaatgtggggtctcctttttgcctgactgcactgcattgcaggagtcagtggtaaaccctgctaaaggactcagtcagtgcacggattgaaaacaaaccaaaagacagctcagtttctccccaaaaagatgccacacactgccattttggattggaatcaaggttctgcattcacaacacaaagtgccaatcactataccaccgtggcacgccataaacttgctggcagatgctgagttttctttaacactttcgatgtaaacatattcacaatattttgttcttgcatcacttgctttctgacaggttgagtggtaagaagcacaaattcctatattctgttctttccaaaaatgtttagtttgatcagaatgcaggatgttgaacaagataactagcctatccacttcaaaaacttagcaacaaggacaaagaaatggagggacagctctaggtaagtaaagtgcaattgaggaactttacttggaacctagggaagcaacatcagtaccacaagtcacttctctctctctcttaaataaatattatatatacacatacatatatatattacatgtgtatataatatataatacacacacacacacacacacacagagtttaattaagcaaagaagaattcctgaatcagaaatttccagaaccagaataggttcagagaggttccagtgctaccatgtggtagaagaagatttatggatggaaaagggaaagtgacttacagaaaacagaagtgaggtacaaaaataatcggattggctacagctctgagtttgtcttatttgaacccagtttgaacagttggccacctttgattggctaaaactcagtcattggctcaagagtaggttacaggttgtttacacatccagttaggttacagttcactacatatggagaaacctttaatatatggatagaggcagcttccagctaatgatatgtatatatctttaagat

SEQ ID NO: 91426 - DNA, 1469 bp, Homo sapiens
tctcccagtccaggttattttgaaacccagtgttaattatctatgggaaaaaaaatatccttttaagtgtggtggcccatgcttttaatctctgcactttcggaggccaaggtgggcatatcactggaagctaggagtttgagaccagcctggccaacaaggcaaaaccccatctctactaaaaacacaaaaattagctaggtatggtggtgtacatctgtaatcccaactactcagaaggctgtggcaggagaattgcttgaacccggaaggcagaggtagcagtgagccttgcgccgccgcactccagcctggataacagagcaagactctgactcaaaaaaaaaaaaaagaaaaatccagtatccttttagacctttggctccaagggccatccatcccctgataatgaagtatggattattacaatcctgtcagtcccaacgtaacacccccatttttcctgttaataagccaaacggggaatatagatttgttcaggatcttagggcagttaatgaggcattagttccagtcacccaatagttcctaatctttatacaataataactcaagtccctgaagatgcttattggttcatagtattaaatttaaaagatgttttctttcacacacctttacacctggacacccaatacatttttgcatttgaatggactaatccagacactcatgctgcatctcagcttacctggactgtcctgtccccaaggttttaggacaatccccatctgtttggcaatgcattggcaaaagaggtatgggaactacagttaattaatggatccctcttaccatatgtgtatcacctattaatttccagccctactaggggaagactctgagawacatacaacttcaagtccttaattttgaaacaaaacaagggtatcaggtatccccccgaaaggcccaaatttctgtccaaagggtcacgtatttgggacacattctcactcctgggaccaggatcttgacccagggatgaaaagagaccatcctggcactccaggtccctcaaattcctttttgagaatagctggattctgctgggtttggattcccaggtttgggctcatagcaaaaccactctacgaacctccaaaagtgagtggttataagcctttgaattgcaatggagcctgtcaaaaggcattcttagccttaaaagaaaagccagggacagcccctgcttcaagactctcgaacttagaaaaacctttcatcctctatgtggatgaataacaagggacagctttggatgttctaactcgaagggtcaggaattgcctcagaccagtggcttatttctctaaacagctagaccaggtggcagctgagtgaccaggaagcttgagatctgtggctaccatcactctattggtagaagaagccagtaagtttaccttgggacaacaagtagatgccataccacccccgccccccac

SEQ ID NO: 91427 - DNA, 1469 bp, Homo sapiens
tctcccagtccaggttattttgaaacccagtgttaattatctatgggaaaaaaaatatccttttaagtgtggtggcccatgcttttaatctctgcactttcggaggccaaggtgggcatatcactggaagctaggagtttgagaccagcctggccaacaaggcaaaaccccatctctactaaaaacacaaaaattagctaggtatggtggtgtacatctgtaatcccaactactcagaaggctgtggcaggagaattgcttgaacccggaaggcagaggtagcagtgagccttgcgccgccgcactccagcctggataacagagcaagactctgactcaaaaaaaaaaaaaagaaaaatccagtatccttttagacctttggctccaagggccatccatcccctgataatgaagtatggattattacaatcctgtcagtcccaacgtaacacccccatttttcctgttaataagccaaacggggaatatagatttgttcaggatcttagggcagttaatgaggcattagttccagtcacccaatagttcctaatctttatacaataataactcaagtccctgaagatgcttattggttcatagtattaaatttaaaagatgttttctttcacacacctttacacctggacacccaatacatttttgcatttgaatggactaatccagacactcatgctgcatctcagcttacctggactgtcctgtccccaaggttttaggacaatccccatctgtttggcaatgcattggcaaaagaggtatgggaactacagttaattaatggatccctcttaccatatgtgtatcacctattaatttccagccctactaggggaagactctgagaaacatacaacttcaagtccttaattttgaaacaaaacaagggtatcaggtatccccccgaaaggcccaaatttctgtccaaagggtcacgtatttgggacacattctcactcctgggaccaggatcttgacccagggatgaaaagagaccatcctggcactccaggtccctcaaattcctttttgagaatagctggattctgctgsgtttggattcccaggtttgggctcatagcaaaaccactctacgaacctccaaaagtgagtggttataagcctttgaattgcaatggagcctgtcaaaaggcattcttagccttaaaagaaaagccagggacagcccctgcttcaagactctcgaacttagaaaaacctttcatcctctatgtggatgaataacaagggacagctttggatgttctaactcgaagggtcaggaattgcctcagaccagtggcttatttctctaaacagctagaccaggtggcagctgagtgaccaggaagcttgagatctgtggctaccatcactctattggtagaagaagccagtaagtttaccttgggacaacaagtagatgccataccacccccgccccccac

SEQ ID NO: 91428 - DNA, 1469 bp, Homo sapiens
tctcccagtccaggttattttgaaacccagtgttaattatctatgggaaaaaaaatatccttttaagtgtggtggcccatgcttttaatctctgcactttcggaggccaaggtgggcatatcactggaagctaggagtttgagaccagcctggccaacaaggcaaaaccccatctctactaaaaacacaaaaattagctaggtatggtggtgtacatctgtaatcccaactactcagaaggctgtggcaggagaattgcttgaacccggaaggcagaggtagcagtgagccttgcgccgccgcactccagcctggataacagagcaagactctgactcaaaaaaaaaaaaaagaaaaatccagtatccttttagacctttggctccaagggccatccatcccctgataatgaagtatggattattacaatcctgtcagtcccaacgtaacacccccatttttcctgttaataagccaaacggggaatatagatttgttcaggatcttagggcagttaatgaggcattagttccagtcacccaatagttcctaatctttatacaataataactcaagtccctgaagatgcttattggttcatagtattaaatttaaaagatgttttctttcacacacctttacacctggacacccaatacatttttgcatttgaatggactaatccagacactcatgctgcatctcagcttacctggactgtcctgtccccaaggttttaggacaatccccatctgtttggcaatgcattggcaaaagaggtatgggaactacagttaattaatggatccctcttaccatatgtgtatcacctattaatttccagccctactaggggaagactctgagaaacatacaacttcaagtccttaattttgaaacaaaacaagggtatcaggtatccccccgaaaggcccaaatttctgtccaaagggtcacgtatttgggacacattctcactcctgggaccaggatcttgacccagggatgaaaagagaccatcctggcactccaggtccctcaaattcctttttgagaatagctggattctgctgggtttggattcccaggtttgggctcrtagcaaaaccactctacgaacctccaaaagtgagtggttataagcctttgaattgcaatggagcctgtcaaaaggcattcttagccttaaaagaaaagccagggacagcccctgcttcaagactctcgaacttagaaaaacctttcatcctctatgtggatgaataacaagggacagctttggatgttctaactcgaagggtcaggaattgcctcagaccagtggcttatttctctaaacagctagaccaggtggcagctgagtgaccaggaagcttgagatctgtggctaccatcactctattggtagaagaagccagtaagtttaccttgggacaacaagtagatgccataccacccccgccccccac

SEQ ID NO: 91429 - DNA, 1469 bp, Homo sapiens
tctcccagtccaggttattttgaaacccagtgttaattatctatgggaaaaaaaatatccttttaagtgtggtggcccatgcttttaatctctgcactttcggaggccaaggtgggcatatcactggaagctaggagtttgagaccagcctggccaacaaggcaaaaccccatctctactaaaaacacaaaaattagctaggtatggtggtgtacatctgtaatcccaactactcagaaggctgtggcaggagaattgcttgaacccggaaggcagaggtagcagtgagccttgcgccgccgcactccagcctggataacagagcaagactctgactcaaaaaaaaaaaaaagaaaaatccagtatccttttagacctttggctccaagggccatccatcccctgataatgaagtatggattattacaatcctgtcagtcccaacgtaacacccccatttttcctgttaataagccaaacggggaatatagatttgttcaggatcttagggcagttaatgaggcattagttccagtcacccaatagttcctaatctttatacaataataactcaagtccctgaagatgcttattggttcatagtattaaatttaaaagatgttttctttcacacacctttacacctggacacccaatacatttttgcatttgaatggactaatccagacactcatgctgcatctcagcttacctggactgtcctgtccccaaggttttaggacaatccccatctgtttggcaatgcattggcaaaagaggtatgggaactacagttaattaatggatccctcttaccatatgtgtatcacctattaatttccagccctactaggggaagactctgagaaacatacaacttcaagtccttaattttgaaacaaaacaagggtatcaggtatccccccgaaaggcccaaatttctgtccaaagggtcacgtatttgggacacattctcactcctgggaccaggatcttgacccagggatgaaaagagaccatcctggcactccaggtccctcaaattcctttttgagaatagctggattctgctgggtttggattcccaggtttgggctcatagcaaaaccactctaygaacctccaaaagtgagtggttataagcctttgaattgcaatggagcctgtcaaaaggcattcttagccttaaaagaaaagccagggacagcccctgcttcaagactctcgaacttagaaaaacctttcatcctctatgtggatgaataacaagggacagctttggatgttctaactcgaagggtcaggaattgcctcagaccagtggcttatttctctaaacagctagaccaggtggcagctgagtgaccaggaagcttgagatctgtggctaccatcactctattggtagaagaagccagtaagtttaccttgggacaacaagtagatgccataccacccccgccccccac

SEQ ID NO: 91430 - DNA, 1469 bp, Homo sapiens
tctcccagtccaggttattttgaaacccagtgttaattatctatgggaaaaaaaatatccttttaagtgtggtggcccatgcttttaatctctgcactttcggaggccaaggtgggcatatcactggaagctaggagtttgagaccagcctggccaacaaggcaaaaccccatctctactaaaaacacaaaaattagctaggtatggtggtgtacatctgtaatcccaactactcagaaggctgtggcaggagaattgcttgaacccggaaggcagaggtagcagtgagccttgcgccgccgcactccagcctggataacagagcaagactctgactcaaaaaaaaaaaaaagaaaaatccagtatccttttagacctttggctccaagggccatccatcccctgataatgaagtatggattattacaatcctgtcagtcccaacgtaacacccccatttttcctgttaataagccaaacggggaatatagatttgttcaggatcttagggcagttaatgaggcattagttccagtcacccaatagttcctaatctttatacaataataactcaagtccctgaagatgcttattggttcatagtattaaatttaaaagatgttttctttcacacacctttacacctggacacccaatacatttttgcatttgaatggactaatccagacactcatgctgcatctcagcttacctggactgtcctgtccccaaggttttaggacaatccccatctgtttggcaatgcattggcaaaagaggtatgggaactacagttaattaatggatccctcttaccatatgtgtatcacctattaatttccagccctactaggggaagactctgagaaacatacaacttcaagtccttaattttgaaacaaaacaagggtatcaggtatccccccgaaaggcccaaatttctgtccaaagggtcacgtatttgggacacattctcactcctgggaccaggatcttgacccagggatgaaaagagaccatcctggcactccaggtccctcaaattcctttttgagaatagctggattctgctgggtttggattcccaggtttgggctcatagcaaaaccactctacgaacctccaaaagtgagtggtyataagcctttgaattgcaatggagcctgtcaaaaggcattcttagccttaaaagaaaagccagggacagcccctgcttcaagactctcgaacttagaaaaacctttcatcctctatgtggatgaataacaagggacagctttggatgttctaactcgaagggtcaggaattgcctcagaccagtggcttatttctctaaacagctagaccaggtggcagctgagtgaccaggaagcttgagatctgtggctaccatcactctattggtagaagaagccagtaagtttaccttgggacaacaagtagatgccataccacccccgccccccac

SEQ ID NO: 91431 - DNA, 1469 bp, Homo sapiens
tctcccagtccaggttattttgaaacccagtgttaattatctatgggaaaaaaaatatccttttaagtgtggtggcccatgcttttaatctctgcactttcggaggccaaggtgggcatatcactggaagctaggagtttgagaccagcctggccaacaaggcaaaaccccatctctactaaaaacacaaaaattagctaggtatggtggtgtacatctgtaatcccaactactcagaaggctgtggcaggagaattgcttgaacccggaaggcagaggtagcagtgagccttgcgccgccgcactccagcctggataacagagcaagactctgactcaaaaaaaaaaaaaagaaaaatccagtatccttttagacctttggctccaagggccatccatcccctgataatgaagtatggattattacaatcctgtcagtcccaacgtaacacccccatttttcctgttaataagccaaacggggaatatagatttgttcaggatcttagggcagttaatgaggcattagttccagtcacccaatagttcctaatctttatacaataataactcaagtccctgaagatgcttattggttcatagtattaaatttaaaagatgttttctttcacacacctttacacctggacacccaatacatttttgcatttgaatggactaatccagacactcatgctgcatctcagcttacctggactgtcctgtccccaaggttttaggacaatccccatctgtttggcaatgcattggcaaaagaggtatgggaactacagttaattaatggatccctcttaccatatgtgtatcacctattaatttccagccctactaggggaagactctgagaaacatacaacttcaagtccttaattttgaaacaaaacaagggtatcaggtatccccccgaaaggcccaaatttctgtccaaagggtcacgtatttgggacacattctcactcctgggaccaggatcttgacccagggatgaaaagagaccatcctggcactccaggtccctcaaattcctttttgagaatagctggattctgctgggtttggattcccaggtttgggctcatagcaaaaccactctacgaacctccaaaagtgagtggttataagcctttgaattgcaatggagmctgtcaaaaggcattcttagccttaaaagaaaagccagggacagcccctgcttcaagactctcgaacttagaaaaacctttcatcctctatgtggatgaataacaagggacagctttggatgttctaactcgaagggtcaggaattgcctcagaccagtggcttatttctctaaacagctagaccaggtggcagctgagtgaccaggaagcttgagatctgtggctaccatcactctattggtagaagaagccagtaagtttaccttgggacaacaagtagatgccataccacccccgccccccac

SEQ ID NO: 91432 - DNA, 717 bp, Homo sapiens
taactttgcctttgcacatagagcctgtttgtacaagattatacagaatctgagcaaataaaacttactatttggcaaaccatgaatttctctcccacctttcactcagcaagaattgtccctcaggggcaattgattccgatgttgaaaataatcagtttttctttcatctctgaagaaaaaattacctgtgtgtgcgaattcaatttctaggaagttagatgtggtagttgctgtttttaataaacagtattaactgaaaatgatgagaatcaccagggtggctgtgccaatgagaaaaacagagatacgggtgtccaagcagctgtgaactttatggtgtgaccaggtgggtctgctgcagccctgctgggacctcaggggtaagttattacaagataggtgtggcgtgaagstgtagcttccttcaccagtattgaatgcagcattgcatccaaggcattcatttagccattctttaattcaacttaaaatacctgtcaagtgacaactatagaccatctactagatcactgttaccaaaagtgtgacctatggagcatccgttgacctgggagcttgttagaaatgcagaatttcaggtcccaccccagtcctctgaataagaacctggatattaacaagatctgtaagtgattctcatgtccattaatatttgacaagcacttggccagatgacaagtgttaagagccagg

SEQ ID NO: 91433 - DNA, 600 bp, Homo sapiens
tccaggttgggctgggttgcaggctgctccctttccctgmacggggccgtgctctgcgctcagcgcttctcctggaagcctcgccaagcctgcctctgctgcagcaggtgcttttctggtggcttctgcatcacaggcttcccctgtgattctcctccagtgtctactgctgagttaagagaagaaatgtttctcaattctttcttcccaggtttaatgtttcttcctgatgtttgcagtttaccagctgccctggtcagatgaagcaagtatcacggcactaataaaagggttgtgctttatccttaaaaatataattacaagtcccacatattttctttttcagcctttaccaagtaagtaagctttccccgtatgcccaccattcgatgctccagttcttccctagtggcagatgtaacccaggtatcatctgtggtctccctgccctttgaaattgctgagaaaactgggctcaaccccctttctatcttgctgtttccttctccagattcagaaaaactctgacagctgagtaaagcaaggcagcttgtgtatgtgggtgcgagaggaagcgtgtgagtgaatgcaggcctgtgt

SEQ ID NO: 91434 - DNA, 600 bp, Homo sapiens
tccaggttgggctgggttgcaggctgctccctttccctgaacggggccgtgctctgcrctcagcgcttctcctggaagcctcgccaagcctgcctctgctgcagcaggtgcttttctggtggcttctgcatcacaggcttcccctgtgattctcctccagtgtctactgctgagttaagagaagaaatgtttctcaattctttcttcccaggtttaatgtttcttcctgatgtttgcagtttaccagctgccctggtcagatgaagcaagtatcacggcactaataaaagggttgtgctttatccttaaaaatataattacaagtcccacatattttctttttcagcctttaccaagtaagtaagctttccccgtatgcccaccattcgatgctccagttcttccctagtggcagatgtaacccaggtatcatctgtggtctccctgccctttgaaattgctgagaaaactgggctcaaccccctttctatcttgctgtttccttctccagattcagaaaaactctgacagctgagtaaagcaaggcagcttgtgtatgtgggtgcgagaggaagcgtgtgagtgaatgcaggcctgtgt

SEQ ID NO: 91435 - DNA, 600 bp, Homo sapiens
tccaggttgggctgggttgcaggctgctccctttccctgaacggggccgtgctctgcgctcagcgcttctcctggaagcctcgccaagcctgcctctgctgcagcaggtgcttttctggtggcttctgcatcacaggcttcccctgtgattctcctccagtgtctactgctgagttaagagaagaaatgtttctcaattctttcttcccaggtttaatgtttcttcctgatgtttgcagtttaccagctgycctggtcagatgaagcaagtatcacggcactaataaaagggttgtgctttatccttaaaaatataattacaagtcccacatattttctttttcagcctttaccaagtaagtaagctttccccgtatgcccaccattcgatgctccagttcttccctagtggcagatgtaacccaggtatcatctgtggtctccctgccctttgaaattgctgagaaaactgggctcaaccccctttctatcttgctgtttccttctccagattcagaaaaactctgacagctgagtaaagcaaggcagcttgtgtatgtgggtgcgagaggaagcgtgtgagtgaatgcaggcctgtgt

SEQ ID NO: 91436 - DNA, 600 bp, Homo sapiens
tccaggttgggctgggttgcaggctgctccctttccctgaacggggccgtgctctgcgctcagcgcttctcctggaagcctcgccaagcctgcctctgctgcagcaggtgcttttctggtggcttctgcatcacaggcttcccctgtgattctcctccagtgtctactgctgagttaagagaagaaatgtttctcaattctttcttcccaggtttaatgtttcttcctgatgtttgcagtttaccagctgccctggtcagatgaagcaagtatcacggcactaataaaagggttgtgctttatccttaaaaayataattacaagtcccacatattttctttttcagcctttaccaagtaagtaagctttccccgtatgcccaccattcgatgctccagttcttccctagtggcagatgtaacccaggtatcatctgtggtctccctgccctttgaaattgctgagaaaactgggctcaaccccctttctatcttgctgtttccttctccagattcagaaaaactctgacagctgagtaaagcaaggcagcttgtgtatgtgggtgcgagaggaagcgtgtgagtgaatgcaggcctgtgt

SEQ ID NO: 91437 - DNA, 600 bp, Homo sapiens
tccaggttgggctgggttgcaggctgctccctttccctgaacggggccgtgctctgcgctcagcgcttctcctggaagcctcgccaagcctgcctctgctgcagcaggtgcttttctggtggcttctgcatcacaggcttcccctgtgattctcctccagtgtctactgctgagttaagagaagaaatgtttctcaattctttcttcccaggtttaatgtttcttcctgatgtttgcagtttaccagctgccctggtcagatgaagcaagtatcacggcactaataaaagggttgtgctttatccttaaaaatataattacaagtcccacatattttctttttcagcctttaccaagtaagtaagctttccccgtatgcccaccattcgatgytccagttcttccctagtggcagatgtaacccaggtatcatctgtggtctccctgccctttgaaattgctgagaaaactgggctcaaccccctttctatcttgctgtttccttctccagattcagaaaaactctgacagctgagtaaagcaaggcagcttgtgtatgtgggtgcgagaggaagcgtgtgagtgaatgcaggcctgtgt

SEQ ID NO: 91438 - DNA, 1027 bp, Homo sapiens
gacctgtaagccccctccctgcttcgagttgtcccgcctttctggacagagccaacatacatctcacacgtgttgaaagatgtgttatgtctccctaaaaagtataaaaccaagctgtgccccaaccaccttgggcacatgccaggacttcctgagactgagtcacgggcactcatccctaactttggcaaaataaactttctaaattaactgagagctgtctgtctcagatatctggggttcacaaagggcccacagtgtgctggttttggcgagtcgctctcttttctgtctctctctgtcacttggatctgactctctcctttttattagcatctctctcttgtagtctgagtccctgtcctctcatgcccaggtaccccaggactaagggaccatgagatctgctgagacctgccagtggccacgacagctgcaggagcaggtgacctccgtccgtggcygtctcctggcaggggagatggcgctggctgagtgttccagtttcccatcaaagcctgatgctctgcagactagacacggaatctttcccatgggagctcccaagctcccttttgtcctaatagaattgtagatctttaatttttgaagcagaacttctttggcctgccagactcttaaaagttctctgtttcttaaaggaggattttatctgttcaatgttatcagacagctggaagggaaactgcaggccatctaggcatctggtgttaggcagaagttgaattttcgttttgttgacaggaacataggacaagagggtgttttacacacagccagcctattttattaaataaagttctccataaatgatgatgattttttccatgtagactaaatgactaaggagaggaatttctcttggtcagctttttttaagtgcttgtgatattttgttgttattgtagatctcaagtccttgaataatttggagtttttttctctcctttttatttcagtaaatttactttctcattttctaagtcaaacttgataagcatcttgt

SEQ ID NO: 91439 - DNA, 922 bp, Homo sapiens
gcctcaggcagtgagggcctaggacctgggagactccgggagcagggcagggaagccgggagagaaactccatccaatgggcatctgttgcaggtgcgttcctggctgcctgcccgtctcactctggctctacacaggaagctggcaaactccggacactctggagtcaactaacatctgagtcagggtcagatgcagcagccaccactccagggagactggtggatggtcaggcaatggggaggccgcacttgcttgacgtccaactgggcacttcatttcacagcctaacagggttccattttgctaattttaagtaggatcacttattttaaaatagagacagtgtttatattttagccccatgtcagactgtagtgtgttaatgaaaggcaaattccaaagtccaatccagggagggcacagtaacatttaaataatttactaaagtttcttgtgaacaggtgaatgtctgtatgcagttctcatagaagatgtattgaggaggcatgaacatacttttgttaaaatccaatcaaatttaaagagtaaattatttttctaggtcaggtatggtggctcacgccaccaacagtttgggaggctgaggtgggtggatcacctgaggtcaggagttcgagaccagcctggccaacatggtgaaacctatctctactaaaaacacaaaaaattagctgagcctggtggcggacacctgtaatcccagctactcaggagactgaggcagcagaattgcttgaacccgggaggcagaggttgcagtgagccaagatggcaccactgcactccagtctgggcaasagagtgcgactatgtctcaaataaaatgaaataaaataaaataaaataaaataaaataaaataaagaggcaatagagacagaaaaacaaaatacaatgca

SEQ ID NO: 91440 - DNA, 1289 bp, Homo sapiens
aaccattaccctttgaagtcacttcgtttcatgattattcatgccactttgtgaactccatgtttttatttattttttttagagacggagtcttgctctgtcacccaggctaaagtgcaatggcatgatcttggctcactgcaacctccgcctcccaggttcaagcaattctcctgtctcagcctcctgagtagctgggattacaggcgcccaccaccatgcccagcaaatttttgtatttttagtagagacggggtttcaccatgttggccaggccggtctcraactcctgaccttgtgatccgcctgcctcagcctcccaaagtgctgggattccaggtgtgagccaccgtgcccagccctccatgttttagaatactctgagaatgctaaaatggatggatgtgtagctgctgtcataagtctactgaaatacagtcgagcgtgctctaaatttccaagcctctgctcacattaaccagatacgtctctttcaaacattcaaacaaatactctaggtctcctcagacactgagttccagcatggctgctataaaaagaaagccctcacctccgaggtgttaccactttcatacgctttgtgttcagcaaacaccagagacacaacctcccctggcctgcactgaaccccgagtcccaaaagacaggggatgacaaacaccctctttattttttccagtggacataagaaaaggcagaggtggcaccctggctggaactggccctcacctcaccgactgtggtccggccatagagccacaccttggaaacaggtttccagtctctgtggggcactgacgccggtccagtgagaggggctctgcgcagggagtcgaggggctgtggacgctagctgaccagccgggaccatcacccacagtagagagaaaagcctgtccttcgggcctgtctcagaggcctagacaaggacaggacggggttgctgtccctcacctcacgatcccccacccccagaccctcactatcagccacactgtggggcccagtgagcttggataaaggctggtgtggcacaatgaagacatccaggtagggctttgagggccatttaaatgacaccacctagctccaaggctgctggagaaaaccagccctgactcccttagccccagcaaattctaaccatggagggagcgttttgtatgcggggctgggtgcataattaagctgctcttcccccgtgggcaccaccacattgtttactcctggggaactaccggccacatttcaccgtgaagcaaaatgca

SEQ ID NO: 91441 - DNA, 1289 bp, Homo sapiens
aaccattaccctttgaagtcacttcgtttcatgattattcatgccactttgtgaactccatgtttttatttattttttttagagacggagtcttgctctgtcacccaggctaaagtgcaatggcatgatcttggctcactgcaacctccgcctcccaggttcaagcaattctcctgtctcagcctcctgagtagctgggattacaggcgcccaccaccatgcccagcaaatttttgtatttttagtagagacggggtttcaccatgttggccaggccggtctcaaactcctgaccttgtgatccgcctgcctcagcctcccaaagtgctgggattccaggygtgagccaccgtgcccagccctccatgttttagaatactctgagaatgctaaaatggatggatgtgtagctgctgtcataagtctactgaaatacagtcgagcgtgctctaaatttccaagcctctgctcacattaaccagatacgtctctttcaaacattcaaacaaatactctaggtctcctcagacactgagttccagcatggctgctataaaaagaaagccctcacctccgaggtgttaccactttcatacgctttgtgttcagcaaacaccagagacacaacctcccctggcctgcactgaaccccgagtcccaaaagacaggggatgacaaacaccctctttattttttccagtggacataagaaaaggcagaggtggcaccctggctggaactggccctcacctcaccgactgtggtccggccatagagccacaccttggaaacaggtttccagtctctgtggggcactgacgccggtccagtgagaggggctctgcgcagggagtcgaggggctgtggacgctagctgaccagccgggaccatcacccacagtagagagaaaagcctgtccttcgggcctgtctcagaggcctagacaaggacaggacggggttgctgtccctcacctcacgatcccccacccccagaccctcactatcagccacactgtggggcccagtgagcttggataaaggctggtgtggcacaatgaagacatccaggtagggctttgagggccatttaaatgacaccacctagctccaaggctgctggagaaaaccagccctgactcccttagccccagcaaattctaaccatggagggagcgttttgtatgcggggctgggtgcataattaagctgctcttcccccgtgggcaccaccacattgtttactcctggggaactaccggccacatttcaccgtgaagcaaaatgca

SEQ ID NO: 91442 - DNA, 1289 bp, Homo sapiens
aaccattaccctttgaagtcacttcgtttcatgattattcatgccactttgtgaactccatgtttttatttattttttttagagacggagtcttgctctgtcacccaggctaaagtgcaatggcatgatcttggctcactgcaacctccgcctcccaggttcaagcaattctcctgtctcagcctcctgagtagctgggattacaggcgcccaccaccatgcccagcaaatttttgtatttttagtagagacggggtttcaccatgttggccaggccggtctcaaactcctgaccttgtgatccgcctgcctcagcctcccaaagtgctgggattccaggtgtgagccaccgtgcccagccctccatgttttagaatactctgagaatgctaaaatggatggatgtgtagctgctgtcataagtctactgaaatacagtcgagcgtgctctaaatttccaagcctctgctcacattaaccagatacgtctctttcaaacattcaaacaaatactctaggtctcctcagacactgagttccagcatggctgctataaaaagaaagccctcacctccgaggtgttaccactttcatacgctttgtgttcagcaaacaccagagacacaacctcccctggcctgcrctgaaccccgagtcccaaaagacaggggatgacaaacaccctctttattttttccagtggacataagaaaaggcagaggtggcaccctggctggaactggccctcacctcaccgactgtggtccggccatagagccacaccttggaaacaggtttccagtctctgtggggcactgacgccggtccagtgagaggggctctgcgcagggagtcgaggggctgtggacgctagctgaccagccgggaccatcacccacagtagagagaaaagcctgtccttcgggcctgtctcagaggcctagacaaggacaggacggggttgctgtccctcacctcacgatcccccacccccagaccctcactatcagccacactgtggggcccagtgagcttggataaaggctggtgtggcacaatgaagacatccaggtagggctttgagggccatttaaatgacaccacctagctccaaggctgctggagaaaaccagccctgactcccttagccccagcaaattctaaccatggagggagcgttttgtatgcggggctgggtgcataattaagctgctcttcccccgtgggcaccaccacattgtttactcctggggaactaccggccacatttcaccgtgaagcaaaatgca

SEQ ID NO: 91443 - DNA, 1284 bp, Homo sapiens
gtgtggtgtttgtgtgagtgtgtgtggggtatgagtgtgtggagtgtgtgtatgtgagtggtatgagtgtgtgtgagtgtgtgtgtggtatcagtgtagagtgggtgtatgagtgtgtctgtgtgtctgtggtattagggtgtgtgtgtgcgtgtaagggtgtgtgtgcttctgcagaaatcatgtcctcactcccccatggtttgctaggtccaccagggacacaggctcctcttctgagccctgcccctcagtcccatctcaccctgatccctgacggggagaggcaagcctggttcttccccacgcgtatgtgcacactctcacatatgtgtgcgcactctggccctcgcactcacccgcacatgcctgcctccgctgcctgccctggccgccaacctgcccagcctgtgagctccatcctcagccgccccccgcccagggcattccagcaggagccgccctctcagccctgactcgactctagctgccctggaaccaggctactccggttatggtctcccgagcccgggcagcgccgtccgccttggttgggtggagagcttcttttctcaagcccccctgtgcggccatgcaccctgttcctgctgctgtagcctgagggtccccttctctaccctgatcctctcccagctcctttcgagatctgagcagatgtgaggccctggacaaaaagggcctgggaacccagtgacttaatcgctgagcctctctgagcaccaggctgagtcagccccaggggatgggatccacacagcctcccctccagctccgtgacccggggccgtttctcaccctctctggccctcgttataaagcgggcacgtcttcgcccattctagggtggctgtgctgttggcagaggtggtgtgcagccagcctgtctcgcagacagggcycgcctgggtgtgccaacagcacctggttcatcagttaccttactctcctgctgcccctgtaaaacctatacagggccaagctctctcgctggcccaggatggaaactcctgcgttcctgggactctgactctcacgcagtcagaatgtcgccctcagttttgtaattagcacacgtcggttgagcatattcactaaacgttgccctccccctgcccagccgatagctgggacgcccaccagaggctgccacgctctcctcctggccctcctggctgctgtccaggaatcctgggtcccaggaggaggaggggtgggattcagggccaaggtggcttcccccagccaggggctcctccctcctgg

SEQ ID NO: 91444 - DNA, 1284 bp, Homo sapiens
gtgtggtgtttgtgtgagtgtgtgtggggtatgagtgtgtggagtgtgtgtatgtgagtggtatgagtgtgtgtgagtgtgtgtgtggtatcagtgtagagtgggtgtatgagtgtgtctgtgtgtctgtggtattagggtgtgtgtgtgcgtgtaagggtgtgtgtgcttctgcagaaatcatgtcctcactcccccatggtttgctaggtccaccagggacacaggctcctcttctgagccctgcccctcagtcccatctcaccctgatccctgacggggagaggcaagcctggttcttccccacgcgtatgtgcacactctcacatatgtgtgcgcactctggccctcgcactcacccgcacatgcctgcctccgctgcctgccctggccgccaacctgcccagcctgtgagctccatcctcagccgccccccgcccagggcattccagcaggagccgccctctcagccctgactcgactctagctgccctggaaccaggctactccggttatggtctcccgagcccgggcagcgccgtccgccttggttgggtggagagcttcttttctcaagcccccctgtgcggccatgcaccctgttcctgctgctgtagcctgagggtccccttctctaccctgatcctctcccagctcctttcgagatctgagcagatgtgaggccctggacaaaaagggcctgggaacccagtgacttaatcgctgagcctctctgagcaccaggctgagtcagccccaggggatgggatccacacagcctcccctccagctccgtgacccggggccgtttctcaccctctctggccctcgttataaagcgggcacgtcttcgcccattctagggtggctgtgctgttggcagaggtggtgtgcagccagcctgtctcgcagacagggcccgcctgggtgtgccaacagcacctggttcatcagttaccttactctcctgctgcccctgtaaaacctatacagggccaagctctctcgctggcccaggatggaaactcctgcgttcctgggactctgactctcacgcagtcagaatgtcgccctcagttttgtaattagcacacgtyggttgagcatattcactaaacgttgccctccccctgcccagccgatagctgggacgcccaccagaggctgccacgctctcctcctggccctcctggctgctgtccaggaatcctgggtcccaggaggaggaggggtgggattcagggccaaggtggcttcccccagccaggggctcctccctcctgg

SEQ ID NO: 91445 - DNA, 938 bp, Homo sapiens
atgagggggagccatgtccagtccaggcttcaaggcactggcctgcccaccagacaactggggtgttcatgccatattctgtcctccctgcagccagccccaccaaagaccctctaggatgtgctggcattctaatagtttcttataagactgactttttacatcatygcacaatgtgtctgtaaaataatatctattcttactcatgtgtagggcatctccccaactggattcccacacacagatacatctcttctcctgtgcatgaagcctgctgactttcttcatttgagcaaatacagcctagtcttaaccacccatggcaataccctacatagataacatatctaccctatgtagacaacattaaactacattttcacctatacatatgccacctgttgatttttccaaggggcatttatgtttccaaaaggatcacattttacactaaatagacaaatcctttagaatggcagagccaggcataacacacagcagtcgtttgcgcatggtgcagcagccggacagcacctaaaccatgccaccgacagggctgacactaccttctgtaatatttctcatcatcattctctaagtgcttttaagacacttcttatgacccactttttacaagaaaatcttaatttaagctcaggctctgcctcctattggctagatgtgcactcaggcaagtcactgagctttactcaatttccatccccaggctcccaaagccaaggagatcaaagggaaaatgcctttgaacagtacctggttttctttattttgccatcccagcttttctgttttctcatttgccctgagcctgtctgtgctgacagcttgctgctagcaacatgcctgcctctcaaagtgctctcccgccttctctaatgagagatgtccaacctcaagagggctgagaaatcagataa

SEQ ID NO: 91446 - DNA, 646 bp, Homo sapiens
  misc_feature (1)...(646): n = A,T,C or G
aattgcaccccctttctttttctttatgtaattttttaacatgaactatgggccctagggctcaaaggcaataagattctttgcccaagggcaaacactctgttgcccactaaggtccacagagaaatccataacccggaggggtgcaggtgacccccatcagggatttgtgattatcctgtgtagactcgttatatacagtctcagttcgttttgctatgtggtagcagggaaagaaaaaaaggcacatccaagcctgaaatgccaacatagatcagtaatgtgtgttccagcctagggattctttcctgtcatatcttttttttctttttgagatggattctygctctgtctcccaggctggagtgcagtggcacgatcttggctcactgcaacctctgcctcctggcttccagccattctcctgcctcagcctccgtagtagctgggattacaggcgcctgtcaccacgcctggctaanttttttgcatttttagtagagatggggttccacatggtctctatctcctgacctggtgatctgtccacctgggccttccaagcgctggaattactttcgtgagccaccatgcctggcccatatcttaagtcatattaaagcaagggactcaagaatgtgtctgc

SEQ ID NO: 91447 - DNA, 1670 bp, Homo sapiens
gaacatggagagctgtgcccagcccacctgctgatgctgctgcctggggacctcacttgcagaccagtgccctcaagaagcggctgtgtttccttccatgcaaagatgtgaagggacacaaatgcacagcccaggagagaaagccggaggagctgaggggttttactctgaagaagacttgaaatggacagggtagctgccttcaaatgcctgaagacgtgctgttatcgagtcaggatccagtgtttctgagctggggccaagatcaacagtcaggggactacagggcgatggagccctgcttcatctaagaaaccattcacttatagatttcaccattgaaagatggcgggagctctcaggaggtggagggaatggaccatcacagaggtgctaacaggaagaagaacctcagcaaggggctggcagcaggagagtctgagtccagtggcctttaaggctcagttcaacctgaggtccctggartttctaaaatgtgtctctgctctttcgttcctgcaccattttctaaagcatgttggcacgtcaagttcctccgtcaacctcaagtaagggtcagctccagtgcctccaggttcctgagtgggtgtgggagcagccacccagaggggcgagtccctccagacccaggcacatccctgaagctagtcctggttttcaatgcatggcatttgagtttctaaataataggttcagaagcagtgatgaatcactcccgctatgggaaggcattgccggtattaactctaacgtgtctttaattggtgtcgttcctgaaaaagagagattttttttcagcatgcctcagcaataagaaagctttcaagaaacatcccaaattttcatacctcaacccctttcagctctaatttgtgttaattcaattaagggcatgtaatttggctgtcaccaaaattaaatataaagaaaaatgtatattaatgcaaaggttgaagagttaggcacacacaatccaagaagtttttaaaaagttctatttcctcctatagcaagaacttagtaggaaagagagggagagaagaaaggaaaaggaaaaagcagtgagaaaaccctacacagcccttgcttacaagttgctttattgtacaagaagatggaaaatcagacatgctacaaaatttaaacaggcaaattgcagtcagaaccggttgtctctaacttcctaatttatacatgtaattcctattctgtgtatttacaacaccgccatgctcttgtatgatgagccttctcattaagcaccacaacatattccaaaagcagacccagggatgactgggctttgctcttgccgagcacaggctcatgcaggaccaaaacagggactgccacaaacatcgccacaaggacgccatcctaggctcttacaggatgtgcttctagttaaaagagatgtagtaaaaggcgaggctcacatagcacagctcctggagatgtcacttctagtaaagtggccttctgaaaatgcaaggcgcctctgagtttcacccaagcagttgtgggggtcctggtcccccagttcaggcccagtggggtggatgcagcaatgggatgtgaatcccctcagggagggtgcatgcggtggtttccagggttaccttcctgagttcacttcgttagttcacagt

SEQ ID NO: 91448 - DNA, 570 bp, Homo sapiens
atcacctcccaccaggtcctgcccccaacaccggaatcacagctctgagatttgggaggggacacggagccaaaccacatgacccaggagcaggagtcccagactcaacaaccccggaagggaagattgcttcttatcttagaggaatgccccaccaccaccaccgaacggaagaaaagaaagcatccatctgggttttaatgtaactttaggaaaaaatagcagaggtacaacgattttctttcccccaaaataacaaaaaaacaaaaaacactctgaaaatctgaaatagtaaagcaagaggcaggaggaacgagcattggaatttttttggtgtggttatattatccctaaaataaccctccagttccaggactatttcagggtttgacttggccttcgaattaggcagytagttttcttatttcagggagatgagtcagggtgtcactaagcctcccttctttgtgaagctaatctgatgcctgggagaggcctcctaggtgagcaggcccctggcaccaggaagcggccatgctcctggaattcctgtccatagccctggctgct

SEQ ID NO: 91449 - DNA, 732 bp, Homo sapiens
ccctggtgtggacgcgatgtggctctgcagttatattaacaaatgttggctgggagtggtggctcacacctgtaatcccagcactttgagatgctgaggcgggcggatcacaaggtcaggagttcgagaccagcctgaccaacatggtgaaaccctgtctctattaaaaatacaaaaattagctgggcgtggtggsgcacgtctgagtagcctccagctactcaggaggctgaggcaggaaaatcacttgaacccgggaggcggaggttgcagtgagctgagatcgcaccactgtactccagcctgtgcaacagagcgagactccgtgtcaaaaaaataaattaaaataaataaaaatgtcatcgccctcaggcagaaccacgctgaacaaagccctgtaaagcctcccctgttcctgcaacaaatcctgcacagatggagcccgaggtgttgccggaagcagaggaacctgagtgctgagaccccagcgtggggcccctccccggtccctcagcagcagctccgcgtcccacgcctgcactgcagtggcctcctgcacaagcgagggtgccagcagagttgggattgcaaggcaggcaagttgggggagctttcagagtcaggcctccccaaggagcctggggaccagagctgcccatatcagcacacaggaccacagccttctccggcacctcagccaagcctcaaatcctagacaggactcccttctct

SEQ ID NO: 91450 - DNA, 769 bp, Homo sapiens
atgcataacaacaactcatcctaagccaaggctgggttttggaaaggttgccgaatcataaaaaaaaagtttacgttttcaaatgaaaaattcagttgtttgggaaaaaagactcaagcctacacagctaatcccaggtaaattagtgttgtctagtggagggaacataggtttgagtgcagtcagattcataatcaaatccaggcttaactcctcactcttgggtgcactgctctatttattatttgctttcactgaacctcagttacgccatctataaatggtgggaagtgccagtttcaaagggctagtctgaggctcaaaggagattgcctgtgtaaactgctttctaccagcccctccaggagtgccattctgttattttgtgtagttatgcacaagacctcaagcccatgcagacatacttagggttagagtgttagcattagaaacagagttagggtcaacattaaggatttagagatctttgttttcttctcttaataattagaatgcacaattactttatttcttttgtgagtgtcatatggcttacatgcctagcaacagtgaccaacacaactaagttgtttaaaaaatattgtttttaatgttactgaatttcctgctgtgaagatattctctagtgccaaaaattrcacgtcatagcttttctctagaactcactcagtaagagatcagctacaaaatattatttctacatctggagaattcatgtgtggcatgagagtttcttttaactcatgca

SEQ ID NO: 91451 - DNA, 868 bp, Homo sapiens
aaagtgttgattttaaaacccagtcctcatggaaaataaacccaactatgtaaagatgcaatacctgcagtacaacttgtttattatgatctaggctaaaactgaattccttgcacaacatgaagaaagcctgaacacatagttccttaaagcttttgtattttctgaatgatataaattgggtgatacatgaaagaaaaagataatttttacatatttttgttagttttttaaatcacaaaagtaataactgctcatctttgaaaacttagaaatcaaaacatggcttacacaaacayggaataaaaaccattagtatcttggtacatctatttccaataagataatatactatacatataacttttatatcttgtaatttttcagacaaccatataactggaaaattttccatttgggatatttagggatattcagactcaatgtgattttaacaactctttattagtatatcttaaaaacattacaatttaaccaatatcctactgtatttttacagtgttagtatttctatatttacaatgatgaaattttatttatctctcttttaaaaaactcttttatttatccatcattttaaaaatctccagatgtttcttaggacaaattcctagaagtgaaattgctggttcacagggaatgaacattatttggtctgttgatttttggataccaatgccttccagaaagttaagtaaaatttaaacttacaacgctgattgactaaagtgtctctcttccatcatcctcaccaactagggtatcttaattattttaaatcattgtcaataggacaggctgccatgcccaggaggatgctgaccacatttaacagaaaggcaatcac

SEQ ID NO: 91452 - DNA, 2398 bp, Homo sapiens
tgcatcagatggcctcaagggagccaccgtggagttgaaagagaggtaggtgggtagagcacagaggctggtaattcagactagatcaggcatgttcagagtgggatggccatagatagaggctgctcattcagtctttaggttaaacactttgtctagacagatattcaatagtggttgtttgcacaagaaaccaactgaagccagataggtgaaaagcttaaacttttgaggaacttaaatcactaaactgacctgatttacaaagctgacctgaaatagcctgaattattcaaactttgaacagctctatgacccccagatctggtccagctggaggtgtgtgcaacccatgaaaagcacacacacacacacacacacacacacacacacatatatgtatatatatagtctctgcctctagttcctgacacagagctcccagtttctcagaatttcctggggggtaggagcatcttttgatctaatgagatgacttttcctgggcttctgcatgagggctggtgactagacaaaccaagccatgattagaagcttgaaactttcagtcccaccctctcatcctcttttttttccctccgtttctttctccagaaaagggagaggagctggagactgagttaataactgatcatgactacatgatgcagccttcgtagtaatccctgaactatggggtttggagagcttctaggttggtgaacacgtgaaggtgctgggagggtggtaaaccaggaaaggccatggaaggtctgcacccctcccacataccttaccctatgtacttctttatctgtctctatcatttgtattctttagtaaataataagccaataaatgtaaacaagtgtttccctgtgttctgtgagccttcttagcaaattattgaacccaaagaagggtcgtgggaaccctgatttgtagctatcagtcagaagtaaaggtgataacatgggatttaagattggtttctgaagtgacgggcagccttgtgggactgagcccttaacctgtggggtctgcagtaactctggttagtgtcagaactgaactgaatcgcaggacacccagtcagtgttcacagaaaactggagaatgccttggtggggaaaaacacactctccttatttcagtgatcagaaatgttctgtgttgtgagtgtgatgaaatgctagtataatttatttcacacattttgaaagttctagcacattttcaagagtcagagaaaatttttttcaaaagcatattcattgctttttctgtaaaaaggcatcaacaatagccacacagtatttattattgaattaaatgcaaaaatgcatatggaaattcttaggaaatttcaaagcttggtataaatacaaggattttatgtaatgtgggttcacaagttcatggctaactcaaaatcgagacttttttacaattggaaatcaacccctgcaaaatatgcttgaaaataactacaaaaataaatcacaccaacaatttttggccaatagaccagctattttgctctttggtaaactcactaaaacagagggatttattgatattccttctttgctaaacagaatattctgggaacacatgcagaaaagataaataaatatgtgttctgatagaggagttgaaacgaatrtggaattgaaagccatcagaacaaagccaataatcatttctgagactatgatgattccacatatgccaaataagtgtttcaagatgcgtcggatccattaactatcactggccaattcagaagacaccaattctgggtacctgccaacctaattagatatttttgtttccccaaaagataattgcaacatgcttatcatgtattatatacacattgagactaggttcatttgaaaatatactcatatgtatcctgggattcattgaacttggagaacattttcctctataaatgaggtactttcagatctctacaagcaaaattacaaaaactgatgaaagaaatggaagaggacacaaatagaaagacatcccatgctcatggatcagaagaattaatattattaaaatgaccatactgcccaaagcactctacagattcaatgtaatctctatcaaaatactaacatcatttctcacagaaacagaaaaacaatcctaaaatttatacagaacaaaaaaatatccagactagtcaaaaccattctgaacaaaaagaacaaagctggaggcattacactgtgtgcctcaaaatatattacaaggcaatagtaaccaaaacagcatgatattggtataaaaacaaagcattgaccaatggatagaatagagagttcagaaataaatccacaaatttacagccaactggtttttgacaaaggtgccaagaaca

SEQ ID NO: 91453 - DNA, 708 bp, Homo sapiens
atgattataatgatataatgatatatataattatataataatgatataatgatataattataatgatacctatttctgtcttatttttcttattcttttttcttgctattaattatgatgagcatctttgtcctgttcatggctttaaagagaatgccgcaacatttgactgataaatatgatgttggctgccagtctaagataatcttcgttatgttagttgtctttttattttcagtttgataggaggtttacttgattgtgtatttattatttatttttaagtaatgaatgggtgtagaattccatcaaattattctttggcaccaattgggggctagggcaaggataaggacagaacttgagaagaccagttgaggagctatttcattgtctcattgtccatattagaggaaccagggctaagacaccagrtgtggaagagaaaagaagaggaggtctgccacctgtgcagcaaagggagctaaaagaggagaagatagagatggctgggagatttagagcctggcttcttgggaggctgaccccaagttcaatgggaaagatcatgtgttcagctgcttgttgagctggaggtaactgagacattcacatggaggtatccagctgacagatgaaactctgggtcttcaataacaaaaaagaaggaaagttagattcacaaacttactgcaaagagacatatca

SEQ ID NO: 91454 - DNA, 619 bp, Homo sapiens
acatgctgagaaacgcctggaatttgcatgaaatttattcaastacctctttatctgcggcagctgatgatcaggcagcctaacctatctcacagagaagcagcaggcaggttggatgtcaacaagcaagtcctagagacacacagtgcacaccaacgtgggcatgcacactcacagtgtcagtgaatccagtcatgctctttgcctcctcaatggttttagccttgtgctctccccactcacacctctgcgtgtctatgcaagagtgagctactgaatgcactacagcagtactgctgattttaagatatttccctgcagatgagagggtggtcttatatgaggaagaagtgccaagaacacacaatgaggaaaggatagtctcctcagtaaacagtgctgagaaaactggatattcacatgcaaaagaatgaaattggatacttatcttacaccactgacatgctgataaacagcaattctttctctctccttgtttctcatgctgataaccactcctgtgctcctcccattttcttagtataacaagcataattcagcttctcaaatgtggagaggaacatggtgtggagagggggatagagaacattttattctt

SEQ ID NO: 91455 - DNA, 693 bp, Homo sapiens
cataaaaatggcgattataaaaaacaacacccaatattatacaaagtactttcacacataacgtctttttcacactcttttcttgatgtccatagcaacaaataccagcygatgccagttattctcaagtgtgtcttcccatccctgactccaccagtctcctgttctgtacttccaattgcctactggatctctccttttgaatgttgcgtaaactcagtgtgtctcaaatagttacccaacccaatcctccacactgaaatattttctggcagtgctacaccttttgcagtgatactgtctcaggcactcacacagctgcagtactctaatactctgccactggccccttggcagtcgacaagagccagtgatgttgggaacagaaaagaagggatagacattagaatcatgttacatgatggagaaagggttcaagataagtatcagtgcaggacaggacttggagaatggttagttattggaatgaatggcaaatccaacaatctgaagacaggagcagtttgagcaaaggtgatcccaggactttcagcctgtcctgcatgtttctacggtttcgtctacagtgactggatcagttctggagtctcccagttctcattatccacctgggggctggggataagactccagagagtcctaggacaagctggcctttgggaatgcagtaga

SEQ ID NO: 91456 - DNA, 693 bp, Homo sapiens
cataaaaatggcgattataaaaaacaacacccaatattatacaaagtactttcacacataacgtctttttcacactcttttcttgatgtccatagcaacaaataccagccgatgccagttattctcaagtgtgtcttcccatccctgactccaccagtctcctgttctgtacttccaattgcctactggatctctccttttgaatgttgcgtaaactcagtgtgtctcaaatagttacccaacccaatcctccacactgaaatatyttctggcagtgctacaccttttgcagtgatactgtctcaggcactcacacagctgcagtactctaatactctgccactggccccttggcagtcgacaagagccagtgatgttgggaacagaaaagaagggatagacattagaatcatgttacatgatggagaaagggttcaagataagtatcagtgcaggacaggacttggagaatggttagttattggaatgaatggcaaatccaacaatctgaagacaggagcagtttgagcaaaggtgatcccaggactttcagcctgtcctgcatgtttctacggtttcgtctacagtgactggatcagttctggagtctcccagttctcattatccacctgggggctggggataagactccagagagtcctaggacaagctggcctttgggaatgcagtaga

SEQ ID NO: 91457 - DNA, 725 bp, Homo sapiens
aattaaaaataccttatacttgagagaacacagtagctaaaattaatctcctatgctaattttaaaaataaattatattcaaattaaattcaaatgtcctatattgggtatggcttttaatggaggcattactttcggatgtccagaccataaatattttctttaaaaacttttaatcaaccctgagataccaagaagaataaaatttaattttttctgtgacaaactgaattacagatgtgtttatttgcattagcagatgataagaaaaaatagctttcaacaccttggaaaacacaagtatagttacaagtgccccaaataaataaattaaagaaaaagcatttcaaaaacaacgtgaattataatgaagagacaggaatattgagtgaattcacgatgtggacccagaaaatctgagacaggtctctgttaatttagaacgtttattttgtgaaggttgaagacacaygcccatgatacagcctcaggaggtcctgatgacatgtgcccaaggtggtcagagaacagcttggttttttacattttaggtagacatgagacatcaatcaatatatgtaaaaaccacattggttctgtctggaaaggcgggataacttaaagcaaaggcagggaaacttgaagtggggagggggcttccaggtcacaggtaggtgagaggcaaaagttgcattcttttggaatttcggattagcctttccaaa

SEQ ID NO: 91458 - DNA, 854 bp, Homo sapiens
cctcttcctcatgtcacaggccacatctcagccagcctttgccacgctgggactccagctcaccacagagactggtkaggacagcagcagcctctgtcacatgacatggtgtctccaggccagtgaaaatgttctcagtttagcaaccttaaaaatccaggccaggctgggtgcagtggctcacacctataatcccagcactttgggaggccgaggcagacggatcacctgaggtcaggagttcaagaccagcctggccaacatggtgaaactccgtctctactaaaaatataaaaattagctgggcatgatggcacgtgcctgtaatcccagctactcaggaggctgaggcatgagattcacttcaacccggaaggcagaggtgatcgcaccactgcactccagcctgggcgacagagcgagactctgtctcaaaaaaaaaaaaaaaagaattccgggcctatgcctccagaatagccatccactcaatgggctgataggagaatgtcaggttacaggaccagattcctgggctccactccagacctgctaaatcagcccctctgctgaggtgttcatgcctctggtgatggagagctcactgcttcaggaaatcctcccatctttgcacggttccagctcatccaatatgtgccctgctgcccagagataaccctacaggtgctgggaggtcagggcacagccctccacaatttcctcagtgttggcgtttcctgcggggagaagagggaccctgaggacaggccctgaagccctctggcttccctcttggcagcagagccccatcttcaccattaacacctttttcctcattcactttttaactgaggtat

SEQ ID NO: 91459 - DNA, 854 bp, Homo sapiens
cctcttcctcatgtcacaggccacatctcagccagcctttgccacgctgggactccagctcaccacagagactggtgaggacagcagcagcctctgtcacatgacatggtgtctccaggccagtgaaaatgttctcagtttagcaaccttaaaaatccaggccaggctgggtgcagtggctcacacctataatcccagcactttgggaggccgaggcagacggatcacctgaggtcaggagttcaagaccagcctggccaacatggtgaaactccgtctctactaaaaatataaaaattagctgggcatgatggcacgtgcctgtaatcccagctactcaggaggctgaggcatgagattcacttcaacccggaaggcagaggtgatcgcrccactgcactccagcctgggcgacagagcgagactctgtctcaaaaaaaaaaaaaaaagaattccgggcctatgcctccagaatagccatccactcaatgggctgataggagaatgtcaggttacaggaccagattcctgggctccactccagacctgctaaatcagcccctctgctgaggtgttcatgcctctggtgatggagagctcactgcttcaggaaatcctcccatctttgcacggttccagctcatccaatatgtgccctgctgcccagagataaccctacaggtgctgggaggtcagggcacagccctccacaatttcctcagtgttggcgtttcctgcggggagaagagggaccctgaggacaggccctgaagccctctggcttccctcttggcagcagagccccatcttcaccattaacacctttttcctcattcactttttaactgaggtat

SEQ ID NO: 91460 - DNA, 637 bp, Homo sapiens
cttcccctgggcagctggcagaaacaccaacccccagctctccagccccatcctgatttttttttttttttttttttttttttgagcccgaatctcactctgttgcccaggctggagtgcagtggcgcaatcttggctctctgcagcctccgcctccctggtttaagtgattctcctgcctcagcctcctgagtagcttggattataggtgtctgccactatgcccagctaatttttgcatttttagtagaggcggggttttgccctgttgtccacccaccttggcctcccagagtgttgggattacaggcgtgagccatggcgcccagcctcccagcctgattcttggtctcggtgggtccagggaatctgcttcaagtcccyggcaccccaggtgtttagtgccctgctagcatgggaacctctaatctgatccaactgctcatctgacagaggaaggcccaggcccagagagggagaagggctgctcagagaccgaggcacaatctctccccagctcccgtgtgccctccctccaacctcacctctgtgccctgcccctgccctacatggagcataagcagccccgccccttgctgtgttgcagtggggacgccctactacatgtcaccggaga

SEQ ID NO: 91461 - DNA, 1058 bp, Homo sapiens
acatgaacttgaaaagtccacaaagtactagttttggtagcttcataatgttgggcaaatcgattgaatagacagtatattttgtcttcagtacaagcaaattaagagcaaagtgtgtttatgaattttttttttttttttgagatggagtttctctctgtcgccaggctagagtgcagtggtgcaatcccggccggctcactgcaacctctgcctcccaggttcaagcaattctcccacctcagcctcccaagtaactgagactacaggcatgcaccaccatgcccagctaattttttatttttagtagaaatggggtttcaccatgttggccaggatggtctcgatctcttgacctcgtgatctgcctgcctcagcctcccaaagtgctgggattacaggcatcagccactgcgcatggcctgtgaatattttaatatcattattctaatccatattgcaagaaaaccaagctttaaaaaacccatgctaagtggctactcactaattcatttattaaaataatcatctagcataatatacctaccaccgataatgtgctgcaggctgtgtgttttattccattttcacaaccaccttactatttaggtactattattttaattttatagatgagtaaactaaagctgaagaacattagtaatttacctaagctcactcagctagtaagaggcagagatggttttcaatattttttaatgaatagatgaatgaaataataaacttgcttgaaagcatcttccagtttgtctgattcttaaacctataatgtctgtctgatacattgtactgactcaaaataaataacttctctttcrtatgctaataagcaggaggagaagaaattgtcaatttaaagatcccattataaattgtaagggcatggcttttgacaggcccttatcatatcgtatttgatctcattagatattcaaaactaccatacagggaagacttagtatcctcaggtatagatgagcaaagtataactcactgaagcttacattgtgtctaggcttgcacagctaggacatgca

SEQ ID NO: 91462 - DNA, 936 bp, Homo sapiens
ttactcttgcctctcatacagataaccactgtcttgaagttggtgattgttttctttctttgctgatatttataattttaccatatgtgcctgttgccataaaaatatttggtttattttaaaatgtgatacaagatattttcctgagtattattgttctgattctgatctgatcaaagaggagcttctattctttacttctgtagaactctttagtcttataaaagttttatatattctgaaatcaaacctaccaatcttttttttttttttgagacagagtctcactctgtcgcccagtctggagtgcagtggcgcaatctcggctcactgcaagcttcgcctcccaggttcacgccattatcctgcctcagcctcctgagtagctgggactacaggcaaacgctgccatgcccggctaactttttgtatttttagtaaagacggagtttcaccgtgttagccaggatggtctcgatctcctgactttgtgatccgcccrcctcggcctcccaaagtgctgggattacaggcgtgagccaccgcacccggcccaaatttaccaatcttttatagtttggtcttttgaagtcttagggaatcgtttcctaccctaaaggtctaatttgattgttttccatatgatggtcagttgtctcagcattattagttgaataatccagtatttacctacagcttggaaatttcccttctttggtaagccagattcccttctaaagggtctatttctggcttttatttttattcattggatatattcatatctccatataccagagactcattcatgtataccacagctttataataaacgttgattagagtgtttttctacctccgtgttcttcaaaattgcctagactattcttgacccttcttcactgtgagtttaggtttaggtgatcatatttaacc

SEQ ID NO: 91463 - DNA, 1981 bp, Homo sapiens
tataattgagtactgtacctggcatgtgctagtacccccaaaattgtagtgaagaaggttggagctgggggtcacagagactggtgcagctcagcacctttaattggaggcttgaaaaaacttgagtaaaaagtttgaaataactgaaaattattaggaaagagaacatgtcacatacagggaattctgtttaacaattaatattttatctgagactattgtgcactgtaatttttatgaacttactattttgttttatacgttggccgctccctctcattcacctaagctagaaaggtttgcttggctaaatgcacaacatggtcacgctgttactcaaaaataatctgtaggaagaggtgagtgtaaggtgctataagctatagcagtgggcaagtgggacgttgcccacattcccaggatagctgtctttaaggtggactggtggatttcattcagcctcagtctgataactttgatgtatggtgcaggtctctcacaaaaccagtgacatacaaaacaacccacataaaatgatgaggtcctactgattagatttagaagtcctgcgttcttaaaaaacaaagcagaataaaaacaaaaagaggtgatagttttgctttcctcgttctatagatcacactggagttctgtgtctcatttccagtgccagactctgagagggacagtgagtaacctgagtgatgcctgaggagatccaccagtgaagggccctggagccaggaccccaggggaatggctaaaggcctgggctttttggtctagaaaataggagaggtagagacagggcataatagttgtctttgagtctctgaagactagcctcagggaagaaaggcttaggtattagtttagtcccggtattgctgaaagatgtgacactgtcaccagcaatagtggcacagatgctgtgatcctggggtcgggaggtgagtggaatctcagaatgtgtgaagggcgtagagttgtaaagctgcaccccctccactctttcttcattaaggatcctgaaatttatgtcctcccccagcacatgtcatgtgtacatgacgcaagccctccctagatacaagggcccagcatgccatctgctgagactcagtggttgagaatgatcccagaagccagaacccaggacaactgcatggaagccagttttttctcaagctagaagtgctttttaaccggagtaaaaaaaatgagtgggctgggtatgatgggtcacgtctataatcccagcactttgtggggctgagcccaggagttcaagaacagccttggccacatagtgagaccctgtctctacaaaaataaaaaataaaataaaataattagctgggtgtggtggcatgtgcctgtggtcccagctactcaggaggctaaggtgggaggattgcttaagcccaggagtttgaggctatagtgagctatgatcacacygctgcattccagcctgggtgacggagagagaccctgtctctaaagaaaaaaaaaaagaaagaaatgagtggtcactaaagaaggagcagttgctgtcacttagggatcagccccaggagagctgaggcagaaactgtttatcctgacccagcacccagaaggcacagtagagaggacttgggcacttgtgggtagcttgggccagatgactatgaagttctgtttcaaccacaagatcccattaaaaattgtctgtaaagtccgggtgtggtggctcatgcctgtaatcccagcactttgggaggccgaggcaggcggatcacctgaggtcgggaggagttcgagaccagcctgaccaacatggagaaaccccgtctctactaaaaatacaaaattagccgcgtgtggtggcgcatgcctgtaatcccagctacttggaggagtattgcttgaacctgggaggcggaggttgtggtgagctgagatcgcaccattgaactccagcctgggcaacaagagc

SEQ ID NO: 91464 - DNA, 679 bp, Homo sapiens
aaataaggtttgaccgctcagggatcagagacctcacgggacttgtcagtgttgttcatcttggccaacctaactgtggtgaagttcctccctctcagygctggtgctttggcagaggagctcagagactacagaccctggagtgacatttcagctctgtccccaggtgaacctctgtacacacacacacacacacacacacacacacacaaaaacacacacacacacgcccacaaaggtgcagcatttttgcctatgcactgagatactctgagaattcatgaactatttaaaattctgatacctgacagtaaaaagtgtcgttaatagttgccataaaaagtaaaagtagagtatttcagcctaaatcccagtgttattcatcccacacatatgttggggtataagaaagagaaaggtgtatttttatttctacctaaaataaaatgcttgattctatgattgaaactacacaatagtatgtacacaaggggtcagagattacaaagcttttcaatattacaattaaataattttcaacatttattttaaaaagttatttaaaattaaataattaaacactaatacagagcaataagggaaaacagcaaatcaaaagcaatctgtccactaattaacccagaagccctttctagggggctgactgtactgtgaagtc

SEQ ID NO: 91465 - DNA, 1565 bp, Homo sapiens
tgagaggatgttaatatggaaagtgtaagggcataaccttgggtatgaatagtagaagcaaggaagtcactgttttctggcagccatctttcaaacttctatattattaaaaaagcaatcccattatctcccacttacccagccattcccagctagtcataaaaggatattctctcccaatacacttttcagcagaaatggctttttgttggttgttcctctttccacgaaaaccaaattgcattctacatcaggcaaagaagccgccttagaaacggaaataacagccactgtgacagcatccggtgccttagaatatctgggactatttacaaagtagaatcttgctctattatgaagactgcgtgattgcccattttaaatcaatacagcctgctcatctctgtgtattcttttaaataccctaatctgtgtcatcaactcaaaattcaatgaaaaacacatctttggtcactggataaaaatcatcttagaaaacacttcccttgatttgaatatttgaaaatgagtcaaatagcttgggactctacagtgtgaaggtgaatggcctttaaaaagccatgcagaataactagatacataaaatctgaactaaatgtctcactaaggatgatggaacaattmgctgccttttcaactcaccaatcctttttaatttcatgttgagttacaggaaaaagcaggagagctagcctaatgcacacacacataatgtgtggatggatccttaaaaggatatttcatatgttatctggtgggcatacgtcatttgggtttaaacttatgtatttttacacaaaggtaaatggtattatacattactgtataaataaaagcactaggggattaggctacaactactaatagagaaatgctatcttaaaggagaagaagcattacaagagaaacctgaccacgtttggtgacaacactgtacaggaagtcactagagaagcttccaactgcccttcagataaagatggctgtgattcagagcactcaaattatgtcaaaaggaaaaaagagacaatgcaaaggcaagattggttttcctttcttgtgcttttcttttccattttctttcttccttttttttttttttttgagacggagttttgctcttgttgcccaggctggagtgcaatggcgcaatcttggctcaccgcaacctctgcctcctgggttcaagccattctcctgcctcagcctcctgagtagctgggattacaggcatgcaccaccacgcctagctaattttgtagttttagtagagatagggtttctccatgttggtcaggctggtctcgaattcccgacctcaggtgatctgcccgcctcggcctcccaaagtgctgggattacaggcatgagccactgtgcccggcctccatttgctttttcatatggagatgcaaatgaaaatactgaagggagggcaatgagctgtaccctttctgatctagaagagcacgcaaaacaaaaaataaaattttccagcatgaaaacacattctggaattacaagttaatggtgcaggactttct

SEQ ID NO: 91466 - DNA, 1361 bp, Homo sapiens
accactctccccgctaatgttctggaggaccatatgtacatgtgagggacaatggccagtggaaaatgagggaatgcttcagtgttagcaaggctgtacttataatcccaatgcagagtgctgtggggtgctggactgaagcacggagctttggctcaagtggagcctcttcccttaartccaaaatcttacccctagccggcagcctttcccaaagaaatgtgaatgcctgtgtcagaagaggagagaaaatgcaaaatgatgtttgtccaactgatagggcgctaaatgtgaaatgtgccacgctcaaatgcaggatattttatctaaaatgacttcacctagtagtaaaagtggttaactagtgccacttaggatttgatgtaattagtttatccactaatttttggagaggacgtaaggggagaaagctgaagcttttcattctcccatattcattcagttttagttcttttttttttcttctttgaaacagggtctcactctgtcacccagactggtatgtagtggcatgatcgtggctcaccacagctttggcctcctgggctcaggtgatcctccaaccccagcctcccaagaagctgggactataggtgcccaccaccaggcctagctaatttttgtgtttttagtagagatggggtttcaccatgttggccaggctggtctcaaactcctgacctcaagggatccacccacctcaacttctcaaagtgctggggttacaagcatgagccactgtccccagccttgaatttattatttaattttttaaaattgtggtaaaatacacataacataaaatttaccatcctatttttaagtgtacagttcagtgacattgaagtttattatattgttacacaaccatcattaagtacacttcacaaagaataatgaagaccaggtagaaacaaagaaaaaatgtttgacatagtttttgtatttttaccattttcctttaatgttatttcactaagcatataactataagcaaaacttgttggttataggtagaaactagatagaatttgcagaaatagtagttactctaggtttattttttgtgtgtgtgtatgagtcactaaaacaaaattgatccactttgatgatctgcctgggattgaaacagtaggtctttctcttttcccagttctcaagaccagaaaggagcctttccctttaagtgaggggccttgggggaagggagactactatgcttggagggaggacaggcctttgaaacttcatgctagagaggaagaaagactttaaggaatttgatccaaggtttatggagacagggagggacaaccaggaggtaagagaacagttaagag

SEQ ID NO: 91467 - DNA, 1361 bp, Homo sapiens
accactctccccgctaatgttctggaggaccatatgtacatgtgagggacaatggccagtggaaaatgagggaatgcttcagtgttagcaaggctgtacttataatcccaatgcagagtgctgtggggtgctggactgaagcacggagctttggctcaagtggagcctcttcccttaaatccaaaatcttacccctagccggcagcctttcccaaagaaatgtgaatgcctgtgtcagaagaggagagaaaatgcaaaatgatgtttgtccaactgatagggcgctaaatgtgaaatgtgccacgctcaaatgcaggatattttatctaaaatgacttcacctagtagtaaaagtggttaactagtgccacttaggatttgatgtaattagtttatccactaatttttggagaggacgtaaggggagaaagctgaagcttttcattctcccatattcattcagttttagttcttttttttttcttctttgaaacagggtctcactctgtcacccagactggtatgtagtggcatgatcgtggctcaccacagctttggcctcctgggctcaggtgatcctccaaccccagcctcccaagaagctgggactataggtgcccaccaccaggcctagctaatttttgtgtttttagtagagatggggtttcaccatgttggccaggctggtctcaaactcctgacctcaagggatccacccacctcaacttctcaaagtgctggggttacaagcatgagccactgtccccagccttgaatttattatttaattttttaaaattgtggtaaaatacacataacataaaatttaccatcctatttttaagtgtacagttcagtgacattgaagtttattatattgttacacaaccatcattaagtacacttcacaaagaataatgaagaccaggtagaaacaaagaaaaaatgtttgacatagtttttgtatttttaccattttcctttaatgttatttcactaagcatataactataagcaaaacttgttggttataggtagaaactagatagaatttgcagaaatagtagttactctaggtttattttttktgtgtgtgtatgagtcactaaaacaaaattgatccactttgatgatctgcctgggattgaaacagtaggtctttctcttttcccagttctcaagaccagaaaggagcctttccctttaagtgaggggccttgggggaagggagactactatgcttggagggaggacaggcctttgaaacttcatgctagagaggaagaaagactttaaggaatttgatccaaggtttatggagacagggagggacaaccaggaggtaagagaacagttaagag

SEQ ID NO: 91468 - DNA, 522 bp, Homo sapiens
atgggcaaccagaaggggcactcaggccatctgtccttagccaagacccttgggtcagattccactggtgtccttggttcatttcacttctgtggtcacaagaaagccaaaactgcacagtcttgtaaccaagtacatttcatgtacctactgctgaaacctagtaagtgtctatattctaatactatagatttatctgatgattgatactgctctcctgataatatcaataatagctaatacttactgagcatttaaccctgtcccaagaactgtactcaatgtctgaaatgcacgatttcacttaaccctcacaacactctgtgaggtagttaccattattattcccattttacagatgaggacactgaggctcagagacacggaatcactcgcccaactaggaaataataggggagaaatttgaacccaaggctgaatgttattctaattattattcccaccytcaccccatcataatcaattataaagctgaggggaacttttctctgatctaagcta

SEQ ID NO: 91469 - DNA, 805 bp, Homo sapiens
gcctttaaactgtgggtccagtcatggaaccgtgttacagcagcaatggtataacagatttaaaactctaagtaaaaccctattttcctggccagagcatcagaaaaaaaaaggtcctctgtgagctgggtcaaaggggaaaggaattccctaattctgtgtatgagactkcacaagtctcaggcttaatcttgagctgtgcatacacaggaaagacccagagcaacacagaaaaggttttgggaactgaattattatttaatcgccccagtttaatattaacccctaagtggcacaaacaattaggggttaatatgaggcttgggtgattaattagacagacccaaaacaccatagcaaaggtttgaaaaataaatttacattggaacaaccacccacggaaggggatgaagaacttgcaatttggatctaatgggatctgctggaacataaaaatcaacattttctatagattttaatgagacccagagtcataaaataatatttttaaatgtcccagaatacaatccaaaattactcaatatagaaaaaagaagaaaaacatgtctaattctcaatggaaagacaaaagatgccaacccttagatgacccagatgttgcattatcaaacaaagatgttaaagcaactatcataaccatagtccatgagataaagatgaacactcttgaaattaatagcaaggtaaaaattatcagcagggaaataaatcctataaaaagaaccaaatggaaatgctgaaatttaaaaatatgtaatctgaaatagatgattcactagatgga

SEQ ID NO: 91470 - DNA, 805 bp, Homo sapiens
gcctttaaactgtgggtccagtcatggaaccgtgttacagcagcaatggtataacagatttaaaactctaagtaaaaccctattttcctggccagagcatcagaaaaaaaaaggtcctctgtgagctgggtcaaaggggaaaggaattccctaattctgtgtatgagactgcacaagtctcaggcttaatcttgagctgtgcatacacaggaaagacccagagcaacayagaaaaggttttgggaactgaattattatttaatcgccccagtttaatattaacccctaagtggcacaaacaattaggggttaatatgaggcttgggtgattaattagacagacccaaaacaccatagcaaaggtttgaaaaataaatttacattggaacaaccacccacggaaggggatgaagaacttgcaatttggatctaatgggatctgctggaacataaaaatcaacattttctatagattttaatgagacccagagtcataaaataatatttttaaatgtcccagaatacaatccaaaattactcaatatagaaaaaagaagaaaaacatgtctaattctcaatggaaagacaaaagatgccaacccttagatgacccagatgttgcattatcaaacaaagatgttaaagcaactatcataaccatagtccatgagataaagatgaacactcttgaaattaatagcaaggtaaaaattatcagcagggaaataaatcctataaaaagaaccaaatggaaatgctgaaatttaaaaatatgtaatctgaaatagatgattcactagatgga

SEQ ID NO: 91471 - DNA, 805 bp, Homo sapiens
gcctttaaactgtgggtccagtcatggaaccgtgttacagcagcaatggtataacagatttaaaactctaagtaaaaccctattttcctggccagagcatcagaaaaaaaaaggtcctctgtgagctgggtcaaaggggaaaggaattccctaattctgtgtatgagactgcacaagtctcaggcttaatcttgagctgtgcatacacaggaaagacccagagcaacacagaaaaggttttgggaactgaattattatttaatygccccagtttaatattaacccctaagtggcacaaacaattaggggttaatatgaggcttgggtgattaattagacagacccaaaacaccatagcaaaggtttgaaaaataaatttacattggaacaaccacccacggaaggggatgaagaacttgcaatttggatctaatgggatctgctggaacataaaaatcaacattttctatagattttaatgagacccagagtcataaaataatatttttaaatgtcccagaatacaatccaaaattactcaatatagaaaaaagaagaaaaacatgtctaattctcaatggaaagacaaaagatgccaacccttagatgacccagatgttgcattatcaaacaaagatgttaaagcaactatcataaccatagtccatgagataaagatgaacactcttgaaattaatagcaaggtaaaaattatcagcagggaaataaatcctataaaaagaaccaaatggaaatgctgaaatttaaaaatatgtaatctgaaatagatgattcactagatgga

SEQ ID NO: 91472 - DNA, 704 bp, Homo sapiens
ggtgggttccagtggtaattactaaggcttcccagtaggactgattttcctgtgcctctatgcacactctcatggcaggcaggggtagtttgggctgagaygagatcttggctttttttctcagcatattctggaccaagcactgactgtttttaaacactattttagttgaatctaggttgacctggctcttctacaagcatgtaaatgctgaagagaacacaccagggcttgagggggggagtgatctatgggtagggcagggccactttctttttgccttgcaaggagttctctcactgttctttaaggtgctttgggcaatgaacctggagaatcagcttcatgcttatcttggactgaagagttgccagctgttcatttatcctctctgcttattgatccatttgatgcctgtcaggtgcctatgcattgcttgcattccctgggttgattatgcgtttgactctgatggagatcccattatttgtttttctgcaggagattaagtaaatgtctagagctggaataatggagagggcaaagaaggtgaggcaggaatagagagttgagattctgttttgcatcttccttgcttgctacagtgcacttggcataaggggatttatttctgtcttctgtattctgtcccattggtttatgtgtctttttatgccactaccgttctgttttgattattatag

SEQ ID NO: 91473 - DNA, 1002 bp, Homo sapiens
tctgtgactcactgaataagtatattcatagaatctcttttctggcctaaatttctgtgtttatccttgggccgcacctctacacccattcccactccagtgccctgagtaacycctttaggggtttgacttgggctttcactataccttgagtctttccctcaaagtctttctattcattctgttgggactttgatgagcattgctcttttgggccaaaggtttccctaatctggttccaacttttttttacagcatattcctgaaacagcctcccttcctgctagtgcccgcaagttgtttgttcttttagtttttatttccccaactccagagcaaaatatttctgtacttgttttttcctgtgatacagtacttttcctgtgatacagtacttttcctgtgatacagtacttttatgttatatataaatatatataacataatatttatcatttaaccacttataagtgtacaattcagggaaattaaatttctttacttcttaatggtgaattccatgagtctaccacactcatgatggctagcttatatggcctgtgggagagattaacaagaggacacaagtgagatccctggaagcctccaacctttccatcttcctctccaggttccttaacagttcactcacttttcaattcaagggacttttgctatggaaggttacctgccaaaggctgtgccaggttgggtgggagacacaatgctgcagaccatcttcctgtcctccaacagctcctcttcagctggagaagagagccagaccaaaaaactaattatcaaacaaaatgcaacaaaaataaattaaaattttaaaaatctaccaaaatgtacaagtactaagagatggaaggaggaggaaaaattaggtctaactagaagagatggacagatgaatagaatttctaaaggaggagaagagtgatcctggcagaacatagtaaagaacagtaccacatgtagtaagtgtgcaataattta

SEQ ID NO: 91474 - DNA, 586 bp, Homo sapiens
aagtatttgcacttctagcaagttcccaagtaatgttgatgctaatggttgagagaccacactttcagaaaccctcatatgatgatgaacctctaggtattaccatccattttgacaatcttgtttcagatatttccccaatttttttcagagggtggaggtggtgagtgaaaggaactggattttttttttttttttttgagacggattcttctctgttgcccaggctagagtgcagtggcgtgatcttggctcactgcaacctctgcctcctgggttcaagcaattctccagcctcagcctcctgagtagctgggattacaggcgtgcgccaccatgctggctaatttttgtattttyagtagagaccgggtttcgccatattggctaggctgatcttgaactcctgacctcaagtgatctgcttgcctcagcttcctaaagtgctgggattacaggcatgaaccaacgcgcccagcctggaactggagtattttaaagcaaattctgacagcatatcatttcacctgttaatactaaaaaatttttgtaaacacagtaattaacagccttaatttattatgtg

SEQ ID NO: 91475 - DNA, 586 bp, Homo sapiens
aagtatttgcacttctagcaagttcccaagtaatgttgatgctaatggttgagagaccacactttcagaaaccctcatatgatgatgaacctctaggtattaccatccattttgacaatcttgtttcagatatttccccaatttttttcagagggtggaggtggtgagtgaaaggaactggattttttttttttttttttgagacggattcttctctgttgcccaggctagagtgcagtggcgtgatcttggctcactgcaacctctgcctcctgggttcaagcaattctccagcctcagcctcctgagtagctgggattacaggcgtgcgccaccatgctggctaatttttgtatttttagtagagaccgggtttcrccatattggctaggctgatcttgaactcctgacctcaagtgatctgcttgcctcagcttcctaaagtgctgggattacaggcatgaaccaacgcgcccagcctggaactggagtattttaaagcaaattctgacagcatatcatttcacctgttaatactaaaaaatttttgtaaacacagtaattaacagccttaatttattatgtg

SEQ ID NO: 91476 - DNA, 831 bp, Homo sapiens
atagtcaggctttgaaggcctgggatacatttttaaatgactttgcattgagtgtgtatcaagtaaatacttttctctgcaaattatagagagctaaattccattggttaatgtaataaaagctatttattgtcttatataaataaaaaataccgtataggggtagggcaagttcctggtaagagtttatgatgtcttcaggtgtatagctatatttctctgtgattcctttaactctgactttgtatgtttgctttttatccaactggcttttcttatgtcaaaatgtggacacctctacattctcagctttatcttaagacaaggcttaagaaccgatgttcaaattgattaaaagtactcaagactttcctatcaaactggttgatgtggtttggctgtgtccccaaccaaatctcatcttaaattgtagttcccataatccctacctgtcgtgggaggggacctggtgagaggtaatttaatcatgggagcggttacctccatgctgttctcaggatagtgagtgagttctcattgttctcatgatagcgactgagttcttatgagatctgatggttttataaggggctttccccccttttgctctgtacttctttcctgccgtcatgtgaagaaagacgtatttgctccctcttccaccatgattgtaagtttcctgaggccttgccagccatgcgaaactgtgagtcaatttaacctctttccttataaattacccagtcttgggtgtgtctttattagcggtgtaagaacagactaatacctggygatggaatcatcatctacacaacccagtgaggacatgcg

SEQ ID NO: 91477 - DNA, 538 bp, Homo sapiens
taaaagccctaatgtgattaagtttggttcacctttttgccaagttaagtaacataattctggggaagtgatatctcatcatgtttagaggctcctcagacactcaagtgagagggagttaacaacagagagggtcattgggtgtcattcctaggattcatttacaacattgttctcatgataaagaccaaagttcttatctcyttgttgatcttcccttttccatctctccagcctcatttcatgtcatatttcccattttttatgtgtatttgacacacatgccggctttctcagggcaactgctggctcttagcctctcaaatattaattccatgggacagcaattgctaatatctccctattgctcaaacttcctcacctccaaactcctcagagtacagtcaataatgctgaaatatatgtatctggtgtttgtacagagaaagtggtttagaataatatgttcaaaaatgctagagattatctgtgtagtgggtttgttcacaatgtataattggagttccaagcttcccat

SEQ ID NO: 91478 - DNA, 1434 bp, Homo sapiens
ctctcaaacaaacaaacaaaaataacaacaaaaaacttacctccttactctccactgagaaatctctatacaaataaaatttttcttttcataataattatatatgcaaaacattatataaaccattaattgcttttttaaaacaataaaaataaaaacaaacatccgcttacccacaacatagctttaccagcaactccaaggtgtagaatatgcctgaacctgatcccatatcttttccttacattccacattttgtatgtccctaaatatttattttagggacatagaaatatgattttgccttctgtgttattctaaggcctcctcttatatttcaatattattcttgagctattcacccatgctaaccacattatagtactcaactgtgagtctattgactttctacattttctcagtgttccacccaaagtggcatgcatgttttcatgaacatcttctggtgtacaagaactaatttagggaatacatgtaagagagaaattgctggggcatgagttatgaacatcttcaaatatgctagataattcaaaatccttctccagagtatctataaccatttatatgccctccacagcacatgaaaatatacatattccatactggcaccagtatttggcaagacctggtctcataatatttgccagaccaatggatgtactccttgccattttaagagttttcaaaattagtaataaggtctaagaattgtcatccttctatcagccattccagcttccaattctgtgaatttccagtttatatcttttcacattttttatcacggtattagtcttttgcttattcattgtttgttaatttgttttatttggatactaattatactatgatttatttagatactaataataaaaataatttggagtataatggtatactcatataccattcatttaaatactaattctttggtcacttaaatgtatgctgtaaatattctagtctgtgccttatccttatctttatggtggtatcttaatgtgatcagaagttcttaattttaatgtagcaaaatttgtcaactttatgctttttacatttagttatttagtgattcttttctttctttctctttctttctttctttctttctttctttctttctttctttctatctttctttcyttccttccttccttccttcctttctttctctctctttccctcccttccttccttccttccttccttccttccttccttccttccttccttccttccttccttccttctctttctttctttctttctttctttctttctttctttctttctttctttctttctttctatctatctttcttttttgagacagggtctcactttgtcccccaggtttgagttcagtcgtatgatctcagctcactgcagcctcaactttccggggtc

SEQ ID NO: 91479 - DNA, 1434 bp, Homo sapiens
ctctcaaacaaacaaacaaaaataacaacaaaaaacttacctccttactctccactgagaaatctctatacaaataaaatttttcttttcataataattatatatgcaaaacattatataaaccattaattgcttttttaaaacaataaaaataaaaacaaacatccgcttacccacaacatagctttaccagcaactccaaggtgtagaatatgcctgaacctgatcccatatcttttccttacattccacattttgtatgtccctaaatatttattttagggacatagaaatatgattttgccttctgtgttattctaaggcctcctcttatatttcaatattattcttgagctattcacccatgctaaccacattatagtactcaactgtgagtctattgactttctacattttctcagtgttccacccaaagtggcatgcatgttttcatgaacatcttctggtgtacaagaactaatttagggaatacatgtaagagagaaattgctggggcatgagttatgaacatcttcaaatatgctagataattcaaaatccttctccagagtatctataaccatttatatgccctccacagcacatgaaaatatacatattccatactggcaccagtatttggcaagacctggtctcataatatttgccagaccaatggatgtactccttgccattttaagagttttcaaaattagtaataaggtctaagaattgtcatccttctatcagccattccagcttccaattctgtgaatttccagtttatatcttttcacattttttatcacggtattagtcttttgcttattcattgtttgttaatttgttttatttggatactaattatactatgatttatttagatactaataataaaaataatttggagtataatggtatactcatataccattcatttaaatactaattctttggtcacttaaatgtatgctgtaaatattctagtctgtgccttatccttatctttatggtggtatcttaatgtgatcagaagttcttaattttaatgtagcaaaatttgtcaactttatgctttttacatttagttatttagtgattcttttctttctttctctttctttctttctttctttctttctttctttctttctttctatctttctttctttccttccttccttccttcctttctttctctctctttccctcccttccttccttccttccttccttccttccttccttccttccttccttccttccttccttccttctctttctttctttctttctttctttctttctttctttctttctttctttckttctttctatctatctttcttttttgagacagggtctcactttgtcccccaggtttgagttcagtcgtatgatctcagctcactgcagcctcaactttccggggtc

SEQ ID NO: 91480 - DNA, 904 bp, Homo sapiens
aattcgatttcttataataaatatcttcctatattgtactgctactggttctgtttctttggttgaatcctaactgatataaaagggatcataggaagtacaatcgggcaatagaaaaatgagacagaaaataatgcagctcaataaagtgtgtttttatgaacagattactcctgtgggtatctgggctcaatcccagtggaaaccttctaaatgactgtagacaagaaacctccaaatgactgcatgaacggtggagaaaaccagggtatttctccttgaactctagctacttattgcttaagagcacctgtcccctccacttgtccatttccctcctttcctgtgacaaaagaacccttgcaggaagacagtggaaaaatgccataggtggcttgaaaggatacgggcttggaatgcacagaatctgatacaagtctacttcaaagacaatggcttttattcttcagtgactggggacacaagaacatgttttcaaaaggggtgtaaaatttgtgatttaatcaacacatactgagtatctaaaatgtgccaggcactgtgaaagaaactgaataaatatgagtgaagtacagtctcagtcctctagaaatttcagattcattaaaagtacagttgacctttgaacaatacagattagaactgtctagtccacttatacatggattttcttctgcctctgtcacccgagacacagcaagaccaacccctccccttcctccttcttttcaacctacttaacctgaaatcgatgatgaagacatttgtgatgatccacatccacttaatgaaaggtaaatatattttctcttccttataattttcctaataacctttttcccccagcttactttawtgtaagaatacaacaaattatacaaat

SEQ ID NO: 91481 - DNA, 717 bp, Homo sapiens
actatgacctccaatggacagaggaagaatcccagtttcagagcagaagctatttgctcaaggtaaatgggtaaggtacagaatgctcaacagtaaccgctgcttttattaaacagaggcctgctgtttgccagtcccagtgtctactgctatacagatattatactttgtgaagtaagatttgccatctctactgtattgatgaggaaaaacsctcagggaaggagagtaccttaccaggtcacatagaaagctgcaggtctacggtttaaactcaggtctatctgaccgcaaaggcttgctctttctactacaccatgtgattgtaggttaaagcctctaagatagtcttatgaatatgcaatcggataatactggcatatattaattgacatatataattataggtggttgcagtcattcatgaattttcaaaatgccagatttttttctttatccagactgatgccagtttgaattataggtacaatgggcaaatactagaacaattatgccactgagagagtatggacactagaaatatggcagagtttttttttaagtagcagagtaacagtttcagagaggacagggtacttattcaaggtcactgagatgcaggataaaaactgtttcctgggatgcctcttaaattcataaagggaatgtatggttgaaatagcagatcagaaacatcaggaaagacatttgagttgg

SEQ ID NO: 91482 - DNA, 717 bp, Homo sapiens
actatgacctccaatggacagaggaagaatcccagtttcagagcagaagctatttgctcaaggtaaatgggtaaggtacagaatgctcaacagtaaccgctgcttttattaaacagaggcctgctgtttgccagtcccagtgtctactgctatacagatattatactttgtgaagtaagatttgccatctctactgtattgatgaggaaaaaccctcagggaaggagagtaccttaccaggtcacatagaaagctgcaggtctacggtttaaactcaggtctatctgaccgcaaaggcttgctctttctactacaccatgtgattgtaggttaragcctctaagatagtcttatgaatatgcaatcggataatactggcatatattaattgacatatataattataggtggttgcagtcattcatgaattttcaaaatgccagatttttttctttatccagactgatgccagtttgaattataggtacaatgggcaaatactagaacaattatgccactgagagagtatggacactagaaatatggcagagtttttttttaagtagcagagtaacagtttcagagaggacagggtacttattcaaggtcactgagatgcaggataaaaactgtttcctgggatgcctcttaaattcataaagggaatgtatggttgaaatagcagatcagaaacatcaggaaagacatttgagttgg

SEQ ID NO: 91483 - DNA, 1550 bp, Homo sapiens
atttataaccatgtgggtcaaaactagagagtctcactggtcatggtattggcatggtgcgacgcgrggtcagccagcttttctgaaaagacccccatgctaaatgccgggctctgtcccagtcgctcagctctgccatggaagtgcagaagcagccacaggcattcatccataaatgggtgtggcttactccaataaaacttgtttatggacatggaaatttgaatttcataaaataatcatatgtcataaaatattctttcttttttcaactatcaaaaaatgtaaaaaccactcttagcttatgggccatacaaaaacaggtgtggactggatttgacccatgaactgtcattttctggtccctgatatagaaaaaaagataggattccgaggcctgttgataagatccaaatgatatcctggtttgaattctcgctctgccaagtatcaaccatgtaaccttgggcaagtcactaacctttccaagtttcagttcctctctaggggaagcataatggccaccccatagacctgagagtcagtgacagagtcgggcacaaagtggtgaccagctcctgaggctctcacgagaccaaatttctctctgtgagagcttgagaacatgtttcaataggtggtagtcaaacttctagcaagagatctcattgtattaaaaggaaaattttagttttgtttcatgtctatttactccatcaaaataacactttgttcctaccaaaggagtgagactgcttagaaactacagacttcctaaattacaggctcactgaggaagcacattccccatatgttttcatcagacacacaatagaggtcttattaagcaatggcaagctctgtcctgtggtgaattcagctaggctgaacggcttctatggaatcctttgttttcccaggggaggtaaattcttcctttagggacccatgctctgaaagttcagaatactccctccaaaaggacaaaccgtttgttcagcgtttcttgcatgtcattaagagttgcccccattaagcttctgtcagaataaataaaactctggtgcctgcaacctaacctggagtttccggtactctctgcttcaccggccagtgccttccctcccactcctgatagaaaggccacatgacagaagcaaatgtgagaattccttcccctgccctcccgcatccagcctttaaggaactgcacaaccctacagggggcattgggccatgctgaaatctgtttcattcctcaaagcgggtgggtgcactcagtcaccctttgctcatcccagaacaaggggcagcagcagcatctgccagaaaccaatccagctgcgctgacaaatgctgggtatgagaaggagggaggcagactcctgccaactgtgcagacctccatgggggctctggagaagttgggtaacagaggaggaaaggagcggggagcagcagccaaatgtcagagatctcagtgtcgctttgagcagaaatcacaggctcctttgatcacaggtagcatcagtctgagcagaaatcaggtt

SEQ ID NO: 91484 - DNA, 930 bp, Homo sapiens
tgcataagttaaagtgaagaaaaaaaaatcagaaataacatctggatacccagacaccagatcccttcaatacatgcaaacagaaggtatgtagtcatttttaaaagaaggaggcaaaaagccacaactactattttgaaagatgatgtatacgaaaattagcaaaagaaaacatattatatcttacatactaaataagcatgatttataccaactatactgtcattcattcaacacatatttactgagcacccattatgagccatgagttggggaaaagagcaaaaacaagacaaacagttcctgctctttggagctagataaacagcaagggagtaagccaaaattaaagaatttttacaaacgtgatgttgatgcacaaaagaagtagatatagggtgtgcccgaaaacctaatagtagaagaagctgggtgtgaaggtcctcagggaataacatttcatctaagattttaaggaytgtgggcggggagcattgtgggctaacaggagacagcattctatgcagagaggatagccttacactcttattaaaaaattttttattctatttttattatttttctttcattgatacataatattttacatatttatggggtacatgtgagtattttttacacatacagattgtgtaacaatcaagtcagggaatttggggtgtcatcaccttgcatgcttatcatttctacgtattggtaacatttcaaatcctctcttctagctacctcgaaatatttgaaatattagacactatcaaatgttatatctataaattgagacagtttagataatttaggtatactgttaaatgttataactgaaaagcaaagggaccagggaacatgtatctactttattttgtgtgtgtgtgtgctgcctcctgtacttttctccaggttacacatgca

SEQ ID NO: 91485 - DNA, 608 bp, Homo sapiens
taagaatttaaattttttctgactacacagtaaaatcatttgaaaggatttgcatcatgaacctttcagacatttgaagttattcacattgaattgtcatctaatcaraaagaggtatcaataaaaacactgtagggtatttaatctaaatgtaaccacattaaatttaatcgtatagttttgcaattatttgtggctatatctacttaagaccataagcaggtcttctttaattttctattcctaatgccaatgataatgctggatacctaattaatgctcaatatatgctcactgcaaagaaccaaacaaggaaaataccaactaagaaatgctttgcagtgtaacataaacattttctttgaatgctaaatatattttgaaattacaaaatcagacaagagacaaaattaagaaacgttaatatcaattagactaagatgcttcttaagcataaacagactattcaaatcacataagggcttttttttgattactggaaaatgtcttatgtggaagaacattaaagacagaagctacatattcatacacaaacacattacttaatatactaattctatattcatctatattaatttctagttgta

SEQ ID NO: 91486 - DNA, 608 bp, Homo sapiens
taagaatttaaattttttctgactacacagtaaaatcatttgaaaggatttgcatcatgaacctttcagacatttgaagttattcacattgaattgtcatctaatcagaaagaggtatcaataaaaacactgtagggtatttaatctaaatgtaaccacattaaatttaatcgtatagttttgcaattatttgtggctatatctacttaagaccataagcaggtcttctttaattttctattcctaatgccaatgataatgctggatacctaattaatgctcaatatatgctcactgcaaagaacmaaacaaggaaaataccaactaagaaatgctttgcagtgtaacataaacattttctttgaatgctaaatatattttgaaattacaaaatcagacaagagacaaaattaagaaacgttaatatcaattagactaagatgcttcttaagcataaacagactattcaaatcacataagggcttttttttgattactggaaaatgtcttatgtggaagaacattaaagacagaagctacatattcatacacaaacacattacttaatatactaattctatattcatctatattaatttctagttgta

SEQ ID NO: 91487 - DNA, 1008 bp, Homo sapiens
ttgtcattttaaggtattaaacagacaatgaaatctgccacaattttggtatttcttgtccatgagaacataataaattaatggagttttttcttttgcttttttctaagcaacaaagttttatgtatcatgaatgaaaagatccttaattacattttggtctacatgtcaaggacttctccctcataaaaccagtagtaatcacaacaaaaggaattaaccataaaaagaggtattaaaaatgtatacttgatttttaaatgcaagcatattatttctttacattaaaatttttagatttaaaaagtgtttctggaagctcaatctagaaaagaaagatttaattcttaacatccagtagggcaaaacaaatcagacagaagtgatatatgaatgtaaatgtaattttatgtaccactttgatgctccaaatggcactgccaggaagctgcctgggtttaaaaatttcccgacctcctgaaatgtctggggaccacgagggtgggctcactgtattatgggtactccaagcctcctaagatatggcagttgagaaaatagatgtgtaaaactcagcaacataaaaggtcaaagccagcaactaaggaattttaggacagcaaaaacaaatgcaaacgtatggaaatttaggacaaattgcttcaaggaaggcaaaataagctaatcactaacagtgatttaaacatttaactataacaaataacttaaatgtttgctgctacagagacatcactacaatgaaacattaaaaattaaggtttatrtgacatcaacattgactcatgaactgcaattactgcaccaaaaagtaaataaaagtcaatcacactttaagaattaacactagaagaaagtattggggggttatttttcttctaacaactatcactctacttaaaaggagaaatggataaccataaggaattctatattctatagctataaacaaccaaaaccagtaggccaaagaatgcaatgagaaacata

SEQ ID NO: 91488 - DNA, 581 bp, Homo sapiens
atctactctattttattaatagattttaaacttggccaaaaaaatggatagacatacattttgtaaagaagtgtgtttttaatttaccttctcatagcaatatagaataaacacaattatctaatgtgcttgagttttaaatattgaggccttatctgtctttttaaatgtaattatgtcaatatattttacattttttaagggttgtgttaaatattggtcaaaattgtagacactttaattttattgattgtagaaaaacaacacggaggagtttctgcactggaacacaagccttccgcctgccccacaggccacccagccaccagtatggttttttgtgctgtgrtgagaggatggggtatgtgctacttatcctcattccacactatgtgattccaattttattctgggttctggtgcacaaaagggtgagtctacgaatagaccaactttgaaggacttacaaaggtagacatatattatctatacacatcaaattgttttataaaagtgcattgatcaaaattgtacctttatatataagaagaagcaatgtaaactgcctggttaaaaattat

SEQ ID NO: 91489 - DNA, 581 bp, Homo sapiens
atctactctattttattaatagattttaaacttggccaaaaaaatggatagacatacattttgtaaagaagtgtgtttttaatttaccttctcatagcaatatagaataaacacaattatctaatgtgcttgagttttaaatattgaggccttatctgtctttttaaatgtaattatgtcaatatattttacattttttaagggttgtgttaaatattggtcaaaattgtagacactttaattttattgattgtagaaaaacaacacggaggagtttctgcactggaacacaagccttccgcctgccccacaggccacccagccaccagtatggttttttgtgctgtggtgagaggatgggstatgtgctacttatcctcattccacactatgtgattccaattttattctgggttctggtgcacaaaagggtgagtctacgaatagaccaactttgaaggacttacaaaggtagacatatattatctatacacatcaaattgttttataaaagtgcattgatcaaaattgtacctttatatataagaagaagcaatgtaaactgcctggttaaaaattat

SEQ ID NO: 91490 - DNA, 581 bp, Homo sapiens
atctactctattttattaatagattttaaacttggccaaaaaaatggatagacatacattttgtaaagaagtgtgtttttaatttaccttctcatagcaatatagaataaacacaattatctaatgtgcttgagttttaaatattgaggccttatctgtctttttaaatgtaattatgtcaatatattttacattttttaagggttgtgttaaatattggtcaaaattgtagacactttaattttattgattgtagaaaaacaacacggaggagtttctgcactggaacacaagccttccgcctgccccacaggccacccagccaccagtatggttttttgtgctgtggtgagaggatggggtatgtgctacttatcctcattccacastatgtgattccaattttattctgggttctggtgcacaaaagggtgagtctacgaatagaccaactttgaaggacttacaaaggtagacatatattatctatacacatcaaattgttttataaaagtgcattgatcaaaattgtacctttatatataagaagaagcaatgtaaactgcctggttaaaaattat

SEQ ID NO: 91491 - DNA, 581 bp, Homo sapiens
atctactctattttattaatagattttaaacttggccaaaaaaatggatagacatacattttgtaaagaagtgtgtttttaatttaccttctcatagcaatatagaataaacacaattatctaatgtgcttgagttttaaatattgaggccttatctgtctttttaaatgtaattatgtcaatatattttacattttttaagggttgtgttaaatattggtcaaaattgtagacactttaattttattgattgtagaaaaacaacacggaggagtttctgcactggaacacaagccttccgcctgccccacaggccacccagccaccagtatggttttttgtgctgtggtgagaggatggggtatgtgctacttatcctcattccacactatgtgattccaattttattctgggwtctggtgcacaaaagggtgagtctacgaatagaccaactttgaaggacttacaaaggtagacatatattatctatacacatcaaattgttttataaaagtgcattgatcaaaattgtacctttatatataagaagaagcaatgtaaactgcctggttaaaaattat

SEQ ID NO: 91492 - DNA, 590 bp, Homo sapiens
cattttaattcagaaaaaaattataaaatgaaaagaaatccctaaaagagaaggaatatcaagaaggactcaattgctaaagtaggtcaaggacaattaaattgctttcttaatatgtctgcttataatttgattatttctgtaaattatatttttacaaagttcctttgaaaatattgttcttttgttttgataagcttttaagacacattcacacattttatttcctgtcagccattttctttcatcataaaagtcattttgttagggtcttgatttaattatagactctattcattagggcaactgaccaactcaagaatccctactgctttattcaatagaagtagttcctggagttttgtgtttaaygcactccattttccctagttcataaagtgtgaaaacttatattttattcagtatttttcttggctctctgattgaatcagtttccaaggaatgagacatatgtgtgagttatatctcctttacaaatattctttcttgcaaggaattactttttcattgccaatatggggattggctaggctaagtactcatatatgcctattgtgaaaacatgtttt

SEQ ID NO: 91493 - DNA, 619 bp, Homo sapiens
ttttacatattgttgaattaaaatttcaactatttctttaaaatattgtatgcccatttttatgagagattttggtacatagccatctgtttttgtaatgttattgtcttttttatatatcagagctatgctgtcctttagaataatttgggagtattcacttctcatcagttttccagaaaagttgtttgtgtaggatttggtactatgtccatatcaatatttggtagaatttaccgtttaaactacttcagcctggtgtgtgtgtgtgtgtgtgtgtgtgtgtgtgtatgtttgtgtgtgtatgtatgtttgtgtgtgtgtgtgtgcatgtataaatgtatttaacaaatattcaattttttaaaaaaagatatagagatcttctgttgtttcagtaatatttgctagtttaaagcaatttatctctttcatctaaatggtcaactttatagtaaaatgttctcttattatcttttaaaataagcagaatctgtaktgatgatccagtttcattgctaatgttggtcatttgcatcttctaactcattttatgcatcaatgtggttagagggtaatcaattttattgatgctcataaaaagtgaacttttaaaaaa

SEQ ID NO: 91494 - DNA, 656 bp, Homo sapiens
tatatcaatccccaaaaagtgataaagttatcgtagaggaattctaataggaatagagtatcaatgacaataaatcaattaaagagttagaatagcaattgtatatactatgacattaagaaaaacatcaagtatagctagaggaccaggaaattcagtatctgattatttatratattcagagagataacaaagaaaacaatataaacgctattattaaagaatggggctgggcccagtggctcatgcctgtaatcccagcactttgggaggcccaggcaggcagatcacgaggtcaggagtttgagaccagtctggccaacatggtgaaaccccatctctactaaaaaaaaaaacaaaaattagcaaggtgtggtggtgcacgcctgtaatccaagctacttgggaggctgagacaggagagttgcttgaactcgggaggcagaggttgcagtgagctgaggtcgcgccattgcactccagctctgggcgacagtggaaggggaggggaagaatggtatggagtataatgaagagtgttagaattagaaataattgatatatagatagataggaagacaagtatagatattcagatgcaaacttgtttttagaaatcaacagacaaaaatctgagaggaaaaaatcttgcacaa

SEQ ID NO: 91495 - DNA, 656 bp, Homo sapiens
tatatcaatccccaaaaagtgataaagttatcgtagaggaattctaataggaatagagtatcaatgacaataaatcaattaaagagttagaatagcaattgtatatactatgacattaagaaaaacatcaagtatagctagaggaccaggaaattcagtatctgattatttatgatattcagagagataacaaagaaaacaatataaacgctattattaaagaatggggctgggcccagtggctcatgcctgtaatcccagcactttgggaggcccaggcaggcagatcacgaggtcaggagtttgagaccagtctggccaacatggtgaaaccccatctctactaaaaaaaaaaacaaaaattagcaaggtgtggtggtgcacgcctgtaatccaagctacttgggaggctgagacaggagagttgcttgaactcgggaggcagaggttgcagtgagctgaggtcgcgccattgcactccagctctgggcgacagtggaaggggaggggaagaatggtatggagtataatgaaragtgttagaattagaaataattgatatatagatagataggaagacaagtatagatattcagatgcaaacttgtttttagaaatcaacagacaaaaatctgagaggaaaaaatcttgcacaa

SEQ ID NO: 91496 - DNA, 671 bp, Homo sapiens
tccaaaaactggacaaactttctctttgcataaagtcaaatcagacacagatggatggragagtgtcccctctgcccacctccaaaattggagcttagcctgggagggttctttgcttcactcaggaaagaatttatgagtgagctgttggtggaagaaagcaggtatactgaagcactggaatacacacactgactgctccttgtagagcagggcaaatccgtaggtggtgtgaccagagtagcagcatacaagctgttggctagcagtgtttacactcatttttaattatatgcaaataaaggagcaagttattcagatatctctagaaaagaagcagtaacttctgggtgttgctgtggcatttgtaaactgtcatagcattggtgggagcgtcttacgtgcagtgaaagcaactagagtttgccttccgtgccattttgctggttcgagtttcttttttccattctgtcgggaccaggatataagtcctgccaatctcctgctctgtttccattagctctttcccattcttttttctttttttttttttttttttttgagacagagagtcttgctctgtcgcccagggtaagataagctctccactcacttcaacctccactttccaggttcaagcaattctcctgcctcagcctcctgagtagttg

SEQ ID NO: 91497 - DNA, 671 bp, Homo sapiens
tccaaaaactggacaaactttctctttgcataaagtcaaatcagacacagatggatggaagagtgtcccctctgcccacctccaaaattggagcttagcctgggagkgttctttgcttcactcaggaaagaatttatgagtgagctgttggtggaagaaagcaggtatactgaagcactggaatacacacactgactgctccttgtagagcagggcaaatccgtaggtggtgtgaccagagtagcagcatacaagctgttggctagcagtgtttacactcatttttaattatatgcaaataaaggagcaagttattcagatatctctagaaaagaagcagtaacttctgggtgttgctgtggcatttgtaaactgtcatagcattggtgggagcgtcttacgtgcagtgaaagcaactagagtttgccttccgtgccattttgctggttcgagtttcttttttccattctgtcgggaccaggatataagtcctgccaatctcctgctctgtttccattagctctttcccattcttttttctttttttttttttttttttttgagacagagagtcttgctctgtcgcccagggtaagataagctctccactcacttcaacctccactttccaggttcaagcaattctcctgcctcagcctcctgagtagttg

SEQ ID NO: 91498 - DNA, 561 bp, Homo sapiens
tggctcatgattctggaagctgagaagtccaatatcaaggcacgtgaaattttggtgtgggggaagggaccagtctgtattctcaagttggtgccttgtgtgctgcatcctcaggaaggagagaccattgtttctcacgtggcagaagagtcaagagagggagcctgctcataaaagccctttgattarggcattaactccacccatgagggtggagccatcatggcctaatcagtttttaaaaaaactcagctcccaatatctatacattggcaattaaatttcaacatgtgtttcagtgaggacagacattcaaatcataggaacagatgaaggcaaaaaagaccaaggaacagattttatttcaatattttgcttaaatctgccctaaagccttgctattcaaaatgtggactgcagaatagcagcatcagcatctcctcagaatcccaggacttatcacatacgttctgaataggaatcaacaggttaacagtatgtccaggtgaaatttgcattactcttaactatccggatgtacgcaggtctgaacactttaaa

SEQ ID NO: 91499 - DNA, 561 bp, Homo sapiens
tggctcatgattctggaagctgagaagtccaatatcaaggcacgtgaaattttggtgtgggggaagggaccagtctgtattctcaagttggtgccttgtgtgctgcatcctcaggaaggagagaccattgtttctcacgtggcagaagagtcaagagagggagcctgctcataaaagccctttgattagggcattaactccacccatgagggtggagccatcatggcctaatcagtttttaaaaaaactcagctcccaatatctatacattggcaattaaatttcaacatgtgtttcagtgaggacagacattcaaatcataggaacagatgaaggcaaaaaagaccaaggaacagattttatttcaatattttgcttaaatctgccctaaagccttgctattcaaaatgtggactgcagaatagcagcatcagcatctcctcagaatcccaggacttatcacakacgttctgaataggaatcaacaggttaacagtatgtccaggtgaaatttgcattactcttaactatccggatgtacgcaggtctgaacactttaaa

SEQ ID NO: 91500 - DNA, 561 bp, Homo sapiens
tggctcatgattctggaagctgagaagtccaatatcaaggcacgtgaaattttggtgtgggggaagggaccagtctgtattctcaagttggtgccttgtgtgctgcatcctcaggaaggagagaccattgtttctcacgtggcagaagagtcaagagagggagcctgctcataaaagccctttgattagggcattaactccacccatgagggtggagccatcatggcctaatcagtttttaaaaaaactcagctcccaatatctatacattggcaattaaatttcaacatgtgtttcagtgaggacagacattcaaatcataggaacagatgaaggcaaaaaagaccaaggaacagattttatttcaatattttgcttaaatctgccctaaagccttgctattcaaaatgtggactgcagaatagcagcatcagcatctcctcagaatcccaggacttatcacatacgttctgaataggaatcaacaggttaacagtatktccaggtgaaatttgcattactcttaactatccggatgtacgcaggtctgaacactttaaa

SEQ ID NO: 91501 - DNA, 626 bp, Homo sapiens
gtagtgaagacagtccctgccctcaagaacataaacataggaacagctaacattattgagctctctcagtgctccaggaactcttccaaatgctttcatatgttacctaatattaagataattaatcctcacaataaggctatgtgataggtgaattattgtacacattttgtagatgagaaaaccgaggtacacaaagttaaaggatcttgcccagattagacagatagatactaggctgtagagccagagctcacttccaagcagaccaacccagaggctccactcttacctactcctccatcctgcctcttttgcaatgttatgaaggagatacayggataaatgcaaaattccaacatagaggttagagtgttaaagtataaaaagaatatttgtggttttgttgcacactgtgtggacgtgaaggggagtatattaaaaaaggattctcgtacaacataatggagcaggaaagtttgttcgtcccaggcaaacagaaaagtatctgcaatagtgctgaatattttgtaaatcacattgtgtcctaaattaactgaactcgagatttcattcattttagaaaaggtggtaaatagggtgttttgaaacaacattgttgctgt

SEQ ID NO: 91502 - DNA, 634 bp, Homo sapiens
cctcaactgactagccacatttttatcctgtagggatagcagaattcacatcatggaaatttttatgttttcctttagaaaaactacttacggagccctttggttataaaacaaaaaggcccrgacccatctagattagagaagaagaaagggagctaaactgatcttcatgatgaacttcaacggagtcattcctgaggatggagggaatgatctatgctggaaagggctatgtgagttttctttaaccaggctccagaaggaataggtttccaatccctggaacttagagaagccagtgcagaaatgggctgaagcaacgtgatgaaagagtgagatgctacagaagagacaaccagggagaggttccctggggcagagaatggtggatgagatttaggatcagtgttgccagattctgtctgttgcagattattgcctttttatcctagtcctttgtatacaatagccttgtgttagtgggtcatgttttaaagcacaagaacaaggcagattggacagacctaaagcagtataaggaggtagagtcagatggcccaaaatgatgaaagagaggattggagtaggagtcgggtctgggactcctcagaattataggtgagtgtgctggata

SEQ ID NO: 91503 - DNA, 634 bp, Homo sapiens
cctcaactgactagccacatttttatcctgtagggatagcagaattcacatcatggaaatttttatgttttcctttagaaaaactacttacggagccctttggttataaaacaaaaaggcccggacccatctagattagagaagaagaaagggagctaaactgatcttcatgatgaacttcaacggagtcattcctgaggatggagggaatgatctatgctggaaagggctatgtgagttttctttaaccaggctccagaaggaataggtttccaatccctggarcttagagaagccagtgcagaaatgggctgaagcaacgtgatgaaagagtgagatgctacagaagagacaaccagggagaggttccctggggcagagaatggtggatgagatttaggatcagtgttgccagattctgtctgttgcagattattgcctttttatcctagtcctttgtatacaatagccttgtgttagtgggtcatgttttaaagcacaagaacaaggcagattggacagacctaaagcagtataaggaggtagagtcagatggcccaaaatgatgaaagagaggattggagtaggagtcgggtctgggactcctcagaattataggtgagtgtgctggata

SEQ ID NO: 91504 - DNA, 2197 bp, Homo sapiens
agcaaatcataacaagacagtgtcatgaactctagctttcaattctgaagtttagacaagtgtgtacttgtatgtgtgtgtatacctttatttgtacttctgagaatttacgtaatttatttactactcattctctaagtcatttgaagaaaataagttaccatctaaagaatggaaatttaaagacaaacaccctaaaatgagaaattaacamggtgatgttagtattgacttataaactcatgcttcaagttgaaagacaaaccattgaacttcatatatttatatcagttctcttagccttcatcagttctcacagccttttaaaatgctaggtaaacatatatgcttgctatctttcaggtttatgtttggtttgtcaaagcatacactaaataattttattctgcataaaatcagaaagatactatttttaaaaataaagattgatacatgcgaaaaattgcatggaaattagagacaatgtgaaatgtaattgaatagcagattagttggaatagttataagagaaaatacaaactgtgatagttagggaagagacgtaagaagtaaagtagcttggatggttcttccttacagtatagacattgaaaaacattttcaaagcttaagtaagaaaacaactcaataaaattgagaaaagagagatgaaaatatcatggagggatgactgttcacttttggcttaactatagtaagactctacacctaaacttttcataagcataaacaaaatttggccaaaaaatctagaattcattaagttattgatagctacctgatactagttcataaagtaagggattaatttctaatttataggctttaactgtgttttgccatatgtacttacagccaactggtggttcctagaatgatttcagatggtatattaataaacatttcaaaaaatgtatttaagtattaaatatgtattttaaaaatataactgtcacaaaaaatgatctgttaggtagttgcccaaagtttgtttgtttttttcccttggctgtatgtatataagttaaaaaaaagagagtaagttaaaaatgaaatattaatatataataaaatgtgatataaagattcggtcaaatatacgaaagtgatgtaaaattaacatcttcaaaaccccaacatagaatgccaataaggctagacctttcagggactgaagtgttcccattcaccattaggctacttccctcatagttaaggtatttgggaaatcaaactgaacatgaaaaagttgattagcaagcagaaactcaacagcaaggcatctggctagttttgataactatatcagcaaggtcatataaaaatctgggatccacttgagaacaatgtagtcgagttctatgatgttggagatactatataaatacattttacgatattcagtagctccctgtattatcaggagatggtctttataggcttaatttttaggaaggtccagagagccggctcctgaaaaattaacatgacacccttgaagaaaacaatgtttatgttgacttctgaggaagacaagcgtcctgggaaaacaggcactcagcctgtgggaggtgtcagcagaaaatgtatccccaacaggaaataccaggctttaatcaatggaaaggtgcttttattgagtacaaaataaggtcatattccatttctgctctcatttctcagcccgctctttcctagtatgtaaaataacttacagagttgcttggaacattaaacaaaataatgtcatatggcaagcactcaataataacattatgattacttgtcctgagaagctggtcatatgttgtgtgtatgtttgagaatggtgattgcgaaattgaagaaaccattttacttggagggacctgtggggaatgtgggcagccttaagcatagatctgaaatcactcaagggaaaacattccttctactttggcactctggcagcaacagctgctgtggtaagcactgaggtcctggaagcaacaaggctgaagtggccgtgaggagtagacaggagtgggatgaagaacaccttgagcttccagggagtttctggggagagaaagaatgaatgattttaagtcccaaagtagggccttgagagcagcataacatggtgctgagctgatagactctgaagttcagcaggatcagtactaattgtgtggcc

SEQ ID NO: 91505 - DNA, 2197 bp, Homo sapiens
agcaaatcataacaagacagtgtcatgaactctagctttcaattctgaagtttagacaagtgtgtacttgtatgtgtgtgtatacctttatttgtacttctgagaatttacgtaatttatttactactcattctctaagtcatttgaagaaaataagttaccatctaaagaatggaaatttaaagacaaacaccctaaaatgagaaattaacaaggtgatgttagtattgacttataaactcatgcttcaagttgaaagacaaaccattgaacttcatatatttatatcagttctcttagccttcatcagttctcacagccttttaaaatgctaggtaaacatatatgcttgctatctttcaggtttatgtttggtttgtcaaagcatacactaaataattttattctgcataaaatcagaaagatactatttttaaaaataaagattgatacatgcgaaaaattgcatggaaattagagacaatgtgaaatgtaattgaatagcagattagttggaatagttataagagaaaatacaaactgtgatagttagggaagagacgtaagaagtaaagtagcttggatggttcttccttacagtatagacattgaaaaacattttcaaagcttaagtaagaaaacaactcaataaaattgagaaaagagagatgaaaatatcatggagggatgactgttcacttttggcttaactatagtaagactctacacctaaacttttcataagcataaacaaaatttggccaaaaaatctagaattcattaagttattgatagctacctgatactagttcataaagtaagggattaatttctaatttataggctttaactgtgttttgccatatgtacttacagccaactggtggttcctagaatgatttcagatggtatattaataaacatttcaaaaaatgtatttaagtattaaatatgtattttaaaaatataactgtcacaaaaaatgatstgttaggtagttgcccaaagtttgtttgtttttttcccttggctgtatgtatataagttaaaaaaaagagagtaagttaaaaatgaaatattaatatataataaaatgtgatataaagattcggtcaaatatacgaaagtgatgtaaaattaacatcttcaaaaccccaacatagaatgccaataaggctagacctttcagggactgaagtgttcccattcaccattaggctacttccctcatagttaaggtatttgggaaatcaaactgaacatgaaaaagttgattagcaagcagaaactcaacagcaaggcatctggctagttttgataactatatcagcaaggtcatataaaaatctgggatccacttgagaacaatgtagtcgagttctatgatgttggagatactatataaatacattttacgatattcagtagctccctgtattatcaggagatggtctttataggcttaatttttaggaaggtccagagagccggctcctgaaaaattaacatgacacccttgaagaaaacaatgtttatgttgacttctgaggaagacaagcgtcctgggaaaacaggcactcagcctgtgggaggtgtcagcagaaaatgtatccccaacaggaaataccaggctttaatcaatggaaaggtgcttttattgagtacaaaataaggtcatattccatttctgctctcatttctcagcccgctctttcctagtatgtaaaataacttacagagttgcttggaacattaaacaaaataatgtcatatggcaagcactcaataataacattatgattacttgtcctgagaagctggtcatatgttgtgtgtatgtttgagaatggtgattgcgaaattgaagaaaccattttacttggagggacctgtggggaatgtgggcagccttaagcatagatctgaaatcactcaagggaaaacattccttctactttggcactctggcagcaacagctgctgtggtaagcactgaggtcctggaagcaacaaggctgaagtggccgtgaggagtagacaggagtgggatgaagaacaccttgagcttccagggagtttctggggagagaaagaatgaatgattttaagtcccaaagtagggccttgagagcagcataacatggtgctgagctgatagactctgaagttcagcaggatcagtactaattgtgtggcc

SEQ ID NO: 91506 - DNA, 2197 bp, Homo sapiens
agcaaatcataacaagacagtgtcatgaactctagctttcaattctgaagtttagacaagtgtgtacttgtatgtgtgtgtatacctttatttgtacttctgagaatttacgtaatttatttactactcattctctaagtcatttgaagaaaataagttaccatctaaagaatggaaatttaaagacaaacaccctaaaatgagaaattaacaaggtgatgttagtattgacttataaactcatgcttcaagttgaaagacaaaccattgaacttcatatatttatatcagttctcttagccttcatcagttctcacagccttttaaaatgctaggtaaacatatatgcttgctatctttcaggtttatgtttggtttgtcaaagcatacactaaataattttattctgcataaaatcagaaagatactatttttaaaaataaagattgatacatgcgaaaaattgcatggaaattagagacaatgtgaaatgtaattgaatagcagattagttggaatagttataagagaaaatacaaactgtgatagttagggaagagacgtaagaagtaaagtagcttggatggttcttccttacagtatagacattgaaaaacattttcaaagcttaagtaagaaaacaactcaataaaattgagaaaagagagatgaaaatatcatggagggatgactgttcacttttggcttaactatagtaagactctacacctaaacttttcataagcataaacaaaatttggccaaaaaatctagaattcattaagttattgatagctacctgatactagttcataaagtaagggattaatttctaatttataggctttaactgtgttttgccatatgtacttacagccaactggtggttcctagaatgatttcagatggtatattaataaacatttcaaaaaatgtatttaagtattaaatatgtattttaaaaatataactgtcacaaaaaatgatctgttaggtagttgcccaaagtttgtttgtttttttcccttggctgtatgtatataagttaaaaaaaagagagtaagttaaaaatgaaatattaatatataataaaatgtgatataaagattcggtcaaatatacgaaagtgatgtaaaattaacatcttcaaaaccccaacatagaatgccaataaggctagacctttcagggactgaagtgttcccattcaccattaggctacttccctcatagttaaggtatttgggaaatcaaactgaacatgaaaaagttgattagcaagcagaaackcaacagcaaggcatctggctagttttgataactatatcagcaaggtcatataaaaatctgggatccacttgagaacaatgtagtcgagttctatgatgttggagatactatataaatacattttacgatattcagtagctccctgtattatcaggagatggtctttataggcttaatttttaggaaggtccagagagccggctcctgaaaaattaacatgacacccttgaagaaaacaatgtttatgttgacttctgaggaagacaagcgtcctgggaaaacaggcactcagcctgtgggaggtgtcagcagaaaatgtatccccaacaggaaataccaggctttaatcaatggaaaggtgcttttattgagtacaaaataaggtcatattccatttctgctctcatttctcagcccgctctttcctagtatgtaaaataacttacagagttgcttggaacattaaacaaaataatgtcatatggcaagcactcaataataacattatgattacttgtcctgagaagctggtcatatgttgtgtgtatgtttgagaatggtgattgcgaaattgaagaaaccattttacttggagggacctgtggggaatgtgggcagccttaagcatagatctgaaatcactcaagggaaaacattccttctactttggcactctggcagcaacagctgctgtggtaagcactgaggtcctggaagcaacaaggctgaagtggccgtgaggagtagacaggagtgggatgaagaacaccttgagcttccagggagtttctggggagagaaagaatgaatgattttaagtcccaaagtagggccttgagagcagcataacatggtgctgagctgatagactctgaagttcagcaggatcagtactaattgtgtggcc

SEQ ID NO: 91507 - DNA, 856 bp, Homo sapiens
tctgccatcgtaattagaagaatatgccttggcaaatccrttgatccaaggaagattagagacacatgtaatacagccccagtcttcagcttgattccaagggtagccaaattcagctccttaatcagccagcttccagctgacctgcaagcacacgaacttgaacaagtgattgttgtaagccactagtttttagggagtttttctcttccaagacattattgctgcaattggtggtttatgtacatacgttcaagaaatgccttcaaaactcttgtatgttagacactaacctagatgttgattaaatagtagatgaaagaatagtgatatatgttctcataaactaccatttagagagtgatagagacaagttgatggataataaaatataatatgggtaaatgttttgatcagagcatggtgttgtgggaatatatgagcctggtgcctcatttatacctgtgggtttgccttaactctccataagaagtcatgactatgtcaacagtgggactggtaaaaactgtataaaggaatgacatttactccaaatagagttagcagtgtgagtgatcagagggcatagagtactcgatgagctggaaggagatgagattggctatagtgaatgttggaggaagagtggagggagaagcttgtaatgtatgtgctttagctaatgcaacaccatggtaactattatagtgtttggacttgactcaagagcaatggtactggtggtgttgttaggagggaattctagttttcctttactacacctgttattatttagttgtctttcccatgagaagatgagaatatcggtatcctcagtgccagacaaattgctttt

SEQ ID NO: 91508 - DNA, 856 bp, Homo sapiens
tctgccatcgtaattagaagaatatgccttggcaaatccgttgatccaaggaagattagagacacatgtaatacagccccagtcttcagcttgattccaagggtagccaaattcagctccttaatcagccagcttccagctgacctgcaagcacacgaacttgaacaagtgattgttgtaagccactagtttttagggagttyttctcttccaagacattattgctgcaattggtggtttatgtacatacgttcaagaaatgccttcaaaactcttgtatgttagacactaacctagatgttgattaaatagtagatgaaagaatagtgatatatgttctcataaactaccatttagagagtgatagagacaagttgatggataataaaatataatatgggtaaatgttttgatcagagcatggtgttgtgggaatatatgagcctggtgcctcatttatacctgtgggtttgccttaactctccataagaagtcatgactatgtcaacagtgggactggtaaaaactgtataaaggaatgacatttactccaaatagagttagcagtgtgagtgatcagagggcatagagtactcgatgagctggaaggagatgagattggctatagtgaatgttggaggaagagtggagggagaagcttgtaatgtatgtgctttagctaatgcaacaccatggtaactattatagtgtttggacttgactcaagagcaatggtactggtggtgttgttaggagggaattctagttttcctttactacacctgttattatttagttgtctttcccatgagaagatgagaatatcggtatcctcagtgccagacaaattgctttt

SEQ ID NO: 91509 - DNA, 856 bp, Homo sapiens
tctgccatcgtaattagaagaatatgccttggcaaatccgttgatccaaggaagattagagacacatgtaatacagccccagtcttcagcttgattccaagggtagccaaattcagctccttaatcagccagcttccagctgacctgcaagcacacgaacttgaacaagtgattgttgtaagccactagtttttagggagtttttytcttccaagacattattgctgcaattggtggtttatgtacatacgttcaagaaatgccttcaaaactcttgtatgttagacactaacctagatgttgattaaatagtagatgaaagaatagtgatatatgttctcataaactaccatttagagagtgatagagacaagttgatggataataaaatataatatgggtaaatgttttgatcagagcatggtgttgtgggaatatatgagcctggtgcctcatttatacctgtgggtttgccttaactctccataagaagtcatgactatgtcaacagtgggactggtaaaaactgtataaaggaatgacatttactccaaatagagttagcagtgtgagtgatcagagggcatagagtactcgatgagctggaaggagatgagattggctatagtgaatgttggaggaagagtggagggagaagcttgtaatgtatgtgctttagctaatgcaacaccatggtaactattatagtgtttggacttgactcaagagcaatggtactggtggtgttgttaggagggaattctagttttcctttactacacctgttattatttagttgtctttcccatgagaagatgagaatatcggtatcctcagtgccagacaaattgctttt

SEQ ID NO: 91510 - DNA, 856 bp, Homo sapiens
tctgccatcgtaattagaagaatatgccttggcaaatccgttgatccaaggaagattagagacacatgtaatacagccccagtcttcagcttgattccaagggtagccaaattcagctccttaatcagccagcttccagctgacctgcaagcacacgaacttgaacaagtgattgttgtaagccactagtttttagggagtttttctcttccaagacattattgctgcaattggtggtttatgtacatacgttcaagaaatgccttcaraactcttgtatgttagacactaacctagatgttgattaaatagtagatgaaagaatagtgatatatgttctcataaactaccatttagagagtgatagagacaagttgatggataataaaatataatatgggtaaatgttttgatcagagcatggtgttgtgggaatatatgagcctggtgcctcatttatacctgtgggtttgccttaactctccataagaagtcatgactatgtcaacagtgggactggtaaaaactgtataaaggaatgacatttactccaaatagagttagcagtgtgagtgatcagagggcatagagtactcgatgagctggaaggagatgagattggctatagtgaatgttggaggaagagtggagggagaagcttgtaatgtatgtgctttagctaatgcaacaccatggtaactattatagtgtttggacttgactcaagagcaatggtactggtggtgttgttaggagggaattctagttttcctttactacacctgttattatttagttgtctttcccatgagaagatgagaatatcggtatcctcagtgccagacaaattgctttt

SEQ ID NO: 91511 - DNA, 856 bp, Homo sapiens
tctgccatcgtaattagaagaatatgccttggcaaatccgttgatccaaggaagattagagacacatgtaatacagccccagtcttcagcttgattccaagggtagccaaattcagctccttaatcagccagcttccagctgacctgcaagcacacgaacttgaacaagtgattgttgtaagccactagtttttagggagtttttctcttccaagacattattgctgcaattggtggtttatgtacatacgttcaagaaatgccttcaawactcttgtatgttagacactaacctagatgttgattaaatagtagatgaaagaatagtgatatatgttctcataaactaccatttagagagtgatagagacaagttgatggataataaaatataatatgggtaaatgttttgatcagagcatggtgttgtgggaatatatgagcctggtgcctcatttatacctgtgggtttgccttaactctccataagaagtcatgactatgtcaacagtgggactggtaaaaactgtataaaggaatgacatttactccaaatagagttagcagtgtgagtgatcagagggcatagagtactcgatgagctggaaggagatgagattggctatagtgaatgttggaggaagagtggagggagaagcttgtaatgtatgtgctttagctaatgcaacaccatggtaactattatagtgtttggacttgactcaagagcaatggtactggtggtgttgttaggagggaattctagttttcctttactacacctgttattatttagttgtctttcccatgagaagatgagaatatcggtatcctcagtgccagacaaattgctttt

SEQ ID NO: 91512 - DNA, 856 bp, Homo sapiens
tctgccatcgtaattagaagaatatgccttggcaaatccgttgatccaaggaagattagagacacatgtaatacagccccagtcttcagcttgattccaagggtagccaaattcagctccttaatcagccagcttccagctgacctgcaagcacacgaacttgaacaagtgattgttgtaagccactagtttttagggagtttttctcttccaagacattattgctgcaattggtggtttatgtacatacgttcaagaaatgccttcaaaactcttgtatgttagacactaacctagatgttgattaaatagtagatgaaagaatagtgatatatgttctcataaactaccrtttagagagtgatagagacaagttgatggataataaaatataatatgggtaaatgttttgatcagagcatggtgttgtgggaatatatgagcctggtgcctcatttatacctgtgggtttgccttaactctccataagaagtcatgactatgtcaacagtgggactggtaaaaactgtataaaggaatgacatttactccaaatagagttagcagtgtgagtgatcagagggcatagagtactcgatgagctggaaggagatgagattggctatagtgaatgttggaggaagagtggagggagaagcttgtaatgtatgtgctttagctaatgcaacaccatggtaactattatagtgtttggacttgactcaagagcaatggtactggtggtgttgttaggagggaattctagttttcctttactacacctgttattatttagttgtctttcccatgagaagatgagaatatcggtatcctcagtgccagacaaattgctttt

SEQ ID NO: 91513 - DNA, 1092 bp, Homo sapiens
tgcatactcctttgcattagtaaaaaatacaatacagtacaaaaatccctttggttaacaatgcaatcagtagcccactacctactgatccatcctccccttgtgcttctccattgcctacaatgctctggtcagactaggcttcttttagttcttggagcaagtaaagttcttggccacttaaggcttttgttcatgttgatgtctctactggtgtgctttaaaaaagtattttattcatacacaattttacatattacatatttacggcatacatgtgatattttgatacatgcatacaatctgtaatgttcaaatcagggtatttaagatatttatcaccttgaacatttatcatttttttgttgagaacatttcaaaatttctatatactttgaaatatacaatattttgttgttaactgtagtcatcctctgggctatcaaacattagaacttatttcttctatgtaactgcatttttatacctattaaccaacctgtcttcattcctcctctccagtcttctttggtattagtagagagcagaatgatagttaccagagactatcattctaccattctctcattcttccatgaaatctatgtttttagctcccacatagtaagaatatgtgatacttgtcttcctgtgtctggcttatttcacttaccgtaataatcttcagttccatccgtgttgctgcgaacaacaggattacattcttttctatggctgaatagtattcccttgtgtatatatctrtttatccttttattcattgatggacacttaggctgattttctctcttctcatggctggcttctcatcaccctttggtcctcctgtatcctctatgtaataaagctcttccccaatatctcgatagatactttagtcctttgttatgttcagagcacttttctagcttgatataatttcaattatgaggctttttccttttttcttgttctgctgaaaagaaactctgaggcctggtccagccaggattccagccaaggtcttgggcacctgaagccctgtattccctctgtgccatggctgctgacaacattggattgtccttgttt

SEQ ID NO: 91514 - DNA, 575 bp, Homo sapiens
ttatttamactttgacagcaaattgtttttaaacatacgtgaggttatatctgtttctttgtatattaattaatatgtgtgtatagatatattattttaaaatacagatatatatgtgtgtatatatttttttctttaaatttggttggaaaaactctagaaatatgtattttaagatcagagcataaagaatttctataatttaaaatattacaaataaatagcatctgtagctttgctggatatgactaaacatttcaataactctgtttttgtatgattctataaaaaataattaggctgagtgccatagctcatacctgtaatcctagcactttgggaggccaaggtgggaagattgcttgggcttaggggttaaagcccactctgggcaacatagcaagaccttgtctctacaaaaaattaaaaaattagccaggcatggtggctaatacctgtagtcccagccacttgggaggctgaggtagggggattacttgagcccaggagtttaaggctccagtgagctaccatcatatcactgcactccagcctgggtgacagaataatagaat

SEQ ID NO: 91515 - DNA, 788 bp, Homo sapiens
caagctcctcttatgtagttatcttctactgttgctaagtatttcagagtcatctggagtcctgaagtcttctacaaatcccttccatttggacatcaaacaagagaagaaggacctttaatgaaataacttacattttttctaccaatatcccatcagccgaaactactctctctccccactcctccaacactctggaatataaaacagatttatgagtaaccaccactctgttaggtgcactttgaatttagttctttcaaagagaaacgggaatgggactgtagccacctcaagaaatgatactggcaaaagacacatttggtattcctattttattgccacaatatgctgaattttgtctatattaaggaaaaggtatgctgtatatctatcaaggtatattgtgcttggagatatgtaatactctttggaagattttaccttcttcactattaagggaattggattttccagtcattgtaaactgatattttgtaacgtttaattccatgccataaaaataatatcagggaaaacaatagctgtaagaaatttatcaaatgcctcatcttagctcattcttcaaaaggcgtattagtctagytggacttccatgaaggtaataaaagtggtaaatatccagctaacattttgtaagctgaaaaaatttttctccgaaagtaaaatacaggtcactgtgtggtaaaagaaaatactcatactagcagagtacttaatatagtagttttatgtggaaaacatgatgtctttactaggtgtagtta

SEQ ID NO: 91516 - DNA, 1214 bp, Homo sapiens
ataattggtacatgttaatatcaattttttcttttgctgtttttgaagtggtgtgaatcacctgtaacaaggtttccttatcatccatttaattattgtcctataatatacttttcaatacagcaactactttttatgttttgggattacttttactattgttagataaaacctatggttgattgtgtgcctctagaagaacttcaaaagtacaatataaatcttgctaacamtaactcattatggtcagtggtttttcaggatagttatttatctcaactactcatgatgtgaatgtcttttaaaatttgaataattgccctctctgtcagatacaatattattatatttttactgattacattaagaattaggcaagattaaaattttctttttgcaccatcattacttcttaagaacttaactgttgttgaacaaatagtacgtgtgtcagttattaaatgtagtctaaattcatgaaataagaatgtacatatagcatagtgggaaaaacacaggttttagaatcatataccatagagttatgtttcagtagtgctactaatgtattctttgaccctacgtcagtcagcaaacacaactgaaatcaagtggtaactctatgttcctcctttgtgtaataagtatttttacatgtttgagatcaaatgatatagtgtgttaaaattatttataagctaaaatattttataaataatagctgtacttattaaaaattagagattaataagttgttacataaaacacacgtaagcgattcaatgttaggaaaatatatttagctttctcaaaattttatttcataaagcaaagtttcctacattaactatccagctatctgttgtgtttttcatcatcatcacaaatggattcagactggctaccatataaaaacactcataaattctaggaatgccagaagttcctgtcctcaactatctaattgtattctttagataacttcacatattatgaagataaataactagcgatacagcagaacccatggtaaatagcactgagtcatgcagttaatgagcataatgtggacagaagagaaaatcactgttgcttctgtcccttggagcaggtggacttcagctgaaacttgagggaatactgtccattctgtttaggaagcattgctaggaagagtgtattgccagctgcttgtgtttttaaagtcactgcat

SEQ ID NO: 91517 - DNA, 1214 bp, Homo sapiens
ataattggtacatgttaatatcaattttttcttttgctgtttttgaagtggtgtgaatcacctgtaacaaggtttccttatcatccatttaattattgtcctataatatacttttcaatacagcaactactttttatgttttgggattacttttactattgttagataaaacctatggttgattgtgtgcctctagaagaacttcaaaagtacaatataaatcttgctaacaataactcattatggtcagtggtttttcaggatagttatttatctcaactactcatgatgtgaatgtcttttaaaatttgaataattgccctctctgtcagatacaatattattrtatttttactgattacattaagaattaggcaagattaaaattttctttttgcaccatcattacttcttaagaacttaactgttgttgaacaaatagtacgtgtgtcagttattaaatgtagtctaaattcatgaaataagaatgtacatatagcatagtgggaaaaacacaggttttagaatcatataccatagagttatgtttcagtagtgctactaatgtattctttgaccctacgtcagtcagcaaacacaactgaaatcaagtggtaactctatgttcctcctttgtgtaataagtatttttacatgtttgagatcaaatgatatagtgtgttaaaattatttataagctaaaatattttataaataatagctgtacttattaaaaattagagattaataagttgttacataaaacacacgtaagcgattcaatgttaggaaaatatatttagctttctcaaaattttatttcataaagcaaagtttcctacattaactatccagctatctgttgtgtttttcatcatcatcacaaatggattcagactggctaccatataaaaacactcataaattctaggaatgccagaagttcctgtcctcaactatctaattgtattctttagataacttcacatattatgaagataaataactagcgatacagcagaacccatggtaaatagcactgagtcatgcagttaatgagcataatgtggacagaagagaaaatcactgttgcttctgtcccttggagcaggtggacttcagctgaaacttgagggaatactgtccattctgtttaggaagcattgctaggaagagtgtattgccagctgcttgtgtttttaaagtcactgcat

SEQ ID NO: 91518 - DNA, 1214 bp, Homo sapiens
ataattggtacatgttaatatcaattttttcttttgctgtttttgaagtggtgtgaatcacctgtaacaaggtttccttatcatccatttaattattgtcctataatatacttttcaatacagcaactactttttatgttttgggattacttttactattgttagataaaacctatggttgattgtgtgcctctagaagaacttcaaaagtacaatataaatcttgctaacaataactcattatggtcagtggtttttcaggatagttatttatctcaactactcatgatgtgaatgtcttttaaaatttgaataattgccctctctgtcagatacaatattattatatttttactgattacattaagaattaggcaagattaaaattttctttttgcaccatcattacttcttaagaacttaactgttgttgaacaaatagtacrtgtgtcagttattaaatgtagtctaaattcatgaaataagaatgtacatatagcatagtgggaaaaacacaggttttagaatcatataccatagagttatgtttcagtagtgctactaatgtattctttgaccctacgtcagtcagcaaacacaactgaaatcaagtggtaactctatgttcctcctttgtgtaataagtatttttacatgtttgagatcaaatgatatagtgtgttaaaattatttataagctaaaatattttataaataatagctgtacttattaaaaattagagattaataagttgttacataaaacacacgtaagcgattcaatgttaggaaaatatatttagctttctcaaaattttatttcataaagcaaagtttcctacattaactatccagctatctgttgtgtttttcatcatcatcacaaatggattcagactggctaccatataaaaacactcataaattctaggaatgccagaagttcctgtcctcaactatctaattgtattctttagataacttcacatattatgaagataaataactagcgatacagcagaacccatggtaaatagcactgagtcatgcagttaatgagcataatgtggacagaagagaaaatcactgttgcttctgtcccttggagcaggtggacttcagctgaaacttgagggaatactgtccattctgtttaggaagcattgctaggaagagtgtattgccagctgcttgtgtttttaaagtcactgcat

SEQ ID NO: 91519 - DNA, 1214 bp, Homo sapiens
ataattggtacatgttaatatcaattttttcttttgctgtttttgaagtggtgtgaatcacctgtaacaaggtttccttatcatccatttaattattgtcctataatatacttttcaatacagcaactactttttatgttttgggattacttttactattgttagataaaacctatggttgattgtgtgcctctagaagaacttcaaaagtacaatataaatcttgctaacaataactcattatggtcagtggtttttcaggatagttatttatctcaactactcatgatgtgaatgtcttttaaaatttgaataattgccctctctgtcagatacaatattattatatttttactgattacattaagaattaggcaagattaaaattttctttttgcaccatcattacttcttaagaacttaactgttgttgaacaaatagtacgtgtgtcagttattaaatgtagtctaaattcatgaaataagaatgtacatatagcatagtgggaaaaacacaggttttagaatcatataccatagagttatgtttcagtagtgctactaatgtattctttgaccctacgtcagtcagcaaacacaactgaaatcaagtggtaactctatgttcctcctttgtgtaataagtatttttacatgtttgagatcaaatgatatagtgtgttaaaattatttataagctaaaatattttataaataatagctgtacttattaaaaattagagattaataagttgttacataaaacacacgtaagcgattcaatgttaggaaaatatatttagctttctcaaaattttatttcataaagyaaagtttcctacattaactatccagctatctgttgtgtttttcatcatcatcacaaatggattcagactggctaccatataaaaacactcataaattctaggaatgccagaagttcctgtcctcaactatctaattgtattctttagataacttcacatattatgaagataaataactagcgatacagcagaacccatggtaaatagcactgagtcatgcagttaatgagcataatgtggacagaagagaaaatcactgttgcttctgtcccttggagcaggtggacttcagctgaaacttgagggaatactgtccattctgtttaggaagcattgctaggaagagtgtattgccagctgcttgtgtttttaaagtcactgcat

SEQ ID NO: 91520 - DNA, 748 bp, Homo sapiens
ctacacagtgaaatagaaaagaacaaataatccaacagggaatatatacttttatattatgtggtaagacaacacataaaaataaaataaataagatgtgacagtagaaataaagtttttttcacataaaccttggttcaagaatataagaaaataactaagtattaatatgtaaaaattgcaaatgttacaatactgcaagcaagatttctaaccatcttctgggtatgtgacttttacttttctgcatatgtggatatgtcaacaactggaatggtaatgtgcttttcttagaattataaacaagttatgtaacagtttggtggtccaaagacatcctctaacatgtgtgggtctctaaagatacgatttggctgtcaagccttttctatttataggaaaataatacataacgtataaatttctaaacagtattaattctttttgctgacatttacctatttgtttttattcagttttatctttgcaatttcttacaaaataaaatatttttcatttttatgttgccatgtgactacatctgaatatcaaatttttccaaaatagtaatctgattgtgtaacatcgtggcttaaagcccttcagattcttcacatgactcttaagatgatatccaaattctggacatgacccacaagaccactgycagccaagccctccagtcggccctctctgggttcttcataccagctctctccagcttagccacaactcatcaagatcttgg

SEQ ID NO: 91521 - DNA, 609 bp, Homo sapiens
atgtattttatgcacttttattttctcacttctaattcatttcttatcagattttctgctcaccaccactctaataaaataactctttcaaaggtctccaatggcttccaaattgccaaatctagcaatctatgttcagtctcatcctgcttgaccttgccaagttattagtatgttctccatttctgtaagaccaacccttactcttctccttcttctcagcctactcaatatgaaggcaaagaggacaaagatctttgggataatcacttccaattaatgaatagtaaatatatgtaacatacaaaatatgtggtaattgcctatgttattggtaaggcttccagtcaacaggaggctattagttaagttttaggggagtcgaaagttatgtgtgggtttttgactgtgaggaggtgctgctaacctcaccttactcaaggatcaactgaatttatcccagaatccccttccrtacgtggtctggatttgagttagataaaagagaagctttcttgagtgaagagggcatttattttggaagactgtggtgggaggccagggtgagaggaagtcccagggtgttcactgggctctagtttcagctca

SEQ ID NO: 91522 - DNA, 982 bp, Homo sapiens
taacctcatcttttttcaaattgtgagtattttaaacaaagagttatgtatgaatgagagaaaatgtgagaaagagccatgaaactacagatactataaatttccattaaaaataaaataytttattagttttattctggtgttgtattgtagttttactgtaataaaaccatattatcagcaacatccaatagcattagaataacttaagcctgcaaagatagaaaatatagagcacaaatattccacggtgtttaataaattattccaaccatccatgtttaagccaatgttattttaataagaaattttcagatcagctatttacaaagcataaactattcccatcacttttattccacgaattgaccttcacagtacagagccatttccacattcttttatttctcttggaaaatatatagtgattatcaaggtagttactgcaagagtaaaagatgagaaagttacttgaatattacaaaaataaagtatcaatacatagtatatgtaagttattcttataacaagcacacgtaactttgacaaatgaatctcaaaattgtcaatggaaataaatttacatcaggtgtcctttttcaataaattatttcaggaacgtgaactattgtattaaagagtatattaattcatccttttttgtcattgcttttccatgtttttattgctctacctttctttgagaggctaatatatagaaattggaagctattttccaatgggcagcatcaaatatcttggcttatttgctgttggcatggggctggtcacatgttcatgtttttcttggactattcagctgcccctccagctttgtgcaacattgttttccatgaatgagctttgattaagataatttcatagtttaaactattatgttggagaattaacttgtaacaattttaacataaaatgatttattataatctcaggattgggtattggtcgaggtttctatgtc

SEQ ID NO: 91523 - DNA, 623 bp, Homo sapiens
tatatatccagaaagacagcccaaaatcaccccagaataatactcccacgtctccactacttgacctctctaccattcaactcaactttgatgtctaatttttgccttgaaactgcataaattcagtcttcaaaagtttattgttctgtaggacaaccagaaatttacactcagttaagaaacataagacrcagttgtcttttagcgtgtccattcttctgaatgtatatcactcataataataataaccaatacctcaaagcaaataaagtattttatgatgtggcttagtggttttatttatgcctcctcaggaagccaagagaccacaacacaaatctgaaaaacaattagcctgtttctgattaaacatgtattgcttaaagctgtagcaagtgaacaagtgaaaaagtttactgctaattcatacaagcagtattttttgctgggccctttaaataatgaaagctatgcaaatagtggcaaaggataaaagaaattaaacacaatttaatttcttcattttgaaatgcaatcagtaactgttttcattcatactcctttggattttcttatctatcctgtgcaccaaggaaataaaatgtatctagaaaggtcaattg

SEQ ID NO: 91524 - DNA, 642 bp, Homo sapiens
gtgtactatggacacatagtctaggaatttatcctaacttctcttcttctccatgaaatatatgagaaattgcctgtctccaaagccaaaactaaaagctacttaaattgactgcagatgcttatgtatctcaagattaatgcactgtggatacagaactctcaacccagacttcacaaccaaatcaactggagctcatatggcacacacctgtggaattcaaccaactaaattctcagagatttggatacaagtagatatatttttattaccagaaaggaagggtaaaagcagaagcattttgtaagacctttcttaacaagcaagtatgtattgcaagggggctctgggaaatgaggcctgcaggaggggagggagtagacacaggatgcacaggaaagacgatggcaagtaccaaagaaaaatatcgttgatttctaaaattagaaaatagcatcagtgactgaaaaggaccatatacaaagtttgtgggttcttttcattgattattataaccaattgcagcttccattaccattttccaaatctgctatctcttgggttcataatttgctaaagctttggcccccaaagaagcattctatctcctattatamactaactttcctagccaacatttcc

SEQ ID NO: 91525 - DNA, 745 bp, Homo sapiens
tgtgtcactaataaagaacttggtacatcagttgaacctctgcacatgagaataacatagactgtaagatcgtggcccagttcacatgaatttraaataataaaatgtatacccaagaaactctctggccaacttcagaactggaacactgccagtccctttatgctgtttatctgggtgcctggttctcctctagcctttctcccagtcatccttacctcctctcatccaaccggttagcactagcctgaattttttgtttatcattatgttgttgcctttttgtttgctttgttttggttttctcttatactaaaagacttttcaaatatattttagaacagttttagctttacaggaaaactgataaggaagtacagagagttttgttgtacacacaggttaaaaaacaaaaaaaagtatggactttacacaaacctcctctccctgactgcacaaacacaagcacagttccccccaattatttgcatcttgcattagtgtggtatatctgttacaactgatgaaccaatattgatacactattactaactaaagttcacagtttatatgagggttcaccctctgttcagttaattttcaaaatgtcatttcttttttttttgagacggagtcttgctcttgttgcccaggctggaggtgcaatggcatgatctcagctcactgccatatccgcctctgaagctcaaacaatgctcctgcctcaacctcccgagtagatggg

SEQ ID NO: 91526 - DNA, 745 bp, Homo sapiens
tgtgtcactaataaagaacttggtacatcagttgaacctctgcacatgagaataacatagactgtaagatcgtggcccagttcacatgaatttaaaataataaaatgtatacccaagaaactctctggccaacttcagaactggaacactgccagtccctttatgctgtttatctgggtgcctggttctcctctagcctttctcccagtcatccttacctcctctcatccaaccggttagcactagcctgaattttttgtttatcattatgttgttgcctttttgtttgctttgttttggttttctcttatactaaaagacttttcaaatatattttagaacagttttagctttacaggaaaactgataaggaagtacagagagttttgttgtasacacaggttaaaaaacaaaaaaaagtatggactttacacaaacctcctctccctgactgcacaaacacaagcacagttccccccaattatttgcatcttgcattagtgtggtatatctgttacaactgatgaaccaatattgatacactattactaactaaagttcacagtttatatgagggttcaccctctgttcagttaattttcaaaatgtcatttcttttttttttgagacggagtcttgctcttgttgcccaggctggaggtgcaatggcatgatctcagctcactgccatatccgcctctgaagctcaaacaatgctcctgcctcaacctcccgagtagatggg

SEQ ID NO: 91527 - DNA, 1043 bp, Homo sapiens
atactatggtaagcatggtttttcctaactgcagcatagatggtaagtttagttttgaagaaactgaagtgtctataagctatagggtagtagatagatatttagaacttattatccaaagaaaaataagaagagaggggaagaaaagagaaaaacgctcttataaataaaaaatattactattgttcataaaacataggaggtagaacaaaattaaaatttattttaaattttattattgccactgcaattccccttacgtcaaccttgatataccttttaaatatttaaggtgtaatgattacttcagttcttaggccaatagatagtcagatttgctacatagtctcccttacaagttttttttttattagtcatttcttctgtagacattatggtcaaataacacgatatgtagttatcatagcaattgatttcacataaattaagccaaggagcaacataatgaaaacatgcaaagatataatttatatgatgtttttaattggtcagaaatggcttactgaytaatgttataatattgggattaatagaagtagaaagaatgttgatttctaccccccgcacccagattttagctcaattaacataaactggttgaacagttaaggttggacaacatcataaaaaatgtgtgtggggacaaactgtacattctataaactgttgtgtctgtataatttgaaggaattatagggaaaaaatctaggttgtatattacctagatttgcgctaatatgatagctatataactttgaattaattataattaaataaaataaaaaatttagtttcttggtcatgctagccatacttcaagtgccaagaggcacatgaggctcatgtctaccatactggacaataaccatctaggacatttccattatcacaaaaagttctgttggagagcaccagtctacacagcaccagcaagtcagttccctttctttggaatgaaataagctaaataaaatttttaagagggatttttctctccgtgtgctccacagtaagcactgtca

SEQ ID NO: 91528 - DNA, 462 bp, Homo sapiens
ttgcagaggtgccctctttgagcagaagaaagacaaagattatctccttctttagggaacagagtgtggcgaactgagtccaggttggatttcagtcacttctcatctgtgcctcttcttgtgcagtgcacaaaaggtacaacaatccatggagacctgtggctttccattaacaaagaggccgttcttggaatttcaagtcagttgacttaactgaggctcaagaaacagaaaaattaagtatatggtggaaacaagcctcagaaataaggctaaatctcagctttttaagacatagatcacacatttggccaagatatcaagactgacttgattctctctctctctctctytttttttttttttttttttaaacacagggtctcgctatgttgcccaggctggtctggaactcctgagctcaagagatcctccctcctccgcctctcaaagtgctgggat

SEQ ID NO: 91529 - DNA, 747 bp, Homo sapiens
tcccttctttgtgctccagagatccagtaacagccagccatcaccctctcttcattcttcataggcctgaactaaggtgttcagggccctccttcaagcttttaggttctgatgactccaaccacttcttttgttccatcctttcctagctctaggaatggtagctgctacctgcagtgattacctgttaccttttataattccttttgaccaatttcccatattaaaatatttctcaataactaatgtgatttctgttttcctgactggaccctgattttaaaatgcacacaaaagccaggtgcagtggcttatgcctgtaatcccaccactktgggaggccgaggcaggtggatcacctgaagtcaggagttcgagaccagcctggccaacatggcaaaaacccatcgctactaaaaatacgaaaattagctgggcagtggtggcaggtgcctgcaatcccagctacttggaaggctgaggcacgagaatctcttgaacccgggaggcgaaggttgcagtaagccaagatcatgccactgcactccagcctgggtgacagagcagactgtctcagaaaaaagtcacacaaagagacatattacaggaggttcacaaaaactttataatagaaagataattgtaagcaacctatgtctatatattggagaactgctaaataaattatatgtattcaataagctattaggcaacatttaagaagaataaggtttatctgaacacaca

SEQ ID NO: 91530 - DNA, 687 bp, Homo sapiens
cgtttccttggatcacgccacagtctcttttctctgagttcgtctctgatgacaagtaaggatacttgtgaaggaagatttccccttagttcttgactttttctttatttttttctgattcttcagtgagattcccagttcttccatgatagcgttgaaagagagacactagggaacatgagatacagaccatcagcttaattaagcctatcgcatgtgcygttgacctgcctcttgcctaggtatttatgaacacaagatattggcttgaaggcagctctgtcacaattggccagttcccatcacctcctcctccacccgctggccacccaccttttctaatcggggaaactgagatggcaagttagctgggcaaactttgggatttcattcacaaatgcagtagtataaaactacccagttaaagcaaactcagggctctcaaaatagataacttacctttgctgagacaccaaaatagagttaaattaagtcatttcccccactgagatgatccaaacattgataggattatcaaggcatacggacacttcagtaatgctatagaaaatgaacaaaccttctctacaccaaggctttgtttttttctcccatgaaaccttactttgttcctaaaataaaatctaattcttgatgactttcctttctgataaaaaaaaaagaaaa

SEQ ID NO: 91531 - DNA, 553 bp, Homo sapiens
cgtactgcaaaaggaggcgggatactcaggtagtattttctggtactttgcatactggaaagtcctccagtagcctggatctggggcctggattaaaaatgtgatggagttcacatttctaataaatctacacttgcacttgattttttttttttttttttgacagagtctcactctgtcaccaggctggagtgcagtggtgccaacttggctcactgcaacttctgtctcctgtgttcaagcgattctcctgcctcagcctcccgagtagctgggactacaggtgcgcgccaccacacgcggctaatttttgtatttttagtagagatgtggtttcaccacgttggccgggatggtcttgatctcctgacctcatgatccaccccccttggccttgcaaagtgctgggattacaggcgtaagccaccgtgtccggcctacaagygacttttaattacagtttagaattggtgcctggtatcagaatgagttttaatttcagctatacttcctagtagccaggttacaccgggcaaggtatttattttctctt

SEQ ID NO: 91532 - DNA, 1065 bp, Homo sapiens
tttcaagttttattaaaatatatttaaaattctgtggctagatgaatatttattacacctggaatattaatttaaaataggttacatttatgacctaataaagacttgtatatgtgttaagtgtggcctttaaggtacataaagggctcactaaaattattgtgcttcatatgtttaaatattcttaataaacttctcatgagagatacttcaatgtacaatcagtaggacactaggttgagcatcacaaggcttgagttctagccctgatcggctggtaatgagccacgtgaaattgaataactcatttaacctcagcagatgtatttgctcaactgcagaataagtaaggttcactaaagatctcttacacatttagacatgattgtgattctatgaaaacataactgtgatagaaatgaggcagcttcagaagaaaccatgcaaaaatggtcactggtctttgccataaatacaaaggccacagcatttcactcagatatctgatggaagcttgggaaacatttaactctgattaggcatctttcagagcaaaacacagcttgggctgatatttgtcctctaaggaaaactcaaaggctcaaagtgtagaatattgttttttttaattgcctaacatttcatttgtagccttagggccatggagcactgaccttgcattagaagcccctccaggaccttctcaagatcaatggtttgatctccaccatcattcactgctggaaattaaaccagactcctgaggaccaagccaccatcagctgtagcctcagggagatgggaatgtgggagcaggcccactttaagcaagctgctgaataaatatagacttgaaaaatggaagaaacacatgaagcctgtttctgttttctaagaaagatgtgtttctttcagtggtaatgtatattctaactttaatctggtaagtacacctgtaatcactayaaaccttgtgaatatcaacagctaaaatttaaaatttatttattgtacttgctcctgcagtttaatttaataaaatatgaggtctagaggaaggtactt

SEQ ID NO: 91533 - DNA, 568 bp, Homo sapiens
atatgccatctatttgtattctgagaatctgtttgacaaatttctttccagaaaacccatacccacaattaacctagttattcagtgtgtatgggggtatttattccctaagaaaagcattctttgtccctcaagcagcgcaaccatgataaaatgtcagatacatctttatggtagtaggagtgttagccattttgctatagtcatgtccatttcataatttactttttacttaatattttgctagtcacttttactagccaattccaagctttactaattgtaatctgaattcagacyaaaagatattttttgtatcagattttgtcctcaacactttcttaacgggcagtgtttgtccattagctattttcttggaaataatcctgctaaaaggatactaaaaacacaaaactgcttagacccagttaggaattgaacttctgattttccccagataaggtgcttcatattatggtttacttattactttctttcttcattgattcatctgtcattcattttctcagcaaacagttgccatctcctatgtgtagtgttttgacat

SEQ ID NO: 91534 - DNA, 568 bp, Homo sapiens
atatgccatctatttgtattctgagaatctgtttgacaaatttctttccagaaaacccatacccacaattaacctagttattcagtgtgtatgggggtatttattccctaagaaaagcattctttgtccctcaagcagcgcaaccatgataaaatgtcagatacatctttatggtagtaggagtgttagccattttgctatagtcatgtccatttcataatttactttttacttaatattttgctagtcacttttactagccaattccaagctttactaattgtaatctgaattcagaccaaaagatattttttgtatcagattttgtcctcaacactttcttaacgggcagtgtttgtccattagctattttcttggaaataatcctgctaaaagratactaaaaacacaaaactgcttagacccagttaggaattgaacttctgattttccccagataaggtgcttcatattatggtttacttattactttctttcttcattgattcatctgtcattcattttctcagcaaacagttgccatctcctatgtgtagtgttttgacat

SEQ ID NO: 91535 - DNA, 744 bp, Homo sapiens
agggtgggattctggcaaaaggaagtgatagtgtttgtaacagaatactgacaaatcaaatagtaaaagtttaaataagaaaataaggaactgatgacaattttattttwaaaaaattggattaattatattaccactaaaattactatctaaatcttcctaaatatctaaagaaatttataaaatattgattaaagaaaacacaatgtgtagagaaagaagcatggcaaatataacaatgcacatgatcattacaacataaaataatttctcagagatgacaccaaacaaaatagcaggtcattaaatgtgaacaagcttaacttacctattaaaatacaatgattattaattggactcaccaagaaagaatcactatgttcaagagaaacattgaaaacaaagtgattaagaaagtctaagaataaaagtatatgcaaattaaatacaaaatgagataccataatatttctattaggatggctaaatttttttaaactaagtgtaatgattgattaagaaagtctaagaataaaagtatatgcaaattaaatataaaatgagataccatattatttccattagaatggataaaaattttaaaacgaactgtaccgatagctagcaagtatgcaaagcaacaggaactctcatttattgctagcaaaaatgcaaaatgacccagccactttgaaagacagtttggcagtttcttaaaaagctaaacatattcttaccctataa

SEQ ID NO: 91536 - DNA, 1038 bp, Homo sapiens
acaacagactaaaagctaaatcagatatgagaaactgtcttccattaagcgagacattaaagagaytgaccaaacatgtaaaacattccactattcctaagaagtttttgctctaaaaaaattatgtttctaaaaatatgaaattatgactgttattttgaaattgattaactcatattttaaaatcatcaattttaattttaaaaagatgaatatcagtaaatataacacataaagaatggcttttcaagatcctcagtaagttcttttatgatcgaagagttttaaaatcattactccaaacaaactaatcctatccaccattatttcttggtggtacgttacttgagacagaagcatgcctgaaatattttggtttaaatcctcaaatatgggagttatttaattaggaaataacactatgctctttgactctctgtgtgttggttttaaaaagtatggttcaaataatagatacatattccaacaagaattttaaaagaaaagtgacaaagtcttcaatatctcaaatataagaactcaagtgactaaccctacttaaaattcactttctaggggcaattaatctgtatagcataaacgagattcttttaaaagagaataatatagcccatggcttttcttttcttatatttgctgccatcgttcccagggatatatttaatttttaagtggaaacactgtctaaaatttggttcctagcagaattttctcattcctttttctatattgttgtattagataggagtagaatttattgcaagtgatagaaatagtgtacattttaagaatgtatttctctttcacataatcaaagtctggatttaagtcatctctagctggtttctagtcctcagtgacccagactcattctaaatcattgcttcatcattcataagatgtaaccttcatcttcatagtcaaagatggtggcatttgtgtcctagggaagaggaccaagaaatatacaaagaagatgatagactccatgcaacttgaatcttaaggaaggatcca

SEQ ID NO: 91537 - DNA, 1213 bp, Homo sapiens
tgcatttcttctgcttaatattctgaatctcctactgtgctaattctatatcctctgcctgggctcacagatctctcataatatacctcttcccctaaccattccaaatctgtttaccactctaagtcatggtaatcatcacattatttgttaaatacattcatgtgcaagacaccaaccatttcccctaaacagccgatttaatgcccattctgcctctgtccccagtgactctcccaccttgratttctgattttctaatctattaatgcagttcttccaagcccagttcatttccccttcgacagaagctttctgcagttcccggagtcctcattatcttcctttcctatgaactcctgccagtcttttcatctgtgacacataagctgttatatctcaagttttgttcttttctacaaataggtatgttagtcttgatcttccaaatggatggttagttctttgatctcagcaactattctcatctacacaacactatcatggtgctgaccaaacacatattaagtgctcgataaatccctgttgatcacctactgaacccaggtgaaaaaatatattttccattaattcatttgctccactgcaatttttaagagttagagtttctaaaagtggagtgtatggatcagcagttatcagcatcacttgggaatttgttaaaattgcagattttgaggttctacccaaaacctactaaatcagaaggtctaggagtaggacccaaaaactctatgtttttcaagcactctggttaatttaatacacactatcatttcagaaccactgccatagatcaatcgtcttgtcctcataacaaggtctctagataaaatagcagtggccaacacaaaaggttaatggcttactgagcttttatttttgaggacattctgacctgtttaaaaccagacaagtggtgattagcagtgtactttctgtgattcacaaagcttagacaataatggaaacaggctatttgagcaatcagttatctaaatgaatctaaaaggttttgctgtgaaggttaatattccatgttttatctaacatttgccttgtaccctccgccaaaattggtttaatgtgcagttctgaaactggaatctaaagtgcagaggttattgtggaaagctcaatcatctagctgctacataagtctgaatatttgtaaaggttttagaacccaaat

SEQ ID NO: 91538 - DNA, 1213 bp, Homo sapiens
tgcatttcttctgcttaatattctgaatctcctactgtgctaattctatatcctctgcctgggctcacagatctctcataatatacctcttcccctaaccattccaaatctgtttaccactctaagtcatggtaatcatcacattatttgttaaatacattcatgtgcaagacaccaaccatttcccctaaacagccgatttaatgcccattctgcctctgtccccagtgactctcccaccttgaatttctgattttctaatctattaatgcagttcttccaagcccagttcatttccccttcgacagaagctttctgcagttcccggagtcctcattatcttcctttcctatgaactcctgccagtcttttcatctgtgacacataagctgttatatctcaagttttgttcttttctacaaataggtatgttagtcttgatcttccaaatggatggttagttctttgatctcagcaactattctcatctacacaacactatcatggtgctgaccaaacacatattaaktgctcgataaatccctgttgatcacctactgaacccaggtgaaaaaatatattttccattaattcatttgctccactgcaatttttaagagttagagtttctaaaagtggagtgtatggatcagcagttatcagcatcacttgggaatttgttaaaattgcagattttgaggttctacccaaaacctactaaatcagaaggtctaggagtaggacccaaaaactctatgtttttcaagcactctggttaatttaatacacactatcatttcagaaccactgccatagatcaatcgtcttgtcctcataacaaggtctctagataaaatagcagtggccaacacaaaaggttaatggcttactgagcttttatttttgaggacattctgacctgtttaaaaccagacaagtggtgattagcagtgtactttctgtgattcacaaagcttagacaataatggaaacaggctatttgagcaatcagttatctaaatgaatctaaaaggttttgctgtgaaggttaatattccatgttttatctaacatttgccttgtaccctccgccaaaattggtttaatgtgcagttctgaaactggaatctaaagtgcagaggttattgtggaaagctcaatcatctagctgctacataagtctgaatatttgtaaaggttttagaacccaaat

SEQ ID NO: 91539 - DNA, 1213 bp, Homo sapiens
tgcatttcttctgcttaatattctgaatctcctactgtgctaattctatatcctctgcctgggctcacagatctctcataatatacctcttcccctaaccattccaaatctgtttaccactctaagtcatggtaatcatcacattatttgttaaatacattcatgtgcaagacaccaaccatttcccctaaacagccgatttaatgcccattctgcctctgtccccagtgactctcccaccttgaatttctgattttctaatctattaatgcagttcttccaagcccagttcatttccccttcgacagaagctttctgcagttcccggagtcctcattatcttcctttcctatgaactcctgccagtcttttcatctgtgacacataagctgttatatctcaagttttgttcttttctacaaataggtatgttagtcttgatcttccaaatggatggttagttctttgatctcagcaactattctcatctacacaacactatcatggtgctgaccaaacacatattaagtgctcgataaatccctgttgatcacctactgaacccaggtgaaaaaatatattttccattaattcatttgctccactgcawtttttaagagttagagtttctaaaagtggagtgtatggatcagcagttatcagcatcacttgggaatttgttaaaattgcagattttgaggttctacccaaaacctactaaatcagaaggtctaggagtaggacccaaaaactctatgtttttcaagcactctggttaatttaatacacactatcatttcagaaccactgccatagatcaatcgtcttgtcctcataacaaggtctctagataaaatagcagtggccaacacaaaaggttaatggcttactgagcttttatttttgaggacattctgacctgtttaaaaccagacaagtggtgattagcagtgtactttctgtgattcacaaagcttagacaataatggaaacaggctatttgagcaatcagttatctaaatgaatctaaaaggttttgctgtgaaggttaatattccatgttttatctaacatttgccttgtaccctccgccaaaattggtttaatgtgcagttctgaaactggaatctaaagtgcagaggttattgtggaaagctcaatcatctagctgctacataagtctgaatatttgtaaaggttttagaacccaaat

SEQ ID NO: 91540 - DNA, 1213 bp, Homo sapiens
tgcatttcttctgcttaatattctgaatctcctactgtgctaattctatatcctctgcctgggctcacagatctctcataatatacctcttcccctaaccattccaaatctgtttaccactctaagtcatggtaatcatcacattatttgttaaatacattcatgtgcaagacaccaaccatttcccctaaacagccgatttaatgcccattctgcctctgtccccagtgactctcccaccttgaatttctgattttctaatctattaatgcagttcttccaagcccagttcatttccccttcgacagaagctttctgcagttcccggagtcctcattatcttcctttcctatgaactcctgccagtcttttcatctgtgacacataagctgttatatctcaagttttgttcttttctacaaataggtatgttagtcttgatcttccaaatggatggttagttctttgatctcagcaactattctcatctacacaacactatcatggtgctgaccaaacacatattaagtgctcgataaatccctgttgatcacctactgaacccaggtgaaaaaatatattttccattaattcatttgctccactgcaatttttaagagttagagtttctaaaagtggagtgtatggatcagcagttatcagcatcacttgggaatttgttaaaattgcagattttgaggttctacccaaaacctactaaatcagaaggtctaggagtaggacccaaaaactctatgtttttcaagcactctggttaatttaatacacactatcatttcagaaccactgccatagatcaatcgtcttgtcctcataacaaggtctctagataaaayagcagtggccaacacaaaaggttaatggcttactgagcttttatttttgaggacattctgacctgtttaaaaccagacaagtggtgattagcagtgtactttctgtgattcacaaagcttagacaataatggaaacaggctatttgagcaatcagttatctaaatgaatctaaaaggttttgctgtgaaggttaatattccatgttttatctaacatttgccttgtaccctccgccaaaattggtttaatgtgcagttctgaaactggaatctaaagtgcagaggttattgtggaaagctcaatcatctagctgctacataagtctgaatatttgtaaaggttttagaacccaaat

SEQ ID NO: 91541 - DNA, 1213 bp, Homo sapiens
tgcatttcttctgcttaatattctgaatctcctactgtgctaattctatatcctctgcctgggctcacagatctctcataatatacctcttcccctaaccattccaaatctgtttaccactctaagtcatggtaatcatcacattatttgttaaatacattcatgtgcaagacaccaaccatttcccctaaacagccgatttaatgcccattctgcctctgtccccagtgactctcccaccttgaatttctgattttctaatctattaatgcagttcttccaagcccagttcatttccccttcgacagaagctttctgcagttcccggagtcctcattatcttcctttcctatgaactcctgccagtcttttcatctgtgacacataagctgttatatctcaagttttgttcttttctacaaataggtatgttagtcttgatcttccaaatggatggttagttctttgatctcagcaactattctcatctacacaacactatcatggtgctgaccaaacacatattaagtgctcgataaatccctgttgatcacctactgaacccaggtgaaaaaatatattttccattaattcatttgctccactgcaatttttaagagttagagtttctaaaagtggagtgtatggatcagcagttatcagcatcacttgggaatttgttaaaattgcagattttgaggttctacccaaaacctactaaatcagaaggtctaggagtaggacccaaaaactctatgtttttcaagcactctggttaatttaatacacactatcatttcagaaccactgccatagatcaatcgtcttgtcctcataacaaggtctctagataaaatagcagtggccaacacaaaaggttaatggcttactgagcttttatttttgaggacattctgacctgtttaaaaccagacaagtggtgattagcagtgtactttctgtgattcacaaagcttagacaataatggaaacaggctatttgagcaatcagttatctaaatgaatctaaaaggttttgctgtgaaggttaatattccatgttttatctaacatttgccttgtaycctccgccaaaattggtttaatgtgcagttctgaaactggaatctaaagtgcagaggttattgtggaaagctcaatcatctagctgctacataagtctgaatatttgtaaaggttttagaacccaaat

SEQ ID NO: 91542 - DNA, 709 bp, Homo sapiens
tcttgttgcttattattccataatttaatttataaattccaacacaattcccaataaaataccaatattctatttttaattggcaaaactaattctaaagttcattgagctttctttgtaatgagaatacatttctttagtgttggaattggaaattttacttgattcttctttaaatctcttttttcctatattgcattatccaccaccactcccaatcctagtccttgggtttcagttccatcatgtcttaataattttaaacatatttagtgtatattctctttatatcctcattgtaggtatattatctcaaagtctaatattctagaatccagcatyctgatctcactgtttatgattccctgtctcactaattttggctcatatcatcatttggtcattttgattagtaattattaagggtttatttttctgtgaaaaatcccttatgcctcaatttgtatctgcttcttcaagcagcttaatgaatatcactggtatcagactaatttgcatatgagtttcttttcttcagagtctcagactaccgcacttgtaaaattcaaaccccaaaactatgtgatacggacacctacagttttaaattcccactaagaacctagcaagaaagggaacaaatatttggggttctccctgttctgttattttctaatccacagatgggtgccacctcttccaggatccc

SEQ ID NO: 91543 - DNA, 709 bp, Homo sapiens
tcttgttgcttattattccataatttaatttataaattccaacacaattcccaataaaataccaatattctatttttaattggcaaaactaattctaaagttcattgagctttctttgtaatgagaatacatttctttagtgttggaattggaaattttacttgattcttctttaaatctcttttttcctatattgcattatccaccaccactcccaatcctagtccttgggtttcagttccatcatgtcttaataattttaaacatatttagtgtatattctctttatatcctcattgtaggtatattatctcaaagtctaatattctagaatccagcatcctgatctcactgtttatgattccctktctcactaattttggctcatatcatcatttggtcattttgattagtaattattaagggtttatttttctgtgaaaaatcccttatgcctcaatttgtatctgcttcttcaagcagcttaatgaatatcactggtatcagactaatttgcatatgagtttcttttcttcagagtctcagactaccgcacttgtaaaattcaaaccccaaaactatgtgatacggacacctacagttttaaattcccactaagaacctagcaagaaagggaacaaatatttggggttctccctgttctgttattttctaatccacagatgggtgccacctcttccaggatccc

SEQ ID NO: 91544 - DNA, 709 bp, Homo sapiens
tcttgttgcttattattccataatttaatttataaattccaacacaattcccaataaaataccaatattctatttttaattggcaaaactaattctaaagttcattgagctttctttgtaatgagaatacatttctttagtgttggaattggaaattttacttgattcttctttaaatctcttttttcctatattgcattatccaccaccactcccaatcctagtccttgggtttcagttccatcatgtcttaataattttaaacatatttagtgtatattctctttatatcctcattgtaggtatattatctcaaagtctaatattctagaatccagcatcctgatctcactgtttatgattccctgtctcactaattttggctcatatcatcatttggtcattttgattagtaattattaagggtttatttttctgtgaaaaatcccttatgcctcaatttgtatctgcttcttcaagcagcttaatgaatatcactggwatcagactaatttgcatatgagtttcttttcttcagagtctcagactaccgcacttgtaaaattcaaaccccaaaactatgtgatacggacacctacagttttaaattcccactaagaacctagcaagaaagggaacaaatatttggggttctccctgttctgttattttctaatccacagatgggtgccacctcttccaggatccc

SEQ ID NO: 91545 - DNA, 709 bp, Homo sapiens
tcttgttgcttattattccataatttaatttataaattccaacacaattcccaataaaataccaatattctatttttaattggcaaaactaattctaaagttcattgagctttctttgtaatgagaatacatttctttagtgttggaattggaaattttacttgattcttctttaaatctcttttttcctatattgcattatccaccaccactcccaatcctagtccttgggtttcagttccatcatgtcttaataattttaaacatatttagtgtatattctctttatatcctcattgtaggtatattatctcaaagtctaatattctagaatccagcatcctgatctcactgtttatgattccctgtctcactaattttggctcatatcatcatttggtcattttgattagtaattattaagggtttatttttctgtgaaaaatcccttatgcctcaatttgtatctgcttcttcaagcagcttaatgaatatcactggtatcagactaatttgcatatgagtttcttttcttcagagtctcagactaccgcacttgtaaaattcaaaccccaaaactatgtgatackgacacctacagttttaaattcccactaagaacctagcaagaaagggaacaaatatttggggttctccctgttctgttattttctaatccacagatgggtgccacctcttccaggatccc

SEQ ID NO: 91546 - DNA, 833 bp, Homo sapiens
gataatagctaaagctgcatcaccaaaagagattttatttcagtaggaagcacaagaaaactagaaaatgtggcygggtgcagtggctcatgcctgtaatttcagaactttgggaggccaacgtgggtggatcacttgagatcagaagtttgagaccagcctaggcaacatggtaaaaccctgtctctaccgaaaaaaaatacaaaaattagccggatgtggtggcacacacctgtagtccaagctactcgggaagctgaggcaccataatcgcttgaacccagaaggcgcaggttgcagtgagccaagatccccccactgcactccagcctagattacagagtgaaaccctgtcttaaacaaaaacaaacaaacaaaaaagtagaaaatgtggcagacacagaagagtgagacactaatcgtggaattccacatatgctaagaaaagatgtacaataagtcatcctgtgtaaacagtgtcttccaagactctccacaattcatggaatttcccactcaaggactctgtgtcaatttttaatgaaccagttactgaacattgtacctaagaccatgacaacttatgctcagccattccatgctcttccatacccagtgcagacaaatttattggggtttaattcaaaatgtgcaaaaaagaaaaatttgcaaattgtttttaaaaaggtaccatctactctcactattaggagcaagttttactacagattgctcaaataataaattcctgggattgaggcccgtctacattaccttgtggtgcttctttttctctgtacacactcacagcgtaatcagagtaaactactgca

SEQ ID NO: 91547 - DNA, 833 bp, Homo sapiens
gataatagctaaagctgcatcaccaaaagagattttatttcagtaggaagcacaagaaaactagaaaatgtggccgggtgcagtggctcatgcctgtaatttcagaactttgggaggccaacgtgggtggatcacttgagatcagaagtttgagaccagcctaggcaacatggtaaaaccctgtctctaccgaaaaaaaatacaaaaattagccggatgtggtggcacacacctgtagtccaagctactcgggaagctgaggcaccataatcgcttgaacccagaaggcgcaggttgcagtgagccaagatccccccactgcactccagcctagattacagagtgaaaccctgtcttaaacaaaaacaaacaaacaaaaaagtagaaaatgtggcagacacagaagagtgagacactaatcgtggaattccacatatgctaagaaaagatgtacaataagtcatcctgtgtaaacagtgtcttccaakactctccacaattcatggaatttcccactcaaggactctgtgtcaatttttaatgaaccagttactgaacattgtacctaagaccatgacaacttatgctcagccattccatgctcttccatacccagtgcagacaaatttattggggtttaattcaaaatgtgcaaaaaagaaaaatttgcaaattgtttttaaaaaggtaccatctactctcactattaggagcaagttttactacagattgctcaaataataaattcctgggattgaggcccgtctacattaccttgtggtgcttctttttctctgtacacactcacagcgtaatcagagtaaactactgca

SEQ ID NO: 91548 - DNA, 833 bp, Homo sapiens
gataatagctaaagctgcatcaccaaaagagattttatttcagtaggaagcacaagaaaactagaaaatgtggccgggtgcagtggctcatgcctgtaatttcagaactttgggaggccaacgtgggtggatcacttgagatcagaagtttgagaccagcctaggcaacatggtaaaaccctgtctctaccgaaaaaaaatacaaaaattagccggatgtggtggcacacacctgtagtccaagctactcgggaagctgaggcaccataatcgcttgaacccagaaggcgcaggttgcagtgagccaagatccccccactgcactccagcctagattacagagtgaaaccctgtcttaaacaaaaacaaacaaacaaaaaagtagaaaatgtggcagacacagaagagtgagacactaatcgtggaattccacatatgctaagaaaagatgtacaataagtcatcctgtgtaaacagtgtcttccaagactctccacaattcatggaatttcccactcaaggactctgtgtcaatttttaatgaaccagttactgaacattgtacctaagaccatgacaacttatgctcagccattccatgctcttccatacccagtgcagacaaatttattggggtttaattcaaaatgtgcaaaaaagaaaaatttgcaaattgtttttaaaaaggtaccatctactctcactattaggagcaagttttactrcagattgctcaaataataaattcctgggattgaggcccgtctacattaccttgtggtgcttctttttctctgtacacactcacagcgtaatcagagtaaactactgca

SEQ ID NO: 91549 - DNA, 753 bp, Homo sapiens
tgcgtgccaccgtgcctggttaattgtgtgtgttttttttttttttttaagtagagacaggtttcactatgttggccaggctggtcttggactcctgaacttgtgatccatctgtctcagcctcctaaagtgctgggattacaggtgtgagccaccacacctggcctcaccctcaaaccttgagagatgaaaggagggaagggtgagtggaagtttcctctactgataggaagtttaaagaaggttccacaagaatgccatgtggtccttcagccaacgttgccatcagaagggtcctgtctccaggcaagattagctgcataatttgacggtccagtgcaaaaataatatgcaggactcagtgttaaaaatgtattaagaattttgggctgggcgcagtggctcctgtctgtaatcccagccctttggggggccaaggtgggtggattkcttgagcctaggagttcaagaccagcctaggcaacatggtgaaactgtatctctacaaaaaattagccagacgtggtggcatgcacctgtagtcccagttactcaggaggctgaggtgggaggaccacctgagcccaggaagtcaaggctatggtgagctgtgattgggttattgcattctagcctgggcgatggagtaaaaccctttctcaaaaaaaaaaaaaaaaaaaaaaagagacagagagagaatttcaagacaaaatagcagagtgctcaacggagtgcagggtccttttgagttca

SEQ ID NO: 91550 - DNA, 649 bp, Homo sapiens
acatgcaccaccacatccagctaattgataacagtaattttatttatttatttatttgacagagtctcgctctgtcacccagtctggagtacagtggcatgatcactacaacttctgcctcctgggttcaagcaattcttctgcctcagcctcccaaggagctgggattataggtgcgcaccaccacacccagctaatttttgtatttttagtagagacagggtcttgccatgttggccaggctggtcttgaactcctgatgtcgggtgatccaccgaccttggcctcctacaatgttgggattacaggtgtgagccaccatccccggctgataatagtaattttaaatactcaacacaaatattatttttaacccctgcatcttccttcagatctgagaagtttcttgaagaccatcagcatcttcagtgggcgactggaagatacactgtggttacctgggaggcagcccagcctggaccagcaacccaacctgcttcttcagagcaaaacaagaactaggaatcatcttttcacctgggaaggaatcaagtaaaaagcaaaaytgaactaaaggcaagggtgacataatttgtattacatataaatgaccagaaaccactggtggccacaaagttttactttgagc

SEQ ID NO: 91551 - DNA, 1244 bp, Homo sapiens
caccagctaacatttgttaagcacttactctctttctggcccatgtgtttatgagcctaatcctgactgcagccctgtgtggtaggtgcttcagtaagccccatttgttagataagaaaattgactcctggccgaggtgccccatatggaaggtggtagagctggggcagattccagcccaggcgcctggctcttggcatgagcagcctaccatagcaccagttctgtggttcttccctctgagaagcctgtattgaattgcttttctttaagttgtattttgtgtttagttgaagtgcccaatcctcccattcagttttcaggggaggcaggtgtggtggtggtgcacacctgtagccctagctactctggaggctgacgtgggaggattgcttgagcctagtgagccgtgattgcagctctgcactgcactgcactggcggggtcgyagcaagatcctgtctccaaaaaaaaaaaaaaaaaagttttaagtggttttcatggtgcctcaaggctcttctgcctgtaggactgactgctgtgcagggctctggccctggagtttagattaacagcaggaagcctcttgtttacatggatccacatggctgcagcttcctagccaagggacctcaggacagtacaaggttctgttcctggttgacgctccagttggtgctgggtgggcctcaggttgcctcagttttagctgtatgtttgaaaaagtgatgccctaatgatccactctagaaataaggcagagagaatcaggaaatagggtttttaagttgctcaaacatcgctccatagattatcacatttactccttgggcaggttttttctttattttatttatttatttattttgagacagagtgtcgctctgtctcccgggctggagtgcagtggtgccatctcggctcactgcaacctccgcctcccaggttcaagtgattctcctgcctcagcctccccagtagctgggattacaggcgcacgccaccacgccaggctgggcaggtatttttattattagccccgttaaaaagttttttatcgagatgaaattcacataacataaaagtaaccattttaaagcatgcacaatccagtggcacttagtaccttcacagtgtcatgcagccagctcctctatctggttctaaaacattttcatcacccccagaggaaaccccatgcccattaagcagtgacttcctattctccctgcccccagcccctg

SEQ ID NO: 91552 - DNA, 599 bp, Homo sapiens
agggcagagcccttacaaagggattcatgccattgttgcaggagtgggttagttatcctgggagtgggctcctgataaaaaggatgagtttggctccatgtcctctccctgtctcctgtgcttgcttcagcttctgccttctgccatgcgatgaccctcaccagatgctggcaccatgctcttagacttttcagcttccagaaccgcaaaccaaataaatctcttttatttataagttacccagtctgtggtgttatgttatagcaacagaaaatggactaagacatggtatttggaggtgaggcctttaggaggtaattagggttaggtgaagtcaggtgagtagagtcctttttgcaagaaggtgacagtctacaagccaggaggagagccctcaccaggaatcaaccatgctggcagcctaacctcagacttctcaacatccagaactgtgagaaataaatttctattgtttaaggcacctagaatagggcattttgttatagcagcccgagcrgatgaagacacctaccaccactcagctttggaaccaggattctgaaccaaagcctatagatcctatgttcttaacaactgca

SEQ ID NO: 91553 - DNA, 663 bp, Homo sapiens
aaatgataaatttcagtttgaggttggtaaacataaaaatatgatttttccttatgaactttttgaattctgtttatgtatcttttggggactttgatcatgccaccttagaattagatgatccagctcattttgttgctacaactttagagggaagcggggggactcctttttgctgactcccattctgcagacatagaagtcttttctctgcagactcgcatctgtggattagtgcataacccacctatttcaagcagctacatagtctctacttgttactgtgactccagaaacttctcagtttacaacagtctaacaattatgccttcaaatctgatgcaagagaacttgaacaaagcccccaaagtcctctgataggtgaaacgtccaatcttatctctactgaggagagctgccacctgaatttatagcmgtgtacactcacttaaagcaaaagtgaaaaaaatacaaagaagagtttagctaggcatagaaaaaatgcaatgggtattttgtgagttctgagtttctcttgaaatgtgagccaatttgattctgggaaaattcaacttccttgtttgaagacagcttatgaaatggcttttgagttttatgtataccaaatgcttctgcactcacccaacaggattttttcaggtg

SEQ ID NO: 91554 - DNA, 635 bp, Homo sapiens
tgaatgtgcccaatttctaaaagtaacaaaggatgtaaatgtcaaataatagagcacattgtatccaatatttaaaatagctcctggaatgctgaggcagtttgaaaaagacaaacacaggggtgtcaaaaatttttctatgtttcatattatttttccataattaaaaattagctactatgattaaaaaataaatctgtagcacttataaaagaacacataagaaaaggattctttggtccaagagagattgagtaattcttgggatggtgaccctgatttcaaacgtttggcttttcaattacttggtgtaaaatctggtacttctctaagaaaggaactgattaattcagaaacaggcagcaaccagcttcctcccagagataagatgacatcaccccaaagtcccagacagtatggtaaatacaacttcaaaataggcaatcacattcactgaaatgaagtccctgcagccaaccacgatcacccatcctctatcatcccgcctcattaccttagccttcagtgtcaggatgagcaaagctgggggcatcyggccaagtcttacacaaatccctaagatatcttttatctccgggttaatagatcatgttaaggatttcagtggcagaaac

SEQ ID NO: 91555 - DNA, 498 bp, Homo sapiens
aatcattgagaagacaataaatgtatataaattataaacttcaataataagttcttgaaaatgttcatttcctgtgccatttccttcctatgcattgccatacagctctttgtatgtataaatgaggaagaagatatgcacttaagatgatttctttgaatattataagcctccccgcttccaatacaattaatcaccttcccatgtgtgatggaaactgcaaaatactttttttccttgtgttataaaaatatcccttgattgtcaacttttagtttttaagtgctttgatctactttgaatgtgaagagtgcagggtccccaaactaagtgggtggcctccaccctatggtgtgagaaaaagctgtgaattttcccccttattttttatgtccatgrgtttcttatttagaggaaaatttaatacacaattggtacctttgcagttagctcacccaaatgttatttgtttaagaggtatttgatgtccaacatacc

SEQ ID NO: 91556 - DNA, 609 bp, Homo sapiens
gcccagaatccaccttcaatcagccaccctagcagctacctggaagcagaggcccgaaagattagtgctcaggggctgagacttcttcagggaagcacaacctggatggctttgaaatgactatgtctggaacccgcacaacttactattgctgttgcaraagatctcatcaaacaagcttcctctggagggaattatgcacaaacaatactaaaagaggttttaaaataacttcactttttgggagaagaaaaagagcacttaatttctggactttattgaaagtccctgtcatgtcttcagaaatcccttcatgggctgttttatgactccatcggcagattaggctcttcctgctccacactaattgctaagcactattgcctaataattgtgccattaacctatgtcagcagtgtaactattgtgattcccatgccatgctcagaagagctgtttcatctaaccttttgaaagtagaaaatcattagacagtggaatctatttctctttgaatagttgttaacttacacttgcccaatgatattaatttttgacacatttctattttgatgtatttacttagcaaaatggaatattgaacctttc

SEQ ID NO: 91557 - DNA, 622 bp, Homo sapiens
ttctctgcatcatgtacatttcaaggtgtagactgtgttctgaagggagagtcggccccacatccttaccttcttttcctgtggtttattgcagaactcagctgccttcacctcctcctgccatttttcatcacttctgagactgttagctcttagaccccccaaatagaacagtttcctttgtgagcccctattatatgcttgccaccattgtttttcaaacctaggatcctccaaactcagtgccactcagcctcttctactgatgaagaaactggagttcaaaggcttgcttgyagcttcccaggtgtatgacgagtatttcaggtcggccagcgccttgtgaagcccacactccagggttgagggcaacatgtaacaatgtcagggaaggctgaggaagtgctgtgccatcgcaaaagaataaaatataagtctagaaatgcggaaggtactgtacagcatcacagctacctaaacttcctctatgggaagacagggaaagtaggcgttagtggcaagacagagtggctttgagtctaagtgtcataataaactctgacggggaaaaataaggggcagcatttgcacatgtgtgctgcagattacccgctgtgaggca

SEQ ID NO: 91558 - DNA, 513 bp, Homo sapiens
gggggacctcccccaccccagttcactcctcccacactgtggggcctacagagctccaggtgattctggcagaaactcgaccatggccaactggtgctccaggaaacagagggacctttgacctaattattcccaattgcttgtctccatcaatcacattctcttgataattgcccagctccccactctgttcttcagtttttttgtcaataaaaaggagaatattatacctatttcataggattgttgaagaattaagtaacttaatacaagtaaagttcacagagtttgcctggcacatgggaaacattcaatcaatgttagctattactataacacktgtggtagtttttcaaatgggttaaaaatccttttgcacttctttcttttcaggtgggggggatggaggggagagtaaatctatgttcctgtcccttgaatctgtgtggactctaactgccttgaccactgggatataggaatgtgactttgaggctgggtcataaaagggca

SEQ ID NO: 91559 - DNA, 601 bp, Homo sapiens
cctcaattcatgtctgaagcattaatgctattttcatttatttctgtctttcatatgcagtgggatcttaacaaattgaggcctagagatggacagaaagactcccaggcaccagaaagctatttcttgcagccaccacgttgctgtgattaacaaaatagttggatgcattttccactcaaaagtggctacagggggaactgagtgtgagttgttcactgtcaactaacagcaccattagaattatgttaaagctgagctaagagaagcaagagaaaggatgctactcaagaagaatcttctagtgaaagagtgaaaactttattggtctcaatggcagtggtgaatcaaggacttttttttttttttttttttttttgagatggagtctctctctgtcgcccaggctggagtrcaatggtgagatcttggggctcactgcaacccctgcctcctgggttcaagcaattctcctgcctcagcctcctgagtagctgggattacaggcacccgccaccacgcccagctaattttttgtatttttagtaaagacgaggtttcaccatgttggccaggctggtctcgaactcctgacctcggg

SEQ ID NO: 91560 - DNA, 601 bp, Homo sapiens
cctcaattcatgtctgaagcattaatgctattttcatttatttctgtctttcatatgcagtgggatcttaacaaattgaggcctagagatggacagaaagactcccaggcaccagaaagctatttcttgcagccaccacgttgctgtgattaacaaaatagttggatgcattttccactcaaaagtggctacagggggaactgagtgtgagttgttcactgtcaactaacagcaccattagaattatgttaaagctgagctaagagaagcaagagaaaggatgctactcaagaagaatcttctagtgaaagagtgaaaactttattggtctcaatggcagtggtgaatcaaggacttttttttttttttttttttttttgagatggagtctctctctgtcgcccaggctggagtgcaatggtgagatcttggggctcactgcaacccctgcctcctgggttcaagcaattctcctgcctcagcctcytgagtagctgggattacaggcacccgccaccacgcccagctaattttttgtatttttagtaaagacgaggtttcaccatgttggccaggctggtctcgaactcctgacctcggg

SEQ ID NO: 91561 - DNA, 593 bp, Homo sapiens
aagaaagaaagaaagaaagaaagaagaaagaaagaaagaagaaaagaaaagaaaagaaaactgttatggacataacccctctcttgttctggttgctcagatcacagcatgcaatgtcaatattgtgtggcttatttgtgcagtttgttcttttatatgcctgatattcaaattttgttaaggawcctatacagaaagaaggtgacaagagccccatgttgctctgacatgtcccactatttcccaagacctatctcgttttttctttctttacatttcagaagcatccctgctccaagagaacaaaggcaagctcatagacacatccttctttgtaaacacagtaaagaggaggggaaaaaataaaaggcacatccctcaataactgggctctggaaggcaatacactggagatagttacctgtgatctggagacatgaacctagaatagaagaagtgccatattagatgtctatttccatctatgaagaagtgtcttagcaaactttgtattaggaacaactacactagctggataaaatacaaaagacagcattcagagtgcctgagagaacaaacaagacatccagatt

SEQ ID NO: 91562 - DNA, 730 bp, Homo sapiens
agagaattgctgtgattaattttacagggcaacttggctaggccatggtgctcagatatgtggtaagctgttattttggatgttttcatgagggtttttgggaggagatcaacatttaaatcagccaagttgaagtaaagcagatggcgctccctaatgtgggtggggctcacccaatcagttgaaggcaggaatagaacaacttctgacctctttgagcaagaaagacttctgcctgcagatggcctttgggcgtcaattgcaactcttccctgagcctctrgactgttgcctaccccatcagatttgggactcactatggctccacaattacatgtcaattccgtaaaataaatctctctccacttacatacgtacacacacacacacacacacacacacacacacacgacctgttggttttgttactggggagaactctgactaatataattatcccaaagtttcagtttctggtctgaaagtgatcttcagtccacttattcctgtgctttgcaaattctacctctttttcaaatttcaaaattcagaacatttcaaaaataagttgacattgcaaatttcatctcatcaaatgctaaaaaaagttcatacttctggccgggcgtggtggctcatgcctgtaatcccagcattttgggaggctgaggcgggtggatcacctgaggtcaggagtttaagaccagcctgtccaacatggtgaaacccc

SEQ ID NO: 91563 - DNA, 666 bp, Homo sapiens
acccaagcagactgagatatccaccaaatcatcaacctgatcatattttaaatctcaaaataacagtagccaaccacaaataaatggtcaagctttccacctgtagaccttcaacatcacagcttaaacccaacaactattaaatttactatttcaggtcaagctgctatgctaaacagtctcatttcctaataagaaaaagatacgaactagaataggaactgtgatttaaaggctacrgggatgcagagcatggccatcccatctagtctggaaaactaggaaatgacgcagcaatatctaaccaaatctgtaggcaaagcttactgtgcagagtgacagagcagagttacagaatccatgaaagcaccaggccactcctactccggcctgcacaggtaggcaagggctgaaaatcactagttatggttagtgtagttaacagaaggccagcggagtcatgaaaatgttcaaaagtaaaactgtccaagaaaatcagacattcccatctccatgtttttatatgtccaaaatttctattctgacttaaatcctaaatgtaattgatccaatttggaaactactacaaaaagctcacccctcaattttttgccattttattgagttatctttctcaatcaggttaattcccaacgctctaagcca

SEQ ID NO: 91564 - DNA, 666 bp, Homo sapiens
acccaagcagactgagatatccaccaaatcatcaacctgatcatattttaaatctcaaaataacagtagccaaccacaaataaatggtcaagctttccacctgtagaccttcaacatcacagcttaaacccaacaactattaaatttactatttcaggtcaagctgctatgctaaacagtctcatttcctaataagaaaaagatacgaactagaataggaactgtgatttaaaggctacagggatgcagagcatggccatcccatctagtctggaaaactaggaaatgacgcagcaatatctaaccaaatctgtaggcaaagcttactgtgcagagtgacagagcagagttacagaatccatgaaagcaccaggccactcctactccggcctgcacaggtaggcaagggctgaaaatcactagttatggttagtgtagttaacagaaggccagcggagtcatgaaaatgttcaaaagtaaaactgtccaagaaaatcagacattcccatctccatgtttttatatgtcsaaaatttctattctgacttaaatcctaaatgtaattgatccaatttggaaactactacaaaaagctcacccctcaattttttgccattttattgagttatctttctcaatcaggttaattcccaacgctctaagcca

SEQ ID NO: 91565 - DNA, 666 bp, Homo sapiens
acccaagcagactgagatatccaccaaatcatcaacctgatcatattttaaatctcaaaataacagtagccaaccacaaataaatggtcaagctttccacctgtagaccttcaacatcacagcttaaacccaacaactattaaatttactatttcaggtcaagctgctatgctaaacagtctcatttcctaataagaaaaagatacgaactagaataggaactgtgatttaaaggctacagggatgcagagcatggccatcccatctagtctggaaaactaggaaatgacgcagcaatatctaaccaaatctgtaggcaaagcttactgtgcagagtgacagagcagagttacagaatccatgaaagcaccaggccactcctactccggcctgcacaggtaggcaagggctgaaaatcactagttatggttagtgtagttaacagaaggccagcggagtcatgaaaatgttcaaaagtaaaactgtccaagaaaatcagacattcccatctccatgtttttatatgtccaaaatttctattctgacttaaatcctaaatgtaattgatccaatttggaaactactacaaaaagctcaccccycaattttttgccattttattgagttatctttctcaatcaggttaattcccaacgctctaagcca

SEQ ID NO: 91566 - DNA, 692 bp, Homo sapiens
gtactgtttaagcatgtcacacatattgctatatttaatccatatagcaccacatgaagtaggaattattatcatccatattttggtgatgaaaaacctgagaaacagcaagattaagtagcttcccagatcccacagttagtacatggcagagtttagaactcaagtgctgtgactcccgatcaaggactttccatcctgagctctaggcccaccacactgcctgacaggtgtcccagaagcatcttaaacacaggatgaaccaaactgaaatcacctattttaaacattttttttttgtatattcattaacacctacccagctgctcatgctaaatctaagctgtcttcaattccattcttctctttgactttcaagaaaaacagataacatcattagcactgtagaaatgtaaaaattagccctgggcaacacagtagattattttacaaaattccctctccacctcctttrtttacttaagtcttatttgaaaaggctgttgcagaatgtctacaacaatttaacaaacacattctctcatcccattcctgtgttctcccctgggtatttttgtcagcacagcttaggaagaagaacccagactgtggagtcagaaagaactgggttcgaatcctggctcttcaaatgattggctgtgacatatttggcaactctcttagcgttccta

SEQ ID NO: 91567 - DNA, 526 bp, Homo sapiens
ataagttcttgtcacgtctttcaagttcaagagctattcctttgggttggttttgaattatgtttgtggtaaagagttactctggttattagaatctgtattacaggccagtgatagctggaattttagatgcttaagggaacacgtaagacagccatataatatatggctcccacatgtttatttttccagataagagaattttaaaaacaaacaagtctatcatctatcataaatagkacctcatgaaggacaggatatttggaacaataatctccaagaagtggcaattcctccctagaaaggtcacctttcatagacatatacacacgtgtgcatatgtgtgtgcacacaagcaaggctgcatgtttgcctggacatcctctttctctctgtctctctccatacgtagtgtgtgtgtgtgtgtgtgtgtgtgtgtgtgtgtgtgtgtatttttctctatgtggcaaaataaagagctggggctacatactgctgtctcacatattttttaaatatttgtatt

SEQ ID NO: 91568 - DNA, 526 bp, Homo sapiens
ataagttcttgtcacgtctttcaagttcaagagctattcctttgggttggttttgaattatgtttgtggtaaagagttactctggttattagaatctgtattacaggccagtgatagctggaattttagatgcttaagggaacacgtaagacagccatataatatatggctcccacatgtttatttttccagataagagaattttaaaaacaaacaagtctatcatctatcataaatagtacctcatgaaggacaggatatttggaacaataatctccaagaagkggcaattcctccctagaaaggtcacctttcatagacatatacacacgtgtgcatatgtgtgtgcacacaagcaaggctgcatgtttgcctggacatcctctttctctctgtctctctccatacgtagtgtgtgtgtgtgtgtgtgtgtgtgtgtgtgtgtgtgtgtatttttctctatgtggcaaaataaagagctggggctacatactgctgtctcacatattttttaaatatttgtatt

SEQ ID NO: 91569 - DNA, 526 bp, Homo sapiens
ataagttcttgtcacgtctttcaagttcaagagctattcctttgggttggttttgaattatgtttgtggtaaagagttactctggttattagaatctgtattacaggccagtgatagctggaattttagatgcttaagggaacacgtaagacagccatataatatatggctcccacatgtttatttttccagataagagaattttaaaaacaaacaagtctatcatctatcataaatagtacctcatgaaggacaggatatttggaacaataatctccaagaagtggcaattcctccctagaaaggtcacctttcatagacatatacacacgtgtgcatatgtgtgtgcacacaagcaaggctgcatgtttgcctggacatcctctttctctctgtctctctccawacgtagtgtgtgtgtgtgtgtgtgtgtgtgtgtgtgtgtgtgtgtatttttctctatgtggcaaaataaagagctggggctacatactgctgtctcacatattttttaaatatttgtatt

SEQ ID NO: 91570 - DNA, 619 bp, Homo sapiens
tacctgcagtgcaagagaaagcccctcgtgttgcagtcagaaaaccattgctgaccttggttgaccttagatgggtcacctaacctttcgaggctcaactccttcattcataaaaatgaatggatgctttcttgaggttgctgtgaggacatccctgagatgatgcctgtgaagaaagtctgcaaactgtgaagcactatacagattaacacagcaacatactgcatgtgcatggctgtgcatgcgtgtatgtgggtgtaaatgtgaggctttttgttcttggcaactgttcataactgtacctcggtgaactcttaggtaggtcaggaagctaaggtttactattgtgcagtgttcagcatgcaactgytttttggaatgtcactgtctttctgaatgttccttttggtttattaggttagttcacattaagaagaacttggtgaggaagccacatggaagaaatggaaaggctttctttggcagctctaccctaagagggcaaaggggtcagttctgcgagagaacccccacaaggaggctggcccgggacaagcattccaggcctgtctcaagtctgaatacaaataaatcccttctcaggtggttttcttcataa

SEQ ID NO: 91571 - DNA, 619 bp, Homo sapiens
tacctgcagtgcaagagaaagcccctcgtgttgcagtcagaaaaccattgctgaccttggttgaccttagatgggtcacctaacctttcgaggctcaactccttcattcataaaaatgaatggatgctttcttgaggttgctgtgaggacatccctgagatgatgcctgtgaagaaagtctgcaaactgtgaagcactatacagattaacacagcaacatactgcatgtgcatggctgtgcatgcgtgtatgtgggtgtaaatgtgaggctttttgttcttggcaactgttcataactgtacctcggtgaactcttaggtaggtcaggaagctaaggtttactattgtgcagtgttcagcatgcaactgctttttggaatgtcactgtctttctgaatgttccttttggtttattaggttagttcacattaagaagaacttggtgaggaagccacatggaagaaatggaaaggctttctttggcagctctaccctaagagggcaaaggggtcagttctgcgagagaacccccacaaggaggctggcccgggacaagcattccaggcctgtctcaagtctgaakacaaataaatcccttctcaggtggttttcttcataa

SEQ ID NO: 91572 - DNA, 558 bp, Homo sapiens
ccggctggggagggtgggaacatcaaggaaggctctctggaggaggtggtccctgagcttaacactgatgaatgagtaggagctacctccaatgcttttcacacatgaaggggtagatgaatcacttggagatctttcactaagcaggttcagattatcaggtcttgcagcaggagctgagaccccgggttgctcccaggtgatgcctacagcaggatgagatgtggaacagcaagaatccttcgataaatacagggcaggatccggggaagttgaaggracaggagcatttcctgcagacagtacagcccaggcaaagacacaagggcacagacagcctggtctgcgtgagctgcaccatgtgactggggttctgcagcccaacatcaggcaggaaggacaggaccatgagaaacagcgtgcaacatatgcagggtgtcttcccaattatcctcagaaacactcatctgcgtgggtgagtcttgtcctgaggataccacctgtcccagaaaagtgtgaggaaccgtaggctgaagctcccccttggagaagccacca

SEQ ID NO: 91573 - DNA, 558 bp, Homo sapiens
ccggctggggagggtgggaacatcaaggaaggctctctggaggaggtggtccctgagcttaacactgatgaatgagtaggagctacctccaatgcttttcacacatgaaggggtagatgaatcacttggagatctttcactaagcaggttcagattatcaggtcttgcagcaggagctgagaccccgggttgctcccaggtgatgcctacagcaggatgagatgtggaacagcaagaatccttcgataaatacagggcaggatccggggaagttgaagggacaggagcatttcctgcagacagtacagcccargcaaagacacaagggcacagacagcctggtctgcgtgagctgcaccatgtgactggggttctgcagcccaacatcaggcaggaaggacaggaccatgagaaacagcgtgcaacatatgcagggtgtcttcccaattatcctcagaaacactcatctgcgtgggtgagtcttgtcctgaggataccacctgtcccagaaaagtgtgaggaaccgtaggctgaagctcccccttggagaagccacca

SEQ ID NO: 91574 - DNA, 558 bp, Homo sapiens
ccggctggggagggtgggaacatcaaggaaggctctctggaggaggtggtccctgagcttaacactgatgaatgagtaggagctacctccaatgcttttcacacatgaaggggtagatgaatcacttggagatctttcactaagcaggttcagattatcaggtcttgcagcaggagctgagaccccgggttgctcccaggtgatgcctacagcaggatgagatgtggaacagcaagaatccttcgataaatacagggcaggatccggggaagttgaagggacaggagcatttcctgcagacagtacagcccaggcaaagacacaagggcacagacagcctggtctgcgtgagctgcaccatgtgactggggttctgcagcccaacatcaggcaggaaggacaggaccrtgagaaacagcgtgcaacatatgcagggtgtcttcccaattatcctcagaaacactcatctgcgtgggtgagtcttgtcctgaggataccacctgtcccagaaaagtgtgaggaaccgtaggctgaagctcccccttggagaagccacca

SEQ ID NO: 91575 - DNA, 558 bp, Homo sapiens
ccggctggggagggtgggaacatcaaggaaggctctctggaggaggtggtccctgagcttaacactgatgaatgagtaggagctacctccaatgcttttcacacatgaaggggtagatgaatcacttggagatctttcactaagcaggttcagattatcaggtcttgcagcaggagctgagaccccgggttgctcccaggtgatgcctacagcaggatgagatgtggaacagcaagaatccttcgataaatacagggcaggatccggggaagttgaagggacaggagcatttcctgcagacagtacagcccaggcaaagacacaagggcacagacagcctggtctgcgtgagctgcaccatgtgactggggttctgcagcccaacatcaggcaggaaggacaggaccatgagaamcagcgtgcaacatatgcagggtgtcttcccaattatcctcagaaacactcatctgcgtgggtgagtcttgtcctgaggataccacctgtcccagaaaagtgtgaggaaccgtaggctgaagctcccccttggagaagccacca

SEQ ID NO: 91576 - DNA, 714 bp, Homo sapiens
attttgtttcagctctgtcctctttcctgcccctaatcctggagctatgaatgttcctgctaggagcctgatcttgaatcacaagtatacagctcctcttaagtcctagaaggttttaattgtgggtttgtccagaaagtttccctctgctccctgaattgcctgttttctctgagatcctttctgtcttgtctttagtttctgtttgtctgtgttagagggcttcctgtctggtgatccttggctatctattcatagttaagagtgagacactaaaatatttatcagaaactggtgtgctggggcaggatttgcctgtgcagtgagaggcgaagtacatgttcagmggagcccacattgttagcatctggagcctgtcctctgggtgatgttgtcctcagaggtcatctgttttcctgcttgctggttataggtttggctatggctgccctggagcagggatggggaaggggccagaagtccaccattcagtgtgcacaattcatatccccacctcaccctgcactggagtgccagctgcctcgatttcccagaggatcaccctcgagtctctcgtgggatcaaggagctagtgtctgcctgagcagcagatctaacaacccttggacagcattcaataacccacctcttgccaaccccatctcatcccaacctttcagagggcctggagtctgattccggagcctctcgggt

SEQ ID NO: 91577 - DNA, 1366 bp, Homo sapiens
atttacgtcatccataaagaagaagggaggaaggaccacagaagcccactctctatcagaagggccagagctcagggagcgcctttgtcagcaagatgggaaccagcttttacggagcactttgtgtcttcaaagaacttcaccaacattgactcattaagccacccacacctctgaggcagctggggtggcttggttctccctgtcagagaggagagaggtcaacgctcacctcagggcacagggcaaattcaagagagggcaagggccagtgtgtcccagatgacccggccgaggaacctgcttctgtgtcagggaaggggtcaagtgaggtcggaagtcaaggaccagctctctaggtgctgaagggttaaggaaggaggaagagagggtggccggtggctggtggcatcatgttaccttctgcctgtcatccagagagccaagctgaacaggcatcagggtgcctgtgaggaggggtgggcccagccttcctggggcagcagcccctccactctcttttcctgtgctgacagagaagggagaagaggtctcagagaggctcttggaccgagttcctttgttcctcccttctaggagtggtgcatttttacaatatcaacagtcctcactcccaggcaagatctctgtaatgcatcacacagatgaatccttctgtatctcaaagttcacacacagtatgaacttaacagccaacagggagcttgtttttatgctaatggaatggcaaagggaaagttcttcccaaatgaaagagctttgatgtcctgtatttctatatgtgtgtgtatgtgtgtacacatatatatatacacacaaatatatatatatatatatatatayacacacacacacacacacatatatttcctccaaaaaagaaatggctggtccggagctgaatctctttcctcctcaaacccctacttggaagcaggcattcctcccatcgtgaaagggctcacatacagcacaacttggtttctgaaagcttggcctttggagctagaaagatttgtttcagtcattgtctggatgtggagaagaacctgactcttagaggcagctttctctgaccccatcgctgcctgggatcccaacatctaggaagaggtttaaaagagaaactgtccaaccccaaaccaagggcaacacaaaccagcctggcttcttcactcacagcttgagcaagctgcttgtctcggtgattatttggacacatgctacgaagcacagagacatacgcttaccttttgttttcagggattaaagagaagattttaaaaatctgaagccaaaaagacacagagcaacagaagcagctgtacaaaacacaccctcagaa

SEQ ID NO: 91578 - DNA, 551 bp, Homo sapiens
tttcattctttcaacaaaatgactaagtcttctgcattttcacttacctactgcattatttcctatagcaattataaacttggagcacggatatttttctagcaaagaaacttccaaagatgtttttgtttgtcttcgaaggagccgcacttccctaacacaagaaacaagatgaaactaaagcaacttcaatataaacagtatcatggcaaaagggcactatatgtatgatttacaataaataaaatgcacgttagttttataaagaatataactaatatcctcagaaaacgatggactcggacaatgataaccaacagataaaactaytgcatacgtgtttacggagaactctaaaatagtgatcaggctgtccacctgacccaagaaccaatcttagcatccctaaaagtgagacagctggggatagcctgcaataagaaacagaaagcaccacttagtagaagcattcttgccgacaaaactttgaatgagaatctgaccaagcctccaaatgaacattcattttacaggacatgcaggtgatacaa

SEQ ID NO: 91579 - DNA, 562 bp, Homo sapiens
taatcataaaactattctcctatactttcctctggtgcttttagagtttttctacatttggattgttaaatctgtctggaatttatttctatgtgtggtgtgaagtagagaactaatttatattttccaaaatgaatatccaattgaactgaaacattttattttattttattttttccagacagagtttcactcttgttgcccaggctggagtgcaatggcacgatctcggctcactgcaacctctgcctcccrggttcaagcaattctcctgcctcagcctcccccgtagctgggattacaggtggacaccaccatgctcggctaatttttgtatttttagtagagatagggtgtcaccatgttgatcaggctggtctcgaactcctgacctcaggtgagccacctgcctcaacctcccaaagtgctggaattacaggcatgagctgccgtgcccgacctgaaacttttttgagtggtctcttcctcaacaagctgaaatgctacctttattgtatattaaatttttggctagtctcacaatttttcctatttccaatgg

SEQ ID NO: 91580 - DNA, 665 bp, Homo sapiens
gtgctgggattacaggcatgagccaccttacctggctgtcaagtcttaaaatatgataatgttaaggattatctgtttttatcctaaatgatggaaatctttcaaacaaagtctgggcaatccttagcaaaaagagcaaagctggaagcatcacattacccaacttcagcctatacaacaaggctacagtaatcaaaacagcatgacactggtacaaaaacagacacatagaccaatggaacagaatagagaaccctaaaataaacccatacacctacaaccatctgacctttgacaaaatcaacaaaagtaaacaatggggaaagaactgcctattcaataaatggtgctrggataaccagctagccaaatgcagaagaataaaactaggcccttacctctcaccattcaaaaattaactcaagatggactaaagatttaaatgtaaaacttcaaactatgaaaatcctagaagaaaacctaggaattatccttcttgacattggctttggcgaaaaatttatggctaagtctccaaaagcaattgcaacaaaaccaaaaattgacaagtggtatccaattaagctaaagagcttccatgcagcaagagaaattgccaacagagtaaatggatagcctacagaatgggagaaaatattcacata

SEQ ID NO: 91581 - DNA, 665 bp, Homo sapiens
gtgctgggattacaggcatgagccaccttacctggctgtcaagtcttaaaatatgataatgttaaggattatctgtttttatcctaaatgatggaaatctttcaaacaaagtctgggcaatccttagcaaaaagagcaaagctggaagcatcacattacccaacttcagcctatacaacaaggctacagtaatcaaaacagcatgacactggtacaaaaacagacacatagaccaatggaacagaatagagaaccctaaaataaacccatacacctacaaccatctgacctttgacaaaatcaacaaaagtaaacaatggggaaagaactgcctattcaataaatggtgctgggataaccagctagccaaatgcagaagaataaaactaggcccttacctctcaccattcaaaaattaactcaagatggactaaagatttaaatgtaaaacttcaaactatgaaaatcctagaagaaaacctaggaattatccttcttgacattggctttggcgaaraatttatggctaagtctccaaaagcaattgcaacaaaaccaaaaattgacaagtggtatccaattaagctaaagagcttccatgcagcaagagaaattgccaacagagtaaatggatagcctacagaatgggagaaaatattcacata

SEQ ID NO: 91582 - DNA, 668 bp, Homo sapiens
gtctagtcttagttcctygatgaatttggtttgtgattgggcaattcactctgtagtataacttaaaaaaatttcagacacgtgaatattttcttatattctcttccttacatgaagggcagtacactatagatattcttttgcattttactttttttcccttacagtatatcctggaaatcaatccatgtcagttcattgagatttccttcctttcttattacagctatatggttatccattgtgtagatgtaccatggtttattcaaccattctccaatatataagcatttaggtcatttctggtattttgcaattacaagcaatgttgcaatgaataatgttgtgtatgttcatatttatggaggtgtagcttttgggtaaattctcagaagtaggattgctaggtcaaaagctacgtgtgtatgtagttttgtcacggattgccaaatttccctccagcaaggttgtacaatttgcatgcttaccagcaacacatgagagttcccgtttccccacagcctggccaacagggtgtcatcatactgtttagtttatgccaacctggaaagtaagtaaataagaaatggtatctcagcatagttttgattctatcttattataagtgaggttgaactactgttccatctttttgtatgattgagaac

SEQ ID NO: 91583 - DNA, 668 bp, Homo sapiens
gtctagtcttagttcctcgatgaatttggtttgtgattgggcaattcactctgtagtataacttaaaaaaatttcagacacgtgaatattttcttatattctcttccttacatgaagggcagtacactatagatattcttttgcattttactttttttcccttacartatatcctggaaatcaatccatgtcagttcattgagatttccttcctttcttattacagctatatggttatccattgtgtagatgtaccatggtttattcaaccattctccaatatataagcatttaggtcatttctggtattttgcaattacaagcaatgttgcaatgaataatgttgtgtatgttcatatttatggaggtgtagcttttgggtaaattctcagaagtaggattgctaggtcaaaagctacgtgtgtatgtagttttgtcacggattgccaaatttccctccagcaaggttgtacaatttgcatgcttaccagcaacacatgagagttcccgtttccccacagcctggccaacagggtgtcatcatactgtttagtttatgccaacctggaaagtaagtaaataagaaatggtatctcagcatagttttgattctatcttattataagtgaggttgaactactgttccatctttttgtatgattgagaac

SEQ ID NO: 91584 - DNA, 673 bp, Homo sapiens
ataagtccccaggcatgagctctgcatgtctgactttggattggagcctccagtaggtacctccaccatcacacaggtcaccccccagcacatcccaagcccctacttggaagacacagtgctcactcatatgtggcattcacggtcagcagcagcctccaactgagaaggccgggctggtggtcggcttccttgtggcccccttggaactgggccctgcaaacaccctcttacctcagggctccctccacacctccaatctgccactgcccatgacagcttcattcagtacattccctttgatgamccaaggatatgacatatcaaaccagctcaaccccagggtttctttgaggacacaaggtttggtgatgaatcttataactccagtcctgtcactgaccaagagccagctcatggaaaaatgctgatggtgccatttggaatccacagagcctgatagccttgtcagggaataagagaggcccggccttggctgatcctagccccttgtggccatgggtccagcttcccagaaatagagaaaatggtggctttcctgaccaaagagacagctgtgtcatgagaggatggcagcctgacgtgaggggcagccctcacagacacgcagaaagccaagtttcttccccaagcccacagggcgagggcactc

SEQ ID NO: 91585 - DNA, 1150 bp, Homo sapiens
gtcaaagatttaactcatcttgattccaaagcaattttcatcttgatgccaatatctaatctttcagcctttcagccattgtgccctggcactgtcttaaaaacttttttcttgttacaaaagcaacatatgttcatattttttaaagaagatatagataagtaaaaaataaacataaaataatttataatctctgtgcccagaaatagccattaatatcattgtaacgtatcttgccattatttttctacacaatcatcagaacttcatgtacatgtagcatgttcttatccatgctatccaagtctttgcttattcgtccgactatgtccacatgcctgagtcttacttgtaggttaagacccagcttgaggtcacgtctgtcattaagctttactcactattgccatcagagagtatttactactccatacttgacctctcagagcattttaactaacctttctcgtgatacaaatcattttcatgtaagtcagagctctccttcagtccagtagtttttaatttttttttttttttgagacggagtctcacactgttgcccaggctggagtgcagtggcccgatctcggctcactgcaacctccacctcccgggttcaagcaattctcctgcctcagcctcccaagtagctgggactacaggcacgtgccaccaagtccggctaattttttatttttagtagagatgggtttcaccatgttggccaggctggtctcgaactcctgacctcaggtgatctgcccgccttggcctcccaaagtgctgggattacaggygtgagccaccacacccggcctagtttttaattttttaaagccataggattctgttcaaatgggtccctagcataaaaaatcagatggaaagagagctgctctgactgtagttacagagaccttgaaccccaaggggactaaattcagagctcgggttgaaagccctgtactagattgcaggatttttagaaaatacattttattgaggtttaattcatccagcaatatgcaccctttttgagtgcacggtttgatgagttctgacaagtgtgtataaccaatgcccctgtcaagacacagattattcctgtcatgctgtaaagctctcttctcctgtgcagctaatccct

SEQ ID NO: 91586 - DNA, 1150 bp, Homo sapiens
gtcaaagatttaactcatcttgattccaaagcaattttcatcttgatgccaatatctaatctttcagcctttcagccattgtgccctggcactgtcttaaaaacttttttcttgttacaaaagcaacatatgttcatattttttaaagaagatatagataagtaaaaaataaacataaaataatttataatctctgtgcccagaaatagccattaatatcattgtaacgtatcttgccattatttttctacacaatcatcagaacttcatgtacatgtagcatgttcttatccatgctatccaagtctttgcttattcgtccgactatgtccacatgcctgagtcttacttgtaggttaagacccagcttgaggtcacgtctgtcattaagctttactcactattgccatcagagagtatttactactccatacttgacctctcagagcattttaactaacctttctcgtgatacaaatcattttcatgtaagtcagagctctccttcagtccagtagtttttaatttttttttttttttgagacggagtctcacactgttgcccaggctggagtgcagtggcccgatctcggctcactgcaacctccacctcccgggttcaagcaattctcctgcctcagcctcccaagtagctgggactacaggcacgtgccaccaagtccggctaattttttatttttagtagagatgggtttcaccatgttggccaggctggtctcgaactcctgacctcaggtgatctgcccgccttggcctcccaaagtgctgggattacaggtgtgagccaccacacccggcctagtttttaattttttaaagccataggattctgttcaaatgggtccctagcataaaaaatcagatggaaagagagctgctctgactgtagttacagagaccttgaaccccaaggggactaaattcagagctcgggttgaaagccctgtactagattgcaggatttttagaaaatacattttattgaggtttaattcatccagcaatatgcacccyttttgagtgcacggtttgatgagttctgacaagtgtgtataaccaatgcccctgtcaagacacagattattcctgtcatgctgtaaagctctcttctcctgtgcagctaatccct

SEQ ID NO: 91587 - DNA, 1150 bp, Homo sapiens
gtcaaagatttaactcatcttgattccaaagcaattttcatcttgatgccaatatctaatctttcagcctttcagccattgtgccctggcactgtcttaaaaacttttttcttgttacaaaagcaacatatgttcatattttttaaagaagatatagataagtaaaaaataaacataaaataatttataatctctgtgcccagaaatagccattaatatcattgtaacgtatcttgccattatttttctacacaatcatcagaacttcatgtacatgtagcatgttcttatccatgctatccaagtctttgcttattcgtccgactatgtccacatgcctgagtcttacttgtaggttaagacccagcttgaggtcacgtctgtcattaagctttactcactattgccatcagagagtatttactactccatacttgacctctcagagcattttaactaacctttctcgtgatacaaatcattttcatgtaagtcagagctctccttcagtccagtagtttttaatttttttttttttttgagacggagtctcacactgttgcccaggctggagtgcagtggcccgatctcggctcactgcaacctccacctcccgggttcaagcaattctcctgcctcagcctcccaagtagctgggactacaggcacgtgccaccaagtccggctaattttttatttttagtagagatgggtttcaccatgttggccaggctggtctcgaactcctgacctcaggtgatctgcccgccttggcctcccaaagtgctgggattacaggtgtgagccaccacacccggcctagtttttaattttttaaagccataggattctgttcaaatgggtccctagcataaaaaatcagatggaaagagagctgctctgactgtagttacagagaccttgaaccccaaggggactaaattcagagctcgggttgaaagccctgtactagattgcaggatttttagaaaatacattttattgaggtttaattcatccagcaatatgcaccctttttgagtgyacggtttgatgagttctgacaagtgtgtataaccaatgcccctgtcaagacacagattattcctgtcatgctgtaaagctctcttctcctgtgcagctaatccct

SEQ ID NO: 91588 - DNA, 1059 bp, Homo sapiens
ggagggattgtgcccctgccccaaagatctgtggatctttgaactggagagtgatgatttagcatatatcatatatggcgggaggggctagccttgtctcagatgagactctctcagttggatgtggctccctctcgagagatcatctcaatccaggaaataagggttgacaaactggtccctcctccagatctgtttggctgcttgtttttatgtggctcttagctaacaacggtttcttgttgtggcttacatttttaaatgattgaaaaaaatcaaaagaggaagaatattttgtcatgtgaaaattatgtgaacttcaaatttcacctttcctaggtgaagttttactggatcccagctgtcttcactcatccacgcatggactgcagctgtgcctatgcagcagaattgagcagttaagaccgagactgcagggcctacaaagctgaaaatatctgctctctggcccattagagaaacagtttgcagactcgtacaggacagtgctgtggacagaaccagcatgtgaggtagaacttactgggtgtgctgcaggtccaaggcagggtgggaaggagagaggggagaaaggttgacaggagaggcactacyaagaaaggagcattggagaaaggcctgggctctgcccagtgttggttagagttcgttactctccttttatccatgctccaatggatagttctaacttgtgttctatcagaagacaaggaatagtaatgtctgcagtaacaatggagctccagtcctggattcaatatctgccctctatagctcagtagggattaagaggaggatggcattctttctctagagctaggctttgtctctctttccttttcttttttcttttttttttttttcctgagacagtctcgccttgtcacccaggctggagtgcattgatgccatctcagctgactgcagcctcgacctcccaggctcaagtgattctcccacttcagcctcctgagcagctgggaccacaggcacacaccaccacacccagctattttttttcttttgatagagatgagg

SEQ ID NO: 91589 - DNA, 720 bp, Homo sapiens
aggtgaggagtcaaagacaggagcccctgggttcacccatcgggccagggatgctgaggctccccatgtagacacccagagtgtatagttggcatygggctgggaagcagtgaaggtagaagaagggagcctcgccatgaaggccaggctgtgcagtctccgttccaaggaggatgaccaccttcttcatctgtgctggattaaaacagcgctatgtctgcaaaggcgaggaaatgaagcagaaggtaggttctttttcaaagtcccccacacctccagaaactatacacaaatgatgcatttggtatgcaagtctgatgaaaagccctaggtcattaatatatagtgtccctataaataatctcaaagacagcttgggccaactctgccccttcaggcaggatcatgcttctaagaagatgaaaataatctgtccttattatatatatacatttccataaattatagaaccacatgtctgtattttaattcagccaggctgaagttttccccaagatctaatatacgaagctgtagatctaattcttctgaagttccttcaaaatttatttcccagctcaatatatttcatgtagatatttttgcttaggttggcagatgcaaggcttgaatacttgtatattaccagtggagaaaatcagacactgagcaatggaacaacttcgccaaggtcatacagaaaatgatttctcacatcta

SEQ ID NO: 91590 - DNA, 720 bp, Homo sapiens
aggtgaggagtcaaagacaggagcccctgggttcacccatcgggccagggatgctgaggctccccatgtagacacccagagtgtatagttggcattgggctgggaagcagtgaaggtagaagaagggagcctcgccatgaaggccaggctgtgcagtctccgttccaaggaggatgaccaccttcttcatctgtgctggattaaaacagcgctatgtctgcaaaggcraggaaatgaagcagaaggtaggttctttttcaaagtcccccacacctccagaaactatacacaaatgatgcatttggtatgcaagtctgatgaaaagccctaggtcattaatatatagtgtccctataaataatctcaaagacagcttgggccaactctgccccttcaggcaggatcatgcttctaagaagatgaaaataatctgtccttattatatatatacatttccataaattatagaaccacatgtctgtattttaattcagccaggctgaagttttccccaagatctaatatacgaagctgtagatctaattcttctgaagttccttcaaaatttatttcccagctcaatatatttcatgtagatatttttgcttaggttggcagatgcaaggcttgaatacttgtatattaccagtggagaaaatcagacactgagcaatggaacaacttcgccaaggtcatacagaaaatgatttctcacatcta

SEQ ID NO: 91591 - DNA, 3099 bp, Homo sapiens
aaggccaactattcacgtggaacttgatgtggtctgttcaactagcagggtattgaatatgaagggattgtttgtgattttgcaacttagtgaaaaaaaaatagtcacccagccttgtctatgtgctgagtcagacacctctcatgtgtcactaggccctctctgaggacccccgtgggtggctgcctcagcgtgggctctgcagacttcaggcaggtacacagtaacagcatgtcatctcctgcccacatcaatcacctccacctccaccccttgccttggggcttcctcatcaacccaggcagatgcaaggtgcaagactttgcatggtccagatgcatggggaattggtgctctgtggagcaccttggatcaacgagagatggcagctggtggtgtagggtccagccctacggggcttagcgggtattctcctcgtgtgtggagacaagagattgtaataaataaaggcataagacgaagagataaagagaaaacagctgggcctgggggaccactaccatcaaggcgcgtagaccggcagtggccccgaacggctgggctggccgttatttattgcatacaagacaagggggcagggtaaggagggtgaatcttctaagtgattgacaaggtgaagcaagtcacgtgattacaggatagggggcccttcccttttaggtagccgaagcagagagagaaggcagcataggtcagcgttttcttctctgcacttataagaaagatcaaagactttaagactttcactatttcttctactgctatctactacgaacttcaaagaggaaccaggagtacgggaggagcatgaaagtggacaaggagtgtgaccattgaagcacagcaccacagggaggggtttaggcctccggatgactgcaggcaggcctggataatatccagccttccacaagaagctggtggagcagagcgttccctgactcctccaaggaaaggagactcccttttgcggtctgctaagtaacaggtgccttcccagacactggcgttaccgcttgatcaaggagccctcaagcggcccctatgcgggcgtgacagagggctcacctcttgccttctaggtcacttctcacaatgtcccttcagcacctcaccccatgtccgccggttattcctaggttatatcagtaatgcaacaaagagtaatattaaaagctaatgattaataatgtttataataatgattgataattgttcatgatcatctctacatctaatttgtattatgactatccttattctaactattttctttattatactgaaacagtttgtgccttcagtctcttgccttggcacctaggtaatcctccaccccacggtggataactttttagtcttctccctagagcctctgtcctcagacacagttcacacagctctcgggggccacactgcaagatcagcatttagaattttgtgttttaaaactttttttaagttttaatttttgtgggtacatagtaggtgtatatatttataggggacatgagacattttgatataggcatgcaatgtgaaataaatacatcatggagaatggggtatgcattcccttaagcatgtatcctttgagttacaaacaattcaagtacactctttaaattgttttaaagtgtacagttattattgactatcgtcaccctgttgtgctatcaaatagcaggtcttatttattctaactattttttgtacctattaaccatccccacctcccctattcagccgtaaaaaagaatgagatctagtcatttgcaacaacatggatggaactggagattattatgttaagggaaataagccagttacagaaagacaaacattgcatattcttacgtacttgtcaggtctaaaaatcaaaacaattgaactcgtagacacggagggtagaaggatggttaccctccggggctgggaggatcagcatttggttatacctctcaatggccagtctgatgaagaatcctcatagcagctgcctctccactccccaccttcccatcctctctctttcacttctggcactgccttctctaataaaaccatagtgcaaccgacatctgcctcatgctctgttttctgggaaacccagactaatatatattcttcactactttcctgcagatcttggtgcaacagaactgtcaggaaaatttacttcaaaaaattgtacctttaaacacctctcctgcctttttatggataccgggcatgtatgagattatcagaggaaacagtyagatgcacaaggatcttcatatacccatttgttatttagattccctttaattggggttttattagattctgaagcactctacttttattcacgaacactgccaagaatggaaacctcgctttctgaagctgtgtgaattgcttggcacgtgtttaagaacccagaggcatctcatctgcctcctggatcctcctgtggcccctccagagagtcccagctcatgcaccacctgcctggcacagggccaaggatgcaggctgtgattgtgaattctggtgttgaaccttagatgggtatgtagcatgttctaatggtgaaataaggacaatgttgaaggaagtcattgtgagggaaatatgtcttttgtttgaaagagcccagtggtgttactatttgtgattgtgaaggtcaatccaagtggaatacactgtctcacagagggccacctgtcttttgtggaggtctctggagataaaaatagggacattgctctaacatgtttaaagagggagggccagtgtctctgatgatgtagatagacacagagctggcttgagcaccagggacgctgatttcaggcggttgaaggaggaaggggctgtccttcttctagactctttggtgagcatccaggaagatgccgtgtctgcatggggacaaggtgttgtggagggtcccaaacaggagcattttatggaagagaagtcattagggtgggtgtcgggctggagatgatcaggagaagaatgagaacatctgagctgagtattgtgatatagactgcaagactcatggtggcattctcctgggagtggaat

SEQ ID NO: 91592 - DNA, 579 bp, Homo sapiens
ttaaaatttatttaaaaagaagacattgggccgggcgcggtggctcacgcctgtaatcccagcactttgggaggctgaggtggatggattatgaggtcaggagatcgagaccatcctgactaacacggcaaaactctgtctctactaaaaatacaaaaaattagccgtacgtggtcgtgggcgcctgtagtcccagccacctgggaggctgaagcaggagaatggtgtgaacctgggaggcggaggttgcagcgagccaagattgcgccgctgcactccagcctggatgacagagccagactcmgtctcaaaaaaaaaaaaaaaaaaaaaagaagacattggacatggtgactggaacgaaaatacagcagcctaatgactgtcattaacaaaatgacgcattaacaatgctgatcttgtagctgatacagaaccttggctgttgccttcatattttcattgaagttgtgcttgatctccctcctggtttctcttgttactggtgacctgcattcctagagcagtggatgtggatgagggggccggtctgtgcagcttcagtacatcctttcttggtgg

SEQ ID NO: 91593 - DNA, 532 bp, Homo sapiens
gatgccagaaaattaatttaaaataaatatattaagtacacataagtctgtgcctatgagacagggacaaacgataccagaattggtggatggttgaaaaaaggggggacaagttaaaataaaacaaaataaggatcttgcatggacagatgataatggtgtggtgtcagccaaaagttgacaaaacaaaaacaaaattcaccattgggatttttgttcatgagtcccaaaccatggctcaacagtgggacatgggctgcaactaggcgttcttgtcttcaggacagaggtggcactctcattcccctcttttattcattagaaaatgcccagagggctatgtttcaytgagacaaaatagacacatcagtgtgtccttcaaaggaaaggagctgctgaacttcgttgcatacaaagtatttaaacaaatggggacgctagagatggttagccaggaagacaaagcttagtcttttgcacgactgggagctttatgtggagaaacggggaactatttagtgttgctctagag

SEQ ID NO: 91594 - DNA, 757 bp, Homo sapiens
gacagtactagggttacagtctgctccgagggcttggccaagatttaataatgtaatcctccacaacaacctgatcagctggctatgatttttttcttattttattgctggagaaactgaggcaacagagtgtaaaccacctgcccaaggacacgcagctggaaagttctggagccagcactggctcccaagtagcctggtttcacactcctacgcagctattacacaagctctgacttaggagtgatctgctctaccattttatcagtggggacagcaaacaggagcagagattttattttactttacttaatttttatttttattttattatactttaagttctagggtacatgtgcacaaygtgcaggtttgttacatatgtatacatgtgccatgttggtgtgctgcacccgttaactcgtcatttacattaggtatatctcctaatgctattcctccccgttctccccatcccacaacaggccccggtgtgtgatgttccccttcctgtgtgcaagtgttctcattgttcaattcccacctatgagtgagaacatgcggtgtttggttttttgtccaaaacagagatatagaccaatggcacagaaaggagcagagattttctaaacaccatgttacttgcccagtgacagagctgtccagagctcagcctcccaaccctcctctctttgtggcagttttagttcattacatcacttaaatgtcaatggaatgagaatgtgtctgtgcataa

SEQ ID NO: 91595 - DNA, 757 bp, Homo sapiens
gacagtactagggttacagtctgctccgagggcttggccaagatttaataatgtaatcctccacaacaacctgatcagctggctatgatttttttcttattttattgctggagaaactgaggcaacagagtgtaaaccacctgcccaaggacacgcagctggaaagttctggagccagcactggctcccaagtagcctggtttcacactcctacgcagctattacacaagctctgacttaggagtgatctgctctaccattttatcagtggggacagcaaacaggagcagagattttattttactttacttaatttttatttttattttattatactttaagttctagggtacatgtgcacaatgtgcaggtttgttacatatgtatacatgtgccatgttggtgtgctgcacccgttaactcgtcatttacattaggtatatctcctaatgctattcctccccgytctccccatcccacaacaggccccggtgtgtgatgttccccttcctgtgtgcaagtgttctcattgttcaattcccacctatgagtgagaacatgcggtgtttggttttttgtccaaaacagagatatagaccaatggcacagaaaggagcagagattttctaaacaccatgttacttgcccagtgacagagctgtccagagctcagcctcccaaccctcctctctttgtggcagttttagttcattacatcacttaaatgtcaatggaatgagaatgtgtctgtgcataa

SEQ ID NO: 91596 - DNA, 757 bp, Homo sapiens
gacagtactagggttacagtctgctccgagggcttggccaagatttaataatgtaatcctccacaacaacctgatcagctggctatgatttttttcttattttattgctggagaaactgaggcaacagagtgtaaaccacctgcccaaggacacgcagctggaaagttctggagccagcactggctcccaagtagcctggtttcacactcctacgcagctattacacaagctctgacttaggagtgatctgctctaccattttatcagtggggacagcaaacaggagcagagattttattttactttacttaatttttatttttattttattatactttaagttctagggtacatgtgcacaatgtgcaggtttgttacatatgtatacatgtgccatgttggtgtgctgcacccgttaactcgtcatttacattaggtatatctcctaatgctattcctccccgttcyccccatcccacaacaggccccggtgtgtgatgttccccttcctgtgtgcaagtgttctcattgttcaattcccacctatgagtgagaacatgcggtgtttggttttttgtccaaaacagagatatagaccaatggcacagaaaggagcagagattttctaaacaccatgttacttgcccagtgacagagctgtccagagctcagcctcccaaccctcctctctttgtggcagttttagttcattacatcacttaaatgtcaatggaatgagaatgtgtctgtgcataa

SEQ ID NO: 91597 - DNA, 1065 bp, Homo sapiens
tccttggctgcttttgaactgtatgtaaaataccatcaacctttctgcattcatttgtgtctggcttctttccttccaccttatgtttgcagatatctaccatacatgtatagtacctgttgtttctttccttttatacacagagttattatacagccctgaaccagcatcacctgggaacatgctagaaatgcacactctggggtcccacaayctgtctgaatcatcccccacctgggggctgctttacatctgttctttgtggcatccctcccctacccgtcacccagagccttgttttctagtaccctgcgtgcatattgcagaagcagctcaggctttggaatcagcagagctaactttgaggttttttggctctgccaattgataagctataaaattaggtgggtatttatgttctgaatcatctatcaaatgggtgcaagggtgatgcccacctcaatagagagaagcaacacaattaaatacatgcaaagacctttgtagattataaagtgcttataaggttagttttttttctagttaatatttgtgttcatgacttggttttctaattacattgtacattcctgtacggctaaagagcttttcatatatatgtataggcaaggattgtaagaaaaaaagtgttaagataatgggatcatacagatttaaaaattttaaatatttaatgtggtttttataaaggttgagcaataaataaaatatgtttaaaagtaaatttcacttatgtaggttttaaatgaaatattaatgaatttgataaataatataacggttgtgtccatcatatcacgtagaatattaacaacataggtaaaagataaaaggaaaacaggggtgttttaagtgctaacttttgttaacttgttttgaagagaatggggtgatggtctgcttactttccaagaatagggttcccagtggtgttttcaaagagattgctgctacagattaattgtagggcccatatttgtgtgcgtgtgtgcacacacatgtacccatgaatgtgcctgtgtgagcacgtgtgcaattctatgc

SEQ ID NO: 91598 - DNA, 1065 bp, Homo sapiens
tccttggctgcttttgaactgtatgtaaaataccatcaacctttctgcattcatttgtgtctggcttctttccttccaccttatgtttgcagatatctaccatacatgtatagtacctgttgtttctttccttttatacacagagttattatacagccctgaaccagcatcacctgggaacatgctagaaatgcacactctggggtcccacaacctgtctgaatcatcccccacctgggggctgctttacatctgttctttgtggcatccctcccctacccgtcacccagagccttgttttctagtaccctgcgtgcatattgcagaagcagctcaggctttggaatcagcagagctaactttgaggttttttggctctgccaattgataagctataaaattaggtgggtatttatgttctgaatcatctatcaaatgggtgcaagggtgatgcccacctcaatagagagaagcaacacaattaaatacatgcaaagacctttgtagattataaagtgcttataaggttagttttttttctagytaatatttgtgttcatgacttggttttctaattacattgtacattcctgtacggctaaagagcttttcatatatatgtataggcaaggattgtaagaaaaaaagtgttaagataatgggatcatacagatttaaaaattttaaatatttaatgtggtttttataaaggttgagcaataaataaaatatgtttaaaagtaaatttcacttatgtaggttttaaatgaaatattaatgaatttgataaataatataacggttgtgtccatcatatcacgtagaatattaacaacataggtaaaagataaaaggaaaacaggggtgttttaagtgctaacttttgttaacttgttttgaagagaatggggtgatggtctgcttactttccaagaatagggttcccagtggtgttttcaaagagattgctgctacagattaattgtagggcccatatttgtgtgcgtgtgtgcacacacatgtacccatgaatgtgcctgtgtgagcacgtgtgcaattctatgc

SEQ ID NO: 91599 - DNA, 1065 bp, Homo sapiens
tccttggctgcttttgaactgtatgtaaaataccatcaacctttctgcattcatttgtgtctggcttctttccttccaccttatgtttgcagatatctaccatacatgtatagtacctgttgtttctttccttttatacacagagttattatacagccctgaaccagcatcacctgggaacatgctagaaatgcacactctggggtcccacaacctgtctgaatcatcccccacctgggggctgctttacatctgttctttgtggcatccctcccctacccgtcacccagagccttgttttctagtaccctgcgtgcatattgcagaagcagctcaggctttggaatcagcagagctaactttgaggttttttggctctgccaattgataagctataaaattaggtgggtatttatgttctgaatcatctatcaaatgggtgcaagggtgatgcccacctcaatagagagaagcaacacaattaaatacatgcaaagacctttgtagattataaagtgcttataaggttagttttttttctagttaatatttgtrttcatgacttggttttctaattacattgtacattcctgtacggctaaagagcttttcatatatatgtataggcaaggattgtaagaaaaaaagtgttaagataatgggatcatacagatttaaaaattttaaatatttaatgtggtttttataaaggttgagcaataaataaaatatgtttaaaagtaaatttcacttatgtaggttttaaatgaaatattaatgaatttgataaataatataacggttgtgtccatcatatcacgtagaatattaacaacataggtaaaagataaaaggaaaacaggggtgttttaagtgctaacttttgttaacttgttttgaagagaatggggtgatggtctgcttactttccaagaatagggttcccagtggtgttttcaaagagattgctgctacagattaattgtagggcccatatttgtgtgcgtgtgtgcacacacatgtacccatgaatgtgcctgtgtgagcacgtgtgcaattctatgc

SEQ ID NO: 91600 - DNA, 1065 bp, Homo sapiens
tccttggctgcttttgaactgtatgtaaaataccatcaacctttctgcattcatttgtgtctggcttctttccttccaccttatgtttgcagatatctaccatacatgtatagtacctgttgtttctttccttttatacacagagttattatacagccctgaaccagcatcacctgggaacatgctagaaatgcacactctggggtcccacaacctgtctgaatcatcccccacctgggggctgctttacatctgttctttgtggcatccctcccctacccgtcacccagagccttgttttctagtaccctgcgtgcatattgcagaagcagctcaggctttggaatcagcagagctaactttgaggttttttggctctgccaattgataagctataaaattaggtgggtatttatgttctgaatcatctatcaaatgggtgcaagggtgatgcccacctcaatagagagaagcaacacaattaaatacatgcaaagacctttgtagattataaagtgcttataaggttagttttttttctagttaatatttgtgttcatgacttggttttctaattacattgtacattcctgtayggctaaagagcttttcatatatatgtataggcaaggattgtaagaaaaaaagtgttaagataatgggatcatacagatttaaaaattttaaatatttaatgtggtttttataaaggttgagcaataaataaaatatgtttaaaagtaaatttcacttatgtaggttttaaatgaaatattaatgaatttgataaataatataacggttgtgtccatcatatcacgtagaatattaacaacataggtaaaagataaaaggaaaacaggggtgttttaagtgctaacttttgttaacttgttttgaagagaatggggtgatggtctgcttactttccaagaatagggttcccagtggtgttttcaaagagattgctgctacagattaattgtagggcccatatttgtgtgcgtgtgtgcacacacatgtacccatgaatgtgcctgtgtgagcacgtgtgcaattctatgc

SEQ ID NO: 91601 - DNA, 1065 bp, Homo sapiens
tccttggctgcttttgaactgtatgtaaaataccatcaacctttctgcattcatttgtgtctggcttctttccttccaccttatgtttgcagatatctaccatacatgtatagtacctgttgtttctttccttttatacacagagttattatacagccctgaaccagcatcacctgggaacatgctagaaatgcacactctggggtcccacaacctgtctgaatcatcccccacctgggggctgctttacatctgttctttgtggcatccctcccctacccgtcacccagagccttgttttctagtaccctgcgtgcatattgcagaagcagctcaggctttggaatcagcagagctaactttgaggttttttggctctgccaattgataagctataaaattaggtgggtatttatgttctgaatcatctatcaaatgggtgcaagggtgatgcccacctcaatagagagaagcaacacaattaaatacatgcaaagacctttgtagattataaagtgcttataaggttagttttttttctagttaatatttgtgttcatgacttggttttctaattacattgtacattcctgtacggctaaagagcttttcatatatatgtataggcaaggattgtaagaaaaaaagtgttaagataatgggatcatacagatttaaaaattttaaatatttartgtggtttttataaaggttgagcaataaataaaatatgtttaaaagtaaatttcacttatgtaggttttaaatgaaatattaatgaatttgataaataatataacggttgtgtccatcatatcacgtagaatattaacaacataggtaaaagataaaaggaaaacaggggtgttttaagtgctaacttttgttaacttgttttgaagagaatggggtgatggtctgcttactttccaagaatagggttcccagtggtgttttcaaagagattgctgctacagattaattgtagggcccatatttgtgtgcgtgtgtgcacacacatgtacccatgaatgtgcctgtgtgagcacgtgtgcaattctatgc

SEQ ID NO: 91602 - DNA, 1071 bp, Homo sapiens
ttcgccactccctccccgagaaaaagaattattttgcccaaaatgtcaatgggttgaggttgagaaactctgctatagracaaagctaggcataaggtatgtgtttcccattggcatgtgccgtattaaggagtgagatagaaatctttattaaagtaaggccaatataagcagttagtagacagaaacccagtacaaactcagagtaaatggtgttgttctccttaggagaagagctaagcaaacaaagcccatttcagctcagttaccatgtgctgacacaaatccacaacaagggataatagcaaagcaattcgttccacttgattatagttcattttgctcaacaggaaagtcagatttgatgttcatgatcatcaggcataaatcctacaaaatgtatttaataagaatgcaatgtatttttaactgccttcattaatttgattgtcccccctttaaaacaataaataatgactaaatctaggtcacgttttctctttgggccttggctcctcagtttcaaaagtggagagttctactctgtgagtcctttagttcatgaatccttgctgatgcaggatacatatttttttccttgaaagggaaacagaattgatcagctgataggtgtgatcgtcatgagcaaaacaaacttcgctttaagaagttatcaaatctctgtatctaaagagaattttcgtcaagagttttcgagattcagatgccaaatcttcctgtttccattcgcaactccatcaactctatcttgccaccttgctgcccagagttgaaagcagcctggtactcagggcagggaaggcagaagcacatgtaattgtcacatgcggtaggaatcaataatcgacaacataatgacattcaatgaacaatttacactgaaggtaaataaattgttgatttcatgtttcgcttacacatagtgcaaagagctcttcaccacggctctggtgatgaaggctttgtatttattaattttgttgaccttggagaaataactttactcctctattggagtttcctattgagtaatgctggcagacacctaga

SEQ ID NO: 91603 - DNA, 2187 bp, Homo sapiens
ttagcctgtttctttatgaatatgtgctgtctgttcctaactgttatgctcatgtgactatcattagtatacctgagtgtttatgcttgcaaaaatatttatgttattattgcttattttattgtgtaaagtggcctatcatgtttctcgatgatgtttttatgtttttccaataaatccccctttaaaaatataaataaatacctctaatataattttttatattatttcttccagaattataatttggggatttgatctttcagtgttgttattttcaggattttagactttgcaaattttgactttctaggatttcaacattcaagattatggtgttctaggtactgtgtctttcaggattatgatcagctgcccacttctatttgcggatgagacagatttaatcaaatagtcatagaaatgaaagaaaaatcacaactttgataagtactacaaagaagatctctgatgctctgagataatacaagagggtaaattgatctattaggaggttgcagttgtggagcaggggttgtgagggccagaggaaggagaaaggccctgcagacagagagcatatgatgtgtgcacatcccttagacaggaggagtcattgtggactagcagaagagaaaagagcacagaaagccagatggagcatgatttaaggtgaaggtggaaattctctggggagaaggctgttcagggccttggggaccaacgtaaggatcctggtctttgttctatgagcaatgggcagcaaggagcatatttcaagcaagagattaatataatgagagtgttcttcttaaaaaattacatgtggcttttaattcaagatggtagaatgagctattgatattccctttaagcttccttaaaataagagtaatgagctaagaaaagaggraaaatcattatggcaaagaaaacaggaaaagctgtcagcaaccaaaagatgtcagcagattctgaagcaccgatctctctcactatatcttagtctgctggactgctttcacaaaaataccatagactggatgacttataaacaacatgtatttctcacagttctggaggccaagaagtctaagatcaaggcactggcaggttcagtgtctggtgagggttcattgctcatagttggcgccttcatgctgtgtccctagatgatggaaggggccaatgagctcccttgggcttcttttataagggctcgaattccactgatgagagctccacacttatgacctaatcacctctcaaagactgcaccttttactaccatcacattggggattaggttacaacatataaatttggtgggagccgaaaaccttcagacaacagcacatcataaagcaacaaagactattccataacccttgcccacttatataagtttccttcctatctgctcaatctttaatataaatggaaatcaacagccatcagatattcaaggaatgcttgcatcatgaaggaggaagaccaaggcaacaaatataaaaatacaaacgttggatgaaacacaattcagaaaacgggagaaaacgaaaataatcatcatcatcatcattaagaattccaggagataatctatttgtaagacaaaaatagaattgtgatgaagaatgtgaaagagacactaagataaataaaatacagaatgagaagactaaatagataactaactggaatctcaggaatataaaagaaaatcattaaaaagatacaatttttagaactatcagaaaatatgtattaaaaatcccaaaagtacaatatactgagataaataaaatcagaatatataaaaagaaatttgtgtccaaacacactttgacaaaattacagaacatcaaaaacaaagaggagatcttaaatgaagccatagagcaaggacaaacagcctacaaaaaggaaacaatttaaatgacttcagactttccaacagcactaatgaaagctagaagataatgatattttacctccaaagtacaaagggaaaatatatagtcagtacagaattgtgtgcccagccaaatactcttttatgaaaaagataaaacaaggatgggtaaagataacaaaaactgagagggtatgccacaaagaaacctgaaataaagaaaattctaaaggatatgcttcaagaaaaaggaacacgaccttaaaaagatg

SEQ ID NO: 91604 - DNA, 733 bp, Homo sapiens
atgctttaaagaaaggtttaacagaacgcttcctcccagatggcccttgcacgtgactcactcacaagcactaggaaaagggcgatgacgtggctgtgaaaatgagacaagacatttagctacagatccagcaagtcatcagtcttcaggagaaaaatattagcagtgcattgcacsattgcctcctgacttcaggcgagatggcagtgtcgctccagaaggaacagccgtccccaccacctgctgcccagtaaggccagaggcagcaggcccctctgttgaaactatgagattacagcccatgtggctgaacttgcagacaaagaagagggctggagctgcttttccttgtagtctaaatgttactgtgcatctccttgtggaacaacattgatcaaacatagccttcaccctgatccaaatctgcgattcaccctctcagaagttcctgaggagctagaacgttgcaccctcaggtctgtgcacaggaaggagtgtgtggtaatcttcagggggaagaaaattatcttagaagaatgtaaattgtttctactccagaaatttgctgaaaagggggagagaagtcatgtaaaaagagatgaatttattagaagttctccttaacccagtaggtcccgagtctgttcctggtgggtagtctggtaaaccaggaacacaagaaggttgggtagagtgtttaagcttttgagtcagagagatctgggtttggatc

SEQ ID NO: 91605 - DNA, 733 bp, Homo sapiens
atgctttaaagaaaggtttaacagaacgcttcctcccagatggcccttgcacgtgactcactcacaagcactaggaaaagggcgatgacgtggctgtgaaaatgagacaagacatttagctacagatccagcaagtcatcagtcttcaggagaaaaatattagcagtgcattgcaccattgcctcctgacttcaggcgagatggcagtgtcgctccagaaggaacagccgtccccaccacctgctgcccagtaaggccagaggcagcaggcccctctgttgaaactatgagattacagcccatgtggctgaacttgcagacaaagaagagggctggagctgcttttccttgtagtctaaatgttactgtgcatctccttgtggaamaacattgatcaaacatagccttcaccctgatccaaatctgcgattcaccctctcagaagttcctgaggagctagaacgttgcaccctcaggtctgtgcacaggaaggagtgtgtggtaatcttcagggggaagaaaattatcttagaagaatgtaaattgtttctactccagaaatttgctgaaaagggggagagaagtcatgtaaaaagagatgaatttattagaagttctccttaacccagtaggtcccgagtctgttcctggtgggtagtctggtaaaccaggaacacaagaaggttgggtagagtgtttaagcttttgagtcagagagatctgggtttggatc

SEQ ID NO: 91606 - DNA, 733 bp, Homo sapiens
tttctaaaggctgataccccccagttattgggggcaagggggctgagaagcatttcttcttgaggcccatgtcaaccccatccaaatcccctcrtaacatcaagcagagcaactaagacagagccaagagcagcccaaccttggtcatggggaatcctcaccgtcctctctgtccccaaccctgtctatcctggggaagacagcccagaggcagacatgaccccactgtcccccggtgtagacacaatagcagcaaggaagacagcctgctaacctttctagaatccatttttctccacactcccacaccacggccttcctttcttgcttcttacacgcctgctgttagaaagatcttaattctggtgactgagggaaacacaaaatggtggcttataatcaaatcagcccagaagccactctgcacccaaacctatcacccggagggacgtgaaagctaattcttcaaaagccaaacacagtcgtctccttttccaagtcctgggattcagctgtcaggcctcatgaaaaccattctcctcaaggttaaaaccttaatgcactgtttgcacattgaatcaaaagaggtttgcataattaatggagcacagaaaaatcgggagacagaacgcaaagtaggttttaggagaaataaaaggcttgcaggaggaaggcatgccctcctgagtttcctgcacaagtacaaagacaccggtggaatcaaaaggcaggt

SEQ ID NO: 91607 - DNA, 710 bp, Homo sapiens
aacataaacaagcttggcagaacattcctaaggtgttgactgagttccaaacagaccaaggtattacattttcattctggaaaactcctgctgattcttcagtcatttacttcgagataaaaaaaaacaacaatgcatccagggctgtgagggtcccactacttgcgcttaggaagagaacagctgagaacggtaagcagtggtccttacactaccttctctcagcatccatatgaccaaacgaaataaaacaaagttccctgatatgtacatttgtgaccctgagttgaatcagttatgtctgtgttttaataggctgccaaccacactgagatactcaggcagcatgaaagggtatggaagacctaggttctaggcctgtctcataaggtgttacattttgggacaagtcatacttcagctcactcaccttcatatttaacaaagaaatttaatctgttatattgacgtttggaaaccccagctaagctaacagggagaagggctgtggtgaaatggtggtgatgaacaaacctcttagaggtacatcatgcaagacgagataaataatactgttaactaccagtmtctaagctgagaaaatgtgctggctaagtcaacaggttgctgtatcctttacacactgacataaatgctgaaatgaatgaaataatgaaaagctaagcaaagagtcttgctttatggaggat

SEQ ID NO: 91608 - DNA, 710 bp, Homo sapiens
aacataaacaagcttggcagaacattcctaaggtgttgactgagttccaaacagaccaaggtattacattttcattctggaaaactcctgctgattcttcagtcatttacttcgagataaaaaaaaacaacaatgcatccagggctgtgagggtcccactacttgcgcttaggaagagaacagctgagaacggtaagcagtggtccttacactaccttctctcagcatccatatgaccaaacgaaataaaacaaagttccctgatatgtacatttgtgaccctgagttgaatcagttatgtctgtgttttaataggctgccaaccacactgagatactcaggcagcatgaaagggtatggaagacctaggttctaggcctgtctcataaggtgttacattttgggacaagtcatacttcagctcactcaccttcatatttaacaaagaaatttaatctgttatattgacgtttggaaaccccagctaagctaacagggagaagggctgtggtgaaatggtggtgatgaacaaacctcttagaggtacatcatgcaagacgagataaataatactgttaactaccagtatstaagctgagaaaatgtgctggctaagtcaacaggttgctgtatcctttacacactgacataaatgctgaaatgaatgaaataatgaaaagctaagcaaagagtcttgctttatggaggat

SEQ ID NO: 91609 - DNA, 902 bp, Homo sapiens
ctccaagcctggaaggaggagcagaagtcagaggacccagggaaggaggggtttagggaaaggggatatcccaagcaaaatgaacagcggttgcactgacacagtggtgtgaacgcacctggctccttcaggatgatatatgggggaatggatacctgaagccaggagagagaggatgttggatggaatgaataatgaacaaggaaaactgttctgagaggtcacagattaaaataaacctagaatgtgttggccacctcttctcagaagtggataatgarcaaaactcttcttcaatcggttaagccaaaggcaaaagcctgggacatgcaaacgcccctccttttatgcagctaattatacccggagtccaggtgagactcgatgagttaatgaggatccactcaaagtctatcacggtccagagacagagctagacccagacatgtcccctgtcctcaccaagctcgtaggctaaaggaacacagacaaagcaagcaagcaagcaagtataatgcggcctggtaagtgccagatcgggatggttcccttttccaggcttgattccgcagaggcaaacctggacacaaggagttgagcacagcagttaatttgggatgtgagccaagaaacactcatggaggagcagggaaatgagacagagaaaggaaggaacccatgcacagtgcacagtgggcacctgggcccaaccccactggggacgtctaggaggctgcatacgtggtacatgcccccaggctgtactggcaagcagggaggagctgggtgtttagccactacctcccatccaccgctgaggaagggctgttcttgacacacaaatttgctgacatttagtgagcccctgttctaacatgcaatcctgtggcaggaggaggtgg

SEQ ID NO: 91610 - DNA, 902 bp, Homo sapiens
ctccaagcctggaaggaggagcagaagtcagaggacccagggaaggaggggtttagggaaaggggatatcccaagcaaaatgaacagcggttgcactgacacagtggtgtgaacgcacctggctccttcaggatgatatatgggggaatggatacctgaagccaggagagagaggatgttggatggaatgaataatgaacaaggaaaactgttctgagaggtcacagattaaaataaacctagaatgtgttggccacctcttctcagaagtggataatgaacaaaactcttcttcaatcggttaagccaaaggcaaaagcctgggacatgcaaacgcccctccttttatgcagctaattatacccggagtccaggtgagactcgatgagttaatgaggatccactcaaagtctatcacggtccagagacagagctagacccagacatgkcccctgtcctcaccaagctcgtaggctaaaggaacacagacaaagcaagcaagcaagcaagtataatgcggcctggtaagtgccagatcgggatggttcccttttccaggcttgattccgcagaggcaaacctggacacaaggagttgagcacagcagttaatttgggatgtgagccaagaaacactcatggaggagcagggaaatgagacagagaaaggaaggaacccatgcacagtgcacagtgggcacctgggcccaaccccactggggacgtctaggaggctgcatacgtggtacatgcccccaggctgtactggcaagcagggaggagctgggtgtttagccactacctcccatccaccgctgaggaagggctgttcttgacacacaaatttgctgacatttagtgagcccctgttctaacatgcaatcctgtggcaggaggaggtgg

SEQ ID NO: 91611 - DNA, 902 bp, Homo sapiens
ctccaagcctggaaggaggagcagaagtcagaggacccagggaaggaggggtttagggaaaggggatatcccaagcaaaatgaacagcggttgcactgacacagtggtgtgaacgcacctggctccttcaggatgatatatgggggaatggatacctgaagccaggagagagaggatgttggatggaatgaataatgaacaaggaaaactgttctgagaggtcacagattaaaataaacctagaatgtgttggccacctcttctcagaagtggataatgaacaaaactcttcttcaatcggttaagccaaaggcaaaagcctgggacatgcaaacgcccctccttttatgcagctaattatacccggagtccaggtgagactcgatgagttaatgaggatccactcaaagtctatcacggtccagagacagagctagacccagacatgtcccctgtcctcaccaagctcgtaggctaaaggaacacagacaaagcaagcaagcaagcaagtataatgcggcctrgtaagtgccagatcgggatggttcccttttccaggcttgattccgcagaggcaaacctggacacaaggagttgagcacagcagttaatttgggatgtgagccaagaaacactcatggaggagcagggaaatgagacagagaaaggaaggaacccatgcacagtgcacagtgggcacctgggcccaaccccactggggacgtctaggaggctgcatacgtggtacatgcccccaggctgtactggcaagcagggaggagctgggtgtttagccactacctcccatccaccgctgaggaagggctgttcttgacacacaaatttgctgacatttagtgagcccctgttctaacatgcaatcctgtggcaggaggaggtgg

SEQ ID NO: 91612 - DNA, 637 bp, Homo sapiens
ccagggcctcactatgttgtccagtacggtctcraactcctggactcaagcaatcctctcacctcagcctcacaaattgctgggattacaagcgtgagccactgtgcccagcttttttcttttcttttttttcttttttttttttggacagagtctcattctgttgctcaggctgagtgcattggtgtaatcatggctcactgtagccttgacctccgggctcaagtgaccctcctgcctcagccttctgagtagatgggattacaggtgtgtgccaccatgcctggctttttaaattattcttattatttgtataggtcttgaactcctgggctcaagcaatctacccacctcagcctcccaaagtgctgggattacaggtgtgaaccaccatgcccagccctcattctcatttattctgagaacgtgagaaattgtccaggaagccctcccttcctactcattaggtgaggtcacattctgccacctgccagacccactcagctctgtgcgcagtgccacgccaggcccactggagctgcccaagactgtggtcagcctctctgctcccatggaagcaactggagagaagagtgagaaatatgagtcaaaaagttgtgtggcgacgtggggtggg

SEQ ID NO: 91613 - DNA, 637 bp, Homo sapiens
ccagggcctcactatgttgtccagtacggtctcgaactcctggactcaagcaatcctctcacctcagcctcacaaattgctgggattacaagcgtgagccactgtgcccagcttttttcttttcttttttttcttttttttttttggacagagtctcattctgttgctcaggctgagtgcattggtgtaatcatggctcactgtagccttgacctccgggctcargtgaccctcctgcctcagccttctgagtagatgggattacaggtgtgtgccaccatgcctggctttttaaattattcttattatttgtataggtcttgaactcctgggctcaagcaatctacccacctcagcctcccaaagtgctgggattacaggtgtgaaccaccatgcccagccctcattctcatttattctgagaacgtgagaaattgtccaggaagccctcccttcctactcattaggtgaggtcacattctgccacctgccagacccactcagctctgtgcgcagtgccacgccaggcccactggagctgcccaagactgtggtcagcctctctgctcccatggaagcaactggagagaagagtgagaaatatgagtcaaaaagttgtgtggcgacgtggggtggg

SEQ ID NO: 91614 - DNA, 637 bp, Homo sapiens
ccagggcctcactatgttgtccagtacggtctcgaactcctggactcaagcaatcctctcacctcagcctcacaaattgctgggattacaagcgtgagccactgtgcccagcttttttcttttcttttttttcttttttttttttggacagagtctcattctgttgctcaggctgagtgcattggtgtaatcatggctcactgtagccttgacctccgggctcaagtgaccctcctgcctcagccttctgagtagatgggattacaggtgtgtgccaccatgcctggctttttaaattattcttattatttgtataggtcttgaactcctgggctcaagcaatctacccacctcagcctcccaaagtgctgggattacaggtgtgaaccaccatgcccagccctcattctcatttattctgagaacgtgagaaattgtccaggaagccctcccttcctactcattaggtgaggtcacattctgccacctgccagacccactcagctctrtgcgcagtgccacgccaggcccactggagctgcccaagactgtggtcagcctctctgctcccatggaagcaactggagagaagagtgagaaatatgagtcaaaaagttgtgtggcgacgtggggtggg

SEQ ID NO: 91615 - DNA, 642 bp, Homo sapiens
gacattttgggtcctctggaattaacgtcagctcagagccagtgtccagtagtccctgaaatgtctgatcatctccctttccccagtgcacagttaccctgataaaaggccagaggtctctttggggaaggatgggagaaagattcactgcatacattgtcggtaatgtagtggggtccttcctcaaggggacccgacctccccttcattcaaggggttctgggtctgtaaactagctcaagtctggaaattgattgaagagccatgattctctgtttttataattcaaattagtgttttggccatttgacctagaagttttctgcttgtataaattaagtaggaatgcagtgggcttcctatcaatttcacttctaggaacaccatgrttaattaaccaatgccggagctctacacgagccagactgttctgattgctgctttgcctctgctgtccattagggtagctgtgcccacctgaccttatcatatctagtttttgaaacatggcagggaaaatgattccacgtaacctgaccatatcagctgggtgactgaataaaacaccttctcagctcgctttcctctggcctgaagctttttgctgtagctgcttttgcaacaaaggacacagttgtaggc

SEQ ID NO: 91616 - DNA, 900 bp, Homo sapiens
gggcttctatgaggcaccgctgtgaaccctctgcaccgaccttagccagaggagcaggactcccmccggcatccttctgcgtaagaggccttgtgggtcttctggggctctggaatcaacgccgcttttcctggggccagagtaggtggagctgagctccccaaagcttccagtttgctgcctgctcccacccgcctcgccactgcgcgagccctttccatcccctctgcagagtgagagaagggccgtgagtgaggatcctggcctagggctgtcaccatccccctcacctgctggccaggctaacctactgcaggctgcttcctttccttaggttcacgggtaccgctatttgtccagcgtccatttgcggtggcattaggatgaggtgctctgtgccctctttctcccagtgtgaatctgacacacgcccccaggagagtccgaggggcatcacttctggaggacgccctgggccctgaaagacagctcatggtccaactgaggagcctgcaccttgctgggacagggtggcccaggagatctggggtctgtacctgctcctggaccctctccagcttgttgttctgggtggggccagctcaggaggggcacctgggctgggagtctctgaagcagctgcccccattgctccaggagagggctcagcccttgtcccagctgcggggccagtgggagcagtgtgcagcgtcctgccctgggctctcgctggctctgcgccctcgcctggccagcccgggagggtgcagaggctcactggcagctcttcctgctcccacacctgcctcttcctctgaactggagggccggcaagcctcaaggcttaatgcaagactaaatacagctgtcagcgccttcctctgagctcgcttgggagct

SEQ ID NO: 91617 - DNA, 900 bp, Homo sapiens
gggcttctatgaggcaccgctgtgaaccctctgcaccgaccttagccagaggagcaggactcccaccggcatccttctgcgtaagaggccttgtgggtcttctggggctctggaatcaacgccgcttttcctggggccagagtaggtggasctgagctccccaaagcttccagtttgctgcctgctcccacccgcctcgccactgcgcgagccctttccatcccctctgcagagtgagagaagggccgtgagtgaggatcctggcctagggctgtcaccatccccctcacctgctggccaggctaacctactgcaggctgcttcctttccttaggttcacgggtaccgctatttgtccagcgtccatttgcggtggcattaggatgaggtgctctgtgccctctttctcccagtgtgaatctgacacacgcccccaggagagtccgaggggcatcacttctggaggacgccctgggccctgaaagacagctcatggtccaactgaggagcctgcaccttgctgggacagggtggcccaggagatctggggtctgtacctgctcctggaccctctccagcttgttgttctgggtggggccagctcaggaggggcacctgggctgggagtctctgaagcagctgcccccattgctccaggagagggctcagcccttgtcccagctgcggggccagtgggagcagtgtgcagcgtcctgccctgggctctcgctggctctgcgccctcgcctggccagcccgggagggtgcagaggctcactggcagctcttcctgctcccacacctgcctcttcctctgaactggagggccggcaagcctcaaggcttaatgcaagactaaatacagctgtcagcgccttcctctgagctcgcttgggagct

SEQ ID NO: 91618 - DNA, 900 bp, Homo sapiens
gggcttctatgaggcaccgctgtgaaccctctgcaccgaccttagccagaggagcaggactcccaccggcatccttctgcgtaagaggccttgtgggtcttctggggctctggaatcaacgccgcttttcctggggccagagtaggtggagctgagctccccaaagcttccagtttgctgcctgctcccacccgcctcgccactgcgcgagccctttccatcccctctgcagagtgagagaagggccgtgagtgaggatcctggcctagggctgtcaccatccccctcacctgctggccaggctaacctactgcaggctgcttcctttccttaggttcacgggtaccgctatttgtccagcgtccatttgcggtggcattaggatgaggtgctctgtgccctctttctcccagtgtgaatctgacacacgcccccaggagagtccgaggggcatcacttctggaggacgccctgggccctgaaagacagctcatggtccaactgaggagcctgcaccttgctgggacagggtggcccaggagatctggggtctgtacctgctcctggaccctctccagcttgttgttctgggtggggccagctcaggaggggcacctgggytgggagtctctgaagcagctgcccccattgctccaggagagggctcagcccttgtcccagctgcggggccagtgggagcagtgtgcagcgtcctgccctgggctctcgctggctctgcgccctcgcctggccagcccgggagggtgcagaggctcactggcagctcttcctgctcccacacctgcctcttcctctgaactggagggccggcaagcctcaaggcttaatgcaagactaaatacagctgtcagcgccttcctctgagctcgcttgggagct

SEQ ID NO: 91619 - DNA, 658 bp, Homo sapiens
ggaggggtgcaggggtccatgaaggccaagttccttgggcccacagaagtcaggatgcagcccggggtcgagggattccttccccagtggcctggagcccgagagggtgtggcctggagcccgagacagtgtggaagcccagagaagctgcagagaggcccgatgggggccgctgagctctagtcctgctgtatcggcccccagtcttttctgtggaccagttctgatgagtgggtcggggatacctgggatgctgaattgagcagcaggaggaggccacgtagggacctaaaatgcagtgactgattagcaatgtcggcccggacacaggcgtggcagaggcgcccagccactggcttgccagcccctgctgagggctttctagctggaaggagcagccgagaccagttccctggggagaatattccttagacactgcgtgtgctgtcctgcttcctaacatcccacaccttgtcttctgtttttctcattcgcctaatgtcctgcaagtcgatgacagcatccagcaccaagtcccacattgagcacaaatctgggggaaattgtcccattttcccagagtcctgayggattaatctgaggcctatgagaaccaagccctgcattcaagcccgggttttgtagccccccgggtgga

SEQ ID NO: 91620 - DNA, 739 bp, Homo sapiens
ttttagccttagaaaaaagttgcaagaatagtacaaagaaacgtttgtacacttcaaccaattcattaattgtgagcattttgtctcatttgcttaatatcctctctctagtataatctctatgtatatatcttttcttacatgtatatagtatcatctctgtccatgtacatatcttttcatatatatgtgtgtatatatgtgcatatacatagatgtgtatgcaaatatatgtgtgtatgtatgtgtgtatgtgtgtatgtaaatatrtgtgtgtgtgtatatatgtgcatatacatatgtgtgtgtaaatatatgtgtatgtatatgtgtgtttatatgtgcggatacatatgtgtatgtaaatatatgtatgtatatgtatgtttgtatatatgtacacacacatagattttagggcaagaactatttaaagaggttgtggacatcaggtttcttttcccaagtgctttggtgtgtattgctaggaatagtcattctcttatatcactgacattgttatatcctacccttgaacccatcatccttattcaaatagaatgccctttgcaaccacgttttttccggtttaggatcttttctcaaattcatgctgtatttgccttcatgatcttgatgatactgagggaaggattattttcattttctttagtaaagaaagtgcaaaactagaaccaacaacatcaaagtcgcttttattgaaaggcttggaatccac

SEQ ID NO: 91621 - DNA, 557 bp, Homo sapiens
tgccctcacctggcatgctatggcgatggcttttttctgaaacgaatgccaatttagtaaaggtataagatggcatcttgtgttttattaaattttattgtgtatatttaaggtatgcaacatggtgttacagatacatagagatagtaaaaaggttactagtaaagcgaagcaagttaacatagccatcgcaactcacagctgcccgcttttgtttttgtggcaagagcagctcaaatccactcatttaatgtgaatcctgcatacagtccagtttcacacccggtgctcccrtgttgccctgtcctcgggttacgtagcttacttggcattgccatggtggtggacctgctcagcctcactcatgtttgctctttcagatccgaacgacgtcaggtgctcctccaccctggtgacggtaaggaccctgttttcttgtccttttctagaacagtgtgcggttctgaccacttccccagcctgctcctgcctgtgcggtgtcagacagaaacacacagggtagacagaagtcccaccctcaaaacattggcagttct

SEQ ID NO: 91622 - DNA, 708 bp, Homo sapiens
aagaagcatggaggacaaaacccacagggcagattgtgctgggggacaagggggtcccctggtaggcaagtgtattcatgtgatgtgtgtgcctgggcacgtgtgtacattatgtgaggacgtgcacataccactcacctagccctgcttccagctaagagaaaggaagccagaaacatgcaaagatgccaagcaagcaccctgggcacggttttccagacctcgcagggaacagagtaaaagctaggaacgctgggcttcacgaaggagcagagggggcaggtgcggagggaggaggccggcagagagcaggtccctcctggagcagcgcgatcgggcgccgaggcctcatgcaacatccgacaactactcatggcaaggagaattctggactgactttctattgttttgattaaaagtaattttatccaaaaatccaaaatgtactggacgtgccaatcagaatggaacagaaggaaatgccgcactacctggctgcctctcccctcggctgctggtggctgcccatagacccctgtraacagctgatgcatgtcccacctgcaccatagggcctggaggaagcggctgtagcaggactcgcagagttccccgtgcgtggccaccggccctgcctccatcgctgttgtctccccgcaggccaaggcgaggcaggtggggcgcactgcatggctctcaggggaagga

SEQ ID NO: 91623 - DNA, 667 bp, Homo sapiens
aagggaggtcacagaatggggcaggtcactggaccaatggcaagccggcctgtcaccctagctgaggcacaaccccgcccgccctccaacccccagcctgtgcagggtctcgggtctcgggtctcagcactccctccacagtcactgggttcagggcccagagaccagcagaacctagcaagtaaccacccatctccacaccctccgttctctgccaggagtcgagtggctgagccctgaactcccagactgagttggcactgccccaagcccccctccagagagccgcctgggcagccccaacagggcactgaggacaccaggcaccatccacacccacactccagcagccaggygctctctctccaccccctgggcagagcgaatcagatggttctctggctctgcctttcccacgtgctgccgtggctctcacagttgttttcggaaacacagactccactgggaggatttctccctcataaacacacatgtcaaaatcaatgtatcactcgtcaccctgtgtcctcatcttcggcttggaaaacctggcctcagtccctcgggccaagagtctcctgactgcccaggtggcaggccctccgtcccttgcggttctaaactgctacctgggaaagaatcgttgctgcccacaacttccatcttg

SEQ ID NO: 91624 - DNA, 667 bp, Homo sapiens
aagggaggtcacagaatggggcaggtcactggaccaatggcaagccggcctgtcaccctagctgaggcacaaccccgcccgccctccaacccccagcctgtgcagggtctcgggtctcgggtctcagcactccctccacagtcactgggttcagggcccagagaccagcagaacctagcaagtaaccacccatctccacaccctccgttctctgccaggagtcgagtggctgagccctgaactcccagactgagttggcactgccccaagcccccctccagagagccgcctgggcagccccaacagggcactgaggacaccaggcaccatccacacccacactccagcagccaggtgctctctctccaccccctgggcagagcgaatcagatggttctctggctctgcctttcccacrtgctgccgtggctctcacagttgttttcggaaacacagactccactgggaggatttctccctcataaacacacatgtcaaaatcaatgtatcactcgtcaccctgtgtcctcatcttcggcttggaaaacctggcctcagtccctcgggccaagagtctcctgactgcccaggtggcaggccctccgtcccttgcggttctaaactgctacctgggaaagaatcgttgctgcccacaacttccatcttg

SEQ ID NO: 91625 - DNA, 637 bp, Homo sapiens
aaaaatgaacagtgaaactctgttgagtggagagcctggaagcccgtactcaccagtgcagtcccaggtacttacatttgggggtctcgctttccctctctgccactgtgaacatctgcattgagtcatgagaccaccagctctttcagaattcactgggtcatctttatgactttctacaagaaggaccctctaggtctctgaccccagcctggtttgggaatgaactccctcagattatgaagtgagtcctcaatctgcatactgggcccccggtcccatgtttatggaaggcacaattccattcatttctttcttttatttcttctgaaaatattttacttattcttttgaaaaattgtgtaaaatacacataatataaaatttaccatcttagctrttttaaaatttacagttcaatggtgttaagtttattcacattgttgggcaaccatcaacaccatccatctccagaactttctcatcttctcaaactcaaactctgaccccattaaacactcattccggattccccctcccctagcccctggaacccaccgttctactgtctgtctctgtgaattcgatgactccaggtctctcatgttaagcggaatcgtacagtgtttgtccttct

SEQ ID NO: 91626 - DNA, 2121 bp, Homo sapiens
  misc_feature (1)...(2121): n = A,T,C or G
cctaaaaacaaaaaacaaacaaacaaaaaaaaaagagttaaacaatcacagaagagaaagtggactgatggttgctaggagctggggagagtggaaatatgtaggcattagtcaaagggtacaaagtttttgttataccagatgagtaagtactagagagctactatacagcatactgcctatgattaatagtgtattatataattaaagttttgctacgagggtagatcctgtgttcttatcagaaaaaaaaatgatagtaaataaagagggctgcaggaaacttttatagctggtagactgtggtaatagtttcagggatatatacttatctccaaccttatcaggttgtatacattaaatacgtacagctttttgtatgtcactcacacctcaataaagtgatttgaagaataattatraagtttgtgaattttcttgataaaacctgattatattctgcattttaaagcattattacttatttagaaaataaccacctctttaaaaccagtagaacgaagccttgaagtttcatgcaatatgaaagtttccaacttctttcctgctccacaatctgtggatattaagctcacatgtagcttatgatattcaaacaaattaataactgcttcaatgcccaggatttaaagtgagatgtaatagaaaggcaaagtgcactgacaatccaaaattacatattagactacatgtacttcagataatatctaggatctcacattttccatgcatttatttttaaagctctagttatgtttattaggaaaacaagaaaagaacaattacaataaagcagatctggagcatatgatttcatnnnnnnnnnnnnnnnnnnnnnnnnnnnnnnnnnnnnnnnnnnnnnnnnnnnnnnnnnnnnnnnnnnnnnnnnnnnnnnnnnnnnnnnnnnnnnnnnnnnngatacgtatcatataatatactacgtgtgagcacaaaaacgtcaaactcatagaaatagagtaaatggtggttactagaggctgggagtataggattaggaagatattggtcaaaaggcacagaattttcatgaaacaggaggcataagttcaaaaggtctattgtatatcatgttgaacacaattaataacactatattgcatattttgaaaaatgctgggaattgattttaagtgttcttgccacaaaagaataagtgaggtaatgtatgtgctaaaaagcttgatttagccattccacaatgtatacatatatcagatcatcatattgtacaccataagtatgtacaattttactagccaattaaataagagaaaaatgaatgcataagttttcatcatatataggtattgatttttccagagagatgatcagtcacaaataatggtatcctcattcatgcttttttaaaaaagccaaatgtagacttgaggctctagcaaatgagtgctgacttctatcttactgcatccttgaatgcatatacgcttactcagtgatcgtttgtaaaagacaaagcagggtgcagaatggtttcatttcacacctggaatcagctctctggggaaattttaagatcaaaacagtaaaacaaacagcaaggtccagtagaaattagttcttaacttgctgcattttaacacctctctggccatacaaatatgcccacacaggtaactagggtagagaagtggacaccacctagtgtatgctaagtaattggatcatcacctgaatgaattcttccacccttatatggtactttcaatataacttgggaaaacttctctctcattcaactcattgtcactagatttaataattcataatgtagttatctctaatgctaaaggataggatgttttggctgataacagtatcagtgtataaatccgtcagaaaagggcaaaatcttaggagctcactatggatcacaaggttatgggtccaaggtagaacaagcatgattgctctaatgcttaaactatcatgctaatttctatatataaaataatttttnnnnnnnnnnnnnnnnnnnnnnnnnnnnnnnnnnnnnnnnnnnnnnnnnnnnnnnnnnnnnnnnnnnnnnnnnnnnnnnnnnnnnnnnnnnnnnnnnnnnaa

SEQ ID NO: 91627 - DNA, 2121 bp, Homo sapiens
  misc_feature (1)...(2121): n = A,T,C or G
cctaaaaacaaaaaacaaacaaacaaaaaaaaaagagttaaacaatcacagaagagaaagtggactgatggttgctaggagctggggagagtggaaatatgtaggcattagtcaaagggtacaaagtttttgttataccagatgagtaagtactagagagctactatacagcatactgcctatgattaatagtgtattatataattaaagttttgctacgagggtagatcctgtgttcttatcagaaaaaaaaatgatagtaaataaagagggctgcaggaaacttttatagctggtagactgtggtaatagtttcagggatatatacttatctccaaccttatcaggttgtatacattaaatacgtacagctttttgtatgtcactcacacctcaataaagtgatttgaagaataattataaagtttgtgaattttcttgataaaacctgattatattctgcattttaaagcattattacttatttagaaaataaccacctctttaaaaccagtagaaygaagccttgaagtttcatgcaatatgaaagtttccaacttctttcctgctccacaatctgtggatattaagctcacatgtagcttatgatattcaaacaaattaataactgcttcaatgcccaggatttaaagtgagatgtaatagaaaggcaaagtgcactgacaatccaaaattacatattagactacatgtacttcagataatatctaggatctcacattttccatgcatttatttttaaagctctagttatgtttattaggaaaacaagaaaagaacaattacaataaagcagatctggagcatatgatttcatnnnnnnnnnnnnnnnnnnnnnnnnnnnnnnnnnnnnnnnnnnnnnnnnnnnnnnnnnnnnnnnnnnnnnnnnnnnnnnnnnnnnnnnnnnnnnnnnnnnngatacgtatcatataatatactacgtgtgagcacaaaaacgtcaaactcatagaaatagagtaaatggtggttactagaggctgggagtataggattaggaagatattggtcaaaaggcacagaattttcatgaaacaggaggcataagttcaaaaggtctattgtatatcatgttgaacacaattaataacactatattgcatattttgaaaaatgctgggaattgattttaagtgttcttgccacaaaagaataagtgaggtaatgtatgtgctaaaaagcttgatttagccattccacaatgtatacatatatcagatcatcatattgtacaccataagtatgtacaattttactagccaattaaataagagaaaaatgaatgcataagttttcatcatatataggtattgatttttccagagagatgatcagtcacaaataatggtatcctcattcatgcttttttaaaaaagccaaatgtagacttgaggctctagcaaatgagtgctgacttctatcttactgcatccttgaatgcatatacgcttactcagtgatcgtttgtaaaagacaaagcagggtgcagaatggtttcatttcacacctggaatcagctctctggggaaattttaagatcaaaacagtaaaacaaacagcaaggtccagtagaaattagttcttaacttgctgcattttaacacctctctggccatacaaatatgcccacacaggtaactagggtagagaagtggacaccacctagtgtatgctaagtaattggatcatcacctgaatgaattcttccacccttatatggtactttcaatataacttgggaaaacttctctctcattcaactcattgtcactagatttaataattcataatgtagttatctctaatgctaaaggataggatgttttggctgataacagtatcagtgtataaatccgtcagaaaagggcaaaatcttaggagctcactatggatcacaaggttatgggtccaaggtagaacaagcatgattgctctaatgcttaaactatcatgctaatttctatatataaaataatttttnnnnnnnnnnnnnnnnnnnnnnnnnnnnnnnnnnnnnnnnnnnnnnnnnnnnnnnnnnnnnnnnnnnnnnnnnnnnnnnnnnnnnnnnnnnnnnnnnnnnaa

SEQ ID NO: 91628 - DNA, 2121 bp, Homo sapiens
  misc_feature (1)...(2121): n = A,T,C or G
cctaaaaacaaaaaacaaacaaacaaaaaaaaaagagttaaacaatcacagaagagaaagtggactgatggttgctaggagctggggagagtggaaatatgtaggcattagtcaaagggtacaaagtttttgttataccagatgagtaagtactagagagctactatacagcatactgcctatgattaatagtgtattatataattaaagttttgctacgagggtagatcctgtgttcttatcagaaaaaaaaatgatagtaaataaagagggctgcaggaaacttttatagctggtagactgtggtaatagtttcagggatatatacttatctccaaccttatcaggttgtatacattaaatacgtacagctttttgtatgtcactcacacctcaataaagtgatttgaagaataattataaagtttgtgaattttcttgataaaacctgattatattctgcattttaaagcattattacttatttagaaaataaccacctctttaaaaccagtagaacgaagccttgaagtttcatgcaatatgaaagtttccaacttctttcctgctccacaatctgtggatattaagctcacatgtagcttatgatattcaaacaaattaataactgcttcaatgcccaggatttaaagtgagatgtaatagaaagkcaaagtgcactgacaatccaaaattacatattagactacatgtacttcagataatatctaggatctcacattttccatgcatttatttttaaagctctagttatgtttattaggaaaacaagaaaagaacaattacaataaagcagatctggagcatatgatttcatnnnnnnnnnnnnnnnnnnnnnnnnnnnnnnnnnnnnnnnnnnnnnnnnnnnnnnnnnnnnnnnnnnnnnnnnnnnnnnnnnnnnnnnnnnnnnnnnnnnngatacgtatcatataatatactacgtgtgagcacaaaaacgtcaaactcatagaaatagagtaaatggtggttactagaggctgggagtataggattaggaagatattggtcaaaaggcacagaattttcatgaaacaggaggcataagttcaaaaggtctattgtatatcatgttgaacacaattaataacactatattgcatattttgaaaaatgctgggaattgattttaagtgttcttgccacaaaagaataagtgaggtaatgtatgtgctaaaaagcttgatttagccattccacaatgtatacatatatcagatcatcatattgtacaccataagtatgtacaattttactagccaattaaataagagaaaaatgaatgcataagttttcatcatatataggtattgatttttccagagagatgatcagtcacaaataatggtatcctcattcatgcttttttaaaaaagccaaatgtagacttgaggctctagcaaatgagtgctgacttctatcttactgcatccttgaatgcatatacgcttactcagtgatcgtttgtaaaagacaaagcagggtgcagaatggtttcatttcacacctggaatcagctctctggggaaattttaagatcaaaacagtaaaacaaacagcaaggtccagtagaaattagttcttaacttgctgcattttaacacctctctggccatacaaatatgcccacacaggtaactagggtagagaagtggacaccacctagtgtatgctaagtaattggatcatcacctgaatgaattcttccacccttatatggtactttcaatataacttgggaaaacttctctctcattcaactcattgtcactagatttaataattcataatgtagttatctctaatgctaaaggataggatgttttggctgataacagtatcagtgtataaatccgtcagaaaagggcaaaatcttaggagctcactatggatcacaaggttatgggtccaaggtagaacaagcatgattgctctaatgcttaaactatcatgctaatttctatatataaaataatttttnnnnnnnnnnnnnnnnnnnnnnnnnnnnnnnnnnnnnnnnnnnnnnnnnnnnnnnnnnnnnnnnnnnnnnnnnnnnnnnnnnnnnnnnnnnnnnnnnnnnaa

SEQ ID NO: 91629 - DNA, 740 bp, Homo sapiens
gattcataggcgaggtatacaatccttacttatgttataaattgagtacaaccactgactaattaatatctgacctttaaattatgctaaccccgtaagaaatcataattttttaaaatatctgagcacagatattagtgaccacataccacaagagataattagtacaggcatgtcacttaacaaaccaacaagtagcactaaaaacaactgcggcaagattraaatacagagtggctagattatcttaaatgtccagtttttagcaaaaaaacaaattaaacatgcggagagaaaaaagaaatatgactatattcagggaaaaagagcaaccagtagaaactgtatttgaggccgggcgcggtggctcacgcctgtaatcccagcactttgggaggccgaggcgggtggatcacgaggtcaggagatcgagaccatcccggctaaaacggtgagaccccgtctctactaaaaatacaaaaaattagccgggcgtagtggcgggcacctgtagtcccagctacttgggaggctgaggcaggagaatggtgtgaacccgggaggcggagcttgcagtgagccgagatcccgccactgcactccagcctgggtgacagagcgagactccatctcaaaaaaaaaaaaaaaaaaaaaaaaagaaactgtatttgaggggcaaagatgttggatttagtagataaagctaaagcagctgttataaacatgttcaaagaactaaa

SEQ ID NO: 91630 - DNA, 750 bp, Homo sapiens
attttttaaaagttgatccatgtgtaagcaactccatgactctgctagtgcaagcgttgcctagaattcttatttcatttctctgatgtcacctagcaatgtgtctgatgctagaatcacattaatgaagactgaagagttgagaaagaaaattgttcatcaaattagcttgactttcctggaacacgacaagcaactcaaatgcaccagatagaaactcacaagtagaaaactttcaggtaccatacgcctttcttacagagaagttaaaacctgaagagctgtttacctgggagcatttttactaacattatcccaagcaytggtcctgggccttggtcgacaggcctctgaaacctttcacctgatttcacgtcaccatgaacatagacatggaagaccggtttggtgaatattggtgtcctggtgttttggggtggaatggaaattttaacccctgaaaatcacacgactacttctttgtatctgttaaagtatataactgattataaagtatggctacagttggaagcaaaagtgacatttgagggggagaaactcacataacctgaaagaaaggaagtaaagttagatagtatataagggactatgtctcacttccctggtgaattcactgatatgataacctacctgtaagtagctatggccaactaatattagaaaagtggagggctgcccagtgctgctgaaactaagctcccaggctagggttggtgtaaattggtttct

SEQ ID NO: 91631 - DNA, 1284 bp, Homo sapiens
gcatggcataatttatgatttatgtgatagaggctcagatttaatccatggggattttcatataaggtgtgctcagtgayatgtttgaagttatgctattgaattcaaataacacacttagttctcagaaatattaatttgattttaacatccttcctcaccacccaggttatggttggtttcttaccttaggaaaatcctaagtgaatttaattaactcatattttgaaagtttgtacatttaggtttgcaaggcagagattttgcaaacatgagaagcagggctgtacacttaaatttaatcattttcctataacctcattgatctgactttatatttcagttataataatgcagaatatgcaattttaaaacaaattattattttgaagcactatatttacatgtgatgacaaatccactgtgttgcttttatcttttaacttttgggatattaaaataaaatagcattttttctctgcttcacaaagtaattattgtagcatctgttgaaatacatgttggctctcggggacttttcagtcttaggacaaattctgtgctttcttaagtatctgtattgttatgctccttttgttttgttgtttgagaggaaaatgaagatctgtgacatcatttattctggaaacaagcacaagtgcgtttaacaagaaaaatcaaggatgtaacttttgtcccgctggtttgaaaatccaaaatcttctttgcaaatagagccattcattgggtacaactggatcaaaagtaacaagtttttgtctgtgtctttagcctaaaacctcccctaccctcttccagattaactctgttgtgcctggattaacccctaagaatcctggtattgtttctcttcattacacttatccccatgtcccctattgtctttgcttttcattaggggaaataaacagtagacggtttaagccatgataagcttctccagcttggagtatctatttgagcttcatatttgacacttgtttcccctttcaatgtaaacattcattttgaatccaataaccttgtcaatggaaattgtgaatgctaagggctgagcaggctgtgtgagcaaataccagtgaagtctcattagttgtacggaacctaggaccagagatgacagttctggatctgaattaatggtcttttgacccattttactgtaaacaaataagaaagagtattagcatctgagaaccatatccattttaatataattaaaactagaacggtatgtccctagagcttgtcaacaacagagtt

SEQ ID NO: 91632 - DNA, 666 bp, Homo sapiens
tctgcttgggtagctggtgacaatctcttgtaaggttgtcacttttggtttgtttgtttttttcctactttgcattttcagtcttcaatgcagttgccctactccatgaactgccccccacctctttaaaaaccaaaacctcagactccttgggacgtgagcacagccctcactaaatcaatwttttaagagcacaaagaccacaaagctgtcagccctacctgaaatcacatccgaaaagcaaagactcaggtggcttcgggttcaggacaggagattttttctactttcaatgaataatctgagctagcagagcatggaggagctttttcttgtctcctattcaaaaggacacaccacaaattgtgttgcacttttcctaaaagacattccatctactgtctaattttggagagaaccaatttaataatttcaaataaattcagccttatttatttaaactagaaattgcagatgggggaaaatagggaaagaagcctaaaagcaatgttttatatttctattcttttcttttaatgctttatatttcttatgtaagtgacccaggtcggggagagaaatgtaggcatataaggaaaaggggggaagcacagccaataaacttggagatagtaggaaggaaatccattttttcaagtctgatct

SEQ ID NO: 91633 - DNA, 1536 bp, Homo sapiens
cctagtaaaggattcctcttctgtcggtttctgccagcatccaccattggcaacttcttctaattagggcctaacttgtactttctgtccctgcaacagcttttgagtgaaggtggatgagtgagaggttatgagaggagtaaagctactgacttcttccatctatctttcttcctgaattttccatttttcctgccgaatttcactcttcaaccaaaccagactgcttgccaatcatgcacttccttaatgctgggtctttactcatgccatcccttctccttcacagtttttccctgtctttacagatccaagtctcacctaactgtcaaaacccacctggagtgtctctgttagtaccttcgcatatccccttgggctgagctcttcttgttctttcttggtgctgttaagatatgctcactttcttcctgtttattggagtttgtgtttctgtcttgttcctttgctggaccaagcagctcgtgtgttcatcagtgatttgccaagtgtgggtttataacaataacatcagccagcatttgctcgatgcttactgtatctttcctgaatttctgcaaatagacacagtcacatgaaatatgaacttctggggattataggccagacccctcatgtccttatccctgaggtttagcacagtgcctcaaacatcaagggtgaccaatcaatgttttgtggatagatgatgtaaggatttatataagcaccaaagcttgctgtgagggtttattgtgcttaagccatcttttaaaactttcccctcactcttagtcttaatgcttcctctttgaaagagatccagaatttgaaacttttcatatctaacgttttctctgtggtatctcaacttttcttagtcaaatatttcattttgaaaaagaaataaatagctttgtggcaatggcaagatctcaggtttactttaggcctttaatgtgagaaagaaaatatacacttcggttaaaatatgcagaatggggaaataaaacgttcagttgatactttaataattaaactaaatattatcaccaagtsataaatgctgctaagtcaatgaaatatgcatcagttagctaatcatgcagctggaacattatacaatttgattgcctaggattgttaaaaaaaatcagtgaagagagtagtttaatgattataatattgttatccaaagtcagcgaaactcatttcttagagtttggctatgatgccatcttcttattaatgactgttttgcttttcttctgcagccttcctcttccttgagaacctcattttggtctggttagtgtttataccctgttgccattatttcttttgggagtttaggctgagttattggtattcctaataaatgaagtagtgaaaagtgcactgaatatggatcagaagccctaagttctcactcgaacgtcagtcacagtcagttatccttttgaggaggttgagtaggaatcactcattactttgtagggggatatcaagtgacctataaaactaccttcctcccca

SEQ ID NO: 91634 - DNA, 518 bp, Homo sapiens
caaaggatacaaaatttcaggtagacagaaggaataaattccagatctctattgtataacacggtgactacagttaaaaacaacatattgtatatctgaaaaatgctatgacagattttaagtattctcactataaaaaaagtgtgtgtgatgtaatgcgtatgtaaatagcttgatttcgccattccacaatgtatacatatattaaaacaacatgttgtacactataagcacatacaatttttaataaagaaaaagagtaagactggaaaaagacaaatgttaagtttcacctgaccctctaaaaaaaactgaaagaaaaagaacttgatawggaaaaacagaaaataaactctaaaatgtgatcacaacctacagagaaattctggaggagcaatggatgcacctgttcagcttacccttatctggcctccactcctgggtcctgaactctgtgaggaaaggacttcgtactattcagccttgaattcccagggttcacattgtgtctggaaaat

SEQ ID NO: 91635 - DNA, 883 bp, Homo sapiens
atgttctgtccctaatcagcaattaaagcaatccgtattccaacgaattaatataattgttatctcctgccattcagcggcttgccaaaggttgatttccatcaaacaacacttgagcaagataatctaaaggatgctacaatctaaagagtctaagttccatctttggaccaaatcaaagactagatgaaattaacattttaataaaataatacctccatatcatatctgactttcatgaaaggttgcttagagctgtacgcggatgaatactatttctatgtttgccgtgaaatggttggggtaagagtgcgcatcttagccatctgagtctgccaggtcagtcaggggaatgggaagaggaaagttctctcttgagggttgctgtgtgtgcccaagcttttacaatggagtttgtatagtgctgtatytactgctttcctgtggctgccacaaagcttaaagctgggtgtctaatgtgcacttagcttcttcatcctgcttggttccaatttatctgaatttttcatttggtgaggtattctttttgttttatcttttttgttattgttctttatatgatgacttaactcctcccttttggaaaaaggaaagatgtacattctttaaaagttgaagtgttattataataaatgcaaaatcattgagggctacttcatcatatattgttaatatgctctactagtgataatagtcattgctgctaattgcaaacaatccatgtgcatatgagtgcaggcttggccacccaaccctcatcatgtaggaggttgatccaccaagacaaggtcattgttttctctttactctcttctatcattttcttgcatctaatgaaggaaactagcctgattgttttgtg

SEQ ID NO: 91636 - DNA, 1277 bp, Homo sapiens
gggttgctgaagaaagaaaggaaacaaattcatgctcaagtagagcaacttcttacacctctagcagagaaatgataaggcttctgagaccatcatgaggaagggatggagcccagaaatgtctttctacagtgcaccctagttccacccactggacccccgcagtggatcagcatactcctcagagagctattgctggtgcccatctggcatgctgattaaaaagcaatacgtacgccatgatgtctttggaaccattgtctgatgtggaggggaactgtgtcaataaatcatgataacagttaattcaagtaataaatacttttatggttgaatattatattatttgtttttaagtctggctgatatctattataatgagattttcctttactattccatttcattataattgacagtatttgtgtgaaatattgagggagctctgatagccacattcaaaaatatagtcaaggtctgtcatggggcatcccatctaagacagagccctcggggacaagccacaagggcgcatactgaaacagaaccctggggaacgcctgagctaatatcaaatcataagacaagaagcaaacttatgttcaataaaatttgatgggggcatcttgagagacaatggtaaggtcttgaggttgctgtttaaacagtatggaaatggataagaaatcactgcctcagatttggttggtagccaataaaggcttagggattagcaaaaagttagaaactattgaaaataatgaaaagataggatctagccttcaccatctctatacaaaataaattaatttaaattagtacaatcctaggaggtccttcccatcaactacgatcatgagcaagcaaatagttaaaatggaaccatgtgttgtttcacgtaaagaaaaaggcttgagtttttggtaacagttctacctgtaaaatagtaaagctgtagatacctatagcattgatgatggcaggggggagatgatattatgtcagtgacagcgagccaagccccatctaaaagaaaggtaagctgggagttttacttaaaaagcctacctaaaytgacagctctcacagaatgcactggaatttgggggtaaagatagaatcttccctcaggtttgaaaaacaagctcttattcacattttctattttcccattgacatgaaaattgcctaagaaaagtagacgagatcccaggggcacactgcttttcaacttgaatctttgccttcccttttcattttttacttacagtgagtac

SEQ ID NO: 91637 - DNA, 953 bp, Homo sapiens
aaaatataaaatactatattaatataaagtatgaatggatgaataattaacaaataatccaatcaattatacattttataaatttcattttggaaacttggcttcaatgtgccacggaggaaattctgttcttgtaccataagcctgtggtttcttcctttttttttttgagactgagtttcgctcttattgcccagactggagtacaatggctcaatctcggctcacggcaacctctgcatcctgggttcaggtggttctcctgcctcagcctcccgagtagctggggttacagatatgggccaccgtaccgggctaattttgtatttgttggtagagacggggtttctccatgttggtcatgctggtctcgaactccccaccttgggtgatccgcctgcctcggcctcccaaagtgctgggattacaggygtgagccactgcgcccctgctctaagtctgtagtttctatattatgtctctctgataaggctttgatgaagatgtataatgttgatgaaagaattattactgtatacatcagtttccttatatggactaaccctgagttagtttggttaaaattgactttgatagaaataatttgggaaagggcaaagaatatgaactggtttatcaatttctcttcaggtggcaggacctagaggaaatatgtgttgacacacacacacacacacacacacacacacacacacacacacagatacacagacacacacacacatacacacacagtacaggttttgcagaaatagactgtgaataacataaaaccacttaagaggcttcttggatatacttcaagcagcattagaactctgaattttgagtttgagtgaataaaagaaaaaaaaatatatgggaatgaaatcattgtgtttggcagaatgttggaggtttgctacaaaaatacaccaaactcacagtgttgc

SEQ ID NO: 91638 - DNA, 953 bp, Homo sapiens
aaaatataaaatactatattaatataaagtatgaatggatgaataattaacaaataatccaatcaattatacattttataaatttcattttggaaacttggcttcaatgtgccacggaggaaattctgttcttgtaccataagcctgtggtttcttcctttttttttttgagactgagtttcgctcttattgcccagactggagtacaatggctcaatctcggctcacggcaacctctgcatcctgggttcaggtggttctcctgcctcagcctcccgagtagctggggttacagatatgggccaccgtaccgggctaattttgtatttgttggtagagacggggtttctccatgttggtcatgctggtctcgaactccccaccttgggtgatccgcctgcctcggcctcccaaagtgctgggattacaggcgtgagccactgcgcccctgcyctaagtctgtagtttctatattatgtctctctgataaggctttgatgaagatgtataatgttgatgaaagaattattactgtatacatcagtttccttatatggactaaccctgagttagtttggttaaaattgactttgatagaaataatttgggaaagggcaaagaatatgaactggtttatcaatttctcttcaggtggcaggacctagaggaaatatgtgttgacacacacacacacacacacacacacacacacacacacacacagatacacagacacacacacacatacacacacagtacaggttttgcagaaatagactgtgaataacataaaaccacttaagaggcttcttggatatacttcaagcagcattagaactctgaattttgagtttgagtgaataaaagaaaaaaaaatatatgggaatgaaatcattgtgtttggcagaatgttggaggtttgctacaaaaatacaccaaactcacagtgttgc

SEQ ID NO: 91639 - DNA, 2159 bp, Homo sapiens
tgcatttgtggtagcattattgctctgttgatatcctctcttcttcccccggcccccaccacgacgcttctccaacccaatgatttggggcttggtcatgtgatttgctttggctaatggaatgttagaagacataccttacatagaggcctctaggatgtgagttagtttggcatttgaactcatgccaagggccaggagaacatgcccttggccactggtccaaggagaatgacagacatgtgacagttctggacacacctgaagctcaaagccaggcccagtcaacccaaagcctgataacaaggtaacaagatccctctccgcatgccagctgatctacaaaccaaggaataaaacaaataaatgcttggtgagtgtcacccactgagttatggggtggcttgctatgcagctttattgtggcaacacctaatccagaaactgctatctctgcctttcttactacacactcccatagtcagagctttttgaagaatcactgtttcattaatttgtttgtttgttcattcattcactcactaatttaataaatgctcattgaaagtttacagcacccggcactgtcccaggtgccgaggatgaagcatgaaraaggcaggcagggcctgttcttccagcgctttctctctagtgggtttgcaagtggcatcagcttctcttccaagtgctgctgacacctgtcctcatgaatgtcttcactttctcatctcaaatgattcactagatgagaaaaacaagcttttatctcacgtgggtatgaggaagggagcagttcctccagaaagtcgtgagagactcagcaagtcacaattaagaagcgttggaagctcattcattttgcaaaataaaaaatcagtactgaactctgttgacttctctaaacctcagagaatgagccatggttacattctagattcaaaacaatttcaagctcttttgtatgaacagatgactcatctaataccagaaaggaaaggctaggtttatttcccagaataaagcatgcaatctacattaagggccaggatttcatttgctgttgtttcaaatatacaattattaaacattacttataacttattaaagtagttctatctacggcatcagaacccacactatagctgttccaggccttaggcttccacgtaaagaatcatctgaactctccaagatgcagaccaggtgttcagagcatgcatgctgaataacgaaagaaagaatggttgacagtttctgaaccccctcagctggaagacagcaagccagatatcctcacaacagatgggtttgggccagcaacccaaaacatatttgtcagaatacttactccccaaggtgataaaacagaattcttgagaaactctgagctaagggaagtaaaatgggattctctgctacaggacttatcagaggctttactagactaacatgcactggagtcccccaaaggggaactctgtgatgtggtatccaaattcacccagcctgggaagctttttgctcatgaaacataaactgggcactgctgactcagagcatccatccacaccagcctgtgtgcttctcagacatcccagcatccccaggtcttcaagagtttagacaataccagaaccccctaaccagcatgtctattaaacccaactacaattaaaggcaacttgcaataaaacctaaaaaacaaagactttctctaaaaaaaaaaaaaccttctggattgtcaaatgtccttcagtaacctccaccatggaacatacattttctaagcatgcccctaaatacacacataagggctttggttatttgaaaataatgttaagatatatttgtgcttgcaattgtgaggtatatttttccctccctttttatatggcagatttggttaaggtatacctattcttgttttttagtgggtttgagttttctattttcaaaaacagcaggttagtaagagccaagagctgttaattttgcactggcttgccttatgcacgtatgacattccaaagttgatggctcttaaacacagcccttcaggtgacttctgtcacatcgaaagcagattcaattatgagctgtatggttccagtatattttgttgtattataattctttgaaaactggtaattcatgca

SEQ ID NO: 91640 - DNA, 1084 bp, Homo sapiens
ctcctgactcacgttttgcttgcccactggcccctccccctgccgttcctttgtccagcccgcctgcttgtcactccctcttactcagcagtttgcccccgagaaaatcccccaaagcgcctttcggatggagcttctaagacaagcaaggatgtcaacgcttccatttgattccctcttaccattccccaaccatccccctgcctggctgtatgtttagcactcagcgaaaaagaacaatttagtgatgttctgtagtgaaaaagaggaaataaaagcagacagaattaatcccaaatcaagaatttgaagccacaaggcaccgagaggtcaagatggggcattaagattctaaaatttgcatggacctggtcagaagctgaaacaataaaactggattttccagagcatcatcaattggcaattgattctacaaatataatacggcaggggtggtttatccgaacaagcacggagaataaaatataacagtgttccttcatctttcttttacagataaatttagatacataaaagctgaactgagatataaaagtttatgaaaatcattcaaaagcttttcatgcactcacgaaatatttataccatgccaaatatttgttccaagcactgcaactccttgtaatgttcttattcatctttgtgcttctccgggtctgggttggggactctagaagaaggcaggtcacatggtagtcacccgtaataacaatcctgaatgccatagttacattcactctctataactggcttttctcttgaaatagtaacatggaaaaatgagacctttcaccttattaacttaaatctcaaaatctaggaccatgataatggatcaaggggccccaaatattctttctgagcctccttatttccttcggtggatttcttactcttattcatacctgccaccctaacagccccagarcccattgtctactctataacactgtagacaaacatggatccaacacttccagaaagttctatcagaacaactgaaacaagttcaaatttcaatgatattttgctcatctctaaaggataacagcaagaaaataaa

SEQ ID NO: 91641 - DNA, 1345 bp, Homo sapiens
gcaccacagtgggcaagatactgagcccctagacatgctgcttcctttgcttggtatgttttcttctctcctcccgctgccatctgtaattcttactcagctcagcatacaccaacacaagaaagctttctttgactccccagactgagccaggataggtccctttgataaaggcttcagagccaattaaactatacattgtgtaatgaattgttgaatgtctgtcttccatcagaagggagagtccatcagagcaggacaatatctgacctatttatggctgtgtccccagcatttaatgcagaggcactcaatacatatttgaggaatacctgaatgaagcaatttaatatttacaaaaagtggccacattcattttctgtttaatctgctcgtatttggaagataggcatatttacttcattttataaataaaaaacccctgagacttagaaaagttagatgactctgtaacaggtggtcragctaggattaggatttgtatattttaaatttaagtcgaacattctttccactaccctggacagtgccaatctccaacatttaaaatgtatcagtcacttaaatgtattatgcacatttcttctaactgaagcatttgtgggtggtcagagattttacttatatttattagctaacacatcatgattttagcaaggtctccacctcctccatgcaagcttcaaccacttcattcttagctatatgcctagaaacacacagaattgcatgcagagtgtatatgtgcatgagtgaatacacatggtatattggctatatggtttataatatacaaacgtattctaaacatcctgtgtatatcctatagattaacatttgccctgcagacctcgttaagtatactcagcatagcagagggcttcttttttataagataaaaaatgatattctgagtatgtttagacatactggagaaggagggaatgtctggaaccctagtcccacccacgagggttcaagaagaggccagagcaataggagctttgccatgggcccctttatggagattgcaacaatgaaagactatcgaaagtgaagataatgaactcttagatttaaaaataagctagtactggagatgagttagttatttattccaaagaggacacgcaaaccaaagaagatattcctccatgccgtgcaaaaaaagacaatgcataggcaaatattctaaaacaaataaactttgaggataaacaaatattaaatcatttaaaaatctgttagggaaccttttatgagtcaagttccgtgctcaatgtcatgagtaaagtatgagtcattaaagtcatttccactcaag

SEQ ID NO: 91642 - DNA, 1345 bp, Homo sapiens
gcaccacagtgggcaagatactgagcccctagacatgctgcttcctttgcttggtatgttttcttctctcctcccgctgccatctgtaattcttactcagctcagcatacaccaacacaagaaagctttctttgactccccagactgagccaggataggtccctttgataaaggcttcagagccaattaaactatacattgtgtaatgaattgttgaatgtctgtcttccatcagaagggagagtccatcagagcaggacaatatctgacctatttatggctgtgtccccagcatttaatgcagaggcactcaatacatatttgaggaatacctgaatgaagcaatttaatatttacaaaaagtggccacattcattttctgtttaatctgctcgtatttggaagataggcatatttacttcattttataaataaaaaacccctgagacttagaaaagttagatgactctgtaacaggtggtcgagctaggattaggatttgtatattttaaatttaagtcgaacattctttccactaccctggacagtgccaatctccaacatttaaaatgtatcagtcacttaaatgtattatgcacatttcttctaactgaagcatttgtgggtggtcagagattttacttatatttattagctaacacatcatgattttagcaaggtctccacctcctccaygcaagcttcaaccacttcattcttagctatatgcctagaaacacacagaattgcatgcagagtgtatatgtgcatgagtgaatacacatggtatattggctatatggtttataatatacaaacgtattctaaacatcctgtgtatatcctatagattaacatttgccctgcagacctcgttaagtatactcagcatagcagagggcttcttttttataagataaaaaatgatattctgagtatgtttagacatactggagaaggagggaatgtctggaaccctagtcccacccacgagggttcaagaagaggccagagcaataggagctttgccatgggcccctttatggagattgcaacaatgaaagactatcgaaagtgaagataatgaactcttagatttaaaaataagctagtactggagatgagttagttatttattccaaagaggacacgcaaaccaaagaagatattcctccatgccgtgcaaaaaaagacaatgcataggcaaatattctaaaacaaataaactttgaggataaacaaatattaaatcatttaaaaatctgttagggaaccttttatgagtcaagttccgtgctcaatgtcatgagtaaagtatgagtcattaaagtcatttccactcaag

SEQ ID NO: 91643 - DNA, 578 bp, Homo sapiens
ccttccttcttccctccctccctccctcccttttctctttctttctctctctgttgttttatctgcttgttttgtttgtttgtttacgtactccaggtcttacccaccaaggtcagagtaacagtcatttatacccacacagtaaggtgaggaagggtttgggggacctgagttagccaggtagatattggtgacagttttgtgccatcagacagctgcccagcaggcacatccccttctttatctgttttagaagaatcttcctccctttccttccactctggctcccaccctcacccatgactcttcctcttcactctaattcttggacaactgygcacagtctgggcatgtctcctatgatgagttcctgaacgcattcttgctacttcaacagctataaagtgtgtgtttgggaagcaggaatgttggatacctggattcaaactcgcccagcctgaatccaggctcagcttcctcctagctgtgtggccttgacaaggcatgtaacctccctgcacctaggctcagtcagctgtgtggcaggcaatcattccctggcaaaattatcctgagga

SEQ ID NO: 91644 - DNA, 578 bp, Homo sapiens
ccttccttcttccctccctccctccctcccttttctctttctttctctctctgttgttttatctgcttgttttgtttgtttgtttacgtactccaggtcttacccaccaaggtcagagtaacagtcatttatacccacacagtaaggtgaggaagggtttgggggacctgagttagccaggtagatattggtgacagttttgtgccatcagacagctgcccagcaggcacatccccttctttatctgttttagaagaatcttcctccctttccttccactctggctcccaccctcacccatgactcttcctcttcactctaattcttggacaactgtgcacagtctgggcatgtctcctatgatgagttcctgaacgcattcttgctacttcaacagctataaagtgtgtgtttgggaagcaggaatgttggatacctggattcaaactcgsccagcctgaatccaggctcagcttcctcctagctgtgtggccttgacaaggcatgtaacctccctgcacctaggctcagtcagctgtgtggcaggcaatcattccctggcaaaattatcctgagga

SEQ ID NO: 91645 - DNA, 578 bp, Homo sapiens
ccttccttcttccctccctccctccctcccttttctctttctttctctctctgttgttttatctgcttgttttgtttgtttgtttacgtactccaggtcttacccaccaaggtcagagtaacagtcatttatacccacacagtaaggtgaggaagggtttgggggacctgagttagccaggtagatattggtgacagttttgtgccatcagacagctgcccagcaggcacatccccttctttatctgttttagaagaatcttcctccctttccttccactctggctcccaccctcacccatgactcttcctcttcactctaattcttggacaactgtgcacagtctgggcatgtctcctatgatgagttcctgaacgcattcttgctacttcaacagctataaagtgtgtgtttgggaagcaggaatgttggatacctggattcaaactcgcccagcckgaatccaggctcagcttcctcctagctgtgtggccttgacaaggcatgtaacctccctgcacctaggctcagtcagctgtgtggcaggcaatcattccctggcaaaattatcctgagga

SEQ ID NO: 91646 - DNA, 578 bp, Homo sapiens
ccttccttcttccctccctccctccctcccttttctctttctttctctctctgttgttttatctgcttgttttgtttgtttgtttacgtactccaggtcttacccaccaaggtcagagtaacagtcatttatacccacacagtaaggtgaggaagggtttgggggacctgagttagccaggtagatattggtgacagttttgtgccatcagacagctgcccagcaggcacatccccttctttatctgttttagaagaatcttcctccctttccttccactctggctcccaccctcacccatgactcttcctcttcactctaattcttggacaactgtgcacagtctgggcatgtctcctatgatgagttcctgaacgcattcttgctacttcaacagctataaagtgtgtgtttgggaagcaggaatgttggatacctggattcaaactcgcccagcctgaatccaggctcagcttcctcctagctgtgtggccttgacaaggcatgtaacctccctgcacctaggctcagtcagctgtrtggcaggcaatcattccctggcaaaattatcctgagga

SEQ ID NO: 91647 - DNA, 643 bp, Homo sapiens
aaggagggacctggaagagagaggtgggtaggagaggagagcaacctcttttgctctttgtaccaaggcttcctggctacagcctggcccgtgggagggtgggggagggaggggaatttgtcattcgaatggatgtgaaataaatagatacttgaaatgggccttggctgtttcagttactgaaagtgagtggaatgttataaaatctgccccaaatgtcattcagtgatgggaaagggcatagttgaagggagtgaataagaacaaaaaaaaagtcacatttgaattcctactgaattcaaacacctcaatgaactggctgcctgtgtcctacagggtctgttcctgagggcagagctgtatccaggccagttagaggcaaagccaggagggctggggatattgcagcagcacatacatgaccgaggccagggctcaggtccttgggctgcagcgccagaraagatgaagatgctgggaaggggaagtgtgggggttcagtgtggagcaaatgcgtgaggcacatcctggtgggaaacagtgggagaatagaacagccaggtgaactgatctctgggctcagaccaaggctgtgcacctgaatttctgctgaagatccagaaatcagcccccaaaggaatct

SEQ ID NO: 91648 - DNA, 727 bp, Homo sapiens
ggatccaagaaagccctgcttgtcagatgggaataccatctgtacagatgatgccccgcacatgcaagagcctggcatttttgggccagggctaaccagggtaaagtctgaatcaccccatgtggaatccgtctcctacggggtgtggactgtggggcatgaattccaattgcgctttccttacataactttgctcttcagatccctggttccgaatgtggggtgtaygcagtatggcccactggaagtacatgaaaatgctagaaggtgaatctacatgtattttttgatctaatgaaaacaagcaggaaaataagttgtactgacaggtaatgtgcagactgatactgctgtcttgactcagactgtgttgggcaattgtctttccctgtgaattccgtgaagaaatgaacccatccagacccatcccatggcaataggattgatggtgccaacctcccatgtttgttttatgccccctgtgttgtgacgtggggcagttaacctatttctggcttaaacagtgtcaaaaataaacaaagccaggcactagttaaagtggtaagaagagacttcaatcagcactttgatttgtgcagcagtgactaggcattttaaaggaagaataagggaatgaggagaggtgtgagtggggactcaggagagtcagggaagtgaaaaatcatcaaaggcgggagggaggaagcttggtccatgtggaaactat

SEQ ID NO: 91649 - DNA, 727 bp, Homo sapiens
ggatccaagaaagccctgcttgtcagatgggaataccatctgtacagatgatgccccgcacatgcaagagcctggcatttttgggccagggctaaccagggtaaagtctgaatcaccccatgtggaatccgtctcctacggggtgtggactgtggggcatgaattccaattgcgctttccttacataactttgctcttcagatccctggttccgaatgtggggtgtatgcagtatggcccactggaagtacatgaaaatgctagaaggtgaatctacatgtattttttgatctaatgaaaacaagcaggaaaataagttgtactgacaggtaatgtgcagactgatactgctgtcttgactcagactgtrttgggcaattgtctttccctgtgaattccgtgaagaaatgaacccatccagacccatcccatggcaataggattgatggtgccaacctcccatgtttgttttatgccccctgtgttgtgacgtggggcagttaacctatttctggcttaaacagtgtcaaaaataaacaaagccaggcactagttaaagtggtaagaagagacttcaatcagcactttgatttgtgcagcagtgactaggcattttaaaggaagaataagggaatgaggagaggtgtgagtggggactcaggagagtcagggaagtgaaaaatcatcaaaggcgggagggaggaagcttggtccatgtggaaactat

SEQ ID NO: 91650 - DNA, 982 bp, Homo sapiens
ccacacacacacctgtacttagtttactatcctagtggacttcacacactccgcaagccttttttgaccatgtttggttacatctgtctctttccataggaatgctccaaggaaccctgccacataaatacttatcctggcactaatcagtattttttttagttgtgtcacctaacatagcgctgagctcactgcacatccacaaacccaaataatgttaatgtagctgtactgggaacatttcagatgtytttcctcccaaactggagcacccacttaggccatccttcaaggccagaggccactggtgacctgcccagtccattccctcagcgcctggtctccccagaccagcctgtgaccaacccatgaggtcacaggacaggaacaatacaagggctttgtgtagatgcttgtgttttcagaagtggctcgagtccagccggcattccttcttgactgggactttttaagaaatgttttcccgacaaatgtcagcaggattgagatccaccacacggtttattaaaggaacaaaagctttgccctgacagccccagcagcaatctcggtttcccctggggacagtcggcctgcgtgttccagtcggaagccagaaggagatggcctgacatggctgtaaatgacttctcctaaccacaggcaagaaggacaagaggaatttcgggacctgcggtagagtcaaagcgcttcctgttcctcccttagcccaggccccacttgccagccccaaacagcactgccaccaaggcgtggctcttctcacagatgccacatcatctataaaaagccttgtctgccttgcaggtgctaatgttctagggagagacagacactttacaacccgtttcatgagcttcctcttgcaagacgcaggaaccacggcacagatggcttcgttgccattgacaaatcatcctcagggacctttcacagcattgctaggtattaacataagaca

SEQ ID NO: 91651 - DNA, 982 bp, Homo sapiens
ccacacacacacctgtacttagtttactatcctagtggacttcacacactccgcaagccttttttgaccatgtttggttacatctgtctctttccataggaatgctccaaggaaccctgccacataaatacttatcctggcactaatcagtattttttttagttgtgtcacctaacatagcgctgagctcactgcacatccacaaacccaaataatgttaatgtagctgtactgggaacatttcagatgtttttcctcccaaactggagcacccacttaggccatccttcaaggccagaggccactggtgacctgcccagtccattccctcagcgcctggtctccccagaccagcctgtgaccaacccatgaggtcacaggacaggaacaatacaagggctttgtgtagatgcttgtgttttcagaagtggctcgagtccagccggcattccttcttgactgggactttttaagaaatgttttcccgacaaatgtcagcaggattgagatccaccacacggtttattaaaggaacaaaagctttgccctgacagccccagcagcaatctcggtttcccctggggacagtcggcctgcgtgttccagtcggaagccagaaggagatggcctgacatggctgtaaatgacttctcctaaccacaggcaagaaggacaagaggaatttcgggacctgcggtagagtcaaagcgcttcctgttcctcccttagcccaggccccacttgccagccycaaacagcactgccaccaaggcgtggctcttctcacagatgccacatcatctataaaaagccttgtctgccttgcaggtgctaatgttctagggagagacagacactttacaacccgtttcatgagcttcctcttgcaagacgcaggaaccacggcacagatggcttcgttgccattgacaaatcatcctcagggacctttcacagcattgctaggtattaacataagaca

SEQ ID NO: 91652 - DNA, 982 bp, Homo sapiens
ccacacacacacctgtacttagtttactatcctagtggacttcacacactccgcaagccttttttgaccatgtttggttacatctgtctctttccataggaatgctccaaggaaccctgccacataaatacttatcctggcactaatcagtattttttttagttgtgtcacctaacatagcgctgagctcactgcacatccacaaacccaaataatgttaatgtagctgtactgggaacatttcagatgtttttcctcccaaactggagcacccacttaggccatccttcaaggccagaggccactggtgacctgcccagtccattccctcagcgcctggtctccccagaccagcctgtgaccaacccatgaggtcacaggacaggaacaatacaagggctttgtgtagatgcttgtgttttcagaagtggctcgagtccagccggcattccttcttgactgggactttttaagaaatgttttcccgacaaatgtcagcaggattgagatccaccacacggtttattaaaggaacaaaagctttgccctgacagccccagcagcaatctcggtttcccctggggacagtcggcctgcgtgttccagtcggaagccagaaggagatggcctgacatggctgtaaatgacttctcctaaccacaggcaagaaggacaagaggaatttcgggacctgcggtagagtcaaagcgcttcctgttcctcccttagcccaggccccacttgccagccccraacagcactgccaccaaggcgtggctcttctcacagatgccacatcatctataaaaagccttgtctgccttgcaggtgctaatgttctagggagagacagacactttacaacccgtttcatgagcttcctcttgcaagacgcaggaaccacggcacagatggcttcgttgccattgacaaatcatcctcagggacctttcacagcattgctaggtattaacataagaca

SEQ ID NO: 91653 - DNA, 2185 bp, Homo sapiens
  misc_feature (1)...(2185): n = A,T,C or G
atgcatgctcagagaggccaagaagaacctagacagacaggccttgctgggttttccccactctgtctactagccttagatctctgggtcttcattctgaaggctcttgaagacgttaataaatttgcatgcctttttaccaatgagtctacctcttgtgggtgattttcagtgaaccttcagagggcaaagaaggtttcccttggcttctacaatacaacacgcaaaaaaaaaaaaaaaaaaatgctgtgacattttgattcttctcaataggttcaagacatcttaccatttaagtcaacaatccttcaaaaatcactttattgtgactttatgaagtttgctttaatctaatacaatagccaatgtaagtgactttttagcttatattcttaagaatgtgactcacttcaaaaattacaagaaagggctggcgtggtggctcacgcctgtaatcccagcactttaggaggttgaggtgggtggatcaccgggggttcggagttcaagaccagcctgaccaacatggtgaaatcccttctctactaaaataccaaaattatctgggtgtgggggcgggcgcctgtagtccccactactgggggagcnnnnnnnnnnnnnnnnnnnnnnnnnnnnnnnnnnnnnnnnnnnnnnnnnnnnnnnnnnnnnnnnnnnnnnnnnnnnnnnnnnnnnnnnnnnnnnnnnnnntgggcgcgaggcgccagtaatcccaactactggggaatgtgaggcaggagattcacttgaacacgggaggtgaggttgcagtgagcagagatcgcgccactgcactccagcttgggtgacacagcgagattccgtctcagaaaaaaaaaaaaaaagttacaagaaaggtcagcaaaatcaattgttgcctctacgtaaaggtctgtgggacattgcccaaaaaatcctccttaataatggtgctgatattttcatggctacccaattcatatagaaaaggtcaataagmagctctttcataatttatactgaactaatcctcacttattccctttcacaaatgactatgtcctatggactgaaaatatgcatcaaaggcttggtgtctgctatttacttagttaatttaacaaatatttattaaatgcttactatatgcaaaaaacaattccagccatttgggatgtagtagtatataaaacaggcaaaaatcctgccctcatggagctgtttgtgacacattatctaatcactgtgctaggcatgttcacaatcctgtgagaggatttgctggtgttttttatcggtgagaaactaaaactcaggcagaataggtgactagatgaacataaaatggctcaccaacaaacacatgcaaattcacatcagttcttctggttgcaagttttgttctactggagtgcattttcaaaactgctgttttgaaatacttttccaagaggcagatgttttctaaaaattacatttcatatttcaatctgtttgggaaagactttttgcctcaggttgggttctagaactagatgctaagatgtatttttgcatgaagagattcttagggcatgctcttaagatcaacacctggggaagggaagggaagggaagagaagggaagggaagggaagggaagggaagggaagggaagggaagaaagtaggattagaaaggcagaaaactgagtggcaatgcagtcttagggcaagcctcaactgacactgcagggagttctgatgatcagaagacccttcaaggatgtcctgagttgggtcgagatgaccatgcctttaggtctccaagccaatcggttactggatgtgatccatcccaggaagtgggcatgaccttgggcaaggtagctcttttcagctgagcaaatccccaaaggagaggtaaggagaggtttccgtgggtaccaccagcagctggggcaacagatccttcattcctaaaggggtgtctgggatgtacatcctagcatccaccagactgtggtatttgtaaacatcagattaaatgaaatgaaacaggcttctttactcctatccatttagagcttttaatgagcaggtttgtactgtgaagcttcaaaaggaaaatttgctatgcagatttttcccaaatttatttaagctcagaatatttttgagggtctgtatttattaacattatctgaaaa

SEQ ID NO: 91654 - DNA, 711 bp, Homo sapiens
taacatacacacacgtaactatacacactgacatacacatacacactaacacattcacacacactgacacacagacactggcactcacatacacaagcacacacacacactgacacacacagagtaatgtatttgtccaatcctctacacaaatatatgtccttgttttgacatgaatcattttgatttttattgtattaacagcctgaaaggaagactgcagtttcctggcaaatacagatgattaaatacccaatatgagtgtgtgtatgtttcagaggggagasagagatccagccgaggcctggggcctgacgggaaaagggtctgttgctttagatctgaattctgggttcatttcgcctctgctttcgaggtccctgagtgcaccctgccctggcccacagaccttcgcctctgaggctgggaatctagaccttgacggggtgctattttaattatgtgtttgtttttacttccctacgtccttccaataacaattgggagctctctgctttgtgttctggtgaatgttaaaaagcaaaacaaaacaaaaaccccatttctgaaacatctgaagaggcaagatggaaaaggcagtttctgaacatatgcttagcaagtagcattttccctcacagtcctgcttcagaaagaagaaagaaaatgtggaagtgctctagcaaagcataatgtgtgcccaggaataga

SEQ ID NO: 91655 - DNA, 740 bp, Homo sapiens
cctgaccttgggtgatctgcccacctcagcctcccaaggtgctgggattacaggtgtgagccaccacacttggccttcttatggaaattttatgtcctacttttagatagaaaggaagagagtggagagcccttgttgcacctactgtttctcaattcccttcagctgaaaataatcaatatgccagagtggctagtttcagggtggcatgttctgatccccttcaaagcaagcaaacacacaaacaaaacaacagcaattaaaacaacaaaccaaaaaaaaaaaaaaaaaaaaaaaaggcaagagagtgctctgtattaaaagaaacaaaatgagaaactttgactaaaccactataaaggacattatttagactactggggactctgaatatggattctgtattaaataatattgatattaaatttcttgggtgtgatcacacgattttgattatgtaggagaatkttctttttcttaggagatacctagaatacctgtcacacctagcagtgaagtattgtgttgtttctgatttttaaatgggaaagagaaaaagagaggacatgtgcaaaatgttaacaattgataaaaggatatcctggtattcattatacaatctttcaacttttctgtaagattaaaatttttccaaatgaaaagttgaaaggtaggaattatattctttcctaagacattttttatttataaagctgacaccatggccaggtaagtctgta

SEQ ID NO: 91656 - DNA, 711 bp, Homo sapiens
tgtgatgattctttgtttttggctcactaaccatggggtctccataggcagatgatgagcaaaatgctgttggtggtggggttggtggctcagagatggaygttcagagccccgtgccaagtctctgtgatggcaacagagctcacaggtggggtggacagtgaaaacaaagctgagaaaaaaggcaggtgagccaacaggtggaggggatacctcagagctccagaatgcaaatgaattgtccaggtatcttatgaaaatgcagacccattagggctgaggtggggtctgagagttagaattcgtaacaagctcccaggtgccattgatgctgttggtcaccagaccacacttggagtaagaagggtctagaggccacaggtgagaggtcttggcgttaaacacagggtgtctgtagcaagagacttggaaacagtcattgccatcctcagcccagagacctcacggactccacacatcacagagcatgggggttcccagacctaggggagaaaaggtcttgtgaacagtaagttaatccacccagaggcagaagcttgagtgagaaaagagggtagatcccatcaactcacaattaactcagagtgattttagacaaatctttatttactcaagttccttattgaaaaattggagaaatctgcttgaaatgggataatgcttgcgagcgcttttaaaagtccaagcaag

SEQ ID NO: 91657 - DNA, 711 bp, Homo sapiens
tgtgatgattctttgtttttggctcactaaccatggggtctccataggcagatgatgagcaaaatgctgttggtggtggggttggtggctcagagatggatgttcagagccccgtgccaagtctctgtgatggcaacagagctcacaggtggggtggacagtgaaaacaaagctgagaaaaaaggcaggtgagccaacaggtggaggggatacctcagagctccagaatgcaaatgaattgtcyaggtatcttatgaaaatgcagacccattagggctgaggtggggtctgagagttagaattcgtaacaagctcccaggtgccattgatgctgttggtcaccagaccacacttggagtaagaagggtctagaggccacaggtgagaggtcttggcgttaaacacagggtgtctgtagcaagagacttggaaacagtcattgccatcctcagcccagagacctcacggactccacacatcacagagcatgggggttcccagacctaggggagaaaaggtcttgtgaacagtaagttaatccacccagaggcagaagcttgagtgagaaaagagggtagatcccatcaactcacaattaactcagagtgattttagacaaatctttatttactcaagttccttattgaaaaattggagaaatctgcttgaaatgggataatgcttgcgagcgcttttaaaagtccaagcaag

SEQ ID NO: 91658 - DNA, 688 bp, Homo sapiens
gtgagtacaacacttgtagagcaaagggcaaatgtggagatcgatggtgtgactcattgactcttgccaggccagtgagatgttgaaaagaaataaaaacaaaaaaagcctttggtttgtattctgtaattgacatgttcaacatacatccaatgctataaytgaagtacagcaagaagaaagctagcaaaaatagttaatcaatggtaacataatccatgcaatgttgatttagaaaaataatttaaccttaactaagacttttctgaagggagcaaaaaaattctgaatattaaaaaacaccccttctaatatttttttctcctttttttaaaagaggagtttgtgtttttggatttatctttctgacttactgatttttaagtactcctctggtggtgtgttgaaaaacagatcctaaaagtttgcatccagaagctgacacacacagaagatacttgttgagaatttaagcccattttcaccttgatgaatttcttcatgcttggatgaatcttggcagacagcaattttcttgaataaagaaagatgtagttggtatagagatgcagtcatatgaggagtagaagatgaagcttgagatggtttttggttttttttcccaatagggtaacagatctgcactgacttactcacttttatccatctagtttcctttgtgcccagt

SEQ ID NO: 91659 - DNA, 559 bp, Homo sapiens
aatagtcttcatcttcagtgaaatgaaacaccaccaccaccatatatgtatgcatatgtacatatatatgtatatcatattttaagatattaaattaaaagcataagtaaacatcccagcactttgggaggctgaggtgggttgatcacgaggtcaggagatcgagaccatcctggctaacacagtgaaaccccgtctctactaaaaaatacaaaaaattagctgggcgtggtggcgggtgcctgtagtcccagctacttgggaagctgaggcaggagaatggcgtgaacctgggagrcggtgcttgcagtgagctgagatcgcgccactgcactccagactgggagaaacagcgagactctgtctcaaaaaaaaaaagtaagtaaacatccagaaagaaactagcagtataggaaaatagtggaataaactttttgaaagtcctatctatcaacagaaggcttaatgtaaataactgatattaaaataggcaaagtgcctaaaaaagacatttctccaaagaagacaaaaaaaatggccaacaggcatatgacatggt

SEQ ID NO: 91660 - DNA, 559 bp, Homo sapiens
aatagtcttcatcttcagtgaaatgaaacaccaccaccaccatatatgtatgcatatgtacatatatatgtatatcatattttaagatattaaattaaaagcataagtaaacatcccagcactttgggaggctgaggtgggttgatcacgaggtcaggagatcgagaccatcctggctaacacagtgaaaccccgtctctactaaaaaatacaaaaaattagctgggcgtggtggcgggtgcctgtagtcccagctacttgggaagctgaggcaggagaatggcgtgaacctgggaggcggtgcttgcagtgagctgagatcgcgccactgcactccagactgggagaaasagcgagactctgtctcaaaaaaaaaaagtaagtaaacatccagaaagaaactagcagtataggaaaatagtggaataaactttttgaaagtcctatctatcaacagaaggcttaatgtaaataactgatattaaaataggcaaagtgcctaaaaaagacatttctccaaagaagacaaaaaaaatggccaacaggcatatgacatggt

SEQ ID NO: 91661 - DNA, 544 bp, Homo sapiens
gggaaatacccacaccccggcttggcagattttgcygacaatctcatcaaagagagtgacatcctgagcgatgaagatgatgaccaccgtcagactgtgaagcagggcagccctactaaagacatcgaaattcagttccagagactgaggatttccgaggacccagacgttcaccccgaggctgagcagcagcctggcccggagtcgggtgagggtcagaaaggaggagagcagcccaaactggtccgggggcacttctgccccattaaacgaaaagccaacagcaccaagagggacagaggaactttgctcaaggcgcagatccgtcaccagtcccttgacagtcagtctgaaaatgccaccatcgacctaaattctgttctagagcgagaattcagtgtccagagtttaacatctgttgtcagtgaggagtgtttttatgaaacagagagccacggaaaatcatagtatgattcaatccagatatgggttaaattcctcattttacttttaaactggtggtaaagtggaaattgcaaaaaaa

SEQ ID NO: 91662 - DNA, 544 bp, Homo sapiens
gggaaatacccacaccccggcttggcagattttgccgacaatctcatcaaagagagtgacatcctgagcgatgaagawgatgaccaccgtcagactgtgaagcagggcagccctactaaagacatcgaaattcagttccagagactgaggatttccgaggacccagacgttcaccccgaggctgagcagcagcctggcccggagtcgggtgagggtcagaaaggaggagagcagcccaaactggtccgggggcacttctgccccattaaacgaaaagccaacagcaccaagagggacagaggaactttgctcaaggcgcagatccgtcaccagtcccttgacagtcagtctgaaaatgccaccatcgacctaaattctgttctagagcgagaattcagtgtccagagtttaacatctgttgtcagtgaggagtgtttttatgaaacagagagccacggaaaatcatagtatgattcaatccagatatgggttaaattcctcattttacttttaaactggtggtaaagtggaaattgcaaaaaaa

SEQ ID NO: 91663 - DNA, 710 bp, Homo sapiens
agaagcaaaatagaaggtctctctggaacttgatatatccattctgggccttagggagcacctaaaatacattttcaagggtgatgaccagcaggaggtcaaagataataaacaagaaaataagataacatgagaaagaaacagcagaaacaaccaackctagaaacagattcacacaggcttaggatattagaattgtcagacagattataaaaagtacacttaaaatatttaaagaaataaatgaaaagcctgaaaaatatctataagagatagcaaatgctaaaagttgaccaacaagttttagaaaaatatcaattaaagtttctagtaaataaaacctagaataactgaagttattctaataagttattctagtaaattttagaatttactagaataactactaaatattatatttactagtaatataatagtactattataatagtaatatttatagtgttatattagtatattcaacatcatattaaatataatatatattatatttactagtaatatagtattatatttactagaataactaataattttctagtaaatattagtttactagaataactgaagttattcagttattagagtttctagtaaataaaaactggaataactgaagtttaaagctcaatgaatgctgggtgtggttcatgcctgtaatcccagtgctttgggaggccaaggtgaga

SEQ ID NO: 91664 - DNA, 546 bp, Homo sapiens
aacttctgacctcgtgatctgcccgcctcggcctcccaaggtgctgggattacagacgtgagccaccgtgcccggccaaggctgccaggtcttttttaagctcagagctagaaacaagacattgctactcctaccaacttcttctattggtgaaattgagtcatggtttctcatggtctcaatcatgacccagcccagattccagggtcaaggaccataaaaggctacattgatggaagacatgtctcattgagggacaccagagtaacaactaccagacaagaaggggcaggtctgtgtgagcgccatttcctaattctatattgcccactcttcagagaagatggttggagggcaaattgtggggagcaaggtaactccaaacttttacaraattaaaggtagggggtctggtcagctacagtccatctgttatcaagaggcctggctgtgtgtcttcattcagtttattaggcatttactgagcacagcctacatgccaggttcttcattttttgacacagggtcttgtgttgcccaggctgg

SEQ ID NO: 91665 - DNA, 504 bp, Homo sapiens
cctaatactatgagtaaaatgaagtgatggtaaaaaccagaattatttttgcaccaacctaatagtttggtggctctgaagaaaccctaactgacaaaaaaacgggaasgcatctcagggttttttgcagacaatatgaagtgaagagcctggcagccgtgtacgaatggatgaagggagggggcccgttgtacctgcagggagccccataggatgtcgctattatccagaaaaaatcaggtagtgtcttgtctgagatgacaccagtgtagatggcaagaaaccagaagcagtaagaggcagagcagatggaactttctaactggacttgctggtactataaaagtatcctccaaataaatggacttctaagaaaaaagtgctgtctggcccaaatagatcagcacttctattttttgaagtgttacatcacagagcgcggctgcactctagaaacactgcacttaacactgacatttgatttgtcacaaaaatattttttaa

SEQ ID NO: 91666 - DNA, 504 bp, Homo sapiens
cctaatactatgagtaaaatgaagtgatggtaaaaaccagaattatttttgcaccaacctaatagtttggtggctctgaagaaaccctaactgacaaaaaaacgggaaggcatctcagggttttttgcagacaatatgaagtgaagagcctggcagccgtgtacgaatggatgaagggagggggcccrttgtacctgcagggagccccataggatgtcgctattatccagaaaaaatcaggtagtgtcttgtctgagatgacaccagtgtagatggcaagaaaccagaagcagtaagaggcagagcagatggaactttctaactggacttgctggtactataaaagtatcctccaaataaatggacttctaagaaaaaagtgctgtctggcccaaatagatcagcacttctattttttgaagtgttacatcacagagcgcggctgcactctagaaacactgcacttaacactgacatttgatttgtcacaaaaatattttttaa

SEQ ID NO: 91667 - DNA, 504 bp, Homo sapiens
cctaatactatgagtaaaatgaagtgatggtaaaaaccagaattatttttgcaccaacctaatagtttggtggctctgaagaaaccctaactgacaaaaaaacgggaaggcatctcagggttttttgcagacaatatgaagtgaagagcctggcagccgtgtacgaatggatgaagggagggggcccgttgtacctgcagggagccccataggatgtcgctattatccagaaaaaatcaggtagtgtcttgtctgagatgacaccagtgtagatggcaagaaaccagaagcagtaagaggcagagcagatggaactttctaactggacttgctggtactataaaagtatcctccaaataaatggmcttctaagaaaaaagtgctgtctggcccaaatagatcagcacttctattttttgaagtgttacatcacagagcgcggctgcactctagaaacactgcacttaacactgacatttgatttgtcacaaaaatattttttaa

SEQ ID NO: 91668 - DNA, 1139 bp, Homo sapiens
ggccagcaagtggggaatggtgagggctagagaggctggaaatggcatttctccgaagaaccgagagccctcctgggaggcttagactttaattctctctggacacacttgagcagatgacgttccaaaggtgccacaccagtacgtccctcccatctgctttctggtgataggacctgacactgtcccaccaagaggtggggtctgcttggtttcccatctcttgaatctgagcgggtctgcaattctggcaaaagtgatactaggtgactttcgaggctaagtcataaaaaaggatgacttccacttgctgctccagggaactctcatgctcagagcccggccaccaggctgtgaggaagcccaggtggccaccaggcaggccacgtggaggcgttcccaccccagcccaccgagatccagccagcagccagcgccactccagatatgtgaaggaagagccttccatgatgccaggccccaccctcggatcccccagctagcatcccagacctggtggccacaggcccccaccacgtggtcccgatccctggcctcagaaggtctgagaatgatggaagggatggtggctccaggactaagctttgcagtgacccgtgcagctaagttaagtggaaccctccaacccccaaacgccgagattctccacgccagaggcccggtgggtgggtgaggggcctgccaagcctggragatttatttgcaggattttccccacggactcataactgaaatcgcagaaggccttgcggtttagaggccctgtctcatgccccaaattgcattttcccggaaagggctcagggcgactgaggtccccaccgccgctgcggagcaggctagggactggggcaggtcccggcacaggggaggggggcgggggcgctgccaaggtctcacagctgaagagggaagccagccggggcctacggaaagctggaaaatgcgctcaggccgggccgtgctcatggctgggatcacagcgccaccctgtggccgacgctctccttcggctcgcaacagtctggagaaattgaattgcattcttcatggagaaacacagaccgaaaaagatcttccagcccagcagcaagaaaaccaccactgacttttagaag

SEQ ID NO: 91669 - DNA, 633 bp, Homo sapiens
agtgttcttatggaatgagaccaccacttctcctgttgtccttcccagcttccccacctccccttttccctagtttataagacagtagaaaagggagaaagcaaaaagttggaaagaaacagaagtaagataaatagctagacgaccttggcgccgccacctggccctggtggttaaaacaataataataatattaacccctgaccaaaactactggtgttatctgtaaattccagacattgtatgagaaagcactgcaaaactttttgttctgttagctgatgtatgtagcccctagtcacgttcctcacacttacttgatctatcatgaccctttcacgtggaccccttagagttgtaagcccttaaaagggctaggaatttctttttcggggagctcagctcttaagacttgagtctgccgatgctaccagcckaataaaaacctcttccttctcttccttctttaatccgggtctgaggagttttgtctgcggctcatcctgctacatttcttggttccctgaccgggaagcgaggtgattactggatggtcgagtcagccccttaggcagcttaggcctgccctgtggagcatccctgcgggggactccggccagctcgagcgacgtg

SEQ ID NO: 91670 - DNA, 534 bp, Homo sapiens
atgttctttagggcagtcattacccacgctctccccagggtgggaagttacccagtgcctccaaggaaaaacaagttccctccaacttaaagtggctaaaagtggctatgatttcaatgctttcgttccctctgcccagggaggtggctgaggagaaatggattgagactgaaggtcgtcggaacgtgcgtggccccgtgctgagcgccgtgtggtcaccagcctgttccacccacatgtacggcccagggacttgggagggacacagagacacggagcagcagggaggccacgttgccagcaccccagccatgcctcctgaaaagcaggagcatggacacgttacccctccaccctcgggcctcgtcccctcagtcccctcctccagcaggtggacgtgacactgtgggcagatgcacgggcattgcaaggggccactggagaatccacaggaactgagctgcatccacgacagagrgctggaagtagaggcagaatgtgggtggcctggagcttctcctacgggtggcctga

SEQ ID NO: 91671 - DNA, 433 bp, Homo sapiens
tgcgtcgagctgtgcgtttctccatggagatcttaaaggcaccacctggcttcctaggcagcctggtacctgtagtggtggagacactggtaagaacagagcttctttttcactctgggcctccctgggcactttggggagcctaccactgagcctagacagtgcccccagcctgggtgcccagaggtccccaccctaaatatcgagcccagcatcctatcagcaagctaagaaagctgtccttgcttacaagaagcaggagaacttgaggaggctccttttccaaactgctcagccyttgacctcaggacccccttctgccaccctacagggaaaccagttccccatttgagtccctctcccagcccctcaatgtgtctgagcctccagggcaggtgtcctcagggaggcccagggtggggaggtgggggtg

SEQ ID NO: 91672 - DNA, 552 bp, Homo sapiens
atcatatgaccttcaacaaaacaacagctggggctttttaaaccaggaagatcctgycatgctaacttgcatttcttttcctaacctaccatagaatcttgccctagttctgccttgcactcttttttttaggggagaatttccaaggccaatgagctccctacctagccatttttgcatttttcttagagtttgtgtggagaagcccgtctctctcaggaggcagtcttccccattgtcttctaaaagctggcccttctggagggtttcagtctgtccctggtcctggttcaaatctgagtgaagatgcaggaggatgtagccaccctcctctcagagttcatgatgagcacggtaaggagatgatctcacttcttccccaagaacctttagctctttaacaacttgcaagaatgaaatttcttctattggtttctctcctccactcttccccaagagaacaagccaaatactgtacaggtcctcttgcatcagagttgagtgtttgtacttctttattatataaatcagtcatagaaggaattgctcttc

SEQ ID NO: 91673 - DNA, 2174 bp, Homo sapiens
tccaaaaccctcagatatggagggccaactttttttttttttttttgagatggagtctcactctcttgtccaggatggagtgcagtggcatgatctcagttcactgcaacctctgcccccygggttcaagcagttctccttcagcaccccaaataactgggattacaggtgcctgccaccacgcctggctaatttttttttttttgtatttttagtagagacgggtttcatcatgacggccaggctggtcttgaactcctgatctcaagtgatccacccacctcggcctcccaaagtgctgggattatgggattatgggcgtgagccacagccccagccatcaactataatcttaaattttaaaagcccaatacaagagatatctatatctatatctatctatctatctatctatctatctatctatctatctatctataatatgttaacatatttgtgcacagaaaaagggtagagaggaaggagcccctaaatatcagcaggggtgtaaatcactaggggtatatgacatacatgtgcatagaaaaaggacaaggaataacccctaaatatcagtaggggagattgtattttctaggagggccacaagatcccctgtcccctgtgctcttcatacagtatgaccatgatggagaggtgtgatctaagttccctctccatgcatttgtgactatggaggcaatacaacttctgcctggtcctcctgggatgctcacgttggaaactcagacactggtgtgagaaagcacatggaaacgccacacatgggtgaactggcgctaaccctgctgacctcaactgacaaccagcatcaatcaccagacacatgagtgaggaagctcctctgtgacctctgactgagaccctgtgagagaccccaagcatgaacagcctagcttagcctagccaacgaccaggatcagaaattaaaaatgaatgttgttgtttaaaacaacagagtttgagggtgatttgttatatagcaatagctatccaggaaaaaagtatttaacttctgtatggtgagatcatggatattaataatacttttccatattttccaatatttctataatgaccatttatttctcttataatcagtaacaaaagaagggaaaacttggtctaaacacgaatttagggacttaaactagacttggagaaaagctttctatgcaagatttattagatactggaaaggatgaggaagacaaatttaagtcaatatgatggaaagagtggtggatttggaatgaggaaacttagaaatgaatctgttttctgggtgaccttgcgcaagcctttgctaaaatttggttttctattttgaaaaacgcagctggctgtttaaggaagataatatccaccagggcgcctggcccagaaaaggcgctctgtaagtggtaggtggatcctgtctaatcaacgccaattataaccaggcatctgcaagctttgtggagggcgcatctttcactgctaccagagcctacagttctaataatgaaaattgcctggaaaagaaccacaactcttaaaaaaaaaaaaaaagtccaaaatcacaaagtggcttttgcagcggtccttgcctgtgacgccgggccatggctggagctccttgctccgtacctctcaggagcctccatcctgtaccaatggccagagagccggggggtgacagacaggggggccggcagccgagccaggcaggacgctgcgcgccgcgttactggagccggtgtcccggcaaccccggaacgcgcctctgtgggagaagcaggcggctgcggtgtcccttttgccctaggctctcggttctcaggcctcggcgtgcggcgtgcgttcggcagttcagttgccagttggttcgttggtccgtggaggcctctgagcacagacccgggcctcccctggggaagggggtgggaagaccccgaggtggaaaagaaggagcaccttgagctggatgggggctgcagcgagcctggttcgggctgggggcggactcgctggggctcccagggcttccaaaccacgaaacgcccaggtggagggagtaaggctcccgtttagaggccagtcctgccctcctgactttcggtggcttgtggaatttgtttgttttgactgatacctttcttacgagggacttt

SEQ ID NO: 91674 - DNA, 1049 bp, Homo sapiens
aaaaacctactggattagggaggtgtgatttttcagtaggagtctttaaaactstttgtaattattttggttataaacttttatagaactattttcaatgaatgctgtctataagaaagatacagtctcaggaccaagttcaaagattattcacagatgaatgtttctctttactaaaagaaaagattcactctattttatttgatcagctggtgctaacaagcatccaacatttcagataacaataacacattcttagacccagtcgtcaaggcagtcttttttttaatctaattcttttttttttttttttttgagagaagtcaagctctgtcacgaggctggagtgcaggcgcttggtctcgactcactgaaacctccgcctcccgggttccagcgattcttctgcctccgcctcctgagtaactgggattacaggcacccaccaccaagcccagctaatttttgtatttttagtagagacggggtttcaccatgttggccaagatggtctcaatctcttgacctcatgatctgcccgccttggcctcccaaagtgctgggattacaggcgtgagccaccacgcccggccttgtctaattctttattgttaaaatactgttttttgagacaagttgcaatccagtttaggttatagctgtgttttaatgatgccctccttagcaagcatcttaaaaaaaaaggtgcctcctatctgtagaccttctctggctggttgcttttgcacttattttgtgttcatttttaaagcttttctttttctctttattttttattaagggaatcctcacatacacaaagataaaagtagtgtaatgaacctccaaggacccatctctgagactcaacaattatcaacattgtgccagtcttgttgcagcaccctgggacgaatcttattcacagcaggctcttccttcttcctgcccaccccacgcttcccagtctagcaccttagaccaaaagagatcggaaaattgagttacctgtataatctgggcataatttttttatcgttgtcccttta

SEQ ID NO: 91675 - DNA, 655 bp, Homo sapiens
ttcaagcctcaaatgcctcttttccagtttgtccctggatctaaacaaacaaacaaacaaacaaacaaaccaaaaagatcccaccacctctcaacacgtttacattggcaattaaatttcagcatgaattttgcaaagacacacgatatctaaatcagaactcagggccagccccaggtatggttcgctccaaagggcctgcttttttagggctcagtgactttgcccttcttcatgtcttgttttattctaatcacagggcacagacattcctgacattgcctcttcatatgaggttgcccaggtgacaaaaacgggtatctcagcctccccagtgatggtgtcaaggcttgttctgattggaccatcttaggtcagattctcatttctaaaccaaygaggaagggctatgctaattggcagaaataaaaatcagggcccaccttggagctgggtgtggagtcaagcacacctaaaccaaatggaagcctgggtagttcgccaaataaactctgctttcttttgccctcttagagcttacagcctagctggagagccagacattaacaagtaatcaattggatgtaaaatatgaagtgaagcaacacagagctgtgagactgtatgtcagaggggcaccatccaaactgggatg

SEQ ID NO: 91676 - DNA, 660 bp, Homo sapiens
gactaaagcccagagccgtagccggaagagtcagaaatttacaaagaggcagggagaagcaagcctaggagagttcacttttayctcacaggtgatgaggatcagggctaccactgacacattaaggatacccctagcaggttagaaaaatgtgcctcactgttggagtatcaaagagataaaggaaatgagaaaaagctccccttcctcaagaccaactaaccccaggaggcttaacagaacacagctgagatttcagtgcctctgtgcagaacacaagcaaccaatacacactggtcctgcgtgggcatgccactttaagcatgtcttttcctttttgaaagatcacttgaaccaaagtaggcagatgaactgagaaaaaccaagctcaacggcagcaaaactagctaggagcgtctgcaatagtccaggcaaaatgtaattaaggatggacaagcaatatgtaggaggttaaaatctacaacctagacccactagatgcaagagataaagaaggttcagtgaagaatatctgacgagaatggtctgtaatacatttttcttacattcagtgcaaaatattaggcaagatctagtaggctagccttgactctgaggtccctcccatctttaatttattttggttcctggtttttttat

SEQ ID NO: 91677 - DNA, 660 bp, Homo sapiens
gactaaagcccagagccgtagccggaagagtcagaaatttacaaagaggcagggagaagcaagcctaggagagttcacttttacctcacaggtgatgaggatcagggctaccactgacacattaaggatacccctagcaggttagaaaaatgtgcctcactgttggagtatcaaagagataaaggaaatgagaaaaagctccccttcctcaagaccaactaaccccaggaggcttaacagmacacagctgagatttcagtgcctctgtgcagaacacaagcaaccaatacacactggtcctgcgtgggcatgccactttaagcatgtcttttcctttttgaaagatcacttgaaccaaagtaggcagatgaactgagaaaaaccaagctcaacggcagcaaaactagctaggagcgtctgcaatagtccaggcaaaatgtaattaaggatggacaagcaatatgtaggaggttaaaatctacaacctagacccactagatgcaagagataaagaaggttcagtgaagaatatctgacgagaatggtctgtaatacatttttcttacattcagtgcaaaatattaggcaagatctagtaggctagccttgactctgaggtccctcccatctttaatttattttggttcctggtttttttat

SEQ ID NO: 91678 - DNA, 720 bp, Homo sapiens
taattcatttcatcctcacagaaagctcatgaggcaggtactccttttttgttttttttgttttgtttttttttttgagacagagtctcaagcccacacggtcgcccaggctggagtgtaatggcgcaatctcacctcactgcaacctccacctccaggttcacacgattctcctgcctcagcctctcgagtagctgggattacaggcaaaaacaccaccatacccagctaattttttgtatttttattagagacagggtttcactatgttggccagattggtctcaaactcctgacctcatgatccacccgcctcagcctcccaaagtgctgggattacaggcatgtaatctgagrcaggtactcttaatatccccatgatatagggaaagaaacttagcacaacagttgtgcaacttacccagagtcctgcaagtgctaagtgggccagctgaactgcaaacccaggtgatctagctccatagcctctatattgtacatcatgtagactcaggccactctcacagtataggggctacattcaagatggtcctgcagatgctttgacttcgtaaatgagcctagtattctcagggagtgctgcccgcctgtccctaccttttgggagaaaggtcatgaagtaaattgttatgactccttggcccacatcgctggactcgttgcattggaagggacctggcctgcataagtgtcgaatct

SEQ ID NO: 91679 - DNA, 1113 bp, Homo sapiens
ggatcctctgttggatcactgggaaactggaatgaaatttcataacagattggtgactgaaagggtgtgaagcaccctttgaaggtagtaggaaatacagtttattcacaagtgataagcttattgaagggcagttactcatcagctgctactgagaagctggtccagagagaagcttgacaggtggtacagcgaatggagcatcggtgtcgctgtagtccaggctagataagagagtcagttgcagctttgtatgtggaggtgttcacgcctttaaagcaagcttgtccaacctgtggcccaggattgctttgaatgggacccaacataaatttgtaaactttcttaaaacattatgagatttttggggaattttttttttttttttaaagctcatcagctggccaggcgcggtggctcacagttgtaatcccggcactttgggaggctaaggtgggcggatcacgaggtcaggagatcgagaccatcctggctaacacagtgaaaccccatctctactaaaaaacagaaaaaagtagccgggcgtggtggcaggcgcctgtactcccagctactcgggaggctgaggcaggagaatggcgtgaacccgggaggcagagcttgcagtgagccgagattgtgccactgcactacacggagcaagagtccgtctcaaaaaaaaaaaaaaaaagctcatcagctgttgttagtgtattttatgtgtggcccaagacaattcttccagtgtggcccaaggacgccaaaagattggacacctctgcttcaaagtcacagtarattccagggtaggtaggaattgaagttcctgagtaagaaggcaaaaacttactgcacgcgatggttctggagattcttgaggaaagggaattttacctctcacctggaatttgagcagcttggtgaagatagaatctccttgggtaggggtattgggagagatggcttgtaagggaaaaagagagagtatgtctggggaacaagtgatatctggttctaagtggatcttgggggacatttgctctcaagtaacatctctttgaagtaaggaaaggacaagtcccaggtaaaagaaggtaagtgtataagggtaag

SEQ ID NO: 91680 - DNA, 625 bp, Homo sapiens
  misc_feature (1)...(625): n = A,T,C or G
tgatcaaggctggaggtgggactttactgtccccaggcaaatagcattccaatatattactctgtatrtaactggcatagagcagtgacgctccggagaggaaaagcatttggagttggaaagtcccttgctgagtttcaagtttcccatctggaaaatggggatgataataataataatttggcatctactttatagagttaaacagattaaatgagtcaacacatgcgcaatattgtcacgtgcctagcacctggaaggcaatgcttgatgaagtccgttttgcttgtttgctcagctcaagccggctccctctctttggtaatcgctctatctgcaggcacagtgaagttaagtaactggcccaaaggcatactgctaagagaggacatcttaggccgggtgtggtggctcacgcctgtaatcccagcacttaggccgagggcaggtggatcacctgagtcaggagttcaagaccagcctggcccacatagtgaaaccccatctctactaaaaatacaaaannnnnnnnnnnnnnnnnnnnnnnnnnnnnnnnnnnnnnnnnnnnnnnnnnnnnnnnnnnnnnnnnnnnnnnnnnnnnnnnnnnnnnnnnnnnnnnnnnnnt

SEQ ID NO: 91681 - DNA, 682 bp, Homo sapiens
cctaacccatctcgacctcctaggctcctagcctaaatgcacagtgtgaaccaaattactcaaacatcaggctgtacaaccaggtttctctgctttgaataacccagattacttcctactaaagccatgacatttaaattagaaatgcttttctccagataataggtgacccgatcctttaatccagttatttataagttccaccaaaaatataaactcactcttggcctaggaacagaggcatggctataaaacaaaacttcctcatagctgtgaaatcagagagtatctccgttttcccttctcatcctgcctctcttttgtaagtcacgttttcagtgcgcaggacgcaatgacaatcatgatgaagaactggttccacgagctatgtgtggctatctttagagaggttcttcctaaatttttaactttctggctaagtcaggatgtctccagcatgaaggcaaatgcagaaggggtgagggtgggatggaaggaagtgcacctggctggtggatgatgcccagaaacctaaaagatgcccacatcagctgaacctcatcagctttggacaaaccaggcaaagctgcagtcaggaggtctgggggaggctaactccccaaaccgagggaacccgaagcataaggaagggaacagaagttgaasaggtcaacactacctt

SEQ ID NO: 91682 - DNA, 2170 bp, Homo sapiens
atactcaaatatttaaggaacaagaggaggaaatgaagccagggaagatggagagagcagtcaaaatttgaggacaggcatatcattcagccataaaaaggaaagaaattctgccatacactacaacatggataaaacttgaggacattatgctgagtgaagtcagtcagtcccaaaaagacaaatactgtataatcccatttacatgaggtatgtagagtagtcatatttaaagagacagaaggaaagcagaatggtggttgccagaggctggggcatggggaagtggggcgttattgtttaatgcttatagagtgtcagagaaactgaagaattctggagattggttccacaatgtgaatgtactgaacactactaaactgtgcacttaaaaatggttaagatggtacattttatgttctatgtattttaccacaattaaacatattttaagtggtataagaaaatcaagagcaattaatgtcatgaagccaagctggtagagggattttagaggaccgtgatcctcagtgcccagtgcagcaaaaagacccaggaagagagagtgagcattgagactgggctcctactaaagctagaagtcaatgtctcaagacattgggttgcgtttagaagctcagaaattctaggagctgatcaatgaaaggaagggctccgaaattagctttcttcaccctgtcttagcattatgcgatggatccagcttctggaaatgcagttacaagtagcagcgtgccttccctgatgcaacgtaagtacccaggggaccttgagctactttcagaagtctgtggagccccaattactcccagtgattggtgtccaaaaggaatatgcttttgtcacagtcagacactgtgtgactcgctcatgtagaaaaagggattagggtcgggacttatatctgggctggatgttttatattacatttcattgaacattcctggcagccttgtaaggtagctccattttaagatctccatttatagatgaggaaatggaggcctagggtctcctagtgagtcagtggtgaactcaggaccagacctcatgtcttcctgactctggcttgatgagagaggttccaccaaaggtctcaggcagttagggtgaatttcgattcttctttcctccctgagtctctctaccactctcttcgctcttctctccacccgcttccttcatccccactgaagagagaaatcaaggaggggctcaaaataccccttctccaacttgtatcttctggcaaagtgaatcaagggtggagaatgaagaaggtattatagataacgagtacatttccttccagtccctgacttaccaaaaccaaaacaaaacagataaaaaacatgatacgaaatttccctgtactcttcagtcaattaccctaattctctttctcttgtacagtgaagggcaggcaccatcccaagatgtgcagggtactgccacagaaggctcatggtgattctcagcagaggctgctctggggtggggtccctgtgtatctcccagcctaactctttttcctttcctctgaaccacaggctgggactgacagctgaacaggcctgtccaccttcagtcctttccttctaaactaatgctaggataccagtttctaggttctcccattgtgtctccctccttccttgttctcaaataagtacataacatgttggatatttataaaagtttcctttggctggccgcggtggctcacgcctgtaatccaagcactttgggaggccgaggcgggcggatcacaaggtcaggaaatcgagaccatcctggctaacacagtgaaaccccgtctctactaaaaatacaaaaaaaagtagctgggcgtggtggctggcacctatagacccagctactcgggaggctgaggcaggagaatcgcttgaacccgggatgcagagggcggaggttgcagtgagccaagatcgcgccattgcactccagcctgggtgacagagcaagactccatctcaaaaaaaaaaaaaaaaaaaaagtgttttcttcatttcwtgctggaaaataatactaaggaattaaccagttacaaagccggaacaaatcttgagtcacactagagttagtgttcacagcagagtaaatgttgaatgagatggctgcagctggt

SEQ ID NO: 91683 - DNA, 575 bp, Homo sapiens
gattttaaaagaattatttcaaatatacagaattctagagagaatcattcgttcattcatttaacaattttcaaggctctactatgtgtcaggcattgttctaggttccaagaatacagcagtcaacaaaacaagttcctgatatcatggaactggcattcagaataatataagataataaaataataaaacccacctacccagctttgtccattcttatcatttcatgatatttaatatttttaaaagaaattagtattgcaaatacaatttaagccctctcgtacttctcccagttccctcctcccttacaatctcgcagaggtaactatttttgagcttgttgttcatcatttccatgcatggttttatacttatactacaaatgtgtatatacataaacaacaccttatttttgcatgtttgaagacattctataagyggtaaatcatgttgcagtatcttctgctcctgactttgttctgtctgcattgttttgagatgtgtccttgttgatcactgtggctctggttcattctttataactgctgtatggtattccattgaatgaatat

SEQ ID NO: 91684 - DNA, 206 bp, Homo sapiens
aggaaacgttgcgacaacttctttacatttcaaagatatttggctctgacaccacataaatagggaatagatggagagaactttcagaaattcatctaagcacataagtacttagaacacctttcgtatagataatagtatacatatgayatcagcataaacagaggatggatgtacatatttttagtgatgaaaactgtttgact

SEQ ID NO: 91685 - DNA, 941 bp, Homo sapiens
gtggatagaatttatttgcaattaaaatttcccagtgatgaactgataggatcaaatggcaggatgtcaagagtgcatatttacaacagtcagaaagttaggtcttcaagacctgttccaaattcagaagytttgatggtggtttttgtgtacatataggtatctattctttccaaatgaagtgcaagattcttgggggtatgaataatgtctaatagttttccatattcttttttccatactgttccatgtacacagtaagcaaaaatacttgttggctgattttgaaatcctttccactggctagccttttagaagagggttgattatccctcttctgtgatactgagcatgaaggcaacagaacagatttgtgacttctaaagctcccttccagggctgtgatttggtaggggacaaaaatagacaggaaaaagcaccaacatccttatgtccttctgtggcacagttggagagtgctatgccagagtttctgattttaaaggttgtttgagaaaaaaaaaaaagataaaatgaagttctgagcaattctcaaaatcacttattgatcatgtcacccagctcttctaaattccaacctgcatatataagaaatatcaaattggtgttgggaaaaagagctaggttttctgacggtctcaaggatatatcagcaataacagcaagcagtctaaatagttccagacttacgacattcaaagacaagaggaccaatcatcaagattttacaaaacaattgtcagcaatagaaacacatcagaaaaattacactagaattgtggctaatatttgtaaatatttctctagattgttacaaagattttgaaatgatcattttgcctctagacagtggcaatttgatattataaatagcacaatataatagttttgaagcaaaaactacaggggtcactttgcaa

SEQ ID NO: 91686 - DNA, 941 bp, Homo sapiens
gtggatagaatttatttgcaattaaaatttcccagtgatgaactgataggatcaaatggcaggatgtcaagagtgcatatttacaacagtcagaaagttaggtcttcaagacctgttccaaattcagaagttttgatggtggtttttgtgtacatataggtatctattctttccaaatgaagtgcaagattcttgggggtatgaataatgtctaatagttttccatattcttttttccatactgttccatgtacacagtaagcaaaaatacttgttggctgattttgaaatcctttccactggctagccttttagaasagggttgattatccctcttctgtgatactgagcatgaaggcaacagaacagatttgtgacttctaaagctcccttccagggctgtgatttggtaggggacaaaaatagacaggaaaaagcaccaacatccttatgtccttctgtggcacagttggagagtgctatgccagagtttctgattttaaaggttgtttgagaaaaaaaaaaaagataaaatgaagttctgagcaattctcaaaatcacttattgatcatgtcacccagctcttctaaattccaacctgcatatataagaaatatcaaattggtgttgggaaaaagagctaggttttctgacggtctcaaggatatatcagcaataacagcaagcagtctaaatagttccagacttacgacattcaaagacaagaggaccaatcatcaagattttacaaaacaattgtcagcaatagaaacacatcagaaaaattacactagaattgtggctaatatttgtaaatatttctctagattgttacaaagattttgaaatgatcattttgcctctagacagtggcaatttgatattataaatagcacaatataatagttttgaagcaaaaactacaggggtcactttgcaa

SEQ ID NO: 91687 - DNA, 1678 bp, Homo sapiens
ggacgacaactacacttgtccttaaagtttaataaaagcaggagagacccaggagagactcaacctgatttgcagttagcatcagaatctaaatctagtatcacaactttaagaaactaaaagaaaactattagaaaaatagaacatcaaacaagcaaaaaaatatacaaatgtacataataaaaaacacacaactcttaataatggctccatgttcagtagaagaaaatatttactggagaaaccacagctattcaggtttgataataaaccaaccctcattggtatcattacccttagtgctccttaaactcattgaagctgaaaggcacaacttaagcaggaaacttatcatcttaaatatatattataacttctcaaatgggaaaataagtcccaaacttaatagtctgtcatcaagaaacacaaaatcatttgccttgttaataaattaacagtctgaatgcatctttccatcctgcttcctgaccctgctggacacactaataaataccctgagaaaatcttctctttaagcttggccaaggtactccatctcctgtggggttttcagctggcactcagcacatttgtagaatgacccaggagggctccatggcaactgtgccccgagactccaggcccagccgggtcccgatggcgagagcgttgtggctcagtgaagcactggcacagaaaggctggactcgaggaatcgaggggtgaagatggagtcggctgacattttttgccttaaaaatacattaggagtcataagcgtgatgacacatggagtgtagcttcttgcaccactggatcaacagtcatcaatttcatgactcggataaggtccccaggagcctggcagaatgtacatctccctctcccttcagagccttacatataatcttctcatgacgatggcaaacagatatattttaaattacacgtaacaattatacatagtgtatatccagatccgtctgcaggcgaactctgcatcagttccacatataagcctcacgcccccaccaccctgcaatttccccgtcctcggaactgtctcacgagaccaccagcgcacagacacgaacatgcctctcacacaccccagaacgcagctgtgctggagttgggcacaaaggcccctcactccctgtcttcatggtgtgggttcttggctgccaacagaactgtcagcctttattaagaaggaagggtctgtgtaaaaatgggatgtgtraatcagaagaggggccctggcacagagccaggcaggcttgctttagcattgagtcctgcgtcgcgcaatgcccaggaccttgcctgttaagtctgggtggggcccctatggggcatgtccacgtgcccccgaccagactcattgccctgtctccagtctccactgtgggttgggctggaggccatgccacgtgggactgcaaacaccagccagttcacaatgcctgctccgtggcaggggcacggcagggaggagctggtatcatcagcgtttccacccatctgaacaaaggtgagcgggccatgcacccttccagctgtgcacagggatgtgctgaaggtgcaggaggcagtgcgtcagggccttggtggctggggtaggtggagaagcccgctgcccccaccatcctgcggtcacccctggactcgtattgga

SEQ ID NO: 91688 - DNA, 708 bp, Homo sapiens
agcctgtgaccctgtttgacatttggctctctgagctgttttccccatctatgtaacaaagggataggatcagatgatttttattccccattctagctcaaaattttatgagtcttgagattattctcttcctttggcctgtcagataaaacagagcaggcaccatccccagttgctgcacgacctggagctgatcagtgatgcgaccattgctgaggggccctgagctgcagtgtggggaggccctgctgcactgcgcccgcccggcagctgagggtgcaaaggtgtgggcaggcagggaagtgttcaagtcgttaggcacgkacttttctagacttgttatctcaattgatttaattgcagccaagttaggtcaataaataccaactgatgatcaacatgaacgattggtgattttttgtgtgtaccttagtagccaaaagtcatgacgatagcatatctgtgcacatgctgttgttttgtcttagatttttaaaataaactctgttttaggatagtgttagatttatagaagaattgtgaagagtacagagcttgcatgtgcccctcaccatttcccattaggaacgcgtatcttactttggtgggtacgttggttacaatcaatattgatgtgctgtcactaactgacatccatatttgattcaggtttccctcattttccccaggtgtcctttttctgtccca

SEQ ID NO: 91689 - DNA, 708 bp, Homo sapiens
agcctgtgaccctgtttgacatttggctctctgagctgttttccccatctatgtaacaaagggataggatcagatgatttttattccccattctagctcaaaattttatgagtcttgagattattctcttcctttggcctgtcagataaaacagagcaggcaccatccccagttgctgcacgacctggagctgatcagtgatgcgaccattgctgaggggccctgagctgcagtgtggggaggccctgctgcactgcgcccgcccggcagctgagggtgcaaaggtgtgggcaggcagggaagtgttcaagtcgttaggcacgtacttttctagacttgttatctcaattgatttaattgcagccaagttaggtcaataaataccaactgatgatcaacatgaacgaytggtgattttttgtgtgtaccttagtagccaaaagtcatgacgatagcatatctgtgcacatgctgttgttttgtcttagatttttaaaataaactctgttttaggatagtgttagatttatagaagaattgtgaagagtacagagcttgcatgtgcccctcaccatttcccattaggaacgcgtatcttactttggtgggtacgttggttacaatcaatattgatgtgctgtcactaactgacatccatatttgattcaggtttccctcattttccccaggtgtcctttttctgtccca

SEQ ID NO: 91690 - DNA, 973 bp, Homo sapiens
tgttacaattaatttcacctgttgctgtttacctttttaatgtggctgctggaaaatttcagtgatatatttggccatatgacatttctattgggcaacattaaagtatgaaactggtaattctccagggaattgaatagctcctgcgtgaaggttgggtgaacgggaagcaggtgacagggattgataggtaacagaagaggaaacggaggagtaacaagaacagtatctcagcactctaggcctcagagagattgtcagtggcacctccagtcrcacctgaaactgaacagacagtaaccagtgggcctgtttgttttgctcctagcaacaggtcccagctggtcccagcccagccgagtctgccagatgcttttcaagcatgttgtggtaatacagcctggtgatggcaacatcctgaatggctgtagcaaggagctttatccaaaaagagtagcagctgttttctagtggctcttcaactacatcaacactgttttcctgaaatattcttaggtcccgtgtgcaaatgagttttctgcagtctccaaagttggtggttacaggtcctgtgctttatgttttgctgaaatcttcactcttaaccaccatcactttcctcttgaatggtatttttttttttctaatgtgacatgggagaaatttacagacatgccaatcagaatttctgagtatgttttagaatttgaaatatatctgagtgatttgaggttttgttgttcttacaatatcatgctcattttatttttctctctctttttatgtgaagactcaatttacctgttgctgtatttaattcctttgaattatatagccttggccctttcaagagaagctaagcaaaatatgttaacctcataggggatggtgatactctacaattttgtggcatgtctctatcctacacgtagtctaggtcaaacataacataacatggttatgttacaaacta

SEQ ID NO: 91691 - DNA, 753 bp, Homo sapiens
tctgctggttggtggtgggacccaaagcacttggctgcctggccctgaccctcaccttcctcagggaggacgtcatgttgttatagacataatgctcacattaggggctcaatcagccgttggctattgctattactattcatataatgagatcatgtgtgtgaatcacacgcacatactttgcacagaataaggggtcaatttgtggtagcaatttatttatttattccatacccctcacttctccccttcctgacctcaggtaaccactaatatactctttatcttcatgagatccccttcttaagctgccacctatgagtgagaacatgwgatatttgtctttctgtgcctaattgatttcacttaacctcatggcctccagttccatccatgttgctgcaaacgacaggattttatacttttttttatggctgaataatattccatggtgtatgtattccacattctctttatccattcatctcttgatgggcacttaggttgattccgtctctcagctactgtgaagagtgctacaatgaacacaggagtgcagattatctctttgatgtattgatttcctttcttttggatctatacccagtagcgggcttgctgatcatatggtggttctattttgagttttttgaggaacctccatactgtgctgcatagtggctgtactaatttgcattcccaccaacatctagtgatagctatttataataatcatgctcataatcataataa

SEQ ID NO: 91692 - DNA, 539 bp, Homo sapiens
acccaggcccttacccaggggcacacacacccccccaggccctcatccagggatatacacatacccaggacctcacccagagacacacacacatacacccagagacacacgcacacccaggccctcacccaggacacacacacacccaggccctcacccagggacacacacacacacatacccagagacacacacacccaggccctcacccaggtacacacacacacctagacacacatacacccaggccctcacccagacacatacacacgcacacctccaacagacaggcacacacactcactcaggccctcacccagggacacacacacacctagacacacatacacccaggccctcacccagacccatacacaygcacacccccaacagacaggcacacacacactcaggcacacccacacacacttgggccctcagccagagacacacacacacccagagacacacacctagacccttatgcaagcacacacacacttacacacctctactcttacacgcttgtagaagctcca

SEQ ID NO: 91693 - DNA, 972 bp, Homo sapiens
ttattaagcaatayacttcaacaatgtgaaactgacatttgttcactattatccatattaaatttatacaaaattgcaattcctatacaattgcaccactgtaaaattttgtgtaatgaattcgatagcctaaagtgaatccatgagttgaagcaacagattttttaatatatttcagtagtactttttacaaatatatagcagtgtctgtatatctaatcaatcaaactacattggctgctgtgatacatgatcctaatctatgttaatgacagcgagatgtattctacacacagctgatggtgcttcaaattgacagcttcagctgtcaaccctcgtaagaaatagcccttgatttgaaacagctgcctcatccaatattatctcccactctcctaggaaatcttgcatccagtgacttgcccaccctagtataagaaggcccattctcaccacaatgcaggacagcttggaagagccattacagccacctagctccttgtggctgactgagatcatttttgtgactacatctcacccaacatcccattcttcctaatcctgtttccttccttcaccttccaaagagcatacctggggaactcaagctgcaaccacaacagataatctttgtagcactgttaaaggcattaataagacacaataggtcaaagacatatttatatagaaactgaaccccaatctctcatcatatacaaaaaattacctcaaggtgggttaatctaaatgtaacatttgagactgtaaaagtcatataagaaaatttagaaaaaactattcaagacattggcctaggcaaagaatttatgcttagacctcaaaagtaaatgcaacaaaaacaaagaaattaatggaatttaattaaactaaaaagcttctgtaaagcaaaagaataatcagcagagtaaacagacaacatacagaatgggaaaaaatatttgcaagctatgc

SEQ ID NO: 91694 - DNA, 1127 bp, Homo sapiens
acaggtattaaaaagaataaagattttcatagatatttcaaaagaagagaaaacttgaaaaaaatccattaagtaacacaaaakatttggctgtggtctgtgttatactaatacctcaaaacaattttcaaaaggcatttatctatatgatatatattcctaatactataaattaatgtttttgagttttaccttaacaaatatagaataaccttaagaatttcaaaatttaaaacaaatgtctacctttcaatagcaacagaagttgtctgatttattgctgggtccaaagggaattaattagtaaactttccttcatcactattagtttgaagtcaagggaaagtagacctagaccagagtatagacctggaaaaaaagaaagtgttggaggcatgaaagaaacatgaaagaaataaagaataatcttcattgaaacaaacctgtcttgtaatttaaaagagatactagtaagttaaaaacagggtcatttattttagatgttctttagtgtggatcaaagtatgcaaaagaaggattcaactttgaagttaagttttctgctttaattcacatactcataaagcttttcactttcagttttaaccatttatatattaagtgatactatgcaagcactctgctaattgctgcaagcatataacagtagataaatataagtttattttctctaagaattcacagtccagcaagaaggtggggaagagagatccaatgaccagtacaaatagtttctgaagttatatactgtacattatgccacatcgacagggatactgtactcctcatagatatcataagtttgtatatatattaaaacaattttgggcagaagacaacaaattatcttattctcatgactctagcgggtttgtttgctttttccttcttttcaaatataggtattgaagggcagcaattagcaagggtacagaaccactagcaggaaactttcttaatatagtcaaagatggcttatgaagattaattaaatatggccctaattaagtctggccttatcttttcatgctcacaaacttgattaaataaacaaaatctctagtattcctttaacggtcaactgaaaaagataccgacactgatca

SEQ ID NO: 91695 - DNA, 1127 bp, Homo sapiens
acaggtattaaaaagaataaagattttcatagatatttcaaaagaagagaaaacttgaaaaaaatccattaagtaacacaaaatwtttggctgtggtctgtgttatactaatacctcaaaacaattttcaaaaggcatttatctatatgatatatattcctaatactataaattaatgtttttgagttttaccttaacaaatatagaataaccttaagaatttcaaaatttaaaacaaatgtctacctttcaatagcaacagaagttgtctgatttattgctgggtccaaagggaattaattagtaaactttccttcatcactattagtttgaagtcaagggaaagtagacctagaccagagtatagacctggaaaaaaagaaagtgttggaggcatgaaagaaacatgaaagaaataaagaataatcttcattgaaacaaacctgtcttgtaatttaaaagagatactagtaagttaaaaacagggtcatttattttagatgttctttagtgtggatcaaagtatgcaaaagaaggattcaactttgaagttaagttttctgctttaattcacatactcataaagcttttcactttcagttttaaccatttatatattaagtgatactatgcaagcactctgctaattgctgcaagcatataacagtagataaatataagtttattttctctaagaattcacagtccagcaagaaggtggggaagagagatccaatgaccagtacaaatagtttctgaagttatatactgtacattatgccacatcgacagggatactgtactcctcatagatatcataagtttgtatatatattaaaacaattttgggcagaagacaacaaattatcttattctcatgactctagcgggtttgtttgctttttccttcttttcaaatataggtattgaagggcagcaattagcaagggtacagaaccactagcaggaaactttcttaatatagtcaaagatggcttatgaagattaattaaatatggccctaattaagtctggccttatcttttcatgctcacaaacttgattaaataaacaaaatctctagtattcctttaacggtcaactgaaaaagataccgacactgatca

SEQ ID NO: 91696 - DNA, 1127 bp, Homo sapiens
acaggtattaaaaagaataaagattttcatagatatttcaaaagaagagaaaacttgaaaaaaatccattaagtaacacaaaatatttggctgtggtctgtgttatactaatacctcaaaacaattttcaaaaggcatttatctatatgatatatattcctaatactataaattaatgtttttgagttttaccttaacaaatatagaatawccttaagaatttcaaaatttaaaacaaatgtctacctttcaatagcaacagaagttgtctgatttattgctgggtccaaagggaattaattagtaaactttccttcatcactattagtttgaagtcaagggaaagtagacctagaccagagtatagacctggaaaaaaagaaagtgttggaggcatgaaagaaacatgaaagaaataaagaataatcttcattgaaacaaacctgtcttgtaatttaaaagagatactagtaagttaaaaacagggtcatttattttagatgttctttagtgtggatcaaagtatgcaaaagaaggattcaactttgaagttaagttttctgctttaattcacatactcataaagcttttcactttcagttttaaccatttatatattaagtgatactatgcaagcactctgctaattgctgcaagcatataacagtagataaatataagtttattttctctaagaattcacagtccagcaagaaggtggggaagagagatccaatgaccagtacaaatagtttctgaagttatatactgtacattatgccacatcgacagggatactgtactcctcatagatatcataagtttgtatatatattaaaacaattttgggcagaagacaacaaattatcttattctcatgactctagcgggtttgtttgctttttccttcttttcaaatataggtattgaagggcagcaattagcaagggtacagaaccactagcaggaaactttcttaatatagtcaaagatggcttatgaagattaattaaatatggccctaattaagtctggccttatcttttcatgctcacaaacttgattaaataaacaaaatctctagtattcctttaacggtcaactgaaaaagataccgacactgatca

SEQ ID NO: 91697 - DNA, 1127 bp, Homo sapiens
acaggtattaaaaagaataaagattttcatagatatttcaaaagaagagaaaacttgaaaaaaatccattaagtaacacaaaatatttggctgtggtctgtgttatactaatacctcaaaacaattttcaaaaggcatttatctatatgatatatattcctaatactataaattaatgtttttgagttttaccttaacaaatatagaataaccttaagaatttcaaaatttaaaacaaatgtctacctttcaatagcaacagaagttgtctgatttattgctgggtccaaagggaattaattagtaaactttccttcatcactattagtttgaagtcaagggaaagtagacctagaccagagtatagacctggaaaaaaagaaagtgttggaggcatgaaagaaacatgaaagaaataaagaataatcttcattgaaacaaacctgtcttgtaatttaaaagagatactagtaagttaaaaacagggtcatttattttagatgttctttagtgtggatcaaagtatgcaaaagaaggattcaactttgaagttaagttttctgctttaattcacatactcataaagcttttcactttcagttttaaccatttatatattaagtgatactatgcaagcactctgctaattgctgcaagcatataacagtagataaatataagtttattttctctaagaattcacagtccagcaagaaggtggggaagagagatccaatgaccagtacaaatagtttctgaagttatatactgtacattatgccacatcgacagggatactgtactcctcatagatatcataagtttgtatatatatwaaaacaattttgggcagaagacaacaaattatcttattctcatgactctagcgggtttgtttgctttttccttcttttcaaatataggtattgaagggcagcaattagcaagggtacagaaccactagcaggaaactttcttaatatagtcaaagatggcttatgaagattaattaaatatggccctaattaagtctggccttatcttttcatgctcacaaacttgattaaataaacaaaatctctagtattcctttaacggtcaactgaaaaagataccgacactgatca

SEQ ID NO: 91698 - DNA, 1127 bp, Homo sapiens
acaggtattaaaaagaataaagattttcatagatatttcaaaagaagagaaaacttgaaaaaaatccattaagtaacacaaaatatttggctgtggtctgtgttatactaatacctcaaaacaattttcaaaaggcatttatctatatgatatatattcctaatactataaattaatgtttttgagttttaccttaacaaatatagaataaccttaagaatttcaaaatttaaaacaaatgtctacctttcaatagcaacagaagttgtctgatttattgctgggtccaaagggaattaattagtaaactttccttcatcactattagtttgaagtcaagggaaagtagacctagaccagagtatagacctggaaaaaaagaaagtgttggaggcatgaaagaaacatgaaagaaataaagaataatcttcattgaaacaaacctgtcttgtaatttaaaagagatactagtaagttaaaaacagggtcatttattttagatgttctttagtgtggatcaaagtatgcaaaagaaggattcaactttgaagttaagttttctgctttaattcacatactcataaagcttttcactttcagttttaaccatttatatattaagtgatactatgcaagcactctgctaattgctgcaagcatataacagtagataaatataagtttattttctctaagaattcacagtccagcaagaaggtggggaagagagatccaatgaccagtacaaatagtttctgaagttatatactgtacattatgccacatcgacagggatactgtactcctcatagatatcataagtttgtatatatattaaaacaattttgggcagaagacaacaaattatcttattctcatgactctagcgggtttgtttgctttttccttcttttcaaatataggtattgaagggcagcaattagcaagggtacagaaccactagcaggaaactttcttaatatagtcaaagatggcttatgawgattaattaaatatggccctaattaagtctggccttatcttttcatgctcacaaacttgattaaataaacaaaatctctagtattcctttaacggtcaactgaaaaagataccgacactgatca

SEQ ID NO: 91699 - DNA, 571 bp, Homo sapiens
atacaaattttacaaattgtgtggactttaggtagcttaaaagtatgttcaatttattgtagcctagaaagtactttctaaaaattacagtgttcaatgatttttagaattttatttaataattattcttcacaataaagctggaaaaaaagatctaagttaacgtattgagttatggatatttcctatttacgctaaagccagaattagaaactttaaaagacatgtgatcataacaaaaggagacattattagaatgaatgaataaatgaacaaacaatgaatatttttgctagacattttcccaaatttatattttcaatgggggagtggagaggtgcatattttgtgtcttatatctatctcttttattctacaacaattctccttccctttttggatgagaaactaaatcattttcaaagaagtgaaatgatggaaactatacatgggttmaagatttactgtaaaggaatagaaatcaagacagtatggtattagataaaggacagacatagattaatagattactggaacagaatagaaggttcagaattggtagttcaactga

SEQ ID NO: 91700 - DNA, 566 bp, Homo sapiens
ttgaggcctagcggacagagaagggwtgtactgtcctgaactattccctatagtgaaataattgtaaccagacccaaagagcagttaccacgggccttctgccaggactgtgcatgaaaatagctttgttatgtctacatatacacagacaatacactctgtcctctagtccttctcaagttcaaattatgtagaagccaacttttcctggactcaactttgtaccttaactaatggtttcaaaaactacagcttccagagatgtctattataactggaaaagccctggtcaacaggctcattcaccttggattatcttgaaatgtagccagtgtgttccaactccttccctatgtgagaaaactaagaaacatgttggatagttgagttgctcagaaactgaactgaagacagaaaagttcttaggagactgttacctgcctctttttccttagctgtattttgaaaaatgttattagtcactaaaaacattttattcttattactataataataaagattgctttttccaaagaatagttgtcagtcctgttgcaatcaccaga

SEQ ID NO: 91701 - DNA, 566 bp, Homo sapiens
ttgaggcctagcggacagagaagggatgtactgtcctgaactattccctatagtgaaataatygtaaccagacccaaagagcagttaccacgggccttctgccaggactgtgcatgaaaatagctttgttatgtctacatatacacagacaatacactctgtcctctagtccttctcaagttcaaattatgtagaagccaacttttcctggactcaactttgtaccttaactaatggtttcaaaaactacagcttccagagatgtctattataactggaaaagccctggtcaacaggctcattcaccttggattatcttgaaatgtagccagtgtgttccaactccttccctatgtgagaaaactaagaaacatgttggatagttgagttgctcagaaactgaactgaagacagaaaagttcttaggagactgttacctgcctctttttccttagctgtattttgaaaaatgttattagtcactaaaaacattttattcttattactataataataaagattgctttttccaaagaatagttgtcagtcctgttgcaatcaccaga

SEQ ID NO: 91702 - DNA, 2069 bp, Homo sapiens
tgcataccataaagtgaaaatgtaattgaagttatcttgtatggtaagatcagaaaagctttttattttcttttttatgtcagtcttctatgaccatgtcttacttttataaaaagaaacaagaacattaattcctctactaagagggaaaacaaagagtcaattgttaagagataattttttaatgttatggccaaaaggggttttacccatagacggtccactgtgtactaaaaacaacagaggctaacatttctaaaaaaccttctatgcgccaagcactgtacaaacattactctgcacaatccaagtttatattatcatcattttacagatgagcaaactggttctctcagaagtgctcactaacgggctgggtgcagtgcttatgcctgtaatcccagcacttagagataagcctgggcaacatagcgagaccttgtctctaagaaaaaaataagaaattagccaggcatggtggcatgtgcctatattcctggcttctggggaggctggggtgagaggatcacttgagcccaggaggtcaaggctgcaggcagctatgctcacaccactgcactccagcctgggcaacagggctcagagaatgaccgtctctaaacaaacaaacaaacaaaaaaagaaagcgccagaccttgaaaactgactggagccacagcctgagctattaatccttacaatagtcttcttttgggcaaaaagagggctagtggttattgtaccctttctggccaaatcccccatgtctccattgcagcttggccttaggatataagagcagaaaagtcctaaagtcctttccagacttggcagtagaattagaactgataaagaatagatgtatcttttgcccttaagaggtaggacgtagtttccaacccccaagtcccctgaaatcccatcctgaggggggactccctcagaagtatgaacacaggtcattctattccagtagcactcatggaagataccactaagaaggagcaatggcattgctgaggggtcctttggggatccacggggttgagagtcctgagttgagaggacagtaggttgctgctgccctgaaaatgtcccttccagacagaggtgacgtccttgtgtcgaacagataatttgagggaattattttataaccgagcatggtaaaggaaaacctcaaaggacagcatggggtcaataaacactcccaggcctgaaggggcacagagagaggggagtcactggagctggtgacagaggggctaatcggagttggtcaggggatatgctagcctgtgctggacctgcaggcagggggctggtgaatgcatacctgagcccccaatctcctcgtcttacattccagtttctggccagcataccccactggccaaacctcattaaaacccagagagatcagtgtctgcatgcacagagctcatggagagaagagaagaagagatcttaagggttaactagaagacaccagaacagtcccgaaggtgtgctgtggactgaactgtgttcccctatgctaaagccctaaagaccaatgtgactatatttggaaaaagggttttcagtgaggcaattaagcttaaatgaggtcataagtgtggggccgcacaggactggtgtccttataaacagaggaagagayaacagagctcagatctctctagctcgctcgctttctctctctctctctctctcagattgtaggcacagaagcaaggctatgtaaagacccagccagaaggtgcccatctgcaagcagaggagggccaggacccagctctacaagcatcgtggtcttggacttccagcctccagaactataagaaaataaatttcccttgtttaagccaggagtcctcaaccgaaattgatccgtggcttgttaggaatccggccacacagcaggaggtgggtggtgggcaggcaagtgaagcttcatctgtatttacagccattctccattactctcttaccgcctgagctctacctcctgtcagatcagcagtggcaatggattctcacaggcgctcgaacctcttatgacctac

SEQ ID NO: 91703 - DNA, 1144 bp, Homo sapiens
atcaatattggcaattgtgagagagccaagactattattgcattattatcctgcaaccgacaatgctaagcttcatccgggacagtttaagatgataaaagaagcagcatagtatgtgaatttgccatacagtgagagcccttttggcaaatatcaagaataaatgtttgggatttttttttttttaattctagaagtcatctggtgaaaatttagggccacccatgactcctttcctttggagctgcaattttcaccttcatttagaagtcagccagattagagacacagatggcgttatcataaccagattcccgtactgtgtcattggatccaagggactgtgagatcacagctggctgaacttcagtccatagacagcagagacaccactcccctggtgtacgatggcagatggctaaaatgtcccaagttgcagtagctatggaatttggagatcgatttgaagctttggggaaaatagaaataagcagtgctgtcaaatgactcttgcagttaatcagaagtatattcgagtctgcagcattttgaaatgacttatttccattcagatggagaartcatccctagtacgtgatttgctacatctaagcaggaatttttacctaagtatcagggcctatgttgatcccctctcctcaccatgtgatactgggcaagccactgaaattcttggaaaatcagtttcttcatcagtaaaatgagggtatttgactaccagatttttctctaagtcattccacccgagttctaacatttttttatgtttctgtgattcagttaattatgaaacatagtcccataatgactcaaagaaaccaaggtgtaacagtaagtcctttgggttacaataagtagattttctactacccttgacttactatttgtacatttcattcaatatatttattgctagttaaaatcatatgaattttcagtgggaaagagtttgcagattatgagaccaaatgttccagaatatggagaacaaagaagagaattaaaaacttctataactagcccatgtcattagaaagtttttcatcaatcacaaaatagctccatctttctggcatttttttttcttactgttcattatcttcagttctataccaaagaatat

SEQ ID NO: 91704 - DNA, 1144 bp, Homo sapiens
atcaatattggcaattgtgagagagccaagactattattgcattattatcctgcaaccgacaatgctaagcttcatccgggacagtttaagatgataaaagaagcagcatagtatgtgaatttgccatacagtgagagcccttttggcaaatatcaagaataaatgtttgggatttttttttttttaattctagaagtcatctggtgaaaatttagggccacccatgactcctttcctttggagctgcaattttcaccttcatttagaagtcagccagattagagacacagatggcgttatcataaccagattcccgtactgtgtcattggatccaagggactgtgagatcacagctggctgaacttcagtccatagacagcagagacaccactcccctggtgtacgatggcagatggctaaaatgtcccaagttgcagtagctatggaatttggagatcgatttgaagctttggggaaaatagaaataagcagtgctgtcaaatgactcttgcagttaatcagaagtatattcgagtctgcagcattttgaaatgacttatttccattcagatggagaagtcatccctagtacgtgatttgctacatctaagcaggaatttttacctaagtatcagggcctatgttgatcccctctcctcaccatgtgatactgggcaagccactgaaattcttggaaaatcagtttcttcatcagtaaaatgagggtatttgactaccagatttttctctaagtcattccacccgagttctaacatttttttatgtttctgtgattcagttaattatgaaacatagtcccataatgactcaaagaaaccaaggtgtaacagtaagtcctttgggttacaataagtagattttctactacccttgacttactatttgtacatttcattcaatatatttattgctagttaaaatcatatgaattttcagtgggaaagagtttgcagattatgagaccaaatgttccagaatatggrgaacaaagaagagaattaaaaacttctataactagcccatgtcattagaaagtttttcatcaatcacaaaatagctccatctttctggcatttttttttcttactgttcattatcttcagttctataccaaagaatat

SEQ ID NO: 91705 - DNA, 533 bp, Homo sapiens
tgtatgtgcatgtgtgagtggtggtggtggttgtatgctgttgtctaaattaatataaatatatttaaatttatgttgtatatgagaacacttaaaaaaaaaaaaaaacttccttgtttgcccataatggaagcacagagctttatttatccattcaacaaatatttacygagcaccaattaaatatcaggcatgttgctaagtgcaggagataacagaggctgggagatagccaaagtcctcctttctcttaaggaatttaaattccagcagacttacagcaggaattcttaacacgtctgggtctgtctgggggactggagtatggaggaaccgtgtggcagctatgcttagtgagttttcgcctgaaggaggagggagaaggtgggtggggctgtgggagacaaggggaggtcaggatgaactctgatgggggcagtcaccattccttggctctgcccagcaaacatatctgcacagctcaagcagaccccaggggctcaaaggcacagggtccaccttagtgcccaggg

SEQ ID NO: 91706 - DNA, 774 bp, Homo sapiens
attaaacctgtgttagtatatcctataattgaaataagttttacagtgcggattctaactgaagcttataaaaacacartgagaatatgggacgaacataagtggaatgaactgatgtaaaaacagtatctgaaaacatgaaatatacaagaacagaaatataatttgcaattgcttaccgaaatacctcctcatatttgcatttgggctacaaagatttcaacaaatatgaacacacctacaaatgtaacagtgaaattggtattgttcccgcgctccatgttgtggaatgtggttctactaaaacaatgccactagtatttctccctgcaggaaggttggttgaacaatttgatataaaaatcaacctatggaagaattaaaccccagttgctgtggcatctccgcattggaaaaaagtcaaaatgatggggctcctattgtcccaggaatggtgtcattcagtgtatgggtgacaaagtgaatacatggttgtcaatggagctgcatctaagattgttcctgactttggggatttcccttccctctttacgaattacatttcaacaaagccaagtatcccaactctttgatctcttcaattccaactgcagttccccttggatgctccactgcccaacctatcccattacttcttatgtgatacacgagatgggtggataagagaagaaaacaatcaagtgcttttgtttcaagtataacaacacctatttcccactcctttggaaaacattaaagggatttgtcattctt

SEQ ID NO: 91707 - DNA, 613 bp, Homo sapiens
tcccacctcagcytcccaagaagctgggactacaggtgcacgccaccatggccagctaatttttcttatttttttgtagagatgaggtcttgctgtattgcccaggctgctcttgagctcctggcttcaagccatcctcctgtcttggtttcccaaagtgctgggactataggtgtgactcaccatgcctggcctacatccagtttaatttatactacagtgtgggtttagtcctcaaacatgtttttgttttacatataaaaatttgaggtaaaagaacatttttacattggtcaataatggtacatttaaacaatggacgactatatccattaaaatcatgttgtggaagaatattcagtgacatggaaagattgactcaagggcaagtgaaacgtgtcaagagtctgttaggtactagacactgtaaactgggtcttggctgtgctacttgcttacatcctccatcatgtgatcttttagataacaaaatcgagatacatagggatttgggatcttgcgcaaagtcacccaggcagtaggtggcaaagtcaattcttacattctttcccatcgaacaccaaaatctcagcttacctcagggcactcaact

SEQ ID NO: 91708 - DNA, 613 bp, Homo sapiens
tcccacctcagcttcccaagaagctgggactacaggtgcacgccaccatggccagctaatttttcttatttttttgtagagatgaggtcttgctgtattgcccaggctgctcttgagctcctggcttcaagccatcctcctgtcttggtttcccaaagtgctgggactataggtgtgactcaccatgcctggcctacatccagtttaatttatactacastgtgggtttagtcctcaaacatgtttttgttttacatataaaaatttgaggtaaaagaacatttttacattggtcaataatggtacatttaaacaatggacgactatatccattaaaatcatgttgtggaagaatattcagtgacatggaaagattgactcaagggcaagtgaaacgtgtcaagagtctgttaggtactagacactgtaaactgggtcttggctgtgctacttgcttacatcctccatcatgtgatcttttagataacaaaatcgagatacatagggatttgggatcttgcgcaaagtcacccaggcagtaggtggcaaagtcaattcttacattctttcccatcgaacaccaaaatctcagcttacctcagggcactcaact

SEQ ID NO: 91709 - DNA, 613 bp, Homo sapiens
tcccacctcagcttcccaagaagctgggactacaggtgcacgccaccatggccagctaatttttcttatttttttgtagagatgaggtcttgctgtattgcccaggctgctcttgagctcctggcttcaagccatcctcctgtcttggtttcccaaagtgctgggactataggtgtgactcaccatgcctggcctacatccagtttaatttatactacagtgtgggtttagtcctcaaacatgtttttgttttacatataaaaatttgaggtaaaagaacatttttacattggtcaataatggtacatttaaacaatggacgactatatccattaaaatcrtgttgtggaagaatattcagtgacatggaaagattgactcaagggcaagtgaaacgtgtcaagagtctgttaggtactagacactgtaaactgggtcttggctgtgctacttgcttacatcctccatcatgtgatcttttagataacaaaatcgagatacatagggatttgggatcttgcgcaaagtcacccaggcagtaggtggcaaagtcaattcttacattctttcccatcgaacaccaaaatctcagcttacctcagggcactcaact

SEQ ID NO: 91710 - DNA, 613 bp, Homo sapiens
tcccacctcagcttcccaagaagctgggactacaggtgcacgccaccatggccagctaatttttcttatttttttgtagagatgaggtcttgctgtattgcccaggctgctcttgagctcctggcttcaagccatcctcctgtcttggtttcccaaagtgctgggactataggtgtgactcaccatgcctggcctacatccagtttaatttatactacagtgtgggtttagtcctcaaacatgtttttgttttacatataaaaatttgaggtaaaagaacatttttacattggtcaataatggtacatttaaacaatggacgactatatccattaaaatcatgttgtggaagaatattcagtgacatggaaagaytgactcaagggcaagtgaaacgtgtcaagagtctgttaggtactagacactgtaaactgggtcttggctgtgctacttgcttacatcctccatcatgtgatcttttagataacaaaatcgagatacatagggatttgggatcttgcgcaaagtcacccaggcagtaggtggcaaagtcaattcttacattctttcccatcgaacaccaaaatctcagcttacctcagggcactcaact

SEQ ID NO: 91711 - DNA, 613 bp, Homo sapiens
tcccacctcagcttcccaagaagctgggactacaggtgcacgccaccatggccagctaatttttcttatttttttgtagagatgaggtcttgctgtattgcccaggctgctcttgagctcctggcttcaagccatcctcctgtcttggtttcccaaagtgctgggactataggtgtgactcaccatgcctggcctacatccagtttaatttatactacagtgtgggtttagtcctcaaacatgtttttgttttacatataaaaatttgaggtaaaagaacatttttacattggtcaataatggtacatttaaacaatggacgactatatccattaaaatcatgttgtggaagaatattcagtgacatggaaagattgactcaagggcaagtgaaacgtgtcaagagtctgttaggtactagacactgtaaactgggtcttggctgtgytacttgcttacatcctccatcatgtgatcttttagataacaaaatcgagatacatagggatttgggatcttgcgcaaagtcacccaggcagtaggtggcaaagtcaattcttacattctttcccatcgaacaccaaaatctcagcttacctcagggcactcaact

SEQ ID NO: 91712 - DNA, 1371 bp, Homo sapiens
ttaatttaacttattattgaccagctgtgttttggttttcctctgttcagtccacttacatttctaaaaattaagaaaaagtctagagaagattaaaatgacacatcttctaacctkttactcctacttctgaaatctatgtggttcactagtacttccatttgctactaaatcaacttaagtcttaccactaagacgatgctacacactattccttttccttactcttaactactcaaggtgagcctttttctacacatgcttatagcagtttattgtcagtacttgtcagctacaaaatggtaaaaaaattttaaaaaacaaaaaataaaacaaaacttctataagagtgactttgactattttgttaaccatatctccgggttttttgtttgtttgtttttttttttttgagacagagtctcgctctgtcacccaggctggagtgcagtggtgcgatctcagctcactgcaagctccgcctcccgggttcacgccattctcctgcctcagtctcctgagtagctgggactacaggcgcccaccaccagcctcagctaattttttgtatttttagtagagatggggtttcacagtgttagccaggatggtctccatctcctgacctcgtgatccgcccaccttggcctcccaaagtgctgggattacaggcgtgagccaccgtgcccagcccaaatctccagtttctaaactggtaagctcaagttgctatgcctcaaggaatttgagagaatatttaatataagattcaggacccaatagtaagaattctactcaggacatctgatcttcattgaaaaggattctaatccaacttcagtcctcatagcaaggaagtactatttcagaaagtccctagattctcagatgcattggcaagcaccatacactgaagaattcacagaagattttagtcacttgctcactcatccacttgaagtaagaaaaatcaatcactgcatgtttattgttctataataaagcaaatgttagaaataaaagttagaaatgtcaaacacactaaattgttacataataaactaatcaagacacaacttttattcaggacatggatatttctgaaatgaaaataaaagaagagaattgacttaaaatgtttataaatacgaatattatgacagaaccaaagctatttatgagcattatttttaaaagcttgtttaagtatcatgcacttgtctgtgtgacattttgtaaagcggagaaaaattaaggagaaaggaattgtagaacactaacaggaagaggacagatactgaggaatggctcatggtataagtgagattatcagagactctctacaatggaatttgaaacgcagggagcaca

SEQ ID NO: 91713 - DNA, 1371 bp, Homo sapiens
ttaatttaacttattattgaccagctgtgttttggttttcctctgttcagtccacttacatttctaaaaattaagaaaaagtctagagaagattaaaatgacacatcttctaacctgttactcctacttctgaaatctatgtggttcactagtacttccatttgctactaaatcaacttaagtcttaccactaagacgatgctacacactattccttttccttactcttaactactcaaggtgagcctttttctacacatgcttatagcagtttattgtcagtacttgtcagctacaaaatggtaaaaaaattttaaaaaacaaaaaataaaacaaaacttctataagagtgactttgactattttgttaaccatatctccgggttttttgtttgtttgtttttttttttttgagacagagtctcgctctgtcacccaggctggagtgcagtggtgcgatctcagctcactgcaagctccgcctcccgggttcacgccattctcctgcctcagtctcctgagtagctgggactacaggcgcccaccaccagcctcagctaattttttgtatttttagtagagatggggtttcacagtgttagccaggatggtctccatctcctgacctcgtgatccrcccaccttggcctcccaaagtgctgggattacaggcgtgagccaccgtgcccagcccaaatctccagtttctaaactggtaagctcaagttgctatgcctcaaggaatttgagagaatatttaatataagattcaggacccaatagtaagaattctactcaggacatctgatcttcattgaaaaggattctaatccaacttcagtcctcatagcaaggaagtactatttcagaaagtccctagattctcagatgcattggcaagcaccatacactgaagaattcacagaagattttagtcacttgctcactcatccacttgaagtaagaaaaatcaatcactgcatgtttattgttctataataaagcaaatgttagaaataaaagttagaaatgtcaaacacactaaattgttacataataaactaatcaagacacaacttttattcaggacatggatatttctgaaatgaaaataaaagaagagaattgacttaaaatgtttataaatacgaatattatgacagaaccaaagctatttatgagcattatttttaaaagcttgtttaagtatcatgcacttgtctgtgtgacattttgtaaagcggagaaaaattaaggagaaaggaattgtagaacactaacaggaagaggacagatactgaggaatggctcatggtataagtgagattatcagagactctctacaatggaatttgaaacgcagggagcaca

SEQ ID NO: 91714 - DNA, 678 bp, Homo sapiens
tggtagcgtgaaacttgcccaggaagctgggctgcgctggcctggggtgaaggtccaagagacgaggrggccgggacgcggggctgtcgcaacgactggccctctgcgaaccctcaggccagcaggttcgggactataggagtgggagtggaggtggtggccactggagagtagagagaacgtccaggaaccggtggactaggggtccccggcggctggccgagggttgcaagcagaggggactatcggttgccagcaagtcccaagcagatgccttctggcagggcagtcacattctacagtgccgattctgtgtacattgagtatccaaaatgaataaaatctgtttatacattggaatgtagcttatgattccaaaatctcatctccaggctgcctagatcacacggccccgtttcattcatttttacttaataacggtcgttagacaatttagagaaacagcagaaaccacgagaaaaataatggaatcaaacggcgataaggactaacaaggctggcggggagatttagcaaatggtggcttctgagagtttgcaccagtccttcaccacattttattggaagtgtggagagtcatgattctcattcctccccagccttccggaaaaatgctcagaaatttctttccacattgacacctgattacagtctaaa

SEQ ID NO: 91715 - DNA, 678 bp, Homo sapiens
tggtagcgtgaaacttgcccaggaagctgggctgcgctggcctggggtgaaggtccaagagacgagggggccgggacgcggggctgtcgcaacgactggccctctgcgaaccctcaggccagcaggttcgggactataggagtgggagtggaggtggtggccactggagagtagagagaacgtccaggaaccggtggactaggggtccccggcggctggccgagggttgcaagcagaggggactrtcggttgccagcaagtcccaagcagatgccttctggcagggcagtcacattctacagtgccgattctgtgtacattgagtatccaaaatgaataaaatctgtttatacattggaatgtagcttatgattccaaaatctcatctccaggctgcctagatcacacggccccgtttcattcatttttacttaataacggtcgttagacaatttagagaaacagcagaaaccacgagaaaaataatggaatcaaacggcgataaggactaacaaggctggcggggagatttagcaaatggtggcttctgagagtttgcaccagtccttcaccacattttattggaagtgtggagagtcatgattctcattcctccccagccttccggaaaaatgctcagaaatttctttccacattgacacctgattacagtctaaa

SEQ ID NO: 91716 - DNA, 678 bp, Homo sapiens
tggtagcgtgaaacttgcccaggaagctgggctgcgctggcctggggtgaaggtccaagagacgagggggccgggacgcggggctgtcgcaacgactggccctctgcgaaccctcaggccagcaggttcgggactataggagtgggagtggaggtggtggccactggagagtagagagaacgtccaggaaccggtggactaggggtccccggcggctggccgagggttgcaagcagaggggactatcggttgccagcaagtcccaagcagatgccttctggyagggcagtcacattctacagtgccgattctgtgtacattgagtatccaaaatgaataaaatctgtttatacattggaatgtagcttatgattccaaaatctcatctccaggctgcctagatcacacggccccgtttcattcatttttacttaataacggtcgttagacaatttagagaaacagcagaaaccacgagaaaaataatggaatcaaacggcgataaggactaacaaggctggcggggagatttagcaaatggtggcttctgagagtttgcaccagtccttcaccacattttattggaagtgtggagagtcatgattctcattcctccccagccttccggaaaaatgctcagaaatttctttccacattgacacctgattacagtctaaa

SEQ ID NO: 91717 - DNA, 678 bp, Homo sapiens
tggtagcgtgaaacttgcccaggaagctgggctgcgctggcctggggtgaaggtccaagagacgagggggccgggacgcggggctgtcgcaacgactggccctctgcgaaccctcaggccagcaggttcgggactataggagtgggagtggaggtggtggccactggagagtagagagaacgtccaggaaccggtggactaggggtccccggcggctggccgagggttgcaagcagaggggactatcggttgccagcaagtcccaagcagatgccttctggcagggcagtmacattctacagtgccgattctgtgtacattgagtatccaaaatgaataaaatctgtttatacattggaatgtagcttatgattccaaaatctcatctccaggctgcctagatcacacggccccgtttcattcatttttacttaataacggtcgttagacaatttagagaaacagcagaaaccacgagaaaaataatggaatcaaacggcgataaggactaacaaggctggcggggagatttagcaaatggtggcttctgagagtttgcaccagtccttcaccacattttattggaagtgtggagagtcatgattctcattcctccccagccttccggaaaaatgctcagaaatttctttccacattgacacctgattacagtctaaa

SEQ ID NO: 91718 - DNA, 678 bp, Homo sapiens
tggtagcgtgaaacttgcccaggaagctgggctgcgctggcctggggtgaaggtccaagagacgagggggccgggacgcggggctgtcgcaacgactggccctctgcgaaccctcaggccagcaggttcgggactataggagtgggagtggaggtggtggccactggagagtagagagaacgtccaggaaccggtggactaggggtccccggcggctggccgagggttgcaagcagaggggactatcggttgccagcaagtcccaagcagatgccttctggcagggcagtcacattctacagtgccgattctgtgtacattgagtatccaaaatgaataaaatctgtttatacattggaatgtagcttatgattccaaaatctcatctccaggctgcctagatcacacggccccgtttcattcatttttacttaataacggtcgttagacaatttagagaaacagcagaaaccacgagaaaaataatggaatcaaacggcgrtaaggactaacaaggctggcggggagatttagcaaatggtggcttctgagagtttgcaccagtccttcaccacattttattggaagtgtggagagtcatgattctcattcctccccagccttccggaaaaatgctcagaaatttctttccacattgacacctgattacagtctaaa

SEQ ID NO: 91719 - DNA, 619 bp, Homo sapiens
cctgggctatcttttcaggtatcaggaaactttgatgaaagtcacttgtctcatctaggagtcatttcatattgtttagcagagcctggtattaacatttccttccaactgtttactggaatctgtgtgttcccttcaagtgatgcatactaggtgcacaggcttcctgccactgtcatcctaatctttccgtgcagacaggagcagaggggagagcgctgagccaggccccagcttgcttttctttcctgactcagcccggctccgctgcacttctcagctcttgctgtaggtggtgctgtttgaccattttcttcatgtgaccctccactcggtaatataaattmattcggaggatgacctgatatcaaaaaaaattccttttgattagtagaatcaacttatttcttcacacgatactcttcccactgagacacatggagacaattctgactccaggtttgcaaccttgagatttctctcagatgcaataaaaaacaaaaaagcattttgagtggcacagtgatgcctagtgcatgatcatgtttgtctgctcaaacataaaagggaaactggtgggtttgaggatgcccagcagcacgacagctgccaatgtaaa

SEQ ID NO: 91720 - DNA, 619 bp, Homo sapiens
cctgggctatcttttcaggtatcaggaaactttgatgaaagtcacttgtctcatctaggagtcatttcatattgtttagcagagcctggtattaacatttccttccaactgtttactggaatctgtgtgttcccttcaagtgatgcatactaggtgcacaggcttcctgccactgtcatcctaatctttccgtgcagacaggagcagaggggagagcgctgagccaggccccagcttgcttttctttcctgactcagcccggctccgctgcacttctcagctcttgctgtaggtggtgctgtttgaccattttcttcatgtgaccctccactcggtaatataaattcattcggaggatgacctgatatcaaaaaaaattccttttgattagtagaatcaacttatttcttcacacgataytcttcccactgagacacatggagacaattctgactccaggtttgcaaccttgagatttctctcagatgcaataaaaaacaaaaaagcattttgagtggcacagtgatgcctagtgcatgatcatgtttgtctgctcaaacataaaagggaaactggtgggtttgaggatgcccagcagcacgacagctgccaatgtaaa

SEQ ID NO: 91721 - DNA, 1205 bp, Homo sapiens
ttttatgttaaaactttaggttttatattgttttgtgttttaaaacataaaatctaaaatgtggtaatatccatgaggtgcagatagagtaatagcacaaattctgtgttcatgaaaattcattttaggataacttaattaaaaggactcaggatttgaatgatattagattagacagaaaaaagttcacctgagtgtaagacataagtaataaaaaccaaaggtagctaacttttttaggcttcttctttctttaaagagtatgcatatgaaataaaatttccatgtcaatgtccatttttccatggtacatagggcttctataatttcgtctatttcatcctgcagttattttcacgggtttctgtgtccaccactatctggaatctctgagatggtgaaaacgaaatcttattcttctttatatttcaaacaattcctagcacattatcaaaaatacctgataaaatttattgtgtctgtaatactggtaagcatgtamaagggtggtaaatatataggctttaagtttagatagatctaaatattattaaaattaccaaattattgtttttaaaaagtattagtttcctaggacaaatagagatttttcgataaggctggatttgtaatactttaagcaacaggtcacagtgcttaagtatttaatgccgatttggcaagcagctgatgttttacataatgctgtcgggtattttatatttgcgtgtattttctgatgcactggatccagcacttcatgtcacgtcatatatctgtttataatatatacaaatgtattttcatatatatttgatgtttgatggctttgaaactttaatcttgaaatagattttaaatttttattaaaactatttaaataattaccataaggaaagagctcttattagttgaaagaaaatgtagattcatgtttccttggagactagtctagtttccaaggatagacggcagtgaggagttgggtatctagatggaatttctgttggtttggattccagctctgctgcttaccagctttgtgacctcaggcaaacaacttaacctctccaagcctcaatttccccatctatataatggtgatatttataagtttcaccttatagggccatggtggggatcacatgaaatagtgtatgtgaagtgcttagcacagtgcctggcacatactcaatgctctatgc

SEQ ID NO: 91722 - DNA, 1205 bp, Homo sapiens
ttttatgttaaaactttaggttttatattgttttgtgttttaaaacataaaatctaaaatgtggtaatatccatgaggtgcagatagagtaatagcacaaattctgtgttcatgaaaattcattttaggataacttaattaaaaggactcaggatttgaatgatattagattagacagaaaaaagttcacctgagtgtaagacataagtaataaaaaccaaaggtagctaacttttttaggcttcttctttctttaaagagtatgcatatgaaataaaatttccatgtcaatgtccatttttccatggtacatagggcttctataatttcgtctatttcatcctgcagttattttcacgggtttctgtgtccaccactatctggaatctctgagatggtgaaaacgaaatcttattcttctttatatttcaaacaattcctagcacattatcaaaaatacctgataaaatttattgtgtctgtaatactggtaagcatgtaamagggtggtaaatatataggctttaagtttagatagatctaaatattattaaaattaccaaattattgtttttaaaaagtattagtttcctaggacaaatagagatttttcgataaggctggatttgtaatactttaagcaacaggtcacagtgcttaagtatttaatgccgatttggcaagcagctgatgttttacataatgctgtcgggtattttatatttgcgtgtattttctgatgcactggatccagcacttcatgtcacgtcatatatctgtttataatatatacaaatgtattttcatatatatttgatgtttgatggctttgaaactttaatcttgaaatagattttaaatttttattaaaactatttaaataattaccataaggaaagagctcttattagttgaaagaaaatgtagattcatgtttccttggagactagtctagtttccaaggatagacggcagtgaggagttgggtatctagatggaatttctgttggtttggattccagctctgctgcttaccagctttgtgacctcaggcaaacaacttaacctctccaagcctcaatttccccatctatataatggtgatatttataagtttcaccttatagggccatggtggggatcacatgaaatagtgtatgtgaagtgcttagcacagtgcctggcacatactcaatgctctatgc

SEQ ID NO: 91723 - DNA, 1205 bp, Homo sapiens
ttttatgttaaaactttaggttttatattgttttgtgttttaaaacataaaatctaaaatgtggtaatatccatgaggtgcagatagagtaatagcacaaattctgtgttcatgaaaattcattttaggataacttaattaaaaggactcaggatttgaatgatattagattagacagaaaaaagttcacctgagtgtaagacataagtaataaaaaccaaaggtagctaacttttttaggcttcttctttctttaaagagtatgcatatgaaataaaatttccatgtcaatgtccatttttccatggtacatagggcttctataatttcgtctatttcatcctgcagttattttcacgggtttctgtgtccaccactatctggaatctctgagatggtgaaaacgaaatcttattcttctttatatttcaaacaattcctagcacattatcaaaaatacctgataaaatttattgtgtctgtaatactggtaagcatgtaaaagggtggtaaatatataggctttaagtttagatagatctaaatattattaaaattaccaaattattgtttttaaaaagtattagtttcctaggacaaatagagatttttcgataaggctggatttgtaatactttaagcaacaggtcacagtgcttaagtatttaatgccgatttggcaagcagctgatgttttacataatgctgtcgggtattttatatttgcgtgtattttctgatgcactggatccagcacttcatgtcacgtcatatatctgtttataatatatacaaatgtattttcatatatatttgatgtttgatggctttgaaactttaatcttgaaatagattttaaatttttattaaaactatttaaataattaccataaggaaagagctcttattagttgaaagaaaatgtagattcatgtttccttggagactagtctagtttccaaggatagacggcagtgaggagttgggtatctagatggaatttctgttggtttggattccagctctgctgcttaccagctttgtgacctcargcaaacaacttaacctctccaagcctcaatttccccatctatataatggtgatatttataagtttcaccttatagggccatggtggggatcacatgaaatagtgtatgtgaagtgcttagcacagtgcctggcacatactcaatgctctatgc

SEQ ID NO: 91724 - DNA, 1601 bp, Homo sapiens
ttctagctcagcctttaggcacgcctctctgggacagggaggagaggtgttgcttggaggttactaaaccttacccacctgtgctacgcacaataatgttccccaaggaaccatgcgtcctaatccctagaacctgtgatatgtcaccttctatggcaaaagggactttgcagatgtgattaatttaaggatgtcgagatgaggagattatcttggattacctgggtgggcctaaaataatcacaagggtctttacaagaaggagataggcaggtcagagaaagcaatgcgatgatggaagcagaggtgggagtgacatggggctatgagacaaggaaccaggcaacttccagaagctggcaaaagcaaggaaatggattcttctccagagcctcaagaaggaatacagccctgctgacaccttgattttagcccagcgaaaatgatttcagacttctgtcccccagaactgtaagacaataactttctgttgctttgagttacaagtttgtggtaatttgttacagcagccacaggcactaatacatccatggatccaggctcaacatattctagttacattaaagtaaagatagagagatacaggttcagatcatcgtctgattcaggactatggaatttcaagggctcccatctctcctctttcaaatctacaaatggcttaataaaagagaagagcttccttttagaaataccacacttattcccatataaggtaagctttgctctttctccataatgcaccttttatcaaaagacatatgcgatagagcttgaaaaccacaaaaatataggataccttggttgcttctttcataatatagcttggagatgttttcacatctgtacacatgttatcctttcatacagtcactccacactctgtgtattttacctttagtataggtactaagtacatcagtaatacttctttagggtatataaattctaattatagcactccagagggaaccatgattatcaaaacctaaatatccacatgtattatttaattcatcttatttttcatttcattcattaactgtaaactattttccccccaaatttccaccttagtaatgttctgcacttttgttcttttctttatttattttcattagagacggggtctcactatgttggccagggtggtctccgactcctggcctccagcaatcctccttccagccttggccttccaaagtgctgggattacaagcatgagccaccatgtccaacccatgtttatttgaaatctatattattaaattagaacaacatggctatatgaaataacaggcttattttttctaacaaatataaacaggcataaggttttaagtgtgtacatactggcttttccatatmattttgaaactttctttacctttctgtatttgacaacttggaagtcaaattttaacttatctccaaagttctaatttaatgatttgatactaaagcaaaactgaatttcagtcctttgtgtaatttttagcctctagaacagttgactcagactgtatataagatcctgtaggggacatgaggttataatttgggaaagctacaaagaagat

SEQ ID NO: 91725 - DNA, 709 bp, Homo sapiens
aacacacacacactgctgtctacagcaacttcaccaatttgtggcttccccaaaggctgagcaggctctctctctaaggaggaccctggcggttctcggaagggagagagggaggagcagcagcwgagacttgttggagttccgccctgccccacctttaccccgcatgcctgcttcaacagacactcaccccggtgacttacacagcagaaacaagctcacggggactgtggataccatgcaaaagataaatttcaagcaccttaaagaaatctttttctctattatcccctttctctattcatcaaagcagctcccttaaaaacccatgttcagacaccttttttggccaatttgagaccctgtgtatctccaagagaaaaatcattcacattaaaaataataatttttttttgaggcagggtctcactctgctaccaaagtgggagtgcagtggtacgatcacggctccggctcgctgcagcctcaacctcctcccggacttaagcgatcctcccacctcagcctccagagtagctgggactacaggcacacaccaccagccccaggtaatttttttttttttgtagagacagggttttgctatgtttcccaggctggtagattgactctttaattcagatcttcccctacccagaactaccttcaccaaaggcagtaagttctggaaaggggtatggccagagga

SEQ ID NO: 91726 - DNA, 709 bp, Homo sapiens
aacacacacacactgctgtctacagcaacttcaccaatttgtggcttccccaaaggctgagcaggctctctctctaaggaggaccctggcggttctcggaagggagagagggaggagcagcagctgagacttgttggagttccgccctgccccacctttaccccgcatgcctgcttcaacagacactcaccccggtgacttacacagcagaaacaagctcacggggactgtggataccatgcaaaagataaatttcaagcaccttaaagaaatctttttctctattatcccctttctctattcatcaaagcagctcccttaaaaacccatgttcagacaccttttttggccaatttgagaccctgtgtatctccaagagaaaaatcattcacattaaaaataataatttttttttgaggcagggtctcactctgctaccaaagtgggagtgcagtggtacgatcacggctccggctcgctgcagcctcaacctcctcccggacttaagcgatcctcccacctcagcctccagagtagctgggactacaggcacacmccaccagccccaggtaatttttttttttttgtagagacagggttttgctatgtttcccaggctggtagattgactctttaattcagatcttcccctacccagaactaccttcaccaaaggcagtaagttctggaaaggggtatggccagagga

SEQ ID NO: 91727 - DNA, 679 bp, Homo sapiens
agggctgagccctagaagttcagtcaggggtgatgttgctttggggccgtgacggaagggtatggaagtgggaggggtctgcccagttacctggggctctggaggaaatgtggggtggaggtgcacccctcacacaagcaaagggaacaggtgtggggaatgctgccttgtgccaggcactgagccctcacagccactctgtggggaggggttcctgcccatttacagacagggaaagagagtggggcaacttgcctgagccatcctacagaagggagcagtggccaagattctaatcctgcttcatccctgggttggggggactatccctgggagaggccagcactgtaccccaagaccctgagtgggtgtgaagagaggaagaaaggcccccacagagagcattccactcgccagttactgaacctggcagggactgrggtggtggcctttacaccttaacgggaaccagttcatctgattccatgctgcccaacaggcttaagtgcagggctggggaaatggaatttacagggatggccttctgatgtatttggaagtccccagggcaggaaagaggagggggtacagaggctggcttgttcccttcacttccatcctcctcactcacactgcccaagccagctgccacttgccaggatgaggcagaagattccag

SEQ ID NO: 91728 - DNA, 582 bp, Homo sapiens
ccaaagaatccaaagaccatcatctcagaataaaaaagaggcatcaaaatgggttactgaagtgaaatggatgttatgggaaactcgctgcaatgcccttacagtcctcatttcaccgcaggccagggagagatcgtggcaggagcccagcactggccctcagatggcggcatcctctctcctgtgtcagcccttccaaacttcccagctcctctccacctgccctctgccttcccccatcctgcacctgccggcctccttcaaaattccccaggaagcrgactggcctccctgctccctcttcccactttcttctccctgcaccataccagtctagcttgagggttgttaagagttcttttcctaaatcacagctctggtaagtatagtgagggttaaacatcctggactctgccactcagtagctgggtgatgctcagcaagtcacttaaccagtctgagcctcagttttctcatctagaaagtggagctgataacaccacctgggagaatgatgatttaaggcaggatgcatgtaaaggacttagaagaacccctggtgctgtgtaagtgctcaagaca

SEQ ID NO: 91729 - DNA, 1809 bp, Homo sapiens
tcagtagaaaagaagttgctgttctgttgttggagccatggttgaatctgggcatgacaagtaccacaaagaacagtgaatcagtaaattattgatgcgggaagactgggcccactggttcaagtgctttttccttccagggaaagcaaagtgatagctaagcagtgaaaacacattgaactgttgaccccagaaggaagtgccgggaaatcacaccatccttttcttcccatcctttttgttttgttttgtttttttagacagggtctcactctgttgcctaggctggagtgtagtagtgtaattataactcactgcaaccttgaactcctgggctcaaaggattgtcttggcctccccagtagctagggctacagttgtgtgccaccatgcccagttcaaagtaggtactgaaacactttagagatgatgaaactgatgcacagagaagatcatacagctactaagcgcttgaatccagggaatctgattatagaacttgcatttttctgtaatgggtgagaaaatctggattatcttttaaaaaatcaaacaagactaccacttaaggtcaaataaatgcatatgagcaccttagggatttctgcacctaacacttcctttacagcccatagttccagcttttacccacggtttacactctgggtgacattaaggaacttctcaaggattccatcctacatgatggaagaacaggaagaataaacagcattccatgggcacagcaaatccacctgtcagtcaccacccattcttcaccagcaaggtgaggctacctctaggatttgtgtctgggcctggagacttcatgtccacctttctgcccctggattttcttctacggaaatgagaatattctggaacacatagactttggagtcagtgggacctagtttggaatcctgactcagttatttgcctttataaacttggggaagtccataaagatttggagtctcagcttcctcaactgtagagcagaggtgatcctgaattcttctggaattgcaaagattaagttgagtcatgtttgcaaaatgcttagcacagtgcttggaacacagtaaccctcacctcactgccaccattcatctacatgctccacatgtagactgatgtgtagattactcatattagtaattaagctgctgtaatttattaacttacttaaccctcatactatataatgagacacgggctgtctttatccttattttgtacataaagaagtggaggcacagttaagcaacttgttcacccagttaataagtggcaatgtcaagactcaaacccaggcagtttatctccaaaatctatatctttaactgccaaaacgtgcttgataaatgatagctattgaacagttgtccttaactgggccaagtttgccctcttctgcctgcaggacatttggcagtgtctgggtatattttggttgttaggagtgagggagggatgctatggacgtctagaggggaacggccatggatgctgctaaacaccctatgatgcacaggacagcctcccacaatgaagaattactaggtccaaaatgttcatagtgtcaaggtggtggaccctgctacagagtgaaaggggatgatgcaacctagttgtgaaattaattgctaattaactgctaatgcaacttcattgcttcaggtattaaaaggagcttataatcaggcaggttgcaggctttgcacccacaraagctgcccctgtgctactggaaatgcatgcaatgtctggtaaaaggcttaagcccaaagagttggatcccagctc

SEQ ID NO: 91730 - DNA, 673 bp, Homo sapiens
aggtgggggagaaaaggatgaggggtaacaggtataaaatatacacggagtgaaaaagaacctttaaccatagcatgctggcctctgcaatagataacctgtaaggaaaagacaaggatggagagggaaccaatgatatagagaaaagaagacctttcaaattaaaaggaaatgrgcaagaccaagcggtagtgtctaaggattcatacgtgagcgataagatgtcaaagaaacacacaaaaagatattataaaagtcccgggctgggcatggtggctcacgcctgtaatcctagcactttgggaggctgaggcaggccgatcaactgaggtcgggagttcgagaccagccatgatcaacatggagaaaccccgtctctaataaaaagacaaaattagccagtcgtggtggtggtggtgcgtgcctgtaatcccagctacttgggaggctgaggcaggagaatcgcttgagccctggaggcggaggttgcagtgagctgagatcatgccattgcactccagtctgggcaacaagagcaaaactccatctcaaaacaacaacaacaacaaaaaaagtcccagtagtgataattttttgaaggagagagggatagtgtctgggatggggcataaaacacggatatctggggtggctgcacaattttgtttcttga

SEQ ID NO: 91731 - DNA, 778 bp, Homo sapiens
aggatcctatacaaattaattaacatatgcccacccctaattcactttactaccaagttgctaccccatcttttggtggggtttttttttttaatgcttttcctatattgggaaggcaaaaataaacccaggaggaagcaaatattttcattaaaatgataataaaatgtcatccctatgaatataaaggtttaaccgagtaccctgctgagcaaatgagctttatcayaagcatgtggaacagtgtgctgggctgaaatggatttcagaaaaatttatattagagccttattcacagaattaaacaaacacaatgaaaacaaagtagttttttaaagcagcttcctgccatgaaggcaatacgacggcacagaaatggctgccctcaaaggggcaactccagcccgagggcgcacctaactccttgccttcaaggatgccaaaagcatcccatccaagccaggttctacgtggcaggaagagaacattgacactcagataaacaaacactgtttgcctagcccctactcacgaaactttataccataagccatctttaattctggctgcaattttaaatggtccagagacttaaaaattacttccatttgtttagatctggaaagagccttggaagacatctaaacccaccatttaagaatacttttaagctacacaacccttttgccaattcaatctaatggatacagaatggatcaatattaaaatggagctccttgggtagggactgtggtaaaagacccagaactccatctac

SEQ ID NO: 91732 - DNA, 778 bp, Homo sapiens
aggatcctatacaaattaattaacatatgcccacccctaattcactttactaccaagttgctaccccatcttttggtggggtttttttttttaatgcttttcctatattgggaaggcaaaaataaacccaggaggaagcaaatattttcattaaaatgataataaaatgtcatccctatgaatataaaggtttaaccgagtaccctgctgagcaaatgagctttatcataagcatgtggaacagtgtgctgggctgaaatggatttcagaaaaatttatattagagccttattcacagaattaaacaaacacaatgaaaacaaagtagttttttaaagyagcttcctgccatgaaggcaatacgacggcacagaaatggctgccctcaaaggggcaactccagcccgagggcgcacctaactccttgccttcaaggatgccaaaagcatcccatccaagccaggttctacgtggcaggaagagaacattgacactcagataaacaaacactgtttgcctagcccctactcacgaaactttataccataagccatctttaattctggctgcaattttaaatggtccagagacttaaaaattacttccatttgtttagatctggaaagagccttggaagacatctaaacccaccatttaagaatacttttaagctacacaacccttttgccaattcaatctaatggatacagaatggatcaatattaaaatggagctccttgggtagggactgtggtaaaagacccagaactccatctac

SEQ ID NO: 91733 - DNA, 778 bp, Homo sapiens
aggatcctatacaaattaattaacatatgcccacccctaattcactttactaccaagttgctaccccatcttttggtggggtttttttttttaatgcttttcctatattgggaaggcaaaaataaacccaggaggaagcaaatattttcattaaaatgataataaaatgtcatccctatgaatataaaggtttaaccgagtaccctgctgagcaaatgagctttatcataagcatgtggaacagtgtgctgggctgaaatggatttcagaaaaatttatattagagccttattcacagaattaaacaaacacaatgaaaacaaagtagttttttaaagcagcttcctgccatgaaggcaataygacggcacagaaatggctgccctcaaaggggcaactccagcccgagggcgcacctaactccttgccttcaaggatgccaaaagcatcccatccaagccaggttctacgtggcaggaagagaacattgacactcagataaacaaacactgtttgcctagcccctactcacgaaactttataccataagccatctttaattctggctgcaattttaaatggtccagagacttaaaaattacttccatttgtttagatctggaaagagccttggaagacatctaaacccaccatttaagaatacttttaagctacacaacccttttgccaattcaatctaatggatacagaatggatcaatattaaaatggagctccttgggtagggactgtggtaaaagacccagaactccatctac

SEQ ID NO: 91734 - DNA, 778 bp, Homo sapiens
aggatcctatacaaattaattaacatatgcccacccctaattcactttactaccaagttgctaccccatcttttggtggggtttttttttttaatgcttttcctatattgggaaggcaaaaataaacccaggaggaagcaaatattttcattaaaatgataataaaatgtcatccctatgaatataaaggtttaaccgagtaccctgctgagcaaatgagctttatcataagcatgtggaacagtgtgctgggctgaaatggatttcagaaaaatttatattagagccttattcacagaattaaacaaacacaatgaaaacaaagtagttttttaaagcagcttcctgccatgaaggcaatacgacrgcacagaaatggctgccctcaaaggggcaactccagcccgagggcgcacctaactccttgccttcaaggatgccaaaagcatcccatccaagccaggttctacgtggcaggaagagaacattgacactcagataaacaaacactgtttgcctagcccctactcacgaaactttataccataagccatctttaattctggctgcaattttaaatggtccagagacttaaaaattacttccatttgtttagatctggaaagagccttggaagacatctaaacccaccatttaagaatacttttaagctacacaacccttttgccaattcaatctaatggatacagaatggatcaatattaaaatggagctccttgggtagggactgtggtaaaagacccagaactccatctac

SEQ ID NO: 91735 - DNA, 782 bp, Homo sapiens
gacagggccatgtgaatcccaaagagccttcctttgcagtattattattaaccttggtcaggtcatgttccttttttttttttcatctgtaagaggagggatattaatcactaaggttgcctccaactttggtattttgtggttttgtgttcggggtgtaggaaaaccaaacccaggatttctaaatggcaggttgggtacttctaggcaaccttactcttctaagtggaacaatcacgttcctcacatcccatcactcacacaagaaatctaacatctattataattatagtggttccaatggccagcaagttcaagtgttagagaaaagaaaactggattgtctaccagaggtgagtggatatcccatttcacaggcaacctgttagatgttggggtggtagcattctgacacttttgctctgggttaagccagacayacaaggaatgcaggacattgtgacctttgagggatcttctagccctgtgatctcatgtgactgcttcactgataagtatcacttgaaactgatgtcaggtatgaccagcccagggcccttgcaggcttcctgcctctctgcagggtctctacacaggggactctcaagcactagacaatgtcaacaggggcagtcataacttgagggggcaactggagcgtggtcctgtagcatttgtgtgctagctgaatgctctcccagtccctccagagcagggctgaccccattccaagggaagctagtctcctggagagtgtaggagctgcagctgagaatgatgga

SEQ ID NO: 91736 - DNA, 782 bp, Homo sapiens
gacagggccatgtgaatcccaaagagccttcctttgcagtattattattaaccttggtcaggtcatgttccttttttttttttcatctgtaagaggagggatattaatcactaaggttgcctccaactttggtattttgtggttttgtgttcggggtgtaggaaaaccaaacccaggatttctaaatggcaggttgggtacttctaggcaaccttactcttctaagtggaacaatcacgttcctcacatcccatcactcacacaagaaatctaacatctattataattatagtggttccaatggccagcaagttcaagtgttagagaaaagaaaactggattgtctaccagaggtgagtggatatcccatttcacaggcaacctgttagatgttggggtggtagcattctgacacttttgctctgggttaagccagacatacaaggaatgcaggacattgtgacctttgagggatcttctagccctgtgatctcatgtgactgcttcactgataagtatcacttgaaactgatgtcaggtatgaccagcccagggcccttgcaggcttcctgcctctctgcagggtctctacacaggggactctcaagcactagamaatgtcaacaggggcagtcataacttgagggggcaactggagcgtggtcctgtagcatttgtgtgctagctgaatgctctcccagtccctccagagcagggctgaccccattccaagggaagctagtctcctggagagtgtaggagctgcagctgagaatgatgga

SEQ ID NO: 91737 - DNA, 782 bp, Homo sapiens
gacagggccatgtgaatcccaaagagccttcctttgcagtattattattaaccttggtcaggtcatgttccttttttttttttcatctgtaagaggagggatattaatcactaaggttgcctccaactttggtattttgtggttttgtgttcggggtgtaggaaaaccaaacccaggatttctaaatggcaggttgggtacttctaggcaaccttactcttctaagtggaacaatcacgttcctcacatcccatcactcacacaagaaatctaacatctattataattatagtggttccaatggccagcaagttcaagtgttagagaaaagaaaactggattgtctaccagaggtgagtggatatcccatttcacaggcaacctgttagatgttggggtggtagcattctgacacttttgctctgggttaagccagacatacaaggaatgcaggacattgtgacctttgagggatcttctagccctgtgatctcatgtgactgcttcactgataagtatcacttgaaactgatgtcaggtatgaccagcccagggcccttgcaggcttcctgcctctctgcagggtctctacacaggggactctcaagcactagacaatgtcaacaggggcagtcataacttgagggggcaactggagcgtggtcctgtagcatttgtgtgctagctgaatgctctcccagtccctccagagcagggctgaccccattccaagggaagctagtctcctggagagygtaggagctgcagctgagaatgatgga

SEQ ID NO: 91738 - DNA, 1197 bp, Homo sapiens
gctggttttactcttagggtgacacctgttttcacatagtagatttactttctgtgatctgtatatcaatgacaatgtttgttttttagtcagttatggctactgaaattgtttcaggaagaaaggaggaagacattctctccttaactaccacctacctcctcaggagtataaaggcagtggcactcctggaatctggaataataatccctcttttttctttcattctttatgactatgatcaggaatttctggctcagtcaaatggaagagcccaatctctgtgggccatagctttattgcacaattaggaatgtttcctgaactaatttgaaactgaaacctggtaattttgtggaaattcaaggagcccaaaatctgttagaataaattaacattttggttttccatattgctttggaatgagtcattctgtagaaattagttttctaggtcgctatttcattacacagtgccctccttataagakcccaagggagaaatttctctctgatctcagaatgggaaatgcacgctgctttctagtacttagaatggtttggtggtgactcttattacagataatgaggatcatggacataagggcattgccttctttgcatttcctgctggacagcttagcaccaaaccagagacccatttatagctgactgacaggcctttttggtgtgaattttagatgttaaccttgtgctagctttgccttatctttcttatttctatatacaatctgttctgcttcctcattcaaatatttttatatttatatttttctacttaagatacttattaagcagccttaaatatccttggaacctcaaagagaataaataaattaaatatataaatactaacttcacaatcatctattttggtggaacccttactttttgaattcagatactaaagctgagttaatcacccttctcaatggtttatttcataatctttggtccaacaagatctctatcattttatttattttccctttatcccactcgaacccctctgctgccccaaggcaatcattcaaactatgtccttttgttagtaagtgttcttataaagcatatagttttatataaacatggaccttaactatatgcaaatgtcattgttatctacctcaacctgtttcttttttcatccagctttctgctgaatagtgtgaatcga

SEQ ID NO: 91739 - DNA, 1197 bp, Homo sapiens
gctggttttactcttagggtgacacctgttttcacatagtagatttactttctgtgatctgtatatcaatgacaatgtttgttttttagtcagttatggctactgaaattgtttcaggaagaaaggaggaagacattctctccttaactaccacctacctcctcaggagtataaaggcagtggcactcctggaatctggaataataatccctcttttttctttcattctttatgactatgatcaggaatttctggctcagtcaaatggaagagcccaatctctgtgggccatagctttattgcacaattaggaatgtttcctgaactaatttgaaactgaaacctggtaattttgtggaaattcaaggagcccaaaatctgttagaataaattaacattttggttttccatattgctttggaatgagtcattctgtagaaattagttttctaggtcgctatttcattacacagtgccctccttataagatcccaagggagaaatttctctctgatctcagaatgggaaatgcacgctgctttctagtacttagaatggtttggtggtgactcttattacagataatgaggatcatggacataagggcattgccttctttgcatttcctgctggacagcttagcaccaaaccwgagacccatttatagctgactgacaggcctttttggtgtgaattttagatgttaaccttgtgctagctttgccttatctttcttatttctatatacaatctgttctgcttcctcattcaaatatttttatatttatatttttctacttaagatacttattaagcagccttaaatatccttggaacctcaaagagaataaataaattaaatatataaatactaacttcacaatcatctattttggtggaacccttactttttgaattcagatactaaagctgagttaatcacccttctcaatggtttatttcataatctttggtccaacaagatctctatcattttatttattttccctttatcccactcgaacccctctgctgccccaaggcaatcattcaaactatgtccttttgttagtaagtgttcttataaagcatatagttttatataaacatggaccttaactatatgcaaatgtcattgttatctacctcaacctgtttcttttttcatccagctttctgctgaatagtgtgaatcga

SEQ ID NO: 91740 - DNA, 1197 bp, Homo sapiens
gctggttttactcttagggtgacacctgttttcacatagtagatttactttctgtgatctgtatatcaatgacaatgtttgttttttagtcagttatggctactgaaattgtttcaggaagaaaggaggaagacattctctccttaactaccacctacctcctcaggagtataaaggcagtggcactcctggaatctggaataataatccctcttttttctttcattctttatgactatgatcaggaatttctggctcagtcaaatggaagagcccaatctctgtgggccatagctttattgcacaattaggaatgtttcctgaactaatttgaaactgaaacctggtaattttgtggaaattcaaggagcccaaaatctgttagaataaattaacattttggttttccatattgctttggaatgagtcattctgtagaaattagttttctaggtcgctatttcattacacagtgccctccttataagatcccaagggagaaatttctctctgatctcagaatgggaaatgcacgctgctttctagtacttagaatggtttggtggtgactcttattacagataatgaggatcatggacataagggcattgccttctttgcatttcctgctggacagcttagcaccaaaccagagacccatttatagctgactgacaggcctttttggtgtgaattttagatgttaaccttgtgctagctttgccttatctttcttatttctatatacaatctgttctgcttcctcattcaaatatttttatatttatatttttctacttaagatacttattaagcagccttaaatatccttggaacctcaaagagaataaataaattaaatatataaatacyaacttcacaatcatctattttggtggaacccttactttttgaattcagatactaaagctgagttaatcacccttctcaatggtttatttcataatctttggtccaacaagatctctatcattttatttattttccctttatcccactcgaacccctctgctgccccaaggcaatcattcaaactatgtccttttgttagtaagtgttcttataaagcatatagttttatataaacatggaccttaactatatgcaaatgtcattgttatctacctcaacctgtttcttttttcatccagctttctgctgaatagtgtgaatcga

SEQ ID NO: 91741 - DNA, 718 bp, Homo sapiens
caactatgacgtttcaatgagtaaaagcactgagtattttcatgagattctatatagtttggtttcaaggaagcatgaaggtgctaaaaggaggacaataaattcggtctagaaagcaggttgaggtcaggttgtgaaaagcaccatatatgatttatggtgcttttgtgaccatacccaaaggagtttggatttcattttctccatggaaaagtcagtttttaaatttccatattgcctacaggactaggttttccaaagactattcctggcatgctagttttataggatgttagtaagagttataccaaaacacctatgcaggttttagttgaaaggggaaggatgattgtctggcatggacagtatgatacagtggttatgagaaataacatttatagagaatttttttctgaaacatgcacagtccatccagctcttagatagygtaagttaagccaaactcaactgcatacttaaacccaatagtctgcctcttcctagaatggattttaccattctactcttccacaagatgagaatggcctatgttgagaattgtaagaagaaatggtttgattcaacatttgtgagtgctatcttcaaatagctggttcgtctttatcttagtgtgtaggtgctgtagttgattgtgtatctgtttttgccacaaacactaggaatcttagagccaaatttgtgtctccctaccaacaga

SEQ ID NO: 91742 - DNA, 718 bp, Homo sapiens
caactatgacgtttcaatgagtaaaagcactgagtattttcatgagattctatatagtttggtttcaaggaagcatgaaggtgctaaaaggaggacaataaattcggtctagaaagcaggttgaggtcaggttgtgaaaagcaccatatatgatttatggtgcttttgtgaccatacccaaaggagtttggatttcattttctccatggaaaagtcagtttttaaatttccatattgcctacaggactaggttttccaaagactattcctggcatgctagttttataggatgttagtaagagttataccaaaacacctatgcaggttttagttgaaaggggaaggatgattgtctggcatggacagtatgatacagtggttatgagaaataacatttatagagaatttttttctgaaacatgcacagtccatccagctcttagatagcgtaagttaagccaaactcaactgcatacttaaacccaatagtctgcctcttcctagaatggattttaccattctactcttccacaagatgagaatggcctatgttgagaattgtaagaagaaatggtttgattcaacatttgtgagtgctatcttcaaatagctggttcgtctttatcttagtgtgtaggtgctgtagttgattgtgtatctgtttttgccacaaacactaggaatcttagarccaaatttgtgtctccctaccaacaga

SEQ ID NO: 91743 - DNA, 668 bp, Homo sapiens
ttccgaaaggccaccacccagcctgctttgaatgcacacagcacagaaaacgcctcggtccgccaggcgtggtggctcatgcctataatcccagcactttgggaggccaaggtgggcggatcacgagatcaggagatcaagaccatcctggctaacatggtgaaacctcatctctactaaaaatacaaaaattagctgggtgtggtggcacgcacctgtaatcccagctactcgggaggctgaggcaggagaatcgcttgaacccgggaggcggagcttgcagtgagccgagatcaagccactacactccagcctgggcgacagagcaagactccatctccagaaaaaaaaaagaaaagaaaaaaaaaagaaaacaccttggtcttcttgttccaagtgtgtcctgataagaaggaggcgtgaagggagaagcctggtggacagagaatatctaaactgactctcagagcaacattcaaggtcccggccatcgtcatgcccactttacaggtgaggaagctgaggctcagagaggtgggaagagctggagagctgctgaggcagctgcggtgtgggcctgcctgcggacattaagacaatgggacagcaaggggacaaagccggracagtcagccctcgctgcttccctgggtccagagccatccgtg

SEQ ID NO: 91744 - DNA, 637 bp, Homo sapiens
atgcggccacaacccaaggagtgtctggggccacccggagctggaagcggcaggaagatcctcgcccagagcctcccgagggggtgtggccctgtgacacctggattctactgggccccagaactgaaagggaatcaactcctgttgctttaggccactcagtctgtagtatttggccacgcagccccaagacactcctccaccagccacaggaagttggggaggcaggcagttagggtgtggctgagctgtgagacctggtttcaaatcttggctctgcaacttactcactgtgctggtgggcaaattacttcacctacctgaccttcagtttgtacatcttaaaatgagagcagcactagaatcttctgggggtcagggtgatcatatcagatgacaggtaggtggggggttcactgttcccaggccctctccacagagcttccatccacctcccatggtgtcaggtaggkagtggcgggggttgcttttcccaggccctactccacaaaggttccatccacaccccacggcctcaggtaggtggggaggaggcacctttcccaggccccctccacagagcttccatccacgccccatggtgtcacctgtacctaacagcaccaaaggctcccag

SEQ ID NO: 91745 - DNA, 491 bp, Homo sapiens
tataagacaatttaacaattcaaatactaagaagtttgatgctgttgactaaagtcaggtggtaaaagaaaagagaaggaggccaggtgtggtggctcatgcctgtaatcccagcactttgggagacgaggcagatggatcaccaggtcaggagattgagaccatcctggctaacatggtgaaaacccgtctctactaaaaatacaaaaaattagccaggcgtggtggtgggcacctgtggtcccagctgctggggaggctgaggcaggagaatggcrtgaacccgggaggcggagcttgtagtgagccgagatggtgccagtgcactccagcctgggcgacagagcaagactctgtctcaaaaaaaaaaaaaaaagaaaaaaaagaaaagaaaagaggaggaaatatgctaattttattcttgatcccagtaagctactaatactgtctaaagaaatagaaggcataaaaatatacgtttatttaaattt

SEQ ID NO: 91746 - DNA, 1842 bp, Homo sapiens
  misc_feature (1)...(1842): n = A,T,C or G
tctgactggcaattggttggaagagttactatctatagagaggaatgtctgggttatctgggctatgataacaggttgcagagaccaaagtttgatctcgcagatgaggcctccttttatggattcagaatgggagtgcatgcagattggtttgtgagtttgcaaaaaggtgtcagagggaatagatcctaaacactttttttttttttttttgagatggaatttcactcttgttgccaggctagagtgcaatggtgcaatctcagctcactgcaacctccgcctcccgggttcaaacagttctcctgcctcagcttcccaagtagctgggattacaggtgcacaccaccacgcccagttaatttttgtattttttaagtagagaaggtgtttcaccatgttggccgggctggactcaaactcctgacctcaggtgatccgtccacctcagcctcccaacgtgctgggataacatgggtgagccaccgtgcccggcctcctaaatgctttttatctgacttaaggtctgtattgattgtgctggagggtgtaatgaggcaaaagcccaaccactacttcccgtccagggtcaaggcctgaaccagtctttcaggttaaattttagagtgtcctggccaagaaggcagtccattcagatggttggggggccttagaattttatttttggtttacaaatgaaacgtggagagaaaaaccctcaaacatttgaacggtgcatcggagttggagcagnnnnnnnnnnnnnnnnnnnnnnnnnnnnnnnnnnnnnnnnnnnnnnnnnnnnnnnnnnnnnnnnnnnnnnnnnnnnnnnnnnnnnnnnnnnnnnnnnnnntcacaccanaagatgaagagaaccaggctggagtttgaggtcctggcctccatccagtccctcacatcctgttggggttcactgctgggcccacacactatcttttgaggtgtccctgggctccaggatcaagcctatgagtcagaggtctgggttctcaattctctcctcatacacacctgcatgtgcagagtgcagtttgcagagcatgtttgtgtgtgctctttcactgtagccccctagacccctagatcagctcctgagcaacactcatcagggagcatcagccatggctctcaggggagaggctccccttcccaggatcccacaggcagtaaacagtggggctgagaactaaacagactctcttcccccaagggcagggctctttcaccgaccatgaagtggcacagagggaagaacatggagccacgaaaatgtggatttgattctcgtcctcaccaaccaccagctgggtaaccttggacaagccactcttcacaaagtgtgatatagtttatctgtgtccccacccaaatctcattttgaattgtagctcccataattcccatgtgttgtgggagagacccagtgggagatcattgaatcatgggggtgggttttttccatgctgttctcatgatagtgaataagtctcacaagatctgatggttttataaagggcagttcccctgcacasgctctcttgcctgccgccatgtaagatgtgcctctgcttctcctttgcctttggcaatgattgtgaggcttccccaaccatgtggaactatgtgtccattaaacctctttttctttataaattactcagtctcaggtatgtcttattagcagcatgagaacagactaatacaaagtgtaaagaatgatgctgacttgcagggtccttggaaggacaggtgtgagtgcaaggacaacatcagcaccttctggggtcttaatcattgtcaacagtgttacagaatcctgag

SEQ ID NO: 91747 - DNA, 1351 bp, Homo sapiens
tcagagctgaatgcccagtggccctcagcagtggggctccaggctgctgcagctgaacaggctctcagaaagcatttctcctccctccaactcccagaagccaaacatctgtgtggcctcggctccagggtttccagaggcctaagcctgggtctccacccctgaataaagcaggtttctgactcctctgagcgtgctcagctctgaccagctccagcttacaggggcttctcgctgcccgccagctccttggctcatgcytcagaccctccctggggccacagctgagcccccatgccctcccgttagcaggaattgtctcacagtgcaccagcctcagacaaggccacactgggacagtgaagggagggacagaactcagccagcccagaatgtcatctgagcacaggcaaaagccaggtctctgggcccatcagaaaagcttcaaacccccctctcctggctggtctgagccctgctgcctctttacgggtcacggctgcagcctcaccctcgtcccctctccctgcagataaggtttattgagatgcttggccacggggtcagcctgcatcctgacagtaccaacccagagcaaaccccactttctcaaatgcccccaaaagtcactcaacacaagccacatcctattacaagccctttctaaccccctcttggagaggccctgtgggtccccagggtatgcgtagcctgttgctgccatgagcgataaaccgacttgttctggcacaggttgtccctggtggtccttggcgagaggacatgggcagcaccttctcacacgagcccttgctggcgtctcttccaggaatgccccaaacgctccctgggtgccccttccttcacccagactcacggctgattcttccctctcctgcaaacctccacaaggatggccctcctccaggaagccttcccaagcctccagactggcttcactgtccacatctgtgcccgcccccacgcccctctggtctccccagtgcttggggctggcccccacaacatgaaacacacaaggaaagttggggagtggcctagtcttcagcctgtcctgaccccaaaagccagcttcatcagcatatgagtctgtccaccccactgagccccctgcctggatggcagcagaaacaaagaaaaggtggaatgaaagcatttgatgtgtgtgcatccctgcccccaacactgtgaggatgctgaggagggcaagggatggagctgagttcccggacaatcctcttggggggccagaggcctcttgagaggcagacaccagacaccctgcagcaagtacgtccacatggaaagctccagaaagaagagaggttcc

SEQ ID NO: 91748 - DNA, 1351 bp, Homo sapiens
tcagagctgaatgcccagtggccctcagcagtggggctccaggctgctgcagctgaacaggctctcagaaagcatttctcctccctccaactcccagaagccaaacatctgtgtggcctcggctccagggtttccagaggcctaagcctgggtctccacccctgaataaagcaggtttctgactcctctgagcgtgctcagctctgaccagctccagcttacaggggcttctcgctgcccgccagctccttggctcatgcctcagaccctccctggggccacagctgagcccccatgccctcccgttagcaggaattgtctcacagtgcaccagcctcagacaaggccacactgggacagtgaagggagggacagaactcagccagcccagaatgtcatctgagcacaggcaaaagccaggtctctgggcccatcagaaaagcttcaaacccccctctcctggctggtctgagccctgctgcctctttacgggtcacggctgcagcctcaccctcgtcccctctccctgcagataaggtttattgagatgcttggccacggggtcagcctgcatcctgacagtaccaacccagagcaaaccccactttctcaaatgcccccaaaagtcactcaacacaagccacatcctattacaagccctttctaaccccctcttggagaggccctgtgggtccccagggtatgcgtagcctgttgctgccatgagcgataaaccgacttgttctggcacaggttgtccctggtggtccttggcgagaggacatgggcagcaccttctcacacgagcccttgctggcgtctcttccaggaatgccccaaacgctccctgggtgccccttccttcacccagactcacggctgattcttccctctcctgcaaacctccacaaggatggccctcctccaggaagccttcccaagcctccagactggcttcactgtccacatctgtgcccgcccccacgcccctctggtctccccagtgcttggggctggcccccacaacatgaaacacacaaggaaagttggggagtggcctagtcttcagcctgtcctgaccccaaaagccagcttcatcagcatatgagtctgtccaccccactgagccccctgcctggatggcagcagaaacaaagaaarggtggaatgaaagcatttgatgtgtgtgcatccctgcccccaacactgtgaggatgctgaggagggcaagggatggagctgagttcccggacaatcctcttggggggccagaggcctcttgagaggcagacaccagacaccctgcagcaagtacgtccacatggaaagctccagaaagaagagaggttcc

SEQ ID NO: 91749 - DNA, 1351 bp, Homo sapiens
tcagagctgaatgcccagtggccctcagcagtggggctccaggctgctgcagctgaacaggctctcagaaagcatttctcctccctccaactcccagaagccaaacatctgtgtggcctcggctccagggtttccagaggcctaagcctgggtctccacccctgaataaagcaggtttctgactcctctgagcgtgctcagctctgaccagctccagcttacaggggcttctcgctgcccgccagctccttggctcatgcctcagaccctccctggggccacagctgagcccccatgccctcccgttagcaggaattgtctcacagtgcaccagcctcagacaaggccacactgggacagtgaagggagggacagaactcagccagcccagaatgtcatctgagcacaggcaaaagccaggtctctgggcccatcagaaaagcttcaaacccccctctcctggctggtctgagccctgctgcctctttacgggtcacggctgcagcctcaccctcgtcccctctccctgcagataaggtttattgagatgcttggccacggggtcagcctgcatcctgacagtaccaacccagagcaaaccccactttctcaaatgcccccaaaagtcactcaacacaagccacatcctattacaagccctttctaaccccctcttggagaggccctgtgggtccccagggtatgcgtagcctgttgctgccatgagcgataaaccgacttgttctggcacaggttgtccctggtggtccttggcgagaggacatgggcagcaccttctcacacgagcccttgctggcgtctcttccaggaatgccccaaacgctccctgggtgccccttccttcacccagactcacggctgattcttccctctcctgcaaacctccacaaggatggccctcctccaggaagccttcccaagcctccagactggcttcactgtccacatctgtgcccgcccccacgcccctctggtctccccagtgcttggggctggcccccacaacatgaaacacacaaggaaagttggggagtggcctagtcttcagcctgtcctgaccccaaaagccagcttcatcagcatatgagtctgtccaccccactgagccccctgcctggatggcagcagaaacaaagaaaaggtggaatgaaagcatttgatgtgtgtgcatccctgcccccaacactgtgaggatgctgaggagggcaagggatggagctgagttcccggrcaatcctcttggggggccagaggcctcttgagaggcagacaccagacaccctgcagcaagtacgtccacatggaaagctccagaaagaagagaggttcc

SEQ ID NO: 91750 - DNA, 1351 bp, Homo sapiens
tcagagctgaatgcccagtggccctcagcagtggggctccaggctgctgcagctgaacaggctctcagaaagcatttctcctccctccaactcccagaagccaaacatctgtgtggcctcggctccagggtttccagaggcctaagcctgggtctccacccctgaataaagcaggtttctgactcctctgagcgtgctcagctctgaccagctccagcttacaggggcttctcgctgcccgccagctccttggctcatgcctcagaccctccctggggccacagctgagcccccatgccctcccgttagcaggaattgtctcacagtgcaccagcctcagacaaggccacactgggacagtgaagggagggacagaactcagccagcccagaatgtcatctgagcacaggcaaaagccaggtctctgggcccatcagaaaagcttcaaacccccctctcctggctggtctgagccctgctgcctctttacgggtcacggctgcagcctcaccctcgtcccctctccctgcagataaggtttattgagatgcttggccacggggtcagcctgcatcctgacagtaccaacccagagcaaaccccactttctcaaatgcccccaaaagtcactcaacacaagccacatcctattacaagccctttctaaccccctcttggagaggccctgtgggtccccagggtatgcgtagcctgttgctgccatgagcgataaaccgacttgttctggcacaggttgtccctggtggtccttggcgagaggacatgggcagcaccttctcacacgagcccttgctggcgtctcttccaggaatgccccaaacgctccctgggtgccccttccttcacccagactcacggctgattcttccctctcctgcaaacctccacaaggatggccctcctccaggaagccttcccaagcctccagactggcttcactgtccacatctgtgcccgcccccacgcccctctggtctccccagtgcttggggctggcccccacaacatgaaacacacaaggaaagttggggagtggcctagtcttcagcctgtcctgaccccaaaagccagcttcatcagcatatgagtctgtccaccccactgagccccctgcctggatggcagcagaaacaaagaaaaggtggaatgaaagcatttgatgtgtgtgcatccctgcccccaacactgtgaggatgctgaggagggcaagggatggagctgagttcccggacaatcctcttggggggccagaggcctcttgagaggcagacaccagacaccctrcagcaagtacgtccacatggaaagctccagaaagaagagaggttcc

SEQ ID NO: 91751 - DNA, 1154 bp, Homo sapiens
actttccttttaatggataagatttgataaaaagcttaaaagaaagtacttttacactgtttttaacagcgctttatacttttgctacactaaaggtagttcttggactagcagcatcaacatcacctggttgctacttagaaatgcagaatctcrggccccaacccagatctactgactcagattctgtattttaacaagctcctcaggtgattcatgtgcacattaaagtttgagaagtcctaatgctgggcgtggtggcattagcctataaagtgccatctactcaggaggctgaggtggggaggatcccttgtgcttaggagttgaagacaagcatgggcaactaaaggaggccctatctctaaaaaaagaaaactgatgctggctgtactggcttaaacctccaatcccagcactttgggaggctgagacgggtgaatcacctgaggtcaggagttcgagaccagcctggccaacatggtgaaaccccttctctactaaaaatataaaaattggctgggcatggtggcaggtgcctgtaatcccagctactcaggaggctgaggcaggagaatcgcttgaacctgggaggcggtggaggttgtggtgaaccaagattgcaccactgcactccagcttgtgtgacagagtgagactccatctcaaaaaaacaagcaaacaaacaacaacaacaacaaaactggagggaaaaaagggcaagaagtcctgtgatggatgacctttgggatccttatttccacctctgcttagcaggactgacattgtctccacaccagacaaaccctctaatgccaaactaaataggatgcatttataggggtgcctggcctctatttcttcctcatttaggaaaatcataaagcatgcagaaaataacccagacaaatgtgccaagatccttgaagacttgttcctgcttctcaggtcaattaacaaaaaaagaaacaagaaaatcagtttcaagttgcatctccatagaaaccctttctcaatatcaactcagcagtgttagacagttttcttcacacaattatactagttgagctgagagattcaaaataacagtggatgaagtaaagaaagttctaatttgattttgccaaggcacaaagccttgctaaaattgtggg

SEQ ID NO: 91752 - DNA, 2198 bp, Homo sapiens
tggtccatgacacataacctggacaattcagaatgggaaaggggtgcagctggaacacaagcgaggagagagagaggagagagggtagtggtaagggggtcacttgcttcggtgaggctatttgtcaggaagccaggctgggtgcctaatcagtgtggccgtattctctctcttcatggctctgcaacctgttcattggatgaacctggctttgttccttcccacctctgggtattaatatattaagaaaacaaattacagcccaatcccacaaaggctagggaacctgcctttcttcttcttcattgtgtccccagagcctagcagattgcctgctacgtagttgataaatatttgaaaaaaatcagtgaggctggaggtagagtttgttctcaaggtgagaggtagggcaggatttcctcccttaagtaaccaggcaggaaaagaacagagtgtcacttgttatagggtaccatggtcaaaccaaggaaatcaggattaatttgaaagtccaaaaggaagtagcacagatgaaaactggatatagtcagaggtcaggacttgggcagacctgaacttaaatgggatcaaagaaaggaaatgaggtaaggatagccctgctgtccacaaattgccccatgcataagtagattaggttggtgtaaagctatgttaactaatattcaacaaatatttattcagtccctattatgtgacaggtactactctaagaggcactcgcaattctgcagtaaacgaaacaaacaaaaatctctacagccacgaagtagagagcactgaccccaaaaggaataataataatagccatttgatgatttaataatcgtaataaataattgcttaccaggtgccaggcattgtcatcgttatcatacatagaccacccaatcagttgatgtggaagtaagttctatgcttatgctaactttcacttttccaaaggactttcttcttcagaccatcacctctgggtgcagaaacgacaggaggaagtaaagtctgaacttacgacctgggatattacatttcagtttggttctggccaggcaccatggctcacacctgtaatcccagcactttgggaggctgaggcaggcagatgacaaggtcaggagttcgagaccaggagttctggccaatatggtaaaaccccatctctactaaaaatacaataattagccgggcgtggtagcaggcacctgtagtcccagctacttgagaggccgagacaggcgaatcgcttgaacccggggggcggagcttgcagtgagccgagatcacgccactgcactctagcctgggcaacagagcgagactccgtctcaaaaaaaaaaaaaaattggttctaacaagtaggcaagtcgcctcatgacttatattactggttactgaaagattgagtaacaagattgcagttaatgaaataatatgagscttttgatgggtgtttatatgaatagtaggtaaagaaaatggttttaagagaatgagcatcaaaagtctttctctaaaatcctttgtggcatgttgtcagaggaacattaataatgaactattctagacatcctctcgacaatgctttcacaaaaacataatatcactcaactgacatgggtttagttaaaaattccagccagatgatgattattaaaaaagaaaatccttaccagttagacatgcatgtagacccttgagtgtgtttttaaaaagatagatacatggaaacattagatatataaagatgtatattccagccagaagtgcctgtaagcacaacagtactcctaaacataaagtaagttattttgaaattttcagatttgacaaggggttttattgtttgcctcatatactttatacacatagcacttgctgtgttataaagccctaattcactaacttcatttgtgtattattcaatgcctttccatgtattaatatttgtggggctgtccttggtgaatgattgtgtatggaagagaataaattatttggttaagaccccagcctcgggaggcaagttgccaatgcttaattactggctccgtcacttactggctgtctgatattgagcaggttatttaaattctctcatgcctcattttgccccatctgtaaaagggggtactaataatgtgtcatgagggtggttaacaggtttgaatatgcttataaaa

SEQ ID NO: 91753 - DNA, 2198 bp, Homo sapiens
tggtccatgacacataacctggacaattcagaatgggaaaggggtgcagctggaacacaagcgaggagagagagaggagagagggtagtggtaagggggtcacttgcttcggtgaggctatttgtcaggaagccaggctgggtgcctaatcagtgtggccgtattctctctcttcatggctctgcaacctgttcattggatgaacctggctttgttccttcccacctctgggtattaatatattaagaaaacaaattacagcccaatcccacaaaggctagggaacctgcctttcttcttcttcattgtgtccccagagcctagcagattgcctgctacgtagttgataaatatttgaaaaaaatcagtgaggctggaggtagagtttgttctcaaggtgagaggtagggcaggatttcctcccttaagtaaccaggcaggaaaagaacagagtgtcacttgttatagggtaccatggtcaaaccaaggaaatcaggattaatttgaaagtccaaaaggaagtagcacagatgaaaactggatatagtcagaggtcaggacttgggcagacctgaacttaaatgggatcaaagaaaggaaatgaggtaaggatagccctgctgtccacaaattgccccatgcataagtagattaggttggtgtaaagctatgttaactaatattcaacaaatatttattcagtccctattatgtgacaggtactactctaagaggcactcgcaattctgcagtaaacgaaacaaacaaaaatctctacagccacgaagtagagagcactgaccccaaaaggaataataataatagccatttgatgatttaataatcgtaataaataattgcttaccaggtgccaggcattgtcatcgttatcatacatagaccacccaatcagttgatgtggaagtaagttctatgcttatgctaactttcacttttccaaaggactttcttcttcagaccatcacctctgggtgcagaaacgacaggaggaagtaaagtctgaacttacgacctgggatattacatttcagtttggttctggccaggcaccatggctcacacctgtaatcccagcactttgggaggctgaggcaggcagatgacaaggtcaggagttcgagaccaggagttctggccaatatggtaaaaccccatctctactaaaaatacaataattagccgggcgtggtagcaggcacctgtagtcccagctacttgagaggccgagacaggcgaatcgcttgaacccggggggcggagcttgcagtgagccgagatcacgccactgcactctagcctgggcaacagagcgagactccgtctcaaaaaaaaaaaaaaattggttctaacaagtaggcaagtcgcctcatgacttatattactggttactgaaagattgagtaacaagattgcagttaatgaaataatatgaggcttttgatgggtgtttatatgaatagtaggtaaagaaaatggttttawgagaatgagcatcaaaagtctttctctaaaatcctttgtggcatgttgtcagaggaacattaataatgaactattctagacatcctctcgacaatgctttcacaaaaacataatatcactcaactgacatgggtttagttaaaaattccagccagatgatgattattaaaaaagaaaatccttaccagttagacatgcatgtagacccttgagtgtgtttttaaaaagatagatacatggaaacattagatatataaagatgtatattccagccagaagtgcctgtaagcacaacagtactcctaaacataaagtaagttattttgaaattttcagatttgacaaggggttttattgtttgcctcatatactttatacacatagcacttgctgtgttataaagccctaattcactaacttcatttgtgtattattcaatgcctttccatgtattaatatttgtggggctgtccttggtgaatgattgtgtatggaagagaataaattatttggttaagaccccagcctcgggaggcaagttgccaatgcttaattactggctccgtcacttactggctgtctgatattgagcaggttatttaaattctctcatgcctcattttgccccatctgtaaaagggggtactaataatgtgtcatgagggtggttaacaggtttgaatatgcttataaaa

SEQ ID NO: 91754 - DNA, 528 bp, Homo sapiens
gtgaaaccccatctctactaaaaatacaaaaaacattagccgggcgtggtggtgggcacctgtagtcccagctactcagcaggctgaggcaggagaatggcttgaacccgggaggcggagcttgcagtgagccaagatcgcactactgcactctagcctgggcgactaagagagactccatctcgaaaaataaaaaaataaaaatwaattataaaaaaattcaccaatcagcagaagtgtctgacatagcagtaagcacaacatgttatttggttgacagccaaattatcttaaaccataatcactctttcaacactgttcctttgagcatgacagatccatgaggattgttctgaacactgagtgccttaccttgcacatcagagcccccaaaacctcacccttctttcagtctccggtgcaatacacaaatgccttagatcttctcacagccctatgcactctagtttctgtttaccaggcacatgggccaatacccttgtttcgaaaacaggaagagcattgctg

SEQ ID NO: 91755 - DNA, 684 bp, Homo sapiens
aataagaactgctatggtttgaatgtctgtccccttcaaaactcgtgttaaaatttaatccccaacatggcaatattgagagttgagatctttcaggaaggctcttccctgatgaatgaattaatccattcatggatgactggattaatagattaatgggttatcctcggagtgggactggcagctttataagaagaggaagatctggctagcaygctcagccccctcaccatgtgatgctctgcattgccccaggactctgcagagaggccccaccagcaagaaggctctggagccccatatacagcctctcgaccttggacttattagccttcataactataagaaataaatgcctttttaaaataaagcacccagttgtgggtattctgttataaacaacagaaaacagagacaagaacctggagaataaaagacccaccatgaatattgaaacaaacaaagtatctcctcttcatgccagtccttctaaaggccaagccttgtagatcttggattccctcttctctctcattactcatatttattcccgtatggagctcgactgtgttttcctttagaatggccagcgggtctgctccttccactccgtgcacatgtccacttgtgcgtctgagtcttcaccacctacaccgagatggcttccacagtctcctctctgga

SEQ ID NO: 91756 - DNA, 1635 bp, Homo sapiens
atagctcaggttgctgaaggagcaacctgatgtttctatagctcaggggtgagcgaaaatctagcctactgcctctttttgttcaataattttcatggctgcctttgggctacatgggaggaggtcagcaattgatatggagaactcagggccccagaggcctaaaatatttcctactgggccctttacagaaagcgtctgtcaacccctgacacatatataattaactagcatcttaactaaaagccaaaatacaacaaggtagtctgttgcaggtcatagattctcaataagtatctgtctcaggaaatgtcaccattcacagacaaacctcataaacaggtaaatggaaaagaactaatatttgtaccaccaaaaataattctcacctcatgctctgaactccctgaagccacctttctgggccacgctgtcactgccagggaacagcggctttgcctctggccaggagcctcctctatgatcaaaactgaggccaggagaaactgaagaaaagaacaaccaatggagggatgagaacttagtcacatatcctatgtacacattttatggtaaaaagtaggattctaaaagtttaaacaaactttttattgagagttttaaaatgttggtatttgcaatgcgggtgactgtcatctccctgcctgcgccgaggaaggttgggagctgcagaggggtcactccactgtttagatctgctgtcactcttcttctagttgacatggtttaaatctgtgtccccacccaaatctcatgttgaaatgcaatccccagtgctggaggtgaggtccggtgggaggtgactggatcatgggtgcagtttttcatggtgccgtggttgcaatcctgagttctcatgagatccggttgttttaaagtgtgtggcatctccccacctccctcttggtcctattcctgtcatgtgagacatctgctcctgctttgccttctgccatgggtcaaagctccctgaggctccccagaagcagaagcgtccatgcttcctgtacagcctgcagagccataagccaattataaacctcttttctttacaaattacccagtctcaggaatttctctgtagcaatgcgagaatcaactaatacactagttttttgggctttgatggaggctgatccattgtcttactaatattccctgaaaatgtgagcctcctggaatcagcagggacagagacatgtatggactcgaacttttagagatgctgcccatractatctccctcaaatgcagaaacagatgggatactgaattggtcacactcatctcctgcccctggggtcactttgagagtttgcctgctattttttttttctgtggtattaattacctcctgaatatgaacctcttaaattaaagtacaccagccgacggaccctaaaagagggtcctgccacgcggaagttgtgctgcatcacctggggccggtggtgccctatggaggttggcgtccagcaccttggacactttaggtgctttcataaaacttcgaatgaggacggagatggcccctgggataaagttccatgttcctgcggaggcctcttcggctcattaaggcaaaaagtattagctgcaccttgccgctgtccc

SEQ ID NO: 91757 - DNA, 767 bp, Homo sapiens
tccaagctactaacgtaggatgcccaaacccaaagagctggaaagcttcaggataaattcatccttctgatagggctgaaatacaaatagaaatggcaagaggggtacatttccatttcattttagatcataattattgacaagaaagagctattaagagtctgagagaagagacaggcatgataatcactgtatttcttaaagataattctgatagcagaaagaacagagtatatgaaagtggagagggtagaatcaagaaaatcaattctaatgttgttgaaataatccaagtagtaggtgataaaggcatggaaatgggtgaaaaataatgatataagcagcaaggaaaaagagatcttggaataatacaagtgaacagactcattgagaagaatcccacacggcagtaatggaaaacaaaacagaaaaagatcttctgaatttgacattttaccaccacaaaactttgacctcaaagagtttgagaattgtgtcaaagactcagatcatctatcttagatrgtcttttatttcacctttgtgccaagccatctgctccctctcaagggcaaatacggtgctttactgactgactggaaaagcaaatatcctgaatgcctagttattgacatttaagacttacatcttctctaatgactcagtgggtgtgatacccagtaatggaagtttttaatttgtgattctgatacactgagacctttctctgcagctggaatgttgtctggtgatgtcatggtctgcag

SEQ ID NO: 91758 - DNA, 767 bp, Homo sapiens
tccaagctactaacgtaggatgcccaaacccaaagagctggaaagcttcaggataaattcatccttctgatagggctgaaatacaaatagaaatggcaagaggggtacatttccatttcattttagatcataattattgacaagaaagagctattaagagtctgagagaagagacaggcatgataatcactgtatttcttaaagataattctgatagcagaaagaacagagtatatgaaagtggagagggtagaatcaagaaaatcaattctaatgttgttgaaataatccaagtagtaggtgataaaggcatggaaatgggtgaaaaataatgatataagcagcaaggaaaaagagatcttggaataatacaagtgaacagactcattgagaagaatcccacacggcagtaatggaaaacaaaacagaaaaagatcttctgaatttgacattttaccaccacaaaactttgacctcaaagagtttgagaattgtgtcaaagactcagatcatctatcttagatggtcttttatttcacctttgtgccaagccatctgctccctctcaagggcaaatacggtgctttactgactgactggaaaagcaaatatcctgaatgcctagttattgacatttaagacttacatcttctctaatgactcagtgggtgtgatacycagtaatggaagtttttaatttgtgattctgatacactgagacctttctctgcagctggaatgttgtctggtgatgtcatggtctgcag

SEQ ID NO: 91759 - DNA, 556 bp, Homo sapiens
aaaattcttatataaactcatctctttaacaatgtgtaggtgatttctgtaagccatttggatatatcattgtttaaataatttctggtgttgaacttcttttagatctrtgatagaagagctcaacttaaaaaatttcatgatctgtataaaggaactgatttaaaggcaacaatgccaaaaattaagttgttagattggaaaattaaataataataaaaggggcacttttagttttagatttaggtaatctgagtttctaatttaacaacagaattggaaagggaataaagcaagtacatttttatgtgtttaaagtgagaagtctagattagattacttgggttagaattataaatatacataggacttaactttcagggacatgtgtgtctgaatgttcataaacagaaaaaatgacttgggaatagtagatgactgttagtatcttcacaatgctgagcccatttgctgctctctactagggagagagagtacagccaacttggaagcagagctaatagttggaaaatatttttgccgttggagaacatgc

SEQ ID NO: 91760 - DNA, 556 bp, Homo sapiens
aaaattcttatataaactcatctctttaacaatgtgtaggtgatttctgtaagccatttggatatatcattgtttaaataatttctggtgttgaacttcttttagatctatgatagaagagctcaacttaaaaaatttcatgatctgtataaaggaactgatttaaaggcaacaatgccaaaaattaagttgttagattggaaaattaaataataayaaaaggggcacttttagttttagatttaggtaatctgagtttctaatttaacaacagaattggaaagggaataaagcaagtacatttttatgtgtttaaagtgagaagtctagattagattacttgggttagaattataaatatacataggacttaactttcagggacatgtgtgtctgaatgttcataaacagaaaaaatgacttgggaatagtagatgactgttagtatcttcacaatgctgagcccatttgctgctctctactagggagagagagtacagccaacttggaagcagagctaatagttggaaaatatttttgccgttggagaacatgc

SEQ ID NO: 91761 - DNA, 759 bp, Homo sapiens
ttgaattcaaaggtagacatttacaagtgaaatatttaagatgtatactccaacctctctgattgttttctgtttctagttcattaaacaacatgcaaacatgaaagataaaaatggagatatagctgttatrtaaaaatgtcaagtagaagtatttgcaagaatgtagaggaaaagaaaaactcgcacactgtgatgggtatgtagattagtactacaattatgggaaacagtgtggagggtcctcaaaaaattaaaaataaaactaccgtatgattcaacaatcctactactgggtatatattcgaaggacaaaaattaatatgttgaacagatatctgcactcccatgttcactgcagcatgattcactataaccaagacaattacagtaattacagtgtaatcacgctattatactaagtgtccataatgaatgaatggttaaagaaaatatggtatatgtacacaatggaatattattcagtcttaaaaaggaagaaactcctctttttttgttatattttgttttgtttttgtgaaaacctggaagagcttgtaagacattaagtgaaataagctaggcacagaaagataaatatcacatgatctcacatgtggaatctaaaaatgttgaattcacagaagcagagagcagagttgtggttatcaggtgctggggtgagggtaagagtacgttggtcaaaggacacaaaatttcagttagcaggaataagtttaagatatctatcatacaagt

SEQ ID NO: 91762 - DNA, 759 bp, Homo sapiens
ttgaattcaaaggtagacatttacaagtgaaatatttaagatgtatactccaacctctctgattgttttctgtttctagttcattaaacaacatgcaaacatgaaagataaaaatggagatatagctgttatataaaaatgtcaagtagaagtatttgcaagaatgtagaggaaaagaaaaactcgcacactgtgatgggtatgtagattagtactacaattatgggaaacagtgtggagggtcctcaaaaaattaaaaataaaactaccrtatgattcaacaatcctactactgggtatatattcgaaggacaaaaattaatatgttgaacagatatctgcactcccatgttcactgcagcatgattcactataaccaagacaattacagtaattacagtgtaatcacgctattatactaagtgtccataatgaatgaatggttaaagaaaatatggtatatgtacacaatggaatattattcagtcttaaaaaggaagaaactcctctttttttgttatattttgttttgtttttgtgaaaacctggaagagcttgtaagacattaagtgaaataagctaggcacagaaagataaatatcacatgatctcacatgtggaatctaaaaatgttgaattcacagaagcagagagcagagttgtggttatcaggtgctggggtgagggtaagagtacgttggtcaaaggacacaaaatttcagttagcaggaataagtttaagatatctatcatacaagt

SEQ ID NO: 91763 - DNA, 520 bp, Homo sapiens
tggaataattgtcctttttttccctaaatttcacgataccatctcttcactttcaacaaaacaaataacaaagctttgattgtaagcactagttttaatcattgtccaaacaggaaaaaaataagttaataattgcttaaggaaaattatgtctataaataaagctcactttgctattcaagtgaattttaaaaagaaaaatctctatatttataaaaaatatgtgtaaatgtttttaataaaaagctgtctagttattaaagtttatgcctctatgactttgtayattatgttgaaatttaaataaacaggaaaaacctgtaatgattacattataatatcctatttcttgagacatttttttcatgtgtgtattttttgtatgtgtgtttgcatttaaaggtgtttcttaatacaaagcgaatatttacatattctcatttctgtatgaaatgacccaaaattaataattcctgattctcaattatttatttatttttttgaaacggattctcgctgt

SEQ ID NO: 91764 - DNA, 520 bp, Homo sapiens
tggaataattgtcctttttttccctaaatttcacgataccatctcttcactttcaacaaaacaaataacaaagctttgattgtaagcactagttttaatcattgtccaaacaggaaaaaaataagttaataattgcttaaggaaaattatgtctataaataaagctcactttgctattcaagtgaattttaaaaagaaaaatctctatatttataaaaaatatgtgtaaatgtttttaataaaaagctgtctagttattaaagtttatgcctctatgactttgtacattatgttgaaatttaaataaacaggaaaaacctgtaatgattacattataatatcctatttcttgagacatttttttcatgtgtgtattttttgtatgtgtgtttgcatttaaaggtgtttcttaatacaaagcgaatatttacatattctcatttctgtatgaaatgacccaaaattaataattcctgattctcrattatttatttatttttttgaaacggattctcgctgt

SEQ ID NO: 91765 - DNA, 1283 bp, Homo sapiens
tttctcaagaagctactagaggacgtgctccatcaaaatgagagagtaaaccaagaaagtggaaaacagagaatccaggaaacaggggatgcaacagaagagagaggtaaatgttattacagaggacccagaccacaggtgtgcacagggcccagcacagcaaccaggctgattgcagcccaggatagagggcttaaagcaagacacagaactaataggttctgaagttttaattatattaacaaaagctttagagttgtgacagagataaattagcaactacattgaaaatataaaaacccatcaaaattactaactctgagaaaaatgaaattgtaccaaaaaacgcaatcacagtgcattgggtagtcagtggcatataatattttcccaagtcataggacagtaaacactgaatattggtttaactagaacctgtgatcttggggtggtgagataagataaacgtgtgtgtgcctgtgcctaagaactaaatcctcattttctatagcaggtagtcgattatatgatgcttaaagctgaaacatcaagataaagctaaaagagttgaaggtggctgcctctgggacaagggatcagcaccagtgagtagggctatttttagaataaaccttatagggctacttgattttttaaactatgtacatgcatttctttatatatctatatatctatatatatatacatacacacacatatatatacacacatatacacacatatgtatatatatgtgtgtatatatagtgtgtgtatatatagtgtgtgtatatatatgtgtatatatatatgtrtatatatatatatatatatatttttttttttttttaaagggaggagagaagggaagaaaatcctctctgaaaaaggaggcattggcgggttttgggaggaggcggcccctctggcatctttgggttttctctgacttcagcctcattaaatcacaggagggagatgacctcagcaaaggacatcgaacctgtgggagcacctgtgaggcaagaagtcctctgccctctaccctcaccctccccagccatcacagtgcggtggcagacaggccctgtgagcggcaggcacctgtcagtgccagagtcctcccagcaggcctggtggccctggtgaaggggtcagcttgggagagacgaagcttcttgggatggagctgggtgggagaggtggagaggaggacttcatggctacatagtacattacaatcatgcctgtgaatagtcactgcactccagccttgaagggag

SEQ ID NO: 91766 - DNA, 683 bp, Homo sapiens
ttaccaattctgtggcccagccacagccaaggaaatgcagccacagaagaagaaagaagccccctttgccacgtgccctcctggcaccagcctctgcctggatctggacctgggcgggcagtctgggctcctgctgcactccagcccagatatttccccttcttctgtgggatcaattttcccaagcgatcgctctctgaatttgaccctcaggaaccatcaatctcaccagaaaaccatcacctgggccacctgatcccccgacacagcacttttcagctcatccatcagaaaggatgatttaataatgaacatagagatagggcatgctggccagcccatgaggccagcggacccctcccaggccaccagggctgttccctctccacccctgccccactgcagaatcctacggctttagctcttcagayggcagcaagaacgctccatgggacacacacacacacacacacacacacacacacacacacacatacacacacacacagagagagagagagagagagagagagagagagaggctgagtcagcagccagattcttacccaggttttgctactgattggctaggtgaccttgagcaagtcacttctctgggtttaatttttggtaaatgtctaacacactgcctggcacacagtaggtgctcaatgtttgcagaa

SEQ ID NO: 91767 - DNA, 683 bp, Homo sapiens
ttaccaattctgtggcccagccacagccaaggaaatgcagccacagaagaagaaagaagccccctttgccacgtgccctcctggcaccagcctctgcctggatctggacctgggcgggcagtctgggctcctgctgcactccagcccagatatttccccttcttctgtgggatcaattttcccaagcgatcgctctctgaatttgaccctcaggaaccatcaatctcaccagaaaaccatcacctgggccacctgatcccccgacacagcacttttcagctcatccatcagaaaggatgatttaataatgaacatagagatagggcatgctggccagcccatgaggccagcggacccctcccaggccaccagggctgttccctctccacccctgccccactgcagaatcctacggctttagctcttcagacggcagcaagaacgctccatgggacacacacacacacacacacacacacacacacacacacacayacacacacacacagagagagagagagagagagagagagagagagaggctgagtcagcagccagattcttacccaggttttgctactgattggctaggtgaccttgagcaagtcacttctctgggtttaatttttggtaaatgtctaacacactgcctggcacacagtaggtgctcaatgtttgcagaa

SEQ ID NO: 91768 - DNA, 683 bp, Homo sapiens
ttaccaattctgtggcccagccacagccaaggaaatgcagccacagaagaagaaagaagccccctttgccacgtgccctcctggcaccagcctctgcctggatctggacctgggcgggcagtctgggctcctgctgcactccagcccagatatttccccttcttctgtgggatcaattttcccaagcgatcgctctctgaatttgaccctcaggaaccatcaatctcaccagaaaaccatcacctgggccacctgatcccccgacacagcacttttcagctcatccatcagaaaggatgatttaataatgaacatagagatagggcatgctggccagcccatgaggccagcggacccctcccaggccaccagggctgttccctctccacccctgccccactgcagaatcctacggctttagctcttcagacggcagcaagaacgctccatgggacacacacacacacacacacacacacacacacacacacacatacacacacasacagagagagagagagagagagagagagagagagaggctgagtcagcagccagattcttacccaggttttgctactgattggctaggtgaccttgagcaagtcacttctctgggtttaatttttggtaaatgtctaacacactgcctggcacacagtaggtgctcaatgtttgcagaa

SEQ ID NO: 91769 - DNA, 683 bp, Homo sapiens
ttaccaattctgtggcccagccacagccaaggaaatgcagccacagaagaagaaagaagccccctttgccacgtgccctcctggcaccagcctctgcctggatctggacctgggcgggcagtctgggctcctgctgcactccagcccagatatttccccttcttctgtgggatcaattttcccaagcgatcgctctctgaatttgaccctcaggaaccatcaatctcaccagaaaaccatcacctgggccacctgatcccccgacacagcacttttcagctcatccatcagaaaggatgatttaataatgaacatagagatagggcatgctggccagcccatgaggccagcggacccctcccaggccaccagggctgttccctctccacccctgccccactgcagaatcctacggctttagctcttcagacggcagcaagaacgctccatgggacacacacacacacacacacacacacacacacacacacacatacacacacacasagagagagagagagagagagagagagagagagaggctgagtcagcagccagattcttacccaggttttgctactgattggctaggtgaccttgagcaagtcacttctctgggtttaatttttggtaaatgtctaacacactgcctggcacacagtaggtgctcaatgtttgcagaa

SEQ ID NO: 91770 - DNA, 653 bp, Homo sapiens
aagactgcgggctctccagcaatgtaagtttctactgaaagcaagcaggtcacctaagctcattcattcatctgctgggactacacatgcaggggtaccatggatagctataagatttttattaaaacattggttataatatattatgaaactttcctcatgaaataaattcaaactggaatggaaaagaacttactttgcagatgaaatggtgcacacacccaaacccaagaaaaatgacacagcacggcctccctgaaggtgtgyggaaaccggtgtttgttctgctcttatttaacatccttaataatgatctggaagatgagtcaacagcacgctaatgaaatttgcataagatccttaattgggaggtgttgctatcaccaagaagggcagagaggtaatgcagatgtctcaaagagggttaaagataccaatggaaaataacaaaataggatttggctcagaggggagaaaggcaaattcaattgggaggaaagtctaaaccaggatattccctggagagaagaacaatgcaaaaataatactgaaagaggttcaggcagagagcgatcttagctggaggtgtgatgtggtgaaaatggccaagattatggaatacatttgaaaaggagatatacgatccaatgcta

SEQ ID NO: 91771 - DNA, 1052 bp, Homo sapiens
gcatatgaaatatcattgaatatatatacttacatcctagtctttgggtttktatgaatgactattaatggatttgtgctatataaatatatgtgtacttttaaaattagttttaagagatgctgccaaattacttttgcaaaagtacaacaatttaagagtcctccatcaatagtaagagtgtccatgatcctgcattccgaaagtcactgatagtcatatttttctatcttaacttttcctgccctttcggatgtgaccgatgcctcattgttattttatttctatgagtattttgtgaccttgaataccttttgtgaccttggacaacttttacattagaaatttgaatttgatgttcaatgaattttctatatatttttcttttggagttttttgttagtcaatatttaaaaatttttcatataatttagatattaagcctacatctgtcacattatattttaactaaaagattggttattgatttttatataagcttcttctttagaaaactatatatgtaaataaaattgtatatatcatatacaatatgtatatatacacatgtatactgcatatgtacatatgtatactatatatgtacacaaacacaaaaacacatgtttatattaatttttttttcctctttacttctgattgtcatggttaagaagatattcatcatcttagggttagatatcatttaagcttcctggagtttaattttattactgtttgtgcctgctaaatatgtcttttgaaaagtgtaaatatgaaattatcactgcaataatattgaaataatacatggtctaaaggctagatttgttaaatactgctcctgaagtgacttcacagacatccacagatctcagctgtattagatgctgaattagatggtatgctattgcttcttattacaaaatataagcattgctaatctctacagaagaacatgcaattcatttgaataaaaatacctgaaaatatgctagtacaagtgagattgtggcaaatttcatgggtaaaagcagtgtagaggagagaaa

SEQ ID NO: 91772 - DNA, 1052 bp, Homo sapiens
gcatatgaaatatcattgaatatatatacttacatcctagtctttgggtttttatgaatgactattaatggatttgtgctatataaatatatgtgtacttttaaaattagttttaagagatgctgccaaattacttttgcaaaagtacaacaatttaagagtcctccatcaatagtaagagtgtccatgatcctgcattccgaaagtcactgatagtcatatttttctatcttaacttttcctgccctttcggatgtgaccgatgcctcattgttattttatttctatgagtattttgtgaccttgaataccttttgtgaccttggacamcttttacattagaaatttgaatttgatgttcaatgaattttctatatatttttcttttggagttttttgttagtcaatatttaaaaatttttcatataatttagatattaagcctacatctgtcacattatattttaactaaaagattggttattgatttttatataagcttcttctttagaaaactatatatgtaaataaaattgtatatatcatatacaatatgtatatatacacatgtatactgcatatgtacatatgtatactatatatgtacacaaacacaaaaacacatgtttatattaatttttttttcctctttacttctgattgtcatggttaagaagatattcatcatcttagggttagatatcatttaagcttcctggagtttaattttattactgtttgtgcctgctaaatatgtcttttgaaaagtgtaaatatgaaattatcactgcaataatattgaaataatacatggtctaaaggctagatttgttaaatactgctcctgaagtgacttcacagacatccacagatctcagctgtattagatgctgaattagatggtatgctattgcttcttattacaaaatataagcattgctaatctctacagaagaacatgcaattcatttgaataaaaatacctgaaaatatgctagtacaagtgagattgtggcaaatttcatgggtaaaagcagtgtagaggagagaaa

SEQ ID NO: 91773 - DNA, 1052 bp, Homo sapiens
gcatatgaaatatcattgaatatatatacttacatcctagtctttgggtttttatgaatgactattaatggatttgtgctatataaatatatgtgtacttttaaaattagttttaagagatgctgccaaattacttttgcaaaagtacaacaatttaagagtcctccatcaatagtaagagtgtccatgatcctgcattccgaaagtcactgatagtcatatttttctatcttaacttttcctgccctttcggatgtgaccgatgcctcattgttattttatttctatgagtattttgtgaccttgaataccttttgtgaccttggacaacttttacattagaaatttgaatttgatgttcaatgaattttctatatatttttcttttggagttttttkttagtcaatatttaaaaatttttcatataatttagatattaagcctacatctgtcacattatattttaactaaaagattggttattgatttttatataagcttcttctttagaaaactatatatgtaaataaaattgtatatatcatatacaatatgtatatatacacatgtatactgcatatgtacatatgtatactatatatgtacacaaacacaaaaacacatgtttatattaatttttttttcctctttacttctgattgtcatggttaagaagatattcatcatcttagggttagatatcatttaagcttcctggagtttaattttattactgtttgtgcctgctaaatatgtcttttgaaaagtgtaaatatgaaattatcactgcaataatattgaaataatacatggtctaaaggctagatttgttaaatactgctcctgaagtgacttcacagacatccacagatctcagctgtattagatgctgaattagatggtatgctattgcttcttattacaaaatataagcattgctaatctctacagaagaacatgcaattcatttgaataaaaatacctgaaaatatgctagtacaagtgagattgtggcaaatttcatgggtaaaagcagtgtagaggagagaaa

SEQ ID NO: 91774 - DNA, 700 bp, Homo sapiens
cagaagaaggaaccaaggaagccagatcaggagagtatagaggaagttttggtcaagagatagttattaaccakcactgctatgaatatttcacattctattcacacattgaatttgaactgaatgtcatcccttaccctaacatatttcagctcatccattaccacaatttagagatttcatgttacattccacatcctggtaatggtttccgcatgagttttgtcagtaaaagtggaaactgtcagaagttagcatttgtattagtcattatgggctagacagtgctgtggaataatctcaaaatctcagtggtatagaacaatttattcaacttcatgtccttcagtaatcaacagggttctttacctgaggtcacaggctgatgggccaccaacataaagcacaccaccagtccctatggcagggttaaagagcacagtgtctacagcactggcattcacaatcttcttacaccaatttaacttatattttactggccaagataagtctaagcttgccaaggacacagttaaattcgaggtagcaggaaaaaccagaaatatttactaccaaagaatggaaagtggcctaggaaatcttacttctcagttattcaagaaataaaaattctactccctttctgtcattcaagtaaaagtctttgcataggcaacaggtagacttttccagaataact

SEQ ID NO: 91775 - DNA, 1197 bp, Homo sapiens
ggaattttgttatcttaattaactcagaggtagcaccatactatgctaagaagactgagtgtaagacttgtaattacctctctttaggccgttaaccctatttggttactgtaagcttttcaaggattgaggccgtgtggttggtcatctctatatgcccaatgcataataatgtgcctggtagataacagacattaaacaaacgcttactgaatgcataaaacatgggtcctagatattctaggctaataccactttaaatagtccactgcttatgtacactggtttgagttcagaaacattgatcatcagagagttaggtctgaatgtgactgatggaatttccgggaatttccaagagatacttctcagcagtagccactataccagccatttttcgtatttctcaatcattcattcattttagtaaaggtagaatcagacagaaatgaagactactccagaagtgaaggaagcgagaaatttatagaacctgaaattggttcctggtcttcatatttcagcaacttcagaattttttttaaatcctctaagacctttttaaacagtcatttattgaagtcttactaagtagcagccttatactcagtgctaagaatacaaaaatcagtaagacagaacacacagatctgaaaatagataaattacaatccaagttggatagtgtttgtattatgtaggatgtcttcagttgcaagtaacagaaaagaaataatggctaaaaaaaagaaatgtttaatcatctcacaaatcatgaaagactaaaagtagatggttccacattggtccagcagttcaatgatatcataaaaaaaatccaatactctgtcttttcactattctatcctttgtccttggcttattgcctcatggtcacagaatcgttgctgtagctccaagtaacatgtttgcacacaattgcatttaagtcaggcaggaaggaacttactgtttctctttatagcaggaaacaaaaatcttctgagataagctgaccaayagactttttctttcgtctcattggttagaactgggtcacttgcccattcccaaatcaatcatgagaaaaggggaatgggattgccatggttggcataagccaatgatgctttattctctcaggctggaggaaggggctgcatcttccttgagcatgttgctaccacctaaaaaact

SEQ ID NO: 91776 - DNA, 755 bp, Homo sapiens
ctattacccaataaggaaggtgtgcccccattttacagtggaggaagttaaggcactcctaattcctcctaactgccttactactaacatccttcatatctcagctttgatgtaatctctccaaaaggcctgcctgcaccatgtgcctccatctccaagctgaggttatctttatcacagaacttatcctctgttttgtaattggcaactcattctcatgaattttcatgagcagagctctttaagagcaggaactgtgtctgtgttgtttagcaatgtatactcagcatctaggcttatgctggcacatttaatttgcaccaatcattttttgaatgacttgaataagtgactaaggctcagagacattaagtaacgtgaccagtcacaaagctaaraggtgacacagctgaggtttcaactatagtctgtctgacccctaaatctctcctacattttgctgaggggtaagcaacttaatccatttacagcaaccagaaaatttaagttggattaaatgcttgtattttaagctcaaaagtaacgggtagggagtctaagaacttctcataatcatcgggttgaagaattaccaaacagaactctggacccaaagctagaagaaggttcctagaggacaagactccttatccaaactttgcctgggctggacaacatttaaaactctcccttaatttaacattttaagattctaaggtttttaacctaatctcgcggtaaaaggaaaatttttc

SEQ ID NO: 91777 - DNA, 631 bp, Homo sapiens
tgggagggagataccattaatatccccatacagaaaagaaaccgaggcacagaggaatgtaaccaaggttaagcacttgctcaaggtctcctagctggtgagcaacagagctgggtgtaggatttctgctgtctggttcttactaaacatacgaggctatacaaatgtagcatgagggatgaaaaatatttaagtaaaggagcaaatgacttatttcatcctgacaatgatccctcaaagaaggagagcattaagagaagaaccacatagctaggaagaggaaaagcctgggttcttactcatgtctatactctgaagtccatgtttttccagaattatattaatactaatatctggaagggatatyagtgagttagcccaagagctgtgtaaagaatctccattgcatgtacattgggtaagaagtgaccagagggacaggctgatgatattggagtgacgagaacccaaccaggccaggaactatactctgtactgggtcttttctaagtagccttttagaaaacctcaatattttatttatttatttatttatttttgagacagagtctcgctctgtcacccaggctggagcgcagtggcacaatctctgctcactgcaagctctgcc

SEQ ID NO: 91778 - DNA, 2567 bp, Homo sapiens
agatggatggatggatggatggatggatggatggatggatggatggatggatagacaggcaggcaggcggatggatggatggatagatagatagatagatagatagatagatagatagatagatagataaattttaaggaactggcttacaccattgcagaagctggcaaatccaaaatctgcagggtaggcttgcaggttggagagtcacggaagacccaatgcagcagtttgagcttgaaagtggtctgctgggagaatgtcttcttcctctggggaggtcagtcttttttctcttaagacttccaactgattgaatgaggcctacccacattacaacaggtaatctgctttattctaagtctattgattttaatgttaatttcatctaaaaaatatcttcacagaaacatctagaatartgtttgaccaaatatctgggtaccatagcctagagaagttgacacataaaattaaccgtcacaaagagttggattttatcaagcacatgtttggtatgtattttatgatttttatcctctgttaatatacttaattttattaatacattttgaatattagactctctttgcactcctaagagaacccacacaaattttcacctaaatatttttaaagattctatatattttacccaaatatttcaaaaggttcaaaataacaagttttggcatggatatttcatatggatgtaaagtggcaaagtctttttggagagtactttgacaggatctataaacatttaaatgtatacctttgacttattggttctatttttttcttctggatcctcaaaaatacctttgcgtatgaataaagaggcatatggcaggctgttcattatagcattgtatggaaagtaaaaaattggaaacagccaaagtgtcattaagagaggaataaatgaacaaacatctaagaaatactggcagcagtcaaaattaatacatatatactagccagacacggtggctcacgcctgtaatcccagcactttgggaggctgaggcgggcagatcacaaggtcaggagatcgagaccatcctggctaacatggtgaaaccccatctctactaaaaatacaaaaattagccaggcatggtggcatacgcctgtaatcccagctactcaggaggctgaggcaggagaattccttgaaccagggaactggaggttacagtgagttgagattgtgccactacgcttcagcctgggtgacaagtggaaattctgtctcaagaaaaaaaaaaatctatatgaatatatttatttagaactctataacatattgatatttgtttttataaaagcaagttttagaacaaaatctcaaaatgacatgacatactaaataatcaaatttttgtatatacattatgacataaatgcaaagaaaatcatttaaattatacttattactctgataataattgttacctctagaggctcagggaggactgctatttatctgtattgtttacatttttttgcaacgagaaggtactaacaaattacttgtctaatttaaatttaataccaaaagctataaattaacaagacattcttttatctcgaatattagaatttagtctagaaccctgatgtgttaactacatatattaaaactcattagaaaatactttatatcatgtttaaaattgaaatttatattgaaatgttaaataccagattcttacaatattactttaatttacaacatacaatgtgtaatctccaggcaaaaagtgaatgcatttcatgtaagttgataatggtactttggtaagaagtctcttctagtttggttaacacaaatagatataacacctaattttagctcacatagtagtaatttgaaaagcaaagatatattactgtttcataaaatgttagctttgttacaaaacaatccccaacatactaggtgtttcgctttggaattttacagtaataaccaaggggaaaaagaaagtagtaacaatatgatttaataaacatggtttcatataaaaaaacttacaaataagtggaaatatttctttgtaatttcattaaagaaactaaaatatcctctaggcactcgaggctgaaaattatcttccggtaactttcattatactgatcaataacatacatagcttttatgagatggtttcttgcttttgagagaaaatataacacacgaaaataaaataatctcatatttaccttgaatcttatgtatgaatttaagctatatttttaatagagaaaaggggggacaaaaggccttgcctcatgattgagggtactgttctcaagagaataagctattcccagccagctagatccctggaccttggatccactacataggtctacatatcactacataggtctaacagaaaggaagcctcttttgagatagaacatgggtttcccctacatttaaaaaaattttattttattttaagttccgggatacatgtgcaggacgtgcaggtttgttatgtaagtaaacgtgtgccgtggtggtttgttgcacctatcaacccatcacctaggta

SEQ ID NO: 91779 - DNA, 2567 bp, Homo sapiens
agatggatggatggatggatggatggatggatggatggatggatggatggatagacaggcaggcaggcggatggatggatggatagatagatagatagatagatagatagatagatagatagatagataaattttaaggaactggcttacaccattgcagaagctggcaaatccaaaatctgcagggtaggcttgcaggttggagagtcacggaagacccaatgcagcagtttgagcttgaaagtggtctgctgggagaatgtcttcttcctctggggaggtcagtcttttttctcttaagacttccaactgattgaatgaggcctacccacattacaacaggtaatctgctttattctaagtctattgattttaatgttaatttcatctaaaaaatatcttcacagaaacatctagaatagtgtttgaccaaatatctgggtaccatagcctagagaagttgacacataaaattaaccgtcacaaagagttggattttatcaagcacatgtttggtatgtattttatgatttttatcctctgttaatatacttaattttattaatacattttgaatattagactctctttgcactcctaagagaacccacacaaattttcacctaaatatttttaaagattctatatattttacccaaatatttcaaaaggttcaaaataacaagttttggcatggatatttcatatggatgtaaagtggcaaagtctttttggagagtactttgacaggatctataaacatttaaatgtatacctttgacttattggttctatttttttcttctggatcctcaaaaatacctttgcgtatgaataaagaggcatatggcaggctgttcattatagcattgtatggaaagtaaaaaattggaaacagccaaagtgtcattaagagaggaataaatgaacaaacatctaagaaatactggcagcagtcaaaattaatacatatatactagccagacacggtggctcacgcctgtaatcccagcactttgggaggctgaggcgggcagatcacaaggtcaggagatcgagaccatcctggctaacatggtgaaaccccatctctactaaaaatacaaaaattagccaggcatggtggcatacgcctgtaatcccagctactcaggagkctgaggcaggagaattccttgaaccagggaactggaggttacagtgagttgagattgtgccactacgcttcagcctgggtgacaagtggaaattctgtctcaagaaaaaaaaaaatctatatgaatatatttatttagaactctataacatattgatatttgtttttataaaagcaagttttagaacaaaatctcaaaatgacatgacatactaaataatcaaatttttgtatatacattatgacataaatgcaaagaaaatcatttaaattatacttattactctgataataattgttacctctagaggctcagggaggactgctatttatctgtattgtttacatttttttgcaacgagaaggtactaacaaattacttgtctaatttaaatttaataccaaaagctataaattaacaagacattcttttatctcgaatattagaatttagtctagaaccctgatgtgttaactacatatattaaaactcattagaaaatactttatatcatgtttaaaattgaaatttatattgaaatgttaaataccagattcttacaatattactttaatttacaacatacaatgtgtaatctccaggcaaaaagtgaatgcatttcatgtaagttgataatggtactttggtaagaagtctcttctagtttggttaacacaaatagatataacacctaattttagctcacatagtagtaatttgaaaagcaaagatatattactgtttcataaaatgttagctttgttacaaaacaatccccaacatactaggtgtttcgctttggaattttacagtaataaccaaggggaaaaagaaagtagtaacaatatgatttaataaacatggtttcatataaaaaaacttacaaataagtggaaatatttctttgtaatttcattaaagaaactaaaatatcctctaggcactcgaggctgaaaattatcttccggtaactttcattatactgatcaataacatacatagcttttatgagatggtttcttgcttttgagagaaaatataacacacgaaaataaaataatctcatatttaccttgaatcttatgtatgaatttaagctatatttttaatagagaaaaggggggacaaaaggccttgcctcatgattgagggtactgttctcaagagaataagctattcccagccagctagatccctggaccttggatccactacataggtctacatatcactacataggtctaacagaaaggaagcctcttttgagatagaacatgggtttcccctacatttaaaaaaattttattttattttaagttccgggatacatgtgcaggacgtgcaggtttgttatgtaagtaaacgtgtgccgtggtggtttgttgcacctatcaacccatcacctaggta

SEQ ID NO: 91780 - DNA, 2567 bp, Homo sapiens
agatggatggatggatggatggatggatggatggatggatggatggatggatagacaggcaggcaggcggatggatggatggatagatagatagatagatagatagatagatagatagatagatagataaattttaaggaactggcttacaccattgcagaagctggcaaatccaaaatctgcagggtaggcttgcaggttggagagtcacggaagacccaatgcagcagtttgagcttgaaagtggtctgctgggagaatgtcttcttcctctggggaggtcagtcttttttctcttaagacttccaactgattgaatgaggcctacccacattacaacaggtaatctgctttattctaagtctattgattttaatgttaatttcatctaaaaaatatcttcacagaaacatctagaatagtgtttgaccaaatatctgggtaccatagcctagagaagttgacacataaaattaaccgtcacaaagagttggattttatcaagcacatgtttggtatgtattttatgatttttatcctctgttaatatacttaattttattaatacattttgaatattagactctctttgcactcctaagagaacccacacaaattttcacctaaatatttttaaagattctatatattttacccaaatatttcaaaaggttcaaaataacaagttttggcatggatatttcatatggatgtaaagtggcaaagtctttttggagagtactttgacaggatctataaacatttaaatgtatacctttgacttattggttctatttttttcttctggatcctcaaaaatacctttgcgtatgaataaagaggcatatggcaggctgttcattatagcattgtatggaaagtaaaaaattggaaacagccaaagtgtcattaagagaggaataaatgaacaaacatctaagaaatactggcagcagtcaaaattaatacatatatactagccagacacggtggctcacgcctgtaatcccagcactttgggaggctgaggcgggcagatcacaaggtcaggagatcgagaccatcctggctaacatggtgaaaccccatctctactaaaaatacaaaaattagccaggcatggtggcatacgcctgtaatcccagctactcaggaggctgaggcaggagaattccttgaaccagggaactggaggttacagtgagttgagattgtgccactacgcttcagcctgggtgacaagtggaaattctgtctcaagaaaaaaaaaaatctatatgaatatatttatttagaactctataacatattgatatttgtttttataaaagcaagttttagaacaaaatctcaaaatgacatgacatactaaataatcaaatttttgtatatacattatgacataaatgcaaagaaaatcatttaaattatacttattactctgataataattgttacctctagaggctcagggaggactgctatttatctgtattgtttacatttttttgcaacgagaaggtactaacaaattacttgtctaatttaaatttaataccaaaagctataaattaacaagacattcttttatctcgaatattagaatttagtctagaaccctgatgtgttaactacatatattaaaactcattagaaaatactttatatcatgtttaaaattgaaatttatattgaaatgttaaataccagattcttacaatattactttaatttacaacatacaatgtgtaatctccaggcaaaaagtgaatgcatttcatgtaagttgataatggtactttggtaagaagtctcttctagtttggttaacacaaatagatataacacctaattttagctcacatagtagtaatttgaaaagcaaagatatattactgtttcataaaatgttagctttgttacaaaacaatccccaacatactaggtgtttcgctttggaattttacagtaataaccaaggggaaaaagaaagtagtaacaatatgatttaataaacatggtttcatataaaaaaacttacaaataagtggaaatatttctttgtaatttcattaaagaaactaaaatatcctctaggcactcgaggctgaaaattatcttccggtaactttcattatactgatcaataacatacatagcttttatgagatggtttcttgcttttgagagaaaatataacacacgaaaataaaataatctcatatttaccttgaatcttatgtatgaatttaagctatatttttaatagagaaaaggggggacaaaaggccttgcctmatgattgagggtactgttctcaagagaataagctattcccagccagctagatccctggaccttggatccactacataggtctacatatcactacataggtctaacagaaaggaagcctcttttgagatagaacatgggtttcccctacatttaaaaaaattttattttattttaagttccgggatacatgtgcaggacgtgcaggtttgttatgtaagtaaacgtgtgccgtggtggtttgttgcacctatcaacccatcacctaggta

SEQ ID NO: 91781 - DNA, 1587 bp, Homo sapiens
atttgggagctgggagacaaagacaaagtgaatgaagtttcttcccctccaatcccactgcaaagatcctgccctacaaacacatatcctcacattgtagtatattttcagatttacagaaagtaacctagtgggaaattctcttttaagcaatatttagctgcttgaagtcttggttttatgaaagccagaatgttggcaaactgagaaatatgatcaatggggtagaagccacagcttggaggtaagctgaaatgtgatggccttttaaatagtccctgtaatttctccttaattgagatcctatttgttaatcattcatgtaaacgttaacggaaaacatgcagaatcaatttgcaagtactggcattcatttaaaaatctataaaggtaattttactatagtgacaaaaacacacaattcacaattacagaccctaaatatatatagtttttaaatttggaactgaattgacgtgagaactaagagtatttaaaaaactaagtagaacaaatttcaggcagtatctggtaaatttccagaggatttattgacttgccaacttaaaactggagtttcttagattttacgttccttttggaagtgtttgaccgtctttggctggtttgtagcctttcgtttcaagtggccttatctcagtgtccaaagcaagaaaacagataatgaaagaaaagcaacatctagaattttctagaagacatatatgcatgtacattcattcacacaggtatgatagacaagcaacacaaatagttttatattgcatttattaaaataacttaacatagtttaagtagggtacctatttagagcatcagactatctaaaattcatatttaattactttgtttccctactttaaaaatattatagggatccccattgaatttggattaaagtttaaataaatggcatactatatccatcataatttattatttagccttatctcctaggcaaccaccatccttaccatgagccctaggtgcccttcttttcctggcacaaagggcacttccttcagaaagtctaccctgaatttccatattgggcctagggcctcttctctctattcccccattacagtctgtatagctgtcttattcattaatgttactaattatactataataatagtaattaatattattcaatagtaatctggttccatgtcagtctttttctccaaactgtatgttctccaagtatgtggacacartggctctaggacatagcccctcaaagtgtaagttcaaaataattacttgttaaactgaatagaactacatttattaaaacacttattgtatataagtggataaacactacccaagtggagtggacactaagacgatcttcccaacactgggcaaattctcatttggataggccacctgtcaacatgtacacctgagctacaataaagaaggactggggacagggcagaactggaactgacaggtgccatgtttttctgtttcttctcttgtgtcttgcccttttatctctcctgcttcctgtaccatttttcacctcaacacacatgcactctcaggtacccacca

SEQ ID NO: 91782 - DNA, 1587 bp, Homo sapiens
atttgggagctgggagacaaagacaaagtgaatgaagtttcttcccctccaatcccactgcaaagatcctgccctacaaacacatatcctcacattgtagtatattttcagatttacagaaagtaacctagtgggaaattctcttttaagcaatatttagctgcttgaagtcttggttttatgaaagccagaatgttggcaaactgagaaatatgatcaatggggtagaagccacagcttggaggtaagctgaaatgtgatggccttttaaatagtccctgtaatttctccttaattgagatcctatttgttaatcattcatgtaaacgttaacggaaaacatgcagaatcaatttgcaagtactggcattcatttaaaaatctataaaggtaattttactatagtgacaaaaacacacaattcacaattacagaccctaaatatatatagtttttaaatttggaactgaattgacgtgagaactaagagtatttaaaaaactaagtagaacaaatttcaggcagtatctggtaaatttccagaggatttattgacttgccaacttaaaactggagtttcttagattttacgttccttttggaagtgtttgaccgtctttggctggtttgtagcctttcgtttcaagtggccttatctcagtgtccaaagcaagaaaacagataatgaaagaaaagcaacatctagaattttctagaagacatatatgcatgtacattcattcacacaggtatgatagacaagcaacacaaatagttttatattgcatttattaaaataacttaacatagtttaagtagggtacctatttagagcatcagactatctaaaattcatatttaattactttgtttccctactttaaaaatattatagggatccccattgaatttggattaaagtttaaataaatggcatactatatccatcataatttattatttagccttatctcctaggcaaccaccatccttaccatgagccctaggtgcccttcttttcctggcacaaagggcacttccttcagaaagtctaccctgaatttccatattgggcctagggcctcttctctctattcccccattacagtctgtatagctgtcttattcattaatgttactaattatactataataatagtaattaatattattcaatagtaatctggttccatgtcagtctttttctccaaactgtatgttctccaagtatgtggacacaatggctctaggacatagcccctcaaagtgtaagttcaaaataattacttgttaaactgaatagaactacatttattaaaacacttattgtatataagtggataaacactacccaagtggagtggacactaagacgatyttcccaacactgggcaaattctcatttggataggccacctgtcaacatgtacacctgagctacaataaagaaggactggggacagggcagaactggaactgacaggtgccatgtttttctgtttcttctcttgtgtcttgcccttttatctctcctgcttcctgtaccatttttcacctcaacacacatgcactctcaggtacccacca

SEQ ID NO: 91783 - DNA, 1211 bp, Homo sapiens
ttaaaattcttgtagtccttacctgctattattttaacactagaaaagtttattataaaaatttcctgagagcattgtattttatgattgcatattcataaagtgctcagctcaagcagagttctatacaagcttctctgttaaggtatgagagtgtgaccaggctctttgtctatcttcctttgcaaaatataatctcatattgattatcacagtcattaagtttgtgcggaattatttcatcttcctcttctgtgaagcatatggtaggactgtcattctcctttttaaatttaggtgtggccacgtggcttgctttggccaataaaatgtgagtagatgatatgcctttgcggtggaagctttaagagctaatgtgtgcttcatcacattctttccattctcccacagagactgacagcattcctggtggtgttgcttttttaagcttagatcccagaaagagattatgcagagtagagtttctagttgatttatggttgaaatggagtctgagaaacaaatctttgtcatgtaagattgttttttggggctgctcgttattgtaacataatgtagtcttttttgattgatacaaggatcagcggcacagcttatttcttactgtattcccacatgttagcacaaggcctggtacagaaagtatttgtgatttgttgaatcaaattttagaatcagagttcttcaacgcctgtggtgacaatgcaaagatgggggctgatattctgtgccatttggtcttgagttctcaatacattccattcatttttccagctggagggacgaagaatgacatttgacttagtcgcaaatggaaatcattttgtttggtacaaagcccattggaaaaaggaagacaaagggcatttctttcagtggtaacctgctactgcatttcctgtaaacactaaatattctcctctgttagcctatgagaaatggtgctaggtgggagaagaggcaagggttttcttgtttgtttgtctcttagctcaaaagaatcaggggagaaatctcttctaattacagagttrtgtgctttggaaggacttttttattcattaagtctgcccactgcctataagtaatctatcttggaaaagatgttttattcttagaagtatgaaaccatttttggtctctgaagcaagatgattggatccaccaatagaaagtcatattctcttggt

SEQ ID NO: 91784 - DNA, 846 bp, Homo sapiens
aaatagacaaacccagtattcatttcatttttttaaagtcaaagaggctgaagaatatcatggctctttctactttttttatgtagctataaacaataggcaaatatttatacagaaatttaatttcctttaattaaatatacttcaatgtcctaatttatgtataaaatataatgataaataaaagtattttttaaactttaaatttttggggaaagtttaacaggaatgaatttcagttcaggcttgataatttcacacagagaaataaaaattaagttaaaatgctgaattttaaaactctgctggcatatcatgacagcttttcagggaaaacatctattttcctttaataagattatgaaaattaaagctcattattgtgttacaaagatatagtttaacaaatgctattaatttcattggtcttaattgttttattaggatataattatttaaaggtgacaacattcataaattagttttctttaaatttgtkcaattgcagatgtgacatgacatgactgtacaaaagtgtgtggtttaaacactggtcacctaacttattaaggatctattttgtttttcttgttttaacatatggcagtagttctcagagtgtggtctttgaggttggcagtatcaccatcacctggaaacttattagaaaagcaaaatctctggcctctcatcctagctgactgaatcagtaactggggagagggtcaagcattgttatgtcttaacaagtccaatggataattcagatacacattaaaggtcaagaatcattaacctatgagttttcagctgtggtgtcatattagaatgatcagaggtgttaaa

SEQ ID NO: 91785 - DNA, 677 bp, Homo sapiens
tccctccagggctgctttgcagaacccagcctaagacagacctatgtctttaatgtcctgtgagaccctctatcacatggcctttgctcacrtatggcttcaacttgctctgagcctccccccacctccctaaccatcccagcaccccacctctttgggctccagccacagaacacgccaagttccctccctgcttagggcctgtgctgtttcttctcattggaattcccttctgttccatggccctacaacttcctcctcctgagaactccctgctctcaactgggtgagatcccctcttaaaccttcccttggtgatcagtcttacatttaccgccactcttgggtgcttgccttgcacctgcgtgagctcgacagtgaggccccaggtgctttgcttgcctccaggccagcctgactcacatgatttagtggtgggatttgtgagcccccagatagccactccttccagtagatgccaagcctgtttcctaccactgtatcctctgcccttagatagcacagagacccagatccacagacatgggccagatgagcaggagactgccagcagcccatcatgggaaacaatgggcaaggttcagaggaagagaagccaaaatgagcgaggaggggcagtgtagttgagggggtgcaaggcatgagtgagggtgtca

SEQ ID NO: 91786 - DNA, 966 bp, Homo sapiens
gtggttcctctagcaatgtaaggcggatttctactgttgttagtcagaaatgaaactcaaaactcatttagatgatggaattacgaagaacttgaatgtgggcctaacataaatcatgctgctataaagacacatgcacgcgtatgtttattgcggcattattcacaatagcaaagacttggaaccaacccaaatatccaacaatgatagactggattaagaaaatgtggcacatatacaccatggaatactattcagccataaaaaagggtgagttcatgtcctttgtagggacatggatgaaattggaaatcatcattctcagtaaactatcgcaagaacaaaaaaccaaacaccgcatgttctcactcataggtgggaattgaacaatgagaacacatggacacaggaaggggaatatcacactctggggactgtggtggggtggggggaggggggagggatagcattgggagatrtacctaatgctagatgacgagttagtgggtgcagcgcaccagcatggcacatgtatacatatgtaactaacctgcacaatgtgcacatgtaccctaaaacttaaagtataataataaaaaaaaaagaatcacatttccaatcctggtgtctcatagaggatcaaaaaacagtgtatgaaagacgcatgatgtgggcatttagagcattggctttggtttgggaggaagccagggcttaacaccagctctattattcaccttgtgtgagcttgattaagtgtattcaacactttgagtccttattgctttgtcggtaaaatggggaaaatagtaacacccctcttacaggttttttgagaagtcattgctattactcttaccaccatcactgccccgggaacttgtctttgtaataagatttttggtggatctgaagctgtgggttattgtttaacctccttcgtgtacacaggctgccttccttcat

SEQ ID NO: 91787 - DNA, 1322 bp, Homo sapiens
  misc_feature (1)...(1322): n = A,T,C or G
tatatnnnnnnnnnnnnnnnnnnnnnnnnnnnnnnnnnnnnnnnnnnnnnnnnnnnnnnnnnnnnnnnnnnnnnnnnnnnnnnnnnnnnnnnnnnnnnnnnnnnnctgtgaatttgcaatttagatccattgttaacatatggcaacatcttttccttatttgtttgcaagaaccctttatatattaaacatgttaccttttaaaatttttatcatttgcctttctgcttgataaattccaaaatatatcagaatatattttttaccattcagaaattttgaatctgtgtgtatgtgtgtgtgtgtgttttaagcccttgagtctagcaatatttttcactatgactttgtcctgagatccccagttataaagtttttctctattttcccccaaatcataacaatatttttaaaaattttcttccaatgcatttataatttgattttttaagattgaacttatctcaaaattaacttgcaactaaaaagctgatatgtgtggtttcttctctagactcagtgattctataaatttatcagtatccaagactgtaatagatagattaaacaaaattttgtctatttctttttttttttttttttgaaacagagtcttgctctgttgcccaggctggagtgcagtggtgcgatctcagctcactgcaagctccgcctactgggttcaggtcattctcctgcctcagcctcccaagtagctgggattacaggcgcctgccaccacgcccrgctaattttttatatttttagtacagacggggtttcaccgtgttagccacgatggtctcgatctcctgacctcgtgatccgcccgccttggcctcccaaagtgctgggattacaggcgtgagccaccgcacccggccccaaaaatttgtctatttctttgaataccaatgttctcctctaaaaagcaaaaacagtgaaatctcctctgcttgtaatattgtgaataaacatgtttcgaaaagtgtcaaatgctatagcagtataacaattatgactaaattcagcttcaggatgagaaagaagtgagacacaggaatgaaacatttgagttctcccaagaagggagaatactcggcaataagtttccttgatttgaactgatgaactcactaagtcacacacttgggagccattgggggtggtgtaggataaaggtattttctgagcatgtcagtgatactttatacatatcacagatttgacttaatactgccaaaaaaaaagacccaccaagattcaagtttaataacttaaaaagtaagaagaggttaattatcaggtattttatatgaaaa

SEQ ID NO: 91788 - DNA, 1322 bp, Homo sapiens
  misc_feature (1)...(1322): n = A,T,C or G
tatatnnnnnnnnnnnnnnnnnnnnnnnnnnnnnnnnnnnnnnnnnnnnnnnnnnnnnnnnnnnnnnnnnnnnnnnnnnnnnnnnnnnnnnnnnnnnnnnnnnnnctgtgaatttgcaatttagatccattgttaacatatggcaacatcttttccttatttgtttgcaagaaccctttatatattaaacatgttaccttttaaaatttttatcatttgcctttctgcttgataaattccaaaatatatcagaatatattttttaccattcagaaattttgaatctgtgtgtatgtgtgtgtgtgtgttttaagcccttgagtctagcaatatttttcactatgactttgtcctgagatccccagttataaagtttttctctattttcccccaaatcataacaatatttttaaaaattttcttccaatgcatttataatttgattttttaagattgaacttatctcaaaattaacttgcaactaaaaagctgatatgtgtggtttcttctctagactcagtgattctataaatttatcagtatccaagactgtaatagatagattaaacaaaattttgtctatttctttttttttttttttttgaaacagagtcttgctctgttgcccaggctggagtgcagtggtgcgatctcagctcactgcaagctccgcctactgggttcaggtcattctcctgcctcagcctcccaagtagctgggattacaggcgcctgccaccacgcccggctaattttttatawttttagtacagacggggtttcaccgtgttagccacgatggtctcgatctcctgacctcgtgatccgcccgccttggcctcccaaagtgctgggattacaggcgtgagccaccgcacccggccccaaaaatttgtctatttctttgaataccaatgttctcctctaaaaagcaaaaacagtgaaatctcctctgcttgtaatattgtgaataaacatgtttcgaaaagtgtcaaatgctatagcagtataacaattatgactaaattcagcttcaggatgagaaagaagtgagacacaggaatgaaacatttgagttctcccaagaagggagaatactcggcaataagtttccttgatttgaactgatgaactcactaagtcacacacttgggagccattgggggtggtgtaggataaaggtattttctgagcatgtcagtgatactttatacatatcacagatttgacttaatactgccaaaaaaaaagacccaccaagattcaagtttaataacttaaaaagtaagaagaggttaattatcaggtattttatatgaaaa

SEQ ID NO: 91789 - DNA, 1322 bp, Homo sapiens
  misc_feature (1)...(1322): n = A,T,C or G
tatatnnnnnnnnnnnnnnnnnnnnnnnnnnnnnnnnnnnnnnnnnnnnnnnnnnnnnnnnnnnnnnnnnnnnnnnnnnnnnnnnnnnnnnnnnnnnnnnnnnnnctgtgaatttgcaatttagatccattgttaacatatggcaacatcttttccttatttgtttgcaagaaccctttatatattaaacatgttaccttttaaaatttttatcatttgcctttctgcttgataaattccaaaatatatcagaatatattttttaccattcagaaattttgaatctgtgtgtatgtgtgtgtgtgtgttttaagcccttgagtctagcaatatttttcactatgactttgtcctgagatccccagttataaagtttttctctattttcccccaaatcataacaatatttttaaaaattttcttccaatgcatttataatttgattttttaagattgaacttatctcaaaattaacttgcaactaaaaagctgatatgtgtggtttcttctctagactcagtgattctataaatttatcagtatccaagactgtaatagatagattaaacaaaattttgtctatttctttttttttttttttttgaaacagagtcttgctctgttgcccaggctggagtgcagtggtgcgatctcagctcactgcaagctccgcctactgggttcaggtcattctcctgcctcagcctcccaagtagctgggattacaggcgcctgccaccacgcccggctaattttttatatttttagtacagacggggtttcaccgtgttagccacgatggtctcgatctcctgacctcgtgatccgcccgccttggcctcccaaagtgctgggattacaggcgtgagccaccgcacccggccccaaaaatttgtctatttctttgaataccaatgttctcctctaaaaagcaaaaacagtgaaatctcctctgcttgtaatattgtgaataaacatgtttcgaaaagtgtcaaatgctatagcagtataacaattatgactaaattcagcttcaggatgagaaagaagtgagacacaggaatgaaacatttgagttctcccaagaagggagaatactcggcaataagtttccttgatttgaactgatgaactcactaagtcacacacttgggagccattgggggtggtgtaggataaaggtattttctgagcatgtcagtgatactttatacatatcacagatttgacttaatactgycaaaaaaaaagacccaccaagattcaagtttaataacttaaaaagtaagaagaggttaattatcaggtattttatatgaaaa

SEQ ID NO: 91790 - DNA, 763 bp, Homo sapiens
cacatggccagtggaagtcccaacctcatcacagggcacacaataagttagtagcccccaratagcctagagcacaaaatggggtacagaaaatgatcagctgggtacaggaataaatattagacttttattgatattttttacttccttctgtaacagtttgtatgttttataaatgtatgtgatacattagtttagttggcatatgaatatattttatataaatttttacatctgcactgggtgatgtactcacaaatgagggggaatagggggtgtgtgatccctcacgtaggatgctgagaggcagctgcaggaagagctcagtttcctctcctcaagcgctcttattctctgagttcacattttatacactctcagactgacctgttgcccctaagatgcccccaaatcaattccagtcacttggctgcaaactaggataagtcttttgtcatgtggagtgaagccacatcaatggcatttgctctccttcagagagtgatatatagagattttcctgtaccttaaaaagcttatcacaaaaatgtaccagcaaacagaaaataaagattagacaaaatacagcaaaacaacgtgactgtacaaacacccaaaggagaaatcaattagctctaagaaaaagaggaatcatcctggagcaattcagccacaggcaaaatgagaacagaaatgagtgaaaagctgtatgtctcttttttaataagtggggatatagtcactgggcctccttaaaggaaaa

SEQ ID NO: 91791 - DNA, 572 bp, Homo sapiens
attcagtatgtcatctgctaggccctactccagccaaccgatctaccaagaatagagacagtatatacactgagaaacgtccattatcctgcagttctatgaattgtctgttttctccctttgcgcttttgtactaataaaaatttgtatgtcttgggacaccaatgtaaagcatgatcctaatagaatggatcttaacaaagtgattatttccactgtacgttgtggtaattggaaaatgagcctgtggaaacagtcctatatctaggtcattatttcacctatcccaattaggatgtgttcaaatactaaagtgcaatataacrctttttgtaatggcctgtgccagctcttttgcaaggggctatttgaggtcaccaagctgtgatagaaaagaaaccacatcagatctctgaggctgacatctacattctgacttacggcgggtctgttttttgaatttggagcttcctgatcagtttatccactcattcaaaagcagaagattcctctacactcccacaagaaatgtgtttgtgatttctttaaggccaaaaacagtctcacacaca

SEQ ID NO: 91792 - DNA, 711 bp, Homo sapiens
ggtggatgagtgcctcctgagtgttacagccagaagagttcagttggggcaggagggaccttaatgtccctttagtataaatgctcatccatggttcaagtctgctaagatagcctcgtgcagtgacwgtgtgcctctgaccgtgcgtgtccaaggatgggggacccactgctgcccagaacaatgcattttccatgactgtgtgaaaactcttctagcccttgagctgaatctgtctccctggaactttgactcatcaatcctggctctttcctacccgctgagaccacacagcacactgctaatctatcatcctcatggcagctcttcagtgtttggagacctccacaccaccctgaggcttctcttctggctagaatttgtctgtcgcttcagccctctcttgtgggccatggtttagggttcccacatcacctgctcactaagatccagatcctgtcacttcctttccatccacactttcacagattttattgagacctcctgcataggcataggggaccccaccgggagctcacagcctaggatggggtgcagggaaggaaaaattctcctttgccctctcagagtctgccgctgggcctgagaatcaaactgacataagatagattaacaggagaaatgcatgcaagtcttattaagaatttaggtgtacatgggagtcttcacaaggaaatgaagacccaaaga

SEQ ID NO: 91793 - DNA, 665 bp, Homo sapiens
agaatagttgagccgaatcttcagacctcaaagtttcacattgttctgtgaaacakaagaaacataattggaatacattaatacagtacaaaagaatatatttctaagaacttagtttttctaagaaaaagagagttaacctcttcaacataaggataatgacggatatacattgtcatgtaggtgaaatagccaagttagcatagtgcatgtagcatgtactcaactgatgcaagggactttggcagttaatggaaacaaaatggagattgagctttctgtattctcagatggctagcagataagggtgcttaaaaatccctcatcctaatttttactaatcatcctggtgtcagattaaacgtctttctgaaaggccttcttggaacttcttggcataaattaaaccctcttctataatcttatatacttagtttgtgtgtatttgttaatgtctccttcatctcttctgcttaagacactctgtgtatattggtttcataaatgtgatttgtcctttagtccaagttcaaatgccggttcctctctggggacttgcttgacacatcctaaaacaactcaattttacatgatcttttttgtaacttctttgtaattgtacctgtattatagaagttttcaaagtttttcaaattagctatgta

SEQ ID NO: 91794 - DNA, 1656 bp, Homo sapiens
tgcatcaatatccagtgaaatccaccattggttggtaaaaagtggtgtccttcagaaaaggatccttgacaatgactattgctatacagaatggggtttgggttcagggagaaagccatcagtttttccagagtcctagtgtggaaggtaacttcagaacagagcaaaaaaaacaaaaaaacaaaaacaaacaaacaaacaaaaacaaaaacaattgcagacttttgactaacatggtcaaacatggtagaaatagggaaaagctgtgagtctgtgggtatttgggtgccagtggcagcaaaaataatttcagtctccattggttggtgagtttcaggctgttaatataatcatacagtttggaactgagtatggctacacatgcaggtaaaagatctcaggaatcacagccgctcatggaatacaggacataattataactatttgtgtggggagttcaaatatgtctttgtaatttaggctggaatgtatatgccaacacatttgtatcttgaatatataaaaccatatttgtgtctgaatcagcaccatcaataaaaaataccatattttcaaaatgtttatctatttataaagtygctccattattctttgactataatcttggatttaaaaggaaatattcaccctctgcccctaccttaaccaattttgtctgatggaagtgtttagcttggagaaaggtggtcttgtactgacactgaaaacattgacccagatggtcatttatgtcgcacttctaacccgacactacaatttggggaagatttttggccaaatcattagaatgctgccctgtgagtcaataggcttaggccaccatttacattttgtttcttcagtttttttctttttctttttatatatccatggattcctgtacacttttaatagcagcatattacaatcaggatattacagtgtaaagagccaagtctttggatacagatggacctaggttggatcccagcactactacttattaacagggaaatattgagctagttctctactttctctgagcctctgtttccttctctattaaatggggataataatacttgcctcaaggtttgttttgagaattagtgaggtaatagatagtacttggcatttattagacacaaaataaatattcattccatttcttctttaatactctttgtgattattaagctatctcagctggctgcatttatatttatgacattcaaaatatgaaagcattgttacaaaatcccaaatgtctagaattcagataaagatgttctctcatggaatgattcacatggaaaaactcattagatacgtctttccaaaataatcacattgataaactatgtattaaatgattttagttaaatacctacaacacattgtggaccattactaggtgctcatttattttaaggacagaaacaatacacacagggagagttagctgaacagcaattaaacacatttcatgtttcctgtgttgtacatcagcagtatttagagcaaagccttgaatctcatggggggccattcacatgcagtctgcagctcttcaacacctaaaatcttcatacaggatattatcattcagttctatgggccacatggtacatttcaataaaaaacactaaagcatgg

SEQ ID NO: 91795 - DNA, 1656 bp, Homo sapiens
tgcatcaatatccagtgaaatccaccattggttggtaaaaagtggtgtccttcagaaaaggatccttgacaatgactattgctatacagaatggggtttgggttcagggagaaagccatcagtttttccagagtcctagtgtggaaggtaacttcagaacagagcaaaaaaaacaaaaaaacaaaaacaaacaaacaaacaaaaacaaaaacaattgcagacttttgactaacatggtcaaacatggtagaaatagggaaaagctgtgagtctgtgggtatttgggtgccagtggcagcaaaaataatttcagtctccattggttggtgagtttcaggctgttaatataatcatacagtttggaactgagtatggctacacatgcaggtaaaagatctcaggaatcacagccgctcatggaatacaggacataattataactatttgtgtggggagttcaaatatgtctttgtaatttaggctggaatgtatatgccaacacatttgtatcttgaatatataaaaccatatttgtgtctgaatcagcaccatcaataaaaaataccatattttcaaaatgtttatctatttataaagttgctccattattctttgactataatcttggatttaaaaggaaatattcrccctctgcccctaccttaaccaattttgtctgatggaagtgtttagcttggagaaaggtggtcttgtactgacactgaaaacattgacccagatggtcatttatgtcgcacttctaacccgacactacaatttggggaagatttttggccaaatcattagaatgctgccctgtgagtcaataggcttaggccaccatttacattttgtttcttcagtttttttctttttctttttatatatccatggattcctgtacacttttaatagcagcatattacaatcaggatattacagtgtaaagagccaagtctttggatacagatggacctaggttggatcccagcactactacttattaacagggaaatattgagctagttctctactttctctgagcctctgtttccttctctattaaatggggataataatacttgcctcaaggtttgttttgagaattagtgaggtaatagatagtacttggcatttattagacacaaaataaatattcattccatttcttctttaatactctttgtgattattaagctatctcagctggctgcatttatatttatgacattcaaaatatgaaagcattgttacaaaatcccaaatgtctagaattcagataaagatgttctctcatggaatgattcacatggaaaaactcattagatacgtctttccaaaataatcacattgataaactatgtattaaatgattttagttaaatacctacaacacattgtggaccattactaggtgctcatttattttaaggacagaaacaatacacacagggagagttagctgaacagcaattaaacacatttcatgtttcctgtgttgtacatcagcagtatttagagcaaagccttgaatctcatggggggccattcacatgcagtctgcagctcttcaacacctaaaatcttcatacaggatattatcattcagttctatgggccacatggtacatttcaataaaaaacactaaagcatgg

SEQ ID NO: 91796 - DNA, 1085 bp, Homo sapiens
tgcattttaaactgtgtgccattcagctccgtccaacctgggatgtgaattatctctttgtccagtggatccacactgtctgtgctacctgcctgttagtcatttagtagctgttttgcttcagataaactgctgaggtaaagcagttcttgtattgaggtaatgcttattttacttaataagcggccccaaagtgcaagagtagtgatgatggtatgtcattataattaatatttaattattagttattgttgttcatcttacttgcctaatttatgaattaaactttttcataggtatgtatgtatagggaaaaacatagagttcgatattatctgtggccaggcatccactgggggtcttagaacacatctcttgcagacaacgggagactactgtattagacatctgattttaaacttcttcttatgggcaatgtgctctgatatttttcatcttattctatcctattctatttcattttattatattgtatttttaaaatgctggggctactaccagatcacacaattccctaatgagtcatgacctgagatttaacacacctaatctatctggagcagtcagaagtcacagcaaagggccttgatttttgaacaaaaaaaaaagctatttgcctctaaaaattcatatgggtctttttgcagattgtgaaacctagatgttcatttaattaatatgtttttttccatccttgtgacatataatatttcatttcatttactttttatcgcaactttataagttaggtttaacagacattttatagcaactttgtaagttaggtttaacagacatttacaagtttctccatcttttaaagatgaagacactgaatctcgggttgagtgattttctaaggtcacacagatagtaactgtttctgctttgaaagccagactcatttacatctatgcccrctgcaccacataggccattgtttctccaaaggtggtagagtactgtctgaatctgaatttcctaggtgcataatacttgctaaaacatacagattcctggctctaccttgatctagaggatcagaatatctaaagctggacgtg

SEQ ID NO: 91797 - DNA, 723 bp, Homo sapiens
acctgaggagctkggagggagcaattattttccacttcatatcaaaatattcccattgcaatcagtcttcctattttatcttatataaaatgtttattattttctacctcctagtaaaaagtgaaattgctagctgctcaattcattatttcttagcaaatacagctttcctttctaaaaaatacagaagaaaaaaatttgtgtaacaagattattagttatttctgatttttagacatgattctcatttaattgttcccaaaagctgaacaacaagagtttgatgaaagcaggcacacacatttaccaagggaatatatgccttctatatgacttctcaaaactgatggatttaactatacattatacagcattattcctaattatataatgaaaaacagtactatcttatttttaccatttattatgttaatagtaggtctaaataattttaatcttgactggtttatcagtggtccattttataagctatagttaatcatttatttcctaataatttttataatattcctcaaaatgaatgttaacatatttatttgaatggaagaataaagtcagacatgtttctaacagaaagtaggtctgatttggctgattggtttgaaatgaaaactggctttgccaattccacaaatggcagttgttttctatacagtgaatgagctgaatctgcatttcagtttaacaaaaagttcttgaaga

SEQ ID NO: 91798 - DNA, 1477 bp, Homo sapiens
acagtgtaattgtggaaaatttcaaatgaaaagagagaatagtataataaaccccagcatactggtcaccaagcttcaatagttatcaaaacattttgccattcctattctgttcctcctgatgtctttttctcccctggagatttctaaagcactataatttcacctataaatactcttgtttgtatttctaacagataaggattttttaaatgatcatattattattatacctaacaaaatcaacaataattccttaatatcatgtcatgatcagttgatactcagttttccctgattgaacatgaattttaactgacagatttctgaatttagaattgttttattagctctagggacctgaaagtagattataaattcagttaaaataacttagttatttctcaaaagggccagaagcaaactagaaatagaaaattgttcttttgtatcattgttttgtaaattcacctcaacaattggccttgcacagttttttgcatcctccttatctcctgggtttcaaacaaaccaaaaatatcgattactctaagatttaaagtcatgtggagcaaaaaacaaagccaatgcacttgtgtatagttccacctactggctaggtgagagattgcttctatagctgctacgtagactaagctactccagaattgccctcatgtttctggcaayagatgtaattacccctggtatttaggggctcattgctcaggttatgggttatctggatcctttttacagtttttgtaacatgacacccatacagtgtagacaatgaaaggcaaaaaaataaaataaaattaggtcagttagttttgttgtttgttggctacttagaagcagcatttatcattttggtggagaaaaggctagacaaaacagcatatttggatcatgagtgagtttcttaatatggtgtccatatctgtctttgccacagactatgtataaccaacactcctttttttcttcctaaactgaagtcatgaaattatatggcccgagaatgttgtttatcatgttagaaaatccttagaactagttgatggctgggctcagtggcttacgcctataatcccagcagtttgggaggccaaggcaggaggatcacctaggggtttgagaccagcctgggcaatagagtgagacctcatctctacgaaaaaattttaaaaattagccaagcatggtggcacacacctgtagtcccagctacttgggaggctgaggtgggagaattacttgagccacagaggcagaaattgcagtgaaccaagatcatgccactgtactccagtgtgggcaacaaagtgagaccctgtctcaaaaataataagccggacttggtggctaacacctgtaatcccagcagtttggaaggttaaggtaggtggatcacttgaggtcaggagtttgagaccagcctggccaacatggcaaaaccccgtctctactaaaa

SEQ ID NO: 91799 - DNA, 1477 bp, Homo sapiens
acagtgtaattgtggaaaatttcaaatgaaaagagagaatagtataataaaccccagcatactggtcaccaagcttcaatagttatcaaaacattttgccattcctattctgttcctcctgatgtctttttctcccctggagatttctaaagcactataatttcacctataaatactcttgtttgtatttctaacagataaggattttttaaatgatcatattattattatacctaacaaaatcaacaataattccttaatatcatgtcatgatcagttgatactcagttttccctgattgaacatgaattttaactgacagatttctgaatttagaattgttttattagctctagggacctgaaagtagattataaattcagttaaaataacttagttatttctcaaaagggccagaagcaaactagaaatagaaaattgttcttttgtatcattgttttgtaaattcacctcaacaattggccttgcacagttttttgcatcctccttatctcctgggtttcaaacaaaccaaaaatatcgattactctaagatttaaagtcatgtggagcaaaaaacaaagccaatgcacttgtgtatagttccacctactggctaggtgagagattgcttctatagctgctacgtagactaagctactccagaattgccctcatgtttctggcaacagatgtaattacccctggtatttaggggctcattgctcaggttatgggttatctggatcctttttacagtttttgtaacatgacacccatacagtgtagacaatgaaaggcaaaaaaataaaataaaattaggtcagttagttttgttgtttgttggctacttagaagcagcatttatcattttggtggagaaaaggctagacaaaacagcatatttggatcatgagtgagtttcttaatatggtgtccatatctgtctttgccacagactatgtataaccaacactcctttttttcttcctaaactgaagtcatgaaattatatggcccgagaatgttgtttatcatgttagaaaatccttagaactagttgatggctgggctcagtggcttacgcctataatcccagcagtttgggaggccaaggcaggaggatcacctaggggtttgagaccagcctgggcaatakagtgagacctcatctctacgaaaaaattttaaaaattagccaagcatggtggcacacacctgtagtcccagctacttgggaggctgaggtgggagaattacttgagccacagaggcagaaattgcagtgaaccaagatcatgccactgtactccagtgtgggcaacaaagtgagaccctgtctcaaaaataataagccggacttggtggctaacacctgtaatcccagcagtttggaaggttaaggtaggtggatcacttgaggtcaggagtttgagaccagcctggccaacatggcaaaaccccgtctctactaaaa

SEQ ID NO: 91800 - DNA, 1272 bp, Homo sapiens
ttccctgctatacaactgaaactgtatatcatatatagcccgaatccatctcacatctataaaagattcagagcgggcccctgtggctgttgagtagagtgtgaattactggtgtggagtggaggcagatttgtctgtgtaccactcacagtgttagcttcaaagtcttgcttataaaaatggagaataagacaaataacaggcttccttatttaattactacatagatgctttgtgaaagcctttcctaaaacacttttaatttctctgtttcaagcaccaccttagttttagataaatgagtagattattttacatctttactctgataartagttcagcacaggaagcagctgtgtaaactcaagatgagcttgatgtttaaggataaaaataaaaagcatttcagattagccttccaagaggaaaaagcaaattgtttccattacaagttatctaatttaagaccctgaggttttaacagtgggttaaaatgtatattttagtctctgcagatgtaccagtcaagtcaaataaaatacacaaggctaggcatggtggttcatgcctgtaatctcagcactttgggaggctgaggcgggcaaattgcttgagcccaggagtccaagaccagcctgggcaacatggcaaaaccccatctctacaaaaactacaaaaattagttgggcatggtagtgcctgtagtttcagccacttgggaggctgaggtgggaggatcccttgaacctgggaggcagaggttgcagtgagccgagatcacaccactgtactccagccttagcgagagagtgagaccctgtctcaaaaaaaaaaaaagaaagaaaataaaatacgtatgtttcaattgcagattaaaatgcctttttaagtagactgttatacagttatatattaatcacagtcacgttttaatttcgagttagggtttacaagtaattgtggttagaaacaggtgcccccaattaaaatatttaaaacaggtttgacttaaaaggctggtaaaatagaacagaaaatttgattttccttggaatctgtctatgtgtgggcacaggccaagaacattataacctgtaagtgaacaagattgacagcatgggactgtggctttgaggtcacattatctgtcttgcacaattgaggtcagaagccattacaggaatccagacattctgaaacagatatcctatttttctgatctataaatttgtttcttccattatggattaaatggaggaagagatatgaatg

SEQ ID NO: 91801 - DNA, 1272 bp, Homo sapiens
ttccctgctatacaactgaaactgtatatcatatatagcccgaatccatctcacatctataaaagattcagagcgggcccctgtggctgttgagtagagtgtgaattactggtgtggagtggaggcagatttgtctgtgtaccactcacagtgttagcttcaaagtcttgcttataaaaatggagaataagacaaataacaggcttccttatttaattactacatagatgctttgtgaaagcctttcctaaaacacttttaatttctctgtttcaagcaccaccttagttttagataaatgagtagattattttacatctttactctgataaatagttcagcacaggaagcagctgtgtaaactcaagatgagcttgatgtttaaggataaaaataaaaagcatttcagattagccttccaagaggaaaaagcaaattgtttccattacaagttatctaatttaagaccctgaggttttaacagtgggttaaaatgtatattttagtctctgcagatgtaccagtcaagtcaaataaaatacacaaggctaggcatggtggttcatgcctgtaatctcagcactttgggaggctgaggcgggcaaattgcttgarcccaggagtccaagaccagcctgggcaacatggcaaaaccccatctctacaaaaactacaaaaattagttgggcatggtagtgcctgtagtttcagccacttgggaggctgaggtgggaggatcccttgaacctgggaggcagaggttgcagtgagccgagatcacaccactgtactccagccttagcgagagagtgagaccctgtctcaaaaaaaaaaaaagaaagaaaataaaatacgtatgtttcaattgcagattaaaatgcctttttaagtagactgttatacagttatatattaatcacagtcacgttttaatttcgagttagggtttacaagtaattgtggttagaaacaggtgcccccaattaaaatatttaaaacaggtttgacttaaaaggctggtaaaatagaacagaaaatttgattttccttggaatctgtctatgtgtgggcacaggccaagaacattataacctgtaagtgaacaagattgacagcatgggactgtggctttgaggtcacattatctgtcttgcacaattgaggtcagaagccattacaggaatccagacattctgaaacagatatcctatttttctgatctataaatttgtttcttccattatggattaaatggaggaagagatatgaatg

SEQ ID NO: 91802 - DNA, 615 bp, Homo sapiens
tagactgaatcaggttctgagaagtcaagagaacctaacccaaaaggagatcaaaggaagcaacccttacatcctcagactcgaagacgtggcagatcatcttgtactgccttttcccatcctgggatgggtgggacgcttccacgttctcctgggagttggagcgaggcatccgccggcgggccatcagcacaacgatgttcccaatgtccgcaatgtaggaaatggtcctcagagggtggtccatcattgtctcctggaggcaggaagagagggcgggtaagtccagytcagcatctaatgacctaagaaagcgcctgccaccttacagccagtcaagtatggttcgcatgcagggtgggctccagggctcactgcaaagcccatgctgagggatcaacggatacccacccaggccggagggcatttcccttagctaatcaagagcaggaaatgatctgtggcaggtgaaaagaaataagaaattccaaacagttgaatctcttgtggagaagtttaaaaaaaaaaaagacaaatcaaaatggcagggctgtttgtttttgtgtgcgtgaatgtaagagattttaaataaaatttcttaaaagacaaatttgt

SEQ ID NO: 91803 - DNA, 1416 bp, Homo sapiens
ctgctcaggcaccctgcctggcagaggcgtgaaactggtgttagacaacttcacygcaaacagaatctgtagcaagagtgcttcttggagtggcagaaatgacctataccccttttgtatctgagttacaggatatgctttagattgagggagaggtaggggctattttgcctctggttatccagctttactacgcttggccagcaggcgtacaccaatggctcttaaaccccacacagcagcagcagcagcccctggccactttttagaagtgcagattctgggctctacccaagccccactgaatcagaaaacctaggggtgggacccaggaatctgtggatgacaaatctcccagatgattcaggtgcacgctcaattttgcgaacaactgttgtggactactactgcagaacaatgaatgacctcatctgcatccaggtggcttaatttctccatggatgattacacccaaagatgtcaatttactagtcacacctgcagccagtgtgctcagtgagagcaggcgctggcaagggtggggtgagggtgacatcttgtgggaaattttgtttgcccagtcactatacagctgacccctgttcagccatctgcatgtctatgtcatgcaggaacacccctaagatcactgctgcatcaaaacccaccctgatgatgaaactaattgaaccaaaatcactgtaactacctgtcattgaacactcactgttatctggcattaacctggaaaggacaggagctgtctcatttaatgtggctgtaattatttctatattatagaagaggaaactgaggctcagagattttaaatgactcactcacattcacacacagcaagattcaatcctatgtctgtccgcattcaaaacgcacagtatttctacaccataatgccccatatacacaaccagagagggtgtgtcttttgtgaataaggcttgctccacaaagacaacagggtcagccacagaacaaatctgtgtccccaaattccagccttgaattggggccatctttttagttcattttcctacgtggcaagagtttttcggggttcctggtcctcataatcccccaccccctggcttccccactgacttctgcttctagtttgtgctcctaatgtgtgaattttgatggaactcaatttccccgccgtcagcatctgctccccccgtgctctgaattcctctgctttctgcaggacttgagcctccccatggctgtcactcagcttgtggcctcgatgtaccatgcgacttagcattcacattcatgtggcatctcctggtggttttggaacatctccagggaactgctctggttaaggaaatgattccaaagcacagcaatggaatgagtgtgattctccctggggaaatgaacatctgtgaa

SEQ ID NO: 91804 - DNA, 1416 bp, Homo sapiens
ctgctcaggcaccctgcctggcagaggcgtgaaactggtgttagacaacttcaccgcaaacagaatctgtagcaagagtgcttcttggagtggcagaaatgacctataccccttttgtatctgagttacaggatatgctttagattgagggagaggtaggggctattttgcctctggttatccagctttactaygcttggccagcaggcgtacaccaatggctcttaaaccccacacagcagcagcagcagcccctggccactttttagaagtgcagattctgggctctacccaagccccactgaatcagaaaacctaggggtgggacccaggaatctgtggatgacaaatctcccagatgattcaggtgcacgctcaattttgcgaacaactgttgtggactactactgcagaacaatgaatgacctcatctgcatccaggtggcttaatttctccatggatgattacacccaaagatgtcaatttactagtcacacctgcagccagtgtgctcagtgagagcaggcgctggcaagggtggggtgagggtgacatcttgtgggaaattttgtttgcccagtcactatacagctgacccctgttcagccatctgcatgtctatgtcatgcaggaacacccctaagatcactgctgcatcaaaacccaccctgatgatgaaactaattgaaccaaaatcactgtaactacctgtcattgaacactcactgttatctggcattaacctggaaaggacaggagctgtctcatttaatgtggctgtaattatttctatattatagaagaggaaactgaggctcagagattttaaatgactcactcacattcacacacagcaagattcaatcctatgtctgtccgcattcaaaacgcacagtatttctacaccataatgccccatatacacaaccagagagggtgtgtcttttgtgaataaggcttgctccacaaagacaacagggtcagccacagaacaaatctgtgtccccaaattccagccttgaattggggccatctttttagttcattttcctacgtggcaagagtttttcggggttcctggtcctcataatcccccaccccctggcttccccactgacttctgcttctagtttgtgctcctaatgtgtgaattttgatggaactcaatttccccgccgtcagcatctgctccccccgtgctctgaattcctctgctttctgcaggacttgagcctccccatggctgtcactcagcttgtggcctcgatgtaccatgcgacttagcattcacattcatgtggcatctcctggtggttttggaacatctccagggaactgctctggttaaggaaatgattccaaagcacagcaatggaatgagtgtgattctccctggggaaatgaacatctgtgaa

SEQ ID NO: 91805 - DNA, 1416 bp, Homo sapiens
ctgctcaggcaccctgcctggcagaggcgtgaaactggtgttagacaacttcaccgcaaacagaatctgtagcaagagtgcttcttggagtggcagaaatgacctataccccttttgtatctgagttacaggatatgctttagattgagggagaggtaggggctattttgcctctggttatccagctttactacgcttggccagcaggcgtacaccaatggctcttaaaccccacacagyagcagcagcagcccctggccactttttagaagtgcagattctgggctctacccaagccccactgaatcagaaaacctaggggtgggacccaggaatctgtggatgacaaatctcccagatgattcaggtgcacgctcaattttgcgaacaactgttgtggactactactgcagaacaatgaatgacctcatctgcatccaggtggcttaatttctccatggatgattacacccaaagatgtcaatttactagtcacacctgcagccagtgtgctcagtgagagcaggcgctggcaagggtggggtgagggtgacatcttgtgggaaattttgtttgcccagtcactatacagctgacccctgttcagccatctgcatgtctatgtcatgcaggaacacccctaagatcactgctgcatcaaaacccaccctgatgatgaaactaattgaaccaaaatcactgtaactacctgtcattgaacactcactgttatctggcattaacctggaaaggacaggagctgtctcatttaatgtggctgtaattatttctatattatagaagaggaaactgaggctcagagattttaaatgactcactcacattcacacacagcaagattcaatcctatgtctgtccgcattcaaaacgcacagtatttctacaccataatgccccatatacacaaccagagagggtgtgtcttttgtgaataaggcttgctccacaaagacaacagggtcagccacagaacaaatctgtgtccccaaattccagccttgaattggggccatctttttagttcattttcctacgtggcaagagtttttcggggttcctggtcctcataatcccccaccccctggcttccccactgacttctgcttctagtttgtgctcctaatgtgtgaattttgatggaactcaatttccccgccgtcagcatctgctccccccgtgctctgaattcctctgctttctgcaggacttgagcctccccatggctgtcactcagcttgtggcctcgatgtaccatgcgacttagcattcacattcatgtggcatctcctggtggttttggaacatctccagggaactgctctggttaaggaaatgattccaaagcacagcaatggaatgagtgtgattctccctggggaaatgaacatctgtgaa

SEQ ID NO: 91806 - DNA, 1416 bp, Homo sapiens
ctgctcaggcaccctgcctggcagaggcgtgaaactggtgttagacaacttcaccgcaaacagaatctgtagcaagagtgcttcttggagtggcagaaatgacctataccccttttgtatctgagttacaggatatgctttagattgagggagaggtaggggctattttgcctctggttatccagctttactacgcttggccagcaggcgtacaccaatggctcttaaaccccacacagcagcagcagcagcccctggccactttttagaagtgcagattctgggctctacccaagccccactgaatcagaaaacctaggggtgggacccaggaatctgtggatgacaaatctcccagatgattcaggtgcacgctcaattttgcgaacaactgttgtggactactactgcagaacaatgaatgacctcatctgcatccaggtggcttaatttctccatggatgattacacccaaagatgtcaatttactagtcacacctgcagccagtgtgctcagtgagagcaggcgctggcaagggtggggtgagggtgacatcttgtgggaaattttgtttgcccagtcactatacagctgacccctgttcagccatctgcatgtctatgtcatgcaggaacacccctaagatcactgctgcatcaaaacccaccctgatgatgaaactaattgaaccaaaatcactgtaactacctgtcattgaacactcactgttatctggcattaacctggaaaggacaggagctgtctcatttaatgtggctgtaattatttctatattatagaagaggaaactgaggctcagagattttaaatgactcactcacattcacacacagcaagattcaatcctatgtctgtccgcattcaaaacgcacagtatttctacaccataatgccccatatacacaaccagagagggtgtgtcttttgtgaataaggcttgctccacaaagacaacagggtcagccacagaacaaatctgtgtccccaaattccagccttgaattggggccatctttttagttcattttcctacgtggcaagagtttttcggggttcctggtcctcataatcccccaccccctggcttccccactgacttctgcttctagtttgtgctcctaatgtgtgaattttgatggaactcaatttccccgccgtcagcatctgctccccccgtgctctgaattcctctgctttctgcaggacttgagcctccccatggctgtcactcagcttgtggcctcgatgtaccatgcgacttagcattcacattcatgtgkcatctcctggtggttttggaacatctccagggaactgctctggttaaggaaatgattccaaagcacagcaatggaatgagtgtgattctccctggggaaatgaacatctgtgaa

SEQ ID NO: 91807 - DNA, 737 bp, Homo sapiens
tttaacatttgttgaacttccctgtacatcaagttctggtctttgagtgactgccactgctgtgggaagtgatgggaaagatgaaggctgttggtgaactacaacattttgttgaagtgtttagtttcattggtgccttactttaaagaggtatcttaaatgtttaaatggagctgcatgaactaaaaacatcttgagtaatcttaaagcatgcacctccttaaactcttattgagccaattcccttagaacaaatttccatgtctaaaatatgttagctaattaaatatgataagaawgtgtaaaaagtattagttttggttataatcaacagactaatgccagatagctggggagtaaaaggaaatgtattaccaggaaatatgagttttctcaggaaatccaaaaatgagcatgcagctgggagtcaggaataaactgaaggaagggctcactgtcaggcttctttctccatctgtcatctctgcgcttccctctccgcatttggtctctttgcagactggctttccctgtttctccagtttctgtggtggaaaccatggcaattgagaagcctccggtttcattcaacacaagaacctccaccagtatcagtggaaaatatccttcaacataagaattcccaattctctgacccaggtttggccacatgatcaccctggaccaatgagctgaggctggatgggcggggtcacattagaagaactggactgtta

SEQ ID NO: 91808 - DNA, 899 bp, Homo sapiens
taacacctcctgggggcagtctgtgaccaataactcataccaagtgatggataaataccttaactcctttaataaataactcatactaaatgatggataaatamcttagctcctttgcccctaggacggaataattgagacacatattccaaatgggctaccagagtctcctagctggattaagctctagttccaaacttgtcactagtttaatgagtctttttttttttttttgagaaggagtctcgctctgccgtccaggctagagtgcagtggcatgatctcggctcactgcaacctccgcctcccagggtcaagcaattctcctccctcagcttcccaagtagttgggattacaggcgcctgccaccacgcctggctaacttttgtatttttaatagagacatgatttcaccatgttggccaggctggtcttgaactcctgacctcaggtgatctgcctgcctcggcctcccaaagtgctgggattcagggatgacccacgacgcccggctgatgcttcaccttttattgctatctttcctttcccatctcacttctccacttccctacagatgtttcctgagatcctctctcaaataaactgctgcaattaaatcttcgccttggagttttggagaaaaccaaactaagatgcctcatctccctcagtggcccaaattaaaactctagcagaggtagtatgattggcctgatctggttcatatgaccattcatcattcaatcttctggaattaggggactgggtgatggaattgcacggttccctgggccttcctatcatcaaggcttatggaggagtagctcccagataaagatctatgggaagaaaggcataatatggcctcctaattcaccatggtgcatttctaacatgc

SEQ ID NO: 91809 - DNA, 797 bp, Homo sapiens
  misc_feature (1)...(797): n = A,T,C or G
agaagaaaggaagctcaagcaagcaatgagagagtcggaagttgcgtacatcactttagcttaccttcctttgtctaggaattagtttgtcatgcctacctacaagctagatgggaaagtggagtctgtgtctgggtgtcttttgctcagctaaaattctattactrtggaaaaatgaaaagcaggttttaggagaaactagcagtctgtcacaataaactgtgtcttaaaaattgtttatatataattatatatatgtaactattgtgatatataatgtgctaatcattaggtaaactattcagtctctctggattgcaattttcttttttttaattttttttttttcttttagagatagggtctctctctgtcacccagatttgggtacagtgatgcagccgtagctcactacaacttccaactcctgggctcaagtgatcttcctgcctcagcctcccaagtacctgngactataggcacatgccaccattcccagctaattatctgtttttattttttgaagagacagggtcttgctacattgcccaggctgatcttgaactcnnnnnnnnnnnnnnnnnnnnnnnnnnnnnnnnnnnnnnnnnnnnnnnnnnnnnnnnnnnnnnnnnnnnnnnnnnnnnnnnnnnnnnnnnnnnnnnnnnnntattctctgtagtttacttattctaataactagttgcgcagttttccaaaagcaagttaccatactgtgtgctctcatttcctttcccatgaaatctaatggctgcatgagtaatagtgtagaatacatg

SEQ ID NO: 91810 - DNA, 797 bp, Homo sapiens
  misc_feature (1)...(797): n = A,T,C or G
agaagaaaggaagctcaagcaagcaatgagagagtcggaagttgcgtacatcactttagcttaccttcctttgtctaggaattagtttgtcatgcctacctacaagctagatgggaaagtggagtctgtgtctgggtgtcttttgctcagctaaaattctattactatggaaaaatgaaaagcaggttttaggagaaactagcagtctgtcacaataaactgtgtcttaaaaattgtttatatataattatatatatgtaactattgtgatatataatgtgctaatcattaggtaaactattcagtctctctggattgcaattttcttttttttaattttttttttttcttttagagatagggtctctctctgtcacccagatttgggtacagtgatgcagccgtagctcactacaacttccaactcctgggctcaagtgatcttcctgcctcagcctcccaagtacctgngactataggcacatgccaccattcccagctaattatctgtttttattttttgaagagacagggtcttgctacattgcccaggctgatcttgaactcnnnnnnnnnnnnnnnnnnnnnnnnnnnnnnnnnnnnnnnnnnnnnnnnnnnnnnnnnnnnnnnnnnnnnnnnnnnnnnnnnnnnnnnnnnnnnnnnnnnntattctctgtagtttacttattctaataactagttgcgcagttttccaaaagcaagttaccatactgtgtgctctcatttyctttcccatgaaatctaatggctgcatgagtaatagtgtagaatacatg

SEQ ID NO: 91811 - DNA, 678 bp, Homo sapiens
tcccacatatacgtccagctgtgccacgttctgattgttgcgtgtctgcatatgagctccccaaggtcagagaccatgccttctatctgcattcccagcatctaggtctgaagaaacaccttcttaatgaattaatcactatttggcaaataacagctaggtatgcgagaaaaataggcaaaatcaatcacagatgaaatcaacaaatatttactgaacaccataagccaggtgctgtgctagtaagcttcatttgtaagacccagtatttaccatgaaagagtctttataactagatgaagaaaacaagatattgacacatgaaggtaaatggtaataaaagatgtaaataatagttaagacaacaataaaagaaagttggggtctggaatacacaggtttctccagttacatgagtggccatagatatggggacgtgcgaggtgtggcataaaactcagacaagcacaggcagctagcctaggaaagggagtctgcctgctaatggcagtgtcaatcccaagtagcttcattcctgaaggagaaaaacccacatggccagtggcaattccaagtgtgtcacgtagctggtttgttttttaatttactctatgaaatggttttctctaatggcatgccattgacraaatgcaccataatgtctccatccatcacctc

SEQ ID NO: 91812 - DNA, 617 bp, Homo sapiens
tccagaagagccccagctcagagtcatgcctaggtgacaagccaggtttttattctcctaamaggaaaggacttacttagaaacagagagtagccccttccaagtcttctttgccattctagggttgaaatttgatggggaaaatagaagctttcaggtctcacttaagagtcaatgacaacacaaggaaatctgtctcccagtccctttttcagcttctagttcagttaacatacttttacgtatttgcaaagatgtgtaagctgtttaatagaatcatagaaaaacctaaatgaacagggaatgggatgtattaaaacaaacacaagggagttaaaagaaaattcattctgagttgtgggtaggtaacttagtgtttaggtcccagttttttattgcatcctaatgcttgagcccagcgatgctgaggtaggcctggtgatgacaatattcattaaagttaatttcctgatagaggccacttaaatctgattgttgttttaatttgtttcactgctaatttccttcgcttaaatagaggaagctctctgcccctcccacagccagcccaggcagtttcagggaggtgacagccatcacggcattcaccaaccaga

SEQ ID NO: 91813 - DNA, 637 bp, Homo sapiens
tccaactgtaagttttactttcccaatgttatttgaatttcagtctcattttatttcttacttactgagaaacccggctgggtgtggtggctcacatctgtaatcccagcactttgggaggctgaggagggcagatcatgaggtcaggagttcaagaccagcctaaccaacatggtgaaatccccatctctactaaaaatacaaaagttagccgggcatgatggtgcatgcctgtaatcctagctactcaggaggctgaggcaggagaatcgcttcaaccagggaggcaatggttccgagatcacgccactccactccagactgggcaacaagagagaaactccatcccccccccmaaaaaaaagaaacccaggttcattgaattttttctttaactgggaagattgttttgaaagtgcttaagagtttttttaaaaataattttctttatggtataaatgtttctttgcgttttaagtaatcttgcttccaaattaagaccaattgcattgctatgaactgaaagatcatttgagagatatcagcttgctaatactgggcccttcttataactcttcattatttacaccactcctgtgaagtcatactctctttcaaacattttaggcaaatgtag

SEQ ID NO: 91814 - DNA, 627 bp, Homo sapiens
gagttcgagaccagcctggccaacatggtgaaaccctgtctctactaaaaatacaaaaattagctaggcttggtggcgggcgcctataatcccagctactcgggaggctgaggcaggagaatcgcttgaacccaggaagcggaggttgcagtgagccgagatcgcgccaccgcactccagcctgggcgacaagagcaaaactccatctttaaaaaaaaaaaaaaaaaacacccaagcctcagtttccccgagataaggcctggggcaaagaccgmggcctggagacctcaggccaaaaggcgggtctcccagaagacggggaaacccaccaccccacgctgagtttttacgcgcgcattttgaaaaacagaaacaacaaaggcgctttcaacttaccctccgaaagcgccgccacctttctcccaacccggaagtgctgctgttgaggaagcggaagtagtagtgcgtcgccttccggccccctcggcgtcacgctgccatggtaacacggctgccgctaggccttggaggcgcgcacatttgcctacccattttccttctgggtcctttagacgtcaggtggggtagagagtgctcctgaaacgaagaaagtaggacagaatcccc

SEQ ID NO: 91815 - DNA, 627 bp, Homo sapiens
gagttcgagaccagcctggccaacatggtgaaaccctgtctctactaaaaatacaaaaattagctaggcttggtggcgggcgcctataatcccagctactcgggaggctgaggcaggagaatcgcttgaacccaggaagcggaggttgcagtgagccgagatcgcgccaccgcactccagcctgggcgacaagagcaaaactccatctttaaaaaaaaaaaaaaaaaacacccaagcctcagtttccccgagataaggcctggggcaaagaccgcggcctggagacctcaggccaaaaggcgggtctcccagaagacggggaaacccaccaccccacgctgagtttttacgcgcgcattttgaaaaacagaaacaacaaaggcgctttcaacttaccctccgaaagcrccgccacctttctcccaacccggaagtgctgctgttgaggaagcggaagtagtagtgcgtcgccttccggccccctcggcgtcacgctgccatggtaacacggctgccgctaggccttggaggcgcgcacatttgcctacccattttccttctgggtcctttagacgtcaggtggggtagagagtgctcctgaaacgaagaaagtaggacagaatcccc

SEQ ID NO: 91816 - DNA, 962 bp, Homo sapiens
ccaaagagcaaatatttattgaacacctacaatgtgcaagggaccggaggaaacacaagaggttgaagactttgtgtccaagaagttgtagtctgatcagagagaaccagactttgcacattaaaactcataagttattaaaagtgggtggctgggggcagtgactcacacctgtaatcccagtactttgggaggctgaggcaggaggattgcttgagcccaggagttygaaaccagcctgggcaacataatgggacctggcatccacaaaattttaaaaaattaggcgggtgtggtagtgtgcacctgtagtctcagctactcaggaaactgaggcagaaggatctcctgaggccaggaggttgaggctacagtgagctatgatcacaccactgcactctagcctgggtgacagagcaagaccttgaccaaaaaaaaaaaaaaaggtggaaggagaggtgatgagaggccagaatgccacgtttaagcgttgaggcaggagcagtattggggctttccaggcagcgcagacggctgatgaggttgggctgggcctgtaggatggactagattccactgggggaacaggacaggaaggggacacctagagcaaaggcacatcacctggaatgtgcaaggtgttttcagcaagaatggacatgcctgtaatcccagcactttgagaggccgaggtgggcggatcacttgaggccaggagttcgagaccagcctggccaacatggtaaaaccctatctctactaaaaatacaaaaaaaaaaaaaaattctgggcatggtggtgcacacctgtaatcccaggtactcgggaggctgaggcaggagaattgcttgaacccaggaggtagaggttgcagtgagccaagatcgcgccattgcactccggcctgcagcctgggtgacaagtgagactctgtctcaaaaaaaaaaaaaagaagaacagaa

SEQ ID NO: 91817 - DNA, 1706 bp, Homo sapiens
ttctgttttttcctctcaggaaaaactgaagcctcagtacttggaagagctacctggacaactgaaacaattctccatgtttctggggaaattctcatggtttgccggggaaaaggtaggaagaagggaaaagaagaggatacttctctatctctgcaggctactactcctcagacctaagcatcttattgcttttcttctagctcacctttgtggattttctcacctatgatatcttggatcagaaccgtatatttgaccccaagtgcctggatgagttcccaaacctgaaggctttcatgtgccgttttgaggtgacgtttcctgcacctttctcttataaaaacactcacaggctcccctgggacctgcaggatcccatagtggaggattcttccccggcttttgcctaatgggatcaatggttggacacctctagacctttaagtcttgggaagagcctaacttctataccttgraggcactgtctacaaaaaaatggaggaggtagacgcaggcaacacgtgaatgttgctgttctggtatgcatctgttggactgggttggggtcgttataagatttggtgtattttcctttcaggctttggagaaaatcgctgcctacttacagtctgatcagttctgcaagatgcccatcaacaacaagatggcccagtggggcaacaagcctgtatgctgagcaggaggcagacttgcagagcttgttttgtttcatcctgtccgtaaggggtcagcgctcttgctttgctcttttcaatgaatagcacttatgttactggtgtccagctgagtttctcttgggtataaaggctaaaagggaaaaaggatatgtggagaatcatcaagatatgaattgaatcgctgcgatactggcatttccctactccccaactgagttcaagggctgtaggttcatgcccaagccctgagagtgggtactagaaaaaacgagattgcacagttggagagagcaggtgtgttaaatgggactggagtccctgtgaagactgggtgaggataacacaagtaaaactgtggtactgatggacttaaccggagttcggaaaccgtcctgtgtacacatgggagtttagtgtgataaaggcagtatttcagactggtgggctagccaatagagttgggacaattgcttactcattaaaaataatagagccccacttgacactattcactaaaattaatctggaatttaaggcccaacattaaacacaaagctgttgaaatattgatgaaaatgtaagaatttttgtgaccacggggtaggagaagtttctttaaagacgtaaaaagaaaaaaaccataggctgctctgcctgtggagtagccattctttattcttttactttttaaaataataacaatcacaaaggaaagatttgccaattgaataggatcaaattctacaacttttcctaaggcacccacaaataaatgacaagtgagacaaaaagcactagtataaagattatataaagacctataaatcattaagacaactgagtttttaaaaatggacaaaatccatgaacaatttataaaatagaaatatagccaaaaatgtctaaaagatgtttatgatgtaaggaattatcaattacaacagtgagaaaccatatttccttctatccgatgagtaaaaagtttctaaagtgttggcaaggctt

SEQ ID NO: 91818 - DNA, 1284 bp, Homo sapiens
tgcatgcctgtaatcccagctactcsggaggttgagacaagggaatcacttgaatctgggaggcagagattgctgtgagctgagatcacaccactgcactccagcctaggtgacaccgtgagactctgtcccaaaaaaaaaaaattttagagcacttgaaacagatcagtgttacataaatttataaatactaattgccaaaaagcaccacattcacttttatattttcacactttaatacatgctgtcccctctgcctcttgcttttcccccaactcccttagccttcaaatcagatttgaagtcacatctgataatccctgtggtgatggtcaccaaagatttctgattgttttcccattgggaaaacttcatgacactctttaacttaaatgtggtctcctgagttgtttggccaattaaacacaagtagaaattacacacattttccaggcagaagttttaaaagccagtgagtaagtcactgtatctgaccaccacagttgtctagactcagagcaggtgccaagttaaagcctccgtcggcctaggtctctaaaagactacgaatagcagggcccctgttgatcacatccgacatgaagggtaagtaagaaataagcgtgtattaagccactaggatttggtttatcctgactgacatttctctacctcccacaggctaatttaaatgcacatattttaaatttttgttcccacagggtacaatgctttcctcgatcaggacttaacacacaactccagttgttcatttagatgttagtctttgctgctaaattataagttgcctgagagcagagactatgtcttatgcaaaattgtatatttagtgcttgcacagagcctgacacagagtaggcactcacaactgtgcactgattcctgtcatttactgagaattggaagacaaaaagaagagtttgcttgataggtaaatgcctaatgccctcaaggaactttaaaaaattcctctttgttttgactgagagacagaacccagaaaaacagaatgccctgtcttaaaacagagagagttcaggtagaagtacctggagtcagaactgaagttcgtattcagggaggtctcagaggatcagcaaggcactgaggctggagagtaggttatatgagtttgtgaaaggaaaatatcttgagcccccaaaatcagtaagctaaaaagaaaattcaaactggaaactgctcaggacaaacctacctcccattctattcaaagccatccctctgctcattgaaatagatgca

SEQ ID NO: 91819 - DNA, 715 bp, Homo sapiens
agaaaaagaaaaaactcttctttcaagaatcagttgcttgattttacaagaaaaaaaaaaggttggtcagagaaaatgagaaagcttcactattgcagtcttaccaagcacccctcctgattgctatgagattagctcctggtctctagaacccagtttgtgacagagatgtcaaaggtaacagagagctttaggcccaggtttttccacaggcaaattctaacaaacatttagggatgaaataatactaattctgcacaatctcttccaggaaattaaagaagaagaaacacttccaaactcattttatcaagccagcaatgccctgatgctgaaatagacaaaggcatttaagaaaaataaaactacagaccaaaactgcagaccttctaaacagaaaccaagtgtcagcaaattgtagtctatgggctaatcatctataaataaagttttattggaacacaaccatatccttttgcttgctatgacagagtcaagcagttacagatgagatagaaaacatgtgttctgaamgtccacaatatttactgtatgatcctttaaggagtttgccaactccagactatcagtgcaaaatttctcaataaaatagtaacaagttgagtctaaaatatatgaaagcataaaatacaaactgaccaagtccacacagggggaaatgaggcagagccgaagcaaggcaaggagggcatct

SEQ ID NO: 91820 - DNA, 569 bp, Homo sapiens
ataactgatgtttacatggcacttgctacatcagtggcactgattgctggtcatataaagcaaggaaaaaagatgtttcctctttttattcatttctacatcctgccagtttccctacacatatgcattatagatgacgaataattgagaaaatctgcaaggacaaggctcgtattcttcctgacccatttcttgttcagagtataaggtaacttgtgccgcacgtgtacccaatatgccgtggggttataggatgttaaattggacatttacatgatacaataaatatgacattccagagtgatgttctagaccaagattcaaatctttaaggaagggatttaaccaaaagttgattacataaacattgttcgcatcacccacactttgttatgtgcatctgtgtgaagagaccaccaaacaggctttgtgtgagcaataaagctttttaatcacctgggtgcargctgactgagtctgaaaaaggagtcagcaaagggagatggggaggggcagttttacaggatttgggtaggtagtggaaaatttacagttaaaggaggtttttc

SEQ ID NO: 91821 - DNA, 569 bp, Homo sapiens
ataactgatgtttacatggcacttgctacatcagtggcactgattgctggtcatataaagcaaggaaaaaagatgtttcctctttttattcatttctacatcctgccagtttccctacacatatgcattatagatgacgaataattgagaaaatctgcaaggacaaggctcgtattcttcctgacccatttcttgttcagagtataaggtaacttgtgccgcacgtgtacccaatatgccgtggggttataggatgttaaattggacatttacatgatacaataaatatgacattccagagtgatgttctagaccaagattcaaatctttaaggaagggatttaaccaaaagttgattacataaacattgttcgcatcacccacactttgttatgtgcatctgtgtgaagagaccaccaaacaggctttgtgtgagcaataaagctttttaatcacctgggtgcaggctgactgagtctgaaaaaggagtcagcaaagggagatggggaggggcagttttacaggatttgggtaggtagtggaaaatttayagttaaaggaggtttttc

SEQ ID NO: 91822 - DNA, 894 bp, Homo sapiens
aatattttgaaatattaaaaatgcctttatgactgacatagaagacctctcatggaggaagggccctcgattggataacactgttttaggttatttaaacagcctaycaagttggcaagctaccaaatgtctatgaagatgcctccttgtttctcaaactcacctcccaaagggtgatctgtggtgtctcctttccttacaaggcacagatgtctgaattttcaggtgcattttgcatatgcttcagtttcagactgtaatttccaagaatgaccacgacaatgtcatccattccatgtgctttaaaaaaaaaaaaagtgtgaccttgacactccttctattgagcaagcagcctcctgcactagaatttgagcaaattgcactatggccttgaccaagagtgtggctaaactgatgttatgtgacctctgagactggacgacactataaagatgccaagcatttcaacctggctttcttgggatgcctcttctgggaatccagctgccatgccgtaaggaagcccaaaccagcccaaggcagagagagcacttggagagtcgtccaacgtccagctgaaattcaaccaatggccagtctcagccacagacttgttagtgaagttgccaccagaatattccagtcctgagccattgactcacccctcagccttctcaccttcctagctgaggcccagacatcatggggtggagataaactgtccctgccaagccctttccaaatccccaaccctgtgagcctaagaagatggagttttatgtagtcactaaatgttggagtggtttgctaggcaccactagtgactggggcaggctccacattcatgtgcaccttagccaaacacctgcattaggatttattttcaagtgtact

SEQ ID NO: 91823 - DNA, 894 bp, Homo sapiens
aatattttgaaatattaaaaatgcctttatgactgacatagaagacctctcatggaggaagggccctcgattggataacactgttttaggttatttaaacagcctatcaagttggcaagctaccaaatgtctatgaagaygcctccttgtttctcaaactcacctcccaaagggtgatctgtggtgtctcctttccttacaaggcacagatgtctgaattttcaggtgcattttgcatatgcttcagtttcagactgtaatttccaagaatgaccacgacaatgtcatccattccatgtgctttaaaaaaaaaaaaagtgtgaccttgacactccttctattgagcaagcagcctcctgcactagaatttgagcaaattgcactatggccttgaccaagagtgtggctaaactgatgttatgtgacctctgagactggacgacactataaagatgccaagcatttcaacctggctttcttgggatgcctcttctgggaatccagctgccatgccgtaaggaagcccaaaccagcccaaggcagagagagcacttggagagtcgtccaacgtccagctgaaattcaaccaatggccagtctcagccacagacttgttagtgaagttgccaccagaatattccagtcctgagccattgactcacccctcagccttctcaccttcctagctgaggcccagacatcatggggtggagataaactgtccctgccaagccctttccaaatccccaaccctgtgagcctaagaagatggagttttatgtagtcactaaatgttggagtggtttgctaggcaccactagtgactggggcaggctccacattcatgtgcaccttagccaaacacctgcattaggatttattttcaagtgtact

SEQ ID NO: 91824 - DNA, 894 bp, Homo sapiens
aatattttgaaatattaaaaatgcctttatgactgacatagaagacctctcatggaggaagggccctcgattggataacactgttttaggttatttaaacagcctatcaagttggcaagctaccaaatgtctatgaagatgcctccttgtttctcaaactcacctcccaaagggtgatctgtggtgtctcctttccttacaaggcacagatgtctgaattttcaggtgcattttgcatatgcttcagtttcagactgtaatttccaagaatgaccacgacaatgtcatccattccatgtgctttaaaaaaaaaaaaagtgtgaccttgacactccttctattgagcaagcagcctcctgcactagaatttgagcaaaytgcactatggccttgaccaagagtgtggctaaactgatgttatgtgacctctgagactggacgacactataaagatgccaagcatttcaacctggctttcttgggatgcctcttctgggaatccagctgccatgccgtaaggaagcccaaaccagcccaaggcagagagagcacttggagagtcgtccaacgtccagctgaaattcaaccaatggccagtctcagccacagacttgttagtgaagttgccaccagaatattccagtcctgagccattgactcacccctcagccttctcaccttcctagctgaggcccagacatcatggggtggagataaactgtccctgccaagccctttccaaatccccaaccctgtgagcctaagaagatggagttttatgtagtcactaaatgttggagtggtttgctaggcaccactagtgactggggcaggctccacattcatgtgcaccttagccaaacacctgcattaggatttattttcaagtgtact

SEQ ID NO: 91825 - DNA, 894 bp, Homo sapiens
aatattttgaaatattaaaaatgcctttatgactgacatagaagacctctcatggaggaagggccctcgattggataacactgttttaggttatttaaacagcctatcaagttggcaagctaccaaatgtctatgaagatgcctccttgtttctcaaactcacctcccaaagggtgatctgtggtgtctcctttccttacaaggcacagatgtctgaattttcaggtgcattttgcatatgcttcagtttcagactgtaatttccaagaatgaccacgacaatgtcatccattccatgtgctttaaaaaaaaaaaaagtgtgaccttgacactccttctattgagcaagcagcctcctgcactagaatttgagcaaattgcactatggccttgaccaagagtgtggctaaactgatgttatgtgacctctgagactggacgacactataaagatgccaagcatttcaacctggctttcttgggatgcctcttctgggaatccagctgccatgccgtaaggaagcccaaaccagcccaaggcagagagagcacttggagagtcrtccaacgtccagctgaaattcaaccaatggccagtctcagccacagacttgttagtgaagttgccaccagaatattccagtcctgagccattgactcacccctcagccttctcaccttcctagctgaggcccagacatcatggggtggagataaactgtccctgccaagccctttccaaatccccaaccctgtgagcctaagaagatggagttttatgtagtcactaaatgttggagtggtttgctaggcaccactagtgactggggcaggctccacattcatgtgcaccttagccaaacacctgcattaggatttattttcaagtgtact

SEQ ID NO: 91826 - DNA, 894 bp, Homo sapiens
aatattttgaaatattaaaaatgcctttatgactgacatagaagacctctcatggaggaagggccctcgattggataacactgttttaggttatttaaacagcctatcaagttggcaagctaccaaatgtctatgaagatgcctccttgtttctcaaactcacctcccaaagggtgatctgtggtgtctcctttccttacaaggcacagatgtctgaattttcaggtgcattttgcatatgcttcagtttcagactgtaatttccaagaatgaccacgacaatgtcatccattccatgtgctttaaaaaaaaaaaaagtgtgaccttgacactccttctattgagcaagcagcctcctgcactagaatttgagcaaattgcactatggccttgaccaagagtgtggctaaactgatgttatgtgacctctgagactggacgacactataaagatgccaagcatttcaacctggctttcttgggatgcctcttctgggaatccagctgccatgccgtaaggaagcccaaaccagcccaaggcagagagagcacttggagagtcgtccaacgtccagctgaaattcaaccaatggccagtctcagccacagacttgttagtgaagttgccaccagaatattccagtcctgagccattgactcacccctcagccttctcaccttcctagctgaggcccagacatcatggggtggagataaactgtccctgccaagccctttccaaatccccaaccctgtgagcctaagaagatggagttttatgtagtcactaaatgttggagtggtttgctaggcaccrctagtgactggggcaggctccacattcatgtgcaccttagccaaacacctgcattaggatttattttcaagtgtact

SEQ ID NO: 91827 - DNA, 719 bp, Homo sapiens
aagtcactggggctgtctcccatggagctgttcctatgtgcgtaccagctggccgctcatcctaggaggaagccccgtgcaggtccaagtggtggggtatggcgcagcgctggagcggggtgcttgcatcgcggagagtttcctcccagatgtcaccaccgtgcgcgtggaagtgagggaggcaggggtgtcccggagagtgtgcccttacccctgcgtggactcccacctgggatacctaggacgtccggacctcctgctggcacaggctgtgcctcggctccygactctgccaggtagggcgacctcgtgggtggcctgcgggggtctgcgccatttgggtaatggagtggaaagagggcctgagcgcttagcttcccagcgcttctcgcggatgaatttgccgctacccacaatatcttaagaaacgcccgcatcgccaagtcaatcctaagccaaaagaacaaagctggaggcatcacactacctgacttcaaactataccacaaggctacagtaaccaaaacagcatggtactggtaccaaaacagagatatagatcaatggaacagaacagagccctcagaaataacgccgcatatctacaactatctgatctttgacaaatctgagaaaaacaagcaatggggaaaggattccctatttaataaaaggtgctgggaaaactggctagccatatgtagaaagctgaaactgga

SEQ ID NO: 91828 - DNA, 719 bp, Homo sapiens
aagtcactggggctgtctcccatggagctgttcctatgtgcgtaccagctggccgctcatcctaggaggaagccccgtgcaggtccaagtggtggggtatggcgcagcgctggagcggggtgcttgcatcgcggagagtttcctcccagatgtcaccaccgtgcgcgtggaagtgagggaggcaggggtgtcccggagagtgtgcccttacccctgcgtggactcccacctgggatacctaggacgtccggacctcctgctggcacaggctgtgcctcggctcctgactctgccaggtagggcgacctcrtgggtggcctgcgggggtctgcgccatttgggtaatggagtggaaagagggcctgagcgcttagcttcccagcgcttctcgcggatgaatttgccgctacccacaatatcttaagaaacgcccgcatcgccaagtcaatcctaagccaaaagaacaaagctggaggcatcacactacctgacttcaaactataccacaaggctacagtaaccaaaacagcatggtactggtaccaaaacagagatatagatcaatggaacagaacagagccctcagaaataacgccgcatatctacaactatctgatctttgacaaatctgagaaaaacaagcaatggggaaaggattccctatttaataaaaggtgctgggaaaactggctagccatatgtagaaagctgaaactgga

SEQ ID NO: 91829 - DNA, 719 bp, Homo sapiens
aagtcactggggctgtctcccatggagctgttcctatgtgcgtaccagctggccgctcatcctaggaggaagccccgtgcaggtccaagtggtggggtatggcgcagcgctggagcggggtgcttgcatcgcggagagtttcctcccagatgtcaccaccgtgcgcgtggaagtgagggaggcaggggtgtcccggagagtgtgcccttacccctgcgtggactcccacctgggatacctaggacgtccggacctcctgctggcacaggctgtgcctcggctcctgactctgccaggtagggcgacctcgtgggtggcctgcgggggtctgcgccatttgggtaatggagtggaaagagggcctgagcgcttagcttcccagcgcttctcgcggatgaatttgccgctacccacaatatcttaagaaacgcccgcatcgccaagtcaatcctaagccaaaagaacaaagctggaggcatcacactacctgacttcaaactataccacaagkctacagtaaccaaaacagcatggtactggtaccaaaacagagatatagatcaatggaacagaacagagccctcagaaataacgccgcatatctacaactatctgatctttgacaaatctgagaaaaacaagcaatggggaaaggattccctatttaataaaaggtgctgggaaaactggctagccatatgtagaaagctgaaactgga

SEQ ID NO: 91830 - DNA, 719 bp, Homo sapiens
aagtcactggggctgtctcccatggagctgttcctatgtgcgtaccagctggccgctcatcctaggaggaagccccgtgcaggtccaagtggtggggtatggcgcagcgctggagcggggtgcttgcatcgcggagagtttcctcccagatgtcaccaccgtgcgcgtggaagtgagggaggcaggggtgtcccggagagtgtgcccttacccctgcgtggactcccacctgggatacctaggacgtccggacctcctgctggcacaggctgtgcctcggctcctgactctgccaggtagggcgacctcgtgggtggcctgcgggggtctgcgccatttgggtaatggagtggaaagagggcctgagcgcttagcttcccagcgcttctcgcggatgaatttgccgctacccacaatatcttaagaaacgcccgcatcgccaagtcaatcctaagccaaaagaacaaagctggaggcatcacactacctgacttcaaactataccacaaggctacagtaaccaaaacagcatggtactggtaccaaaacagagatatagatcaatggaacagaacagagccctcagaaataacgccgmatatctacaactatctgatctttgacaaatctgagaaaaacaagcaatggggaaaggattccctatttaataaaaggtgctgggaaaactggctagccatatgtagaaagctgaaactgga

SEQ ID NO: 91831 - DNA, 719 bp, Homo sapiens
aagtcactggggctgtctcccatggagctgttcctatgtgcgtaccagctggccgctcatcctaggaggaagccccgtgcaggtccaagtggtggggtatggcgcagcgctggagcggggtgcttgcatcgcggagagtttcctcccagatgtcaccaccgtgcgcgtggaagtgagggaggcaggggtgtcccggagagtgtgcccttacccctgcgtggactcccacctgggatacctaggacgtccggacctcctgctggcacaggctgtgcctcggctcctgactctgccaggtagggcgacctcgtgggtggcctgcgggggtctgcgccatttgggtaatggagtggaaagagggcctgagcgcttagcttcccagcgcttctcgcggatgaatttgccgctacccacaatatcttaagaaacgcccgcatcgccaagtcaatcctaagccaaaagaacaaagctggaggcatcacactacctgacttcaaactataccacaaggctacagtaaccaaaacagcatggtactggtaccaaaacagagatatagatcaatggaacagaacagagccctcagaaataacgccgcatatctacaactatctgatctttgacaaatctgagaaaaacaagcaatggggaaaggattccctatttaataaaaggtgctgggaaaactggctagccatatgtagaaagytgaaactgga

SEQ ID NO: 91832 - DNA, 571 bp, Homo sapiens
ggtgcccaccaccactcctagctaggttgcattcttttaagaatttgtaattttggatgaattttccaattgaaaagcacaaaatttgtaattttaacagttttattgaattataattcacataccttaattatatttatttaatatatacaattcaatggtttttactatatccacaaagctgtgcaaccactaccataatccaattttagaagatttttatcctcctcctaaagaaaaacattacactcattccccattctcaggaaccttctcagccctagacaaccactcatctactttttgtctctagaaatttgcttattctgggcatttcatatacatggaatcatatagcatgttcttcagtgagtgacttcttttactttgcataatgctttcatgagtcatccatgctgtcacttatatcaayactttattttctttttatggctgaataatatttcattgatagattttgtttattcatcagtagattgacacttgggttatttccactttttggtattataaatacacttccatgaacatctttgtatatgtttttgtg

SEQ ID NO: 91833 - DNA, 571 bp, Homo sapiens
ggtgcccaccaccactcctagctaggttgcattcttttaagaatttgtaattttggatgaattttccaattgaaaagcacaaaatttgtaattttaacagttttattgaattataattcacataccttaattatatttatttaatatatacaattcaatggtttttactatatccacaaagctgtgcaaccactaccataatccaattttagaagatttttatcctcctcctaaagaaaaacattacactcattccccattctcaggaaccttctcagccctagacaaccactcatctactttttgtctctagaaatttgcttattctgggcatttcatatacatggaatcatatagcatgttcttcagtgagtgacttcttttactttgcataatgctttcatgagtcatccatgctgtcacttatatcaacactttattttctttttatggctgaataatatttcattgatagattttgtttattcatcagtagattgacayttgggttatttccactttttggtattataaatacacttccatgaacatctttgtatatgtttttgtg

SEQ ID NO: 91834 - DNA, 681 bp, Homo sapiens
gagatgtgccccctaccacagagctcaggattacccttccaaagcatactcttgayacctacaatccccaaaacccttgcctacatggctccaagcccaattccagattctctccccaggactagccattcaagggccaaccatgctcccactacctaaaagatgtttcctagaagtctagacagagtttgaatatcgttgctggggtattcacacatgtggaaataaagcccttctctatcagtgtcagagtgagagtaacaatgtaagagggagggctgggaggtggaagccagcatgtagaaattctaaatccaatccatgatttccagaactccgtgaaatatggataaaacatacgttgaggttgttagcttcacctatactttctaaacatttaaaccaatggtatattgcccttcatttgcacttttccttcagacctgacaaatgttacggagcaggcctaaaccccctagacctgggagtataacctatgtccaggttccaggactataggtagtaattggcctgattttttatgttcctttttttttttcagagtcccagacgggaaccaattccttgtcactttcttgctctaacaataagagatttttctattttcctttcagtaaggggcatcattccagtgcccacctttatgcgggagacttagtt

SEQ ID NO: 91835 - DNA, 681 bp, Homo sapiens
gagatgtgccccctaccacagagctcaggattacccttccaaagcatactcttgacacctacaatccccaaaacccttgcctacatggctccaagcccaattccagattctctccccaggactagccattcaagggccaaccatgctcccactacctaaaagatgtttcctagaagtctagacagagtttgaatatcgttgctggggtattcacacatgtggaaataaagcccttctctatcagtgtcagagtgagagtaacaatgtaagagggagggctgggaggtggaagccagcatgtagwaattctaaatccaatccatgatttccagaactccgtgaaatatggataaaacatacgttgaggttgttagcttcacctatactttctaaacatttaaaccaatggtatattgcccttcatttgcacttttccttcagacctgacaaatgttacggagcaggcctaaaccccctagacctgggagtataacctatgtccaggttccaggactataggtagtaattggcctgattttttatgttcctttttttttttcagagtcccagacgggaaccaattccttgtcactttcttgctctaacaataagagatttttctattttcctttcagtaaggggcatcattccagtgcccacctttatgcgggagacttagtt

SEQ ID NO: 91836 - DNA, 712 bp, Homo sapiens
tctgggaacatcactgggtgtaattcccagcagagaaggactgagactgagctaatgtcatttcaatgacttttttttttttttaagatggggtctctctctgttgtccagagtggagttcagtggcgtgatcttggctcactgcagccttgaccttctgggttcaagcgatcctcccacctcagcctctcaaatagctgggactacaggcatgtgccaccatggccagctattttttttttaatttatttttcatagagaaaggttctcactacgttgcccagtctggtcttgaattccagggctcaatggcatttcaagaatcagattaggggagaggaagaagggattagcaaaaytgcaagctgccaagggctccctcgaaagactcctgaatgccctgaaatccagagtaacactgatggtagagggtgtttcttctgcaggaaggctcttattctgaaaagtttacctcaggaagttcaaagattataatctctgaggagataacagtgaatctgttggtaagtataaattattcctcttccttttgggggttaagatcatcagaatggatcagcttctcctgatccaggcagtgaactggccacttcacatgtatcatttcattttattctcatgacagccctggaaagcaggtgtcaacatctgttaaggaaacagatgatctcaaagattaaacaaacgtcaa

SEQ ID NO: 91837 - DNA, 579 bp, Homo sapiens
gctgtatasacttgataaaaaacctttaaaaccaataagagacgttatttctttgaaatttaaagccatgcagagcaatggaattctacttcacagagaaggacaacatggaaatcacattactctggaattaattaaaggaaagcttgtcttttttcttaattcaggtaaaaaaatacttgaacttttataccagtagttaaaaaaaatctgtttacatttgttggtactcagtcttttcacagttagataaaatgaccatataattcatcatctaaaccagaacacctttaagaaataaaaaatacacaagtgatagttactctgggacagtaagtgcaaagtagaactgcaatgaacaaatgtaaatgaaaatttaagagcattactaccagatgcatgcaatacatacatatcctaagtatgatttctgtaaacagcatatattttgacaaactgtgcaagatcaccatatgtgtgtataatatatatgtaatatatgattatccatatcataaagacaatacatcattataaaattatgagataatgctgataatgaggttctaagaaagaaaa

SEQ ID NO: 91838 - DNA, 579 bp, Homo sapiens
gctgtatagacttgataaaaaacctttaaaaccaataagagaygttatttctttgaaatttaaagccatgcagagcaatggaattctacttcacagagaaggacaacatggaaatcacattactctggaattaattaaaggaaagcttgtcttttttcttaattcaggtaaaaaaatacttgaacttttataccagtagttaaaaaaaatctgtttacatttgttggtactcagtcttttcacagttagataaaatgaccatataattcatcatctaaaccagaacacctttaagaaataaaaaatacacaagtgatagttactctgggacagtaagtgcaaagtagaactgcaatgaacaaatgtaaatgaaaatttaagagcattactaccagatgcatgcaatacatacatatcctaagtatgatttctgtaaacagcatatattttgacaaactgtgcaagatcaccatatgtgtgtataatatatatgtaatatatgattatccatatcataaagacaatacatcattataaaattatgagataatgctgataatgaggttctaagaaagaaaa

SEQ ID NO: 91839 - DNA, 579 bp, Homo sapiens
gctgtatagacttgataaaaaacctttaaaaccaataagagacgttatttctttgaaatttaaagccatgcagagcaatggaattctacttcacagagaaggacaacatggaaatcacattactctggaattaattaaaggaaagcttgtcttttttcttaattcaggtaaaaaaatacttgaacttttataccagtagttaaaaaaaatctgtttacatttgttggtactcagtcttttcacagttagataaaatgaccatataattcatcatctaaaccagaacacctttaagaaataaaaaatacacaagtgatagttactctgggacagtaagtgcaaagtagaactgcaatgaacaaatgtaaatgaaartttaagagcattactaccagatgcatgcaatacatacatatcctaagtatgatttctgtaaacagcatatattttgacaaactgtgcaagatcaccatatgtgtgtataatatatatgtaatatatgattatccatatcataaagacaatacatcattataaaattatgagataatgctgataatgaggttctaagaaagaaaa

SEQ ID NO: 91840 - DNA, 1066 bp, Homo sapiens
aaattccacttgactcacttctccttataatatcagtagtaaaacacccaaagaaggacatagaccattgtggtttccttaattgctcataatttatttcaattgattataagcatattggaactggaaaggatcttaaagagcatctaatataacccttatatttttctttttcttttttattagagatagggtctccctctgttgcccagcttggagtgcagtggcaccttcatagtttactgcagcctcgacctcctgggctcaagtgaattggacctgagtagattaattataacagtggctaaatgtggaaaggggatcagaggtgtggctgagtctgaacacactggaggctgtctcactagcccagaaggagggtaactgtaacacgttgatccctgttccactcctgttgctcaaataaatatccgactttgaaaattaagctaatttaacttcatgattttgattggaattaacagtacagatgttcctcaatttatgatgaagttgcatccagatgaacttattataaattaaaaatgcactttaatacatgtgacctactgaacctagctcaacccagcctaacttaaatgtgctcagaacacttaaatcagcctacagttgggcaaaatcatctaacacaatgcctattttataataaagtgttgaatatctcatgtcatttattaactactgtactgagagtaaaaaagaaaataataataatggttgtggccaggcatggtggctcacgcctgtaatcccagcactttgggaggccgaggcaggcagattacgaggtcaggagatcgagaccatcctggctaacatggtaaaaccctatctctactaaaaatacaaaaaattagccgggcgtggtggcacgtgcctgtagtcccagctaccggggaggccgaggcagaagaatcgcttgaacctgggaggtggaggttgcagtgagccgagatcgtgccactgtactccagcctgggtgacagagcaagcctctgtctcaaaataataataataataataataataataataataawaataa

SEQ ID NO: 91841 - DNA, 2100 bp, Homo sapiens
tgagacatgctattatactaagactttgagcagagtatattcttattctcatttacagtaagagagccaggcatggaattagccaggcgtggtggtgcacacctgtaatcccagctacttggaaggctgaggcaggagaatcacttgaacctgggaggtggaacttgcagtgagccgagatcgcgccactgcgctccagcttgggtgacagagcaagactctgcctcagataaataaataaataataaattacccagacttgggtgtgtctggatagcaatgtgagaatggactaatatactcactgtttcttcaatgagagtactagtaagtctagtaaatgtagtttgcctgactaacaagctctagtatttttttagggagttaaatgtcagttctaaggaggtcaaaggatatataagaaataacaagttttaaagtcagaagtgcatttaaatttgggcttagaatttatcttgcatttatcctatttcaggaaatattaccacatatgaagtgtggatatttatgtgtacttagcagtgggcttgagaatatcacacacaatattatacgtaggctaccatagaatctgcaattattataatacccgaatgcctcctacagcccttctacctcttgaagacctttaagaatttgctttttccactgaaaattaraaagaacaacatagctgaaggcagtccttgttctattgggtcatttgttgggattgtgcttatcctgcaactttggggaagggaggcatttcaacatgaaatgaggctgcctgtaagtcagaaaaagagtgaaggaaaattgaatttagctcttgccagcattgcttgaggtatttgggtgatataaatttttttttaaaggccacaatgcttttagaattttctttgcttgtgattagtcattgttggcctctttatgcttctcccagaatcattacaatgccatgcttccccactcttttctaaggactctaaagcctggatttattttttctgacccaagaggcacaaccaaatgatgtttaagcatccgcaacccagccaatgtgtgaggccatttcctccaaaatacattctcctttcttacctgccctctctgattccttgtccagcctggcctcttatatggaccctgatcttttatcctcaatatcctttcttatcccacgcccactgtctactttagtttcaatttcagccactggttagtttcttggtaaacaaagtgaataaacgcccttgaagtcctgccatactgactcctttggaaacccaactcaccattaaattgcagtgtcttaaattgtactctttgcatactgatttatcctctggtactcagctaattcacggctctctgagtcttgtgtacctcattttcacatgctcaggtcagggtagagatggcttttgtgaggccttgagtgggaggtgtgagagtttgtcctctaaacatgcattttgactcttttcgtgttcgtttttgccatcgaggagatcaacaggggcccgctgctcttactcaacatgtctttggggtatcacgtctacaatgcctgcaacactgatcagaggactttggagggccctctgttttggctgtcaggaggggccgagaaccttcccaattatacatgtgagaggcagagcaaatccatagcagcgattgaaggaactatatcagcatttgtttctcagttggagatgttgatggaaatctacaaactaccacaggtgagacaggatggggtgggtcagagatgacattgaatgtcctttgctgttattacaaggcatgtcaacaaaaggtggctcagaacagtctttgaagcccccaaaggtgacagaaagtccttgcactgccagtgtttatttagggtaagaaggagacagaatgagatgggcagcagtgaggcatccctggctggcacagccaggccagctctgggaactctatatctgaacacttactttccagattaatttttcccagagggaagatgatacatttaaaaaaatgaacaagtaaatcttcccctttccaaaagaaaatgtagtatcttcaacttcaaaatggtga

SEQ ID NO: 91842 - DNA, 2100 bp, Homo sapiens
tgagacatgctattatactaagactttgagcagagtatattcttattctcatttacagtaagagagccaggcatggaattagccaggcgtggtggtgcacacctgtaatcccagctacttggaaggctgaggcaggagaatcacttgaacctgggaggtggaacttgcagtgagccgagatcgcgccactgcgctccagcttgggtgacagagcaagactctgcctcagataaataaataaataataaattacccagacttgggtgtgtctggatagcaatgtgagaatggactaatatactcactgtttcttcaatgagagtactagtaagtctagtaaatgtagtttgcctgactaacaagctctagtatttttttagggagttaaatgtcagttctaaggaggtcaaaggatatataagaaataacaagttttaaagtcagaagtgcatttaaatttgggcttagaatttatcttgcatttatcctatttcaggaaatattaccacatatgaagtgtggatatttatgtgtacttagcagtgggcttgagaatatcacacacaatattatacgtaggctaccatagaatctgcaattattataatacccgaatgcctcctacagcccttctacctcttgaagacctttaagaatttgctttttccactgaaaattagaaagaacaacatagctgaaggcagtccttgttctattgggtcatttgttgggattgtgcttatcctgcaactttggggaagggaggcatttcaacatgaaatgaggctgcytgtaagtcagaaaaagagtgaaggaaaattgaatttagctcttgccagcattgcttgaggtatttgggtgatataaatttttttttaaaggccacaatgcttttagaattttctttgcttgtgattagtcattgttggcctctttatgcttctcccagaatcattacaatgccatgcttccccactcttttctaaggactctaaagcctggatttattttttctgacccaagaggcacaaccaaatgatgtttaagcatccgcaacccagccaatgtgtgaggccatttcctccaaaatacattctcctttcttacctgccctctctgattccttgtccagcctggcctcttatatggaccctgatcttttatcctcaatatcctttcttatcccacgcccactgtctactttagtttcaatttcagccactggttagtttcttggtaaacaaagtgaataaacgcccttgaagtcctgccatactgactcctttggaaacccaactcaccattaaattgcagtgtcttaaattgtactctttgcatactgatttatcctctggtactcagctaattcacggctctctgagtcttgtgtacctcattttcacatgctcaggtcagggtagagatggcttttgtgaggccttgagtgggaggtgtgagagtttgtcctctaaacatgcattttgactcttttcgtgttcgtttttgccatcgaggagatcaacaggggcccgctgctcttactcaacatgtctttggggtatcacgtctacaatgcctgcaacactgatcagaggactttggagggccctctgttttggctgtcaggaggggccgagaaccttcccaattatacatgtgagaggcagagcaaatccatagcagcgattgaaggaactatatcagcatttgtttctcagttggagatgttgatggaaatctacaaactaccacaggtgagacaggatggggtgggtcagagatgacattgaatgtcctttgctgttattacaaggcatgtcaacaaaaggtggctcagaacagtctttgaagcccccaaaggtgacagaaagtccttgcactgccagtgtttatttagggtaagaaggagacagaatgagatgggcagcagtgaggcatccctggctggcacagccaggccagctctgggaactctatatctgaacacttactttccagattaatttttcccagagggaagatgatacatttaaaaaaatgaacaagtaaatcttcccctttccaaaagaaaatgtagtatcttcaacttcaaaatggtga

SEQ ID NO: 91843 - DNA, 546 bp, Homo sapiens
aaaaaaaaaaaaaaaaaggaatcaagataatgggaaggttaaaaaagataaaaagtttgggaataatcccaagtattttaagaaatatttgaagctcgcttagcatctgtttttcttgggtttagcttagccagaaaaataactcctaagatcgaataaatcaattttacttacctaatgtttattcaggttccagatatttcaggtatggtaaagattttctcttggaaggacattaaattgccaattatctattayttaggactatcctagtcaacacgttgctgctattctgttgagtttctaaaacctgaggtgctttgtttactgcggagtccatagtcaaggataaattatggatcatgcatgttagttgggaaacaacttggataaggtagaaacacctacacacacacaaacatactcacacatacacccacctacacacatacacacacacagtcacacacacacactaacactgtgcccgaaattggtgggttcttggtctactgacttcaagaatgaagccgcggaccctcgcgg

SEQ ID NO: 91844 - DNA, 546 bp, Homo sapiens
aaaaaaaaaaaaaaaaaggaatcaagataatgggaaggttaaaaaagataaaaagtttgggaataatcccaagtattttaagaaatatttgaagctcgcttagcatctgtttttcttgggtttagcttagccagaaaaataactcctaagatcgaataaatcaattttacttacctaatgtttattcaggttccagatatttcaggtatggtaaagattttctcttggaaggacattaaattgccaattatctattacttaggactatcctagtcaacacgttgctgctattctgttgagtttctaaaacctgaggtgctttgtttactgcggagtccatagtcaaggataaattatggatcatgcatgttagttgggaaacaacttggataaggtagaaacacctacacacacacaaacatactcacacatacacccacctacacacatacacacacacagtcacacacacacactracactgtgcccgaaattggtgggttcttggtctactgacttcaagaatgaagccgcggaccctcgcgg

SEQ ID NO: 91845 - DNA, 856 bp, Homo sapiens
gcaatatataatatttacttgtaaaactaccttttacatttcatggtatgtactattaccaccttaatttgttactatcatatattcttacccatatatcagacgtcaaattagaaacactactttataaaatgataattcacttactctcttttcaaatataactgcagagaaactaatttccatctatatatatttggaaacctcttcatgtaattttaattttagattcaactaatgtgaaaattgtctttaagaaatggttactataatatctagcctgaatatttactcagtgttaaataaatctactaagatttactattggtgaaatagttcattttgctgaaaagtgtttgctcttcattatctttaagaaatcacctattttgctaattgtaaatcacacaattttaattgagctgaagtttccctatcatcacattgcccaaattaactttgtcttgcataaaacatgactgcttattggaaataagctcccaacctaaagtacattggtctggctttgaatcccgttctttaaagttttgtccttttctacttactattatccagcaattttctattatgatgtgttattttatataatcttcaatcataggaaaatataacacatttggcttagtattatttcttcctttagtatgtgacctctttgttggctcactaggttttatatttgttcctcaatagtatggtgatacttcaatgaaatgaaaacttaactaaggataycatttatttgaaataaacaaaaatattgaacacagacactgagtagaaaataaatccattgacacttattttaacttaaaaacaggaacagaaattagat

SEQ ID NO: 91846 - DNA, 763 bp, Homo sapiens
attagaaatgaaatgggagacattacaactgatactacagaaacacaaaggatcattcaaggctgctatgaacaccttatgtgcacaaactagaaaatctagagatgatgaataaatccctggaaatatacaatccccctagattaaatcagaaagaaataaaaactctgaacaatcaagtacttagattgaaacagtaattaaaaaaactcccccaaaatcccaggaccagagggagtcaaagctcaattctaccagacattcaaaggagagttggtgccaatcttactgaaactattctaaaaggaaaatcttaagaattttaaacctgagaaaataatatcctattttattcatttttctgaatcttctaaatttgactaaagcttgaattgtttcatttatattttcatttatatatatacatattttttgcctgagtaaagcatacattgcagcttttaataatcaatggcagcctttagtgcctacatataaggaatgtcttagtttattggtgarcttggaaggcaggttgcactaaatttgaaatttgaatataagactttaggaaaaatgtaattttatctaactctaattatgctgttatttaattgaaatttaaaagtatattattgccagtttgtgtatattttttaactttgtgatgttactaccattttctcttagatttctccttttcatcatgaatagttttatgacataataaaaagttatctgctttcaaaacttttggacagaa

SEQ ID NO: 91847 - DNA, 561 bp, Homo sapiens
tgtaccactatcgaagtagtcctttgaaccagaaatttaaacagctaagctactttaaaaagtgtatctgctgctactccaagcagccgactctggaactggcttctgactttaaaagatgagtgaaaagatgtgctgtgctttcctctgcagaatgttcaaaccagaaggcccctggaagactgtgcctgaaacgcggctaaggcaccaccaggctgaacagaaaacgggggccttatcagagagaagggaagggccccatagtccaaacgcccaggaggctccgacctgacccgcggccacgagtgtttgctgcaggacgagaatctggggaagatgcagcsaagaaaatggcctggccgggccgggaagagcagcccacagagacccgcagcacagagagggatgcggggagcctgccctgggagccaccccggctgaggctcaggaggggagctgcgaagcctgaaacccatcgatgatggctggtgatgaaaacatgtgggtggacctgctttgatggcgagatggacaggtctgagctcacacatcctcgggaaa

SEQ ID NO: 91848 - DNA, 684 bp, Homo sapiens
ttgggtcattgtatgttggtcgaaatgttaccgtaacagtaaccccaagagccaatgaagtctcgtccagtcttcacactccctacagcttccattgttctcttatttcgaggttagagcttggggaatttccaaactttttttttgattctgtgcattgtactggtcaccatggggctatttataggaagaggatctatgctcacaagagcatacctgatttgaagaaaggacgggatatgtgaattccacacttcaaayttgcgtaggtgtatctgtgtgtagtcgcagttttagggactgagcgtctaaaaggctgaggcatgagcaccctcggaacgcgggcacggctgtgtgggtgagccactctggatctggtattaagggttcgttcatagcaaccctctccccttctcactccctcctcctcctcagaggggagagcggggaataattaaacattccagacctaacacacctcctcccacctgcaggatcacgctgttccaggtcagtctgctgataacaggggaagttgggaatttgcatttcgaatcttagacaagttgtagagacaacactagaaggagcatcacattttcctcctccgttgccacattccccgttgaagacacatgagcctgaaggaagatatgttgggtattgatcattctgtagcctttg

SEQ ID NO: 91849 - DNA, 684 bp, Homo sapiens
ttgggtcattgtatgttggtcgaaatgttaccgtaacagtaaccccaagagccaatgaagtctcgtccagtcttcacactccctacagcttccattgttctcttatttcgaggttagagcttggggaatttccaaactttttttttgattctgtgcattgtactggtcaccatggggctatttataggaagaggatctatgctcacaagagcatacctgatttgaagaaaggacgggatatgtgaattccacacttcaaatttgcgtaggtgtatctgtgtgtagtcgcagttttagggastgagcgtctaaaaggctgaggcatgagcaccctcggaacgcgggcacggctgtgtgggtgagccactctggatctggtattaagggttcgttcatagcaaccctctccccttctcactccctcctcctcctcagaggggagagcggggaataattaaacattccagacctaacacacctcctcccacctgcaggatcacgctgttccaggtcagtctgctgataacaggggaagttgggaatttgcatttcgaatcttagacaagttgtagagacaacactagaaggagcatcacattttcctcctccgttgccacattccccgttgaagacacatgagcctgaaggaagatatgttgggtattgatcattctgtagcctttg

SEQ ID NO: 91850 - DNA, 684 bp, Homo sapiens
ttgggtcattgtatgttggtcgaaatgttaccgtaacagtaaccccaagagccaatgaagtctcgtccagtcttcacactccctacagcttccattgttctcttatttcgaggttagagcttggggaatttccaaactttttttttgattctgtgcattgtactggtcaccatggggctatttataggaagaggatctatgctcacaagagcatacctgatttgaagaaaggacgggatatgtgaattccacacttcaaatttgcgtaggtgtatctgtgtgtagtcgcagttttagggactgagcrtctaaaaggctgaggcatgagcaccctcggaacgcgggcacggctgtgtgggtgagccactctggatctggtattaagggttcgttcatagcaaccctctccccttctcactccctcctcctcctcagaggggagagcggggaataattaaacattccagacctaacacacctcctcccacctgcaggatcacgctgttccaggtcagtctgctgataacaggggaagttgggaatttgcatttcgaatcttagacaagttgtagagacaacactagaaggagcatcacattttcctcctccgttgccacattccccgttgaagacacatgagcctgaaggaagatatgttgggtattgatcattctgtagcctttg

SEQ ID NO: 91851 - DNA, 684 bp, Homo sapiens
ttgggtcattgtatgttggtcgaaatgttaccgtaacagtaaccccaagagccaatgaagtctcgtccagtcttcacactccctacagcttccattgttctcttatttcgaggttagagcttggggaatttccaaactttttttttgattctgtgcattgtactggtcaccatggggctatttataggaagaggatctatgctcacaagagcatacctgatttgaagaaaggacgggatatgtgaattccacacttcaaatttgcgtaggtgtatctgtgtgtagtcgcagttttagggactgagcgtctaaaaggctgaggcatgagcaccctcggaacgcgggcacggctgtgtgggtgagccactctggatctggtattaagggttcgttcatagcaaccctctcccctyctcactccctcctcctcctcagaggggagagcggggaataattaaacattccagacctaacacacctcctcccacctgcaggatcacgctgttccaggtcagtctgctgataacaggggaagttgggaatttgcatttcgaatcttagacaagttgtagagacaacactagaaggagcatcacattttcctcctccgttgccacattccccgttgaagacacatgagcctgaaggaagatatgttgggtattgatcattctgtagcctttg

SEQ ID NO: 91852 - DNA, 684 bp, Homo sapiens
ttgggtcattgtatgttggtcgaaatgttaccgtaacagtaaccccaagagccaatgaagtctcgtccagtcttcacactccctacagcttccattgttctcttatttcgaggttagagcttggggaatttccaaactttttttttgattctgtgcattgtactggtcaccatggggctatttataggaagaggatctatgctcacaagagcatacctgatttgaagaaaggacgggatatgtgaattccacacttcaaatttgcgtaggtgtatctgtgtgtagtcgcagttttagggactgagcgtctaaaaggctgaggcatgagcaccctcggaacgcgggcacggctgtgtgggtgagccactctggatctggtattaagggttcgttcatagcaaccctctccccttctcactccctcctcctcctcagaggggagagcggggaataattaaacattccagacctaacacacctcctcccacctgcaggatcacgctgttccaggtcagtctgctgataacaggggaagttgsgaatttgcatttcgaatcttagacaagttgtagagacaacactagaaggagcatcacattttcctcctccgttgccacattccccgttgaagacacatgagcctgaaggaagatatgttgggtattgatcattctgtagcctttg

SEQ ID NO: 91853 - DNA, 684 bp, Homo sapiens
ttgggtcattgtatgttggtcgaaatgttaccgtaacagtaaccccaagagccaatgaagtctcgtccagtcttcacactccctacagcttccattgttctcttatttcgaggttagagcttggggaatttccaaactttttttttgattctgtgcattgtactggtcaccatggggctatttataggaagaggatctatgctcacaagagcatacctgatttgaagaaaggacgggatatgtgaattccacacttcaaatttgcgtaggtgtatctgtgtgtagtcgcagttttagggactgagcgtctaaaaggctgaggcatgagcaccctcggaacgcgggcacggctgtgtgggtgagccactctggatctggtattaagggttcgttcatagcaaccctctccccttctcactccctcctcctcctcagaggggagagcggggaataattaaacattccagacctaacacacctcctcccacctgcaggatcacgctgttccaggtcagtctgctgataacaggggaagttgggaatttgcatttcgaatcttagacaagttgtagagacaacactagaaggagcatcacattttcctcctccgttgccacattccccgttgaagacacatgagcctgaaggaagatatgttgggtattgwtcattctgtagcctttg

SEQ ID NO: 91854 - DNA, 746 bp, Homo sapiens
ggagggaccaggtggagataattgaatcatggggcagtatcctgttctcgtgatagtgagtgagttctcacgggatctgatggttttacagggggcttccctcttcgctgggcactcattcttctccttcctgccatcatgtgaagaaggatgtgtttgcttccccttctgacatgattgtcagtttcctgaggcctccccagccatgctgaactgagtcaattaaacctctttcctttataaattactcagtctcaagtatgtctttattagcagtgtgagaacggactaatacagtcaacttattgatcatatggtttatataatcatacatctataattatatagattatatagtcagattatatgatttatatcatcatataaataaactaccttttttaaagagatgaggtcttgctatgttgcccaggctggagtgccgtggccattcacagacacgataatcacacactgcagcttggaactcctggcctcaaaaatttcccaaagtgtttccaaagaacaggaactgaaaaggttctgtgagtgagaaggtttgggaaatagtgagttattccagcagggctctgaagggccaytgataaacaagctctaataggaataaactagggaaggatgtagttagcatcttattaatgtcttaatatactagccacagagaaatcatttcccacccctgtctgtctccctcccttctttttacccagagcatctcttggaac

SEQ ID NO: 91855 - DNA, 514 bp, Homo sapiens
aaaattttggaattgacttgtcaatttctcaaaaaaaaaaccctaccataattttgatttagtttatgttgtatctacagatcgatttggggagaaattatatcttgaaattgaatctttgataaatttgaacatgaaatgtcattgaaaattgaacatgataaatttctccattaatttaggtcttatttaatttttgccaacaatgttttgtagtttttagcatataaatctcacataaattttgttagagctatccataagtattttacattttatgatacaattgtatatataattattgatactattatatatgatatatgtgtgtatatatatatatatatrtatatatatatatatatatagttttaacatccaaatggtaattccaattggtgtattttattttacatattgtatatttcacctcccatgccctccacccctgccatgctctgcagcttagaaagagtgtgtatcatttctcactgtatttgttctcctcctgcca

SEQ ID NO: 91856 - DNA, 514 bp, Homo sapiens
aaaattttggaattgacttgtcaatttctcaaaaaaaaaaccctaccataattttgatttagtttatgttgtatctacagatcgatttggggagaaattatatcttgaaattgaatctttgataaatttgaacatgaaatgtcattgaaaattgaacatgataaatttctccattaatttaggtcttatttaatttttgccaacaatgttttgtagtttttagcatataaatctcacataaattttgttagagctatccataagtattttacattttatgatacaattgtatatataattattgatactattatatatgatatatgtgtgtatatatatatatatatatrtatatatatatatatatagttttaacatccaaatggtaattccaattggtgtattttattttacatattgtatatttcacctcccatgccctccacccctgccatgctctgcagcttagaaagagtgtgtatcatttctcactgtatttgttctcctcctgcca

SEQ ID NO: 91857 - DNA, 514 bp, Homo sapiens
aaaattttggaattgacttgtcaatttctcaaaaaaaaaaccctaccataattttgatttagtttatgttgtatctacagatcgatttggggagaaattatatcttgaaattgaatctttgataaatttgaacatgaaatgtcattgaaaattgaacatgataaatttctccattaatttaggtcttatttaatttttgccaacaatgttttgtagtttttagcatataaatctcacataaattttgttagagctatccataagtattttacattttatgatacaattgtatatataattattgatactattatatatgatatatgtgtgtatatatatatatatatatatrtatatatatatatatagttttaacatccaaatggtaattccaattggtgtattttattttacatattgtatatttcacctcccatgccctccacccctgccatgctctgcagcttagaaagagtgtgtatcatttctcactgtatttgttctcctcctgcca

SEQ ID NO: 91858 - DNA, 1209 bp, Homo sapiens
aattcaggagaaccagcttttaattctaactttgcagctaatgagctgtgtgaacatgggcatgtcctctatctaattgcaccttacttatctcttttgtcaaataagggaaatagactagaatatttttaagtctccttctacctctaatgggcaatgatttattacctctttcttacaaatgcaaaatgtccamatcagttatcaggatatgagctagattgtcttttaaaattgttctgacctacttatatctatccatgctttgtaaagttagaacagaatctttgggttctttgtttttggttgttgaagttattatttgtttgttttccattgtagtatacaaagcttggggtcttttgctatccttttatttctacggccggaatgggtcccatgtttccacatttcttctattcgcctctttgcccttggccatagctgcagggctttcactttgtacaatcccaaggagcatttccattgcagtttttgtcatgttccaagaggtgctattttttaaggaatagagttatatagactgcatttacagagactccattatgaacagtgatcttggagctgcacaatggcagggatcctgcatagctgatttgattagggtggacagttggccatattggaatagctagttctctttcttgaaaatttagaagtgaggataagataggataactctgggatcgtctcataaattgagaaatgtaaaccagaaagctactgaatgcatatataagctaagccagtagacagaaagagagagagtagaaaaaaatgcttaatgtgtagagagagtgagagaaaaaaattacatgagatcccaatggcttctaacttttttgagacttagatatattcctgttttcctgtcccaggcctctctttcttaagctgctgtgaaagagttttgttacttgcaattaattttcttattaagaaattttccttgttatgttagatttaatttattgtaaatgccctttctcaatagaatcaaacatatatgaatttaactgcctataataggtaagtattgatttatcaaagaggtcagtaagtttactgatcattttaaacatgaccgatatgatcatactataagccattatctaaccaaaagtatttaaattgaatgtggatatattctaggtagtccccactgcaaggaatgtaacattttgaaag

SEQ ID NO: 91859 - DNA, 1209 bp, Homo sapiens
aattcaggagaaccagcttttaattctaactttgcagctaatgagctgtgtgaacatgggcatgtcctctatctaattgcaccttacttatctcttttgtcaaataagggaaatagactagaatatttttaagtctccttctacctctaatgggcaatgatttattacctctttcttacaaatgcaaaatgtccaaatcagttatcaggatatgagctagattgtcttttaaaattgttctgacctacttatatctatccatgctttgtaaagttagaacagaatctttgggttctttgtttttggttgttgaagttattatttgtttgttttccattgtagtatacaaagcttggggtcttttgctatccttttatttctayggccggaatgggtcccatgtttccacatttcttctattcgcctctttgcccttggccatagctgcagggctttcactttgtacaatcccaaggagcatttccattgcagtttttgtcatgttccaagaggtgctattttttaaggaatagagttatatagactgcatttacagagactccattatgaacagtgatcttggagctgcacaatggcagggatcctgcatagctgatttgattagggtggacagttggccatattggaatagctagttctctttcttgaaaatttagaagtgaggataagataggataactctgggatcgtctcataaattgagaaatgtaaaccagaaagctactgaatgcatatataagctaagccagtagacagaaagagagagagtagaaaaaaatgcttaatgtgtagagagagtgagagaaaaaaattacatgagatcccaatggcttctaacttttttgagacttagatatattcctgttttcctgtcccaggcctctctttcttaagctgctgtgaaagagttttgttacttgcaattaattttcttattaagaaattttccttgttatgttagatttaatttattgtaaatgccctttctcaatagaatcaaacatatatgaatttaactgcctataataggtaagtattgatttatcaaagaggtcagtaagtttactgatcattttaaacatgaccgatatgatcatactataagccattatctaaccaaaagtatttaaattgaatgtggatatattctaggtagtccccactgcaaggaatgtaacattttgaaag

SEQ ID NO: 91860 - DNA, 1209 bp, Homo sapiens
aattcaggagaaccagcttttaattctaactttgcagctaatgagctgtgtgaacatgggcatgtcctctatctaattgcaccttacttatctcttttgtcaaataagggaaatagactagaatatttttaagtctccttctacctctaatgggcaatgatttattacctctttcttacaaatgcaaaatgtccaaatcagttatcaggatatgagctagattgtcttttaaaattgttctgacctacttatatctatccatgctttgtaaagttagaacagaatctttgggttctttgtttttggttgttgaagttattatttgtttgttttccattgtagtatacaaagcttggggtcttttgctatccttttatttctacggccggaatgggtcccatgtttccacatttcttctattcgcctctttgcccttggccatagctgcagggctttcactttgtacaatcccaaggagcatttccattgcagtttttgtcatgttccaagaggtgctattttttaaggaatagagttatatagactgcatttacagagactccattatgaacagtgatcttggagctgcacaatggcagggatcctgcatagctgatttgattagggtggacagttggccatattggaatagctagttctctttcttgaaaatttagaagtgaggataagataggataactctgggatcgtctcataaattgagaaatgtaaaccagaaagctactgaatgcatatataagctaagccagtagacagaaagagagagagtagaaaaaaatgcttaatgtgtagagagagtgagagaaaaaaattacmtgagatcccaatggcttctaacttttttgagacttagatatattcctgttttcctgtcccaggcctctctttcttaagctgctgtgaaagagttttgttacttgcaattaattttcttattaagaaattttccttgttatgttagatttaatttattgtaaatgccctttctcaatagaatcaaacatatatgaatttaactgcctataataggtaagtattgatttatcaaagaggtcagtaagtttactgatcattttaaacatgaccgatatgatcatactataagccattatctaaccaaaagtatttaaattgaatgtggatatattctaggtagtccccactgcaaggaatgtaacattttgaaag

SEQ ID NO: 91861 - DNA, 1209 bp, Homo sapiens
aattcaggagaaccagcttttaattctaactttgcagctaatgagctgtgtgaacatgggcatgtcctctatctaattgcaccttacttatctcttttgtcaaataagggaaatagactagaatatttttaagtctccttctacctctaatgggcaatgatttattacctctttcttacaaatgcaaaatgtccaaatcagttatcaggatatgagctagattgtcttttaaaattgttctgacctacttatatctatccatgctttgtaaagttagaacagaatctttgggttctttgtttttggttgttgaagttattatttgtttgttttccattgtagtatacaaagcttggggtcttttgctatccttttatttctacggccggaatgggtcccatgtttccacatttcttctattcgcctctttgcccttggccatagctgcagggctttcactttgtacaatcccaaggagcatttccattgcagtttttgtcatgttccaagaggtgctattttttaaggaatagagttatatagactgcatttacagagactccattatgaacagtgatcttggagctgcacaatggcagggatcctgcatagctgatttgattagggtggacagttggccatattggaatagctagttctctttcttgaaaatttagaagtgaggataagataggataactctgggatcgtctcataaattgagaaatgtaaaccagaaagctactgaatgcatatataagctaagccagtagacagaaagagagagagtagaaaaaaatgcttaatgtgtagagagagtgagagaaaaaaattacatgagatcccaatggcttctaacttttttgagacttagatatattcctgttttcctgtcccaggcctctctttcttaagctgctgtgaaagagttttgttacttgcaattaattttcttattaagaaattttccttgttatgttagatttaatttattgtaaatgccctttctcaatagaatcaaacatatatgaatttaactgcctataataggtaagtattgatttatcaaagaggtcartaagtttactgatcattttaaacatgaccgatatgatcatactataagccattatctaaccaaaagtatttaaattgaatgtggatatattctaggtagtccccactgcaaggaatgtaacattttgaaag

SEQ ID NO: 91862 - DNA, 713 bp, Homo sapiens
ggggaggcgtggggcttctgcatgagctactgcactcagagccaacaatgagcacggtggttgccttgatccaagggagcaaaagaaaaccctcatttgttggctgggagtctggggtgggggtggtctctgggccrgcaaagccctttcaggggccttgttcccagatgcgtctcccagctctatgtggctgggtggctcctttcttctcttctgtgtctcaatttgaatggggatggagggggtccatttcccctgaagccatgggactcagcaatcactgtggcgagatggaggcaccctggtaccgtgggtgacgggggtgctgccaactcttcagcagagtaggtgggttgacttctagagcaagagggtgcctcagagcccctccttcagcagcccccggcagatgggaaggagacttgggcacagggaccgcctgttcagggtcacacagtgaattggaggcctgggctcccctctccttaactcctcacctatgactttctaaccctgtacctgggagctcttctggtagaggagttctaccatacagtcctttagggaactgtgactccatacaaggatcccaaggtcatgagaatgacagccgcctggcctggccaagacagccagtgtcaaatccgaaagttagagagcaagtcttagtggtgatggtgatgggaaaggggtggtgatggggatgggaaagg

SEQ ID NO: 91863 - DNA, 713 bp, Homo sapiens
ggggaggcgtggggcttctgcatgagctactgcactcagagccaacaatgagcacggtggttgccttgatccaagggagcaaaagaaaaccctcatttgttggctgggagtctggggtgggggtggtctctgggccggcaaagccctttcaggggccttgttcccagatgcgtctcccagctctatgyggctgggtggctcctttcttctcttctgtgtctcaatttgaatggggatggagggggtccatttcccctgaagccatgggactcagcaatcactgtggcgagatggaggcaccctggtaccgtgggtgacgggggtgctgccaactcttcagcagagtaggtgggttgacttctagagcaagagggtgcctcagagcccctccttcagcagcccccggcagatgggaaggagacttgggcacagggaccgcctgttcagggtcacacagtgaattggaggcctgggctcccctctccttaactcctcacctatgactttctaaccctgtacctgggagctcttctggtagaggagttctaccatacagtcctttagggaactgtgactccatacaaggatcccaaggtcatgagaatgacagccgcctggcctggccaagacagccagtgtcaaatccgaaagttagagagcaagtcttagtggtgatggtgatgggaaaggggtggtgatggggatgggaaagg

SEQ ID NO: 91864 - DNA, 713 bp, Homo sapiens
ggggaggcgtggggcttctgcatgagctactgcactcagagccaacaatgagcacggtggttgccttgatccaagggagcaaaagaaaaccctcatttgttggctgggagtctggggtgggggtggtctctgggccggcaaagccctttcaggggccttgttcccagatgcgtctcccagctctatgtggctgggtggctcctttcttctcttctgtgtctcaatttgaatggggatggagggggtccrtttcccctgaagccatgggactcagcaatcactgtggcgagatggaggcaccctggtaccgtgggtgacgggggtgctgccaactcttcagcagagtaggtgggttgacttctagagcaagagggtgcctcagagcccctccttcagcagcccccggcagatgggaaggagacttgggcacagggaccgcctgttcagggtcacacagtgaattggaggcctgggctcccctctccttaactcctcacctatgactttctaaccctgtacctgggagctcttctggtagaggagttctaccatacagtcctttagggaactgtgactccatacaaggatcccaaggtcatgagaatgacagccgcctggcctggccaagacagccagtgtcaaatccgaaagttagagagcaagtcttagtggtgatggtgatgggaaaggggtggtgatggggatgggaaagg

SEQ ID NO: 91865 - DNA, 529 bp, Homo sapiens
tgatacatatcaggygccagatggagcccgacatacagagagagctcactgaatagtaactattattatcttgggcacctgtctggtccctacaggcttctgaattttcagcccttcttcctctccacctacgagaatcttggccagcccacaccttcaaatcttagctgaagattttatctgcctcttttttattattcattttcttagagacaggatcttactcttctgcccaggctggagtgcagtggcatgatcatagctcactgcagcctctaactcctggactcaagcaatcctcttgcccctgctgcccaagtagctgagattacaggctatccgcccttctaaaccgcattctctgctaaacccagcgcactgctgttgtgctggacccctgttaactccaatagatggcaccagattccagagatctggaagcagtgagccagacacagggtttattggaaacttacctacagggatggtctgggggcagcaggctggacaggagaaccgcaaccgcttg

SEQ ID NO: 91866 - DNA, 727 bp, Homo sapiens
  misc_feature (1)...(727): n = A,T,C or G
agaatgtgtggatttggtcacctttcttccctcttcagggaccatggcagccttctgccataggtagtttttcagtctgactccggacagatgtgaggctgattgccggcagcttgggtcctgacatttggtgggctttgctttgtgttctgctttcgatggcagggcttcctgtcccagtgcggaatttctccactctggctccctggtagaatcatttttgggcatggagaacctttaagatactggtgcccaggcaggatctagacctactgaacctctagggatgtgacctgggtacttttcctgtttagtcgctcacatattaataaattaactaattaatatatatattttttgtagagacagggtcttgctatattgcacagtctggtctcaaattcctgggcttggccgggcgtggtggctcatgcttgtaataccagcactttgggaggccgacgcgggtggatcatctgaggtcacgagtttgagaccagactggccaggkggtgaaaccctgtctctactcaaaatacaaaaaattacccaggcgtggtggtgggcacccataatcccaactactcaaaaggntggggcgggagaatgccttgaatccgggaggtggaggttgcagtgagccgagattgagccattgcaccccaatctgggcgacaagagcgaaactccatctaaaaaaaaagaaattcctgggctcaagtgatcc

SEQ ID NO: 91867 - DNA, 571 bp, Homo sapiens
gatagagagaacaatagtaccccttcgtcagtgagctctcagtctactggggggatagacagataaataattccaatacagtgcaaggagtgcttctgtggaggtctgaatcgggagcaggagccattagggttagcttcaggaggagrtgttaggactccttcagttgcaaatgacaaaaacccaagtcaaactggcatagctgaaagaaaacatcttttgatttatgcatctggaaagtcctcctaggcttctgatgtggctgacccagggccttaattgccatcatcaagacccagcctccctctgtctctcagcactagtttcttctatagtggctccattctcagggcagcttcttctaaagcacggctgttgggtagacctcatatcccaccagctgagcagcccagcaggaagagaacacctctttcctgatggttctcacagaaatggcagttctgactctcactggctagcagtaggtcacgtgacaatccttggcccaatcattgtgactcgggccaagcctaggtcatgtgccttctcctggagcagggagggaagggat

SEQ ID NO: 91868 - DNA, 571 bp, Homo sapiens
gatagagagaacaatagtaccccttcgtcagtgagctctcagtctactggggggatagacagataaataattccaatacagtgcaaggagtgcttctgtggaggtctgaatcgggagcaggagccattagggttagcttcaggaggagatgttaggactccttcagttgcaaatgacaaaaacccaagtcaaactggcatagctgaaagaaaacatcttttgatttatgcatctggaaagtcctcctaggcttctgatgtggctgacccagggccttaattgccatcatcaagacccagcctccctctgtctctcagcactagtttcttctatagtggctccattctcagggcagcttcttctaaagcacggctgttgggtagacctcatatcccaccagctgagcagcccagcaggaagagaacacctctttcctgatggttctcacagaaatggcagttctgactctcactggctagcagtaggtcacgtgacaatcctyggcccaatcattgtgactcgggccaagcctaggtcatgtgccttctcctggagcagggagggaagggat

SEQ ID NO: 91869 - DNA, 530 bp, Homo sapiens
tgtggaactagattggtatattttgttcagattagattttaatggaaatgaagctttgtgaacttttaagctttcaaaatggtttcttttgtttatttgtaaagtggcttgagagcaactataaatacattttgacatcaggcaaattccaggaaagttatctctgtgtatgtaatattggttgtcattatggtgatttggagaaaataatactccgtacataattataaccaaatgatccatattgacccaaagccttactgaactattgttgagatagaaatatctggactgtagtaagagtcttggaagtgctaattctcaccctctycctctacctcccactttttctctgcctctgtaatcatccaaatgcaaaaagccctaaatcaacacttggcaaaatcctcctaacattattttgagacgtttctgtttacttgtgagttttaattcctctgcaaggagttcttccctgctctcaaatcccgaaatgtactagaggattctatcactctcctcctccctcc

SEQ ID NO: 91870 - DNA, 1285 bp, Homo sapiens
gtatcaaagcatcatgctgtacaccttaaataaatacggtaaaaataatgttttttaagaacatttttaaaacaaataaatgttttttaaaaaacatggattgataagccttcgcctcagagtttctgatgcagaaatcagccccctcaagttgcagatctatcacacttatagatgctgctgatccaaaacccatgcttttggaacctctgctgtaagggaaaaaaaaagaaatcacgtccccagatcccagactccagcttttggcctgtctgtccactgtttcattctctcatccaaaatgacacttttaaacatccaagttctccacttatcagatcccttgacctcatgcttaatattgccaagtcacctcagccacacatggaactaagcccctaacataaaatattgctcccaatcacactgaaattcagctcttttgcaccatttcttttctctgcctcccccttaactctgaaaacatgttttctctgttgactgcggaatgcaacgttactcatgccagccctctttgctaagatcagtcttctctcgttggaccaaacttgagtccttttcaccttgtagtaagtggtcagctgcctctgtgctcctcttgccagtattttggactctcttgaggaccctcccatctctagccttggattgctccacggtgagccttctgctcacagactgcagaatgctgctggagaaagttgtgtggcttagtgcagctggtgccctgcgagagcctgctgtacaatttcagtttggccagggtctcctgctcaccactccttctatttatcctcgttgacttcttggatcattttccatggaaacttttcaggctgtgttttatttcttaaagaaataaaaccattctccctgggggcttaaagcccccaatcccattagttctctcatctttaattcaatttatctgttcctatatctatatttattcttctctcacatctcagagcaagatataycgtctctcgaaagttaaagtcggatgttgcaaaagaatgtctgatgttcctttgctctcatctcttcacatgtataaaggaacttacttgacttctgtcttcactgccatcccttttaagttaatcttcctattttccctattgggatttctcctggctttgaaaaatgcctcagttttctcgattaaagtgacatttttgcttcatcctgctttcctttcccaatattatttcatttctcttattaattagggtctttgaatgaacagttgatatggtttgca

SEQ ID NO: 91871 - DNA, 760 bp, Homo sapiens
ggatcctacatatttttcaggtctcatctatgaactatgggcagaaaatctacgataaacaaaagatcaaaaaaattagawaaagacagcctgctgttatttgatttatgaccctgggttattgcacaacaggagttgatgaatgcatcttttaattacagccctcaagtgtgcagaggaggtggggatcacagtgagctcacctcctcagatcacttctctgtttaaccatcgctggctgcctctcgtctatacagtcctgacccctgagcatgcagctcttcatgaatggccttatgccctcaagccctgtgctgcccctttcccttccctcccaccactgtttctgcttcctttaacaccagctagtccaactgtgtccaaccacgctgatgtacttgacatttccaatcaacactgtttactttcaacacccaggtgagaggcttctctaagaaccccttccccaattcttctgagcccttgggaaaagtaagccacttcctttagtgtgatacttcctctgcgtgactcaggcactttatacaggcttctattatagcacttactgtattgttcatagttaacttctccattgcactaggaggtccctagaaggcagagcccttaaacttttcaattttgtattcctagcacatagcataatggacaactcacaggcggtacagaacaactacttggaaattaatgacattttatgggtctaacttgttttggaatgggttttccttaggggcaa

SEQ ID NO: 91872 - DNA, 3809 bp, Homo sapiens
  misc_feature (1)...(3809): n = A,T,C or G
gggatcctctgcaaggcaacctgggagggagtttaggattgttctgaagcagtgaaagtcattgagattcacatgtaagagggtagagaaagggaatccacatgttttgatccctccatgtgctggatataacttggtcttcattatattgcaccacctttggtgtcagagagaactggatttgaatcccagttccatcactcattatgatttgatggtgaatgtgtttttaactcatctgagcctcagtttgctcatctataaaagatgggattgttatgagacttgcataaggtaagtgtttaaaaatctgggaataacccctgtaatttaaaagacggggttgtgatgaggcttcaataaggtaagtgtgtaatatctggacacaatgttactaattttgtaggttttcaatatatagagaaggaggattatttttctctcatttaatttttagaacaagtttataaaattggtattattcatatttttgagataatcaaaggatcactaagtttaaataaatcaccatagtaacaaagcagttcacaatatattgactggataattgctagtgaaaagtagcaatgatgatcacattgaaaatcttgtgttaggtggtggttttctcttgcataagcctcttcatttgttgaaaccatagattctaagtttgctctatcaaagtgatcattagaaaaatataatgtacttagtgtataaattttagaaaatttcctttttagtcctgttattttgattgaatatgtgcattttgaattatgaatataaatatgaatatgtatggcataagaaatatgacttgacatcacagagtaaccttagatcgtggcaatgtttttttctgaaagcacctgcagaaatgtatcttctttctagtttccaaaaaactcagaggccatgggggaagaggggactttggtggtcagatagtgcatgaggtacattaggatatagtaattgcatcataattcatatccataattcacagtgaggaaacctgaaatttgctaccagctaccaataaatgaaaggtggggcggggtcgctggggggcgcggctttgtgagccagtgcctggactcccacgtcacaaatggaagggcagcgcgtggagggaactcaaggcctgattggttcttcctaagcaggacacgatcaggttggcacggcaaccggccttcagttggtggccttcagtgggtgccttaagttggtggcatttggttgcctttcctggggagaggcggcaggtgctcagctctgcagacgtaggggcaagcgaaggcccaagctgcctcgagaagagcagagatgccccatggggaccacgatgacgggtcgcatgtgcaccaaagccagcccccagcagggccagcgcaggggttctgcggggccgtcctgtggctctgatatctatgagtcgtcggccagcaaaggcacaggcaccagcagaaaggagcagagatgcccagaacatgctgtcccccaatgccagccccaagcggggccagcttagggtgcggtgggcagagccatcctgcagctctgagatccacgaggaggaggtgggagtagcgccaggctccactgcgttggagctcgcacaatttgagcccaatttgattccggagccatgacttgcagcacattgaagaccagaagacgcccaaaggtagggaggcgacagataccgcttggcctcaggagctcctctggccgttgctgaaccaaggttcccccagagacatccacagcctggrgctcctcccttcttcacctagttcctttcctaggcccaggccccaagcatgaggactggcactgcctggcgtctccatcccttggtctttccctgttgcatccagctggtttcttttctcctccctacccatatgcccagttatgggccctcttcttcttcctagaggctggccaaaaactaagttttcaaagtacaaaatggatgctacagatttcgttgctttagaggaaatgtctgacggttcttgtatttaaacttaagtagctacactgggactcacagtttcatatcttgagttctagaccagagctatcaaccctaaagcaacggcaaggggttagaggtactcttcttgattcgaataataaaaaatgattttttttttgtagggacaaggtctcactgtgttgcccaagctggtctcaaacccctggccacacactgctgggatgacaggcaagagccaccacacctggtcattggaggtgctcttgctttgtgtgtttcggctggtcttcaggtgcagctgtctgtaagatgcttctgcaatatagttctatgtctttctgcacagattcagtggatcctgtgttttttttacatggaatagcccctttattttttgcagagaagctagataattcacagtaacctatggcctagaaaattttatttcttgatcaacacaactctttatagatgcttgtggtccaaaaatgcagatttctaatcatccccacgaataagggggccattgcaaggcaacctgggagggagtttaggatttctctgaggcagtgaaagctattgaaattcccacatgagggggcagaaaagggaatccacatattttgatccctccatgttctggctgtaacttggtgctcgttaaattgcacctttttggnnnnnnnnnnnnnnnnnnnnnnnnnnnnnnnnnnnnnnnnnnnnnnnnnnnnnnnnnnnnnnnnnnnnnnnnnnnnnnnnnnnnnnnnnnnnnnnnnnnnatatacataaaaatgtacaaaatatgtactggggtgatggatttcctaatagctttgaactgacccactaagcatggaacagaaattgcacatgtatcccataatttttatataaacaaaagtaaataaatggaaggaagggagaaagagaaggaaggaaagaaagaaagaaggaagagcgaggaaaggaaagaaggaagggagagcaaggaaaggaagggaagggaaaggaaaggaaaggaaaggaaagggaaggaaaaaatgaagggagagcgaggaaaggaaaggaaagggaaggaaggaagggagaaagaaagaaagaggaaagaaagagagagagaagaaagaaagaaaaagaaagaaagaaagaaagaaagaaagggaaagaaagagagaaagaggaatagtgttcatgatgtttaggaatcaccaattctgggggtgctgaattgtgtccccccagattcctatgttgaagagctgatccccactgcctcagagggactgatttagagaaggcattcaaagaggtaagtgaggtccaatgaagccatatgggtggaccctaaaccaatatggcaggtgtccatgtaaaaagagattgagacacaggcaacacagcctgaggacacagcaggaagggaggcatctgcaaggcagcagttctcagaagaaggcaaacctgctgacattccatcctggatttccagtcttcagagctgtgagaagataaaccactcaatctgtggcagcttgtgatggaagcccctagcactcttatacggtgaccttagcacgagcagtttcataggcttgatgaaagtgaaagccaaactgacctgaataaagagtgaaaggaaaatgagcaaaaggagatagtaaatgtggaaaatccttgagaaaaatttgccaagaaaggaggagatggcttgatagctagaaagacacacagagtcaaaatcaaggttcctccaagatagaagattttttaaatgaaaaatttatatttaaatgct

SEQ ID NO: 91873 - DNA, 3809 bp, Homo sapiens
  misc_feature (1)...(3809): n = A,T,C or G
gggatcctctgcaaggcaacctgggagggagtttaggattgttctgaagcagtgaaagtcattgagattcacatgtaagagggtagagaaagggaatccacatgttttgatccctccatgtgctggatataacttggtcttcattatattgcaccacctttggtgtcagagagaactggatttgaatcccagttccatcactcattatgatttgatggtgaatgtgtttttaactcatctgagcctcagtttgctcatctataaaagatgggattgttatgagacttgcataaggtaagtgtttaaaaatctgggaataacccctgtaatttaaaagacggggttgtgatgaggcttcaataaggtaagtgtgtaatatctggacacaatgttactaattttgtaggttttcaatatatagagaaggaggattatttttctctcatttaatttttagaacaagtttataaaattggtattattcatatttttgagataatcaaaggatcactaagtttaaataaatcaccatagtaacaaagcagttcacaatatattgactggataattgctagtgaaaagtagcaatgatgatcacattgaaaatcttgtgttaggtggtggttttctcttgcataagcctcttcatttgttgaaaccatagattctaagtttgctctatcaaagtgatcattagaaaaatataatgtacttagtgtataaattttagaaaatttcctttttagtcctgttattttgattgaatatgtgcattttgaattatgaatataaatatgaatatgtatggcataagaaatatgacttgacatcacagagtaaccttagatcgtggcaatgtttttttctgaaagcacctgcagaaatgtatcttctttctagtttccaaaaaactcagaggccatgggggaagaggggactttggtggtcagatagtgcatgaggtacattaggatatagtaattgcatcataattcatatccataattcacagtgaggaaacctgaaatttgctaccagctaccaataaatgaaaggtggggcggggtcgctggggggcgcggctttgtgagccagtgcctggactcccacgtcacaaatggaagggcagcgcgtggagggaactcaaggcctgattggttcttcctaagcaggacacgatcaggttggcacggcaaccggccttcagttggtggccttcagtgggtgccttaagttggtggcatttggttgcctttcctggggagaggcggcaggtgctcagctctgcagacgtaggggcaagcgaaggcccaagctgcctcgagaagagcagagatgccccatggggaccacgatgacgggtcgcatgtgcaccaaagccagcccccagcagggccagcgcaggggttctgcggggccgtcctgtggctctgatatctatgagtcgtcggccagcaaaggcacaggcaccagcagaaaggagcagagatgcccagaacatgctgtcccccaatgccagccccaagcggggccagcttagggtgcggtgggcagagccatcctgcagctctgagatccacgaggaggaggtgggagtagcgccaggctccactgcgttggagctcgcacaatttgagcccaatttgattccggagccatgacttgcagcacattgaagaccagaagacgcccaaaggtagggaggcgacagataccgcttggcctcaggagctcctctggccgttgctgaaccaaggttcccccagagacatccacagcctggggctcctcccttcttcacctagttcctttcctaggcccaggccccaagcatgaggactggcactgcctggcgtctccatcccttggtctttccctgttgcatccagctggtttcttttctcctccctacccatatgcccagttatgggccctcttcttcttcctagaggctggccaaaaactaagttttcaaagtacaaaatggatgctacagatttcgttgctttagaggaaatgtctgacggytcttgtatttaaacttaagtagctacactgggactcacagtttcatatcttgagttctagaccagagctatcaaccctaaagcaacggcaaggggttagaggtactcttcttgattcgaataataaaaaatgattttttttttgtagggacaaggtctcactgtgttgcccaagctggtctcaaacccctggccacacactgctgggatgacaggcaagagccaccacacctggtcattggaggtgctcttgctttgtgtgtttcggctggtcttcaggtgcagctgtctgtaagatgcttctgcaatatagttctatgtctttctgcacagattcagtggatcctgtgttttttttacatggaatagcccctttattttttgcagagaagctagataattcacagtaacctatggcctagaaaattttatttcttgatcaacacaactctttatagatgcttgtggtccaaaaatgcagatttctaatcatccccacgaataagggggccattgcaaggcaacctgggagggagtttaggatttctctgaggcagtgaaagctattgaaattcccacatgagggggcagaaaagggaatccacatattttgatccctccatgttctggctgtaacttggtgctcgttaaattgcacctttttggnnnnnnnnnnnnnnnnnnnnnnnnnnnnnnnnnnnnnnnnnnnnnnnnnnnnnnnnnnnnnnnnnnnnnnnnnnnnnnnnnnnnnnnnnnnnnnnnnnnnatatacataaaaatgtacaaaatatgtactggggtgatggatttcctaatagctttgaactgacccactaagcatggaacagaaattgcacatgtatcccataatttttatataaacaaaagtaaataaatggaaggaagggagaaagagaaggaaggaaagaaagaaagaaggaagagcgaggaaaggaaagaaggaagggagagcaaggaaaggaagggaagggaaaggaaaggaaaggaaaggaaagggaaggaaaaaatgaagggagagcgaggaaaggaaaggaaagggaaggaaggaagggagaaagaaagaaagaggaaagaaagagagagagaagaaagaaagaaaaagaaagaaagaaagaaagaaagaaagggaaagaaagagagaaagaggaatagtgttcatgatgtttaggaatcaccaattctgggggtgctgaattgtgtccccccagattcctatgttgaagagctgatccccactgcctcagagggactgatttagagaaggcattcaaagaggtaagtgaggtccaatgaagccatatgggtggaccctaaaccaatatggcaggtgtccatgtaaaaagagattgagacacaggcaacacagcctgaggacacagcaggaagggaggcatctgcaaggcagcagttctcagaagaaggcaaacctgctgacattccatcctggatttccagtcttcagagctgtgagaagataaaccactcaatctgtggcagcttgtgatggaagcccctagcactcttatacggtgaccttagcacgagcagtttcataggcttgatgaaagtgaaagccaaactgacctgaataaagagtgaaaggaaaatgagcaaaaggagatagtaaatgtggaaaatccttgagaaaaatttgccaagaaaggaggagatggcttgatagctagaaagacacacagagtcaaaatcaaggttcctccaagatagaagattttttaaatgaaaaatttatatttaaatgct

SEQ ID NO: 91874 - DNA, 3809 bp, Homo sapiens
  misc_feature (1)...(3809): n = A,T,C or G
gggatcctctgcaaggcaacctgggagggagtttaggattgttctgaagcagtgaaagtcattgagattcacatgtaagagggtagagaaagggaatccacatgttttgatccctccatgtgctggatataacttggtcttcattatattgcaccacctttggtgtcagagagaactggatttgaatcccagttccatcactcattatgatttgatggtgaatgtgtttttaactcatctgagcctcagtttgctcatctataaaagatgggattgttatgagacttgcataaggtaagtgtttaaaaatctgggaataacccctgtaatttaaaagacggggttgtgatgaggcttcaataaggtaagtgtgtaatatctggacacaatgttactaattttgtaggttttcaatatatagagaaggaggattatttttctctcatttaatttttagaacaagtttataaaattggtattattcatatttttgagataatcaaaggatcactaagtttaaataaatcaccatagtaacaaagcagttcacaatatattgactggataattgctagtgaaaagtagcaatgatgatcacattgaaaatcttgtgttaggtggtggttttctcttgcataagcctcttcatttgttgaaaccatagattctaagtttgctctatcaaagtgatcattagaaaaatataatgtacttagtgtataaattttagaaaatttcctttttagtcctgttattttgattgaatatgtgcattttgaattatgaatataaatatgaatatgtatggcataagaaatatgacttgacatcacagagtaaccttagatcgtggcaatgtttttttctgaaagcacctgcagaaatgtatcttctttctagtttccaaaaaactcagaggccatgggggaagaggggactttggtggtcagatagtgcatgaggtacattaggatatagtaattgcatcataattcatatccataattcacagtgaggaaacctgaaatttgctaccagctaccaataaatgaaaggtggggcggggtcgctggggggcgcggctttgtgagccagtgcctggactcccacgtcacaaatggaagggcagcgcgtggagggaactcaaggcctgattggttcttcctaagcaggacacgatcaggttggcacggcaaccggccttcagttggtggccttcagtgggtgccttaagttggtggcatttggttgcctttcctggggagaggcggcaggtgctcagctctgcagacgtaggggcaagcgaaggcccaagctgcctcgagaagagcagagatgccccatggggaccacgatgacgggtcgcatgtgcaccaaagccagcccccagcagggccagcgcaggggttctgcggggccgtcctgtggctctgatatctatgagtcgtcggccagcaaaggcacaggcaccagcagaaaggagcagagatgcccagaacatgctgtcccccaatgccagccccaagcggggccagcttagggtgcggtgggcagagccatcctgcagctctgagatccacgaggaggaggtgggagtagcgccaggctccactgcgttggagctcgcacaatttgagcccaatttgattccggagccatgacttgcagcacattgaagaccagaagacgcccaaaggtagggaggcgacagataccgcttggcctcaggagctcctctggccgttgctgaaccaaggttcccccagagacatccacagcctggggctcctcccttcttcacctagttcctttcctaggcccaggccccaagcatgaggactggcactgcctggcgtctccatcccttggtctttccctgttgcatccagctggtttcttttctcctccctacccatatgcccagttatgggccctcttcttcttcctagaggctggccaaaaactaagttttcaaagtacaaaatggatgctacagatttcgttgctttagaggaaatgtctgacggttcttgtatttaaacttaagtagctacactgggactcacagtttcatatcttgagttctagaccagagctatcaaccctaaagcaacggcaaggggttagaggtactcttcttgattcgaataataaaaaatgattttttttttgtagggacaaggtctcactgtgttgcccaagctggtctcaaacccctggccacacactgctgggatgacaggcaagagccaccacacctggtcattggaggtgctcttgctttrtgtgtttcggctggtcttcaggtgcagctgtctgtaagatgcttctgcaatatagttctatgtctttctgcacagattcagtggatcctgtgttttttttacatggaatagcccctttattttttgcagagaagctagataattcacagtaacctatggcctagaaaattttatttcttgatcaacacaactctttatagatgcttgtggtccaaaaatgcagatttctaatcatccccacgaataagggggccattgcaaggcaacctgggagggagtttaggatttctctgaggcagtgaaagctattgaaattcccacatgagggggcagaaaagggaatccacatattttgatccctccatgttctggctgtaacttggtgctcgttaaattgcacctttttggnnnnnnnnnnnnnnnnnnnnnnnnnnnnnnnnnnnnnnnnnnnnnnnnnnnnnnnnnnnnnnnnnnnnnnnnnnnnnnnnnnnnnnnnnnnnnnnnnnnnatatacataaaaatgtacaaaatatgtactggggtgatggatttcctaatagctttgaactgacccactaagcatggaacagaaattgcacatgtatcccataatttttatataaacaaaagtaaataaatggaaggaagggagaaagagaaggaaggaaagaaagaaagaaggaagagcgaggaaaggaaagaaggaagggagagcaaggaaaggaagggaagggaaaggaaaggaaaggaaaggaaagggaaggaaaaaatgaagggagagcgaggaaaggaaaggaaagggaaggaaggaagggagaaagaaagaaagaggaaagaaagagagagagaagaaagaaagaaaaagaaagaaagaaagaaagaaagaaagggaaagaaagagagaaagaggaatagtgttcatgatgtttaggaatcaccaattctgggggtgctgaattgtgtccccccagattcctatgttgaagagctgatccccactgcctcagagggactgatttagagaaggcattcaaagaggtaagtgaggtccaatgaagccatatgggtggaccctaaaccaatatggcaggtgtccatgtaaaaagagattgagacacaggcaacacagcctgaggacacagcaggaagggaggcatctgcaaggcagcagttctcagaagaaggcaaacctgctgacattccatcctggatttccagtcttcagagctgtgagaagataaaccactcaatctgtggcagcttgtgatggaagcccctagcactcttatacggtgaccttagcacgagcagtttcataggcttgatgaaagtgaaagccaaactgacctgaataaagagtgaaaggaaaatgagcaaaaggagatagtaaatgtggaaaatccttgagaaaaatttgccaagaaaggaggagatggcttgatagctagaaagacacacagagtcaaaatcaaggttcctccaagatagaagattttttaaatgaaaaatttatatttaaatgct

SEQ ID NO: 91875 - DNA, 1485 bp, Homo sapiens
tgcatggaatgccacaatagaggcaatgaggatgcttagaggaaaccacttatgttggcctggggaatcggaacttgtggctgtaataaagctttcttctcttagattatgaatgttgctcatggggagcacttaaatgagctccctgagaacagggaccacaacttctttgtttttattttttagtctgagtgtagtgctttgactatagtagttgatcaatgtggtgagcagaaaaggtagcttccctacattacagctagtagtggtgtttgctggacttcagcaggtctttgtaaattcaaagcccaggctctctaacaccatacatagcactttgttactcacaatgaatggtttgctacagaatgctttctcttttctaatctgcttcttgtctgattgtcatgcaaacttgaatgggataataaatgtaaagtaattagcatagaagaagcactcagtgactattacctgctattattactttataatgtagtctgcattatttttttcctttatttaaatcttcaactttgctgaattgcttattgaagaaaatgctgtctctaaacataacattactggcagctggaagtgaaacttacacattatgcttcatggtatctgagagtcatgaagtttacaaagacatttctggtcttattctgataaatatcacatgctagtatttcctacattcccatttactcagtgttccctacttcctaaaggagggaaaagcgccgtcgaacagttgtcaaattttcttcacaaacagcttggttttccttaatggatgaaatcacccttcgttgatggatccatttgcacaggaatttctagatcatctcagggctcacactctgggtcccacctcctgctctgctacaaayggttaggtatctttatgcatcagtatccagctggccatagcggccctgtgtcagaaattatatttcctctaattggctaaagggaccattttcttaatagtttctttcttttatagggccatgtgctatattccatttatatacacattctggaacacagtattccagagcatgttaattgttcagagataatggacctaacaaatagaatggtgcggttaaggagaaatccagttgcatggaggtccttggtcttttgtgtggcttgaagaggttgaggatgctgatgtgttctttgggaagagattcacagttgacaggaaacatctgctttaatttgctccaacatcaacaagatcgatgtggtaggaaacctgttgttactgtgtgagttccatttatcaaggcagggcttggcctgaaatcagggctatttggacaggtaccacaatgggtcaaaatatggacataacaaagcagcattacttgagagtatcgtgtggctgtttctctatttaaagggagtcatgttccttctatacctgtctggctatcttcatttctttctatgtctttctcgttatgtttt

SEQ ID NO: 91876 - DNA, 1485 bp, Homo sapiens
tgcatggaatgccacaatagaggcaatgaggatgcttagaggaaaccacttatgttggcctggggaatcggaacttgtggctgtaataaagctttcttctcttagattatgaatgttgctcatggggagcacttaaatgagctccctgagaacagggaccacaacttctttgtttttattttttagtctgagtgtagtgctttgactatagtagttgatcaatgtggtgagcagaaaaggtagcttccctacattacagctagtagtggtgtttgctggacttcagcaggtctttgtaaattcaaagcccaggctctctaacaccatacatagcactttgttactcacaatgaatggtttgctacagaatgctttctcttttctaatctgcttcttgtctgattgtcatgcaaacttgaatgggataataaatgtaaagtaattagcatagaagaagcactcagtgactattacctgctattattactttataatgtagtctgcattatttttttcctttatttaaatcttcaactttgctgaattgcttattgaagaaaatgctgtctctaaacataacattactggcagctggaagtgaaacttacacattatgcttcatggtatctgagagtcatgaagtttacaaagacatttctggtcttattctgataaatatcacatgctagtatttcctacattcccatttactcagtgttccctacttcctaaaggagggaaaagcgccgtcgaacagttgtcaaattttcttcacaaacagcttggttttccttaatggatgaaatcacccttcgttgatggatccatttgcacaggaatttctagatcatctcagggctcacactctgggtcccacctcctgctctgctacaaacggttaggtatctttatgcatcagtatccagctggccatagcggccctgtgtcagaaattatatttcctctaattggctaaagggaccattttcttaatagtttctttcttttatagggccaygtgctatattccatttatatacacattctggaacacagtattccagagcatgttaattgttcagagataatggacctaacaaatagaatggtgcggttaaggagaaatccagttgcatggaggtccttggtcttttgtgtggcttgaagaggttgaggatgctgatgtgttctttgggaagagattcacagttgacaggaaacatctgctttaatttgctccaacatcaacaagatcgatgtggtaggaaacctgttgttactgtgtgagttccatttatcaaggcagggcttggcctgaaatcagggctatttggacaggtaccacaatgggtcaaaatatggacataacaaagcagcattacttgagagtatcgtgtggctgtttctctatttaaagggagtcatgttccttctatacctgtctggctatcttcatttctttctatgtctttctcgttatgtttt

SEQ ID NO: 91877 - DNA, 1485 bp, Homo sapiens
tgcatggaatgccacaatagaggcaatgaggatgcttagaggaaaccacttatgttggcctggggaatcggaacttgtggctgtaataaagctttcttctcttagattatgaatgttgctcatggggagcacttaaatgagctccctgagaacagggaccacaacttctttgtttttattttttagtctgagtgtagtgctttgactatagtagttgatcaatgtggtgagcagaaaaggtagcttccctacattacagctagtagtggtgtttgctggacttcagcaggtctttgtaaattcaaagcccaggctctctaacaccatacatagcactttgttactcacaatgaatggtttgctacagaatgctttctcttttctaatctgcttcttgtctgattgtcatgcaaacttgaatgggataataaatgtaaagtaattagcatagaagaagcactcagtgactattacctgctattattactttataatgtagtctgcattatttttttcctttatttaaatcttcaactttgctgaattgcttattgaagaaaatgctgtctctaaacataacattactggcagctggaagtgaaacttacacattatgcttcatggtatctgagagtcatgaagtttacaaagacatttctggtcttattctgataaatatcacatgctagtatttcctacattcccatttactcagtgttccctacttcctaaaggagggaaaagcgccgtcgaacagttgtcaaattttcttcacaaacagcttggttttccttaatggatgaaatcacccttcgttgatggatccatttgcacaggaatttctagatcatctcagggctcacactctgggtcccacctcctgctctgctacaaacggttaggtatctttatgcatcagtatccagctggccatagcggccctgtgtcagaaattatatttcctctaattggctaaagggaccattttcttaatagtttctttcttttatagggccatgtgctatattccatttatatacacattctggaacacagtattccagagcatgttaattgttcagagataatggacctaacaaatagaatggtgcggttaaggagaaatccagttgcatggaggtccttkgtcttttgtgtggcttgaagaggttgaggatgctgatgtgttctttgggaagagattcacagttgacaggaaacatctgctttaatttgctccaacatcaacaagatcgatgtggtaggaaacctgttgttactgtgtgagttccatttatcaaggcagggcttggcctgaaatcagggctatttggacaggtaccacaatgggtcaaaatatggacataacaaagcagcattacttgagagtatcgtgtggctgtttctctatttaaagggagtcatgttccttctatacctgtctggctatcttcatttctttctatgtctttctcgttatgtttt

SEQ ID NO: 91878 - DNA, 1485 bp, Homo sapiens
tgcatggaatgccacaatagaggcaatgaggatgcttagaggaaaccacttatgttggcctggggaatcggaacttgtggctgtaataaagctttcttctcttagattatgaatgttgctcatggggagcacttaaatgagctccctgagaacagggaccacaacttctttgtttttattttttagtctgagtgtagtgctttgactatagtagttgatcaatgtggtgagcagaaaaggtagcttccctacattacagctagtagtggtgtttgctggacttcagcaggtctttgtaaattcaaagcccaggctctctaacaccatacatagcactttgttactcacaatgaatggtttgctacagaatgctttctcttttctaatctgcttcttgtctgattgtcatgcaaacttgaatgggataataaatgtaaagtaattagcatagaagaagcactcagtgactattacctgctattattactttataatgtagtctgcattatttttttcctttatttaaatcttcaactttgctgaattgcttattgaagaaaatgctgtctctaaacataacattactggcagctggaagtgaaacttacacattatgcttcatggtatctgagagtcatgaagtttacaaagacatttctggtcttattctgataaatatcacatgctagtatttcctacattcccatttactcagtgttccctacttcctaaaggagggaaaagcgccgtcgaacagttgtcaaattttcttcacaaacagcttggttttccttaatggatgaaatcacccttcgttgatggatccatttgcacaggaatttctagatcatctcagggctcacactctgggtcccacctcctgctctgctacaaacggttaggtatctttatgcatcagtatccagctggccatagcggccctgtgtcagaaattatatttcctctaattggctaaagggaccattttcttaatagtttctttcttttatagggccatgtgctatattccatttatatacacattctggaacacagtattccagagcatgttaattgttcagagataatggacctaacaaatagaatggtgcggttaaggagaaatccagttgcatggaggtccttggtcttttgtgtggcttgaagaggttgaggatgctgatgtgttctttgggaagagattcacagttgacaggaaacatctgctttaatttgctccaacatcaacaagatcgatgtggtaggaaacctgttgttactrtgtgagttccatttatcaaggcagggcttggcctgaaatcagggctatttggacaggtaccacaatgggtcaaaatatggacataacaaagcagcattacttgagagtatcgtgtggctgtttctctatttaaagggagtcatgttccttctatacctgtctggctatcttcatttctttctatgtctttctcgttatgtttt

SEQ ID NO: 91879 - DNA, 1626 bp, Homo sapiens
aaacacagatttgatttacccaggaactaaagctgagtaagctatgggttaatagaaggtctgtgaagggtacttagactacagtaagattggggaagaaaattccatttccaaatctaagatatatcattcctttgtgccaagcacataatgaaggtagaggtttaagggggcccttagcacagaagcactgggttagtcagaaggtgaggtgagctgtcacacagccttgatgctagaatgagggtgccctgatagtgtcttatcagccatgacactggtgcatcgggccaggtttgtttttttttcttttttttgagacaggctgttgctttgttactcaggctagagtgcagtgacacgatcatggctcagtgcacccttgacctcgtaggctcaagcaatcctctcacctcgaactcccgagtagctgggaccacagtcttgtaccaccatacccagctaatttcttaatttttttgtagagatgggggtctccttttgttgcctaggctgattttgaactcctgggcttaagtgattctcctgcttccacctctcaaagtgctggattacaggcatgccagacatatggaaacattctcaactatctgaaaatacgtgaaaagctttgttatgcattgtgagacaatacagcaggaatatttcaccatctgcctaaggtttaaaaggaaataactttaagcatgtgtctaaataggaagtaatgttttagagcggattctcttaaattcagcttgtgcgtctgcagcatatacacagcttgagctgtaacctgacatagagacaggcaacttcagtgcccactgttcttaggatccactgctttttcacagctaaaacccctgagtggcactgttaagtattatgttatgttactttagtygttaaacgtataagcatacctccaaaggttgaatgtaggccacttgcagaaagtaggcagaatgctcacatttaattcttgataatactgtgtttagctttcttattctttgaaatctcattgagaagaaatactggcatctgttcaaagtaatttctttttcagttgacaatattataagtaatgttattgtatcatttccctacttggacagagtgtgaaaattttgaggagcttgtctgccagaaatttcttcttcatttgcaaaacattaatgagatattatatttaaataattttgtttaatattaagtgtacttggtgaatgtggcatagaacatacaaaataaaactaatttaaaattattaactattacatttataagaaagacttgctaatcataacactgttgataatgattctgaataaagcattatttcttttcctgaaaacaattgtagctataactcaatcatctaaattgcttattagttttatttctttttaattgtctattttgattaattttctttttctccattggtttcgtgtgtttgtggaggtaaaatatacagaatatagaatttgccagtttttctatttttacgtgtacacttcagtggcatttaaatacatgcaccattttaccttcccaccagcattgcacagggtttcagtttctccacatcctgcccaacatttgtttttctggttttct

SEQ ID NO: 91880 - DNA, 1626 bp, Homo sapiens
aaacacagatttgatttacccaggaactaaagctgagtaagctatgggttaatagaaggtctgtgaagggtacttagactacagtaagattggggaagaaaattccatttccaaatctaagatatatcattcctttgtgccaagcacataatgaaggtagaggtttaagggggcccttagcacagaagcactgggttagtcagaaggtgaggtgagctgtcacacagccttgatgctagaatgagggtgccctgatagtgtcttatcagccatgacactggtgcatcgggccaggtttgtttttttttcttttttttgagacaggctgttgctttgttactcaggctagagtgcagtgacacgatcatggctcagtgcacccttgacctcgtaggctcaagcaatcctctcacctcgaactcccgagtagctgggaccacagtcttgtaccaccatacccagctaatttcttaatttttttgtagagatgggggtctccttttgttgcctaggctgattttgaactcctgggcttaagtgattctcctgcttccacctctcaaagtgctggattacaggcatgccagacatatggaaacattctcaactatctgaaaatacgtgaaaagctttgttatgcattgtgagacaatacagcaggaatatttcaccatctgcctaaggtttaaaaggaaataactttaagcatgtgtctaaataggaagtaatgttttagagcggattctcttaaattcagcttgtgcgtctgcagcatatacacagcttgagctgtaacctgacatagagacaggcaacttcagtgcccactgttcttaggatccactgctttttcacagctaaaacccctgagtggcactgttaagtattatgttatgttactttagtcgttaaacgtataagcatacctccaaaggttgaatgtaggccacttgcagaaagtaggcagaatgctcacatttaattcttgataatactgtgtttagctttcttattctttgaaatctcattgagaagaaatactggcatctgttcaaagtaatttctttttcagttgacaatattataagtaaygttattgtatcatttccctacttggacagagtgtgaaaattttgaggagcttgtctgccagaaatttcttcttcatttgcaaaacattaatgagatattatatttaaataattttgtttaatattaagtgtacttggtgaatgtggcatagaacatacaaaataaaactaatttaaaattattaactattacatttataagaaagacttgctaatcataacactgttgataatgattctgaataaagcattatttcttttcctgaaaacaattgtagctataactcaatcatctaaattgcttattagttttatttctttttaattgtctattttgattaattttctttttctccattggtttcgtgtgtttgtggaggtaaaatatacagaatatagaatttgccagtttttctatttttacgtgtacacttcagtggcatttaaatacatgcaccattttaccttcccaccagcattgcacagggtttcagtttctccacatcctgcccaacatttgtttttctggttttct

SEQ ID NO: 91881 - DNA, 1626 bp, Homo sapiens
aaacacagatttgatttacccaggaactaaagctgagtaagctatgggttaatagaaggtctgtgaagggtacttagactacagtaagattggggaagaaaattccatttccaaatctaagatatatcattcctttgtgccaagcacataatgaaggtagaggtttaagggggcccttagcacagaagcactgggttagtcagaaggtgaggtgagctgtcacacagccttgatgctagaatgagggtgccctgatagtgtcttatcagccatgacactggtgcatcgggccaggtttgtttttttttcttttttttgagacaggctgttgctttgttactcaggctagagtgcagtgacacgatcatggctcagtgcacccttgacctcgtaggctcaagcaatcctctcacctcgaactcccgagtagctgggaccacagtcttgtaccaccatacccagctaatttcttaatttttttgtagagatgggggtctccttttgttgcctaggctgattttgaactcctgggcttaagtgattctcctgcttccacctctcaaagtgctggattacaggcatgccagacatatggaaacattctcaactatctgaaaatacgtgaaaagctttgttatgcattgtgagacaatacagcaggaatatttcaccatctgcctaaggtttaaaaggaaataactttaagcatgtgtctaaataggaagtaatgttttagagcggattctcttaaattcagcttgtgcgtctgcagcatatacacagcttgagctgtaacctgacatagagacaggcaacttcagtgcccactgttcttaggatccactgctttttcacagctaaaacccctgagtggcactgttaagtattatgttatgttactttagtcgttaaacgtataagcatacctccaaaggttgaatgtaggccacttgcagaaagtaggcagaatgctcacatttaattcttgataatactgtgtttagctttcttattctttgaaatctcattgagaagaaatactggcatctgttcaaagtaatttctttttcagttgacaatattataagtaatgttattgtatcatttccctacttggacagagtgtgaaaattttgaggagcttgtctgccagaaatttcttcttcatttgcaaaacattaatgagatattatatttaaataattttrtttaatattaagtgtacttggtgaatgtggcatagaacatacaaaataaaactaatttaaaattattaactattacatttataagaaagacttgctaatcataacactgttgataatgattctgaataaagcattatttcttttcctgaaaacaattgtagctataactcaatcatctaaattgcttattagttttatttctttttaattgtctattttgattaattttctttttctccattggtttcgtgtgtttgtggaggtaaaatatacagaatatagaatttgccagtttttctatttttacgtgtacacttcagtggcatttaaatacatgcaccattttaccttcccaccagcattgcacagggtttcagtttctccacatcctgcccaacatttgtttttctggttttct

SEQ ID NO: 91882 - DNA, 1552 bp, Homo sapiens
atcttttgaacacttggaatatgtccagtctggaattttagatatgtacacacccacacacatacacatgtcctgttttgatgtcctataattaattttctcttagtttttaacttttatctatcttattaatgtacagaatcgccctgaaacctggctatggaaaataycttagtataaattcagatgaacttgttgttggcgttcagatgcaattggaccaagagaacaatgggaaccagtctttcaaaatgtgagtgctgttattgtttataaaaacttcctgtcagtttaacacaaagtctgtagcagtcaataataatatatttaaaaagaaaaagtaggatgcaatagtacaatacattaaattggaataaatcagtaagaacacagagccttaaagagatctcaaaatatagtgcaacaaaaatagctttagtacttttgcccacaattatttctgtatacccttagtgcccgatatggatctcatttccattgaagaaccagtcaattttaggtcacagagtaggaaaacagaatcgttcctaagtatcttctttgtggcagaaatcatggatgctttcagaaactttagagactgtaagcgaacagtagagctagctaataccaagttgtgacaatttgcttataaaatataaataataatagttcattgaagtaaattatctctaaaagactttcagttcataaacttaaaatagtgtatgaaaagatagttttaatataagaagaaaaaagataatatactaattcttaattttagtaagtagacagttgtagtgtatggatgttttgttaaatctttgttgatacagaatatataatttcctttttctgtttgtgtgagaagtaaagattgaacaaaaatatgtgagtgctaaactgtctttaaaaagtagataactatatcaaaaacagtaaggaccagtgggcaccatgcagaacaagcaaatagaagctcagcctttgagtagcagctttggtagtatacaaaaatgaactgaaaataggaactcagcagtgttttaagatgacagattaaacaaacatcccaccagaaagaggtaatcacttagactaatttcctcatcccctaggataaaatcttaagtcagtgacttgaaaactattttgacccaatccattgagaaatgcatttttacattgcagcccagcacacacatatgtataactgaagcaagagttgtacttaacaatacttacttatccgtgtgttatgcatcttgatatttcttattctcttttaccccttcctctgtgtgtgtgtgtgtattctttttcccccccacccacccgataccgttcaggaaacactacgttgatttcattacctgctaatgtgttgcaacccctttgagatgatcctactagttatgatgagatgcttctaataaaagttacaccagtagaaaatgccaatatttcataaggccaggatgatgacttagatagtactaatattacaacactttaggaaagttcatttcattttatttttaggaaggac

SEQ ID NO: 91883 - DNA, 1552 bp, Homo sapiens
atcttttgaacacttggaatatgtccagtctggaattttagatatgtacacacccacacacatacacatgtcctgttttgatgtcctataattaattttctcttagtttttaacttttatctatcttattaatgtacagaatcgccctgaaacctggctatggaaaatatcttagtataaattcagatgaacttgttgttggcgttcagatgcaattggaccaagagaacaatgggaaccagtctttcaaaatgtgagtgctgttattgtttataaaaacttcctgtcagtttaacacaaagtctgtagcagtcaataataatatatttaaaaagaaaaagtaggatgcaatagtacaatacattaaattggaataaatcagtaagaacacagagccttaaagagatctcaaaatatagtgcaacaaaaatagctttagtacttttgcccacaattatttctgtatacccttagtgcccgatatggatctcatttccattgaagaaccagtcaattttaggtcacagmgtaggaaaacagaatcgttcctaagtatcttctttgtggcagaaatcatggatgctttcagaaactttagagactgtaagcgaacagtagagctagctaataccaagttgtgacaatttgcttataaaatataaataataatagttcattgaagtaaattatctctaaaagactttcagttcataaacttaaaatagtgtatgaaaagatagttttaatataagaagaaaaaagataatatactaattcttaattttagtaagtagacagttgtagtgtatggatgttttgttaaatctttgttgatacagaatatataatttcctttttctgtttgtgtgagaagtaaagattgaacaaaaatatgtgagtgctaaactgtctttaaaaagtagataactatatcaaaaacagtaaggaccagtgggcaccatgcagaacaagcaaatagaagctcagcctttgagtagcagctttggtagtatacaaaaatgaactgaaaataggaactcagcagtgttttaagatgacagattaaacaaacatcccaccagaaagaggtaatcacttagactaatttcctcatcccctaggataaaatcttaagtcagtgacttgaaaactattttgacccaatccattgagaaatgcatttttacattgcagcccagcacacacatatgtataactgaagcaagagttgtacttaacaatacttacttatccgtgtgttatgcatcttgatatttcttattctcttttaccccttcctctgtgtgtgtgtgtgtattctttttcccccccacccacccgataccgttcaggaaacactacgttgatttcattacctgctaatgtgttgcaacccctttgagatgatcctactagttatgatgagatgcttctaataaaagttacaccagtagaaaatgccaatatttcataaggccaggatgatgacttagatagtactaatattacaacactttaggaaagttcatttcattttatttttaggaaggac

SEQ ID NO: 91884 - DNA, 1552 bp, Homo sapiens
atcttttgaacacttggaatatgtccagtctggaattttagatatgtacacacccacacacatacacatgtcctgttttgatgtcctataattaattttctcttagtttttaacttttatctatcttattaatgtacagaatcgccctgaaacctggctatggaaaatatcttagtataaattcagatgaacttgttgttggcgttcagatgcaattggaccaagagaacaatgggaaccagtctttcaaaatgtgagtgctgttattgtttataaaaacttcctgtcagtttaacacaaagtctgtagcagtcaataataatatatttaaaaagaaaaagtaggatgcaatagtacaatacattaaattggaataaatcagtaagaacacagagccttaaagagatctcaaaatatagtgcaacaaaaatagctttagtacttttgcccacaattatttctgtatacccttagtgcccgatatggatctcatttccattgaagaaccagtcaattttaggtcacagagtaggaaaacagaatcgttcctaagtatcttctttgtrgcagaaatcatggatgctttcagaaactttagagactgtaagcgaacagtagagctagctaataccaagttgtgacaatttgcttataaaatataaataataatagttcattgaagtaaattatctctaaaagactttcagttcataaacttaaaatagtgtatgaaaagatagttttaatataagaagaaaaaagataatatactaattcttaattttagtaagtagacagttgtagtgtatggatgttttgttaaatctttgttgatacagaatatataatttcctttttctgtttgtgtgagaagtaaagattgaacaaaaatatgtgagtgctaaactgtctttaaaaagtagataactatatcaaaaacagtaaggaccagtgggcaccatgcagaacaagcaaatagaagctcagcctttgagtagcagctttggtagtatacaaaaatgaactgaaaataggaactcagcagtgttttaagatgacagattaaacaaacatcccaccagaaagaggtaatcacttagactaatttcctcatcccctaggataaaatcttaagtcagtgacttgaaaactattttgacccaatccattgagaaatgcatttttacattgcagcccagcacacacatatgtataactgaagcaagagttgtacttaacaatacttacttatccgtgtgttatgcatcttgatatttcttattctcttttaccccttcctctgtgtgtgtgtgtgtattctttttcccccccacccacccgataccgttcaggaaacactacgttgatttcattacctgctaatgtgttgcaacccctttgagatgatcctactagttatgatgagatgcttctaataaaagttacaccagtagaaaatgccaatatttcataaggccaggatgatgacttagatagtactaatattacaacactttaggaaagttcatttcattttatttttaggaaggac

SEQ ID NO: 91885 - DNA, 1552 bp, Homo sapiens
atcttttgaacacttggaatatgtccagtctggaattttagatatgtacacacccacacacatacacatgtcctgttttgatgtcctataattaattttctcttagtttttaacttttatctatcttattaatgtacagaatcgccctgaaacctggctatggaaaatatcttagtataaattcagatgaacttgttgttggcgttcagatgcaattggaccaagagaacaatgggaaccagtctttcaaaatgtgagtgctgttattgtttataaaaacttcctgtcagtttaacacaaagtctgtagcagtcaataataatatatttaaaaagaaaaagtaggatgcaatagtacaatacattaaattggaataaatcagtaagaacacagagccttaaagagatctcaaaatatagtgcaacaaaaatagctttagtacttttgcccacaattatttctgtatacccttagtgcccgatatggatctcatttccattgaagaaccagtcaattttaggtcacagagtaggaaaacagaatcgttcctaagtatcttctttgtggcagaaatcatggatgctttcagaaactttagagactgtaagcgaacagtagagctagctaataccaagttgtgacaatttgcttataaaatataaataataatagttcattgaagtaaattatctctaaaagactttcagttcataaacttaaaatagtgtatgaaaagatagttttaatataagaagaaaaaagataatatactaattcttaattttagtaagtagacagttgyagtgtatggatgttttgttaaatctttgttgatacagaatatataatttcctttttctgtttgtgtgagaagtaaagattgaacaaaaatatgtgagtgctaaactgtctttaaaaagtagataactatatcaaaaacagtaaggaccagtgggcaccatgcagaacaagcaaatagaagctcagcctttgagtagcagctttggtagtatacaaaaatgaactgaaaataggaactcagcagtgttttaagatgacagattaaacaaacatcccaccagaaagaggtaatcacttagactaatttcctcatcccctaggataaaatcttaagtcagtgacttgaaaactattttgacccaatccattgagaaatgcatttttacattgcagcccagcacacacatatgtataactgaagcaagagttgtacttaacaatacttacttatccgtgtgttatgcatcttgatatttcttattctcttttaccccttcctctgtgtgtgtgtgtgtattctttttcccccccacccacccgataccgttcaggaaacactacgttgatttcattacctgctaatgtgttgcaacccctttgagatgatcctactagttatgatgagatgcttctaataaaagttacaccagtagaaaatgccaatatttcataaggccaggatgatgacttagatagtactaatattacaacactttaggaaagttcatttcattttatttttaggaaggac

SEQ ID NO: 91886 - DNA, 1552 bp, Homo sapiens
atcttttgaacacttggaatatgtccagtctggaattttagatatgtacacacccacacacatacacatgtcctgttttgatgtcctataattaattttctcttagtttttaacttttatctatcttattaatgtacagaatcgccctgaaacctggctatggaaaatatcttagtataaattcagatgaacttgttgttggcgttcagatgcaattggaccaagagaacaatgggaaccagtctttcaaaatgtgagtgctgttattgtttataaaaacttcctgtcagtttaacacaaagtctgtagcagtcaataataatatatttaaaaagaaaaagtaggatgcaatagtacaatacattaaattggaataaatcagtaagaacacagagccttaaagagatctcaaaatatagtgcaacaaaaatagctttagtacttttgcccacaattatttctgtatacccttagtgcccgatatggatctcatttccattgaagaaccagtcaattttaggtcacagagtaggaaaacagaatcgttcctaagtatcttctttgtggcagaaatcatggatgctttcagaaactttagagactgtaagcgaacagtagagctagctaataccaagttgtgacaatttgcttataaaatataaataataatagttcattgaagtaaattatctctaaaagactttcagttcataaacttaaaatagtgtatgaaaagatagttttaatataagaagaaaaaagataatatactaattcttaattttagtaagtagacagttgtagtgtatggatgttttgttaaatctttgttgatacagaatatataatttcctttttctgtttgtgtgagaagtaaagattgaacaaaaatatgtgagtgctaaactgtctttaaaaagtagataactatatcaaaaasagtaaggaccagtgggcaccatgcagaacaagcaaatagaagctcagcctttgagtagcagctttggtagtatacaaaaatgaactgaaaataggaactcagcagtgttttaagatgacagattaaacaaacatcccaccagaaagaggtaatcacttagactaatttcctcatcccctaggataaaatcttaagtcagtgacttgaaaactattttgacccaatccattgagaaatgcatttttacattgcagcccagcacacacatatgtataactgaagcaagagttgtacttaacaatacttacttatccgtgtgttatgcatcttgatatttcttattctcttttaccccttcctctgtgtgtgtgtgtgtattctttttcccccccacccacccgataccgttcaggaaacactacgttgatttcattacctgctaatgtgttgcaacccctttgagatgatcctactagttatgatgagatgcttctaataaaagttacaccagtagaaaatgccaatatttcataaggccaggatgatgacttagatagtactaatattacaacactttaggaaagttcatttcattttatttttaggaaggac

SEQ ID NO: 91887 - DNA, 621 bp, Homo sapiens
acccactgcatgtgtcagtatttcattccttcttgttattgtgtagtatacgaatatataaatatatcactatttttgcaatctcctgttgatggacatttgtattgtttccagttattagctattatgaatcatgcaactatgtatattattatacaggtcttttgtggacacatctccattatttttgggtaaatatttaggaatggaatgttggtcagctgtaggctccattttacaagaaactgccaaactgtcttccattctacacttttgtttgcaatgtatgaaagttctggttgcttcctatcctaatcaacatttggtgtgggactacaggaacatgccactacacctgattgattaaagaaaattttttgtagagacagggttttgctctattgcccaggctggtcttgaattcctggcctcaagtgatcctcccacctcagccactcaaagctctaggattacaggtgtgagtcgccacgmccggccaaaatttattaattggtagttggcaattgttgatggaaaagaaaaagcaggttacaagcaatgtactttttgatgtctttggtattatcacaggcaaataaattatatatgtatatatattat

SEQ ID NO: 91888 - DNA, 1234 bp, Homo sapiens
ttggtggtttatgaaaattcttttagactaacctcggccgtataagcacaaccacattccttgctagtgaataggaggcagggcccagtggaatcatttttaaagtgttccattacaaacctttcacttctacctctcaagggagaaggggactggagggggagcagggaggacttcacagcgaaattttctgtggaagcctgtttgaagctataagtagtcaaaggaaaaatccagaaatagtttaggaaattagtcatctgtctccaaactgtgttcagttacagttttgggttccactttatgaaatgtaaaaaaaaaaaaaaaaaaaacagaaatctggaaagattaataatcatttgtgtaagggtcaaaaaggtccagtttttgcccagaaagaggaaaaaaagttcccatttgctaaaatattgtcaaaataattcccaggatggaaaattacattctgggaactgggaaacatgttgactttctctacttttactagttttgcaatactaaaatgttgataattaggttatactagatgtctaatgttgcttattttaaagcacgagtacataaattattaagtgcatttttcagtgcacacacacacagacacgaggaagctacccattaatatgtgcctatcctctatttttttttttaagtgagctaaaggagaactaaaatgggtcgggtgcgggggaagtagtattccactatttctatacctattagttcaccaacttactatcatgatcattttaaggcagttattttgctcttcactgttctgttaaaacctgtgttttaaagaataagggagtctagggaaatggaatggaagaattcatacagagcttatttttaaaagaaaagaaaaagtctttgcagccataacgaatcagcactgccagccttggtagggagaggctggggagaaacctgactctttactagaggccmtgccaggctttcccggagagtgtttggcttgggtatttctcaggcattgataaaaagcttcttgccatcggagtgaacaggccagagagcgtcttgtacttagactgaagacacttgtaagaagttagagagcggagactctactgagctgacgcagggctgcacggtgtttactacaacccctgcctcagttgggcatgtttggttgcaggtcacagaatatgcaaaagtggttccactttttggaaaagcggttgaagatgct

SEQ ID NO: 91889 - DNA, 522 bp, Homo sapiens
tatcattttctgcagggaagttcttcacattgagtcctattccatcattctctgaagagtatcttctactatctaccacgttggtgtttttctcaaagtatttacatttcaattattaatttccttatatcacatcaggagatgtgtaacatcgtgttggccccgttagtgatgctaagattgtgtactggagtagtgttgtgactttatgatctttgcacttaacaggctcctacgatccacatcgcaggggaatgcacacgccccgccatatgggaagtaggagcaacccccctytccccgcctgtctcctacgatccacatcgcagggaggtgcacacccccgcaatatggggagtaggagcaacccccgtctcccccactggctattacaatccacgctggacacacagcgtgtttatgattttgtgagtaaatcatctccccctcagcaaattatgaactatttcaccgacgggtgtacaacctctgccgtattgggagcaatatcatcctcaaccc

SEQ ID NO: 91890 - DNA, 522 bp, Homo sapiens
tatcattttctgcagggaagttcttcacattgagtcctattccatcattctctgaagagtatcttctactatctaccacgttggtgtttttctcaaagtatttacatttcaattattaatttccttatatcacatcaggagatgtgtaacatcgtgttggccccgttagtgatgctaagattgtgtactggagtagtgttgtgactttatgatctttgcacttaacaggctcctacgatccacatcgcaggggaatgcacacgccccgccatatgggaagtaggagcaacccccctttccccgcctgtctcctacgatccacatcgcagggaggtgcacacccccgcaatatggggagtaggagcaacccccgtctcccccacyggctattacaatccacgctggacacacagcgtgtttatgattttgtgagtaaatcatctccccctcagcaaattatgaactatttcaccgacgggtgtacaacctctgccgtattgggagcaatatcatcctcaaccc

SEQ ID NO: 91891 - DNA, 2129 bp, Homo sapiens
tgcattctcactgcaaaagagattttctgaaatggcaagtaactcttggaaaaattcaacaaaatacaatcttcccagatttacccttcagactcattcccagaaacctgagtcaatattaaaactgtgtacataaaagaatttctaagcccaaatattagacaccagtttttcacctgtacagctctccagctggcacctgaaggctgtgtgggtagtgacgtaattctccagtctgctggaatgcactgtgcaccacaggcatagtgcgcctggactccatacacccacggccaaagcaccccgatcacaaagcacccacatcactcccacgagggtgattctgccctatgagaaccgttcctttataacaaactgccaccacatgacaaaagtgcctctggaggccaaaataattgatgtaaattgtgttcagttgaggttgtttattcagatatcagaccctaagaaaatcatctctgtcactattttcctcccatgaacttctggcactgggcacctgggtgctaggtgtgaactggaatgcctctcatcttttcctcttgacagactgcatgccccgcttcagaatatttggacaagcacaaatttgaaagataaacaggcctgcaatgagtgttctgaggctcatgattctgctgagacccaaagggtggtcctgaacttcacccacgacgagagggttatttcaccggaatgctctgtcatgactgatgatacgacttatttagaaaaataggttcacttgatttgctcactgccaaaattaaaaatacctgcaaattctagaataagcaaaaataatgagaaactctggtcatttggacttgaaaacgtagtaacccctgccatgttctaatgatgtgataaagtttcctgcacaacttttgcaaggcttttggagatagcctagattcatacagatactgctagttgcatttttaataaagaatccttaaaagctaccaaattctaacacctagaacttcactatttaattatttaaagcaccccaaaacatggctctacagacacatgtgtgtcttttctatattaaaacaatgtgtataatcagaaatacaaactgacaaacattggtttgagtaacagaactaaaaaaaagaattcaaaataccaaaaacatcactcctcaaagtaaatttaatttagacaatatcacatacacacatcaactcaatactttatatcaagtccacaagaaaaaaacataattaaatggaatgtgtttaactgttgcatgcatgactggtggtagaacctagagagtagggaggataggcatcaaagactacaagtttatttattttattattctattttattttattattttttgagacagggtctcactctggctctgtcacccacactggggtatagtggtgtggtcacagctcactgcagccttgaactcctgggctcaagcgatcctcccacctcagcctcccaagtagctggaaccacaggtgcatgccaccgtatccagctaacttttgtatttttttatagagatggggtttcgccatgttgcccaggctggtctcgaactcctaggttcaagcgatccacccgcctcagctcccaaagtactgggattacaagcgtgagccaccactcccaccctacagttttaattaacatgtgttaacaatgcttgaaaaactgtaaataccttaaaatagttcctagctttcttctgtacctaagaatataaaacaagtcaacagttaaggttatattccttatagctcatggcaaagatgtggagaaactgggamccttgttcatcactggtgggaaggtaatgtggtatagccactttggaaaacaatctaggcttcttaaatcactccatttactcaactgctcatataaatttactcaacttacgtgactcctaggtcatctatcggagagaggtaaaagcatatgttcatttaacaactcatctgtacttactgcagcattactacagccctaaactggaaataacccaaatgtgcatcaactggtgaacagacagataaaatgtggtgtaaccataaaatggaatactgtccaggaataaagggaacacagcgatacac

SEQ ID NO: 91892 - DNA, 2129 bp, Homo sapiens
tgcattctcactgcaaaagagattttctgaaatggcaagtaactcttggaaaaattcaacaaaatacaatcttcccagatttacccttcagactcattcccagaaacctgagtcaatattaaaactgtgtacataaaagaatttctaagcccaaatattagacaccagtttttcacctgtacagctctccagctggcacctgaaggctgtgtgggtagtgacgtaattctccagtctgctggaatgcactgtgcaccacaggcatagtgcgcctggactccatacacccacggccaaagcaccccgatcacaaagcacccacatcactcccacgagggtgattctgccctatgagaaccgttcctttataacaaactgccaccacatgacaaaagtgcctctggaggccaaaataattgatgtaaattgtgttcagttgaggttgtttattcagatatcagaccctaagaaaatcatctctgtcactattttcctcccatgaacttctggcactgggcacctgggtgctaggtgtgaactggaatgcctctcatcttttcctcttgacagactgcatgccccgcttcagaatatttggacaagcacaaatttgaaagataaacaggcctgcaatgagtgttctgaggctcatgattctgctgagacccaaagggtggtcctgaacttcacccacgacgagagggttatttcaccggaatgctctgtcatgactgatgatacgacttatttagaaaaataggttcacttgatttgctcactgccaaaattaaaaatacctgcaaattctagaataagcaaaaataatgagaaactctggtcatttggacttgaaaacgtagtaacccctgccatgttctaatgatgtgataaagtttcctgcacaacttttgcaaggcttttggagatagcctagattcatacagatactgctagttgcatttttaataaagaatccttaaaagctaccaaattctaacacctagaacttcactatttaattatttaaagcaccccaaaacatggctctacagacacatgtgtgtcttttctatattaaaacaatgtgtataatcagaaatacaaactgacaaacattggtttgagtaacagaactaaaaaaaagaattcaaaataccaaaaacatcactcctcaaagtaaatttaatttagacaatatcacatacacacatcaactcaatactttatatcaagtccacaagaaaaaaacataattaaatggaatgtgtttaactgttgcatgcatgactggtggtagaacctagagagtagggaggataggcatcaaagactacaagtttatttattttattattctattttattttattattttttgagacagggtctcactctggctctgtcacccacactggggtatagtggtgtggtcacagctcactgcagccttgaactcctgggctcaagcgatcctcccacctcagcctcccaagtagctggaaccacaggtgcatgccaccgtatccagctaacttttgtatttttttatagagatggggtttcgccatgttgcccaggctggtctcgaactcctaggttcaagcgatccacccgcctcagctcccaaagtactgggattacaagcgtgagccaccactcccaccctacagttttaattaacatgtgttaacaatgcttgaaaaactgtaaataccttaaaatagttcctagctttcttctgtacctaagaatataaaacaagtcaacagttaaggttatattccttatagctcatggcaaagatgtggagaaactgggacccttgttcatcactggtgggaaggtaatgtggtatagccactttggaaaacaatctaggcttcttaaatcactccatttactcaactgctcatataaatttactcaacttacgtgactcctaggtcatctatcggagagaggtaaaagcayatgttcatttaacaactcatctgtacttactgcagcattactacagccctaaactggaaataacccaaatgtgcatcaactggtgaacagacagataaaatgtggtgtaaccataaaatggaatactgtccaggaataaagggaacacagcgatacac

SEQ ID NO: 91893 - DNA, 1505 bp, Homo sapiens
gaaggcggtggaaggctgcttacgtgatggcatgtggatagcgatgccatccgtttgtttttttctcctccatgacagagaagcaggaaaacattcctaaatttatttatagacgttaaaaaaaaatcaggcttggttttttcctgtaactgttcttcagccggcagcaagtatagcagcaagtatacagcagcaagtatacagcagcaagtatacagcagcaagtacagcagcagcaagtacagcagcagtactttatgagttgttgtgtttattccctgccttttggctttactcaagaaaaccagttgtgtttctcagagcaactgtattgttttatttgccactctcttcactttgtccattatagtacaatagattgtccttgtcccrtctccaaattggaagctccctaggtggtggtcaggctgttgatgagatttgtattctatcaaagctccattttagataatctatcatcattttttatacgcagtaagtcgctgattttgtttctttttttcaaacagttttgatttgaagttcctttaaaggctgttggagcttttgcaaatacccagctaatgaaaggcacttaagattgggcccatgtgcatcatcacattgaagttttctgtctaaaggaaggttccagctacctgttacccttttgctaaacacagttgcagtgttgcagtgtttttcatgacaaaagtgtactctagttttctgtgaaatgattattttctctgaaatgattcttggtcatgttgagcttctaaatgttaaagagaacatagtgcttttgacctgtggaaatctcatcttggtaccatggtgctgcacagaccatcaggaagaactgaaaagttcaggcaacttgagaaaataaagtcaccaccagcaagaagctgtctaaaataaccggaagattataacccaagcacgtggaggagtgtgctagtgagtagaatgttatgaaagctactagaggtcctccatagatgcatgtgctagtcctaaggagaaggaagaggagaaggattgccacggaggaacacctgaagtttcagttgagcactttgtttggaaagttgtccaaggctggagttgtgagagctgggaaagacctcacaagcttctctaattcaagtccttgtttcacatatgagaatgcagaggccctgagaagttgattcccaggcctgcatgctggcctggaactagagcctgggtctcctcttgctttttccagctgtctgcccaggtagctccccaaggcaggcatggaggcagagctgctttgggttccaggtaaggagagatgtgtccaggtggcctttgttgtattgtggggcacagacactgagggagacagggaaaggtctgggagacacaagatggtaccccagaaggccatcctttgtagactagacacacatccaaagggagggctgtttcctggcttattgaggacttttccatttgggctagaagtaaactga

SEQ ID NO: 91894 - DNA, 1505 bp, Homo sapiens
gaaggcggtggaaggctgcttacgtgatggcatgtggatagcgatgccatccgtttgtttttttctcctccatgacagagaagcaggaaaacattcctaaatttatttatagacgttaaaaaaaaatcaggcttggttttttcctgtaactgttcttcagccggcagcaagtatagcagcaagtatacagcagcaagtatacagcagcaagtatacagcagcaagtacagcagcagcaagtacagcagcagtactttatgagttgttgtgtttattccctgccttttggctttactcaagaaaaccagttgtgtttctcagagcaactgtattgttttatttgccactctcttcactttgtccattatagtacaatagattgtccttgtcccgtctccaaattggaagctccctaggtggtggtcaggctgttgatgagatttgtattctatcaaagctccattttagataatctatcatcattttttatacgcagtaagtcgctgattttgtttctttttttcaaacagttttgatttgaagttcctttaaaggctgttggagcttttgcaaatacccagctaatgaaaggcacttaagattgggcccatstgcatcatcacattgaagttttctgtctaaaggaaggttccagctacctgttacccttttgctaaacacagttgcagtgttgcagtgtttttcatgacaaaagtgtactctagttttctgtgaaatgattattttctctgaaatgattcttggtcatgttgagcttctaaatgttaaagagaacatagtgcttttgacctgtggaaatctcatcttggtaccatggtgctgcacagaccatcaggaagaactgaaaagttcaggcaacttgagaaaataaagtcaccaccagcaagaagctgtctaaaataaccggaagattataacccaagcacgtggaggagtgtgctagtgagtagaatgttatgaaagctactagaggtcctccatagatgcatgtgctagtcctaaggagaaggaagaggagaaggattgccacggaggaacacctgaagtttcagttgagcactttgtttggaaagttgtccaaggctggagttgtgagagctgggaaagacctcacaagcttctctaattcaagtccttgtttcacatatgagaatgcagaggccctgagaagttgattcccaggcctgcatgctggcctggaactagagcctgggtctcctcttgctttttccagctgtctgcccaggtagctccccaaggcaggcatggaggcagagctgctttgggttccaggtaaggagagatgtgtccaggtggcctttgttgtattgtggggcacagacactgagggagacagggaaaggtctgggagacacaagatggtaccccagaaggccatcctttgtagactagacacacatccaaagggagggctgtttcctggcttattgaggacttttccatttgggctagaagtaaactga

SEQ ID NO: 91895 - DNA, 1505 bp, Homo sapiens
gaaggcggtggaaggctgcttacgtgatggcatgtggatagcgatgccatccgtttgtttttttctcctccatgacagagaagcaggaaaacattcctaaatttatttatagacgttaaaaaaaaatcaggcttggttttttcctgtaactgttcttcagccggcagcaagtatagcagcaagtatacagcagcaagtatacagcagcaagtatacagcagcaagtacagcagcagcaagtacagcagcagtactttatgagttgttgtgtttattccctgccttttggctttactcaagaaaaccagttgtgtttctcagagcaactgtattgttttatttgccactctcttcactttgtccattatagtacaatagattgtccttgtcccgtctccaaattggaagctccctaggtggtggtcaggctgttgatgagatttgtattctatcaaagctccattttagataatctatcatcattttttatacgcagtaagtcgctgattttgtttctttttttcaaacagttttgatttgaagttcctttaaaggctgttggagcttttgcaaatacccagctaatgaaaggcacttaagattgggcccatgtgcatcatcacattgaagttttctgtctaaaggaaggttccagctacctgttacccttttgctaaacacagttgcagtgttgcagtgtttttcatgacaaaagtgyactctagttttctgtgaaatgattattttctctgaaatgattcttggtcatgttgagcttctaaatgttaaagagaacatagtgcttttgacctgtggaaatctcatcttggtaccatggtgctgcacagaccatcaggaagaactgaaaagttcaggcaacttgagaaaataaagtcaccaccagcaagaagctgtctaaaataaccggaagattataacccaagcacgtggaggagtgtgctagtgagtagaatgttatgaaagctactagaggtcctccatagatgcatgtgctagtcctaaggagaaggaagaggagaaggattgccacggaggaacacctgaagtttcagttgagcactttgtttggaaagttgtccaaggctggagttgtgagagctgggaaagacctcacaagcttctctaattcaagtccttgtttcacatatgagaatgcagaggccctgagaagttgattcccaggcctgcatgctggcctggaactagagcctgggtctcctcttgctttttccagctgtctgcccaggtagctccccaaggcaggcatggaggcagagctgctttgggttccaggtaaggagagatgtgtccaggtggcctttgttgtattgtggggcacagacactgagggagacagggaaaggtctgggagacacaagatggtaccccagaaggccatcctttgtagactagacacacatccaaagggagggctgtttcctggcttattgaggacttttccatttgggctagaagtaaactga

SEQ ID NO: 91896 - DNA, 838 bp, Homo sapiens
ggatccttgtgtccacctccccaaccccagatcctgccagaccaattacaaggggccaaagggaaaacattcctgatctatgcttctcaagaaaataatcactcatgaaaaagaaactaaattcctaagtgattctgtctattcaccctgccatgacaacaatggcatgttcaatatatgcctgaatatttctaaagaaattggaatactttaaagtatcagaatattcctaacttttcttgtattcacattttcataaaaatttccttctttttgtttccttagaattaatgcttttgccacaagtggtagctcacacctgtaatcccagcactctgggaggtctagacaggagaatggcttgagctcaggagtttcagaccagcctgagcaacacagtgagacctcgctccctacccacccccaaaattaggtgtggtgatatgcrtctgtagtcccagctatttgggaggctgaagtgggaggatcatctgagccctggagttggaggctgcggtgagctatgattaatccagtagacttcagcctgggcaacagagcaagactctgtatccaacaacaacaacaacaacaacaacaacaaaaatgaattaatgctcttacctaaattaataacagtgtacgtaatatacttgttgtatttatcttgaaggagagtatacattttataattctgagttcctaatttacaaacagtgacatttgctagctccaattctagttatacattaacttataaccccctaaggcccagcatatgagtatacctttactgtaaaaaaacggttggttgagtatatgaatcaaaacatcctat

SEQ ID NO: 91897 - DNA, 661 bp, Homo sapiens
tgcaccagcctctgaggaatcaccaccaccaccgcacttgggagatggaatgcgattttccaaagccctttcctagttcttactttacttattctttacaaccatcctataagacaggccagcagggcaggggagggatctagtgttattttgtggaaaaacaagagtgtaaagaagtgagcagcacatctgagaacaccatggttggcaccaggtttcatgacccccagaatggtgttctttccgtggccacactgagcacctgctacacataagatgtgcttttccttggcttccagcaactgggggtgcagtgtcccaggagggctaagaggtccaagtgagagctgccgagggagtgacaaggggtgaggcaaagagattccattgctttttaaaaaaattatctctcgcattctatcctgaaatggaactcctaggagactaaagcccattttgtgtatttagctaagtgtttctcctttttctccctattaaaagcatggggcttgcctaagtcattaaaaatacatgttccatttgctttgatgcagagggtgagaagatggaagagccaaggggaccaggctagtcaygtctggctgcgcccctggagccccagaggctgatggctgagctgataattagcagaagatctgga

SEQ ID NO: 91898 - DNA, 1129 bp, Homo sapiens
cactactgagtcagaggggaaaatacagtgggcaccccacaagtgttacaggggctggatctccctcttcctcagcttatttggaaatctggttaagattcactatatttccatgtgcttggctcaatatagagggttctagggtcttaatgttacaagtattgattatttcacatttattctcaccatctaaaggcagagattcattgctacataggtatattttatattattgttctcctagaagatcatggttgaaaatgatataaaatgttttattcagggttattttatatctgttcaaaaatggtggacttccttaaaaatcacctgtgctgaactgggtaacagctggattcatattaaaacttgcaggtttgaagaagagaagcatttggaaaatgcagagaataaacacagtatgggttggtgacttagctgaaggctcaacaacggttgagagagaagtagagataaacccatagaggatcccacctgccaccttccatgcagccacctcaagtgacaactttgaagatgcacgctagaccagagggtttttggcttgctgcacttccctaggcttgttgatttagtctcggcgattagctctgcctaggttcctctctccccactctatggtcttggtttgtcccctgacccctgcctggcatcactcttagcttyccacttctccttgacaagtattcccagcatgctttgtgattcccagcatggtgcctatgaacggtttgggacagaaaccatttcttagtattatgttcatgaaagacagcagaagattaaaattagcctaagggcttcctgtatacaaatcaacattgcattcacagatgtgctagtttatgacaatttttaccacatgaatatgaaatgattaaaaaatcaatttgaggaattgcccttacctaagacagagatgatatacttttcaaaacagcgtttcatttatgttaattcttgcacttatttaataaaagtgtattgagcacctaccatgtgcaaagcattatggggcataaagagagacatagttctaggttcaagaagtccagaatctaacatgggagggagatgtgtaaatatctgttataggaaataaacagaa

SEQ ID NO: 91899 - DNA, 517 bp, Homo sapiens
gactaatttgatagttatttcccttggactgataagyacattccttttttttttttttttttttttgttagacagagtcttgctctgtcggccaggctggagtggcatgatctcggctaactgcaacctccatctcctgggttcaagcaattctcctgcctcagcctcctgagtagctgggattacaggcgtgtgccaccatgcccggctaatttttgtaatttgagtagagacggggtttcaccatgttgaccaggctggtctcaaactcctgacctcaggtgatctggcctcctcggcctcccaaagtgctgggactacaggtgtgagccactgtgccccacccaagtacattcatttttaaacaattaagaagttttgtaatgacttgtgaaatgaggtgatgaaatataattaaagtaatcactattttaatggtagttctccatggaatatttcacaaaattattcagcaccttgttaagtttttaagaactaataatgaaataatataata

SEQ ID NO: 91900 - DNA, 517 bp, Homo sapiens
gactaatttgatagttatttcccttggactgataagtacattccttttttttttttttttttttttgttagacagagtcttgctctgtcggccaggctggagtggcatgatctcggctaactgcaacctccatctcctgggttcaagcaattctcctgcctcagcctcctgagtagctgggattacaggcgtgtgccaccatgccyggctaatttttgtaatttgagtagagacggggtttcaccatgttgaccaggctggtctcaaactcctgacctcaggtgatctggcctcctcggcctcccaaagtgctgggactacaggtgtgagccactgtgccccacccaagtacattcatttttaaacaattaagaagttttgtaatgacttgtgaaatgaggtgatgaaatataattaaagtaatcactattttaatggtagttctccatggaatatttcacaaaattattcagcaccttgttaagtttttaagaactaataatgaaataatataata

SEQ ID NO: 91901 - DNA, 1777 bp, Homo sapiens
  misc_feature (1)...(1777): n = A,T,C or G
tcacaagtaacaatacatagttggccaggcacggtggctcacgcccgtaatcccagcactttgggaggcygaggtgggcagatcatgaggtcaggagatcgagaccatcctggctaacacggtgaaaccccatctctactaaaaaatatataaaaaattagccaggcgtggtggtgggcacctgtagtcccagctactcgggaggctgaggcaggagaatggcatgaacccaggaggcggagcttgcagtaagcggagatcacgccactgcactccagcctgggcaacagagggagactccgtctcagaaaaaaaaaacaagaaacaatacacagtttcacttattaaaaaagtcaaacatgtgcaaaactaaacaatatgcaagtctataatgacaagcaatggaatgattaacaggaagttagggatagtggttacctcttgtggaaagagtgagtggcattgaagaagggcaatgggagtttctaagatactggaaatattctatttcataacctgaaggaagggcgcatatgctcattttatattcttcttaagctgtacacacacacttttatatttatgatctatttcattaagtaacaagacatatatatgcatttgtaaataagtgagattaacacatttttggatacatataacatatcaaagttgactcaaataattagaaaatctagatggaaatcataccattaaagtaattgagttaataattaataattctacaaagaaaacatgatgcctagatgatgtcaccagtagttccaatgttacactaataatctgcgaggggaaaaaaaagagaccattctttaattcatatgatactaggataaccttgctatggtgtacctcatccatgcacacagacaaatagtgtaaacaaaatactaggaagtatacctagcaaagtataaaaaccatgaacaagctcggttagtaatgcaaatttagttcagtgttagaaaatctactgaaattatctccttatcaacaaattaaagccaaaaattatatgattgtctcaaaaggcctataaaattattttacagctgggcacagtggctcacgtctgtaatcccagcactttgggaggctgaggcgggtggatcacgaggtcaggagattgagaccatcctggctaacacaatgaaaccctgtctctactaaaaaaaaaaaaaacaattagctggacgtggaggcgggcgcctgtagccccagctactcgggaggctgagccagaagaatggtgtgaatccgggaggcggagcttgcagtgagccgagatcctgccactgcactccagcctgggccacaaagtgagaatccctctcaaaaaaaaaaaaaaatttacgaaaattaaattattgatatttccacctatgaataaagggtaacttccttaacctgataaaaggagtcgacaaataacttacagcacctatcatgttttgtgattaaaaatattgaaatcactccttttaaaatcaagaaaaagacaagagtaccattgtcactaaactgcttccaaagcttatatggaagagaaaagggcccagtataactaagacaatcccatagaagactaaagtgtgcgaaggtgggaggtggagcttatgtgagtctatctcgtaccagatttgctgtgaagttannnnnnnnnnnnnnnnnnnnnnnnnnnnnnnnnnnnnnnnnnnnnnnnnnnnnnnnnnnnnnnnnnnnnnnnnnnnnnnnnnnnnnnnnnnnnnnnnnnnat

SEQ ID NO: 91902 - DNA, 1777 bp, Homo sapiens
  misc_feature (1)...(1777): n = A,T,C or G
tcacaagtaacaatacatagttggccaggcacggtggctcacgcccgtaatcccagcactttgggaggccgaggtgggcagatcatgaggtcaggagatcgagaccatcctggctaacacggtgaaaccccrtctctactaaaaaatatataaaaaattagccaggcgtggtggtgggcacctgtagtcccagctactcgggaggctgaggcaggagaatggcatgaacccaggaggcggagcttgcagtaagcggagatcacgccactgcactccagcctgggcaacagagggagactccgtctcagaaaaaaaaaacaagaaacaatacacagtttcacttattaaaaaagtcaaacatgtgcaaaactaaacaatatgcaagtctataatgacaagcaatggaatgattaacaggaagttagggatagtggttacctcttgtggaaagagtgagtggcattgaagaagggcaatgggagtttctaagatactggaaatattctatttcataacctgaaggaagggcgcatatgctcattttatattcttcttaagctgtacacacacacttttatatttatgatctatttcattaagtaacaagacatatatatgcatttgtaaataagtgagattaacacatttttggatacatataacatatcaaagttgactcaaataattagaaaatctagatggaaatcataccattaaagtaattgagttaataattaataattctacaaagaaaacatgatgcctagatgatgtcaccagtagttccaatgttacactaataatctgcgaggggaaaaaaaagagaccattctttaattcatatgatactaggataaccttgctatggtgtacctcatccatgcacacagacaaatagtgtaaacaaaatactaggaagtatacctagcaaagtataaaaaccatgaacaagctcggttagtaatgcaaatttagttcagtgttagaaaatctactgaaattatctccttatcaacaaattaaagccaaaaattatatgattgtctcaaaaggcctataaaattattttacagctgggcacagtggctcacgtctgtaatcccagcactttgggaggctgaggcgggtggatcacgaggtcaggagattgagaccatcctggctaacacaatgaaaccctgtctctactaaaaaaaaaaaaaacaattagctggacgtggaggcgggcgcctgtagccccagctactcgggaggctgagccagaagaatggtgtgaatccgggaggcggagcttgcagtgagccgagatcctgccactgcactccagcctgggccacaaagtgagaatccctctcaaaaaaaaaaaaaaatttacgaaaattaaattattgatatttccacctatgaataaagggtaacttccttaacctgataaaaggagtcgacaaataacttacagcacctatcatgttttgtgattaaaaatattgaaatcactccttttaaaatcaagaaaaagacaagagtaccattgtcactaaactgcttccaaagcttatatggaagagaaaagggcccagtataactaagacaatcccatagaagactaaagtgtgcgaaggtgggaggtggagcttatgtgagtctatctcgtaccagatttgctgtgaagttannnnnnnnnnnnnnnnnnnnnnnnnnnnnnnnnnnnnnnnnnnnnnnnnnnnnnnnnnnnnnnnnnnnnnnnnnnnnnnnnnnnnnnnnnnnnnnnnnnnat

SEQ ID NO: 91903 - DNA, 1777 bp, Homo sapiens
  misc_feature (1)...(1777): n = A,T,C or G
tcacaagtaacaatacatagttggccaggcacggtggctcacgcccgtaatcccagcactttgggaggccgaggtgggcagatcatgaggtcaggagatcgagaccatcctggctaacacggtgaaaccccatctctactaaaaaawatataaaaaattagccaggcgtggtggtgggcacctgtagtcccagctactcgggaggctgaggcaggagaatggcatgaacccaggaggcggagcttgcagtaagcggagatcacgccactgcactccagcctgggcaacagagggagactccgtctcagaaaaaaaaaacaagaaacaatacacagtttcacttattaaaaaagtcaaacatgtgcaaaactaaacaatatgcaagtctataatgacaagcaatggaatgattaacaggaagttagggatagtggttacctcttgtggaaagagtgagtggcattgaagaagggcaatgggagtttctaagatactggaaatattctatttcataacctgaaggaagggcgcatatgctcattttatattcttcttaagctgtacacacacacttttatatttatgatctatttcattaagtaacaagacatatatatgcatttgtaaataagtgagattaacacatttttggatacatataacatatcaaagttgactcaaataattagaaaatctagatggaaatcataccattaaagtaattgagttaataattaataattctacaaagaaaacatgatgcctagatgatgtcaccagtagttccaatgttacactaataatctgcgaggggaaaaaaaagagaccattctttaattcatatgatactaggataaccttgctatggtgtacctcatccatgcacacagacaaatagtgtaaacaaaatactaggaagtatacctagcaaagtataaaaaccatgaacaagctcggttagtaatgcaaatttagttcagtgttagaaaatctactgaaattatctccttatcaacaaattaaagccaaaaattatatgattgtctcaaaaggcctataaaattattttacagctgggcacagtggctcacgtctgtaatcccagcactttgggaggctgaggcgggtggatcacgaggtcaggagattgagaccatcctggctaacacaatgaaaccctgtctctactaaaaaaaaaaaaaacaattagctggacgtggaggcgggcgcctgtagccccagctactcgggaggctgagccagaagaatggtgtgaatccgggaggcggagcttgcagtgagccgagatcctgccactgcactccagcctgggccacaaagtgagaatccctctcaaaaaaaaaaaaaaatttacgaaaattaaattattgatatttccacctatgaataaagggtaacttccttaacctgataaaaggagtcgacaaataacttacagcacctatcatgttttgtgattaaaaatattgaaatcactccttttaaaatcaagaaaaagacaagagtaccattgtcactaaactgcttccaaagcttatatggaagagaaaagggcccagtataactaagacaatcccatagaagactaaagtgtgcgaaggtgggaggtggagcttatgtgagtctatctcgtaccagatttgctgtgaagttannnnnnnnnnnnnnnnnnnnnnnnnnnnnnnnnnnnnnnnnnnnnnnnnnnnnnnnnnnnnnnnnnnnnnnnnnnnnnnnnnnnnnnnnnnnnnnnnnnnat

SEQ ID NO: 91904 - DNA, 1777 bp, Homo sapiens
  misc_feature (1)...(1777): n = A,T,C or G
tcacaagtaacaatacatagttggccaggcacggtggctcacgcccgtaatcccagcactttgggaggccgaggtgggcagatcatgaggtcaggagatcgagaccatcctggctaacacggtgaaaccccatctctactaaaaaatatataaaaaattagccaggcgtggtggtgggcacctgtagtcccagctactcgggaggctgaggcaggagaatggcatgaacccrggaggcggagcttgcagtaagcggagatcacgccactgcactccagcctgggcaacagagggagactccgtctcagaaaaaaaaaacaagaaacaatacacagtttcacttattaaaaaagtcaaacatgtgcaaaactaaacaatatgcaagtctataatgacaagcaatggaatgattaacaggaagttagggatagtggttacctcttgtggaaagagtgagtggcattgaagaagggcaatgggagtttctaagatactggaaatattctatttcataacctgaaggaagggcgcatatgctcattttatattcttcttaagctgtacacacacacttttatatttatgatctatttcattaagtaacaagacatatatatgcatttgtaaataagtgagattaacacatttttggatacatataacatatcaaagttgactcaaataattagaaaatctagatggaaatcataccattaaagtaattgagttaataattaataattctacaaagaaaacatgatgcctagatgatgtcaccagtagttccaatgttacactaataatctgcgaggggaaaaaaaagagaccattctttaattcatatgatactaggataaccttgctatggtgtacctcatccatgcacacagacaaatagtgtaaacaaaatactaggaagtatacctagcaaagtataaaaaccatgaacaagctcggttagtaatgcaaatttagttcagtgttagaaaatctactgaaattatctccttatcaacaaattaaagccaaaaattatatgattgtctcaaaaggcctataaaattattttacagctgggcacagtggctcacgtctgtaatcccagcactttgggaggctgaggcgggtggatcacgaggtcaggagattgagaccatcctggctaacacaatgaaaccctgtctctactaaaaaaaaaaaaaacaattagctggacgtggaggcgggcgcctgtagccccagctactcgggaggctgagccagaagaatggtgtgaatccgggaggcggagcttgcagtgagccgagatcctgccactgcactccagcctgggccacaaagtgagaatccctctcaaaaaaaaaaaaaaatttacgaaaattaaattattgatatttccacctatgaataaagggtaacttccttaacctgataaaaggagtcgacaaataacttacagcacctatcatgttttgtgattaaaaatattgaaatcactccttttaaaatcaagaaaaagacaagagtaccattgtcactaaactgcttccaaagcttatatggaagagaaaagggcccagtataactaagacaatcccatagaagactaaagtgtgcgaaggtgggaggtggagcttatgtgagtctatctcgtaccagatttgctgtgaagttannnnnnnnnnnnnnnnnnnnnnnnnnnnnnnnnnnnnnnnnnnnnnnnnnnnnnnnnnnnnnnnnnnnnnnnnnnnnnnnnnnnnnnnnnnnnnnnnnnnat

SEQ ID NO: 91905 - DNA, 612 bp, Homo sapiens
aatcattaagtttatttttaaataagtatttagataactaattagcaatcattaagttcatttttaaataactgtttagtccacaaaaaataaaaaatatattttagaaagggagggcattccaaaatctgtctcaggagcattcaatctcaaatatattttaatgaagcagaaatgtaaatacatgtttagataatttaggttaaaaaaggtaaattttggttgcctgcttaacttttatgaaacagatatttttcattcaagtccagcatatattttgctatgactttcacatcctttcctcagagactatttacctaaacattagggtaccaaaggaactaggaaacaaaaacttgttagagagaaaaattttaagtgaggcrcacattctggtgatattaatttgtttttgacattttattaatattttgagaacactaagaaaataaaatccaaaggggcaagcaggtatcattgtctcagcctgggccctcttttgtcatcctctgtaagatggcagtcatcaaagagcgtgacccaagaagaaagtaaaacagtggaacaaatgagcatttctctaaatacaaacagtagagtccctgagaaaga

SEQ ID NO: 91906 - DNA, 612 bp, Homo sapiens
aatcattaagtttatttttaaataagtatttagataactaattagcaatcattaagttcatttttaaataactgtttagtccacaaaaaataaaaaatatattttagaaagggagggcattccaaaatctgtctcaggagcattcaatctcaaatatattttaatgaagcagaaatgtaaatacatgtttagataatttaggttaaaaaaggtaaattttggttgcctgcttaacttttatgaaacagatatttttcattcaagtccagcatatattttgctatgactttcacatcctttcctcagagactatttacctaaacattagggtaccaaaggaactaggaaacaaaaacttgttagagagaaaaattttaagtgaggcacacattctggtgatattaatttgtttttgacattttattaatattttgagaacactaagaaaataaaatccaaaggggcaagcaggtatcattgtctcagyctgggccctcttttgtcatcctctgtaagatggcagtcatcaaagagcgtgacccaagaagaaagtaaaacagtggaacaaatgagcatttctctaaatacaaacagtagagtccctgagaaaga

SEQ ID NO: 91907 - DNA, 586 bp, Homo sapiens
  misc_feature (1)...(586): n = A,T,C or G
ccaaacaagaaagagctcctttaggggtagtcaggaccctgattatattcccacatagaaactgttcccactcactactggcacagcagaacacataaactgtcagatggctccatttcaatgatttgacttgtaattctcaattgtttctgttcctaagattttaggactttctatcaactcataaaaaaaatctttaaaaaggtaaggcaaccttcaaatctaagatgctcagctttaaactagtaagttcttaaggatgttttttttcctycaaggaaacaattctcctctttgctgagcaataatacaggttttaatattaaataagtacacaaagtaaaagaaacagacaaaaagtnnnnnnnnnnnnnnnnnnnnnnnnnnnnnnnnnnnnnnnnnnnnnnnnnnnnnnnnnnnnnnnnnnnnnnnnnnnnnnnnnnnnnnnnnnnnnnnnnnnnggagtgcagtggcacaatctcagctcactgcaacctctgcctcctcagttcaagtgattctcctgcctcagcctcccaagttgctgggatcacaggtgcctgccatcacgcccggctaatttttt

SEQ ID NO: 91908 - DNA, 586 bp, Homo sapiens
  misc_feature (1)...(586): n = A,T,C or G
ccaaacaagaaagagctcctttaggggtagtcaggaccctgattatattcccacatagaaactgttcccactcactactggcacagcagaacacataaactgtcagatggctccatttcaatgatttgacttgtaattctcaattgtttctgttcctaagattttaggactttctatcaactcataaaaaaaatctttaaaaaggtaaggcaaccttcaaatctaagatgctcagctttaaactagtaagttcttaaggatgttttttttcctccaaggaaacwattctcctctttgctgagcaataatacaggttttaatattaaataagtacacaaagtaaaagaaacagacaaaaagtnnnnnnnnnnnnnnnnnnnnnnnnnnnnnnnnnnnnnnnnnnnnnnnnnnnnnnnnnnnnnnnnnnnnnnnnnnnnnnnnnnnnnnnnnnnnnnnnnnnnggagtgcagtggcacaatctcagctcactgcaacctctgcctcctcagttcaagtgattctcctgcctcagcctcccaagttgctgggatcacaggtgcctgccatcacgcccggctaatttttt

SEQ ID NO: 91909 - DNA, 1396 bp, Homo sapiens
ttggctgtttctgtgacttgtatccccacgacattctggccatcagagctgagcaaaaacaggctaccagcttccatctgacaggtctctggtgggtggcgggaaagatgatcttgctggactgatgagttaaaggcgcacgaggttctggcagtctcctgccaccgggaggaggcagaaacatgactgtttgagccaccaaggcctgagatggctgggacagaagccaccaaatcctcatgtggagacaagctttgagggacggtgcccagtggaagtgccactgagtcacagtgagatggagttatcagtgtggagtcccgcaggggaggagcagtgaagccttttggaggaggcagagagcaggccagaggatcaggggtgtgtggtgggtgagggaaaagtgcaggtggctcgggtgaggggtgttctaggggaagggaaggttctggtggctgggaggcacttagggaggagactgaggtggtcattgggcctggtgatggggtggaggccagatcctgaggatgcttggcttgaggatccggggaagctaacagggagagaatgggagcagcatcttccataggctcatgagaggactgggaggctccatcaggtgctctttcrcccacctcacctggggggtctggaccggagagctgaccaaagtcacctttgtcaaggtgtggccccaggaggctgcaggagacaggaggcacgagctgcagccaggagccggtggggccggagggcagagtgggtgctcgggccacagcccctccaccaccccacaccctgattgcccaattctcctgctacccctcgccccagggttttactcccatcctctgtacccctggtctccccatcccaggtcagctccaggctgcctgtggccctggggtcacgtcccagccctggtaggaaggatgcagggaaggggaagtgcctcacctctgcagttgtgaaagcaggtccgaagtctcctccaggcctctccggcactctctaccagctggaaatcaggagactgggttagggcagtgagggaggggcctgggttctcacaggaggctgagtggctgtttctttagggaggaccatggggaattagaccctggaccccacccatctgtgtccaaagccacatgaccccgacgttaatagcaaggcatggaggacagggctttttcattcacaaagggcttccacacacggaccccccacccccacagtcctcacaactgccctgtggggagaaaggactgaggtggtctcaaagaggaatcagccttagcagagttggacagctgttcccagggagcgggaggccccctcacccccctccgcatccaggcaggcattggtctccccaggacacacacactgcccc

SEQ ID NO: 91910 - DNA, 1396 bp, Homo sapiens
ttggctgtttctgtgacttgtatccccacgacattctggccatcagagctgagcaaaaacaggctaccagcttccatctgacaggtctctggtgggtggcgggaaagatgatcttgctggactgatgagttaaaggcgcacgaggttctggcagtctcctgccaccgggaggaggcagaaacatgactgtttgagccaccaaggcctgagatggctgggacagaagccaccaaatcctcatgtggagacaagctttgagggacggtgcccagtggaagtgccactgagtcacagtgagatggagttatcagtgtggagtcccgcaggggaggagcagtgaagccttttggaggaggcagagagcaggccagaggatcaggggtgtgtggtgggtgagggaaaagtgcaggtggctcgggtgaggggtgttctaggggaagggaaggttctggtggctgggaggcacttagggaggagactgaggtggtcattgggcctggtgatggggtggaggccagatcctgaggatgcttggcttgaggatccggggaagctaacagggagagaatgggagcagcatcttccataggctcatgagaggactgggaggctccatcaggtgctctttcgcccacctcacctggggggtctggaccggagagctgaccaaagtcacctttgtcaaggtgtggccccaggaggctgcaggagacaggaggcacgagctgcagccaggagccggtggggccggagggcagagtgggtgctcgggccacagcccctccaccaccccacaccctgattgcccaattctcctgctacccctcgccccagggttttactcccatcctctgtmcccctggtctccccatcccaggtcagctccaggctgcctgtggccctggggtcacgtcccagccctggtaggaaggatgcagggaaggggaagtgcctcacctctgcagttgtgaaagcaggtccgaagtctcctccaggcctctccggcactctctaccagctggaaatcaggagactgggttagggcagtgagggaggggcctgggttctcacaggaggctgagtggctgtttctttagggaggaccatggggaattagaccctggaccccacccatctgtgtccaaagccacatgaccccgacgttaatagcaaggcatggaggacagggctttttcattcacaaagggcttccacacacggaccccccacccccacagtcctcacaactgccctgtggggagaaaggactgaggtggtctcaaagaggaatcagccttagcagagttggacagctgttcccagggagcgggaggccccctcacccccctccgcatccaggcaggcattggtctccccaggacacacacactgcccc

SEQ ID NO: 91911 - DNA, 544 bp, Homo sapiens
ccatctgtaaaataaaggggattggattccatttcttctaatatccatttaatttaaagtagtgcatggtatcacataagaaaaagaaaaataaactcatttttcctaagtcttaatcaaaattgaacaagtcagtgttaatttctcatgaatatttttgaaatasggaaatgcaatttattttttggataatttttcccagaataacactgatattttacactataatcaaagagaggttagtacactttgtcttaagagttctttgaaaatacaaatttatatatattgaaggagcaagttatttaaagatacatagacttacagtcatgtgtcacttaatgatgagaatatgtcctaagcaacgtgtccttaggtgatttcatcattgtgcaaacatcacagagcatacttacacaaacctagatggtataagctactacacatgtaggctgtgtgatataacccattgcttctaggctacaaaaccgtacagcatgttactgtactgaatactataggcaattgtaaataatggtatttg

SEQ ID NO: 91912 - DNA, 544 bp, Homo sapiens
ccatctgtaaaataaaggggattggattccatttcttctaatatccatttaatttaaagtagtgcatggtatcacataagaaaaagaaaaataaactcatttttcctaagtcttaatcaaaattgaacaagtcagtgttaatttctcatgaatatttttgaaatagggaaatgcaatttattttttggataatttttcccagaataacactgatattttacactataatcaaagagaggttagtacactttgtcttaagagttctttgaaaatacaaatttatatatattgaaggagcaagttatttaaagatacatagacttacagtcatgtgtcacttaatgatgagaatatgtcctaagcaaygtgtccttaggtgatttcatcattgtgcaaacatcacagagcatacttacacaaacctagatggtataagctactacacatgtaggctgtgtgatataacccattgcttctaggctacaaaaccgtacagcatgttactgtactgaatactataggcaattgtaaataatggtatttg

SEQ ID NO: 91913 - DNA, 544 bp, Homo sapiens
ccatctgtaaaataaaggggattggattccatttcttctaatatccatttaatttaaagtagtgcatggtatcacataagaaaaagaaaaataaactcatttttcctaagtcttaatcaaaattgaacaagtcagtgttaatttctcatgaatatttttgaaatagggaaatgcaatttattttttggataatttttcccagaataacactgatattttacactataatcaaagagaggttagtacactttgtcttaagagttctttgaaaatacaaatttatatatattgaaggagcaagttatttaaagatacatagacttacagtcatgtgtcacttaatgatgagaatatgtcctaagcaacgtgtccttaggtgatttcatcattgtgcaaacatcacagagcatacttacacaaacctagatggtataagctactacacatgtaggctgtgtgatataacccattgcttctaggytacaaaaccgtacagcatgttactgtactgaatactataggcaattgtaaataatggtatttg

SEQ ID NO: 91914 - DNA, 544 bp, Homo sapiens
ccatctgtaaaataaaggggattggattccatttcttctaatatccatttaatttaaagtagtgcatggtatcacataagaaaaagaaaaataaactcatttttcctaagtcttaatcaaaattgaacaagtcagtgttaatttctcatgaatatttttgaaatagggaaatgcaatttattttttggataatttttcccagaataacactgatattttacactataatcaaagagaggttagtacactttgtcttaagagttctttgaaaatacaaatttatatatattgaaggagcaagttatttaaagatacatagacttacagtcatgtgtcacttaatgatgagaatatgtcctaagcaacgtgtccttaggtgatttcatcattgtgcaaacatcacagagcatacttacacaaacctagatggtataagctactacacatgtaggctgtgtgatataacccattgcttctaggctacaaaacygtacagcatgttactgtactgaatactataggcaattgtaaataatggtatttg

SEQ ID NO: 91915 - DNA, 898 bp, Homo sapiens
acacacacacacacayatacatgttgcaaccatatatatgtgaatgatgtgtacacgtgtgtgcaatgtgcatgaatacatgctcatgtataaattaactcatatctaagcaggaataggctttgtgaacatctgtctatacaggtaggcatttgtgcacatctgtttacacagatgtacttccatgcacgcatagtcatacatccaagcttaaccacacgtgtcacacaggcacccagtctccaaggtggttcctgcagccccaagatatggtcatcagggggactaaggaaaatttctatgcctgttttcttgtgtgtttttcccttcaccccccttcataggagtattcacatgatgtattttattagtttaatagatttcaccaaaaatctggagatcccatggaaatctcttatttgttggccctcccatcacctctgcttctccattcccatagccttcccttcctctttcctcttcctaaagagtgaaacaaacacatttatttgtctcataggtgacaggttaagaagcatcttttagtatttgattatccccttgtgaacttacctgacatgtcgaagagtttatcaaagcattttttctcaatgaacacagtggtcttagaaaaaaattacagtgaataaaattatttgcacctccttctttatagataaagaaatttatattcagacagaaaagtgagtttctcagtgtctcccactcatctagtgagtagcagaattgggccttaatctggattcccaagtttcttagccccattaagtaacaacaataatagtaagaacaagagtagtaacatagcaacaatttgttaagtgtcagacagtgtgctaagcactttcaatagatgattttatttaatttttgcaat

SEQ ID NO: 91916 - DNA, 898 bp, Homo sapiens
acacacacacacacatatacatgttgcaaccatatatatgtgaatgatgtgtacacgtgtgtgcaatgtgcatgaatacatgctcatgtataaattaactcatatctaagcaggaataggctttgtgaacatctgtctatacaggtaggcatttgtgcacatctgtttacacagatgtacttccatgcacgcatagtcatacatccaagcttaaccacacgtgtcacacaggcacccagtctccaaggtggttcctgcagccccaagatatggtcatcagggggactaaggaaaatttctatgcctgttttcttgtgtgtttttcccttcaccccccttcataggagtattcacatgatgtattttattagtttaatagatttcaccaaaaatctggagatcccatggaaatctcttatttgttggccctcccatcacctctgcttctccattcccatagccttcccttcctctttcctcttcctaaagagtgaaacaaacacatttatttgtctcataggtgacaggttaagaagcatcttttagtatttgattatccccttgtgaacttacctgacatgtcraagagtttatcaaagcattttttctcaatgaacacagtggtcttagaaaaaaattacagtgaataaaattatttgcacctccttctttatagataaagaaatttatattcagacagaaaagtgagtttctcagtgtctcccactcatctagtgagtagcagaattgggccttaatctggattcccaagtttcttagccccattaagtaacaacaataatagtaagaacaagagtagtaacatagcaacaatttgttaagtgtcagacagtgtgctaagcactttcaatagatgattttatttaatttttgcaat

SEQ ID NO: 91917 - DNA, 1174 bp, Homo sapiens
tgaggattaaaataattattattggtcttcgtttttaatcactccatcatttttcttctattaattttccttccttccttcctgttttccttctttcctcattttcttccctccttccttcttcccatttatctttcctttctttcttcccatctttctgcttcccttctttcacacatattcctgaagccctactatgtgccaggcagctgtgctgtggatactagggtgaatgaggcagacaactccctcttgttgtaggtcttactgtttactgagagagagagagagagagagagagagagagagagagagagagagagagaaagagatgtaaactagttgcttggatgcaatgaaaccagtrttctatgagaagtacaagtttttcagggaacacagggaaagaacaatgaactcagcatggactggattaggggtgttaaaagcactctccactctcctagggggtagcatttaagctgagacctaatggatacaagggcactaggggatgagggatccacagaaagagtagtctagacagcgggaagagcatggaaaaggccacgggcatagaactccttccagctgagaatcaacttggccctcacatttctttctgactaaggttcgtcttcttttgtttgtttgcttacaagttccctagaaaagaaaagaaagagtacttgcacacaagagatcaaaattttgaagggaagggtgacacaaagcagaaatctgtgagctccttagaggaaatagcatttcttatagtacaagaaagatctttattcattataagatgggattctgagactcaggaaaaaaatggggctcactgtgttattgagtttcaaccactgggagtactcaagtaacagaagaactttaggggaccctcaagttggatctctggagaccttcaacaacattgatgatattgctagcaggcacttggatcaactgaccatgctctgtgaggctggggaaagaagaatatctggaaaagataactgggaaagaagatccaatcaacagaagctgaaggtgaacctaagacctgaagattatagcccaatcttcatcgctgactttgattctgctcttttgctgacaggaactcagcttgtttctccttttaacaagtagtacattaggaattgttggagga

SEQ ID NO: 91918 - DNA, 1229 bp, Homo sapiens
ctcccttggcagtgcaccttcttccaaattacactggctgctatagtattttctccttcaacatagttgccaagggatgaagttttttttcagtctgaggttgtttgtttagagagagagtttgaagaaatttctccccctttgctttctaaaaaaaaaaaaaaaatttaggtttcccagaaattctttctatattaaaggtaaagttagttagttaagttttagtttaaataaaatcagtgaccaaaaaacagggtaagttttagtattgcattggtttgccagacagaattccctaagaagtctaaatatatataatctcctttgataatacatatgcacatctaccacctatacacccactcccgttccccacacacagaaatataaacactgccacttccttggcatctgtgaaagggtgagaggccttatgagggttaaatcaggatgatagactaagaaagacagctttaacttgggggttaaatcaggatgaaagaccaacaaagacagctcatttgaaagcagttctgtaaaggatttggtcaaacatcacttcttagtctccagaaactctgagttcatctttttgctaaggtagtgcttgcaagagcttcctcctgagcatctggatcctcatttctgcattggaagagaaatgcagaatcacaaaattttaaggttggaagagaaaatagaactactgtgatctaaacttctcccagtgcaaatctcttcatcattgggaaatcaccaccattcactgactagatcataccagggacagggagctagctaattagctctatcttccactttctttgaattattaacattatttcacggaagaagagtaatagctcccattccagcttgtgttataaaccagatctaattggaatatcctyccatactttgatcagctttgcatatttcacccactggctccagttctgcaatgtgcatttccttcttatggtaatgtcctcctggataaaatacacagacctgtctcagaggttattgaagtctgtgttagcaggacacaaagtgaacaccatccctagtgtagcttattttaaggtgaaagaatgggagggtttcaatgcatagaggtaaagaattatctactttgtctaagtgtgtctgggaagaagattctttttttttttaagaatggtaaattccaactttaatatttcagtttttagtatgaattagcatat

SEQ ID NO: 91919 - DNA, 909 bp, Homo sapiens
gttcagcaatgttgccctgactctccatacctgcctgcatctctggccagcacattgccctgttcttctctgtgtttctgttattatcaggcaggctgtctccacatgagagctcccagaaactctagcctactctcatattctccagctagcaacctcagcaatacaaaagccagtttttcccaaagtcccggcaaaaatcccaaaccctgattctaatcagggttgtatcctcagtcctgaaaaagatccttgaggcaaaggaatatgctcatcggtcaagtctgggtgagtctcacctccatacagatgctaagatggttctttgytgctgttaacaaaatttggaggaatagatgtggacagccaaaaataaaaactgcacactatttgtcataagctcttagcttctgttttctacccattggactagataaatgctctttaggggagtctagacaagggccagagagcagggattggaaagaggatgaaaagaaggaaacagggaataatcatgttggtaaagcacaatgaaagaaggcagcaacaattacatcttttaaggtaattcaacagacattgatatgtctcagacgtgttcaaaactttatttctaattggacctacaaggcaagacttgtgatttcatggaatttacattctaaaaggaagatggatatagccgtagttctagatgtagatacaaatatacatgtagatatagatagatggataagatagatatgcaagtagatgtgggaggagggaaaaggaagacaaatcaagaagaggccccaggcgtgaccttagggaatttgcccttttagggagaaactaaacatacacagtgaaacagctggagacaatagctccatattgtacaatataaaattatatgaaagtaca

SEQ ID NO: 91920 - DNA, 750 bp, Homo sapiens
tttccctgggcggagctcccaggagagccctttgaaaggggtcagattcaggaggcaagctgcttttttccccttgcccttcgctttcttctaacctggaatgtggatttgaaagaagcgcaaccattttgccaccatgaggtgacaagcaaactgaggatagccatacggcaagagaggctgattggaaagataggaggcatgcggggtctctggaggcattgtggggctgccatattggctctggatctcctacatctggatttcttattgtgtgaggaaaaaatcagactctatgtggttaagccacggcaagttcagctttctgttacatcagctgaacccattcttaactctttctggtactgtttcataggtccaggtgacagcccctgagtmcctgaactacagcagccagtggcatgaagaggtgaggaacagctctcaggtagacttggcagcaacatcttgttagggagagtgaagcctgaaagacagtgtagctcctgaaactgactgaaatgtagacggcagaatcggcccaccccaaggattcaggtttaagggctgagtaggacacatgccagagacgatgagctcggtcaagggcagactgagtttgaagtgctcaatgtgcaatgtagacggggcatcttctgggccactggaaaggcccgtctgcattcgggaaagaggtagggagagttctgaaaaagagatatggcagttaccggcaaagtgatggtggct

SEQ ID NO: 91921 - DNA, 1184 bp, Homo sapiens
gagtagtgaggaggaccagaggtcactttcatggccgtcttgattttggcgggttttggctggcttctttaccttaacctgttatataagtaaggtctttgtgacgtgtaccttgtgccaacctcctatytcatcctgtgactaagaatgcctaacctcctggtaatgcagcccagttggtctcagcctaattttacccagcccttattcaagatggagtcactctttttcaaacaccgctgacactgtcactcttcccaaatcttccagggagtgctttcatccccattctttggatgtcacaaaaagccacttttccttcacaaaattcagtggaaagtatgccatctccatgagatgcttcaagttacaaaacagctcatctctgctcatcaacaaatcaccagccctgccccttgactcctcccataagtttggttacacctggcctgcacctggcctgcaacgacagtcttgcccttcactgggagcatatatgcaataaaaatcacaagtctttacatgagtattgatatgtaacaattgctcaacatgttcacatactctatatcagttaattctcatagacacctgcactgcccccacactgctgctgaagaaactgaggcttgaaattgaagttcaaggccatggccagaggagtacgtggcagagacaggatatagcataatggtggtccatacagcccttcttaccactgtatatcagtggttatgagaatgggacttaccttgtgggtgcaatatgatatagcacctaatagcaccagctatagaacttccgttccaagtccacctacatttgtggggcccagtgcaaaatgaaaatgcaggtcccttttttagaaagcaggaaaaaatgccactaatgctatagaaatataaagctttttcctttcctctgtagtctctctctagacttaccatgggtttgaaaatttgctttttaatgccatttaaatgaaaaaatgaaaaatcttgaattattagcgtaccttttacattcagctttatattgcaaaaggccacttttaaatgcagacattagagcatttaactgatgtggagtcatccaaattacacaatttgtatttcgtagcttgcacacatatctcattgttactagaatggtggaaatgctccacaaaaccgacccaactgttt

SEQ ID NO: 91922 - DNA, 683 bp, Homo sapiens
gtccagcttggagtgtcacaagtgttctgccacagtctttctgaatctgttcctcctcattaggattaagatgctggaggacaggacccaggactcacaattctgttctatytccctttccctgctaccctcccccacggtactggaacactcctgggcacgtacgcgagtctcaataaatgcttggtggataaactcacattcctggtgactagtcaaagatgtgtcacttattatgaagtgtgccaaaaaagtcactcactaacttgtccagtaagcactttagcaatttaatctgtgaaccaattacttcagtacagtttccagaaatagagttgttcatcctttgaagcaggttaattgtcaactgatattttatctttgttgattcatctgacggacaattagggcttctaaagtgtcaggcacggtgctaggcacagaggagcacagagaaaatcataacacttcccacgaggtctcagaggggagtgggctagacagtcgtgtcagcaatgcacccaggtctctgaagggctgcatcaaagctctgtgggccagcggggaaagagtgattcaaggcagggaggagttgtggggttgtgaggttagattggctgctggagtctccttccttagacattctaagctgactgctggcctggttccaccaaggggatccg

SEQ ID NO: 91923 - DNA, 683 bp, Homo sapiens
gtccagcttggagtgtcacaagtgttctgccacagtctttctgaatctgttcctcctcattaggattaagatgctggaggacaggacccaggactcacaattctgttctatttccctttccctgctaccctcccccacggtactggaacactcctgggcacgtacgcgagtctcaataaatgcttggtggataaactcacattcctggtgactagtcaaagatgtgtcacttattatgaagtgtgccaaaaaagtcactcactaacttgtccagtaagcactttagcaatttaatctgtgaaccaattacttcartacagtttccagaaatagagttgttcatcctttgaagcaggttaattgtcaactgatattttatctttgttgattcatctgacggacaattagggcttctaaagtgtcaggcacggtgctaggcacagaggagcacagagaaaatcataacacttcccacgaggtctcagaggggagtgggctagacagtcgtgtcagcaatgcacccaggtctctgaagggctgcatcaaagctctgtgggccagcggggaaagagtgattcaaggcagggaggagttgtggggttgtgaggttagattggctgctggagtctccttccttagacattctaagctgactgctggcctggttccaccaaggggatccg

SEQ ID NO: 91924 - DNA, 679 bp, Homo sapiens
cccatttatgtgaatactggaacagcactgagaaaaatgccactgctctgtagcctctaaagggttaacatcagggcatatttgaaacttggcagccaaaggcagctgtgtgaccttttattgtgaaatcagattggaagctgtagcacaaagcagggggtggagagtggagccaatggccctgaagactgcaggagcgggaccctcacaccctgtggttagtgactgagtttgaaaagcaagccagaatgaagcctgtatctccaaggggcatttccaaaccagtaattgaagactttttacaaattaaatttgtatttcttgctgtcctttaatttttagtatgtactaacaatacagatttgctaaatctggaagttggtaagcaagcatgtaatcattggtaactccttatccaagaatctcactgaatatttcatatgctgcctcattaatgcctgtccctgcccattgatctctggcaactctagggtattgcttactcctattttacagatgcagaagatgagggagagaaaattaaatgccttcatggagaattaatcatgcaacaraaccaagagctctaagtgttctggcttccagttcttggccttgacagtgaaactgagctttttttttttctcctaggaacagctagaactttcactttatgggg

SEQ ID NO: 91925 - DNA, 2524 bp, Homo sapiens
tgcatattgaaaattaattcccaatgcaacagcattacgaggtagggccttttggaggtgattagccttcatgaatggaattagtgcccttatagaaagggcttgaggaaccgagttcaccccacccacctctgctctcccttccgccatgtgaggactcagcacaaggggccatctttgaagcagaggcaagggcttgccagacaccaaacctggcacgttggtcttggacttccctgcctctagaactataagagacacattgctattatttataaatgacatagtctgtggtattttgttgcagcagcacaaatggactcagataagacccaatcatacccgtctgtgtatttcttctgttttctcccaatctttcatcccactgcaatgaggaaggtttggaacctctcttgcttttttggagaggccaagttcctctgtacccttgatcaatagggagttatgagtctctatgaactatgcttctcatttgagttagtcatcctgttctcttggcctcctctgcactttggccatgcctgcctatgggtttgtctctctcctttgggccgagaacatctgggatgaggaacctggtgtgtctcatcattgtatctccaccgtctgccagagcacacagggaacaagtaactgaggaaagcaagggaggggaaggatgacaggaagaagtcttggcctactggcccagttccctggatgtggttgcaaattgataagatgcacagaaacagaacttccagggaagcttcctggaaaatctttatgcttagacggaaactctgatatgaatgccaccacagtattcataggatcaggatggctgggcagccatctcccccaagacctgccaagaccgtgtcatttccttatgtgatgctgacagtcttagctctggcccttaatacccaacacaaggtggccatcctggacaaagcatgtgtctaggctcctgctggcccactcaccatcattccactatggccaagtaatcattcccaaaggacagatcctgccactgtcctatttaagaatcacatgctcattcccaggccccatctggcctttgaggctctccaacagtgcctgtggcaccacacaaccctccagactccccgaggatgctcaggccaatcctcccgtccccagtgtgcttagtcctagcttggacctttgaatgcttctgggccaataggtattcatctgttatttcaagaaacctttctgaggaaccatatccagctcatctttctcacactttgtatgtcctccttgcttgggtgccccatctggaccacatcctgcccatccttctcctccctatgcattccttttgtcaatgcctattttgagaaccttaccaggtgctaggcccataccttgtgagaggcagagctgagattcaaatccagatctaaacaacccaagagcctggctctccatcacaacactccatggcaccccctgcccctgaggcctctttgaccttgccttagcttcctttctcagtgaaaagagatgtcactttggccagaaaagcaggagtcccactagttgggctgcagcccccaggatccatctcttcaacagtttccatgcaccagttgtggaaataacatcactgtgcaggcccgggagacacctttcttggagtgcaagacagcagaagggcttcaaaaagggacccaagattgggatagaaagaggaaagcattcctccctctcatccagtgctccctcacacactaagtggagacccttcctttgggaagaaaggaagcaagtaaaggagatggaggcagtggtgaggaggggactctgccaggcagaatgatgagtcaccatccagatccatggcacagcggctggaccaagaaaaggataaggatttggacacaggggctggtaccctcttcccttcgtagctggctgagcctgtggagaaggaatctctggacgtgggcctgaggttttgagttcactcatagtgggtgacaaaaacgagatggttatttgttttatggtaatgatctccatgaggctccaaactctaggactgcagtcggcacgccacgcggcaggccttccttcgggtgcgaaaggatttccttggtttggtgggattcgtttgttttwtaaatgaggctgtttattttctcttcttttaatgttatgattttttttcaggctcacaaggaagatacataatgtacagccgaatctacagtctcctattttgtcagctgcttgtgttgattaaaacttcaataaagatcctgtgataaaacagagctatgttcaaaggatcctgttatgtttttaaagggctgagcttggcagaaaacatgtagagtatagctttgtaccttggtatttttccccttttccaggttaaagagggagaagtggaggagacacatacagtggtttctagtacctgtgggatcgttagacagcatgcgtttgaccaagtcccaaataataagcagggtccaacttaaat

SEQ ID NO: 91926 - DNA, 547 bp, Homo sapiens
cagcgccctctgctgtccaagtggtggctgaagtgaaggtggctttcatgctatcagaaaagcccttttcactaaacaaaattgatgttatctcctcttctaggctctagagaggtcagaaaaggaagagcaaagaattagcaataagtcagaacagacagcagtgacctattggaagaaaggaaaggttacacaagaaagaacaacagaacagcataaaatgaaagaaaagatgagaattctgacagattctggagcaggcttatgaagaggtttgtgagcgccagcttttccaccctgcttgagaatctttgatagttgcgacctccagaaaccagtgaaaactgcttggctgatcaccaactgagcacaaycgacccacccaaacgccatttcatatattcttgaggtagttccttggcctttctctgcacggaatggcctcttcagtggcccctacacttgaaatgcttattcctgtgttacagcttgggcagtcctccctctcctgcctccaaggcccttctttgcccttatctgcacattc

SEQ ID NO: 91927 - DNA, 690 bp, Homo sapiens
aacatgcttttgttctctgtttctgcttccgtcagctcttttctgtctataaaagcaacttcctctgttcagcttatcggacattcattctattttatagaatgaggtgttgctccagtcttgaatggcaaataaaaaccaattaaaatctttaaaataaatttrctgtaattttaacaatgtaaaggaaaaaaactaaggagaaagggggaaattttggagaaaatatggtcaaccacccagaatatattcaatgataattctcctagcatttatataaacatatggcttaaaacaggccgaacaattttcaatatgagaagtcattggtgttttaaactcttcttacatagtaacttgatttgtaaatcaatatctattaaataagttacccaggagaataatcaaatgagtgccaatctccttatcagtacagaggcagaaaagttgttaaaaataattcactgaaattgcaaagtttggggaggggtgttttgttttcatcatagtgtgtgccaagggcttgactaaatttattttattagatacaatacctacaactgtagctcctattctcaaactgtgaagcctgtgtctcaataaaatgccagtttaaaagacaagataatgaagaccaccatcaccaccagaactccataagaatatgtgaaaggttataaaacaaaactc

SEQ ID NO: 91928 - DNA, 535 bp, Homo sapiens
attctttctgaataatgctttttaaccaattgaatgttgtcttttccaatactacctttggcctgctcctcccccactctgagcccataaaagccctggactcagccacatttggggggggactttcccaccttcaagtagtaggaccaycccgcatctcctctccactgaaagctgttttcttcactcagtaaaactccctgcctagctcactcttcaactgtcagtgcacctcattcttcttgggtgcgcgacaagaactcgggaaccagtgcgtgggacaagaactcgggaaccagtgcataagctagattcgacctggaagggccaagtgaatgtgacgtctcctgcagcaggtagcatggccaagtgaggtccagatgggacatcgccagctgaaggtccccagcttgcaaagtgaccaggaaaagaatcctgtgtcattgtgagtaggagttggtgacctgggcagtgaaatgaccactgtcactggatcagaattatacacaaagataaatcagaggtaatgctgaaa

SEQ ID NO: 91929 - DNA, 535 bp, Homo sapiens
attctttctgaataatgctttttaaccaattgaatgttgtcttttccaatactacctttggcctgctcctcccccactctgagcccataaaagccctggactcagccacatttggggggggactttcccaccttcaagtagtaggaccatcccgcatctcctctccactgaaagctgttttcttcactcagtaaaactccctgcctagctcactcttcaactgtcagtgcacctcattcttcttgggtgcgcgacaagaactcgggaaccagtgcgtgggacaagractcgggaaccagtgcataagctagattcgacctggaagggccaagtgaatgtgacgtctcctgcagcaggtagcatggccaagtgaggtccagatgggacatcgccagctgaaggtccccagcttgcaaagtgaccaggaaaagaatcctgtgtcattgtgagtaggagttggtgacctgggcagtgaaatgaccactgtcactggatcagaattatacacaaagataaatcagaggtaatgctgaaa

SEQ ID NO: 91930 - DNA, 535 bp, Homo sapiens
attctttctgaataatgctttttaaccaattgaatgttgtcttttccaatactacctttggcctgctcctcccccactctgagcccataaaagccctggactcagccacatttggggggggactttcccaccttcaagtagtaggaccatcccgcatctcctctccactgaaagctgttttcttcactcagtaaaactccctgcctagctcactcttcaactgtcagtgcacctcattcttcttgggtgcgcgacaagaactcgggaaccagtgcgtgggacaagaactcgggaaccagtgcataagctagattcgacctggaagggccaagtgaatgtgacgtctcctgcagcaggtagcatggccaagtgaggtccagatgggacatcgccagctgaaggtccccagcttgcaaagtgaccaggaaaagaatcctgtgtcattgtgagtaggagttggtgacctgggcagtgaaatgaccactgtcactggatcagaattatayacaaagataaatcagaggtaatgctgaaa

SEQ ID NO: 91931 - DNA, 819 bp, Homo sapiens
ctctggctactgtattgggagtgccctgtagaggaygaaagggagagaagcaaggagagtagctaggagacaggtgcagttgctgaggtgaaaggccatacacgtgtgagcatttcatctctgggttctcagcatctaacgcagtattttattttattatttttattttatatatatatatatttgaaatggagtctcactctgtcgcccaggctggagtgcagtggtgcaagcatggctcactgcagccttgacctcccctactcaggcaatcctcccacctcagcctcctgagtacttgggaatacaagcaggcgccaccacaccaagctaattttaaaattttttgtagagactgggtatctgctttgttgccaaggctggtcttgaactcctgggctcaagcaatctctcggccttccaaagtgttgggattacaggcctgagccactgtgccctggtggaaatatatatatatatatttttttgagacagagtttcgctcttgtggcccaggctggagtgcagtggcgcgatctcggctcactgcaacctctgcctcccgggttcaagtgattctcctgcctcagcctcccgagtagccaggattataggcgcctgccaccatgcccagctaatcttttgtatttttagtagagacggggtttcgccatgttgggcaggctggtctggaacttctgacctcaggtgatctgcccaccttggcctcccaaagtgttgggattacaggtgtgagccaccgtgcccggcccagaaatgagatatttaattttttaatttttactttttttttttttg

SEQ ID NO: 91932 - DNA, 734 bp, Homo sapiens
tagacagttgcacacacacaaaagagctggttttacagaaatgctacattaaatatatacaccaactatggagtatattttttaaaaagaacatttccatttccagcagtttcatctttcatatcattaagaaagtaggtatcaggaagtactgtatctttaaagatctgagctactttctcatggagataagaaaaagaatctacatatttccagtgtctatgcccttctaattattatgcagttccacattcctgggctagttctgggtcattgggtgyttgatggagccatctcatgacacacctatgagaatatttattgatgtttatcatagatgcccgtaaaaaccattgaagatttaatatgtgttggacattggctacatgctttcccaccttttaactcaattataatcaacatctccacaaaaggcaactgacaggtatctttccaatgccagcaatcctaatgccaatccctttgtagtataagatacattgtataaagtttacccttctaaattctcagtgtgacagagtgaaaagagcacaagctttggagtcaaatgcctctaaattataactttacttctaccacctacttgttcactgcactgagacaagatattttaacttctttgagtttcaatttcttcacttgtgaaagacaaatattgttatcagccttgtagtgttattttaaggactgaatgacattaatatttgtagatt

SEQ ID NO: 91933 - DNA, 803 bp, Homo sapiens
agcttttcagtcctcaccctcctcccaccctccaccctcagggaggccctggtgtcttgttcccttctttgtgcccatatgtactcaatgtttagctcccacatataagcgagaacatgcagcatttggttttctgttcctgtgttagtttgcttagaataatggccctcagctctatccatgcaaaggatagttttaattttttgttgtcttttggtcttgaaattatctctttcctttggwgtcacctctcctgatgatttaccttgattcaactttagttagcttattgacattacatgctacaagctttccacaaaaaccgttgatccttgattacctgttctctcttgagagtgaggcaaagggctgagtagaagttatgtgtgcatggaggaggtttgccaactagaaggttctgctttaggatgaacagttacacttagatacccctaattttacagtaaggagacctgtgctgttgggtcttaatacttgtgtctggaaggtaaattgaggaaacttctaagaatgtagaacaaagagataaagagtcagaaacaaatgaaagaaaagaaaaaatgacagtaaacttttatgtgggagacccaacatctgtctaatgaaaattctagaaagacagaatacagaaaatagacagaaaaatttcaaagaaacagaagataattttctatagctaaagaagctagaatggggctcttgagtgccagtgaaatggatgaaaatagccccataaacatatgatcatgaaatttcaaaagaccaagaataaacaaaggatc

SEQ ID NO: 91934 - DNA, 1207 bp, Homo sapiens
gcctcccaagtagctggaactacaggcgcctaccaccacacccagctaattttttgtatttttagtagagacggggtttcaccacgttagccaggatagtctggatctcctgacctcgtgatccacccgcctcagcctcccaaagtgctgggattacaggcgtgagccaccgcacccagccattaatcacagttttaaccttgtatctacttatgtagtcgcttgcttaatatttatcttctctatcagactataagctccatgaaggcaaggtatgcccacctagtacagtatytgacacgtataagaaaggtagcatattatctaactcacgactctctcaataaagaaacagcatcccacaagacaaagtattttgatcactactttaaaaggaaatgtgatgaaatttcattgcttttctctgcacagcattcatggaggcatccccaactcttctttcccatacgggaggcaacctcattctccttaatgactccctgttctctcccatcaaccacaaaggaaccaacaggagtttaaagacagaaagaaagggcaattctggatccagattagcagaaaaggcatcaggcttgtcaaaccccgagttcctctcccacagagctgaggggcctgtacagctacacctgtgcacactacaaagttatctcgtatttccactagacacctccacttccttccctcccactactgaacacatcaacatgctgtaggaatttctcttctgaatagtgctttgccctcataatgacatccggccagataaatgggaggacactggaataatttgatttctaccagatatttctactcttgctacctgtcctttttcttctccttctaaaataaatgtcgactcctcttagccacatttcttcctacttgtcctataaagaaaagactagggttggaagacccaagtgtgatttgttttctttctctgatctttttttctagttagccctctctaaactagaacgtatgtgattcaatcattcatttattaattcaataaaatcatgtattgagtgcctattatcagctaggtacgcagtgaatgagacaatatcagatagtttcatgttaaataaagggaacagaaaagagcatgagccctggacataagagggggtaagtagaggggtctcatggcgggagacaaagggcaaagatgggagagcat

SEQ ID NO: 91935 - DNA, 1207 bp, Homo sapiens
gcctcccaagtagctggaactacaggcgcctaccaccacacccagctaattttttgtatttttagtagagacggggtttcaccacgttagccaggatagtctggatctcctgacctcgtgatccacccgcctcagcctcccaaagtgctgggattacaggcgtgagccaccgcacccagccattaatcacagttttaaccttgtatctacttatgtagtcgcttgcttaatatttatcttctctatcagactataagctccatgaaggcaaggtatgcccacctagtacagtatctgacacrtataagaaaggtagcatattatctaactcacgactctctcaataaagaaacagcatcccacaagacaaagtattttgatcactactttaaaaggaaatgtgatgaaatttcattgcttttctctgcacagcattcatggaggcatccccaactcttctttcccatacgggaggcaacctcattctccttaatgactccctgttctctcccatcaaccacaaaggaaccaacaggagtttaaagacagaaagaaagggcaattctggatccagattagcagaaaaggcatcaggcttgtcaaaccccgagttcctctcccacagagctgaggggcctgtacagctacacctgtgcacactacaaagttatctcgtatttccactagacacctccacttccttccctcccactactgaacacatcaacatgctgtaggaatttctcttctgaatagtgctttgccctcataatgacatccggccagataaatgggaggacactggaataatttgatttctaccagatatttctactcttgctacctgtcctttttcttctccttctaaaataaatgtcgactcctcttagccacatttcttcctacttgtcctataaagaaaagactagggttggaagacccaagtgtgatttgttttctttctctgatctttttttctagttagccctctctaaactagaacgtatgtgattcaatcattcatttattaattcaataaaatcatgtattgagtgcctattatcagctaggtacgcagtgaatgagacaatatcagatagtttcatgttaaataaagggaacagaaaagagcatgagccctggacataagagggggtaagtagaggggtctcatggcgggagacaaagggcaaagatgggagagcat

SEQ ID NO: 91936 - DNA, 1207 bp, Homo sapiens
gcctcccaagtagctggaactacaggcgcctaccaccacacccagctaattttttgtatttttagtagagacggggtttcaccacgttagccaggatagtctggatctcctgacctcgtgatccacccgcctcagcctcccaaagtgctgggattacaggcgtgagccaccgcacccagccattaatcacagttttaaccttgtatctacttatgtagtcgcttgcttaatatttatcttctctatcagactataagctccatgaaggcaaggtatgcccacctagtacagtatctgacacgtataagaaaggtagcatattatctaactcacgactctctcaataaagaaacagcatcccacaagacaaagtattttgatcactactttaaaaggaaatgtgatgaaatttcattgcttttctctgcacagcattcatggaggcatccccaactcttctttcccatacgggaggcaacctcattctccttaatgactccctgttctctcccatcaaccacaaaggaaccaacaggagtttaaagacagaaagaaagggcaattctggatccagattagcagaaaaggcatcaggcttgtcaaaccccgagttcctctcccacagagctgaggggcctgtacagctacacctgtgcacactacaaagttatctcgtatttccactagacacctccacttccttccctcccactactgaacacatcawcatgctgtaggaatttctcttctgaatagtgctttgccctcataatgacatccggccagataaatgggaggacactggaataatttgatttctaccagatatttctactcttgctacctgtcctttttcttctccttctaaaataaatgtcgactcctcttagccacatttcttcctacttgtcctataaagaaaagactagggttggaagacccaagtgtgatttgttttctttctctgatctttttttctagttagccctctctaaactagaacgtatgtgattcaatcattcatttattaattcaataaaatcatgtattgagtgcctattatcagctaggtacgcagtgaatgagacaatatcagatagtttcatgttaaataaagggaacagaaaagagcatgagccctggacataagagggggtaagtagaggggtctcatggcgggagacaaagggcaaagatgggagagcat

SEQ ID NO: 91937 - DNA, 678 bp, Homo sapiens
tgaaagagcacaggagaaacagctagaggcaaactgcaccttgtcaaaagtcagcccccggcaaggcaacctacgtgggcttttgcagagcaggtcagatcctaacaaaacccagaattggctgtcagtctctccaggagttccgcaacctgcattctcaccgctgtccaccacatcatcatgtttaggttgacccctggctcttctcagagtatgtcatggtctttcacactagtcctgatttaagcccattctacagaaaggatcagcttttcacactttctaaggtgtcagtgatgagtcagcctgaagggtgaactcctagaagcacagcataaccttttcccagctatgaaaaaatacaaaagaagttttgtcgttacaaaaaattataaaattgttaatatttataattataaaaacaaattatataattataaaattattttttaaatacaaaaaaaaaggagcttgaaccatttggttttatatcrgggcagggctttcctgacctccctcaaacatagtctggggcaacgtttcccaaacattgacgggaggtgcagctctccttattctccacacacatacacacatatacacacacaaaagtttgagactcggggggaaatagagtgcagaatttccccaggctgtcaatatggttatctgaacttt

SEQ ID NO: 91938 - DNA, 569 bp, Homo sapiens
tatacacaattagtatatcctgtcattagcatggttaattttgaaggtatactgagttgtcacttacrtttgcaatagcattctgaacaggtcatcctggggaaggcagagattttgaggcaaatcagtctaaatacctctgtcccccaattttaaaacaagtctacaagaactttgtttacaatgaatcccaaggcagccttgatgggaagaaattaacaagaagacatcttctcagtaatgttggggaaggaaattgcttgtgttgttactctcttcattaatgaaatgacaataatcttcatggtgttttctgttccacagtgtgcctccactcaccttacctctttgattctaagagctctagaccaattgttctcatatgatcctaagtttctctgaactccagctcgcagacctgcctcctctttgctcagcagcaggctgcctccctgagtcactgcatagaagtgtctctgattatggcttgccaggtctcacatgatgctaaccgaggaaaagatgctactctctgcccctgtagcattaaggcttctgttgtttgtgtc

SEQ ID NO: 91939 - DNA, 923 bp, Homo sapiens
tgcatagaaaagaataatttgaactgaatcccaactactcgattatgtgtttatatgtaacattagaaacaacacagacgcatgacaatataatatctgacactgcaatggttaatgtgaaacgcagtcctaccagagaaatgagtttattacaggaaaaaatatactgcttcagtttttaaatataaattagttaaaattaaataatattaaaaattcagttcttcagttgtcctgctcacatttcaaatgctcaacagccacctgtggctggtggcaactattttacacaacacaattgtagagcttcttggacagtatctagttcgagaacaactgatccatgtttattgttgctagtctttttaagtaaatttaaatttcagtttaagctttagaggctttaaagtttttctcacagcccttgctkgcttctctggaagctgccgcttgcagaggattaggaagtaattccattaatagataacgcattcaggcttccactgcagaagtagaaaagaatgagaaaacatttatacacttgcccatactttctacttttagaatattaagaactggttacatcttctttaaaaactgtgaaataaacagaaaaaaagatagtttttaaaagtgcaagtgtctttacatttgttaaattagtaaaaaccggttactttttcttacatctttgtttattgttcttttaccaataggatgcccaagcccttttcacagcatcagttcagctgcttgcagattaaatccagttgctcccttatctttagttcttttgacccgtgcctcacctaccaacaagagctaaaactgtcttgatgactttgaatagcaacaacaaaaaaatgagcagaatatttagcatacataataataaaaactctgaatttcaataatgtaaaatg

SEQ ID NO: 91940 - DNA, 923 bp, Homo sapiens
tgcatagaaaagaataatttgaactgaatcccaactactcgattatgtgtttatatgtaacattagaaacaacacagacgcatgacaatataatatctgacactgcaatggttaatgtgaaacgcagtcctaccagagaaatgagtttattacaggaaaaaatatactgcttcagtttttaaatataaattagttaaaattaaataatattaaaaattcagttcttcagttgtcctgctcacatttcaaatgctcaacagccacctgtggctggtggcaactattttacacaacacaattgtagagcttcttggacagtatctagttcgagaacaactgatccatgtttattgttgctagtctttttaagtaaatttaaatttcagtttaagctttagaggctttaaagtttttctcacagcccttgctggcttctctggaagctgccgcttgcagaggattaggaagtaattccawtaatagataacgcattcaggcttccactgcagaagtagaaaagaatgagaaaacatttatacacttgcccatactttctacttttagaatattaagaactggttacatcttctttaaaaactgtgaaataaacagaaaaaaagatagtttttaaaagtgcaagtgtctttacatttgttaaattagtaaaaaccggttactttttcttacatctttgtttattgttcttttaccaataggatgcccaagcccttttcacagcatcagttcagctgcttgcagattaaatccagttgctcccttatctttagttcttttgacccgtgcctcacctaccaacaagagctaaaactgtcttgatgactttgaatagcaacaacaaaaaaatgagcagaatatttagcatacataataataaaaactctgaatttcaataatgtaaaatg

SEQ ID NO: 91941 - DNA, 658 bp, Homo sapiens
atcataaagtaaaaacaaatatggagtcgaccttttccaagttttgactgttcaagggatagtctggggtgaccttagctatgacaaaaaagaaaaccagaacttttaggggcttttgagatcctgaaagatcaaatgaggaaatagctttttaacacacaggacaggaaacttgttgactaccaggctatttggggacagactttcggyagagataacacccagattttcctggctgcatcacttcctggttaatctcatggcatctaattctttgaccagattgttcttgccaaggcaaggctgagactttagacaactccctttgtcctagggaagaagcaattccaactgcagcaattcttttatgcctttattctctggggaagtgtagagactggttctctcagaaaaaccaactaaccaaccaactaaaaacaacaacaacaacaaaacccatcccttaggggtatctgatgatgtaaaggtcattgttgcatttttccccccaaactcaagccataggggagtcaggtatggcagagcaagagaaacaaaccattcagtggtactaggccacagctggtagtttattattacttcactgtcaaagacacccttacattgtcgatgaagtatgtcattcaccctcagaata

SEQ ID NO: 91942 - DNA, 658 bp, Homo sapiens
atcataaagtaaaaacaaatatggagtcgaccttttccaagttttgactgttcaagggatagtctggggtgaccttagctatgacaaaaaagaaaaccagaacttttaggggcttttgagatcctgaaagatcaaatgaggaaatagctttttaacacacaggacaggaaacttgttgactaccaggctatttggggacagactttcggtagagataacacccagattttcctggctgcatcacttcctggttaatctcatggcatctaattctttgaccagattgttcttgccaaggcaaggctgagactttagacaactccctttgtcctagggaagaagcaattccaactgcagcaattcttttatgcctttattctctggggaagtgtagagactggttctctcagaaaaaccaactaaccaaccaactaaaaacaacaacaacaacaaaacccatcccttaggggtatctgatgatgtaaaggtcattgttgcatttttcyccccaaactcaagccataggggagtcaggtatggcagagcaagagaaacaaaccattcagtggtactaggccacagctggtagtttattattacttcactgtcaaagacacccttacattgtcgatgaagtatgtcattcaccctcagaata

SEQ ID NO: 91943 - DNA, 739 bp, Homo sapiens
tctctataattttgttttaaaaaaagaatacatttgtgtcttacttgtgaaataaagttttgagtaaaccatttaagtaattaggaaggcatggcctaaatacatgagaagcttagtagtaagagttcaccgataaccacgacaacaatataagcaacatcacaaggcagaatagatgtattgctccaccatcagcatctgcagtaatggccaggagttcagaagaggaagagcttgctgagtgctggggagctctgaaagggggctaagaagtcagggcctctttgaaagtcttttaataaaggaatgctgtgaccaggtggagctttgtgaagatccatctgggcacaagggtgcaatgtgtttaattaaaaaattgcattatgagtgtagaggtttttctttttttctccttatacttgccaggtcctggaaattgaagatggtatcatacgatctaagatctaggaggaagttagaataggaaaatgagggatgctttggtataatcctcaagccaaatgaacaagtgatcaaggacccccaggagggtgtctggggatcaccaaagtttacttagtttcctccactggattgtgaatttcttcagagccrgggctatgatgtcttccctcctggagccccagtgcatagaatagaacagtacaagatgccacacaacaggtacacctcagtgaacacttgttgaacgaacgaatgcttgcatgcatgaatgaat

SEQ ID NO: 91944 - DNA, 741 bp, Homo sapiens
ggatccagaaagagcatctgaaggatctttgggagatgagtgaaagggagggttaggtggcaggggatgcagcagggttcaggtttcctaagagcctaaaatggtgacttcagcagtaggggatttgggtgtttattgtcagcagcgtttgagaagagctgattggataaatgatgtgtgatcacacagaggagagcagtgctccctacggtggttgtgttcaccaagagccagcccagttacgaccacccttattcatggagttattcatctgacaggtcagagaaattaagaggtagcatgtatcagggtttcagccgggctttagcaaggcttttcatgattttcaggagtgcaagacagagaaatgaggactgcagaatgtggaagttgggagcaattttcagtaggtttaattgtagaaccagaggcggcagatgacccccagtgtgggcagtcacagggtgtgtctttggcattctcctatttaacattttgactaatgctataggatgagaaagaaaatcctattgtgcaatgacaatggcattaactgagagggatggtgaatatgagtgataagagactcaccacacaaggatgccttcaacaggctgcaacatyaggacatggtcaaaggtgaaatgtttcaatcctattcagaggcctccaaattaaacggctgataagtaatgttagagagatgtggcttgctgttcttttgaagcatcagcaacaata

SEQ ID NO: 91945 - DNA, 741 bp, Homo sapiens
ggatccagaaagagcatctgaaggatctttgggagatgagtgaaagggagggttaggtggcaggggatgcagcagggttcaggtttcctaagagcctaaaatggtgacttcagcagtaggggatttgggtgtttattgtcagcagcgtttgagaagagctgattggataaatgatgtgtgatcacacagaggagagcagtgctccctacggtggttgtgttcaccaagagccagcccagttacgaccacccttattcatggagttattcatctgacaggtcagagaaattaagaggtagcatgtatcagggtttcagccgggctttagcaaggcttttcatgattttcaggagtgcaagacagagaaatgaggactgcagaatgtggaagttgggagcaattttcagtaggtttaattgtagaaccagaggcggcagatgacccccagtgtgggcagtcacagggtgtgtctttggcattctcctatttaacattttgactaatgctataggatgagaaagaaaatcctattgtgcaatgacaatggcattaactgagagggatggtgaatatgagtgataagagactcaccacacaaggatgccttcaacaggctgcaacatcaggacatggtcaaaggtgaaatgtttyaatcctattcagaggcctccaaattaaacggctgataagtaatgttagagagatgtggcttgctgttcttttgaagcatcagcaacaata

SEQ ID NO: 91946 - DNA, 716 bp, Homo sapiens
gggagaagttgagctgcgatgtggttgcaataggagcctcgaccaattctccagggagctctggagctgcctgaatcaaggcaagggatcaggcttttgtattcccacactggatgccggctgctctgagggacggggcctaacctagaccagaacagctcccttcaggccaaggcaatttctggagagactcacttgtgagccacctagcagctgggaaaatgagtgctgtggtccaaaatggataatttgggcagtggtccgcagcatccactaacatagtcatcacaggccaggcgcggtggctcacgcctgtaatcccagcactttgggaggccgaggcaggtggatcacctgaggtcaggagtttaagaccagcctggccaacatggtgaaaccctgcctctactaaaaatacaaaaattagctgggcatggtggyatgcgcctgtaatcccagctactcaggagggtgaggcaggagaatcacttgaaactgggaagtggagtttgcagtgagccaagattgtgccattgcactccagcctgggcaacagagtgagactccatatcgggggggtgggggaaaagtcaacacgtctcaatacacaaaaggaaaaataagaaagagatgaacactccaaggcacgaggcgcaaagggcccacagtgtaggcttaataatgcctcgcctcaagatgtccacatcctcattctt

SEQ ID NO: 91947 - DNA, 716 bp, Homo sapiens
gggagaagttgagctgcgatgtggttgcaataggagcctcgaccaattctccagggagctctggagctgcctgaatcaaggcaagggatcaggcttttgtattcccacactggatgccggctgctctgagggacggggcctaacctagaccagaacagctcccttcaggccaaggcaatttctggagagactcacttgtgagccacctagcagctgggaaaatgagtgctgtggtccaaaatggataatttgggcagtggtccgcagcatccactaacatagtcatcacaggccaggcgcggtggctcacgcctgtaatcccagcactttgggaggccgaggcaggtggatcacctgaggtcaggagtttaagaccagcctggccaacatggtgaaaccctgcctctactaaaaatacaaaaattagctgggcatggtggtatgcgcctgtaatcccagctactcaggagggtgaggcaggagaatcacttgaaactgggaagtggagkttgcagtgagccaagattgtgccattgcactccagcctgggcaacagagtgagactccatatcgggggggtgggggaaaagtcaacacgtctcaatacacaaaaggaaaaataagaaagagatgaacactccaaggcacgaggcgcaaagggcccacagtgtaggcttaataatgcctcgcctcaagatgtccacatcctcattctt

SEQ ID NO: 91948 - DNA, 716 bp, Homo sapiens
gggagaagttgagctgcgatgtggttgcaataggagcctcgaccaattctccagggagctctggagctgcctgaatcaaggcaagggatcaggcttttgtattcccacactggatgccggctgctctgagggacggggcctaacctagaccagaacagctcccttcaggccaaggcaatttctggagagactcacttgtgagccacctagcagctgggaaaatgagtgctgtggtccaaaatggataatttgggcagtggtccgcagcatccactaacatagtcatcacaggccaggcgcggtggctcacgcctgtaatcccagcactttgggaggccgaggcaggtggatcacctgaggtcaggagtttaagaccagcctggccaacatggtgaaaccctgcctctactaaaaatacaaaaattagctgggcatggtggtatgcgcctgtaatcccagctactcaggagggtgaggcaggagaatcacttgaaactgggaagtggagtttgcagtgagccaagattgtgccattgcactccagcctgggcaacagagtgagactccatatcgggggggtgggggaaaagtcaacacgtctcaatacacaaaaggaaaaataagaaagagatgaacactccaaggmacgaggcgcaaagggcccacagtgtaggcttaataatgcctcgcctcaagatgtccacatcctcattctt

SEQ ID NO: 91949 - DNA, 716 bp, Homo sapiens
gggagaagttgagctgcgatgtggttgcaataggagcctcgaccaattctccagggagctctggagctgcctgaatcaaggcaagggatcaggcttttgtattcccacactggatgccggctgctctgagggacggggcctaacctagaccagaacagctcccttcaggccaaggcaatttctggagagactcacttgtgagccacctagcagctgggaaaatgagtgctgtggtccaaaatggataatttgggcagtggtccgcagcatccactaacatagtcatcacaggccaggcgcggtggctcacgcctgtaatcccagcactttgggaggccgaggcaggtggatcacctgaggtcaggagtttaagaccagcctggccaacatggtgaaaccctgcctctactaaaaatacaaaaattagctgggcatggtggtatgcgcctgtaatcccagctactcaggagggtgaggcaggagaatcacttgaaactgggaagtggagtttgcagtgagccaagattgtgccattgcactccagcctgggcaacagagtgagactccatatcgggggggtgggggaaaagtcaacacgtctcaatacacaaaaggaaaaataagaaagagatgaacactccaaggcacgaggcgcaaagggcccacrgtgtaggcttaataatgcctcgcctcaagatgtccacatcctcattctt

SEQ ID NO: 91950 - DNA, 857 bp, Homo sapiens
tgcagctttataaagtgaatatttcatgtggtcagacttggagtattttgcccagagtgagaataaattggctttgagtacatggaagaaaagttcttatgaaggaaagtcttaaatttcagagcatgacatcccttaatgctgcccagagctcttgtctatttcctttctgtttctcattcgttccagataagggtcttctgggtgagttgggggtctcacgactagtactaacgtggcttgtgatccctgtgagccacaactattaccacgggacattcatgaggtcacatgttgcccccaagccagggcttttttccttctgcattacttgaacaaagtgctctgcacacactgccctagggaggaagcctactcctgaaggatactggcagtggttccttggaagaacccgcttttaagatgccacattgaataaggactggtctttgtgtgagagtgctggttccgcctctggagggttgacagagcggtggatgggagcaggcatttgtcttcatgtggagactgmtatagggcatgtccaggtgacatcatctagtgggaaaagctagtcggttacttgagttagccaggtcacaccagcatacattcattcattcattcattcattcattcattcattcaacacagtggctctccactgaagctgtacccatggagcacctggggagctttataaataaatagggatgcccagactctgccccagtcagaatcttctggaggtggggcccaggcttgtgtatttctaaatacctcccttggtgattctggtgtgcatctccagtggaaaccgcccgtggtggtagaccttgggttttggtgtttggatc

SEQ ID NO: 91951 - DNA, 857 bp, Homo sapiens
tgcagctttataaagtgaatatttcatgtggtcagacttggagtattttgcccagagtgagaataaattggctttgagtacatggaagaaaagttcttatgaaggaaagtcttaaatttcagagcatgacatcccttaatgctgcccagagctcttgtctatttcctttctgtttctcattcgttccagataagggtcttctgggtgagttgggggtctcacgactagtactaacgtggcttgtgatccctgtgagccacaactattaccacgggacattcatgaggtcacatgttgcccccaagccagggcttttttccttctgcattacttgaacaaagtgctctgcacacactgccctagggaggaagcctactcctgaaggatactggcagtggttccttggaagaacccgcttttaagatgccacattgaataaggactggtctttgtgtgagagtgctggttccgcctctggagggttgacagagcggtggatgggagcaggcatttgtcttcatgtggagactgatatagggcatgtccaggtgacatcatctagtgggaaaagctagtcggttacttgagttagccrggtcacaccagcatacattcattcattcattcattcattcattcattcattcaacacagtggctctccactgaagctgtacccatggagcacctggggagctttataaataaatagggatgcccagactctgccccagtcagaatcttctggaggtggggcccaggcttgtgtatttctaaatacctcccttggtgattctggtgtgcatctccagtggaaaccgcccgtggtggtagaccttgggttttggtgtttggatc

SEQ ID NO: 91952 - DNA, 2143 bp, Homo sapiens
tggttctcataactgaatgttgatcttttttgtggccaygtgtttttcatattcccttccgctaaaacagggtcccttccttacatctgagtccctggccagggttccacaggggctggccagataaatgtaaatgaatgaagagaacaggcgtaagggaaatggaccacggcacactgtgtgttaacgcctgctgggagggtttttaattctgtaaggaaatataccctccatttttcttgaaaacgtacagtcttcttggtttatgttttgtttttcacttttaatagagacatggatacagagaaatatttctttaccataagaaaaacaacactttgcaaccgcaatgataaatgtcagctgacacttaaagctgggtaaagccctaaagatggggcatcatggaaatgttgtagatgggagagccctccccctctgcaggggcaaaggctgctcagttccaattgattgttaccacaggtaaacgtggcccagtttgaccagatctactgagttttcaagagaagctgaaaatttggatttttaaaatgttggctcagtttttaaaaagtagcactgtatgagtcaaataaaacatatttcaaggttgaatgtggcctaagagccacccgtttgcaacctctgatccagcatctagggccagctttgctcttgccagcacccctacccagctgcctgttaataaacctccctgctgctgaccccttcttgtctggacttcccccatgttttttgtttccataatcatgtcacagtgctctgccctcctgtggggacaccctcactcctaaatgtgttctggaaatgtggctgtcctctgataggtttccttaagaatggatgaaatgagttaaggcataactggtaactggctcactgttcttggcaatggaaaaatattccttgccaataatttctctcaacactttttcaggcaaagcaacatacggggtaattatttttagatcagaaataatttgggtgttataatgtcagtgtacgtaaacctggtaagattataggaaggttttaaaatgagttttgaaactagtgacatataaattaaatgttgaagtacttgcccacttattactgaaaatatcagctcaactgttgttttttttttcctttttataataagacagcaacacaaggctgggattagcctgtcagatgtgaggcctgtcagatgtgactgcagcaccttccatttagttctgctccatggtcctgcattttctttagggatggccccatcatccacacatttctgcaagccagaggcctacaggtcttcctccacaccccttcctcctctccgccatatccacccttaatatctcctggatccatttacttctcctgccctctgccattatctgctgtaggccatgatcacccagctctttggtgactacactggcctactaattatctccctgtacccactttgacctcctctctgttccttccataccctgcagccatattttcataacttaaatcttatatcaaccctttgcttaggactcccagtggctttgcgttagctagggtaaagtccaaaatctctgttattattatactttaagttctgggatacatgggcagaacatgcaggtttgttacataggtatacacctgccatggtggtttgctgcacccatcaacccgtgatctacattaggtatttctcctaatgctatccctcctgtagccccccatccccaaaaggccccagtgtgtgatgttcccctccctgtgtccatgtgttctcattgttcaactcccacttatgagtgagaacgtgcggtgtttggttttctgttcctgtgttagtttgctgagaatgatggtttccagcttcatccatgtccctgcaaaggacatgaactcatccttttttatggctgcatagtattccatggtgtgtatatgccacatcttctttatccagtctatcattgatgggcgtttgggttggtttcaagtccttgctattgtgaatagtgctgcaataaacatgtgtgcatgtgaaagaccaaaatcttcaacatcactcttaaggtcccacatggattgattcccacacacatcaccactcttatctcttcctttg

SEQ ID NO: 91953 - DNA, 2143 bp, Homo sapiens
tggttctcataactgaatgttgatcttttttgtggccacgtgtttttcatattcccttccgctaaaacagggtcccttccttacatctgagtccctggccagggttccacaggggctggccagataaatgtaaatgaatgaagagaacaggcgtaagggaaatggaccacggcacactgtgtgttaacgcctgctgggagggtttttaattctgtaaggaaatataccctccatttttcttgaaaacgtacagtcttcttggtttatgttttgtttttcacttttaatagagacatggatacagagaaatatttctttaccataagaaaaacaacactttgcaaccgcaatgataaatgtcagctgacacttaaagytgggtaaagccctaaagatggggcatcatggaaatgttgtagatgggagagccctccccctctgcaggggcaaaggctgctcagttccaattgattgttaccacaggtaaacgtggcccagtttgaccagatctactgagttttcaagagaagctgaaaatttggatttttaaaatgttggctcagtttttaaaaagtagcactgtatgagtcaaataaaacatatttcaaggttgaatgtggcctaagagccacccgtttgcaacctctgatccagcatctagggccagctttgctcttgccagcacccctacccagctgcctgttaataaacctccctgctgctgaccccttcttgtctggacttcccccatgttttttgtttccataatcatgtcacagtgctctgccctcctgtggggacaccctcactcctaaatgtgttctggaaatgtggctgtcctctgataggtttccttaagaatggatgaaatgagttaaggcataactggtaactggctcactgttcttggcaatggaaaaatattccttgccaataatttctctcaacactttttcaggcaaagcaacatacggggtaattatttttagatcagaaataatttgggtgttataatgtcagtgtacgtaaacctggtaagattataggaaggttttaaaatgagttttgaaactagtgacatataaattaaatgttgaagtacttgcccacttattactgaaaatatcagctcaactgttgttttttttttcctttttataataagacagcaacacaaggctgggattagcctgtcagatgtgaggcctgtcagatgtgactgcagcaccttccatttagttctgctccatggtcctgcattttctttagggatggccccatcatccacacatttctgcaagccagaggcctacaggtcttcctccacaccccttcctcctctccgccatatccacccttaatatctcctggatccatttacttctcctgccctctgccattatctgctgtaggccatgatcacccagctctttggtgactacactggcctactaattatctccctgtacccactttgacctcctctctgttccttccataccctgcagccatattttcataacttaaatcttatatcaaccctttgcttaggactcccagtggctttgcgttagctagggtaaagtccaaaatctctgttattattatactttaagttctgggatacatgggcagaacatgcaggtttgttacataggtatacacctgccatggtggtttgctgcacccatcaacccgtgatctacattaggtatttctcctaatgctatccctcctgtagccccccatccccaaaaggccccagtgtgtgatgttcccctccctgtgtccatgtgttctcattgttcaactcccacttatgagtgagaacgtgcggtgtttggttttctgttcctgtgttagtttgctgagaatgatggtttccagcttcatccatgtccctgcaaaggacatgaactcatccttttttatggctgcatagtattccatggtgtgtatatgccacatcttctttatccagtctatcattgatgggcgtttgggttggtttcaagtccttgctattgtgaatagtgctgcaataaacatgtgtgcatgtgaaagaccaaaatcttcaacatcactcttaaggtcccacatggattgattcccacacacatcaccactcttatctcttcctttg

SEQ ID NO: 91954 - DNA, 761 bp, Homo sapiens
tggtgtgctgcacccattaactcgtcatttacwttactttttctactgaaaatattttcttggcttcctgtcaagtaatgtgagttgcaaaaggcattgaagattggaccaactaatgaaatggaatcaggacatggtttcataaaataagagtgtttttttgtaattatttatagtttcttcctttttttatttttttaacttatttatattccaaatacggtttgtcatttagctcaactttttattttgccccacatatcttcttacggcttcttggtttaataggataataaaatttctaaagcaggctggtctatggcttccttaaattaaccctgcctcttctcttacaaaagttactaaaggcaaatataaataatcatgaccaacatataaagatatgaatgagatttacagagaataactttactcagttatatagcgttacccacaaagggaatttactagcttcaattgaaaaaaaaatcccatgacacctatgatatttacttctgtcatctccacattcaaaagaaaacaaacagattacccacatatttaatcactttttattttacaaatgctctgtaaacaaaatgcttctcagacctattcaatacaattaaaatataacatagctttgccaaaaggtgtattccaaagttatcagttagatttattaactgataaagattagcaatttaatgtgaatgttttctttagtgaatatacagaattctctcaaagttaaattatta

SEQ ID NO: 91955 - DNA, 563 bp, Homo sapiens
caccttgtcttgtaatttttaaaaaatttcccatattttcttaataaaataaaaacagaaagaactataggaatatgagtaaactttcctcctgtaaaatgcctcatgtttcatcctgacaggccaatattatttctcgtactgctatgttttgaagaagtaccacctcctcagtattatgaaatctccaggtgatgatttctatggcctcactgaaattgttcagtgttcctgataatatctgaagcacagatagtatgatttaaagacaggagaaaactattcagaattagacatgagtaatrttgtatatctcaaaatgaggccctgtttttctctttcttgaatgaaattatctagagttctctttttctagggtttgagggggaaatgtgcccaaatcatccatgagtaatattaggcaccattctgaaagtatagtgtctaaatttacaaagataacaattttttggtataatttgttggccacacccaatagacttttgttttgcaaacctaacactggtctttagaatctacccaaagacttatcattgtccaaa

SEQ ID NO: 91956 - DNA, 884 bp, Homo sapiens
tttggggtcgttctctctccttaaggatcatctgtgaacctttgaatctttgcagtctaaaaggaaatttctccaaagttcaattttcaagtagggaaaaaaaaactaagtgttggtccgcagctctgcagctgctcatcaccgccacttgagggcgctgatgaacacaaattgtcctccatccatccattggaccccgtggtctttgccctatgacccagtccagaaagttggggccttcaaagaaaggcaattctccacacactcactcagtccagggtaacacgctcctcagtgcgttttctggagttctcagtcattctcctctggagccagtcctcataagtggctcaggggacctcctcctgggatccaaagccctggatctctttagttctgagaatacactgggtgggtaggcagacagattgaagagaccaggattgagatgttttcttttgcattcctcaatatctttattttattttattttattcctttttaaagaggctcactatgatgtccaggttggtgtcgaactcctgggctcaagagatcctcctgccccaacctcctgagtagctgagactataggtgcatgcccctgaccccagctgtgttcctcaaaatccaatagacttattccgcttccttcttgacatagtgttaatygatccaactcttctcttctttttggtctcacatgacaatctggttacttcttaaggaaggggataggtgacaaggtgccaccttgggggtttctgctgaacaccgactgctccccatccctgtagcagagatggtggagattaggtggtgaggaagacttttgaaaccttaatgtatgagtcgccatgtctcagaggccactaagggacttc

SEQ ID NO: 91957 - DNA, 549 bp, Homo sapiens
cttgaaccggggagttcgaggttgcagtgagctatgatagtgccactgcactccagcctgggtaacagagcaagactctgtctaaaaaaaaaaagatccccaggtataatccagatctagtgaatcagaaactctgggggtggggccaatagtrtaggttttagaagccttccaggtgattcttctgcaagctcaaattggagaaccctgctctcagtctgctgccaaagctgtctgctccagagagtttttggtagttagccatacctctggacagtcctcttccccttcctccctcacaaatttaagtacacccttagtacttaattaactcttaggtacctagagatttgctctctgcttgtttcatgtttctatattttgtctcccagttagattgaaacccgttgaaggtacagtatgtgtgtgactccttccatctctaccccaccactgatccattttaagcatttaataaaggcaaggaaggccttcacctttattaactttttgaaaaatcagaattttcagcccacaattcactttcaa

SEQ ID NO: 91958 - DNA, 549 bp, Homo sapiens
tctctctgtctctccatttctctgtgtatttttctgtctccgtctctgtctctctgtgtctgtttctctctgtctctgtttctctttctcttgctaaggaacagctcttgccactttatagtggcaagactacttattctctgttttgaaatgcagaatatgccagggattggggtatctagcacatcacctcttcagacttcatgcactgtgcccacagtgcccctccgcaggcttgtgctgggctggacaagccttcccttcgtccctccccaagcctagattccagcgtgccctccctgcagaagctggtctcccttcccctctccctgcatgctccctactgacctcttcccgcagccagggagcatctggggcaaatgcaaacagttctktggtctgcttatttgcttttcttagtgcaaaggtggaggcagaatgtggttagtgcagccaccatggctgccaggaacaaagtcagttctggggaaggggagcgccagagcctgccagcccagcagccagccctgccggaaggcccccaagcca

SEQ ID NO: 91959 - DNA, 549 bp, Homo sapiens
tctctctgtctctccatttctctgtgtatttttctgtctccgtctctgtctctctgtgtctgtttctctctgtctctgtttctctttctcttgctaaggaacagctcttgccactttatagtggcaagactacttattctctgttttgaaatgcagaatatgccagggattggggtatctagcacatcacctcttcagacttcatgcactgtgcccacagtgcccctccgcaggcttgtgctgggctggacaagccttcccttcgtccctccccaagcctagattccagcgtgccctccctgcagaagctggtctcccttcccctctccctgcatgctccctactgacctcttcccgcagccagggagcatctggggcaaatgcaaacagttctgtggtctgcttatttgcttttcttagtgcaaaggtggaggcagaatgtgrttagtgcagccaccatggctgccaggaacaaagtcagttctggggaaggggagcgccagagcctgccagcccagcagccagccctgccggaaggcccccaagcca

SEQ ID NO: 91960 - DNA, 2216 bp, Homo sapiens
cattatcagagtgcaccaccacccactgtttccatgtcagctgctgagtgatccggcctgtcctcacactagacagcacatccaccccagaggccaccagccagctcctcgtcttgagttggcccactggtctccatcccatggacagcagctgcggtcggccaccctgctttcctgtgrctcctgctgcttcctgctgtgctctctccaatgtgttctcttcaagtccccagggaaagcacttgggaccacgtcacttcctggctcaaactgcccagtgacctccacccgatttagaatgtagtcctgcatgactcacggacgcgacccggcatgccgggcccctgccgacctcacccctctcacctccctgctatccttcccctgcatccctcctggcaaccccataccctcacccctctgtgggcatccagaaccatcccaggagtatctcgaatatgtgcggatctcggataccctgggcatgctgcctagaaagctccctgtccattcttcagggtgtgcttgggcatcatttcccactagaagcaccctgggtctctctgtgtgcctcttggtggctcatgtcctcagtcaaaacaagtgcttgtgttcgtggcatccccaagcccaagaaggcaagagtgtaaatgcttcgttcatggctgtataatgggtgctcagtaataatgtgtataatacatgaactaactgacagctcacggcctcataccaagtactcagaaagcgtggccatctggggccacctagggtaggacaaagagccctggccacttattcccatggctcctgaaagccatgctgcagcagtgtccagaactgtctattctgacacagaaaaagagaaactagccggttctctggggaatccagattttaactggacatgttccaattccctgttgtggttgctctggcctttttaaacaagcaggtaggctgtacctcaagctgatggttccctctgtctgggacacaactcccaggcacctccatggcctggcccctcacttccctggcctttgagatgactcagatgcctctcagcgggaccttcccagaccacataatttaacatctccactcccctgtccctcgctctccagcacctgatccccttctccgctctgttcccctgcacagcagttctccccctccaaggcagaagttatttgacttatttatcttgtttgctgtctgtttcctggtagggtatccactccaggggccagggtttgtgttttccgtattgttcagtgctgtacccccagtcaacccagtgtccggtacacagcaggtactcaataactgtgtgttgaatgaatgcatacaatggaagcagtgacatctagctgaggacatacggtcagagtcatgcaaattttcaggctagattcaggaagcatgcagcccagaagcagaagcagggaagctgtgttgggcaggtggcctgatgatggagagaccttcgtgaaaacagaaccacccagtcctggtctgctccatttgtcttctctctcagtgaaaatgactctaaaatcagaagtggagcaagacctcagtaatggtatgaactagttctgacacgctcatgggggaaaacaagccacattcttcggtttttcacaatcccatcaagcccccttttgccctttctttgagggttagcaggaaagccaatctccatgatttgggaaaggcctcttccccacagccatcattctagagtccctggagggtcgtgaatagcagtgccctgcaggccacttgcagtgtctccttgtcttgacccaggccagccatgaggcagcctggggctccccaggcaaacctctcaccctcttccagccctggccagagaggccgatcttgagtcctggataactggaaggtgtggttcaagaaggaggaggaaacagggagcagcctgggagctctccatcagttcagacaggcgggtccacgccggacctcctgtgctgccaagaggcttgctggaggcacaggggcatggcaagggggtccatgagaaatcccagggaatggtttgaggcaaaagtactgtggatattcaaagggagaaggagcagagaagaaggaggataccaaaaaccacggagcaatgaaagtgaccttgaatccttacaaaagtccaggttagtttaaccaaaccatggtgtattatcaaatattaa

SEQ ID NO: 91961 - DNA, 2216 bp, Homo sapiens
cattatcagagtgcaccaccacccactgtttccatgtcagctgctgagtgatccggcctgtcctcacactagacagcacatccaccccagaggccaccagccagctcctcgtcttgagttggcccactggtctccatcccatggacagcagctgcggtcggccaccctgctttcctgtgactcctgctgcttcctgctgtgctctctccaatgtgttctcttcaagtccccagggaaagcacttgggaccacgtcacttcctggctcaaactgcccagtgacctccacccgatttagaatgtagtcctgcatgactcacggacgcgacccggcatgccgggcccctgccgacctcacccctctcacctccctgctatccttcccctgcatccctcctggcaaccccataccctcacccctctgtgggcatccagaaccatcccaggagtatctcgaatatgtgcggatctcggataccctgggcatgctgcctagaaagctccctgtccattcttcagggtgtgcttgggcatcatttcccactagaagcaccctgggtctctctgtgtgcctcttggtggctcatgtcctcagtcaaaacaagtgcttgtgttcgtggcatccccaagcccaagaaggcaagaktgtaaatgcttcgttcatggctgtataatgggtgctcagtaataatgtgtataatacatgaactaactgacagctcacggcctcataccaagtactcagaaagcgtggccatctggggccacctagggtaggacaaagagccctggccacttattcccatggctcctgaaagccatgctgcagcagtgtccagaactgtctattctgacacagaaaaagagaaactagccggttctctggggaatccagattttaactggacatgttccaattccctgttgtggttgctctggcctttttaaacaagcaggtaggctgtacctcaagctgatggttccctctgtctgggacacaactcccaggcacctccatggcctggcccctcacttccctggcctttgagatgactcagatgcctctcagcgggaccttcccagaccacataatttaacatctccactcccctgtccctcgctctccagcacctgatccccttctccgctctgttcccctgcacagcagttctccccctccaaggcagaagttatttgacttatttatcttgtttgctgtctgtttcctggtagggtatccactccaggggccagggtttgtgttttccgtattgttcagtgctgtacccccagtcaacccagtgtccggtacacagcaggtactcaataactgtgtgttgaatgaatgcatacaatggaagcagtgacatctagctgaggacatacggtcagagtcatgcaaattttcaggctagattcaggaagcatgcagcccagaagcagaagcagggaagctgtgttgggcaggtggcctgatgatggagagaccttcgtgaaaacagaaccacccagtcctggtctgctccatttgtcttctctctcagtgaaaatgactctaaaatcagaagtggagcaagacctcagtaatggtatgaactagttctgacacgctcatgggggaaaacaagccacattcttcggtttttcacaatcccatcaagcccccttttgccctttctttgagggttagcaggaaagccaatctccatgatttgggaaaggcctcttccccacagccatcattctagagtccctggagggtcgtgaatagcagtgccctgcaggccacttgcagtgtctccttgtcttgacccaggccagccatgaggcagcctggggctccccaggcaaacctctcaccctcttccagccctggccagagaggccgatcttgagtcctggataactggaaggtgtggttcaagaaggaggaggaaacagggagcagcctgggagctctccatcagttcagacaggcgggtccacgccggacctcctgtgctgccaagaggcttgctggaggcacaggggcatggcaagggggtccatgagaaatcccagggaatggtttgaggcaaaagtactgtggatattcaaagggagaaggagcagagaagaaggaggataccaaaaaccacggagcaatgaaagtgaccttgaatccttacaaaagtccaggttagtttaaccaaaccatggtgtattatcaaatattaa

SEQ ID NO: 91962 - DNA, 2216 bp, Homo sapiens
cattatcagagtgcaccaccacccactgtttccatgtcagctgctgagtgatccggcctgtcctcacactagacagcacatccaccccagaggccaccagccagctcctcgtcttgagttggcccactggtctccatcccatggacagcagctgcggtcggccaccctgctttcctgtgactcctgctgcttcctgctgtgctctctccaatgtgttctcttcaagtccccagggaaagcacttgggaccacgtcacttcctggctcaaactgcccagtgacctccacccgatttagaatgtagtcctgcatgactcacggacgcgacccggcatgccgggcccctgccgacctcacccctctcacctccctgctatccttcccctgcatccctcctggcaaccccataccctcacccctctgtgggcatccagaaccatcccaggagtatctcgaatatgtgcggatctcggataccctgggcatgctgcctagaaagctccctgtccattcttcagggtgtgcttgggcatcatttcccactagaagcaccctgggtctctctgtgtgcctcttggtggctcatgtcctcagtcaaaacaagtgcttgtgttcgtggcatccccaagcccaagaaggcaagagtgtaaatgcttcgttcatggctgtataatgggtgctcagtaataatgtgtataatacatgaactaactgacagctcayggcctcataccaagtactcagaaagcgtggccatctggggccacctagggtaggacaaagagccctggccacttattcccatggctcctgaaagccatgctgcagcagtgtccagaactgtctattctgacacagaaaaagagaaactagccggttctctggggaatccagattttaactggacatgttccaattccctgttgtggttgctctggcctttttaaacaagcaggtaggctgtacctcaagctgatggttccctctgtctgggacacaactcccaggcacctccatggcctggcccctcacttccctggcctttgagatgactcagatgcctctcagcgggaccttcccagaccacataatttaacatctccactcccctgtccctcgctctccagcacctgatccccttctccgctctgttcccctgcacagcagttctccccctccaaggcagaagttatttgacttatttatcttgtttgctgtctgtttcctggtagggtatccactccaggggccagggtttgtgttttccgtattgttcagtgctgtacccccagtcaacccagtgtccggtacacagcaggtactcaataactgtgtgttgaatgaatgcatacaatggaagcagtgacatctagctgaggacatacggtcagagtcatgcaaattttcaggctagattcaggaagcatgcagcccagaagcagaagcagggaagctgtgttgggcaggtggcctgatgatggagagaccttcgtgaaaacagaaccacccagtcctggtctgctccatttgtcttctctctcagtgaaaatgactctaaaatcagaagtggagcaagacctcagtaatggtatgaactagttctgacacgctcatgggggaaaacaagccacattcttcggtttttcacaatcccatcaagcccccttttgccctttctttgagggttagcaggaaagccaatctccatgatttgggaaaggcctcttccccacagccatcattctagagtccctggagggtcgtgaatagcagtgccctgcaggccacttgcagtgtctccttgtcttgacccaggccagccatgaggcagcctggggctccccaggcaaacctctcaccctcttccagccctggccagagaggccgatcttgagtcctggataactggaaggtgtggttcaagaaggaggaggaaacagggagcagcctgggagctctccatcagttcagacaggcgggtccacgccggacctcctgtgctgccaagaggcttgctggaggcacaggggcatggcaagggggtccatgagaaatcccagggaatggtttgaggcaaaagtactgtggatattcaaagggagaaggagcagagaagaaggaggataccaaaaaccacggagcaatgaaagtgaccttgaatccttacaaaagtccaggttagtttaaccaaaccatggtgtattatcaaatattaa

SEQ ID NO: 91963 - DNA, 2216 bp, Homo sapiens
cattatcagagtgcaccaccacccactgtttccatgtcagctgctgagtgatccggcctgtcctcacactagacagcacatccaccccagaggccaccagccagctcctcgtcttgagttggcccactggtctccatcccatggacagcagctgcggtcggccaccctgctttcctgtgactcctgctgcttcctgctgtgctctctccaatgtgttctcttcaagtccccagggaaagcacttgggaccacgtcacttcctggctcaaactgcccagtgacctccacccgatttagaatgtagtcctgcatgactcacggacgcgacccggcatgccgggcccctgccgacctcacccctctcacctccctgctatccttcccctgcatccctcctggcaaccccataccctcacccctctgtgggcatccagaaccatcccaggagtatctcgaatatgtgcggatctcggataccctgggcatgctgcctagaaagctccctgtccattcttcagggtgtgcttgggcatcatttcccactagaagcaccctgggtctctctgtgtgcctcttggtggctcatgtcctcagtcaaaacaagtgcttgtgttcgtggcatccccaagcccaagaaggcaagagtgtaaatgcttcgttcatggctgtataatgggtgctcagtaataatgtgtataatacatgaactaactgacagctcacggcytcataccaagtactcagaaagcgtggccatctggggccacctagggtaggacaaagagccctggccacttattcccatggctcctgaaagccatgctgcagcagtgtccagaactgtctattctgacacagaaaaagagaaactagccggttctctggggaatccagattttaactggacatgttccaattccctgttgtggttgctctggcctttttaaacaagcaggtaggctgtacctcaagctgatggttccctctgtctgggacacaactcccaggcacctccatggcctggcccctcacttccctggcctttgagatgactcagatgcctctcagcgggaccttcccagaccacataatttaacatctccactcccctgtccctcgctctccagcacctgatccccttctccgctctgttcccctgcacagcagttctccccctccaaggcagaagttatttgacttatttatcttgtttgctgtctgtttcctggtagggtatccactccaggggccagggtttgtgttttccgtattgttcagtgctgtacccccagtcaacccagtgtccggtacacagcaggtactcaataactgtgtgttgaatgaatgcatacaatggaagcagtgacatctagctgaggacatacggtcagagtcatgcaaattttcaggctagattcaggaagcatgcagcccagaagcagaagcagggaagctgtgttgggcaggtggcctgatgatggagagaccttcgtgaaaacagaaccacccagtcctggtctgctccatttgtcttctctctcagtgaaaatgactctaaaatcagaagtggagcaagacctcagtaatggtatgaactagttctgacacgctcatgggggaaaacaagccacattcttcggtttttcacaatcccatcaagcccccttttgccctttctttgagggttagcaggaaagccaatctccatgatttgggaaaggcctcttccccacagccatcattctagagtccctggagggtcgtgaatagcagtgccctgcaggccacttgcagtgtctccttgtcttgacccaggccagccatgaggcagcctggggctccccaggcaaacctctcaccctcttccagccctggccagagaggccgatcttgagtcctggataactggaaggtgtggttcaagaaggaggaggaaacagggagcagcctgggagctctccatcagttcagacaggcgggtccacgccggacctcctgtgctgccaagaggcttgctggaggcacaggggcatggcaagggggtccatgagaaatcccagggaatggtttgaggcaaaagtactgtggatattcaaagggagaaggagcagagaagaaggaggataccaaaaaccacggagcaatgaaagtgaccttgaatccttacaaaagtccaggttagtttaaccaaaccatggtgtattatcaaatattaa

SEQ ID NO: 91964 - DNA, 2216 bp, Homo sapiens
cattatcagagtgcaccaccacccactgtttccatgtcagctgctgagtgatccggcctgtcctcacactagacagcacatccaccccagaggccaccagccagctcctcgtcttgagttggcccactggtctccatcccatggacagcagctgcggtcggccaccctgctttcctgtgactcctgctgcttcctgctgtgctctctccaatgtgttctcttcaagtccccagggaaagcacttgggaccacgtcacttcctggctcaaactgcccagtgacctccacccgatttagaatgtagtcctgcatgactcacggacgcgacccggcatgccgggcccctgccgacctcacccctctcacctccctgctatccttcccctgcatccctcctggcaaccccataccctcacccctctgtgggcatccagaaccatcccaggagtatctcgaatatgtgcggatctcggataccctgggcatgctgcctagaaagctccctgtccattcttcagggtgtgcttgggcatcatttcccactagaagcaccctgggtctctctgtgtgcctcttggtggctcatgtcctcagtcaaaacaagtgcttgtgttcgtggcatccccaagcccaagaaggcaagagtgtaaatgcttcgttcatggctgtataatgggtgctcagtaataatgtgtataatacatgaactaactgacagctcacggcctcataccaagtactcagaaagygtggccatctggggccacctagggtaggacaaagagccctggccacttattcccatggctcctgaaagccatgctgcagcagtgtccagaactgtctattctgacacagaaaaagagaaactagccggttctctggggaatccagattttaactggacatgttccaattccctgttgtggttgctctggcctttttaaacaagcaggtaggctgtacctcaagctgatggttccctctgtctgggacacaactcccaggcacctccatggcctggcccctcacttccctggcctttgagatgactcagatgcctctcagcgggaccttcccagaccacataatttaacatctccactcccctgtccctcgctctccagcacctgatccccttctccgctctgttcccctgcacagcagttctccccctccaaggcagaagttatttgacttatttatcttgtttgctgtctgtttcctggtagggtatccactccaggggccagggtttgtgttttccgtattgttcagtgctgtacccccagtcaacccagtgtccggtacacagcaggtactcaataactgtgtgttgaatgaatgcatacaatggaagcagtgacatctagctgaggacatacggtcagagtcatgcaaattttcaggctagattcaggaagcatgcagcccagaagcagaagcagggaagctgtgttgggcaggtggcctgatgatggagagaccttcgtgaaaacagaaccacccagtcctggtctgctccatttgtcttctctctcagtgaaaatgactctaaaatcagaagtggagcaagacctcagtaatggtatgaactagttctgacacgctcatgggggaaaacaagccacattcttcggtttttcacaatcccatcaagcccccttttgccctttctttgagggttagcaggaaagccaatctccatgatttgggaaaggcctcttccccacagccatcattctagagtccctggagggtcgtgaatagcagtgccctgcaggccacttgcagtgtctccttgtcttgacccaggccagccatgaggcagcctggggctccccaggcaaacctctcaccctcttccagccctggccagagaggccgatcttgagtcctggataactggaaggtgtggttcaagaaggaggaggaaacagggagcagcctgggagctctccatcagttcagacaggcgggtccacgccggacctcctgtgctgccaagaggcttgctggaggcacaggggcatggcaagggggtccatgagaaatcccagggaatggtttgaggcaaaagtactgtggatattcaaagggagaaggagcagagaagaaggaggataccaaaaaccacggagcaatgaaagtgaccttgaatccttacaaaagtccaggttagtttaaccaaaccatggtgtattatcaaatattaa

SEQ ID NO: 91965 - DNA, 2216 bp, Homo sapiens
cattatcagagtgcaccaccacccactgtttccatgtcagctgctgagtgatccggcctgtcctcacactagacagcacatccaccccagaggccaccagccagctcctcgtcttgagttggcccactggtctccatcccatggacagcagctgcggtcggccaccctgctttcctgtgactcctgctgcttcctgctgtgctctctccaatgtgttctcttcaagtccccagggaaagcacttgggaccacgtcacttcctggctcaaactgcccagtgacctccacccgatttagaatgtagtcctgcatgactcacggacgcgacccggcatgccgggcccctgccgacctcacccctctcacctccctgctatccttcccctgcatccctcctggcaaccccataccctcacccctctgtgggcatccagaaccatcccaggagtatctcgaatatgtgcggatctcggataccctgggcatgctgcctagaaagctccctgtccattcttcagggtgtgcttgggcatcatttcccactagaagcaccctgggtctctctgtgtgcctcttggtggctcatgtcctcagtcaaaacaagtgcttgtgttcgtggcatccccaagcccaagaaggcaagagtgtaaatgcttcgttcatggctgtataatgggtgctcagtaataatgtgtataatacatgaactaactgacagctcacggcctcataccaagtactcagaaagcgtggccatctggggccacctagggtaggacaaagagccctggccacttattcccatggctcctgaaagccatgctgcagcagtgtccagaactgtctattctgacacagaaaaagagaaactagccrgttctctggggaatccagattttaactggacatgttccaattccctgttgtggttgctctggcctttttaaacaagcaggtaggctgtacctcaagctgatggttccctctgtctgggacacaactcccaggcacctccatggcctggcccctcacttccctggcctttgagatgactcagatgcctctcagcgggaccttcccagaccacataatttaacatctccactcccctgtccctcgctctccagcacctgatccccttctccgctctgttcccctgcacagcagttctccccctccaaggcagaagttatttgacttatttatcttgtttgctgtctgtttcctggtagggtatccactccaggggccagggtttgtgttttccgtattgttcagtgctgtacccccagtcaacccagtgtccggtacacagcaggtactcaataactgtgtgttgaatgaatgcatacaatggaagcagtgacatctagctgaggacatacggtcagagtcatgcaaattttcaggctagattcaggaagcatgcagcccagaagcagaagcagggaagctgtgttgggcaggtggcctgatgatggagagaccttcgtgaaaacagaaccacccagtcctggtctgctccatttgtcttctctctcagtgaaaatgactctaaaatcagaagtggagcaagacctcagtaatggtatgaactagttctgacacgctcatgggggaaaacaagccacattcttcggtttttcacaatcccatcaagcccccttttgccctttctttgagggttagcaggaaagccaatctccatgatttgggaaaggcctcttccccacagccatcattctagagtccctggagggtcgtgaatagcagtgccctgcaggccacttgcagtgtctccttgtcttgacccaggccagccatgaggcagcctggggctccccaggcaaacctctcaccctcttccagccctggccagagaggccgatcttgagtcctggataactggaaggtgtggttcaagaaggaggaggaaacagggagcagcctgggagctctccatcagttcagacaggcgggtccacgccggacctcctgtgctgccaagaggcttgctggaggcacaggggcatggcaagggggtccatgagaaatcccagggaatggtttgaggcaaaagtactgtggatattcaaagggagaaggagcagagaagaaggaggataccaaaaaccacggagcaatgaaagtgaccttgaatccttacaaaagtccaggttagtttaaccaaaccatggtgtattatcaaatattaa

SEQ ID NO: 91966 - DNA, 2216 bp, Homo sapiens
cattatcagagtgcaccaccacccactgtttccatgtcagctgctgagtgatccggcctgtcctcacactagacagcacatccaccccagaggccaccagccagctcctcgtcttgagttggcccactggtctccatcccatggacagcagctgcggtcggccaccctgctttcctgtgactcctgctgcttcctgctgtgctctctccaatgtgttctcttcaagtccccagggaaagcacttgggaccacgtcacttcctggctcaaactgcccagtgacctccacccgatttagaatgtagtcctgcatgactcacggacgcgacccggcatgccgggcccctgccgacctcacccctctcacctccctgctatccttcccctgcatccctcctggcaaccccataccctcacccctctgtgggcatccagaaccatcccaggagtatctcgaatatgtgcggatctcggataccctgggcatgctgcctagaaagctccctgtccattcttcagggtgtgcttgggcatcatttcccactagaagcaccctgggtctctctgtgtgcctcttggtggctcatgtcctcagtcaaaacaagtgcttgtgttcgtggcatccccaagcccaagaaggcaagagtgtaaatgcttcgttcatggctgtataatgggtgctcagtaataatgtgtataatacatgaactaactgacagctcacggcctcataccaagtactcagaaagcgtggccatctggggccacctagggtaggacaaagagccctggccacttattcccatggctcctgaaagccatgctgcagcagtgtccagaactgtctattctgacacagaaaaagagaaactagccggttctctggggaatccagattttaactggacatgttccaattccctgttgtggttgctctggcctttttaaacaagcaggtaggctgtacctcaagctgatggttccctctgtctgggacacaactcccaggcacctccatggcctggcccctcacttccctggcctttgagatgactcagatgcctctcagcgggaccttcccagaccacataatttaacatctccactcccctgtccctcgctctccagcacctgatccccttctccgctctgttcccctgcacagcagttctccccctccaaggcagaagttatttgacttatttatcttgtttgctgtctgtttcctggtagggtatccactccaggggccagggtttgtgttttccgtattgttcagtgctgtacccccagtcaacccagtgtccggtacacagcaggtactcaataactgtgtgttgaatgaatgcatacaatggaagcagtgacatctagctgaggacatacggtcagagtcatgcaaattttcaggctagattcaggaagcatgcagcccagaagcagaagcagggaagctgtgttgggcaggtggcctgatgatggagagaccttcgtgaaaacagaaccacccagtcctggtctgctccatttgtcttctctctcagtgaaaatgactctaaaatcagaagtggagcaagacctcagtaatggtatgaactagttctgacacgctcatgggggaaaacaagccacattcttcggtttttcacaatcccatcaagcccccttttgccctttctttgagggttagcaggaaagccaatctccatgatttgggaaaggcctcttccccacagccatcattctagagtccctggagggtygtgaatagcagtgccctgcaggccacttgcagtgtctccttgtcttgacccaggccagccatgaggcagcctggggctccccaggcaaacctctcaccctcttccagccctggccagagaggccgatcttgagtcctggataactggaaggtgtggttcaagaaggaggaggaaacagggagcagcctgggagctctccatcagttcagacaggcgggtccacgccggacctcctgtgctgccaagaggcttgctggaggcacaggggcatggcaagggggtccatgagaaatcccagggaatggtttgaggcaaaagtactgtggatattcaaagggagaaggagcagagaagaaggaggataccaaaaaccacggagcaatgaaagtgaccttgaatccttacaaaagtccaggttagtttaaccaaaccatggtgtattatcaaatattaa

SEQ ID NO: 91967 - DNA, 2216 bp, Homo sapiens
cattatcagagtgcaccaccacccactgtttccatgtcagctgctgagtgatccggcctgtcctcacactagacagcacatccaccccagaggccaccagccagctcctcgtcttgagttggcccactggtctccatcccatggacagcagctgcggtcggccaccctgctttcctgtgactcctgctgcttcctgctgtgctctctccaatgtgttctcttcaagtccccagggaaagcacttgggaccacgtcacttcctggctcaaactgcccagtgacctccacccgatttagaatgtagtcctgcatgactcacggacgcgacccggcatgccgggcccctgccgacctcacccctctcacctccctgctatccttcccctgcatccctcctggcaaccccataccctcacccctctgtgggcatccagaaccatcccaggagtatctcgaatatgtgcggatctcggataccctgggcatgctgcctagaaagctccctgtccattcttcagggtgtgcttgggcatcatttcccactagaagcaccctgggtctctctgtgtgcctcttggtggctcatgtcctcagtcaaaacaagtgcttgtgttcgtggcatccccaagcccaagaaggcaagagtgtaaatgcttcgttcatggctgtataatgggtgctcagtaataatgtgtataatacatgaactaactgacagctcacggcctcataccaagtactcagaaagcgtggccatctggggccacctagggtaggacaaagagccctggccacttattcccatggctcctgaaagccatgctgcagcagtgtccagaactgtctattctgacacagaaaaagagaaactagccggttctctggggaatccagattttaactggacatgttccaattccctgttgtggttgctctggcctttttaaacaagcaggtaggctgtacctcaagctgatggttccctctgtctgggacacaactcccaggcacctccatggcctggcccctcacttccctggcctttgagatgactcagatgcctctcagcgggaccttcccagaccacataatttaacatctccactcccctgtccctcgctctccagcacctgatccccttctccgctctgttcccctgcacagcagttctccccctccaaggcagaagttatttgacttatttatcttgtttgctgtctgtttcctggtagggtatccactccaggggccagggtttgtgttttccgtattgttcagtgctgtacccccagtcaacccagtgtccggtacacagcaggtactcaataactgtgtgttgaatgaatgcatacaatggaagcagtgacatctagctgaggacatacggtcagagtcatgcaaattttcaggctagattcaggaagcatgcagcccagaagcagaagcagggaagctgtgttgggcaggtggcctgatgatggagagaccttcgtgaaaacagaaccacccagtcctggtctgctccatttgtcttctctctcagtgaaaatgactctaaaatcagaagtggagcaagacctcagtaatggtatgaactagttctgacacgctcatgggggaaaacaagccacattcttcggtttttcacaatcccatcaagcccccttttgccctttctttgagggttagcaggaaagccaatctccatgatttgggaaaggcctcttccccacagccatcattctagagtccctggagggtcgtgaatagcagtgccctgcaggccacttgcagtgtctccttgtcttgacccaggccagccatgaggcagcctggggctccccaggcaaacctctcaccctcttccagccctggccagagaggccgatcttgagtcctggataactggaaggtgtggttcaagaaggaggaggaaacagggagcagcctgggagctctccatcagttcagacaggcgggtccacgccggacctcctgtgctgccaagaggcttgctggaggcacaggggcatggcaagggggtccatgagaaatcccagggaatggtttgaggcaaaagtactgtggatattcaaagggagaaggagcagagaagaaggaggataccaaaaaccacggagcaatgaaagtgaccttgartccttacaaaagtccaggttagtttaaccaaaccatggtgtattatcaaatattaa

SEQ ID NO: 91968 - DNA, 1320 bp, Homo sapiens
caccccccagacactctgttccgcctgctggttgggatttccttctggcacctacccatagacctgccccttgaagggactttgacctgtagaaggtaaccagtctatacccaactgtgtcaaaagatatcccaggaaaaccagcaagtgaaccagtaagagaaatgcaagcaaactacagaagccaagaccaggaatgggggctgggcccacgatgtgaagcatctccaacaacagaccaagaccaaggaacctggtcagattcagaaagaaatggagagacattgaagaatcagacttagatttatctagaagcagcgtaaaggacagatgtgtgatggggtagaggtaaggggctacagcagtggttagttctagcaactataaatcacctgggacaattttttttttaatttaatgcctagatcccactttcagagatgactttcacagatctgagggacatatttttttatttaccacaagagtcttaactggaacggaaaatcttcaggaaaaatatgcccctaaaacccagctaaggagtagcatactaattcttttcaaagcagtcaactaaaaagctatttgcagggttaaattgccttccctgttttctccctgggtccctggttccttctctctcatttttccaccggatcctgcatgagggtccatcattcttgtatcttctactcaccagccccccagactcagctaccacttggtcaaccaccctcatgctcagtaactaascttggctctggttccaaattctgcatttgtcctccaggctcaatttgatatttactcactgttttcctggtaccagccccagcaagccactatccccagactgcgaacagaggaacagggagggatccgagaggcattacaaaaaggaaacatttgttttggcaactgatgggatgtgacaggatatgattgcaacattacaattaggagaaagaagagtaagatttcattgaacaaccaagaattcttgcagcttattgaaaacctctgagaacatggtgtatacagtctgtaagaagaaaaatacttgctaggctgcatgtctttagctgtaggaggatttatgtttcaggtaatgatgtgatcgtgatggttaactatgagaggagaatgaattggcaggcgtggcaggcagagcagccacctgtcaaaaggaaaagataatagaaagagattagtaaacccagagtggggaggattagaaccgtgcaggaaaaggctcagtgtgaaggagtatactggggtttgacttgaaccataatttgagctgagtgagccttctct

SEQ ID NO: 91969 - DNA, 1320 bp, Homo sapiens
caccccccagacactctgttccgcctgctggttgggatttccttctggcacctacccatagacctgccccttgaagggactttgacctgtagaaggtaaccagtctatacccaactgtgtcaaaagatatcccaggaaaaccagcaagtgaaccagtaagagaaatgcaagcaaactacagaagccaagaccaggaatgggggctgggcccacgatgtgaagcatctccaacaacagaccaagaccaaggaacctggtcagattcagaaagaaatggagagacattgaagaatcagacttagatttatctagaagcagcgtaaaggacagatgtgtgatggggtagaggtaaggggctacagcagtggttagttctagcaactataaatcacctgggacaattttttttttaatttaatgcctagatcccactttcagagatgactttcacagatctgagggacatatttttttatttaccacaagagtcttaactggaacggaaaatcttcaggaaaaatatgcccctaaaacccagctaaggagtagcatactaattcttttcaaagcagtcaactaaaaagctatttgcagggttaaattgccttccctgttttctccctgggtccctggttccttctctctcatttttccaccggatcctgcatgagggtccatcattcttgtatcttctactcaccagccccccagactcagctaccacttggtcaaccaccctcatgctcagtaactaaccttggctctggttccaaattctgcatttgtcctccaggctcaatttgatatttactcactgttttcctggtaccagccccagcaagccactatccccagactgcgaacagaggaacagggagggatcygagaggcattacaaaaaggaaacatttgttttggcaactgatgggatgtgacaggatatgattgcaacattacaattaggagaaagaagagtaagatttcattgaacaaccaagaattcttgcagcttattgaaaacctctgagaacatggtgtatacagtctgtaagaagaaaaatacttgctaggctgcatgtctttagctgtaggaggatttatgtttcaggtaatgatgtgatcgtgatggttaactatgagaggagaatgaattggcaggcgtggcaggcagagcagccacctgtcaaaaggaaaagataatagaaagagattagtaaacccagagtggggaggattagaaccgtgcaggaaaaggctcagtgtgaaggagtatactggggtttgacttgaaccataatttgagctgagtgagccttctct

SEQ ID NO: 91970 - DNA, 1320 bp, Homo sapiens
caccccccagacactctgttccgcctgctggttgggatttccttctggcacctacccatagacctgccccttgaagggactttgacctgtagaaggtaaccagtctatacccaactgtgtcaaaagatatcccaggaaaaccagcaagtgaaccagtaagagaaatgcaagcaaactacagaagccaagaccaggaatgggggctgggcccacgatgtgaagcatctccaacaacagaccaagaccaaggaacctggtcagattcagaaagaaatggagagacattgaagaatcagacttagatttatctagaagcagcgtaaaggacagatgtgtgatggggtagaggtaaggggctacagcagtggttagttctagcaactataaatcacctgggacaattttttttttaatttaatgcctagatcccactttcagagatgactttcacagatctgagggacatatttttttatttaccacaagagtcttaactggaacggaaaatcttcaggaaaaatatgcccctaaaacccagctaaggagtagcatactaattcttttcaaagcagtcaactaaaaagctatttgcagggttaaattgccttccctgttttctccctgggtccctggttccttctctctcatttttccaccggatcctgcatgagggtccatcattcttgtatcttctactcaccagccccccagactcagctaccacttggtcaaccaccctcatgctcagtaactaaccttggctctggttccaaattctgcatttgtcctccaggctcaatttgatatttactcactgttttcctggtaccagccccagcaagccactatccccagactgcgaacagaggaacagggagggatccgagaggcattrcaaaaaggaaacatttgttttggcaactgatgggatgtgacaggatatgattgcaacattacaattaggagaaagaagagtaagatttcattgaacaaccaagaattcttgcagcttattgaaaacctctgagaacatggtgtatacagtctgtaagaagaaaaatacttgctaggctgcatgtctttagctgtaggaggatttatgtttcaggtaatgatgtgatcgtgatggttaactatgagaggagaatgaattggcaggcgtggcaggcagagcagccacctgtcaaaaggaaaagataatagaaagagattagtaaacccagagtggggaggattagaaccgtgcaggaaaaggctcagtgtgaaggagtatactggggtttgacttgaaccataatttgagctgagtgagccttctct

SEQ ID NO: 91971 - DNA, 1512 bp, Homo sapiens
tttacaatttgaagtttgatttttggaagcttgtcaaatatgtcaaaggtttaaagtaatcataacaggaacacagattactgtaaaaataacaagcatttatttagccaaagtgataattaaaagggtttaaaaaaaaaacaaaactttactcttctagaggagattcaatttttcaaacaatcaagacagcatgaaacataatttgtctctccttctctccactcattttctctctctctgcagtctacataaagggtgaagaataatattttactgtctctattaatactatgtaaaattcttcttcaaaagagaaaaacaaattttacttttgtacctttttattgtcaatactaaatccaataaaaccttatgaataaatccatccaatctcatccagcttttgaccatacaagttaagatttccataaaccttttataacctcttacaacatttttttctatttgtccttttttgaactatttttatctatttagttttatttatatcatctcttcatttggaaacatctttaaataacctctcaactaaaccaaataacttttygtataacaaaaactacatcttttatatttttagatgaaaatcgttacataatttttaagaaagaaatatttcctcaatttctaaagtaacagatttagtaaatatttgtttattaataaatatttaacatataaatatatttacaataaatagtatgtattataaataatacataattcatgcatttagcaaagtttttttataccatataaaaataatatgctgaagtatataaacttaaaattacatctatgtttaataattaatattttgatattttaacttagagtattttatgattatgtactacttaatttaaaatagcatgaccttaatattttgagttattaaaaaaaatttgaaactccgatataggtatcctccctaatgtcttccccagttgtgggtaccaagtacccacgtggcacccaggatgactatgaaaagcagaggtcatctgggtcctgaatttacatatagctcgggatagaagatagaactgtgaagacagtgcctgaaggatctaaactctcccagaatggccaaaaggcaaagctgggccaggaaggatagggccatattgggcttatctctgacttgcagctgatgtcacaggtgctgtggccacacatgtccctaggcctcaccatagtcatctgcctagacttcagaatctaaagtctcgaaaccaaagacataaggtcataaacaggacaagcataaaaaatactacagaaggagcagttttatacccttaaaacatctattagagacaatataaacctgttgaatcactaaatccaggcaaaaatgtctgcattatatttactattaaaaattttgaagacatatgctattttattttaccaacaattttaaagctagttttatttaccaaatatcatcttagatcagagaaatatcacatacatataacacat

SEQ ID NO: 91972 - DNA, 750 bp, Homo sapiens
acaaaggtaagactcgttatgtaaatttaaaacaatactaagagtttctagtgactcagttctccttcttttcaggatgcacaaaggcaaacacccttatgaaaggagattttctttatatataaatttattttatgaaagaatttcaaaatagccaactaaatgccagaaagtggtattgtggagactgttgggttcaacaggcagtgttcttaactcctgtttcttggtaaaacttactgagtttaaggcaaagcccattaagcaacagggtaaagaaagcatcctctatgcatggactcagcatggatagctctgaaaaaataagcaagcctaccttgcctgagggtctatattttataaacatttattttgcattcttctagcccctagagtggtatagtaactaacacaaaaactaacagaattaatttttattatcaattagttgtttcagctttttatttttctttcataaaaagctttttaagagtggcaacaaaaataytgtaattttttttagaaacttctgcatatcaatagatgtatctgagttaaactaatttgggagcccttatccataaaagtactttttaaagtgcactgttgttcatttggaatgttttgctgtacttttaaattatctttagaaggattttaccagttctgtaagcatttggtgtttgtggagcccagtacaggtaggtgtagccaaaaggtacagtgctccatttttcacaaattaaggat

SEQ ID NO: 91973 - DNA, 1469 bp, Homo sapiens
taaagagaataatacgaaactcatataaatttttaagataaaacatgagtcctcaaggaaatttactygtgctagataactggagaattcatctacttattttggaaaagttacagaatccctaggttgcacacaggctgaagtttctttttgctttggtatcctgattttgctgatagaaaatacaaagtactcccagtaaaggcagatattttgatgccctggaaataataagaatttaaaaagcgtggtatgaacaatgactggtatttaccacatttatgtccaccattttattatgcaaataacttataacttctaatttaggcacactttaagaatggtcagagtgtttccccatcaagaaaacaaattattattattattattattattattatcattttgagacagaatctcactctgttgctcaggctggagtgcagtggcgtgatcttggctcactgcaacctccttctcccaggttcaagtgattctcctgcctcagtctcctgagtagcagggattacaggtgcacactaccatgcccatctaatttttgtatttttagtagaggtggggtttcaccatgttggccaggctggtctcaaactcctgatttcaaaggaccctcccgtctcggtctcccagtgttctgggattacaggcgtgagccaccgcacctggcctaggaaaataaactgttttggagagcagtctttttttatttatttactttatttaattttttttaactaatctgtatctagagctccataaaaagttctatgataaaaataaggataatgatgataataataaggatgccacttattatcaagttgaaccctccacctcctgagctcaagcgatcaaaaaaggtaacattgctcaagcaattaaaaaaggcaacattttatcaaatattttatggtgactgcctcttttgtaaaactaatcattcaacgtgaaatccacacctaacttagaatgtgtttatcatctgtctccacccactggaatgtaagctccctgaaggaaaggatgatcttgttcattttgtttaccaatgtatcttggggacttggtgcataatagaagctcaacaaatattaaacacatgaatgagtgactggtcaacttatccagccttctgcctcctcataagctcctcctttccctcttgctaaaaaccagttgatttcctacttttaaaaaatatggaaccaacttttctttctaattctttgtctctgcaaagtcttctctacaaaccagcatcatccaatagaaatataatgtgaaccaaatacataattttaaaagtgtctagtgtccatttaagaagtaaacatgaataaaattaattgtaataaaatttatttaatccagcatatccaagatactatcatttcaacatgtaattatacagaaattattgatgagatattgacattattttttgtact

SEQ ID NO: 91974 - DNA, 932 bp, Homo sapiens
aaagaggggagaattgggctgatccaaagctatccaaaaaactgtcctrcaggacgtcatggagatttttctttccttcttttttttttttcttttaagacagggtctcactctgtcacccaggctggaatgcagtggcaccatcacagttcactcccacttccacctgccaggttcaagcagtcctcccatcacagtctcccaagtagctgggactacaggcacacaccaccacgcatgtctaatttttgtatctttagtagagacgggattttgccaggttgtccaggctggtttcaaacttctggacgtaagaaatccactaggcttggcctccaaaaatgctgggattacaggcttgagccaccgccctcggcagggattttctgataatctgtcaatgaagtcgttccaaactctcccaaccccccaaaatatgtttcagtaactttccaatttttatacatttgccccatttagttatagcttcatttccacatatactacctggagctattatgtatcataattcttaactaatcaaaatgcttttagtcctttgggattattaaccagatctgttgaaaatttctagtaattaatgttatactctccattatacttggtacagactcttctgtacattttcatccagagagccttctttattgtgggttaaggaaggaaactagcccctgagctccagtaatcctatcaatgcttctccagtgtcagataagtcacattgctatcattttctgtgtcagaaattaaccaccattcaatggccttgaaaaagaatgagattattgacttcaccattgatttaagcaacaggggaagtaaatgaagaatgaagtaattatgtctttaatctcttccataggcctggaagatttattccagtgtgaaaaatcatactggaagtcctt

SEQ ID NO: 91975 - DNA, 932 bp, Homo sapiens
aaagaggggagaattgggctgatccaaagctatccaaaaaactgtcctacaggacgtcatkgagatttttctttccttcttttttttttttcttttaagacagggtctcactctgtcacccaggctggaatgcagtggcaccatcacagttcactcccacttccacctgccaggttcaagcagtcctcccatcacagtctcccaagtagctgggactacaggcacacaccaccacgcatgtctaatttttgtatctttagtagagacgggattttgccaggttgtccaggctggtttcaaacttctggacgtaagaaatccactaggcttggcctccaaaaatgctgggattacaggcttgagccaccgccctcggcagggattttctgataatctgtcaatgaagtcgttccaaactctcccaaccccccaaaatatgtttcagtaactttccaatttttatacatttgccccatttagttatagcttcatttccacatatactacctggagctattatgtatcataattcttaactaatcaaaatgcttttagtcctttgggattattaaccagatctgttgaaaatttctagtaattaatgttatactctccattatacttggtacagactcttctgtacattttcatccagagagccttctttattgtgggttaaggaaggaaactagcccctgagctccagtaatcctatcaatgcttctccagtgtcagataagtcacattgctatcattttctgtgtcagaaattaaccaccattcaatggccttgaaaaagaatgagattattgacttcaccattgatttaagcaacaggggaagtaaatgaagaatgaagtaattatgtctttaatctcttccataggcctggaagatttattccagtgtgaaaaatcatactggaagtcctt

SEQ ID NO: 91976 - DNA, 932 bp, Homo sapiens
aaagaggggagaattgggctgatccaaagctatccaaaaaactgtcctacaggacgtcatggagatttttctttccttcttttttttttttcttttaagacagggtctcactctgtcacccaggctggaatgcagtggcaccatcacagttcactcccacttccacctgccaggttcaagcrgtcctcccatcacagtctcccaagtagctgggactacaggcacacaccaccacgcatgtctaatttttgtatctttagtagagacgggattttgccaggttgtccaggctggtttcaaacttctggacgtaagaaatccactaggcttggcctccaaaaatgctgggattacaggcttgagccaccgccctcggcagggattttctgataatctgtcaatgaagtcgttccaaactctcccaaccccccaaaatatgtttcagtaactttccaatttttatacatttgccccatttagttatagcttcatttccacatatactacctggagctattatgtatcataattcttaactaatcaaaatgcttttagtcctttgggattattaaccagatctgttgaaaatttctagtaattaatgttatactctccattatacttggtacagactcttctgtacattttcatccagagagccttctttattgtgggttaaggaaggaaactagcccctgagctccagtaatcctatcaatgcttctccagtgtcagataagtcacattgctatcattttctgtgtcagaaattaaccaccattcaatggccttgaaaaagaatgagattattgacttcaccattgatttaagcaacaggggaagtaaatgaagaatgaagtaattatgtctttaatctcttccataggcctggaagatttattccagtgtgaaaaatcatactggaagtcctt

SEQ ID NO: 91977 - DNA, 932 bp, Homo sapiens
aaagaggggagaattgggctgatccaaagctatccaaaaaactgtcctacaggacgtcatggagatttttctttccttcttttttttttttcttttaagacagggtctcactctgtcacccaggctggaatgcagtggcaccatcacagttcactcccacttccacctgccaggttcaagcagtcctcccatcacagtctcccaagtagctgggactacaggcacacaccaccacgcatgtctaatttttgtatctttagtagagacgggattttgccaggttgtccaggctggtttcaaacttctggacgtaagaaatccactaggcttggcctccaaaaatgctgggattacaggcttgagccaccgccctcggcagggattttctgataatctgtcaatgaagtcgttccaaactctcccaaccccccaaaatatgtttcagtaactttccaatttttatacatttgccccatttagttatagcttcatttccacatatactacctggagctattatgtatcataattcttaastaatcaaaatgcttttagtcctttgggattattaaccagatctgttgaaaatttctagtaattaatgttatactctccattatacttggtacagactcttctgtacattttcatccagagagccttctttattgtgggttaaggaaggaaactagcccctgagctccagtaatcctatcaatgcttctccagtgtcagataagtcacattgctatcattttctgtgtcagaaattaaccaccattcaatggccttgaaaaagaatgagattattgacttcaccattgatttaagcaacaggggaagtaaatgaagaatgaagtaattatgtctttaatctcttccataggcctggaagatttattccagtgtgaaaaatcatactggaagtcctt

SEQ ID NO: 91978 - DNA, 762 bp, Homo sapiens
gcaagggtccacgcgtgtctatggagttaacagcaccacagcaggaggctgaggttaagccattttcctggctccaccatcttcacaaaaatgcctactgagtaagggaatttctgcagaaggaagtttggtcagaagctggggagagatgtgatgtcagtttgagaaggatcttccatgccaatgaactttgcagaaacaaggccctgggctcgtaagatcttgcaaagatcccaaaaagtcactccttgaaggaatgattatttgtacacctgccacacaaagggaacccatggccagtcgagaaaggggactgcacccacaccacaggtagccaaggcaagggatagctctgtcccgctcctgctagagaagggaaggatgtgtgaatagaaaacctctccttattttcagtgtgggtgcgtgtgkggggggggatgcacgtgcacacacacacacacgaggagaaagaggtctttcacttaaaaatgattgaacataagagtgcaatttaaactgtaatttctctcacccaagtcgtgacaatcaaaaatgtctccagacattgccaaatgtcccctgaggggcaaaattcctccagattgagaacccctggtctagagaaagaccttatcattgagtggcagcaactgttttttttctttcatctgttacttagacattctatgccacaaagtgaaaattaaagggaataaacctactgacaagtcgtggaacaaacagatgttttctggcagaatc

SEQ ID NO: 91979 - DNA, 762 bp, Homo sapiens
gcaagggtccacgcgtgtctatggagttaacagcaccacagcaggaggctgaggttaagccattttcctggctccaccatcttcacaaaaatgcctactgagtaagggaatttctgcagaaggaagtttggtcagaagctggggagagatgtgatgtcagtttgagaaggatcttccatgccaatgaactttgcagaaacaaggccctgggctcgtaagatcttgcaaagatcccaaaaagtcactccttgaaggaatgattatttgtacacctgccacacaaagggaacccatggccagtcgagaaaggggactgcacccacaccacaggtagccaaggcaagggatagctctgtcccgctcctgctagagaagggaaggatgtgtgaatagaaaacctctccttattttcagtgtgggtgcgtgtggggggggggatgcacgtgcacacacacacacacgaggagaaagaggtctttcayttaaaaatgattgaacataagagtgcaatttaaactgtaatttctctcacccaagtcgtgacaatcaaaaatgtctccagacattgccaaatgtcccctgaggggcaaaattcctccagattgagaacccctggtctagagaaagaccttatcattgagtggcagcaactgttttttttctttcatctgttacttagacattctatgccacaaagtgaaaattaaagggaataaacctactgacaagtcgtggaacaaacagatgttttctggcagaatc

SEQ ID NO: 91980 - DNA, 762 bp, Homo sapiens
gcaagggtccacgcgtgtctatggagttaacagcaccacagcaggaggctgaggttaagccattttcctggctccaccatcttcacaaaaatgcctactgagtaagggaatttctgcagaaggaagtttggtcagaagctggggagagatgtgatgtcagtttgagaaggatcttccatgccaatgaactttgcagaaacaaggccctgggctcgtaagatcttgcaaagatcccaaaaagtcactccttgaaggaatgattatttgtacacctgccacacaaagggaacccatggccagtcgagaaaggggactgcacccacaccacaggtagccaaggcaagggatagctctgtcccgctcctgctagagaagggaaggatgtgtgaatagaaaacctctccttattttcagtgtgggtgcgtgtggggggggggatgcacgtgcacacacacacacacgaggagaaagaggtctttcacttaaaaatgattgaacataagagtgcaatttaaactgtaatttctcycacccaagtcgtgacaatcaaaaatgtctccagacattgccaaatgtcccctgaggggcaaaattcctccagattgagaacccctggtctagagaaagaccttatcattgagtggcagcaactgttttttttctttcatctgttacttagacattctatgccacaaagtgaaaattaaagggaataaacctactgacaagtcgtggaacaaacagatgttttctggcagaatc

SEQ ID NO: 91981 - DNA, 2220 bp, Homo sapiens
tgcattgtatggtttctgtcttcagtcataggaaccattctttgctctaggagtagcaatgagatccaaatccaggaaatatggcaatatcttcgatttacatcattagccctcagtatttttttttttttttgagactagaagcagaaggctgcttcatgcctggctgcctatcaaaagaagcaattttcataaatctatagctctgaacaatgaaaacggttcctttcacctctgctgaatcagtgtctggagcatcagggacaggggaaaagttctaacattagcttttttcttctacctgctgctaatcagagtgcaagcgagaagttgtattcttctcagggccagtaaagcagggaaagaaatcactagtgctcctctccggtctgaggatcaaataaacagcctttttttatcatccagctgctaggggtatggcttgagctacagacagctcattagaaagaaccacaaagttagaaatttggcctttggggggaaaatgtcattcttcaaattccctgtcttgtattctttaactaagtacatatcctttttaggggccagatgggatggggacacctgttttgaaccttaagacaataataagagcttagatatttactgaaggaatgaaatggtctgtctgaaagttgcccagtttcacaactgttgttccataaaaccaaagagaacgatgcttgccacgtgggtaaaagctgactttagttgacgtctcttccttcattctttttcagctcacacatcctctccattctctgaattcccacaaagactgttattgctggggctcataaaattatactccaaagtatgacgctttggcatccagagtgctttgaactaaaggagactgaaggccccagaagccaagtttccctctgaccttctcctgccttcctgtcttccaccccctacttttcccctgaagtgagtcctggaaaccagaattcttcttgcccaaagcaagccgtgacaccctggaaatatcactctaaccttccttgcctttccgtgtggcagctggccatgaagaaattctctgacctaccttgtttgatagcagatcacaagaccctggttccagagcggtcctgctttacaccgagggaaaggaatgtcatacagaaaggccaagaagaatctgaagagatgtccaatcacctttgcacgtggctgcccattcttcattgaacctaagcattaaaatagacagtttcccctgggtctttgggtcttcatttctgaagactccatgtcatgtaaaactttgattaaatgaatgtatcatgcattacttttgctaacctgtcttttgttatagtagtgtcgcctgtgacctttatgatgggtaaggaaagatttcacatcttttctacccctacattatcatactgtgaaattttattatatgctgtcttgccctcatagaaagagaattttggagtttgaaagaatcctgctaatcatgaaatctggtcctttatttaacagaaaaattcccagagacatgaaatgattagtactgtttcacagagaagcagagggagagccagaccctcagtcagtccaggctctgctgtctttggaggtggggtttcaggtctccccagcagggttgtgaggtcccaaagaacgggaggcaggccttgggccatagtstcctgcatccctccagagcctgcagcaggagctgggcccaaggatgctgctgagtgagtccacatgactgacatacactgctctggaagcaccattccggcagactagccctcttcttcccatgtaatccaggaaggttgttatagatagtccagatttttctagataatcttgtaacatattcacattcaacatacatacaaaaattcacacttggtatgggtaggagaactgtgcagacttcagtagaatttatttattaaagctttctgtagacggtcatttaaggccagcaaaatgttttcgatctcaggggttaaatggattcaaaacagaaatcagtaaagctgtcattgcagatttctgtaatagagaggcaagtataacaattgattaagaactctatccctttatatctatagaacatataaggcccctggatacccctggacctcaacgctccacattccccatttcagaaatccaggaggacgtgtggcaccgtgaggggaccacagagaccctgtctctcct

SEQ ID NO: 91982 - DNA, 515 bp, Homo sapiens
aagacatgaatgtgaggaagacagaagagtcaggaatgtcttttaggcttctcaactgcaaagatggcagtyatttttgactctgaaattaagaataatcaccaagagggggtaggaggagagatggtgactttggctttacatactgttctcatgcttgctctcatgttattagagtctacgttactgctcctggaaaaaatcttcatctccaaattataaaaatatgcttggtaaaatgcctgttaaatttgagagagactacaatttcctaacagcatagtctaaaacagttctgaagaattactttaaaatgttccttataaccttcattatactaccaaatagtaatttattcatacttgtctttatgactgagtgggagaatttagaactcaagattttaaaaaaaataatatttatcatacaggctgaataaagaaaatgtggtacatatacaccatggaatactatgcagccagaacaaagaggaggatcatgtcctcttcagcaac

SEQ ID NO: 91983 - DNA, 515 bp, Homo sapiens
aagacatgaatgtgaggaagacagaagagtcaggaatgtcttttaggcttctcaactgcaaagatggcagttatttttgactctgaaattaagaataatcaccaagagggggtaggaggagagatggtgactttggctttacatactgttctcatgcttgctctcatgttattagagtctacgttactgctcctggamaaaatcttcatctccaaattataaaaatatgcttggtaaaatgcctgttaaatttgagagagactacaatttcctaacagcatagtctaaaacagttctgaagaattactttaaaatgttccttataaccttcattatactaccaaatagtaatttattcatacttgtctttatgactgagtgggagaatttagaactcaagattttaaaaaaaataatatttatcatacaggctgaataaagaaaatgtggtacatatacaccatggaatactatgcagccagaacaaagaggaggatcatgtcctcttcagcaac

SEQ ID NO: 91984 - DNA, 515 bp, Homo sapiens
aagacatgaatgtgaggaagacagaagagtcaggaatgtcttttaggcttctcaactgcaaagatggcagttatttttgactctgaaattaagaataatcaccaagagggggtaggaggagagatggtgactttggctttacatactgttctcatgcttgctctcatgttattagagtctacgttactgctcctggaaaaaatcttcatctccaaattataaaaatrtgcttggtaaaatgcctgttaaatttgagagagactacaatttcctaacagcatagtctaaaacagttctgaagaattactttaaaatgttccttataaccttcattatactaccaaatagtaatttattcatacttgtctttatgactgagtgggagaatttagaactcaagattttaaaaaaaataatatttatcatacaggctgaataaagaaaatgtggtacatatacaccatggaatactatgcagccagaacaaagaggaggatcatgtcctcttcagcaac

SEQ ID NO: 91985 - DNA, 515 bp, Homo sapiens
aagacatgaatgtgaggaagacagaagagtcaggaatgtcttttaggcttctcaactgcaaagatggcagttatttttgactctgaaattaagaataatcaccaagagggggtaggaggagagatggtgactttggctttacatactgttctcatgcttgctctcatgttattagagtctacgttactgctcctggaaaaaatcttcatctccaaattataaaaatatgcttggtaaaatgcctgttaaatttgagagagactacaatttcctaacagcatagtctaaaacagttctgaagaattactttaaaatgttccttataaccttcattatactaccaaatagtaatttattcatacttgtctttatgactgastgggagaatttagaactcaagattttaaaaaaaataatatttatcatacaggctgaataaagaaaatgtggtacatatacaccatggaatactatgcagccagaacaaagaggaggatcatgtcctcttcagcaac

SEQ ID NO: 91986 - DNA, 515 bp, Homo sapiens
aagacatgaatgtgaggaagacagaagagtcaggaatgtcttttaggcttctcaactgcaaagatggcagttatttttgactctgaaattaagaataatcaccaagagggggtaggaggagagatggtgactttggctttacatactgttctcatgcttgctctcatgttattagagtctacgttactgctcctggaaaaaatcttcatctccaaattataaaaatatgcttggtaaaatgcctgttaaatttgagagagactacaatttcctaacagcatagtctaaaacagttctgaagaattactttaaaatgttccttataaccttcattatactaccaaatagtaatttattcatacttgtctttatgactgagtgggagaatttagaactcaagatttwaaaaaaaataatatttatcatacaggctgaataaagaaaatgtggtacatatacaccatggaatactatgcagccagaacaaagaggaggatcatgtcctcttcagcaac

SEQ ID NO: 91987 - DNA, 587 bp, Homo sapiens
ccaaatattcaattttgacttgtttatataggtatattttttccttatattacccccaaatattcggtaatgcctgctactcatacagatgccttccataagaaatttggggagggcargaaataaagaaataattatatttctaggctagagagagaaaaaaagaaaggggccaggtgcagtggctcacacctgtcatctcagcatttagggaggcagaggcaagaggatcatttgaggccaggagttcaagaccagcttggccaatatagtgagacctcatttttacaaaagaacagaaaaacttagcagggcatggtggtacatgtctgttatcccacctagttgggaggtggtggtggaggatcacttgagcccaggaattcaaggctgtggtaagccatgattgtgccactgcactccagcctaggtaacagagcaagaccctgactcaaaaaatcaaaaagaaagagagaaagaacagctgcaggggtgaaaccagtgaattgtaaattcagcaagggccagcaaaaatggtcaacagtcaagaggaatcaagctccttctcaatcctagaattcacaaaa

SEQ ID NO: 91988 - DNA, 587 bp, Homo sapiens
ccaaatattcaattttgacttgtttatataggtatattttttccttatattacccccaaatattcggtaatgcctgctactcatacagatgccttccataagaaatttggggagggcaggaaataaagaaataattatatttctaggctagagagaraaaaaaagaaaggggccaggtgcagtggctcacacctgtcatctcagcatttagggaggcagaggcaagaggatcatttgaggccaggagttcaagaccagcttggccaatatagtgagacctcatttttacaaaagaacagaaaaacttagcagggcatggtggtacatgtctgttatcccacctagttgggaggtggtggtggaggatcacttgagcccaggaattcaaggctgtggtaagccatgattgtgccactgcactccagcctaggtaacagagcaagaccctgactcaaaaaatcaaaaagaaagagagaaagaacagctgcaggggtgaaaccagtgaattgtaaattcagcaagggccagcaaaaatggtcaacagtcaagaggaatcaagctccttctcaatcctagaattcacaaaa

SEQ ID NO: 91989 - DNA, 470 bp, Homo sapiens
aatgatgagcataaaaaacggtctagataagaactgaggtctccagacatactttatgcccactcagttttgtcttttgccctagttgctaaacaaaacttaactttgctgtgcggtgcgacttcgttaacttaaaattacaggctgtcagctatgaccgctagactctaagaaagtccagtggaaatccttcaatgaaaagaatctgttcttgggtggaagccccgctcatgcaggaggaacagagggcttccattctcgcgtcacacaactgagggtcaaccccttgctccctgcagtaagcctgattagtgggcggagcttccttcaggatcgcaagaaagaraggaggaaggggaccccgcctcctacgtgctcgcgggggggggcggggtcggtggactgggcgtgagttaattggctggggggcggggcaccacgggttggctccgcccaggcgctcgcgcgga

SEQ ID NO: 91990 - DNA, 670 bp, Homo sapiens
ttagacgagtaacaccaggaaggacctcaaccctggctccacccaattcccgggaggaagtgctcatctccgcaagccaggatgtcctctgacaaccgactccctagaggagggaaaaatgytttgaaaacacactgcatttcagtagcaacccagtgctgcctttagccttgccaggtggtgtacagtttcaattggtcgtatttctcaggctaaacacaacacggcacaattgggattgtacgaagggtgggtgtatttagaggaaaagaacagaaaatggcaacggggccaagactggcttttaaaaacaatacatttcatgtgtgtgcagcgcttcacttgctagaagtggctttatatgtattatttccactggtgtaactctgaaaagtagggtagaaatgatcataccttttttaaagatggggaatctgaaggtggttaacccagagatgctctgtcaatcagcagcggagctgggaggctcagggagcgatttcctgggtcagagtcactgatttttcctccaagtatgaacaaagatttcaaagaatgcaaacactcttgaagccagagtcttacataaagccaaataccttgtattacaaatactcagtgtattagctatctattgctgtgtaacaacccccataacatagtggattaa

SEQ ID NO: 91991 - DNA, 670 bp, Homo sapiens
ttagacgagtaacaccaggaaggacctcaaccctggctccacccaattcccgggaggaagtgctcatctccgcaagccaggatgtcctctgacaaccgactccctagaggagggaaaaatgctttgaaaacacactgcatttcagtagcaacccagtgctgcctttagccttgccaggtggtgtacagtttcaatyggtcgtatttctcaggctaaacacaacacggcacaattgggattgtacgaagggtgggtgtatttagaggaaaagaacagaaaatggcaacggggccaagactggcttttaaaaacaatacatttcatgtgtgtgcagcgcttcacttgctagaagtggctttatatgtattatttccactggtgtaactctgaaaagtagggtagaaatgatcataccttttttaaagatggggaatctgaaggtggttaacccagagatgctctgtcaatcagcagcggagctgggaggctcagggagcgatttcctgggtcagagtcactgatttttcctccaagtatgaacaaagatttcaaagaatgcaaacactcttgaagccagagtcttacataaagccaaataccttgtattacaaatactcagtgtattagctatctattgctgtgtaacaacccccataacatagtggattaa

SEQ ID NO: 91992 - DNA, 672 bp, Homo sapiens
ctgagcacagctgggaagcccagcacatctctctctcctgcatggtcccataccagtactcggcattctcattttcagccctttttgctcccatgaagaggagagtctgatgaatgaatttccccaatgatgccaattactgataaagcataaagtattattctctttgagatgatggtgtctgaagagggaagaagagaatggcctttacgtgtagaatttcaggcatgggcgaccggagggaaagtggccttttgatacacacacacacacacacgcacacacacacacatgcaccatgccccagtcctgcaatcacacataggatgcatgyatatatcactctctagaatgggcagcgctggctggctcttctctcaggaggagaaaataccaagggcattgtggaaactcctctttctccccatcctcactaagtttgatgcagctttgatgcttccttttcttgctcgctaaactgcagacttgttgaggctcctgtcttcacactgcaactcctcagcacatggggtacacagggcgagggagagtgaaggatggcaaattcctccaggaaggctggtgtgagtctggctctgaggcctagccctccctggcaccggcggacccgggctggccaggtcctgctagtgcagatggcattcccagcct

SEQ ID NO: 91993 - DNA, 672 bp, Homo sapiens
ctgagcacagctgggaagcccagcacatctctctctcctgcatggtcccataccagtactcggcattctcattttcagccctttttgctcccatgaagaggagagtctgatgaatgaatttccccaatgatgccaattactgataaagcataaagtattattctctttgagatgatggtgtctgaagagggaagaagagaatggcctttacgtgtagaatttcaggcatgggcgaccggagggaaagtggccttttgatacacacacacacacacacgcacacacacacacatgcaccatgccccagtcctgcaatcacacataggatgcatgcatatatcactctctagaaygggcagcgctggctggctcttctctcaggaggagaaaataccaagggcattgtggaaactcctctttctccccatcctcactaagtttgatgcagctttgatgcttccttttcttgctcgctaaactgcagacttgttgaggctcctgtcttcacactgcaactcctcagcacatggggtacacagggcgagggagagtgaaggatggcaaattcctccaggaaggctggtgtgagtctggctctgaggcctagccctccctggcaccggcggacccgggctggccaggtcctgctagtgcagatggcattcccagcct

SEQ ID NO: 91994 - DNA, 1356 bp, Homo sapiens
ctctgtcgcccaggctggagtgcagtggcgcaatctcggcttactgcaagctctgcctcccaggttcacgccattttcctgcctcagcctcctgagtagctgggactacaggcgtccaccaccgtgcccgccaccacacccagctaattttttgtatttttagtagagacagggtttcaccgtgttagccaggatggtcttgatctcctgacctcgtgatctgcccacctcagcctcccaaagtgctgggattacaggcgtgagccactgtgcccggccgaaagaagtttttctagagcatatacctaggagtgtagttgctggctcaacttggtgagatatttccaaattgctttccaatgaggtttaccaatttgctctcctatcagcaagatatgattctgcatcctccataacattttctttggttttatcaggcttctttctttttattaaaaaaaagggtgttttttttgtttgtttttttctaagcaaaactttcaagtgtggcaaaattcaaaactrtaaaaggacagaatgtgagagttctataaccctggtctccaggcggcccatttgcagtttggagtaccattttctaatggatccttccatgggcattttatatggacacaggcaaatgcgtgtgtgtgtgtgtgtgagtgcatgtttgtgtggatgtgtgcatatgtatgtacccttttttgtttgttttttgaacacagagcttcctcagtcttttgatttggtttgttttcttaaatcattcactgttatttgactcttttttaaatcagaataataaattttttgtgaaatgtatcatgcataatagaatagaaaacatgtatgtaccaacaagagaagaataaaattaatccctgcatactcttctctcaggctcagaaggaggatcatgtccgtagcttagaagcaccctttgatactcttctctaagacagcccctagcctccaccttcaggaaatccctctccagacttctgcgttagtgattcctttgcttttctttatagatttccaactcatgtttgtatcctcaaaaaatgcatcgctccgttttgactgagtagcaaacaagtaaattgctgtcctgggagaagaaattcaactgaatctctgggtttagattccccggatgtgtaagagcatcccttctggaaaggtcagggacaaggccattgttgaaacctggaaacgtgggagcacatcactgaggcatccatttgtggagcaggatctgggttcagcagtgaatggtcaggcaagtaggctacccagaacttcctgggtctaaacttaacataatctaccttcagctcccaagagtaagtcaaa

SEQ ID NO: 91995 - DNA, 685 bp, Homo sapiens
ggatccaagatggcatcacctcagggaggacattttgacgatgctatcaaaattacaaatgtaccttcacttcagccattccccttccagatattccgtgcagtctaacatgggcacaaagacttgtgtgacatttctagtaatagtaaaccattagaaaaaataaatataactgaccaagctcagtggctcacgcctataatcccagcactttggaggcccaggttcacttgaggccaagagatcaagaccagcctgggtgacagcgcctctaaagattagatagatagatagatagatagatagatagatagayagatagacagacagacagacagacagacaaataaaatggaaaaataatctaaatgaccatcagtggtagactggctaaacaaactacagtactattcaatttaatactacaaaggcattaaaataatgatcaaaggccaggtgcaatggtgtgtgcctgtagtcccagctatttgggacgctgaggcaggagaatcacttgaacccaggagtttgagacagcctaggcaacacagcccccacatctcaaataagtaaataaataaataatttcaaaaagggaatgaagaaggttgttatatactgacacggaacgagctcagaattttttttttttgagacggagtctcactccgtcacccaggctgga

SEQ ID NO: 91996 - DNA, 685 bp, Homo sapiens
ggatccaagatggcatcacctcagggaggacattttgacgatgctatcaaaattacaaatgtaccttcacttcagccattccccttccagatattccgtgcagtctaacatgggcacaaagacttgtgtgacatttctagtaatagtaaaccattagaaaaaataaatataactgaccaagctcagtggctcacgcctataatcccagcactttggaggcccaggttcacttgaggccaagagatcaagaccagcctgggtgacagcgcctctaaagattagatagatagatagatagatagatagatagatagatagayagacagacagacagacagacagacaaataaaatggaaaaataatctaaatgaccatcagtggtagactggctaaacaaactacagtactattcaatttaatactacaaaggcattaaaataatgatcaaaggccaggtgcaatggtgtgtgcctgtagtcccagctatttgggacgctgaggcaggagaatcacttgaacccaggagtttgagacagcctaggcaacacagcccccacatctcaaataagtaaataaataaataatttcaaaaagggaatgaagaaggttgttatatactgacacggaacgagctcagaattttttttttttgagacggagtctcactccgtcacccaggctgga

SEQ ID NO: 91997 - DNA, 563 bp, Homo sapiens
ttacctgtacaccaaatccctgtgacacagtttacctatataacctgcttgtgtacccctgaacmtaaaagttagaaacaaaaataaaaccattttttgggggacttgagctctaagttatgaatattgtcttagggggctcagaggtaaagggacagcagcgtatctttaagatcaagcatgattttgttactaatagagcctctgtcctaacctgtacttttgggggttgacgataccagagtaatttttctgtgcattttctgtgtgttggtttgccctgtcttcagcagtgattatgtatttctgtaagttaataggtccctttgtgtggggcctgccccctgtgtggaatcatctcatatggagacatgtcctggaagtgtcccagaagcccctagacttgagttttccagactccttggccaacaaacacggccctcccctggggactgtggccatcaccccaccctgcaactgcctggcctcctgtggtagaaagggaagatgaatgatcatcagcgctccatctgtctggatcggaatgaacaaatctcttgctg

SEQ ID NO: 91998 - DNA, 2370 bp, Homo sapiens
tggtttagatatgcttcgaaagcttgcaggagattctcacatgctcctaccattgcaaaccactgttctacaccacatagttaccctcttccccaggcccccagcctgtgctctgtctggaacagtagcgtttttagttgacctgcccccgtgcccactctctttccctctctctctgcctctctggagtcccagctcttcattttcttcctgtatcctccagcccccaattccagatccgaacaacatgagagactttgtcagctacccatcagccggcaacgagcggctgcactgcaccatgaagcgcacagaggacgacccggaggtgggcggcccgtgctacacgctctacctggagtacctgggcgggcttgtgcccatcctcaaagggcggcgcatcagcaagctgcggccagagttcgtcatcatggacccgcggacagatagcaaaccaggtgggcccctcacccgagggactgggaccttgttctcctgtggtcatgggctgttaacgccttacaccccatgcaaagagaatgtctgctaatgaaacgtgagcctgtgggggctagtgtggaacatccttgaagctacgacatttccagaatcccattgaaatgaacagttctctaaatgtactttttgacaggtttttaatcatattccatgggcagtggatagctgggcggtggatagatgaaccaggcaaggggaagttggcgcagtcctcctgggagtgagggtttcctcttcacagttaccgagtattcatcgagtgccttcatgtaatattgagacaacttgaaaataataacaagatacagtccctaccctcccagagtggatgataaaattgaaatcaaaccttcagcctcctacccctccctagtctactgttaactgctttttacctgattgctaatgacaatgttttgctcatccataaagatgttggtatgagtcacccttttcttctaaaaacctttccctgcagtgattttcattgctcagttaatgtattcaagatgctccctgcacatctctctgggatcctagattgtaagcttcagagggaagggactttgttctttttttgtgccayttggtactaggctagtgtccgtgcacccatcagtcactgccagctcagtctgccacctccctctgaaactttgcccatcacctatggcagaacgaacagcacgcttagtcattgtgctccagacgctgccccgctgaatcctgtgggcctggggggagagaactgagtcatctttgtgccctcagtggatttggatttgttttcattagttcatgcttcctctcgccacttcctcgctccagtttactctcctgcccattagtctggtccctgcctctcattacgacctggagctagcatgacctgtggcctgaccagtcaccccaagtcacagtgtggtgggcttgctcactctcaacttgtactcagcgctgtacacaggtgccccacctctgcctgccagccttcatttgttcagcatcggcagtgacactctactacccctgcaaaacagcaataccacttgtcaatattagatattagtccgttttttctgtcttttgactcgtgacaagctagtaccaggaacaaagaaagcaactagcagaattggggctggtagggaggcagactgaaaggagggagaggacagattcaggaggaaggaaggcacagtgggaaaagcaggagagagagaagcgcatgttcacgtgggagggaaacatggtttcagggaaaaggagaagggccaccaatggttagagatgactggggtgggggccgtgggacaggccctgagcccaggtttgcagcagatgttctcactgatgtcagtacctctaaggttactcccctgggtacaattttataaaatctgtattgagattaaatgttggcgataacttaggtgaagagcttatttcctcatgtgtgcataaattcttcactgaagaagacggaccggaggctgtgctgtggagtacccaaggactgggcttgcttgaatctgacccgactacgccaaatgcctgctcttccttccggttcatgtttatcagctcgtatcaaacacagacccactcatttgcgcacaatcctttcagggaataagatgttgtatttttataattaaaagaattaaaagctataaaacaaagcacattgacagatatttagtcagtgcctaccttgtgtggggtacttgagtctcctgctattattaagtaataccaggtcatctctgcttttaaggagtttctaaacccttttgggtgataagacaatgtaagcacttgaaaagtttaattaaaaagtcaagatttaaa

SEQ ID NO: 91999 - DNA, 2370 bp, Homo sapiens
tggtttagatatgcttcgaaagcttgcaggagattctcacatgctcctaccattgcaaaccactgttctacaccacatagttaccctcttccccaggcccccagcctgtgctctgtctggaacagtagcgtttttagttgacctgcccccgtgcccactctctttccctctctctctgcctctctggagtcccagctcttcattttcttcctgtatcctccagcccccaattccagatccgaacaacatgagagactttgtcagctacccatcagccggcaacgagcggctgcactgcaccatgaagcgcacagaggacgacccggaggtgggcggcccgtgctacacgctctacctggagtacctgggcgggcttgtgcccatcctcaaagggcggcgcatcagcaagctgcggccagagttcgtcatcatggacccgcggacagatagcaaaccaggtgggcccctcacccgagggactgggaccttgttctcctgtggtcatgggctgttaacgccttacaccccatgcaaagagaatgtctgctaatgaaacgtgagcctgtgggggctagtgtggaacatccttgaagctacgacatttccagaatcccattgaaatgaacagttctctaaatgtactttttgacaggtttttaatcatattccatgggcagtggatagctgggcggtggatagatgaaccaggcaaggggaagttggcgcagtcctcctgggagtgagggtttcctcttcacagttaccgagtattcatcgagtgccttcatgtaatattgagacaacttgaaaataataacaagatacagtccctaccctcccagagtggatgataaaattgaaatcaaaccttcagcctcctacccctccctagtctactgttaactgctttttacctgattgctaatgacaatgttttgctcatccataaagatgttggtatgagtcacccttttcttctaaaaacctttccctgcagtgattttcattgctcagttaatgtattcaagatgctccctgcacatctctctgggatcctagattgtaagcttcagagggaagggactttgttctttttttgtgccacttggtactaggctagtgtccgtgcacccatcagtcactgccagctcagtctgccacctccctctgaaactttgcccatcacctatggcagaacgaacagcacgcttagtcattgtgctccagacgctgccccgctgaatcctgtgggcctggggggagagaactgagtcatctttgtgccctcagtggatttggatttgttttcattagttcrtgcttcctctcgccacttcctcgctccagtttactctcctgcccattagtctggtccctgcctctcattacgacctggagctagcatgacctgtggcctgaccagtcaccccaagtcacagtgtggtgggcttgctcactctcaacttgtactcagcgctgtacacaggtgccccacctctgcctgccagccttcatttgttcagcatcggcagtgacactctactacccctgcaaaacagcaataccacttgtcaatattagatattagtccgttttttctgtcttttgactcgtgacaagctagtaccaggaacaaagaaagcaactagcagaattggggctggtagggaggcagactgaaaggagggagaggacagattcaggaggaaggaaggcacagtgggaaaagcaggagagagagaagcgcatgttcacgtgggagggaaacatggtttcagggaaaaggagaagggccaccaatggttagagatgactggggtgggggccgtgggacaggccctgagcccaggtttgcagcagatgttctcactgatgtcagtacctctaaggttactcccctgggtacaattttataaaatctgtattgagattaaatgttggcgataacttaggtgaagagcttatttcctcatgtgtgcataaattcttcactgaagaagacggaccggaggctgtgctgtggagtacccaaggactgggcttgcttgaatctgacccgactacgccaaatgcctgctcttccttccggttcatgtttatcagctcgtatcaaacacagacccactcatttgcgcacaatcctttcagggaataagatgttgtatttttataattaaaagaattaaaagctataaaacaaagcacattgacagatatttagtcagtgcctaccttgtgtggggtacttgagtctcctgctattattaagtaataccaggtcatctctgcttttaaggagtttctaaacccttttgggtgataagacaatgtaagcacttgaaaagtttaattaaaaagtcaagatttaaa

SEQ ID NO: 92000 - DNA, 618 bp, Homo sapiens
agcaatcccacttccaggtgaagytcactcaaataagtcatacacaaaaggacaaatgtagtatgatgtgtttacactgatatgaagctacctagaataggcagattcttagggacagaaagtcagatagaggctgcagggacctgtggcaggggaggatgcagagttaccatttaattgggacagagtttctgctggggaagataagacagttccggaggtggatgatggtgtgattgcacaacattgtagatgtccccaatgccacttaaaaattgttagaattgtaaattttatgttatgtacattttattataagaaaaaaaggagagcaaaggcagctgtgggtgagttcatgatgtttcccctgagttccagcaggtcccatctgtgatgtcccacagtcctgttgcatgggtagggctggtgacgttgctggtcccattttatagatgactaaacaagtcacagggacatacctgtgtgttctcattcacattcctgttcattgtctgcctccctacactggggtgtgcattctgtcagggcagggacctggtggggccgctcaccccagtgttctcagggcctggcacatataagatatttgcactgaat

SEQ ID NO: 92001 - DNA, 618 bp, Homo sapiens
agcaatcccacttccaggtgaagttcactsaaataagtcatacacaaaaggacaaatgtagtatgatgtgtttacactgatatgaagctacctagaataggcagattcttagggacagaaagtcagatagaggctgcagggacctgtggcaggggaggatgcagagttaccatttaattgggacagagtttctgctggggaagataagacagttccggaggtggatgatggtgtgattgcacaacattgtagatgtccccaatgccacttaaaaattgttagaattgtaaattttatgttatgtacattttattataagaaaaaaaggagagcaaaggcagctgtgggtgagttcatgatgtttcccctgagttccagcaggtcccatctgtgatgtcccacagtcctgttgcatgggtagggctggtgacgttgctggtcccattttatagatgactaaacaagtcacagggacatacctgtgtgttctcattcacattcctgttcattgtctgcctccctacactggggtgtgcattctgtcagggcagggacctggtggggccgctcaccccagtgttctcagggcctggcacatataagatatttgcactgaat

SEQ ID NO: 92002 - DNA, 693 bp, Homo sapiens
aaccccagcgcggtgcttcacggacatgtgcgcatgcgcactggcagagagctgctgcggcacagggacttttcctctctgctcctccaacgcctcatctctgccattgggtggtgagcgaggaggcctcccctccacctccaagcggccttttcccctccccaggctgccccctcccaggttccacgccttcccagctgttgactgcaggaatgggtccctgacctggctgagaggcatgrtcacaagggtttgttctgttttccagcactgcccttaactcaaaccttgctgtgcagcatctaattttggctttctgacacccttctttaaaaaaaaaaattaaattaagaaaatggatacatatttgtacatatctatgaggtacacgtgaaattttgttacatgcgtgtaacatgtaatgttcaggccagagtattggggtgtccatcacctggagcatttatcatttctctatgttaggaacattaaaagtcctctctcagctattttgaaatatacaggcctggcgtggtggttcatgcctataatcccagcactttgggaggctgaggcgggcggattgcctgaggtcaggagttcgagaccagcctggctaacatggtgaagcctcatctctactaaaaaaatatataaaaatgagccgggcatggtggtgcacacctgtggtcc

SEQ ID NO: 92003 - DNA, 691 bp, Homo sapiens
cctgcagacatggctggagctgtctctgcttccaagatccagaggcttctttttgtagtttccccaaactttcygggagtaattaataccaacagaaacctcagtagactagttagtcaaagttccagaaaggggccctctagggtggctctattgtgggctgaggaagcacaggcttctctcctgcactgtcacatttatctctgctatttcccatgttgtatcctctgagtactacactgtgggaaacacagaggatgctgtgtgaggagtcagggtaggaaatctgggatcttcttttggaaatcccacagtatttccatgttgccatgtgttttaatagtgataactaattttcaaaatgcatttcctgttcattagctttaactccagtaatggcctcatgaagtacacaccacagtcaactatttaccagtgtggaagctgagactgtgatacaaattttgcacatagatctttctgtactagggctttaagttctgtgggatagactcccccaagtgtgattgctttatcaaaatgtatgcctgtctctgcatcctacaagcatatatgaaaaaagctcaacatcaccaatcattagagaaatgcaagtcaaaaccacagtgagattccatcttccaccagtcagaatggctgttattaaaaagccaaaaaataacagaggctg

SEQ ID NO: 92004 - DNA, 755 bp, Homo sapiens
gtagatcgacgtacagagagtggcaagcaagttgcaccatggcattcattgaaagcagggctaataggtgatatgggtattttattttcttcaagtattaaagaattgttttctgttgggggaccgccttcattcatagccaagttttcacaagcttgtagtgggctcctaactctgtcaactttttgggaaacactaaatgttttattaacattctgaatatttgaaacccttctgttgtgacttgtagaggctgaaattttcttctttttaatggtatcccaaagactcctctgcaaaaataaggaaaatataccaattaagtttgtagctattgaatattaaataagcaatattacttcaagcctgttatcaaaataagttttatttattattaaacaatttcttagagtaaatcacagaatrgttaaaacattacctttttctttttctgctcttctgcatttcctagtaatatagcttggtgtttcagaacatcatttacaagaaatgtcataatctctcttactcggccttctttgagtggtgtccagttaacagaaataacaattttctctttaggctataatcaaaacaatacattatataattacaatagtaattacataataaccaaaacaccttatatacaacttacaatatagtagggcttaataattgttaaccaacactctatatactaaacatttaataaatcaaatatatttctcctaccctatctgcttaattataag

SEQ ID NO: 92005 - DNA, 1161 bp, Homo sapiens
atgtttaaaatagcagaagtctgatccctgcagaaaagactcatgctttgataaataactagtgaccatttatccctgaagatgaatttagacaaccacagccaagaatgaaaaagaataaaagaagtgaaagaatttgattaagagtagtagtgacacatcctctctttttcatggtctgctaagtgatttgaccctttctcggaatgaaccgcaatgctatttaatttaaagagctcagaggtaacaaattgccaacaactagggtatttcatggatggtctcactagactggtgactaagctaattttgaacagctggaagggcttatcccgctcacacaaatcatgtatagttcagrcattgtggagaaaatcactctgaaaagtaaacaaaacacacctcttctaagcaaagtgtaatttaggattattgaaaaaggaattcttagacttctagtagatatatttttgttttaagccacataaatatttgtttatagtaattgcttatgaataactaaatagatttaacactacaattgcacttcattttctttagaattttgaaatgattttgttttcagttgaatgaatcataccattctgagttatatctgtcccttgcttcaacctccacccccgcccccatccacagtttagtcctcgtgggatccttcttttactcttcttcacactgtcagagaaaactgttccaataaggtaaaatctagacagcagaaggttaaataagcacaagaatgctggaaataacgctacttaataaattaagctactttatgtagcttaaaattggaggtagcattgaccatagtaataggtctgacaccattcattcatttgttcattcattcaataaatacttagtgagctcttgggaattctcagatgaattagacactgtatttccaagggatcccttttaagaccaatacaaataaggtaaggttgaaaataacacaggtgggcatgggtggctgctggtggtggtgaagccagaacaaagttatcactcatcaggataggcctacctgaggacgaagtcttttacttgggcttgcaggagtcaccggggttgacaggagtgggccgggggagctgtcctagcctagctgagccgtcccaactacccatagtatgc

SEQ ID NO: 92006 - DNA, 1377 bp, Homo sapiens
gtggatactgtaatcatagaacattaggtcataaataccaaggatcctgaggaagaaraagaaagaatatctatgatttggacagccatttttccaattgtggaacattgtttagcatttcaaataatgaaaataaacacatatagaaggcttactatgtgctgggcattgttctgttttatacatattaactcgtttaatctgtgcaatgcacgtaggagtttatggagtttcctcataccttatctcattcagttcccaaaataataccagcagattgtgggtgattacaacattttcaaggattcttccccagggcagctgcttgtgggagagctgaggtctagaaaggaggagttgagagcaggaaaggaaccaagcctgaccccacccccatgccagcattttgatttatggaaccctgggagaagagtttctccaaaatgatacttcatggcctccagcagatccccctcaaagaaaccaacctgggaatgaccctctgtgtggagatcaaggaggaaagaggcaagtgagcctttcttttctcctgctcgtggacttagagtaagagtgtctgggacatccaggtatatactatttccatttttccttttgacatcttcgatgatcaagatacctgctaaggatttgttcagaaatcagaattagttgtaaggcagttgcctgaacaactgaaagcgtaatgaccccacagagagcactaaggcaacagaaagtacggcgaggtgggattattaggttggtgcaaaagtaattgtggtttttgccaatacttttaatggcaaagtttttttaaaaagtatttttagtagaggcagggtttagccatgttgatcaggctggtcttgaactcctgacctcaggtgatccgcctgtcttggcctcccaaaattctgggattacaggcatgagccaccatgcccagcttttttttaaatttccattacttttaatggcaaaaactgcaaattactttcacaccaaattaataggatatttgatgagttttaatataattatcgtttttaccacaattgaccttcccctactcttaccctcaaaaaaaaaaaaaaagaacttaaaataaatccatagtcatttcaaaagtgacttcaataattttaaagtcattagttgttgggactctgaaaatgtaggaatcctgttatgcatgacagatttccacggtgggcaacagtcacctagcacatgcctggtagttcagctgtaatgtgggctaaaagctgatggaaagcctaacccctttttaaacagtatttctatgactggctgaactccgtggtggatggcaaggctgtgtcctacatcagtgagagcctgcccgctgcagcc

SEQ ID NO: 92007 - DNA, 2109 bp, Homo sapiens
  misc_feature (1)...(2109): n = A,T,C or G
tgtatcccagaacttaaagtataataaaaatgaaaaaaaaaaaaaaaaggatagcctttaaccaaagataaatagaaatcgataaataaatgtcctggtttctttgcccctcatgtaggattatatgtgtgttttgcacttttgtccagaggtgtgcaagatatggagtccctgccagaaatagagtctgagttgcctgcagcagtgaccagccgacaaacatatcttgattaggttttcttgtcttcctactccactactggtaatttctaggaccactttccagataaacttcttttacatgattctacttacaggacctccttctagagaaatctaatttagggcagaatgcatgagtgcatgtnnnnnnnnnnnnnnnnnnnnnnnnnnnnnnnnnnnnnnnnnnnnnnnnnnnnnnnnnnnnnnnnnnnnnnnnnnnnnnnnnnnnnnnnnnnnnnnnnnnntccctctaacagcatcctctggatggctgtgttcacaaagccttgcagtagccaaattgggccaggttctagaaatacaggccataagtgacagcctgaaagttttccttttgacattttttgaaaggaaaatcagttttcttcctgagaaaagcatgagaatgacactttactttccagcctcctcctattgtgacaggttgataagcactgtattttcatcctcctattttcttcatcataaataggtctcaatttataacccacgtttgcagtttcattgagaagcagggcagaaggcacactgccctattttagctcagcagggcaagagcattaagaacaatgaaagttcagagttacctatcacaaatatatctgaatgatagcatcaacaaaatcagaatgagtttttccaggaaacagtgaccttgtgacataaaagccrcgctactgagaggtgaagccggttgggcttctgggttgggtggggacttggagaacttttctgtctagctaaaggattgtaaatgcaccaatcaatgctctgtgtctagctaaaggtttgtaaatgcaccaatcagcactctgtgtctagctaatcgggtaggggacttggagaacttttgtgtatagctaaaggattgtaaatgcatcaatcagtgctctgtgtctagctaaaggtttgtaaacgcaccaatcagcactctgtaaaaacggaccaatcagccctctgtaaaacggaccaatcagtactctgtaaaatggaccaatcagcaggatgcgtgtggggccaaataagggaataaaaacaggccacggagccagcaggggcaacttgctggggtccccttccacgatgtggaagctttgttcttttgctcttcacaataaatcttgctgcccactcttcaggtcaacactacctttatgagctgcaacactcaccatgaaggtctgcagctgcactcttgaagccagaaagaccacgaacccacacggaggaacaaacaactccagacgtgccacctttaagagctgtaacactcactgtgaaggtctgcagcttcactcctgaagtcagcgagaccacgaacccagcaagaggaatgagcaactctggatgggccacctttaagagctgtgtaacactcactgcaagggtatgcagcttcactcctgaagtcagcgaggccacaaacatttgaaggaaccaactccgcacacaccatctttaagaactgtaacactcactgcaagggtctgcagcttcattcgtgaggtcagtgagaccaagaacccaccggaaggaaccaattctggacacactaccacagtgtctaggttacattaaaacaagcacagtaataataacaatagcaaacaatagcaccacttctcgtaagtaaagtgctttctggtttgtaaaacacttttcatagatatcttctcctttgattctttcaacagcactataagagaagcaacagttgtggatacgctggcaaattatttggcattgcaatcctacccatctgtactcttgcactcgctaatttctataatctagtttcatggctttaaggaaacatccaggcctagagcaatcaataaaactgtgtacaaaaatcgtttgatgcat

SEQ ID NO: 92008 - DNA, 732 bp, Homo sapiens
agttattacaggtgtgaccacgcaggttttattacctagcaggcctagtacatawggaatggattcagataaaacaatgcactgtcttggccgggcgcggtggctcacgcctgcaatcccagcactttgggaggccgaagtggacggatcacaaggtcaggagatcaagaccatcctggctaacacggtgaaacactgtctctactaaaaatacaaaaaattagccaggcatggtggtgggtgcctgtagtcccagctacttgggaggctgaggcaggagaatagcgtgaacccaggaggtggagcttgcagtgagccgagatcatgccactgtgctccagcctgggggacagagtaagactccgtctcaaaaaaaaaaaaaaaaaacaaaaccaaaaaacaaaaaacaatgcactgtctcaatcctgggagtcagaaattcccatatgcctgattcaggcaagaagcaagctgtttaaggaaagaaaggtaaaatcatgttttcaaaattatgtcagtaaaagaaatctgacatagttggctccatcttgcttctaactttcaagctgtccttggtcattcctaggcgtaggccaagctaatttgggaagaatttagtttatagtttaaccttaaagcaaggatggtaatagcccttcccaaatctaaactgcttttgtaaaactgatgagaggccacaaggttaggattatgatgggggcttgaatctgc

SEQ ID NO: 92009 - DNA, 752 bp, Homo sapiens
tgcatttggcagaagctggagggctggtgtgggaaagcggtggggcaggagatggggagggactatgccgaggcctagagggctctagtccttccagaaaagagactctggctgggggaggaggaagtatctctaacaagaggcaagaacctcagcatcctctgaaacttcaacttttttctaagcaaatcctagaggagaaaatgtggtttactcagaagtacggatcatccaagagaaaaagaaacatgcaggtaagacccaaggatgtctctgttctggcccaccctcaacttagacagtatagctcagtttctacccactcagcagatctgagccagacaggcatagagccgcccctcccactgggtcatggggcttctttatktgtgcctatgctgcttcaggtgaatccaagcctcccctgcactctcctttccctattctctgcagagggccccagtataacctgaataacaaaactatctttttgggcattcgcttaacctctcagaccttccatatccctatccataaactgtgactacttccctactgtcttagtcagttctggctcctgtaacagagtaccataaactaggtgacttaaagaactaatatctatttctcacaattctggaggctggaaatccaagatcaaggtgccagcatggtcaggttcttagtgagggccctattcccattttccagacagatgactccttgctgtatcccccacacagcagagagag

SEQ ID NO: 92010 - DNA, 752 bp, Homo sapiens
tgcatttggcagaagctggagggctggtgtgggaaagcggtggggcaggagatggggagggactatgccgaggcctagagggctctagtccttccagaaaagagactctggctgggggaggaggaagtatctctaacaagaggcaagaacctcagcatcctctgaaacttcaacttttttctaagcaaatcctagaggagaaaatgtggtttactcagaagtacggatcatccaagagaaaaagaaacatgcaggtaagacccaaggatgtctctgttctggcccaccctcaacttagacagtatagctcagtttctacccactcagcagatctgagccagacaggcatagagccgcccctcccactgggtcatggggcttctttatgtgtgcctatgctgcttcaggtgaatccaagcctcccctgcactctcctttccctattctctgcagagggccccagtataacctgaataacaaaactatctttttgggcattcgcttaacctctcagascttccatatccctatccataaactgtgactacttccctactgtcttagtcagttctggctcctgtaacagagtaccataaactaggtgacttaaagaactaatatctatttctcacaattctggaggctggaaatccaagatcaaggtgccagcatggtcaggttcttagtgagggccctattcccattttccagacagatgactccttgctgtatcccccacacagcagagagag

SEQ ID NO: 92011 - DNA, 1050 bp, Homo sapiens
tggattttcatgtttctgaatataattatgatgataaagataaaaataataaaatagatgtttgttataatgacaytatagtgtctttaagtaagttctggtgtttgtatatttgttggatgtaatttgtaaatatcgatatatagagagactctaatttaatcatctaagcaattcattgaggtgggtattattgttgcccctctttcacagatgaacatgctgaggccccgagtgggtgagtcacacagctagtaagtgaagaggcagcagtcaaacccaggtattctgattctagtctgtcttctgccaaagagtactttgtggctaaattcactggatgtgactcagtttttatctgtcatcatctcttagctttgccttatccaaaccagctccctctcttctgcttagaacacattctgcccttggtgacagtggggcacactctcacagtgcctcttgcttcaaccggagtccttccttctcaagtcccaactcctctactgggactggcctggggtttgctccaactggacgctctcttgatgaaccctctcttttactcctggctgccccccaaactggctgctctatgactcatttctcactgtgctgctggagtggttttccccaagatttaaagcattcatggagcccagattgccctgcaaaatatggcccaagcccttactctgcttctaaatatggtctaaacataccttcctctccaaccttatcctacctttctccactgttcagtctgtgctgcagtcgtcaagaaccgactgcccctccagttcctggaacatgccttccctccctcaccacaatcctcttctcctgaaatgttcccactcatcctcaggtctcaactcacacatgagttcttccaagaaattttttctcacttcccaactcagattggcatgcctttccatctgctcctgcagccaccaggtgcttctatcctcaggttgatgtttaatctcttacttgactgcatttgctattagcccctacgaactgtgtggggaaggccaggttagt

SEQ ID NO: 92012 - DNA, 1050 bp, Homo sapiens
tggattttcatgtttctgaatataattatgatgataaagataaaaataataaaatagatgtttgttataatgacactatagtgtctttaagtaagttctggtgtttgtatatttgttggatgtaatttgtaaatatcgatatatagagagactctaatttaatcatctaagcaattcattgaggtgggtattattgttgcccctctttcacagatgaacatgctgaggccccgagtgggtgagtcacacagctagtaagtgaagaggcagcagtcaaacccaggtattctgattctagtctgtcttctgccaaagagtactttgtggctaaattcactggatgtgactcagtttttatctgtcatcatctcttagctttgccttatccaaaccagctccctctcttctgcttagaacacattmtgcccttggtgacagtggggcacactctcacagtgcctcttgcttcaaccggagtccttccttctcaagtcccaactcctctactgggactggcctggggtttgctccaactggacgctctcttgatgaaccctctcttttactcctggctgccccccaaactggctgctctatgactcatttctcactgtgctgctggagtggttttccccaagatttaaagcattcatggagcccagattgccctgcaaaatatggcccaagcccttactctgcttctaaatatggtctaaacataccttcctctccaaccttatcctacctttctccactgttcagtctgtgctgcagtcgtcaagaaccgactgcccctccagttcctggaacatgccttccctccctcaccacaatcctcttctcctgaaatgttcccactcatcctcaggtctcaactcacacatgagttcttccaagaaattttttctcacttcccaactcagattggcatgcctttccatctgctcctgcagccaccaggtgcttctatcctcaggttgatgtttaatctcttacttgactgcatttgctattagcccctacgaactgtgtggggaaggccaggttagt

SEQ ID NO: 92013 - DNA, 1050 bp, Homo sapiens
tggattttcatgtttctgaatataattatgatgataaagataaaaataataaaatagatgtttgttataatgacactatagtgtctttaagtaagttctggtgtttgtatatttgttggatgtaatttgtaaatatcgatatatagagagactctaatttaatcatctaagcaattcattgaggtgggtattattgttgcccctctttcacagatgaacatgctgaggccccgagtgggtgagtcacacagctagtaagtgaagaggcagcagtcaaacccaggtattctgattctagtctgtcttctgccaaagagtactttgtggctaaattcactggatgtgactcagtttttatctgtcatcatctcttagctttgccttatccaaaccagctccctctcttctgcttagaacacattctgcccttggtgacaktggggcacactctcacagtgcctcttgcttcaaccggagtccttccttctcaagtcccaactcctctactgggactggcctggggtttgctccaactggacgctctcttgatgaaccctctcttttactcctggctgccccccaaactggctgctctatgactcatttctcactgtgctgctggagtggttttccccaagatttaaagcattcatggagcccagattgccctgcaaaatatggcccaagcccttactctgcttctaaatatggtctaaacataccttcctctccaaccttatcctacctttctccactgttcagtctgtgctgcagtcgtcaagaaccgactgcccctccagttcctggaacatgccttccctccctcaccacaatcctcttctcctgaaatgttcccactcatcctcaggtctcaactcacacatgagttcttccaagaaattttttctcacttcccaactcagattggcatgcctttccatctgctcctgcagccaccaggtgcttctatcctcaggttgatgtttaatctcttacttgactgcatttgctattagcccctacgaactgtgtggggaaggccaggttagt

SEQ ID NO: 92014 - DNA, 744 bp, Homo sapiens
caattctctctaccctattggaagtgctgaactagagcccacgccacatatttgcagccacacatttgccgagtgtctggggcttttggggcttcctgccacactgccaggaaacaggaatctgtctgcagagggcttgcagtttgcttggggaagygtaagagtcatttcaaagtgacccattaataagcgagagctgatgtagtgtaaaccctgccaagacatgctggggaatgaggcagaaaagagtgactgctgagtctggtcccaggcaccagagtccttacctagtgccagtgcttgagaccaagccgaggctgctgctcacaggtacctgccccatgccaggtgggatgcaggagggccaagcagctcctttattcaggtatagaaacaggctcagggatgtacagcacttactcatccaaggctgtattgtcccagtgcttagttatctcatttcatctcagtccattccacagaggagtaagctgaggcactgaggttaagaaagatgcctgaggcaactagtaggtcattcagcccagctttcaattctggctgcacttcgcttccgcagtaggacaacaggtagaacatttagttctgagaggtcaggaaaacaattacaaagtatcaggcttgaactatcacactggccctggagaggggagcaagggatgaataatgatttaaggcataataattaacatgttcgggaccaggcgtggtaggctcacgcct

SEQ ID NO: 92015 - DNA, 335 bp, Homo sapiens
ccagctgatgtttgtatttttagtagagatggggtttcaccatgttggccaggctggtcttgaactcctcacctcaagtgatctgcctgccttggcttcctgaagtgctgggatyacaggcatgagccactgtgcccagcctcagtcagtagtttcttaagccatgttttaaggtggtacattttgggggatcactatggaagatgtccaaagggaggttctgtgagagaagctctgggctcctgtttctacttgagggatgatttagcagataagttcatgatcaaaagtatttcataaagattttgtttggcatcttgcatccttatttcttc

SEQ ID NO: 92016 - DNA, 464 bp, Homo sapiens
aactcaagtttgggctttctctaccagactgtgtagccagctcttttattcgtgcatacctcccatctctctgcattcctcaatgatttctactttttaataccttactcttttggagaattagtgtgattatagatctcataaaacttgtttttgtacagttctctgtttatccatgcctrattgtctcaacagcattttacaatcttagggcagctaaactgtccttgactatcccttcttatttgggtttatctgacaaggccactagtcagcaatgcttaaagctgctggaggccaggcacagtgtctcatgcttgtaatcctagcactttgggaggccgaggcggatggattgcctgtgctcaggagttcgagatcagcctgggcaacacgacgaaaccccgtctgtactaaaatagaaaagaaattagctgggtgtggcagagtgcgactatagtccc

SEQ ID NO: 92017 - DNA, 559 bp, Homo sapiens
caaacttgcacatgtaccaactgaatctaaaataaaagttgaaaaaatatatacaaatgaaatagtagttatctctggcctggcacagttgctcatgccagcactttggaaggcraagcactttggaaggccaaggtgggtgcatcgcttgaggccaggagttcaagaccagcctagctgggatttcacatggtgaaatcccgtctctactaaaaatacaaaacttaaccgggattagctgggcatggtggcgtgagcctgtaatgtcagctacttggagaatctgaggcaggagaatcgcttgaacccagaaggcggaggctgcagtgagctgagatcgcgccactgcactccagcctgggcgacagaaagagacttccgtctggaaaaaaaaaaaaaatagtggttatttctgattatgtgtgttttttcttattttcttcattatatttcacatttaaaatttattttataatgagtatatattccattttattaaaaggtaatcatgttttaaaatctaaaaagtaagcataaatttcaaaaatcccagaccaaa

SEQ ID NO: 92018 - DNA, 682 bp, Homo sapiens
cttgaattatattccccaagagggtccagatatcaccaagcccacccaatacattggtgagggttgctcttgccaacatctctgaacagcactctagtggctgcactctgcaacctcgcratagccagtggtggggtgaggaatgccaaaattgtcttggcttccataatatcaggatcctgggatgtcataaagtcaaataatagcatttaaccagcagaaacaaagtgaatgtggctaccataataggcagcaggtccagtgggaataattgaagatttgaaccatagtggttaattgatcacggggtccctgaactgaaatacatggacagcaactaaatctcaatttgatttgtttaactaaaaccttccagttctatagaaaaaaagcctttacttgaacaaggatgactctcccatttcccagacctgaatcagttcacaaatcccagagcattctgaatgatgggcaacctagaaatctttactgaagtgcacgctgtgactctatctccaagcagtccccaaaggcattcatgaatgtataccagggcaactgtatgatacttcttggggaggagggatatttggaacctggctgtgaacatttattcccgaggacccagaatgccactgtcatccactggtcagagtgaggttcatgggcgtaaagtaaaaag

SEQ ID NO: 92019 - DNA, 2124 bp, Homo sapiens
accattggtagatcatcacagaagtggatatatttcaggaacttggcagacattaagttatactttcatgctctgggaaaaaatatctcccctcagtcagaggcaaaatagagtaactaaatatccttgtatatgtagagcagttttcagttttcaaaaggatgtttgcctgacattatctatcagatcctcatgcctctcgggaatacagagtacatagagttttgtgcccattttattgataagctgaggctcagagatactgagtagccagcccaagtaggtagcattggcagaattggtatgaaaatccagtgtttagctcttcgcaccactcttgctctctttttgtgcagaaaaaaaaaaaaaagaaatgagtggactgtgaagagatgcatatctggccatgtcacacttctaatagttccacacatctggaggagaagaaggagaaggtctttttggtacgttgtccttagtcctgagccatccagtaatgactgacctttctggcctcttcttttgtacttctctcccttcttccacacacaccctgggccaggaatcatgtccctttacttcattctgtgctccctcatgagcaattctctgtggcagtgggagccattaccccataccaaatgttcacgctctctcagaatgcagctgccaggaagcagctgcctacccaagactacatctctccacccctttgcatctacatgcgtggccagtggaatgtgaggcaaaatgatgagtgtcacttctggaccaaggtggttaaagttccagcatacattccctgcactgaagatgaaaacagcctgaatctctggatcaccactttgggaagagccactcagaacacactggacatgtcatgagcaagaaataaattttattatgataaacagctgagatttggggatcattttagtagtagttggcatccattgatcaatacatttcccctagataacattccctcctctcatttttctacctgggaaacacccttcaagacctagctcaaatctcatatctcagggatgcctgattccccagtcagggtaggctgggccctctggsacctttgcatgtcactctctaacagcacttatcacaggatatgacaagtagttctttacatggttgtctttcctgcttagcctgtgagcttaccaaagacaggaatcacatcacctctcagaacctagtgagcacagtaggaaatataaaaaccattaataaatacttgttgcctaaatggctgaatgggatggcccaagatagcagtcttttaattccaacatcactttgaaatatctttggaaaaggcctatgacttttgtctaacatttggactccgggaatgctcttgcatcacaaggcagcacccaaagaggttgagctcaggatgcccttgccttattcaagattcacagcctatgatgtttcactcaaccttccatgtgttctgcattcgggccctctttcttatttcttggcctccaaatcaccccatgcatctgacacttttcactcttgatcttcatgatctctactcttcttccttgactatcattggaacacgatcacccttctgacgagctgaggtagccttctgccaggtcttcctgcctgaacacaggccttcttagaagactttaggctcattcctgccacaggccttagtacatactgttccttttgcttgctatgctctccattacgcaccatctgctttcagtctgcggtcattttctttcacctactcagtgactattgtgctggatattttctatttgcttctccagatctatcctccactcttctcatcctggtctttggcaggagcctgatctatatagactgttacaatgggcttccttgccactggattctagttgggatacgtcaagagaaatgacaataggagatcagagggggtgaggacagtgaggtcagattatttattcttttggctccctttcttctgtgtctccatggattgtgactttactgaagtcacagttcctgttggactcccatgtcttacagctctgatattatgtcacatttccagtaaatacctttaggtccagatagaataacaggtccaca

SEQ ID NO: 92020 - DNA, 1238 bp, Homo sapiens
aaagcacatctgaaagatatacctgctcagaggctatgatagcagtctatttattatttccccttacagtcattcaatacatactatgtatggggcattggcagaaacacgggttgaaaagaagtggacccagttcctaccatcatagagctgattgtttagtgggggaaagtgatgtcaatcacatggttatacagacaagtataatcatattctttgaaggaggactgcatggtgctgatggtgctgctagaagctctaataatggcagcaggtaattagggaggtcagggaaggctgcttccgggaaagtgacaaagaagctgaaattgaataggagcaaacagagtgatccagatagagtgcacagtrtgttcaaaggccctgcaactggcacagggaatagcgtagactaaaagaagtcagtgtgattaggagtgaagagcaaagatgagcatattgaagaagttggagagtagcaggtattagcacatgcagtgtcgtctgggctatgctaagcagctcttgcctttaagtgtgcagaccctgggaccagagtgcctgcgtttatatcctgactccagcacttacgtctttgggaaagtctctttgcctccattttcttatttgtaaaacgaggatcgtattagtacctacctgatgaggactatatgagttagcagaaaagcatttagaacagtttctagcacatagcactatggtaattgttagccatcattattattctagaaaaagtatgtaactatgtatatttgtgtgtgtgtgtatatatgtgtgtgtgtgtgtatatatatatgtgtgtgtgtgtgtatccatgacttaattttcatgacttagtgtaaatacttccttgtatataatcctgcccatattgactttggtaatatcccaggaaaagcattctatattggaaaggagagggagatgggaaattaagagattttttctctaattttctctttgaaactataattttgagacttatgaagattctgatactgttttaaaacctctgtgtataaagaattgtattcttttttccatttattacccctgtgtaagagcatgaggacccagtaggtagcatttttctgtaggctaagaaacaatgtgctttgagaacctaaatacatttattcagcacctcttgaccccttaagttgaggtggacgtgcagtagcagaaatctcactgataaaaccccccttttcaagtca

SEQ ID NO: 92021 - DNA, 1056 bp, Homo sapiens
cccctctctctcactttctgccatgtgatttatgtacaccagctccccttagccttctgccatgagcagaaggcacctgaagccctcaccagaaacagatgctggtgctatgcttgtacagcctgcagaactgtaagccagataaacctctgttcaatataaattacccaacctcaggtattgctttatagcaatacaaatgggctgagacagacttcttgtttattttcatgccttattacattggctacaatgctcagcataatgatcattagaaattctaagaacaatgtaaattaatagaaatttctgcaacttgttggtcttatttgtgactttaaatgaatttcaaagttaagtccaatattgatctttggttcaatacaaatattttttttaataaagatgtaccctaaatcgcttaaagtttatttttcaataaaaagctgttgttttttttcttgttcatttatttttctgcattgataaaatattgtacatattttcctttgccatgttaatatgacactaatattaatgactagaggagctgctaagagtatgagacctggaaccagtctgcctaggttcaaatcctgactcagtttagtttgtttgggctgctataacaaaataccatagactaggaagtttgtaaacaagagaaatttacttctcacagttatggagrctggaaggtgctggcagattcagtgtctggtgagggctggttcctcacagacaacaccttctcactgcatgctcacataacagaaagggaaaacaagctcccttgtgcctattttatagggcattaatcccattcatgagggctttgccctgataatagagttacttcccaaaggtcccacctcttaatcccatcaaatttcgggttgtaatttcaatatacagattttggagagacacagacattcagaccatagtactatcatttacaagttgtgtaactgtggtacttctcttcatgctgtcacaggtacttcacttgtaaagtggggattagagtaatacctacctcagggttgttgggaa

SEQ ID NO: 92022 - DNA, 735 bp, Homo sapiens
ctttatatcacatgctgtcataggcccattgattgggaaaattcatacagatatgtttttctcagcgcttctcgtgtccctccaggactcaggcaaaatctggagtctggggttgtggtctccaggaagaaatgcagaagctgtctttattctgggatcatccacaccacccatggctttaattatcaccttataccagtaggtttgaacctagttagagggaagatgcagcccgttttacacacttctctgcttttctaatttgctgggagatactaacatgagtggatatagaattttgtcaaatgcttgttctccttctattagtatgatcaaatggtttctctaatttagcctgttaatatggtgaatcagactgattaattttcaaatgttgaaccaactttaccttctttggatgaactccccttggtaataatgtattgtcctttttagacattgctggatttgaattgctaatattttgtaaaggacttttgcaaatacgttcatgaggataccactctgtagttttgtttgttttcttttgtttgtcttgtaaactgtaatttttttggtaccartgtaatttatgcccacctcataaaataagttagaagtattctttcttctgccttctaaaacagatcatgtatcattgctgttattattattactattactattattatgccctttgtcaatgtctggtagaattcaccaatgtaatcattt

SEQ ID NO: 92023 - DNA, 434 bp, Homo sapiens
tttttttttttttttttttttgacgcggtctgtgttgccaagtttttctcaaactcctggccccaagcaattctcctgcctcagcctcccagagcactgtgattacaggtataaggkaccatgcctgaccaaaaaacagtttctaatatcatcaagctagtgatggagttaaatacgtaaaatgtaaaattttaaatcagatattcccctcaccccaccatggatatcacctttgagcaaagaaaatttacaaaaaaaaaaaagtcttggctgggcccggtggctcacacctgtaatgccagcactttgggaggccaaggtgggcagatcaccagttcaggatttcgagaccagcctagccaacatggtgaaaccccatctctactaaaaaatacaaaaattagccgggcgtggtggtgtgcacctgtagtccc

SEQ ID NO: 92024 - DNA, 754 bp, Homo sapiens
ttcattcctgcatgggccactattgacctttacaacataaagatcattaggttaccacaatctcatgttccccactgagtgttcactgttaagaatcctactaaagctcttgtgtaaaaaaataactgttactaattcataggtcccagagatgggcatcttcagccccaggtttagaggcaggctaccttgctactctatttcacatatgcccaatcctgatctttctatgcccaatcctgatctgttcatgaggtcaacaggtacaaaatgctgacaagttggtttaagacgtaacttggaaggctgaatatggaaaatgtatctatctccagcattactgtccattatgcaaggccacacgggttgcagtttgagaggaaataccacagttaatcaggcaaggtttacccaaagcttccactgtctaggaaatctagttcacaaaaataatccattggaaaagttacacaaaaccagatcgttaytattatgcaaaatgaaagatgaagtcagaatccctttaactgggtatgaatggttcctttacctttcctgcccacgttcttccagccaggccttgcagcaatgcggtcagtatcattccgagatatggaggtactagagagctagtctgttttgcaattgatgccatggcaattgcaccctgggctttcattttccaggactgagactgcaaagccttctgggtaatagtaattaactcctgcaggtataatcgaatgccaccaaa

SEQ ID NO: 92025 - DNA, 856 bp, Homo sapiens
ttacgagcgctgcttcagccggctttctggccttcgagctttaagcatcacgaatgttctcttttacaatgaagacctggctgaagttgcctcattgccaagattagagagcttggatatttctaacacctcaatcacagacatcactgctctactggcctgcaaagaccgactcaagtctctaaccatgcaccacttgaaatgtttaaaaatgacaactacccagatactggatgtagttcgggaactcaaacatctgaatcatcttgatatctcagatgataaacagtttacatcagacatagctcttcgcttactagaacaaaaagacatcctacctaaccttgtttctctggatgtttctgggagaaagcacgtgacagataaagccgttgaagcctttatacaacaacgtccaagcatgcaatttgtaggtttgctggctactgatgctggttactctgaattcctcacaggcgaaggacatttgaaggttagactttaaaaatgtattattttgtcaggctgaccaatatcttagttgcataagactctattaaagatgaatgtctrtaatatatggaacatgttcatgaaacagggctgcatatagttgaaaggcttagagtcctaattaaaatctcagcttcatgacccagaacaagctatgatgtcacttcgagtttttatttatttgtagaatagatattattcttaccttgcagaattctgaagattaataataatctatgtaaagggcaagtcacgtagtaggtcctggctaaacaataggttgtcttatgatgataatgtttagctattttgaaccatttacatatatggtttttttgttttt

SEQ ID NO: 92026 - DNA, 634 bp, Homo sapiens
ctgttgatctgtgaccttacccccaaccctgtgctctctgaaacatgtrctgtgtccactcagggttaaatggattaagggcggtgcaagacgtgctttgttaaacagatgcttgaaggcagcatgctcgttaagagtcatcaccactccctaatctcaagtacccagggacacaaacactgcggaaggccgcagggtcctctgcctaggaaaaccagagacctttgttcacttgtttatctgctgaccttccctccactattgtcctatgaccctgccaaatccccctctgcgagaaacacccaagaatgatcaataaaaaataaaaaaaataaaaaataaaatgtggaatcttctcttttcctctctgtgaccaatcctaatttgtgttactctgtttcctagtgcttggtgccaggtaccatccttccatatcacagctttacctttcaccatgaaatatccccactttcaaaatcttctccccttctacattttcacctagtcaaataaataaaaagtagaagctttattggcacctgtaactatacaataaggattacaaaagaaataaatgttgtggccctgagctcgaaaatagtatattcctatcaggggaaagaaaaccatatag

SEQ ID NO: 92027 - DNA, 634 bp, Homo sapiens
ctgttgatctgtgaccttacccccaaccctgtgctctctgaaacatgtgytgtgtccactcagggttaaatggattaagggcggtgcaagacgtgctttgttaaacagatgcttgaaggcagcatgctcgttaagagtcatcaccactccctaatctcaagtacccagggacacaaacactgcggaaggccgcagggtcctctgcctaggaaaaccagagacctttgttcacttgtttatctgctgaccttccctccactattgtcctatgaccctgccaaatccccctctgcgagaaacacccaagaatgatcaataaaaaataaaaaaaataaaaaataaaatgtggaatcttctcttttcctctctgtgaccaatcctaatttgtgttactctgtttcctagtgcttggtgccaggtaccatccttccatatcacagctttacctttcaccatgaaatatccccactttcaaaatcttctccccttctacattttcacctagtcaaataaataaaaagtagaagctttattggcacctgtaactatacaataaggattacaaaagaaataaatgttgtggccctgagctcgaaaatagtatattcctatcaggggaaagaaaaccatatag

SEQ ID NO: 92028 - DNA, 634 bp, Homo sapiens
ctgttgatctgtgaccttacccccaaccctgtgctctctgaaacatgtgctgtgtccactcagggttaaatggattaaggrcggtgcaagacgtgctttgttaaacagatgcttgaaggcagcatgctcgttaagagtcatcaccactccctaatctcaagtacccagggacacaaacactgcggaaggccgcagggtcctctgcctaggaaaaccagagacctttgttcacttgtttatctgctgaccttccctccactattgtcctatgaccctgccaaatccccctctgcgagaaacacccaagaatgatcaataaaaaataaaaaaaataaaaaataaaatgtggaatcttctcttttcctctctgtgaccaatcctaatttgtgttactctgtttcctagtgcttggtgccaggtaccatccttccatatcacagctttacctttcaccatgaaatatccccactttcaaaatcttctccccttctacattttcacctagtcaaataaataaaaagtagaagctttattggcacctgtaactatacaataaggattacaaaagaaataaatgttgtggccctgagctcgaaaatagtatattcctatcaggggaaagaaaaccatatag

SEQ ID NO: 92029 - DNA, 634 bp, Homo sapiens
ctgttgatctgtgaccttacccccaaccctgtgctctctgaaacatgtgctgtgtccactcagggttaaatggattaagggcggtgcaagaygtgctttgttaaacagatgcttgaaggcagcatgctcgttaagagtcatcaccactccctaatctcaagtacccagggacacaaacactgcggaaggccgcagggtcctctgcctaggaaaaccagagacctttgttcacttgtttatctgctgaccttccctccactattgtcctatgaccctgccaaatccccctctgcgagaaacacccaagaatgatcaataaaaaataaaaaaaataaaaaataaaatgtggaatcttctcttttcctctctgtgaccaatcctaatttgtgttactctgtttcctagtgcttggtgccaggtaccatccttccatatcacagctttacctttcaccatgaaatatccccactttcaaaatcttctccccttctacattttcacctagtcaaataaataaaaagtagaagctttattggcacctgtaactatacaataaggattacaaaagaaataaatgttgtggccctgagctcgaaaatagtatattcctatcaggggaaagaaaaccatatag

SEQ ID NO: 92030 - DNA, 858 bp, Homo sapiens
tgaattgtagctcccataattccctcatattgtcgggggtacccagtgggagataactgaatcataggggcattttcctccatactgttcttgtggtagtgaataagtctcacaagatctggtggtttcataaggggaaacccctctcacttggttcctcattcttctcgtctaccaccatgtgagatgtgcctgttaccttccaccatgagtgtgaggcctccgcagccacgtggaactgtgagtccattgaacctctttcttttgaaatttgcccagtttcaagtatgttgtttatttcccccattagaatgtaagctccttgacagcagagatttttttccatttcatcactgatctatttgaaaagcttagaacaatgcagcatacataataggtgctcaataagtatctgttgaaggaatgaatgcaccattcctctatcctatcttgtattttagttctagataagaaacacattccraaagtttcattctaatctccattccccttccgggttataagcttatttttcatttgttttaaatagtttttgtcctacatgtgtagtactgaaaaacagatacaaggtaagaaattggaatttgggagtaaataattgttgaaaacctgtgggatatgcctgaaattgtcagaaatgttttttgctgttttctttagtatccctaccaaggagggggtcaaaacccacccagttaacccctctccaatcagcttcttgtaactttgatcagcccttatatactctattgtatattctgtcaagttgatactgggattattcatgtccttaagtttgtcttacatatgcaaattataaaaccctaagtggacagt

SEQ ID NO: 92031 - DNA, 763 bp, Homo sapiens
gcattatctccatacctcagtattctgagaaataagagacctctcatctttaattcagggactcttgtttatcctacatacccattctttccttttctaacagctgggtataggatggcttggaataaagactgcattttccatcctcccttgcagctaggtataaccatgtaactaaattctgcccaatagwattgaagcagaagtattgtgggataacttaaaagaatctgccttctcagactctgtatatgctttagctagataatcagattctactgtttttgttgcctctttgggaatggacttttgtaccaggaagtaacatatcctgctcaatgatttccgtatgtgccaggatgatacatacaacatggcagacaaccaagtttttaggcttttgtgtgcttctttttttttaaacattgaaaacaacagaaagaagaaagtttgagttaagccatgtaatcaacaaattgaagtaaacaggacatgaagtagcaaagtagtagatattagaaatggaacagatcagtgaagtctgttcatccttgagtcactgaagatccttggtcatcatgctaaagcaagaaatgcttattcttaataagtaatagtcctgttcatttataaacttggttttcaggattctcaagctcatcagtcacttctatggaaagaaaagctcacattttaatatgtctcactgccatagaatgtaatttctgtcatgttgtgtatattttctcatttaaattcatta

SEQ ID NO: 92032 - DNA, 508 bp, Homo sapiens
  misc_feature (1)...(508): n = A,T,C or G
aggccaggttgatagcaagagggagtgtttttcttttaatttgtcaatagcaaagtgatgtttgccactgtcatttcagagtgaggggacaatttgttgttgtttggttttgtgggtttttgtttgtttgtttgtttgtttttgagacaaggtctcactgtcacccaggctggagtgcagtggcatgtnnnnnnnnnnnnnnnnnnnnnnnnnnnnnnnnnnnnnnnnnnnnnnnnnnnnnnnnnnnnnnnnnnnnnnnnnnnnnnnnnnnnnnnnnnnnnnnnnnnntcctgccttgacctcatgaattcaagcaaacctccttactaatcctcctgagtagctgggactacaggyacgtgaccccacaccctggggtgtgaactgggatttgatgttttcagttggctctctaatggaataggttcccttactcttgtagaatcagattgtcttcatgattatcattcttgtgtgccttatatttctactaccctgctgttttttt

SEQ ID NO: 92033 - DNA, 2760 bp, Homo sapiens
agaccgttatcccaagatcatttgtcccaagtttgtgcaaatggttatgccatatttttccaatcgatttaaagcaaatgcccccaaatggttgctgggagaaaaactgcaatattcagccctgtctcatcaaatactcagattcttcatggtagcgaggattttagacgctgaaattagagtgaaggatgaaatctacaagatctacaaaattgagacaaaatcagagttgtgtgaatttgtcacatctgcccagatccaacatcttgagagtaggattagggtgccacaggcatggcctgagactaggaagagagccctgctcactgacccatcccttgcctgggcttccaagtggaactagagtttcattcaacctacatgtgcctataggtcctccctgtggcaatgacatctctcagctcagtaagggccatttgcagtaggaatatgaccctaaccagaagactcagtggatccttatcaccttcatagaaaggtactcaccatccatgtcaagagcccagccaacacgctgttgctccaatatgtaamaggcacttctgtagggctggcatgagtcagtcagttcaagataacctgaaggagttgaataacatctatccagtgagtcctgcaagacttcaggccctttctcatccagcagctccctgctgagcctggaacagtgggaaaaagtaaagaataagccaggggaaatcagaaaccacacagccccagctagatttcatggctaacataaggaagagtttgaaaagaaaaaggacagatccattaatgaggtaacaaattattgtctttatgttgggatagaacagggccaggtagaaaacaatgaaagagaaagacagagagacagagacagagacagagacagagagaaagtgagctagtgaattggccaggtgacatactggtaagggagtaaaaggacactctgagttagtgccctcatgacacacagcaaactgcgatcatgaaaagagtgagctcaatagttttccataaaatatgctcaaaattcgatgcagtggccacgagagtacagcttttgaagtatggtcatcctatggtacgttagtaaatgataaggggaggaagaaatggaaacctaaacatctactgcaatgaaaaccaacagcaatgacagtaggagtaattcagccttcgttgaaaacatgaaatcaaacacactctggtttccctgaatctgttgcctccaggtgttaacacagaattaagcatccacaattgctgaaagttacctggggcatggtgggttttgatcttcttccccttcttttcttccccttctccttcttttcttcgttgatcttcttccccttcttttcttccccttccccttcttttcaatttctgcaataaattcagacatggacagacacattaagctgattcccctacacacataacaatccactgtctaatcctcacacagggacctcaggctcctcagcataagaataggagactgtgagagatatatttcaggaggcctgaaggctggtcatgatagaaattcctcggtttttctcccagaaactgtgggtaaaatgtccctattctagtagatcgttatcccaatatcatttgtcccgagtttgtgcaaacagttatgccatatttttccaatcaatttaaagcaaataccctcaaatgatttctaggagaaaaactgcaatatttagccctgtctcatcaaatactcagattgttcatggttgtgaggactttagacactgaaattagagtgaaaaaggaaatctacaaacccttgagtcaaaatcatagttctctgaatttgtcacatctgcccaggtccaatgtcatgagagtagaatcagagtgccacaggcatggcctgagactaggaagagagccatgctcactgacccatcccatgtctgggcttccagttagaactagagtttcattcaacctacatgtgcctataggtcctcactgcagcaatgacatctctcagctcagtaatggccacttggagcaggaatatgatctttatatggaagactcagtggatccttatcaccttcatagaaaggtactcacctcccacgtcaagagaaaagccaacatgtttttcctccaatgcataaaaggaacttccatagggcaggcaggagtcaggctgttcaagacaactggaaggagttgaataacatctatccagtgagtcctgcaagacttcaggctctactgcctccagcagctccctgctgagcctggaaaaggaggaaaaagtaaagaataagccaggggaaatcagacacaacagagccccaactaggtttcatgggtagcataaggaagtggttgaaaaagtaaaaggagagatccattaatgaggtaacaaattattgccttcatgttgggacagaacagggccaaatggaaaagaatgaaagagaaagacagatagacacacacacacacacacacacacacacacacacacacacacagagaatgagctcagtgaattgtccaggtgacacactgatgagggagtaacaggacactctgagttagtgccctcaggacacacagcatacagtgatcaggaaaggactgtgctcaataattttccataaaatgtgctcaagtttccatgcagtcgccatgagaatacagtttttgaagtctggtccacctacagtaggttagtaaatgataaggggaggaagaaatggaaaccta

SEQ ID NO: 92034 - DNA, 2760 bp, Homo sapiens
agaccgttatcccaagatcatttgtcccaagtttgtgcaaatggttatgccatatttttccaatcgatttaaagcaaatgcccccaaatggttgctgggagaaaaactgcaatattcagccctgtctcatcaaatactcagattcttcatggtagcgaggattttagacgctgaaattagagtgaaggatgaaatctacaagatctacaaaattgagacaaaatcagagttgtgtgaatttgtcacatctgcccagatccaacatcttgagagtaggattagggtgccacaggcatggcctgagactaggaagagagccctgctcactgacccatcccttgcctgggcttccaagtggaactagagtttcattcaacctacatgtgcctataggtcctccctgtggcaatgacatctctcagctcagtaagggccatttgcagtaggaatatgaccctaaccagaagactcagtggatccttatcaccttcatagaaaggtactcaccatccatgtcaagagcccagccaacacgctgttgctccaatatgtaacaggcacttctgtagggctggcatgagtcagtcagttcaagataacctgaaggagttgaataacatctatccagtgagtcctgcaagacttcaggccctttctcatccagcagctccctgctgagcctggaacagtgggaaaaagtaaagaataagccaggggaaatcagaaaccacacagccccagctagatttcatggctaacataaggaagagtttgaaaagaaaaaggacagatccattaatgaggtaacaaattattgyctttatgttgggatagaacagggccaggtagaaaacaatgaaagagaaagacagagagacagagacagagacagagacagagagaaagtgagctagtgaattggccaggtgacatactggtaagggagtaaaaggacactctgagttagtgccctcatgacacacagcaaactgcgatcatgaaaagagtgagctcaatagttttccataaaatatgctcaaaattcgatgcagtggccacgagagtacagcttttgaagtatggtcatcctatggtacgttagtaaatgataaggggaggaagaaatggaaacctaaacatctactgcaatgaaaaccaacagcaatgacagtaggagtaattcagccttcgttgaaaacatgaaatcaaacacactctggtttccctgaatctgttgcctccaggtgttaacacagaattaagcatccacaattgctgaaagttacctggggcatggtgggttttgatcttcttccccttcttttcttccccttctccttcttttcttcgttgatcttcttccccttcttttcttccccttccccttcttttcaatttctgcaataaattcagacatggacagacacattaagctgattcccctacacacataacaatccactgtctaatcctcacacagggacctcaggctcctcagcataagaataggagactgtgagagatatatttcaggaggcctgaaggctggtcatgatagaaattcctcggtttttctcccagaaactgtgggtaaaatgtccctattctagtagatcgttatcccaatatcatttgtcccgagtttgtgcaaacagttatgccatatttttccaatcaatttaaagcaaataccctcaaatgatttctaggagaaaaactgcaatatttagccctgtctcatcaaatactcagattgttcatggttgtgaggactttagacactgaaattagagtgaaaaaggaaatctacaaacccttgagtcaaaatcatagttctctgaatttgtcacatctgcccaggtccaatgtcatgagagtagaatcagagtgccacaggcatggcctgagactaggaagagagccatgctcactgacccatcccatgtctgggcttccagttagaactagagtttcattcaacctacatgtgcctataggtcctcactgcagcaatgacatctctcagctcagtaatggccacttggagcaggaatatgatctttatatggaagactcagtggatccttatcaccttcatagaaaggtactcacctcccacgtcaagagaaaagccaacatgtttttcctccaatgcataaaaggaacttccatagggcaggcaggagtcaggctgttcaagacaactggaaggagttgaataacatctatccagtgagtcctgcaagacttcaggctctactgcctccagcagctccctgctgagcctggaaaaggaggaaaaagtaaagaataagccaggggaaatcagacacaacagagccccaactaggtttcatgggtagcataaggaagtggttgaaaaagtaaaaggagagatccattaatgaggtaacaaattattgccttcatgttgggacagaacagggccaaatggaaaagaatgaaagagaaagacagatagacacacacacacacacacacacacacacacacacacacacacagagaatgagctcagtgaattgtccaggtgacacactgatgagggagtaacaggacactctgagttagtgccctcaggacacacagcatacagtgatcaggaaaggactgtgctcaataattttccataaaatgtgctcaagtttccatgcagtcgccatgagaatacagtttttgaagtctggtccacctacagtaggttagtaaatgataaggggaggaagaaatggaaaccta

SEQ ID NO: 92035 - DNA, 2760 bp, Homo sapiens
agaccgttatcccaagatcatttgtcccaagtttgtgcaaatggttatgccatatttttccaatcgatttaaagcaaatgcccccaaatggttgctgggagaaaaactgcaatattcagccctgtctcatcaaatactcagattcttcatggtagcgaggattttagacgctgaaattagagtgaaggatgaaatctacaagatctacaaaattgagacaaaatcagagttgtgtgaatttgtcacatctgcccagatccaacatcttgagagtaggattagggtgccacaggcatggcctgagactaggaagagagccctgctcactgacccatcccttgcctgggcttccaagtggaactagagtttcattcaacctacatgtgcctataggtcctccctgtggcaatgacatctctcagctcagtaagggccatttgcagtaggaatatgaccctaaccagaagactcagtggatccttatcaccttcatagaaaggtactcaccatccatgtcaagagcccagccaacacgctgttgctccaatatgtaacaggcacttctgtagggctggcatgagtcagtcagttcaagataacctgaaggagttgaataacatctatccagtgagtcctgcaagacttcaggccctttctcatccagcagctccctgctgagcctggaacagtgggaaaaagtaaagaataagccaggggaaatcagaaaccacacagccccagctagatttcatggctaacataaggaagagtttgaaaagaaaaaggacagatccattaatgaggtaacaaattattgtctttatgttgggatagaacagggccaggtagaaaacaatgaaagagaaagacagagagacagagacagagacagagacagagagaaagtgagctagtgaattggccaggtgacatactggtaagggagtaaaaggacactctgagttagtgccctcatgacacacagcaaactgcgatcatgaaaagagtgagctcaatagttttccataaaatatgctcaaaattcgatgcagtggccacgagagtacagcttttgaagtatggtcatcctatggtacgttagtaaatgataaggggaggaagaaatggaaacctaaacatctactgcaatgaaaaccaacagcaatgacagtaggagtaattcagccttcgttgaaaacatgaaatcaaacacactctggtttccctgaatctgttgcctccaggtgttaacacagaattaagcatccacaattgctgaaagttacctggggcatggtgggttttgatcttcttccccttcttttcttccccttctccttcttttcttcgttgatcttcttccccttcttttcttccccttccccttcttttcaatttctgcaataaattcagacatggacagacacattaagctgattcccctacacacataacaatccactgtctaatcctcacacagggacctcaggctcctcagcataagaataggagactgtgagagatatatttcaggaggcctgaaggctggtcatgatagaaattcctcggtttttctcccagaaactgtgggtaaaatgtccctattctagtagatcgttatcccaatatcatttgtcccgagtttgtgcaaacagttatgccatatttttccaatcaatttaaagcaaataccctcaaatgatttctaggagaaaaactgcaatatttagccctgtctcatcaaatactcagattgttcatggttgtgaggactttagacactgaaattagagtgaaaaaggaaatctacaaacccttgagtcaaaatcatagttctctgaatttgtcacatctgcccaggtccaatgtcatgagagtagaatcagagtgccacaggcatggcctgagactaggaagagagccatgctcactgacccatcccatgtcwgggcttccagttagaactagagtttcattcaacctacatgtgcctataggtcctcactgcagcaatgacatctctcagctcagtaatggccacttggagcaggaatatgatctttatatggaagactcagtggatccttatcaccttcatagaaaggtactcacctcccacgtcaagagaaaagccaacatgtttttcctccaatgcataaaaggaacttccatagggcaggcaggagtcaggctgttcaagacaactggaaggagttgaataacatctatccagtgagtcctgcaagacttcaggctctactgcctccagcagctccctgctgagcctggaaaaggaggaaaaagtaaagaataagccaggggaaatcagacacaacagagccccaactaggtttcatgggtagcataaggaagtggttgaaaaagtaaaaggagagatccattaatgaggtaacaaattattgccttcatgttgggacagaacagggccaaatggaaaagaatgaaagagaaagacagatagacacacacacacacacacacacacacacacacacacacacacagagaatgagctcagtgaattgtccaggtgacacactgatgagggagtaacaggacactctgagttagtgccctcaggacacacagcatacagtgatcaggaaaggactgtgctcaataattttccataaaatgtgctcaagtttccatgcagtcgccatgagaatacagtttttgaagtctggtccacctacagtaggttagtaaatgataaggggaggaagaaatggaaaccta

SEQ ID NO: 92036 - DNA, 2760 bp, Homo sapiens
agaccgttatcccaagatcatttgtcccaagtttgtgcaaatggttatgccatatttttccaatcgatttaaagcaaatgcccccaaatggttgctgggagaaaaactgcaatattcagccctgtctcatcaaatactcagattcttcatggtagcgaggattttagacgctgaaattagagtgaaggatgaaatctacaagatctacaaaattgagacaaaatcagagttgtgtgaatttgtcacatctgcccagatccaacatcttgagagtaggattagggtgccacaggcatggcctgagactaggaagagagccctgctcactgacccatcccttgcctgggcttccaagtggaactagagtttcattcaacctacatgtgcctataggtcctccctgtggcaatgacatctctcagctcagtaagggccatttgcagtaggaatatgaccctaaccagaagactcagtggatccttatcaccttcatagaaaggtactcaccatccatgtcaagagcccagccaacacgctgttgctccaatatgtaacaggcacttctgtagggctggcatgagtcagtcagttcaagataacctgaaggagttgaataacatctatccagtgagtcctgcaagacttcaggccctttctcatccagcagctccctgctgagcctggaacagtgggaaaaagtaaagaataagccaggggaaatcagaaaccacacagccccagctagatttcatggctaacataaggaagagtttgaaaagaaaaaggacagatccattaatgaggtaacaaattattgtctttatgttgggatagaacagggccaggtagaaaacaatgaaagagaaagacagagagacagagacagagacagagacagagagaaagtgagctagtgaattggccaggtgacatactggtaagggagtaaaaggacactctgagttagtgccctcatgacacacagcaaactgcgatcatgaaaagagtgagctcaatagttttccataaaatatgctcaaaattcgatgcagtggccacgagagtacagcttttgaagtatggtcatcctatggtacgttagtaaatgataaggggaggaagaaatggaaacctaaacatctactgcaatgaaaaccaacagcaatgacagtaggagtaattcagccttcgttgaaaacatgaaatcaaacacactctggtttccctgaatctgttgcctccaggtgttaacacagaattaagcatccacaattgctgaaagttacctggggcatggtgggttttgatcttcttccccttcttttcttccccttctccttcttttcttcgttgatcttcttccccttcttttcttccccttccccttcttttcaatttctgcaataaattcagacatggacagacacattaagctgattcccctacacacataacaatccactgtctaatcctcacacagggacctcaggctcctcagcataagaataggagactgtgagagatatatttcaggaggcctgaaggctggtcatgatagaaattcctcggtttttctcccagaaactgtgggtaaaatgtccctattctagtagatcgttatcccaatatcatttgtcccgagtttgtgcaaacagttatgccatatttttccaatcaatttaaagcaaataccctcaaatgatttctaggagaaaaactgcaatatttagccctgtctcatcaaatactcagattgttcatggttgtgaggactttagacactgaaattagagtgaaaaaggaaatctacaaacccttgagtcaaaatcatagttctctgaatttgtcacatctgcccaggtccaatgtcatgagagtagaatcagagtgccacaggcatggcctgagactaggaagagagccatgctcactgacccatcccatgtctgggcttccagttagaactagagtttcattcaacctacatgtgcctataggtcctcactgcagcaatgacatctctcagctcagtaatggccacttggagcaggaatatgatctttatatggaagactcagtggatccttatcaccttcatagaaaggtactcacctcccacgtcaagagaaaagccaacatgtttttcctccaatgcataaaaggaacttccatagggcaggcaggagtcaggctgttcaagacaactggaaggagttgaataacatctatccagtgagtcctgcaagacttcaggctctactgcctcmagcagctccctgctgagcctggaaaaggaggaaaaagtaaagaataagccaggggaaatcagacacaacagagccccaactaggtttcatgggtagcataaggaagtggttgaaaaagtaaaaggagagatccattaatgaggtaacaaattattgccttcatgttgggacagaacagggccaaatggaaaagaatgaaagagaaagacagatagacacacacacacacacacacacacacacacacacacacacacagagaatgagctcagtgaattgtccaggtgacacactgatgagggagtaacaggacactctgagttagtgccctcaggacacacagcatacagtgatcaggaaaggactgtgctcaataattttccataaaatgtgctcaagtttccatgcagtcgccatgagaatacagtttttgaagtctggtccacctacagtaggttagtaaatgataaggggaggaagaaatggaaaccta

SEQ ID NO: 92037 - DNA, 2218 bp, Homo sapiens
aggaaaactgcagtattcagccctgtctcatcaaatgcccagctcgttcatggatgcaagaattttagacactgaaattagaatgagggaggaaatctacaaacccttgagtccaaatcatagttctgtgaattttttacatctgcctgggtccaatgtgctgagagcgggctcaggttgccacaggcatggctggagactaggaatagagccttgctcactgacccatttcatgtctaggcttccagcggagactacagtttcattacaacctatatgcgcccataggtcctgcctgcggcaatgacatctctcgggtcagtaagggccactgggaacaggaatatcacccctatctggaagaccaggtggaggcttatcaccttcatagtaaggtactcactgtccacgtcaagagccaagccaaggtactgttcctccaatgagtgaacagcacttctgtagggctggcctaagtcaggcagttcaagataacctgaaggagtcgaataacatctatccagtgagtcctgcaagacttcaggctctttctcatccagcagctccctgctgagcctggaaaagtaggaaaaagtaaagaataagccagggggaatcagaaaccacacagccccagctacatttcatggctaacataaggaactgtttaaacagaaaaaggacagatccattaatgaggtaatgaattattgcctttatgttgggatagaccagggccaggtagaaaagaatgaaagagaaagacagggagagggagagggagagagagacagaggagaaagtgagctcagcgaattggccgggtgacacactgatgaaggggtcaaaggacactctgagttagtgccctcgggacacacagagaacagtgatcatgaaaagagtgggctcaataattttccataaacttgcttaagattccatgcagttgccatacagcctttgaggtatggtcaacctacagtaagttagtaaatgataaggggaggaagaaatggaaacctaaacatctactgcaaggaaaaccaacagcaatgtcagtaggagtaattcaaccttcgttgaaaacatgaaattgaacatactcttgttttccctggacctggcatctccaggtgtcaacacagaattaagcatccataattgctcaaagttacctggggcatgatgggtcttggtcttcttccacttcttggtacttttcaatttctgcaataagttcagacatggacagacatattaagctggttctcctacacacataacaatccactgtctaatcctcacacagggacttcaggctcctcagcatgagaataggacactgtgagagatcttcttcaggaggcctgaaggctgatcatgatagagattcctgggtttttgtcccagaaactgtgggtaaaattccctattctggtagatcgttatcccaagatcatttgtcccaagtttgtgcaaatggttatgccatatttttccaatcgatttaaagcaaatgyccccaaatggttgctgggagaaaaactgcaatattcagccctgtctcatcaaatactcagattcttcatggtagcgaggattttagacgctgaaattagagtgaaggatgaaatctacaagatctacaaaattgagacaaaatcagagttgtgtgaatttgtcacatctgcccagatccaacatcttgagagtaggattagggtgccacaggcatggcctgagactaggaagagagccctgctcactgacccatcccttgcctgggcttccaagtggaactagagtttcattcaacctacatgtgcctataggtcctccctgtggcaatgacatctctcagctcagtaagggccatttgcagtaggaatatgaccctaaccagaagactcagtggatccttatcaccttcatagaaaggtactcaccatccatgtcaagagcccagccaacacgctgttgctccaatatgtaaaaggcacttctgtagggctggcatgagtcagtcagttcaagataacctgaaggagttgaataacatctatccagtgagtcctgcaagacttcaggccctttctcatccagcagctccctgctgagcctggaacagtgggaaaaagtaaagaataagccagggggaatcagaaaccacacagccccagctagatttcatggctaacataaggaagagtttgaa

SEQ ID NO: 92038 - DNA, 2218 bp, Homo sapiens
aggaaaactgcagtattcagccctgtctcatcaaatgcccagctcgttcatggatgcaagaattttagacactgaaattagaatgagggaggaaatctacaaacccttgagtccaaatcatagttctgtgaattttttacatctgcctgggtccaatgtgctgagagcgggctcaggttgccacaggcatggctggagactaggaatagagccttgctcactgacccatttcatgtctaggcttccagcggagactacagtttcattacaacctatatgcgcccataggtcctgcctgcggcaatgacatctctcgggtcagtaagggccactgggaacaggaatatcacccctatctggaagaccaggtggaggcttatcaccttcatagtaaggtactcactgtccacgtcaagagccaagccaaggtactgttcctccaatgagtgaacagcacttctgtagggctggcctaagtcaggcagttcaagataacctgaaggagtcgaataacatctatccagtgagtcctgcaagacttcaggctctttctcatccagcagctccctgctgagcctggaaaagtaggaaaaagtaaagaataagccagggggaatcagaaaccacacagccccagctacatttcatggctaacataaggaactgtttaaacagaaaaaggacagatccattaatgaggtaatgaattattgcctttatgttgggatagaccagggccaggtagaaaagaatgaaagagaaagacagggagagggagagggagagagagacagaggagaaagtgagctcagcgaattggccgggtgacacactgatgaaggggtcaaaggacactctgagttagtgccctcgggacacacagagaacagtgatcatgaaaagagtgggctcaataattttccataaacttgcttaagattccatgcagttgccatacagcctttgaggtatggtcaacctacagtaagttagtaaatgataaggggaggaagaaatggaaacctaaacatctactgcaaggaaaaccaacagcaatgtcagtaggagtaattcaaccttcgttgaaaacatgaaattgaacatactcttgttttccctggacctggcatctccaggtgtcaacacagaattaagcatccataattgctcaaagttacctggggcatgatgggtcttggtcttcttccacttcttggtacttttcaatttctgcaataagttcagacatggacagacatattaagctggttctcctacacacataacaatccactgtctaatcctcacacagggacttcaggctcctcagcatgagaataggacactgtgagagatcttcttcaggaggcctgaaggctgatcatgatagagattcctgggtttttgtcccagaaactgtgggtaaaattccctattctggtagatcgttatcccaagatcatttgtcccaagtttgtgcaaatggttatgccatatttttccaatcgatttaaagcaaatgcccccaaatggttgctgggagaaaaactgcaatattcagccctgtctcatcaaatactcagattcttcatggtagcgaggattttagaygctgaaattagagtgaaggatgaaatctacaagatctacaaaattgagacaaaatcagagttgtgtgaatttgtcacatctgcccagatccaacatcttgagagtaggattagggtgccacaggcatggcctgagactaggaagagagccctgctcactgacccatcccttgcctgggcttccaagtggaactagagtttcattcaacctacatgtgcctataggtcctccctgtggcaatgacatctctcagctcagtaagggccatttgcagtaggaatatgaccctaaccagaagactcagtggatccttatcaccttcatagaaaggtactcaccatccatgtcaagagcccagccaacacgctgttgctccaatatgtaaaaggcacttctgtagggctggcatgagtcagtcagttcaagataacctgaaggagttgaataacatctatccagtgagtcctgcaagacttcaggccctttctcatccagcagctccctgctgagcctggaacagtgggaaaaagtaaagaataagccagggggaatcagaaaccacacagccccagctagatttcatggctaacataaggaagagtttgaa

SEQ ID NO: 92039 - DNA, 784 bp, Homo sapiens
ctagtattatccccatttcactgatgaggaaatcaaggcaagtgaagtcacatccccaaggtgtgacagagctggtaagtgacacagctgggatttgaacactcgctgtctggcttctgacaaggatctgtgtgcttaaccttgatgctaagttgaataaatacggcacatcttgccaagcaaagaaaagaatctaaagatgttcaaactctcccttcagcagagggcaaagggtggaaagtaagcagctagcaccaggtgaacgagaggaggcaggttgataagccagcttccttcccaggaaaccccttctgtcttagaggaccctgtaaaaccttcttacttcaccaaaatgaatctcacaactgttggaaaaacagagccaccctatcctgttcccccaaacactgtccccaagtctattatgcaagcgcctattacagygagttgtggatgtctcttttgtggtcatggtttttaactgcaaatgaaagaagaaacccaagtcaggaagcgtgcatcttaccaatcccacatttgggggtgcaggagaccccgaaatgtgggctgtctttggaaagagtagaacactccgcgtggggctggcgggctgctgctgggaaggatgaggtatggtaagggctgagacaaccccaagataatctgggggaaaatcctggcaggggaaggaagggaagtgagccattaggggtgaccctggctccggaagttgaatctctctctgaagaaggacagagtggccacacgcggttcctgggatcca

SEQ ID NO: 92040 - DNA, 784 bp, Homo sapiens
ctagtattatccccatttcactgatgaggaaatcaaggcaagtgaagtcacatccccaaggtgtgacagagctggtaagtgacacagctgggatttgaacactcgctgtctggcttctgacaaggatctgtgtgcttaaccttgatgctaagttgaataaatacggcacatcttgccaagcaaagaaaagaatctaaagatgttcaaactctcccttcagcagagggcaaagggtggaaagtaagcagctagcaccaggtgaacgagaggaggcaggttgataagccagcttccttcccaggaaaccccttctgtcttagaggaccctgtaaaaccttcttacttcaccaaaatgaatctcacaactgttggaaaaacagagccaccctatcctgttcccccaaacactgtccccaagtctattatgcaagcgcctattacagcgagttgtggatgtctcttttgtggtcatggtttttaactgcaaatgaaagaagaaacccaagtcaggaagcgtgcatcttaccaatcccacatttgggggtgcaggagaccccgaaatgtgggctgtctttggaaagagtagaacactccgygtggggctggcgggctgctgctgggaaggatgaggtatggtaagggctgagacaaccccaagataatctgggggaaaatcctggcaggggaaggaagggaagtgagccattaggggtgaccctggctccggaagttgaatctctctctgaagaaggacagagtggccacacgcggttcctgggatcca

SEQ ID NO: 92041 - DNA, 706 bp, Homo sapiens
aaaataatgataatagtaataatttactgttctcataaaaattagcagatggggaatggaggcaagcctgtgcagaccatgacaactagtttagattttattgtcaactcattaaaaactcgttctcgttttgtgtttttaaaaaattccacggatacagccgttttctctaccgaaaaagactataaccacattatttcaccagtggaagctacagacaaagggcccttgagaggcggcatcttcacctacgggaatttttcctgctcaactgtgagacaaagagcatgtccaagttttcctatcggccaggccgccccctagtttctgcgctgtgggctaaactccagaagctggcgcccttcggggccagaggtttactctgctctctggaggctgctaggattaaaggcaaagcaaacgacaggtctattagccacaatcgcaggmtagaaaacactactgtgactcagattagaacccaggttgtggcaaccacaactacaagtattaaccactacacgaccacaaagcctgctgacaagcattgcacttcttctattttttgaatgtaaaaacactcacactactttatctgctttattcttggacgccgccgattttcgtgcttttctctctttcatgcgcttctccgtttctctccccattctgctacataattttaaaaaaatctcatctcccagga

SEQ ID NO: 92042 - DNA, 894 bp, Homo sapiens
gccccgtgaatagatgaaagtaacaggtaccaatatcaaaactgcagtgactcaccggaaacacttcgtgcttgccactttgctaagctgtttgagtccaacaattgcatgggtcctgggttagtgtcctgaatgtctcttgccgctactctcgtgagtaatgttgtcactttaccttgtggtggccaagcccctamatgcactattaggttatgcagtataattttgcagcgtaaaagacgggtaaagggccataatgaagtgaaaaagtccctgctgcattggccgggaattgaacccgggactccggcctgggaggcgagaatgctaccaccgaaccaccaatgcctccccgtagccacggcctggaggatatgagaaaagagtatccacaaagacttagaaacttccaaccgcctttttcaagtgtcgactaaaagctaacaaagacatccaaaccaaatgtttttataggaaacttttactagacaaagttataaatatcaaaatagctcatttggtggatcaaactcttaactctgaaaaaggtctttctacctgcattataaacccctataataaaacatcagaaattcattcatgtttcttttttctaatcttaaatcttccattgtcaatctcaaactgctgccttagaggttctgagaaggtaacctaactggtagtttaggtaaataaagttcaaatccagggaggaaataagaagcagaagcagaattagaagaaagatgaaataaaaggacagaatcaatgtacagataatgaagaaacaaaggttggtccactaagttagtcttttgtcgctggtttttttggcaaaagagtaatgatcggtctcgtaatcattataatactattatttgtctgcttgaa

SEQ ID NO: 92043 - DNA, 1186 bp, Homo sapiens
gttccagatgcagatttagaaccttttaaaaaaatattttgtttttgtctcgcaaatcagccagatctgcaacttatcagagtgaagcgaagccaagcgggacacttaggaaatgcgctaagatgtcatccactttcagtgtcagcctgtgaaaattcaggcgacagaagagaatgaagagaatcttaaggaatttctggaagcaaagctaatattaagcaggcctcttgctggcagaccagtggaaactgtagcctggtcaacratctgtctagattgaggaggtctaaagtgtagccacaggttcaactacttttctgtttgtttcccaacctcgattaaactcactaaatttagggacaagaagaaaaaccaaaaaaccatgtttccctccagtctcgagccaagggtctttcacatgtgaggcaaacatgataaccactatactacagaaactgcacatacactggaaaaggcaaaacataatcatgaaaatctgaggtcagccatttctattatcgtttccaaagtaagaaatccaactgcattttgaaattcgactgaaaaaagcccaataagcaccagccatcaagaagactatggctcccaataggcccaggcttagcgttctgcacctacccccaacacgaagaccacggggacccacacccgggcttcgggatcccgcatcctcccccgggtatccagttccagaactaagcgccgtgtgcgggatccttccggctgacactcttggctcccagaagctgcagaagccggcgggatggggcacatgtcagagctctctttggagggtccagcggtggggtaccaaggtggagctccagttacagcatgtacttccccaggcacagggcaccgtcctcaacagctggcatcattgcacctgcagcatctgccccttcccagagcctctctcttacgcttttcacatcactggagaagcagcttgcaggaccacaccgtatttcactcttacggtgcaaagccagaaggtgcccaaaggagaagcacctactcccgtggtaagaaggtgggcacaggtgcagctgcgactcaccaagagccaggctgccagccacacagccagggacaccgcaatgggggaaggggcagcaaggatgtgtcaaagatattcctttccaaatgacttggttgaaagaaa

SEQ ID NO: 92044 - DNA, 1186 bp, Homo sapiens
gttccagatgcagatttagaaccttttaaaaaaatattttgtttttgtctcgcaaatcagccagatctgcaacttatcagagtgaagcgaagccaagcgggacacttaggaaatgcgctaagatgtcatccactttcagtgtcagcctgtgaaaattcaggcgacagaagagaatgaagagaatcttaaggaatttctggaagcaaagctaatattaagcaggcctcttgctggcagaccagtggaaactgtagcctggtcaacaatctgtctagattgaggaggtctaaagtgtagccacaggttcaactacttttctgtttgtttcccaacctcgattaaactcactaaatttagggacaaraagaaaaaccaaaaaaccatgtttccctccagtctcgagccaagggtctttcacatgtgaggcaaacatgataaccactatactacagaaactgcacatacactggaaaaggcaaaacataatcatgaaaatctgaggtcagccatttctattatcgtttccaaagtaagaaatccaactgcattttgaaattcgactgaaaaaagcccaataagcaccagccatcaagaagactatggctcccaataggcccaggcttagcgttctgcacctacccccaacacgaagaccacggggacccacacccgggcttcgggatcccgcatcctcccccgggtatccagttccagaactaagcgccgtgtgcgggatccttccggctgacactcttggctcccagaagctgcagaagccggcgggatggggcacatgtcagagctctctttggagggtccagcggtggggtaccaaggtggagctccagttacagcatgtacttccccaggcacagggcaccgtcctcaacagctggcatcattgcacctgcagcatctgccccttcccagagcctctctcttacgcttttcacatcactggagaagcagcttgcaggaccacaccgtatttcactcttacggtgcaaagccagaaggtgcccaaaggagaagcacctactcccgtggtaagaaggtgggcacaggtgcagctgcgactcaccaagagccaggctgccagccacacagccagggacaccgcaatgggggaaggggcagcaaggatgtgtcaaagatattcctttccaaatgacttggttgaaagaaa

SEQ ID NO: 92045 - DNA, 1186 bp, Homo sapiens
gttccagatgcagatttagaaccttttaaaaaaatattttgtttttgtctcgcaaatcagccagatctgcaacttatcagagtgaagcgaagccaagcgggacacttaggaaatgcgctaagatgtcatccactttcagtgtcagcctgtgaaaattcaggcgacagaagagaatgaagagaatcttaaggaatttctggaagcaaagctaatattaagcaggcctcttgctggcagaccagtggaaactgtagcctggtcaacaatctgtctagattgaggaggtctaaagtgtagccacaggttcaactacttttctgtttgtttcccaacctcgattaaactcactaaatttagggacaagaagaaaaaccaaaaaaccatgtttccctccagtctcgagccaagggtctttcacatgtgaggcaaacatgataaccactatactacagaaactgcacatacactggaaaaggcaaaacataatcatgaaaatctgaggtcagccatttctattatcgtttccaaagtaagaaatccaactgcattttgaaattygactgaaaaaagcccaataagcaccagccatcaagaagactatggctcccaataggcccaggcttagcgttctgcacctacccccaacacgaagaccacggggacccacacccgggcttcgggatcccgcatcctcccccgggtatccagttccagaactaagcgccgtgtgcgggatccttccggctgacactcttggctcccagaagctgcagaagccggcgggatggggcacatgtcagagctctctttggagggtccagcggtggggtaccaaggtggagctccagttacagcatgtacttccccaggcacagggcaccgtcctcaacagctggcatcattgcacctgcagcatctgccccttcccagagcctctctcttacgcttttcacatcactggagaagcagcttgcaggaccacaccgtatttcactcttacggtgcaaagccagaaggtgcccaaaggagaagcacctactcccgtggtaagaaggtgggcacaggtgcagctgcgactcaccaagagccaggctgccagccacacagccagggacaccgcaatgggggaaggggcagcaaggatgtgtcaaagatattcctttccaaatgacttggttgaaagaaa

SEQ ID NO: 92046 - DNA, 1186 bp, Homo sapiens
gttccagatgcagatttagaaccttttaaaaaaatattttgtttttgtctcgcaaatcagccagatctgcaacttatcagagtgaagcgaagccaagcgggacacttaggaaatgcgctaagatgtcatccactttcagtgtcagcctgtgaaaattcaggcgacagaagagaatgaagagaatcttaaggaatttctggaagcaaagctaatattaagcaggcctcttgctggcagaccagtggaaactgtagcctggtcaacaatctgtctagattgaggaggtctaaagtgtagccacaggttcaactacttttctgtttgtttcccaacctcgattaaactcactaaatttagggacaagaagaaaaaccaaaaaaccatgtttccctccagtctcgagccaagggtctttcacatgtgaggcaaacatgataaccactatactacagaaactgcacatacactggaaaaggcaaaacataatcatgaaaatctgaggtcagccatttctattatcgtttccaaagtaagaaatccaactgcattttgaaattcgactgaaaaaagccmaataagcaccagccatcaagaagactatggctcccaataggcccaggcttagcgttctgcacctacccccaacacgaagaccacggggacccacacccgggcttcgggatcccgcatcctcccccgggtatccagttccagaactaagcgccgtgtgcgggatccttccggctgacactcttggctcccagaagctgcagaagccggcgggatggggcacatgtcagagctctctttggagggtccagcggtggggtaccaaggtggagctccagttacagcatgtacttccccaggcacagggcaccgtcctcaacagctggcatcattgcacctgcagcatctgccccttcccagagcctctctcttacgcttttcacatcactggagaagcagcttgcaggaccacaccgtatttcactcttacggtgcaaagccagaaggtgcccaaaggagaagcacctactcccgtggtaagaaggtgggcacaggtgcagctgcgactcaccaagagccaggctgccagccacacagccagggacaccgcaatgggggaaggggcagcaaggatgtgtcaaagatattcctttccaaatgacttggttgaaagaaa

SEQ ID NO: 92047 - DNA, 2060 bp, Homo sapiens
agatccaaaaaacagctgctgcataactgcgtgttgcaagcaagccctaaattgctgattttgaaacagcctgatgggttcacaaagacaatttctgaatagtcttaagagcagaggtgcactaaagccactgtgcccygcagctcaggatcccagaaagttctttaaggagtaagtcttacttccatttatggaagatttttggagttgtccttagtcacccccaaaaatgttttggttaggagtagaattttagatgtcatcaatttaaaaattaaaactgaaactctggaactcatagagagataaaattaagagaatccattcacatcctgagtagaaagatttttatagaacatgacgggctttaaaaataaagaaaaaatatggcaaaatttcatcaaattaaatgctttcagaactaagattaaaatctgaagccacccaactagctggacagatggcttctttgccaaggagaccccagagaagtcttaaatactgagttcctggccagtacttggaagctcagacacctctccttatactctctccctttgtggtttagacacaactgaccagcattattgttaaaatagagatcctaagactgacagaacagagtccttacagtagtaagataccatattataaacaagacctaaggccatgccaggcaaggttaagtcatgcacccctcaacttaaagaataaactatgttctaattgccacaggtttttttcttcttcccttttttctctagctaaacaagcactggccttgagataagcaatgctgaagcacttgcagctcacccattaccataaactgactgagccctccctacacaagccataactgcagctttgattggacaagagactgatttcagtaacttccccttgataagagagcactggctgtggacgggttctggacggtttacagaggctgtgcacttgactgcctttgtgtccctgcttccccttttgaagcatagggcctaattataatgtatttaaatgtcatctccaccccaaagtgaacatgggttgcatgtaacaggcttgtttactcagcatgcatgcagcaggatcccttcatgaatattcagagctcctcctattccctgttgaatatgcatatgtggcccaccacatcaacataaatccctgttcccccctcccctccctggaaacctacttttcggtttcagcaggagggtatgcctcccagtctgtgggaatggccaccttgcaggctgtaaccatttataaaaaataaaatctcccttctaaatttataaattgtgtgatttttcagttgacagctttcagtcagacttttcactgactgggaaaagtcatttgcaatatatttattttaaaaatgactcctcaggatacaaaattcttgtgcaaagatcacaagcattcttatacaccaataacagacaaacagagagccaaatcatgagtgaactcccattcacaattgcttcaaagagaataaaatacctaggaatccaacttacaagggatgtgaaggacctcttcaaggagaactacaaaacactgctcaacaaaataaaagaggatacaaacaaatggaagaacattccatgctcatgggtaggaagaatcaatatcgtgaaaatggtcatactgcccaaggtaatttgtagattccatgccatccccatcaagctaccaatgactttcttcacagaattggaaaaaactactttaaagttcatatggaaccaaaagagagcccgcatcaccaagtcaatcctaagccaaaagaacaaagctggaggcatcacgctacctgacttcaaatgatactacaaggctacagtaaccaaaacagcatggtactggtaccaaaacagagatatagaccaatggaggagaacagagccctcagaaataatgccacacatctacaactatctgatctttgacaaacctgacaaaaacaagaaatggggaaaggattccctatttaataaatggtgctgggaaaactagctagccatatgttgaaagctgaaact

SEQ ID NO: 92048 - DNA, 2060 bp, Homo sapiens
agatccaaaaaacagctgctgcataactgcgtgttgcaagcaagccctaaattgctgattttgaaacagcctgatgggttcacaaagacaatttctgaatagtcttaagagcagaggtgcactaaagccactgtgccccgcagctcaggatcccagaaagttctttaaggagtaagtcttacttccatttatggaagatttttggagttgtccttagtcacccccaaaaatgttttggttaggagtagaattttagatgtcatcaatttaaaaattaaaactgaaactctggaactcatagagagataaaattaagagaatccattcacatcctgagtagaaagatttttatagaacatgacgggctttaaaaataaagaaaaaatatggcaaaatttcatcaaattaaatgctttcagaactaarattaaaatctgaagccacccaactagctggacagatggcttctttgccaaggagaccccagagaagtcttaaatactgagttcctggccagtacttggaagctcagacacctctccttatactctctccctttgtggtttagacacaactgaccagcattattgttaaaatagagatcctaagactgacagaacagagtccttacagtagtaagataccatattataaacaagacctaaggccatgccaggcaaggttaagtcatgcacccctcaacttaaagaataaactatgttctaattgccacaggtttttttcttcttcccttttttctctagctaaacaagcactggccttgagataagcaatgctgaagcacttgcagctcacccattaccataaactgactgagccctccctacacaagccataactgcagctttgattggacaagagactgatttcagtaacttccccttgataagagagcactggctgtggacgggttctggacggtttacagaggctgtgcacttgactgcctttgtgtccctgcttccccttttgaagcatagggcctaattataatgtatttaaatgtcatctccaccccaaagtgaacatgggttgcatgtaacaggcttgtttactcagcatgcatgcagcaggatcccttcatgaatattcagagctcctcctattccctgttgaatatgcatatgtggcccaccacatcaacataaatccctgttcccccctcccctccctggaaacctacttttcggtttcagcaggagggtatgcctcccagtctgtgggaatggccaccttgcaggctgtaaccatttataaaaaataaaatctcccttctaaatttataaattgtgtgatttttcagttgacagctttcagtcagacttttcactgactgggaaaagtcatttgcaatatatttattttaaaaatgactcctcaggatacaaaattcttgtgcaaagatcacaagcattcttatacaccaataacagacaaacagagagccaaatcatgagtgaactcccattcacaattgcttcaaagagaataaaatacctaggaatccaacttacaagggatgtgaaggacctcttcaaggagaactacaaaacactgctcaacaaaataaaagaggatacaaacaaatggaagaacattccatgctcatgggtaggaagaatcaatatcgtgaaaatggtcatactgcccaaggtaatttgtagattccatgccatccccatcaagctaccaatgactttcttcacagaattggaaaaaactactttaaagttcatatggaaccaaaagagagcccgcatcaccaagtcaatcctaagccaaaagaacaaagctggaggcatcacgctacctgacttcaaatgatactacaaggctacagtaaccaaaacagcatggtactggtaccaaaacagagatatagaccaatggaggagaacagagccctcagaaataatgccacacatctacaactatctgatctttgacaaacctgacaaaaacaagaaatggggaaaggattccctatttaataaatggtgctgggaaaactagctagccatatgttgaaagctgaaact

SEQ ID NO: 92049 - DNA, 736 bp, Homo sapiens
ctgaaacattaaggtctcttcsagatgtgatgttcccaaaagtctaagattccaattctaaaaagtctccacctattattaatctgtatcattattattattattattgagacggagtcttgctctgttgcccaggctgcagtgcagtggcacgatcttggctcactgcaacctctgcctcctgggttcaagcgattctcctgcctcagcctcctgagtagctgggactacaggcgcgtgccaccacacccagctaattttttgtagagatagggtttcaccgtgttagccaggatggtcttgatctccggacctcaggtgatccacccgcctcggcttccccaactgctgggattataggcgtgagccactgcgcccggctagccccatgttataaatggggcaactgaggtatgggaggttgggcagcttgtccaaggtccccagctaggagaagtgggactggatttaacccagaagcaggctccagtgcctgtgacttaacccaggactggatgcaggaggctgcgagcctggcctgccccacatgctctccagaccaccccacacacagcttggcctacctgtgctagctgctcctgcagccaactgagctcatggtgcagtgtggggagctgttgctccagcgcctcctgggcctgctccgccactcatagggagccctccaggccctgccgtgccacctcctgctccaaccacagctcctccagccact

SEQ ID NO: 92050 - DNA, 736 bp, Homo sapiens
ctgaaacattaaggtctcttccagatgtgawgttcccaaaagtctaagattccaattctaaaaagtctccacctattattaatctgtatcattattattattattattgagacggagtcttgctctgttgcccaggctgcagtgcagtggcacgatcttggctcactgcaacctctgcctcctgggttcaagcgattctcctgcctcagcctcctgagtagctgggactacaggcgcgtgccaccacacccagctaattttttgtagagatagggtttcaccgtgttagccaggatggtcttgatctccggacctcaggtgatccacccgcctcggcttccccaactgctgggattataggcgtgagccactgcgcccggctagccccatgttataaatggggcaactgaggtatgggaggttgggcagcttgtccaaggtccccagctaggagaagtgggactggatttaacccagaagcaggctccagtgcctgtgacttaacccaggactggatgcaggaggctgcgagcctggcctgccccacatgctctccagaccaccccacacacagcttggcctacctgtgctagctgctcctgcagccaactgagctcatggtgcagtgtggggagctgttgctccagcgcctcctgggcctgctccgccactcatagggagccctccaggccctgccgtgccacctcctgctccaaccacagctcctccagccact

SEQ ID NO: 92051 - DNA, 736 bp, Homo sapiens
ctgaaacattaaggtctcttccagatgtgatgttcccaaaagtctaagattccaattctaaaaagtctccacctattattaatctgtatcattattattattattattgagacggagtcttgctctgttgcccaggctgcagtgcagtggcacgatcttggctcactgcaacctctgcctcctgggttcaagcgattctcctgcctcagcctccygagtagctgggactacaggcgcgtgccaccacacccagctaattttttgtagagatagggtttcaccgtgttagccaggatggtcttgatctccggacctcaggtgatccacccgcctcggcttccccaactgctgggattataggcgtgagccactgcgcccggctagccccatgttataaatggggcaactgaggtatgggaggttgggcagcttgtccaaggtccccagctaggagaagtgggactggatttaacccagaagcaggctccagtgcctgtgacttaacccaggactggatgcaggaggctgcgagcctggcctgccccacatgctctccagaccaccccacacacagcttggcctacctgtgctagctgctcctgcagccaactgagctcatggtgcagtgtggggagctgttgctccagcgcctcctgggcctgctccgccactcatagggagccctccaggccctgccgtgccacctcctgctccaaccacagctcctccagccact

SEQ ID NO: 92052 - DNA, 736 bp, Homo sapiens
ctgaaacattaaggtctcttccagatgtgatgttcccaaaagtctaagattccaattctaaaaagtctccacctattattaatctgtatcattattattattattattgagacggagtcttgctctgttgcccaggctgcagtgcagtggcacgatcttggctcactgcaacctctgcctcctgggttcaagcgattctcctgcctcagcctcctragtagctgggactacaggcgcgtgccaccacacccagctaattttttgtagagatagggtttcaccgtgttagccaggatggtcttgatctccggacctcaggtgatccacccgcctcggcttccccaactgctgggattataggcgtgagccactgcgcccggctagccccatgttataaatggggcaactgaggtatgggaggttgggcagcttgtccaaggtccccagctaggagaagtgggactggatttaacccagaagcaggctccagtgcctgtgacttaacccaggactggatgcaggaggctgcgagcctggcctgccccacatgctctccagaccaccccacacacagcttggcctacctgtgctagctgctcctgcagccaactgagctcatggtgcagtgtggggagctgttgctccagcgcctcctgggcctgctccgccactcatagggagccctccaggccctgccgtgccacctcctgctccaaccacagctcctccagccact

SEQ ID NO: 92053 - DNA, 651 bp, Homo sapiens
tggggaatggaggcaagcctgtgcagaccatgacaactagtttagattttattgtcagctcattaaaaactcgtcctcgttttgtgtttttaaaaaattccactgatacagccgttttctctaccagaaaagactataaccgcattatttcatcagtggaagctcagacaaaagggccttgagaggcggcatcttcacctacggaaatttttcctgctcaattgtagacaaagagcatgtccaagttttcctatcggccaggccgccccctagtttatgcgctgtgggctaaactccagaagctggcgcccttcggggccagaggtttactctgctctctggaggctgctaggattaaaggcaaagcaaacgacaggtctattagccacagttgcaggttagaaaacactactgtgactcagattagaacccaggttgtggcaaccacaactacaagtattaactactacacgaccacaaagcctgctgacaarcattgcacttctatgttttgaatgtaaaaacactcacactattttatctgctttattgttggacgtccgcagatttttgtgcttttctgtctttcatgcgcttctccctttctctccccattctgctacataattaaaaaaaaaatctcatctctca

SEQ ID NO: 92054 - DNA, 1495 bp, Homo sapiens
tttagaacctttttaaaaaatattttgtttttgttgtcttgcaaatcagccagatctgcaacttaccagagtaaagcgaagccaagcgggacccttaggaaatgcactaagatgtcatccactttcagtgtcagcctgtgaaaatacaggcgatagaagagaatgaagagaacctgagggaatttttggaaccaaagctaatattaagcaggcctcttgctggcagaccagtggaaactgtagcctggtcaacgatctstctagattgaggaggtctaaagtgtagccacaggttcaactacttttctgtttgtttcccaacctcgattaaactcactaaatttagggacaaaaaaacaaaacaaaacacgatgttcccacgcagtctcgaaccagagacctttcatatgtgaagcgaccataataaccactacaccacagaaactgcatatgcaccaaaaaaggcaaaatatcatcatgaaaatcttaggtcagccatttctattatcgtttccaaagtaagaaattcaactgcatttcgaaattcgactgaaaaaagcccaataagcaccagccatcaagaagactatggctcccaataggcccaggcttagcgttccgcgcccacccccacacgaaaaccatggggacccacacacgggcttcggggacacatactcgggcttcgggctcccgcatcctcccctgggtatgcagttccagaactaagcgccgtgtgcgggatccvtttagaacctttttaaaaaatattttgtttttgttgtcttgcaaatcagccagatctgcaacttaccagagtaaagcgaagccaagcgggacccttaggaaatgcactaagatgtcatccactttcagtgtcagcctgtgaaaatacaggcgatagaagagaatgaagagaacctgagggaatttttggaaccaaagctaatattaagcaggcctcttgctggcagaccagtggaaactgtagcctggtcaacgatctctctagattgaggaggtctaaagtgtagccacaggttcaactacttttctgtttgtttcccaacctcgattaaactcactaaatttagggacaaaaaaacaaaacaaaacacgatgttcccacgcagtctcgaaccagagacctttcatatgtgaagcgavcataataaccactacaccacagaaactgcatatgcaccaaaaaaggcaaaatatcatcatgaaaatcttaggtcagccatttctattatcgtttccaaagtaagaaattcaactgcatttcgaaattcgactgaaaaaagcccaataagcaccagccatcaagaagactatggctcccaataggcccaggcttagcgttccgcgcccacccccacacgaaaaccatggggacccacacacgggcttcggggacacatactcgggcttcgggctcccgcatcctcccctgggtatgcagttccagaactaagcgccgtgtgcgggatcc

SEQ ID NO: 92055 - DNA, 747 bp, Homo sapiens
tttagaacctttttaaaaaatattttgtttttgttgtcttgcaaatcagccagatctgcaacttaccagagtaaagcgaagccaagcgggacccttaggaaatgcactaagatgtcatccactttcagtgtcagcctgtgaaaatacaggcgatagaagagaatgaagagaacctgagggaatttttggaaccaaagctaatattaagcaggcctcttgctggcagaccagtggaaactgtagcctggtcaacgatctctctagattgaggaggtctaaagtgtagccacaggttcaactacttttctgtttgtttcccaacctcgattaaactcactaaatttagggacaaaaaaacaaaacaaaacacgatgttcccacgcagtctcgaaccagagacctttcatatgtgaagcgaccataataaccactacaccacagaaactgcatatrcaccaaaaaaggcaaaatatcatcatgaaaatcttaggtcagccatttctattatcgtttccaaagtaagaaattcaactgcatttcgaaattcgactgaaaaaagcccaataagcaccagccatcaagaagactatggctcccaataggcccaggcttagcgttccgcgcccacccccacacgaaaaccatggggacccacacacgggcttcggggacacatactcgggcttcgggctcccgcatcctcccctgggtatgcagttccagaactaagcgccgtgtgcgggatcc

SEQ ID NO: 92056 - DNA, 747 bp, Homo sapiens
tttagaacctttttaaaaaatattttgtttttgttgtcttgcaaatcagccagatctgcaacttaccagagtaaagcgaagccaagcgggacccttaggaaatgcactaagatgtcatccactttcagtgtcagcctgtgaaaatacaggcgatagaagagaatgaagagaacctgagggaatttttggaaccaaagctaatattaagcaggcctcttgctggcagaccagtggaaactgtagcctggtcaacgatctctctagattgaggaggtctaaagtgtagccacaggttcaactacttttctgtttgtttcccaacctcgattaaactcactaaatttagggacaaaaaaacaaaacaaaacacgatgttcccacgcagtctcgaaccagagacctttcatatgtgaagcgaccataataaccactacaccacagaaactgcatatgcaccaaaaaaggcaaaatatcatcatgaaaatcttaggtcagccatttctattatcgtttccaaagtaagaaattcaactgcatttcgaaattcgactgaaaaaagcccaataagcaccagccatcaagaagactatggctcccaataggcccaggcttagcgttccgcgcccacccccacacgaaaaccatggggacccacacmcgggcttcggggacacatactcgggcttcgggctcccgcatcctcccctgggtatgcagttccagaactaagcgccgtgtgcgggatcc

SEQ ID NO: 92057 - DNA, 747 bp, Homo sapiens
tttagaacctttttaaaaaatattttgtttttgttgtcttgcaaatcagccagatctgcaacttaccagagtaaagcgaagccaagcgggacccttaggaaatgcactaagatgtcatccactttcagtgtcagcctgtgaaaatacaggcgatagaagagaatgaagagaacctgagggaatttttggaaccaaagctaatattaagcaggcctcttgctggcagaccagtggaaactgtagcctggtcaacgatctctctagattgaggaggtctaaagtgtagccacaggttcaactacttttctgtttgtttcccaacctcgattaaactcactaaatttagggacaaaaaaacaaaacaaaacacgatgttcccacgcagtctcgaaccagagacctttcatatgtgaagcgaccataataaccactacaccacagaaactgcatatgcaccaaaaaaggcaaaatatcatcatgaaaatcttaggtcagccatttctattatcgtttccaaagtaagaaattcaactgcatttcgaaattcgactgaaaaaagcccaataagcaccagccatcaagaagactatggctcccaataggcccaggcttagcgttccgcgcccacccccacacgaaaaccatggggacccacacacgggcttcggggacacatacycgggcttcgggctcccgcatcctcccctgggtatgcagttccagaactaagcgccgtgtgcgggatcc

SEQ ID NO: 92058 - DNA, 1296 bp, Homo sapiens
tatgctataggaagctatattttgacatgactgttttaggcaaagatacactcaccaacttactccacaagagtttctaatcagagaatatcatatggatctatttgaattgctcccatgcttggctgagcccaaaataatttactgtgcrtatgtacaccaagtgagaaggttgaggaggtgtcacttgtacatctctttattctttttttttttgtatgtgtgtgttattttcatgtgttttgaaaggctctcttgcttagcttttattttgccattaaagatttttttctgtgctataactgtatttttaagtctggtttgagttcaagaaatccacaaattcacaaaagattaagaataatttgtgaacaaaatgatgcagaaataaaaaatgcattttccaaataactcccttgcagtccttctcgcccaactaccactttctattaagtttcttcttcctactctatgaagtgccatgagctttcaattcattgtattttaagtataagctatacttactaaccttcaccttattctttgctacttaaataagcttgctttcatagttcaattgacgtattgtttaactgatatttttaattggtatattttgatatatattgataattgatagctatataattcatttgagatattttgggtatggagggttggaaggaatcctttcataatttttctacttaaaagaaatcttttttcatttaacagcttttcccatggggatagagttttcatgaataaatcaaagtcattaaatgaggtatatggtacatcttttaagagtcacagaaagaagcaacaacaatttacccaggcagagagtataagtttagaccttggttgcctgatttgtgggacaagttctttaattttttttctttatattttgacttttttttggactctctcctccccttccaggctccaggtcaaatacttgacacctgaatgatgttcaattatttaaaagatggattggccagctcagctcctgtctcagacagactgtctttaaatgtattttcaacatgtcttcagacagttatttttcctctgttcaattttgttcatcttcttacttaaccgttcaagtgctcctatttcctttttaaatgtagtattgagaagtgcaaacattattggaaaagagagtctcactagcataattgtgcattatcttcctcttatatcgccggcctccctgcacccccatgcccacctcctcctcgcgcctccatgccgcctcccactgctccagctccttgcagc

SEQ ID NO: 92059 - DNA, 2225 bp, Homo sapiens
agacatttgggaaatctcagagaaatccagtagaaaggatggccaaaaagagctctgaggggatttcttggccctctctggcctccaaagcactttctaactattctcagaagagcctggagagattgtcaataagacagggacaggaaagttactgttgaaaactcttagagatgctgatgatagaatcgttgatgttcaagaaatattttttctttgatgtttatgagtttatttgctttctacttttctttttcaagccttttgcttcttctgctttttgcatgacatgtcctctatttatgtgaaatccttcctgttgcatgcagtcagatcttattgtcagctgtctcccccggggtcaaagacatccaaacataaatcctctcttgtcggcctcttgcttttctcctaccctttgtgttttgccattttcttcccgccttttgctttcccgcttttgtttttttggggctgtttgatccacctccactccttttttttaggtcataaagtttttttttgtcactgactttttttgggtcacaaggtctttttttaaattcagtggtatagctgtcccccttttcaatctattgtgccttggtgttctctgctgcctctctttctctctctctccctccctctcactgtgtgtttatttaatatgtgtttcaccttagctctcctcatttgtgatcctgaatttgtgcaggagcgtctcacacattctatatagtctcggaaagggcagacaaattaaaagaaaaggattgagactgaaagaaaacattgaaatgaacagagcagctattgatccttgatgaaacaacagctccaaatgtagattcactttaaagaaggacaaactgaagaggaaatttctcaacatattgctcctattaagaagttccctaccttaagtccagagattcatcattgttttgaaggaagacctctaaaaataggctagttatagaagtatgattatttagagagccacatgcaattcttcccatgaacagaattgataattttagagacttataatgggagatactctaggatgcagcagctaagagccactttgaaatagattttaaatgatagattttaaaatttaaatacaccatatgacaaaaaatcgttatttaaaagttcttaccccagcttgcaggaagagatggtcaaagagcttatttgacaaaacttgtygggcgactgtgtgccatgcattgtgctggatgctgggaacctgtaggtgaatcagcatgcacggtgcctaccctggtcataatctaacatagaacttagattcattctcccatcagttcatttatttattcccttaatataaatgaacaaagtcttaaaccttgacctcatgtaatccacagtctgagtgtagcttattttttttatttttaattttttttagtaagacggaatcttgctctgtcccccaggctggagtgcagtggtgcgatctccgctcactgcaagctccgcctcccaggttcacgccattctcctgcctcagcctcctgagtagctgggactacaggcgcccgccaccaccacgcccggctaattttttgtatttttagtagagacagggtttcaccttgttagccaggatggtctctatctcctgacctcgtgatccacccgcctgggcctcccaaagtgctgggattacaggcgtgagccaccgcgcccggcctgtgtttattatctatgggaactcaggctttagataaggaatttggaaactcacatcttaaatctagaaagaatggtatttctgcaaagatagatgatttcagattgatatacgatttttgaaataaccaagaattttttatagtggctctattataattggaaaactgaactgaataatttcttaagcccctttcaattatttaaaaagtttttttaatactcgacattgctaatcactagagaaaagcaaattaaaaccacaatgatatattatctcacacctgtcagaatggctgttatcaaaaacacaaaagatagcagtgttggcaaggatggggaaaaaaaaaaacccttgtacactgtgatgggaatgtaaagccattatataaaattctatagaggttcttcagcaagctaaaaatagaactaccatatgatccagcaatcctatctctgggtatgaacccccaatatttgaaatcagtttgttgaagagatgt

SEQ ID NO: 92060 - DNA, 645 bp, Homo sapiens
catttcccttcttcccagctatggcctcgggcaaagcatttgacctcccaggctcttgtggaagggtgtgcaggcttacattctatgaggcggagacacccggggcaccatcgggccagggcaggacctccaccaacagtggctgtgatggggatgactagggggygggggggagggggggaagaatccaaaatgggtggggccgggcacggtggctcatgcctgtgaccccagcactttgggaggctgaggcagacggatcacttgagctcaggggtttaagaccaacctgggcaacagagcgagaccttgtctcaaaaaataaaaaaaaaagtccaaagtaaatcgaagcaaaaggcccctcaatgtgcctaagcccccaatcccaccagcacctggctcaggcagctgggaggcggttctaggtcagggcccaggccactggccaggctgtcctcgtggaaggccactcgctgacccttgccttggtcctgggctgggacactcccaggagacccagcagctctctgagccaggacttgcccatcttcagctgcgtgagctcattcagggcagccccctccccctctgctggggctcgctggggccaccggggacagggaccccagtgaggaatctggtgtt

SEQ ID NO: 92061 - DNA, 645 bp, Homo sapiens
catttcccttcttcccagctatggcctcgggcaaagcatttgacctcccaggctcttgtggaagggtgtgcaggcttacattctatgaggcggagacacccggggcaccatcgggccagggcaggacctccaccaacagtggctgtgatggggatgactagggggtgggggggagggggggaagaatccaaaatgggtggggccgggcacggtggctcatgcctgtgaccccagcactttgggaggctgaggcagacggatcacttgagctcaggggtttaagaccaacctgggcaacagagcgagaccttgtctcaaaaaataaaaaaaaaartccaaagtaaatcgaagcaaaaggcccctcaatgtgcctaagcccccaatcccaccagcacctggctcaggcagctgggaggcggttctaggtcagggcccaggccactggccaggctgtcctcgtggaaggccactcgctgacccttgccttggtcctgggctgggacactcccaggagacccagcagctctctgagccaggacttgcccatcttcagctgcgtgagctcattcagggcagccccctccccctctgctggggctcgctggggccaccggggacagggaccccagtgaggaatctggtgtt

SEQ ID NO: 92062 - DNA, 589 bp, Homo sapiens
cgtgtttctccgtgcgttttccagaaagcctccagccctgcctcaatcatgggttggctctgtcgctattccgagtttcaccgttgtcatatttgagcagarcttttgccccgaccagggatgagaacgtcgtctgccagtctcctctgcagccggagtggccacaggcaggcagagggggaaggcagagtcctccagccaggaagagcgccaggccaggcagcctctgctgtgtaaatcgacaggcttaaggctgctcattatgtggtttcacctgaagagcgacctgccgtagccaccgccagcaagcgtgtatggaggccggtgcctggcgagcgtcggggaagctgctgagtccctcacttcccccagtcaatcccggcagccttgcgcaaagcttggttaattcaaaaactgtctttgtctgcattaaaacacctttatccctggtattaatttcctggccagaacaaattaccaaaaatttggtggcttcaaaccgcagaaatgtgtgctctctcagttccgaaggccagaaatccaaaatctgggtgtcacaggaccgggccccctcccaaggctctaggga

SEQ ID NO: 92063 - DNA, 589 bp, Homo sapiens
cgtgtttctccgtgcgttttccagaaagcctccagccctgcctcaatcatgggttggctctgtcgctattccgagtttcaccgttgtcatatttgagcagaacttttgccccgaccagggatgagaacgtcgtctgccagtctcctctgcagccggagtggccacaggcaggcagagggggaaggcagagtcctccagccrggaagagcgccaggccaggcagcctctgctgtgtaaatcgacaggcttaaggctgctcattatgtggtttcacctgaagagcgacctgccgtagccaccgccagcaagcgtgtatggaggccggtgcctggcgagcgtcggggaagctgctgagtccctcacttcccccagtcaatcccggcagccttgcgcaaagcttggttaattcaaaaactgtctttgtctgcattaaaacacctttatccctggtattaatttcctggccagaacaaattaccaaaaatttggtggcttcaaaccgcagaaatgtgtgctctctcagttccgaaggccagaaatccaaaatctgggtgtcacaggaccgggccccctcccaaggctctaggga

SEQ ID NO: 92064 - DNA, 673 bp, Homo sapiens
ccatcttgcaatcaacaccatcttcttagaaatccaatcttgttatcaatgacaacaaacacttgcctgtgattactatttgccaggtcactacccctcacaaccagcatgtaagatggatttactgaatttcacagatgaggaaacaaacacagrttactaatgtattaataactctttcaaagtcacacagcaactgcttgaccaagtgaggaaattcagaacttgataagactgtgcctgctgtcctccttaaaagcaacactaagtctgcttcagttgatcatgtaaagcatctgtgactgtactaaaagttgtaatgagatctacttgtccaagagttatctccttgatctcttacctcttttacctgtcctaaggcaataataacaataataacacatttttaaatttttaaaattattttcttcttttctcttactctcttatcttttattgtttctatgaatactttaggacattagatagctgttcagagggcctggagaactgcaagacagaatctaccattgactgatagagtggacgagtatttcatggagcccaggaatttgttttcccatttctcttaataagtatattaaaagtaaaaatctaagtacttctgtattctaattcacataatctttgctcaaaactctccaatggatcc

SEQ ID NO: 92065 - DNA, 674 bp, Homo sapiens
agttaaaactagattttactgaaaatgaatttaaaaagattgagtgtgttgggggagtggaagattggggtagaggtgacaactacagacacgaaattacgtaaatttgattatcagatggtgttctgctgatcaaatcaatgggctaaactgcaccctacaaggatgctttgtggcattctgtctctggacagtagcatgaagttctatgattataatctactttttcaaaagatgacgtcttttcaaaattctctctttctcttgtcatttcctatgcccagggtatgcatgagaaaaccatgaatctcttaatatcatctccaaatataggcggtcaagtacctgtatatgtggtatcatataccatataggtatamaaatacttatatacttggtatcatgtaaagagggtatatgaaggcgatacatagcagtatacatttcgtgaactcttttgttcccaaagctgttgactatgccctctacacctggatctccagcatgagctaaaaggaaatctttaatatttgcaccaaaaaataagatatgcatgaagtcttttaaaatcagtaacaagtataaattttgacatggtaagtcaaacttactgtttagctacttacgcgttttttaaatagtatgaaattaaacagtataacacaaaacaagtt

SEQ ID NO: 92066 - DNA, 562 bp, Homo sapiens
gttctttacttaaaattataccctaataatcttccatgtcattgaatagtatttataagaaccatttaaaatcgtgtttataatacttactgtggtcagtttttccagtattcagggctatttttaggaatcaatactctggtactattttattaacattaagtcatcatgttggcattttaaaaatctgaaatctgcatcagtattttattcagataaaatcattgactctrttatataattaatgtgaaaagacaaatcaattactcatctagccagttctatgctaatgagtctaaataggcagtgtattgtgatattgcaaaccttctttttcaagaacaatttttattctatttcaaaaacatttcaaagtagtagactatgaaaaaatcagaattgaaactgataaaggtaagtctgcaccaaacttttaactattcatgataaaattaaaggacaaaccaggaaaatacactttgtaatgaaacaaaatatatagtttgctatcaatgagaagtttgcaaaatcaggaaaaaaatcctaaaatcttatttaaaat

SEQ ID NO: 92067 - DNA, 995 bp, Homo sapiens
cattttgtttctttcacacagttctgaccaaattgggaattgatttattctgataaaagtcatttgcgtatataaagatgtcacaattattttaccaaaaatgctattgagtcatatttgttaacatatttcattatgatagtcatataaacaattgaattaaccagttacactgcaacatcaaaatattatttcacataattatgcaaattgtaagactctgtgttgtaaagtagtgtgtcgtgctgtgtagcttaggagggtgtctctttgaaagtggagacaagataaatgttggcttaatatgataaattctttctaaaacaagagatgttctaatgcagaatattgccttatgaagttagaaatttcctatgaagtggctgagcaaatgctggtggaccttcagacaggaatatcattgagggatttccatgttgcttccagcatcaacataggatgtcctcaaaagtcccttccaaatctaacatgctaacgtttttataaggattctataacagatattttactatagttccacatttaaagttccacatattatagttccatatatatataaacacacacacatatatatataaccttgctgtccttgtaactttagaatttaaaaatgactttggctgtttctgaggaagtacacgtgaggatgttaacctctttaaatgtagtgaatattatgctttttcttgaacattgtcttttgcattttactatattctaatattttttaaataaaaactgtctgaaacttttaaataattcatgttytttttcattacaaaaccaaaaagtcaatttaaaaagttagtaaaatttttatgaaagctggagactattataatgactttgactttttaaggattgaaggaaaccacactgcttccttatatacctcttttcaataaaaaccaatttaaaaatttacatttttcaaggagggatgattcccgtaaacaaaacttaagcatgca

SEQ ID NO: 92068 - DNA, 706 bp, Homo sapiens
ttttattgttttaccaggcctactcaagagtcttgaggaccaacagctatgaagcatgaggtcattgttctgaaaacagtcatctaacattagttgtccttatcaggtaccaagagattcttaagtattctgttctaaatcccagtggcaaataactatgtatactgactaagccggaattagttcaccctcggagatgtcatttactatctttctgcacagtatgktcaaaatgaagctcaaatctggcccggcaatccccttaaaatgccaggaaacctctcatgggtgttaatggtctggatttcccaatttcttcggggcagaacagaagaaaggtgaaaggggatgctggacacttcctcaagaggaataaaaaggtaacattccctggaccttggaatattcaactttagagttgaaaggtcaaggagaaaaacatcctgagaagtactaaatcaattctcctcggagattttgccaaatacacttgccatgtgagctccacctcttaaaaaatccagtcccctacaagggattggtccctccgacgacctcggcgaccaggggcgctgagcactcacctaggagcgggaggcgtttcattggcggtggccgcagtggtggcggtggcggagagcgcggcggagtgagtgcggctgtggacccgggaccgggcgccgctgggcgggcgcggcagggtccc

SEQ ID NO: 92069 - DNA, 706 bp, Homo sapiens
ttttattgttttaccaggcctactcaagagtcttgaggaccaacagctatgaagcatgaggtcattgttctgaaaacagtcatctaacattagttgtccttatcaggtaccaagagattcttaagtattctgttctaaatcccagtggcaaataactatgtatactgactaagccggaattagttcaccctcggagatgtcatttactatctttctgcacagtatgttcaaaatgaagctcaaatctggcccggcaatccccttaaaatgccaggaaacctctcatgggtgttaatggtctggatttcccaatttcttcggggcagaacagaagaaaggtgaaaggggatgctggacacttcctcaagaggaataaaaaggtaacattccctggaccttggaatattmaactttagagttgaaaggtcaaggagaaaaacatcctgagaagtactaaatcaattctcctcggagattttgccaaatacacttgccatgtgagctccacctcttaaaaaatccagtcccctacaagggattggtccctccgacgacctcggcgaccaggggcgctgagcactcacctaggagcgggaggcgtttcattggcggtggccgcagtggtggcggtggcggagagcgcggcggagtgagtgcggctgtggacccgggaccgggcgccgctgggcgggcgcggcagggtccc

SEQ ID NO: 92070 - DNA, 986 bp, Homo sapiens
gttagttttaattccaacctaatttgcaaatattttcaagttctgcaggccagatacaaagtctggcagtgggtgatggacaggtgagaagttgaatgctgttttgacacagtagtaactttgcctgctctttcttttctaagtgaagagaagaatttgttctttaccctctcctctctctacctttgtccctgcttcgacctcatttattccawactcagctctataaacttattttccaaatcaagattacagttttctccaactctttaaaccaactccatgagtatcatatcaaatcttgtcatctgaaatacagaaataggaactccccgttttctctacccagagtagttcctcttgacatctatgtttctgttaatggccatacctttcacactattctccctgttagacagttataagaagtgagaggaatgtgatgcagcattttttttaattttagatttagggaatatgtgtacaggttttttacatgggtatattgcatagcgctggggtgatgaagtatttaagaacaagttttatggagtaaggctgcccaggtctaacccacttttgtcattggaataacagagtatctcaaaacttaacttcatattgctattgaatggattaaattctctgtgtgcagtccttaggggagtgcctgtcacatagtaatcactgtaaaacgtagtatatattgcactaaatatgtttatctgtcattttataagtacacactaaatatttgcaccaggatgaaattagactctcctataacctgtatctctacctttctgttcaaaatagaataatcatcttaaaatatctaataatcttcctaactagatagaagcttttcttcttttattcctaaaatatttaatatttcctttctgaaatgtactttcggcttcatattaatactatgtgcatgttattcttcttccaaaattaactgatcagctcttaggttcaag

SEQ ID NO: 92071 - DNA, 986 bp, Homo sapiens
gttagttttaattccaacctaatttgcaaatattttcaagttctgcaggccagatacaaagtctggcagtgggtgatggacaggtgagaagttgaatgctgttttgacacagtagtaactttgcctgctctttcttttctaagtgaagagaagaatttgttctttaccctctcctctctctacctttgtccctgcttcgacctcatttattccatactcagctctataaacttattttccaaatcaagattacagttttctccaactctttaaaccaactccatgagtatcatatcaaatcttgtcatctgaaatacagaaataggaactccccgtwttctctacccagagtagttcctcttgacatctatgtttctgttaatggccatacctttcacactattctccctgttagacagttataagaagtgagaggaatgtgatgcagcattttttttaattttagatttagggaatatgtgtacaggttttttacatgggtatattgcatagcgctggggtgatgaagtatttaagaacaagttttatggagtaaggctgcccaggtctaacccacttttgtcattggaataacagagtatctcaaaacttaacttcatattgctattgaatggattaaattctctgtgtgcagtccttaggggagtgcctgtcacatagtaatcactgtaaaacgtagtatatattgcactaaatatgtttatctgtcattttataagtacacactaaatatttgcaccaggatgaaattagactctcctataacctgtatctctacctttctgttcaaaatagaataatcatcttaaaatatctaataatcttcctaactagatagaagcttttcttcttttattcctaaaatatttaatatttcctttctgaaatgtactttcggcttcatattaatactatgtgcatgttattcttcttccaaaattaactgatcagctcttaggttcaag

SEQ ID NO: 92072 - DNA, 986 bp, Homo sapiens
gttagttttaattccaacctaatttgcaaatattttcaagttctgcaggccagatacaaagtctggcagtgggtgatggacaggtgagaagttgaatgctgttttgacacagtagtaactttgcctgctctttcttttctaagtgaagagaagaatttgttctttaccctctcctctctctacctttgtccctgcttcgacctcatttattccatactcagctctataaacttattttccaaatcaagattacagttttctccaactctttaaaccaactccatgagtatcatatcaaatcttgtcatctgaaatacagaaataggaactccccgttttctctacccagagtagttcctcttgacatctatgtttctgttaatggccatacctttcacactattctccctgttagacagttataagaagtgagaggaatgtgatgcagcattttttttaattttagatttagggaatatgtgtacaggttttttacatgggtatattgcatagcgctggggtgatgaagtatttaagaacaagttttatggagtaaggctgcccaggtctaacccacttttgtcattggaataacagagtatctcaaaacttaacttcatattgctattgaatggattaaaytctctgtgtgcagtccttaggggagtgcctgtcacatagtaatcactgtaaaacgtagtatatattgcactaaatatgtttatctgtcattttataagtacacactaaatatttgcaccaggatgaaattagactctcctataacctgtatctctacctttctgttcaaaatagaataatcatcttaaaatatctaataatcttcctaactagatagaagcttttcttcttttattcctaaaatatttaatatttcctttctgaaatgtactttcggcttcatattaatactatgtgcatgttattcttcttccaaaattaactgatcagctcttaggttcaag

SEQ ID NO: 92073 - DNA, 677 bp, Homo sapiens
tcccaaggattacaagagtcacaaagaaacccaaaactgtttccagcaatattatggttggcaataatattgttagtaaatattactagtaataatattattattacagataatgttgttattttggagtttataaatatataaaatgattctattttaactgcatrtgtgataaaattataacacagacacatgcaataagataaaccaagtaattcattataataaagttattggccaagaacagaagtttttagcgtaaaagaagagaaataatgccaaaactcgtgatatattttctcttagtttgttcttctagctcaatccactgaaaaggtctagagacagtaatcgcctggtagcaatgagtatgcctatcactcacattatggtcttgaaacatcattttccactaaaaagagctagaagctcttgcagaaatgacagtttgcctgcctgggacaagatgaacccggaacattttattaaaccaaaaagcaagaaagtcttcaaatgattggagattctttcaggtggctcaggagtcatctggaggggactgttcctggccaaagatggggaaagttaatcattgcaaagattaagaacagcaatggatagagatgtcgtaaacatctagaaatccatagctataatcatactaacgttacaaaacc

SEQ ID NO: 92074 - DNA, 810 bp, Homo sapiens
aagttatgccattcagggagacatgcacaagaattaaaattttaatgagaatgtatatataagaggcaggaatgtctgctggaggatgagaggatttaggcttagatggtctcataagatttggcaatagctggtcaaaaagtgatgcttgtccatttcctgtctcaggcaccaaatctaatagttggccatttttaaattcagactagacagtcttcactccacatcagaaagaaaaccagaaagattgttctttctgtgtcaaagccaagacatcagtaccaaaaatgtagatggaaaaagagctttgtctaatattactggtgacccagagcaaagtttgtccaaatggattcctatccagtgagaacaacactcacctgtttgtgtggctgacttatgtaacagggttataaggcatggttgtgtyataatcagtgattctccttatgactaataacaattttagacagcacaaaacagaagcacaaaagggagcagaacaggatgaaaatgaatggcctgattctagcaagaatgccaaaaaccgggaagcgataacaaaacctgggtgccaagcagaataaatagctgtagagctcaacaaaaacacagcagagttcagaccgggtgctgatgtactcattgatctactcattgtgatcaacaagattcagggcactccatgggtaattttacaccaaagtgtgggatccatggtgatgaatagttcaggttatatgttggtggatcctccaggaaaactgtagaaatacaggaagaccacccaagtgggaacaaacagaggct

SEQ ID NO: 92075 - DNA, 810 bp, Homo sapiens
aagttatgccattcagggagacatgcacaagaattaaaattttaatgagaatgtatatataagaggcaggaatgtctgctggaggatgagaggatttaggcttagatggtctcataagatttggcaatagctggtcaaaaagtgatgcttgtccatttcctgtctcaggcaccaaatctaatagttggccatttttaaattcagactagacagtcttcactccacatcagaaagaaaaccagaaagattgttctttctgtgtcaaagccaagacatcagtaccaaaaatgtagatggaaaaagagctttgtctaatattactggtgacccagagcaaagtttgtccaaatggattcctatccagtgagaacaacactcacctgtttgtgtggctgacttatgtaacagggttataaggcatggttgtgttataatcagtgattctccttatgactaataacaattttagacagcacaaaacagaagcacaaaagggagcagmacaggatgaaaatgaatggcctgattctagcaagaatgccaaaaaccgggaagcgataacaaaacctgggtgccaagcagaataaatagctgtagagctcaacaaaaacacagcagagttcagaccgggtgctgatgtactcattgatctactcattgtgatcaacaagattcagggcactccatgggtaattttacaccaaagtgtgggatccatggtgatgaatagttcaggttatatgttggtggatcctccaggaaaactgtagaaatacaggaagaccacccaagtgggaacaaacagaggct

SEQ ID NO: 92076 - DNA, 598 bp, Homo sapiens
aaattcctgaccccaagcccagtgtttctrcactacactgaattgtctctcagaaagctcgtgaacgcccctagcttattcagccctgctgtctgtaggctgcttacttcccatcgtcatgcctttctccattctctgctgatacgttagtgattcgagcacaacatttcagagtaggccaaacagacccttgctcgtggtttcctgtgtttgaaatcgcatgattgttaggactcaaaagagagacttattacagaaattcccgttgcacttcagcggtgtgtaattggactttcatcaaattgaagcccataagcaattttctttcatggcctggcaatcctcagagaagaagacctcttcagctgtgtttaaaccattgaggagagggagtaccttgaatatgcatgagcatgaccgaggcagcaacagcagaggtggattttaataattaattcattaggccaatttatttctctaattggttgtgaagctttgtcaactaggagatagtaaaaacaattaaaaattcaaattattttttataacctggtggatcttaggtattaaggatgcacagagagagaaaaaaacagac

SEQ ID NO: 92077 - DNA, 1069 bp, Homo sapiens
ttattcttcatagggcagctggggtgaacacttttaactataaatcctctaatggcctcctactacactggaataaaatcccatcccctagcctgctgtggacagtgcctgggctggcccagcctccctctccttctactcctgcccgtacttaccatgcttgggcactctgacatttgcaccagtaactccctccagctggagtggtcttccctgattatcctgtagctgcatcgtttttgtaaatcaaggtctcagtttggagctgccccccttagagagaccttcctgatccccatcctgacagtaggctatggtcactcttggctctgatcaaccagctatagttctgcaatagcacttattgttctctgaaatcataattttatacttgtccactgcttttattcccacccattcccctaagatatttgacaagactttacttattctttccattgatgcgtatcactagaacaatgtctagcacataggtactcaataactatttttcaaaagattctggaagataataaaaatatgttccctttggctgaagtaattgtattttgtcaaccctgggacctgattggcataatacatctatagatatgagtagaaatgtctcaaccttcttccctggggagtttgagcttgtgaagtctgattctctaggttgacatttctgcagattgggtagagttaagtaggtttaaaatgataaagtgaaatggcagtgttatccaagaagttaaaayagagaaggaagggtatcagcacataacttacatttttaaactacacaaaggtatatgcaaaatgtgcacccgtgaataaaatttatatagatgtagctatggccaggtgcacacacaagtccagataactatagcagtgggtggaaacaaaaacttgagtaatacaagcaaaacctaataccaaaaatagtttaccctattttagagatgtagtagtcagagtcataaggtaatgagataaaaacaaaactcagagtgtgtacgtccaaataaatatttctctcaatattgtcttcagaacaccatacaat

SEQ ID NO: 92078 - DNA, 785 bp, Homo sapiens
gttactgagcctttaagtccctcagaagttagtggaagagaaaaaaaggttcaatacaggtaagtatacgttttacatcaggtgttcatgtacagggatttcaagccacaaaaaaggagcaatcaattctggggaaacccagaagagaaagcctagagagaagaggtagcatgtgaattccccagacaatgaaggggcctggagtcaagggaagagggaggagatatttagggacaggaaaaagtagatgtacaaaggccaaagagtgtgaatgggcagaggaggatgtaagggagaggacttggttttctgctttgtacagtaacaacatatgcctgtaactctgggccctgcaggccaaatgcagcctctacttggtttttgtaaataacacttactggaacactgccatgcctgtgggtgtgcagattgttcatggctacttttacactaaaaggcagagttgtgtagttgcaacagagaccttttggtcttacaaggctggtttatgtactttctagcactttacagaaaatgtttgccaactctctctctctctaaagctatagttctcaaactttaatgtrcatacaaatcacctaggaatcttgtttaaatgcggattgtgattcagtaggactgggtgggcctaaagttctgaaattctaagagttctgaagttctaagattcctccttccttcaccttttgtgatgatccaggtaatgtcagtgttgctagatggcttgacacactttcagtagcaaggatctagagaaactctgg

SEQ ID NO: 92079 - DNA, 1352 bp, Homo sapiens
tgcatcaggtggctgcatagagagaagaagatggcatgaggagacggyggggggaaacagaaatgatcagtgcatagcagtacttaggcaatggaggtggagaggcaaggtgaggacccacattgtcacagaggtgaagtctccaggactcctcagtacttgagtggatgtgagtgaaacaaatggtcaggaagattaaaaacaaaattttttttcttaaagactccaactttttcagtcatttcatgtcatactcttgcccatctccccaccatttggttacatgttgatggaaactagtgacccttctcccacaatttcactgcaacctattcttccttgtggtgcagtgatcttgcaataataacgatgtcactatttacattgtggtgccgtcttaaactgcaattaattcacagttccaggctattaggaactattgtcataacagctatggcttcctttatctgcaaatgctgagttgtgagatgtataattatatgcgggagtaattggttttaaatttatttttgtaattacactaattgaacatggatgtgaatttaaaaatatgaagggcatggcatcgagccggatgcggtgtcttcataagaggtagatgaaagaaatgattgttatgagtaggtgaaaacaaccttgctcatttgtaaaagtgcagtgtaaatacaatggcccatgtatcccctccaggttgaatgccagtgtagtacagttgccaagtggagtcttcatgagagttcatttgaaactggaccaatgcctaaatcaaggggagagcatcctggctgctgctgtgacttaagatcggcagcattcccttggacctcccccatgaatatttgaaatttccctagaagacatgcccagtagcgtctaagctcaccactcttgcatacccagggcttacgattcccactattcttcaacttctaacaaacaaccattggtgatctctccaagccccacattcgaagatcccagttgccttcagtatctgtccagccctgccctggcaaactccgcagccttcgcctggtggtggcagtgagttctagagaacagagctgcttaatctcccttggctcagctcctttatatgagcccatctgctcttcaattctgtgtagatcagagccaagtccaggctttgtataaaacacttggggccccagaccagccaagagggaggagtaggcaggttttctgctgcacatcttcctagacgagctctactgtataagctgatagaccaaggattatatcaggccctttagtgtatctatcagcagcaatgtgccataaccactgaaactctaataatggccccccag

SEQ ID NO: 92080 - DNA, 1352 bp, Homo sapiens
tgcatcaggtggctgcatagagagaagaagatggcatgaggagacggtggggggaaacagaaatgatcagtgcatagcagtacttaggcaatggaggtggagaggcaaggtgaggacccacattgtcacagaggtgaagtctccaggactcctcagtacttgagtggatgtgagtgaaacaaatggtcaggaagattaaaaacaaaattttttttcttaaagactccaactttttcagtcatttcatgtcatactcttgcccatctccccaccatttggttacatrttgatggaaactagtgacccttctcccacaatttcactgcaacctattcttccttgtggtgcagtgatcttgcaataataacgatgtcactatttacattgtggtgccgtcttaaactgcaattaattcacagttccaggctattaggaactattgtcataacagctatggcttcctttatctgcaaatgctgagttgtgagatgtataattatatgcgggagtaattggttttaaatttatttttgtaattacactaattgaacatggatgtgaatttaaaaatatgaagggcatggcatcgagccggatgcggtgtcttcataagaggtagatgaaagaaatgattgttatgagtaggtgaaaacaaccttgctcatttgtaaaagtgcagtgtaaatacaatggcccatgtatcccctccaggttgaatgccagtgtagtacagttgccaagtggagtcttcatgagagttcatttgaaactggaccaatgcctaaatcaaggggagagcatcctggctgctgctgtgacttaagatcggcagcattcccttggacctcccccatgaatatttgaaatttccctagaagacatgcccagtagcgtctaagctcaccactcttgcatacccagggcttacgattcccactattcttcaacttctaacaaacaaccattggtgatctctccaagccccacattcgaagatcccagttgccttcagtatctgtccagccctgccctggcaaactccgcagccttcgcctggtggtggcagtgagttctagagaacagagctgcttaatctcccttggctcagctcctttatatgagcccatctgctcttcaattctgtgtagatcagagccaagtccaggctttgtataaaacacttggggccccagaccagccaagagggaggagtaggcaggttttctgctgcacatcttcctagacgagctctactgtataagctgatagaccaaggattatatcaggccctttagtgtatctatcagcagcaatgtgccataaccactgaaactctaataatggccccccag

SEQ ID NO: 92081 - DNA, 674 bp, Homo sapiens
ttttccataatggcccatctacatatgaatggataaagaaatgtgctatttacacacacacacacacacacacacacacacacacacacacacacacacacacaatggaatactattgagccataaaacagaatgaaatcctgccatttgcagcaagatgggcaaactcggaggacattatattaagtgaaataaaccaggcacagaagacaagtatcaacatgatctcactcatatatagagtcttaaaaagttgatttcatattagcagagagtggaatggtggttaccagaggctgaggagcatggatgagatgaggattgtcaatggggaggactgggagaggttggtcaatcggtacagttacagttaaataggaggatatacacagtagggtgactatagcaaataacaatgtattgtgtattttaagacagctgaaagagaagactttgaatgttgtcaccacaaaaaaataagtgtttaaagtggtggrtacggtagttgccctgatttgatcattcatgctatgtatacatgcattgaaacatcacatctcataaatatgcacaattattatgtgtcaagtataaatttaaatgttaaattaaaacattttcaccttctttctctttttgaaaaaggaatgaattccagtcttgatttgaattgg

SEQ ID NO: 92082 - DNA, 2318 bp, Homo sapiens
aaagagcagtttctcccggaaaggcagaggagagagtgtgtgtaaaggcatgagtgcaaatcgcatgcacacattgcaaagaacaagaaagctggtaggactggarcctgtcgtgggaccaaggacatgcaaaggatgagactggagagggagctggacaaggcagggccccagaggcttttgctccaaaaagctcatgataacaacatgagaaagatggatcagagcagcccgaaactagaggcagggaggtactgggttgatcttaaatatttggcaagacatgataaaggcttgagttagagcagtaataggaatggaaaattaatttaggattaagacatttttaagaggtgagatactcaggacctagtaaacaatgaccatgaaggattaaggagaggggtagatgacctctaagtttccaccttaggtagactagtggttctacttaccagttcagaaatcagagaagggggcagatgctcacaggactggttaatgagctcacacttacacaggggagtcttggggtgacatcgttgtgaaggattcaagcaggcagtgaatacatggattgggaactcaggagaaatattcatcctcactaaaatcataagcaggtaagatctgggtcaaagattcttgcccagtggattgaattgtgttaaagtgtgcatcccttcaaagtctggatccgggatgctccagtaggaccagctcaagttcccacaccagggtctgccatatacagtcaggctattgctttacccgactgtaacttaaaaataccaccctttcctatatttgccatgacatggcaaaaagttaaggaagctctatgctagggaaaccatggagagagatggaagggaattgggatcagactcccatggaacatcaattttaaaggactgcagaaaaataggagccactacaactctggggagggatagaagttggacaagggcaagactgggggaaggggtgttctggggaaatggaagaaacagcaggttcaaatgcagcagagagaccagggagaccatgttcttgtcccttggcagagagaaaatggccagtgactccatcagatgttctttcagccaagccgtagacgcctagtttcagtgggtagaagaatcaagagaggcgagaaagtagaggcactaaaagttgatttcccattccaggacattggctgtgagtgaaaggtgagaacaagtgccctagttagagggagacagatgtcaagagaggtttgatattgtttttctgttttcacagaggtgtggctaatctgatttccccacttaggttacatgctttccaaatgagatcctgttttctaaggttctgggcatattcagatgctaattcaggatatgcaggttcacatattgatttttgtcacagaattattcaaacagcattaattatgtgtgcaccaattccaaatgtaatttcttgatatgtttatacatatgttacatatacatgtttcataaggggagagaacagatttgatgattttagatagcaataaggaatctattaaaaatattgagattcaatggacaattatcctctttctgtggagattttcttttgcctagatttattttaaagatattttgtgcctactttactctgcacaatggcctttctcctgcattcatctgttaagtaacattttctctcccatagtactcagaccatatggtccccttctgcagtgtttttgactttttttgtgagataaatggtacttgggcgtggatctcatcattctcaaatactcagcaaatatactaattgagcttaagtgtaagatccgcacttccgacaacttattgatcaaaaataccacccttaccattgcacttaaatggaaaggtctatgttaatttatattgcataaagcatgccaaataaaacatgatagtccgtgtttaaagtttctgtttgcactaggatgtgtcgttgaatcgcagacaagtgttagaagtgattacagatcataacaaatggactctattttcaactcccatttttaatttaaacttctagcaaatccagaaggatttccagacatttatatgaagatacaatatggatgtgataataacaagacctttaaataagaaaatatgccctttaaaataatgaaaggaataaaataattctggtgaatggattgagcacacagcagaagtatctcttttgtagaagtggcagccagtcattggtgttcaatgatttctgttcacatttttctgaaataaagttttgcacagggttttttaaaaaaatgtttg

SEQ ID NO: 92083 - DNA, 1980 bp, Homo sapiens
ttacgttcttcttactgctcacttatagattgaggaaataagatgttcaatgatagaataacatggaagagtcttaaattctttagcaaatgtagaaaactagttaggactctttacatgatatagcttgttacaaaataccacctttaatacaatcctttttccattgagtcaaaataatagtggtgtatagaaggctccaacagcagtaattttcattcattttaaaatacactcatgttcaaggttagaaattttcaattgtcccacaaaaatgtgtgtggtgtgcccatagcatctatgtttaatatatccgtggattgctggaaatgatgaagaattgggtaatacgcaaacattttgtactttattcaatacatcagcacttgcatacttctgaagaattatagtgtagacacatttgaggtttattcagactacggttttatatatatatatatatatwtttttttaatttttattttaggttcaggggtacgtgtgcaggtttgttatataggtacattgtgtgtcacaggggtttggtgtacagattatttcatcgcccaggtaataagtgtagtacccaataggtagtttttcaatcctcagcctcctctcaacctcagctctcaagtaggcccaggtatctttctttgtttccaggtgtactcagtgtttagctcttacttacaagtgagaacatgcgtatttcattttctgttcttgagttattttgctgaggatgatggccttcatctttatccatgttgctgcaaaggccatgacctcattcttttttatggctgcataatattccatggtgtatatataccaccctttcttcttcttttttttttttttttttttttttgagacagagtcttgctctgtcacccaggctggagtacagtggtgtgatctcagttcactgcaacctatgcctcccaggttcaagcaattctcctgcctcagcctcccaagaagctgggattacaggtgcctgccaccgtgcccggctaatttttctatttttagtagagacggggtttcgccatgttggtcaggctggtctcaaactcctgacctcaggtgatccacctgccttggcctcccaaagtgctgggatcacaggcatgagccatggcgcccagccccaccttttctttatctagactacagttattaactggtatgggcatatgaatgggatgacttctctcagtgactgtgttggccccacagcagctcacaagctgcaggtgtggtgcgggagatacaaggggaagtctcaaggttgagtcaggtgtggatccttttaaaagaaaaaaaaaatgaattattgtgtctctggcattgacttaattatttttgttatacacatatgtgacataacaaacatgttaagcatgtacatatacaaacctggttataaactgattctgagagctcttgtgaaaccataaaatccaaacaaattaaaatcaaatataggctacaaaatcacttaaaatcaagttaacaaaactaatttaatgtggcagaagatgttgtttggctgaaattaaattactgcttaaaatgtgaatatggtactagactgctgtggcaacagtgcttttgagctcagcgtgcctgtatatttcaagtttggggtgatagttttctggaagaacacaggaaagtcttcatttattctttaaatttacttggtgcaaataaatcatttatttattaagtccactttttaattcttgcctgtactacttgttgctgttacacacaaaaggattgtttagtttatcatcaaaataaaatcataaaggtattataaatcaaatcccttagataatgtggagaatcttaaaaacatgtccaagcacttcctctctcccatttctgatgaccatggacaccagtttgaaaagagtaccttggaagatagtaaaacttattatgaacctgtactatatgaaagag

SEQ ID NO: 92084 - DNA, 1093 bp, Homo sapiens
ctgaaaaaggcatccaggtactgttttggartgtgatcccaaaactctaaaaacatacacaaagcttaaatggacaatttctgaaatactagagtgcaaactgacctcactcatgcttcatctttgtcagcccctctgtgctagatggctttggaggacagatgaagtgggggaaggaatggggagagacatattagtgcttcctcctcagctctcctttcctctctctttccccttcagctaccagaagaggctgctgaaggaccttttgcacaatttggcagtcatactattctcaggcaaattactagtagtcatttttgaaaaactgaaattcttctcaactcaggatgcagagcctgcccattccctgtcactccccactctggtcctatggaacatgaagaatgaaaaatcaataaattctttaagtggttttgagtccccactgtgttctgtgcacagacctagaggcatcccctgctgagcttctccttttgcccacatgctggatctgggatgattctggcttcactgtgagtcccctgttctgtgataactttacagtacagaatccagacaacttgtgcacctgctgtcagtgataaggtctgtgattgctccttcactactaaatactcgttccacccaggacgtgaatctctagcactggagccattttcaaatcagtgcctgtggtcataaggaagtgtttgctgccctcaaatgcttgcaaactattttccaaatgggcctacacgggctctaggattttccactttgaaagaatattttcattaagcatgtccactgttagataggctttccactggaaaggaacagaggctcaatgttgtcatcctaatccacgggggcttaatgaaaagcctagccacagggagggagatgccacatggcagagatcagccactgtctacacacctttaacatcggctccaggacccatcacgtcaccatgttagaggcaagagtgttcccgaatctttcctttggtgttctgcttctgattgtcttgacctcctcctggagggagggagggtggtaaatgtgtactcttctctcactaccaacc

SEQ ID NO: 92085 - DNA, 1610 bp, Homo sapiens
tgtaaattcctgaaagacaaagatactgcaatgaatttctttattatcactatatttaaatatctccctgaacatagaaagtcagtaaatgtgtattaattgacttcattgaaaaatcgagaagagatttggctggaaattaaggaacaagagttcttgaccattattggaaaggcttaatgactctcagcatgtcactttacctccctggattttaatatcctccttcattaaatgaattagtattaaaatgtmtctaaagttccttccagttctaaaatgtgtgactgaacttacaggggcagaaaagacatccttcagtacacccgaaaattctcctctctgtgcagaaacactggttctttgaatgtcagggactggaacagattgcgcattgtcgagaagagagtcaccctcaattactcatcaatggtggaattctttgtggtttactctcactaacctagtgtttccttagtaccacccacctaggtccaaggggatatacatgtgtctgagtatgtgtgtatttttgcctctctgacgacattccaagactaatataaacaccttttaaattacccattactctgtgtcacttctctcttctaccagaaagaggttagcctatatttacatttgaatttctaatattctaccctttccatcacctttttctttcttaaatactgatttcatctcttctatatgtggcccaaatttcaatatttctttaaatttgtatattggcataagtgtcctatacttatttaatattatattatattgaattatattttattgtaattataattaaatataatgaattacttatttaatatttaacataggtaatatattctattaatataattaattttaattattaatgctattgcataaatagaaaaaactcaaagaatatatcacaagagattaactggaaacaagattacgtgtgatttttatatttttctctttgcgtttctgtttttctacaattttatggattgcatacacaataattatatatgcattcacccatatatacaccttagttacttgaaccaaaatcaaaaacctttacacaactctttattattcttaacttcactttacgagaaaacatctctcgatacataaaaagtccagataaatacatataaatatactctaaaaacaaatattttaatatgtaagtggttttaagttactgacattaatcattaagttaataataaccttgatcctgtgagacagtcagaatatgctcattttcagcatagtacacttgctaaggcagcaaaatggaacagaatacttgaacaagattttcaatgatcatgggcaaaataaaaagacacagttaaccagaatattcaattagtcagaatatattctttaaacatctattagtcaggcaagtttcacttttcagggccttgtatcaaagcttttttttaaattataaaaacccataaacaatgctaattattcacatttacaaattaaacaccaaagtccattcccagattaaaacagaatctaaattgatgtgcttttaccaagactttatgtgatcattatccatcccttcccgctattgctga

SEQ ID NO: 92086 - DNA, 1610 bp, Homo sapiens
tgtaaattcctgaaagacaaagatactgcaatgaatttctttattatcactatatttaaatatctccctgaacatagaaagtcagtaaatgtgtattaattgacttcattgaaaaatcgagaagagatttggctggaaattaaggaacaagagttcttgaccattattggaaaggcttaatgactctcagcatgtcactttacctccctggattttaatatcctccttcattaaatgaattagtattaaaatgtctctaaagttccttccagttctaaaatgtgtgactgaacttacaggggcagaaaagacatccttcagtacacccgaaaattctcctctctgtgcagaaacactggttctttgaatktcagggactggaacagattgcgcattgtcgagaagagagtcaccctcaattactcatcaatggtggaattctttgtggtttactctcactaacctagtgtttccttagtaccacccacctaggtccaaggggatatacatgtgtctgagtatgtgtgtatttttgcctctctgacgacattccaagactaatataaacaccttttaaattacccattactctgtgtcacttctctcttctaccagaaagaggttagcctatatttacatttgaatttctaatattctaccctttccatcacctttttctttcttaaatactgatttcatctcttctatatgtggcccaaatttcaatatttctttaaatttgtatattggcataagtgtcctatacttatttaatattatattatattgaattatattttattgtaattataattaaatataatgaattacttatttaatatttaacataggtaatatattctattaatataattaattttaattattaatgctattgcataaatagaaaaaactcaaagaatatatcacaagagattaactggaaacaagattacgtgtgatttttatatttttctctttgcgtttctgtttttctacaattttatggattgcatacacaataattatatatgcattcacccatatatacaccttagttacttgaaccaaaatcaaaaacctttacacaactctttattattcttaacttcactttacgagaaaacatctctcgatacataaaaagtccagataaatacatataaatatactctaaaaacaaatattttaatatgtaagtggttttaagttactgacattaatcattaagttaataataaccttgatcctgtgagacagtcagaatatgctcattttcagcatagtacacttgctaaggcagcaaaatggaacagaatacttgaacaagattttcaatgatcatgggcaaaataaaaagacacagttaaccagaatattcaattagtcagaatatattctttaaacatctattagtcaggcaagtttcacttttcagggccttgtatcaaagcttttttttaaattataaaaacccataaacaatgctaattattcacatttacaaattaaacaccaaagtccattcccagattaaaacagaatctaaattgatgtgcttttaccaagactttatgtgatcattatccatcccttcccgctattgctga

SEQ ID NO: 92087 - DNA, 1610 bp, Homo sapiens
tgtaaattcctgaaagacaaagatactgcaatgaatttctttattatcactatatttaaatatctccctgaacatagaaagtcagtaaatgtgtattaattgacttcattgaaaaatcgagaagagatttggctggaaattaaggaacaagagttcttgaccattattggaaaggcttaatgactctcagcatgtcactttacctccctggattttaatatcctccttcattaaatgaattagtattaaaatgtctctaaagttccttccagttctaaaatgtgtgactgaacttacaggggcagaaaagacatccttcagtacacccgaaaattctcctctctgtgcagaaacactggttctttgaatgwcagggactggaacagattgcgcattgtcgagaagagagtcaccctcaattactcatcaatggtggaattctttgtggtttactctcactaacctagtgtttccttagtaccacccacctaggtccaaggggatatacatgtgtctgagtatgtgtgtatttttgcctctctgacgacattccaagactaatataaacaccttttaaattacccattactctgtgtcacttctctcttctaccagaaagaggttagcctatatttacatttgaatttctaatattctaccctttccatcacctttttctttcttaaatactgatttcatctcttctatatgtggcccaaatttcaatatttctttaaatttgtatattggcataagtgtcctatacttatttaatattatattatattgaattatattttattgtaattataattaaatataatgaattacttatttaatatttaacataggtaatatattctattaatataattaattttaattattaatgctattgcataaatagaaaaaactcaaagaatatatcacaagagattaactggaaacaagattacgtgtgatttttatatttttctctttgcgtttctgtttttctacaattttatggattgcatacacaataattatatatgcattcacccatatatacaccttagttacttgaaccaaaatcaaaaacctttacacaactctttattattcttaacttcactttacgagaaaacatctctcgatacataaaaagtccagataaatacatataaatatactctaaaaacaaatattttaatatgtaagtggttttaagttactgacattaatcattaagttaataataaccttgatcctgtgagacagtcagaatatgctcattttcagcatagtacacttgctaaggcagcaaaatggaacagaatacttgaacaagattttcaatgatcatgggcaaaataaaaagacacagttaaccagaatattcaattagtcagaatatattctttaaacatctattagtcaggcaagtttcacttttcagggccttgtatcaaagcttttttttaaattataaaaacccataaacaatgctaattattcacatttacaaattaaacaccaaagtccattcccagattaaaacagaatctaaattgatgtgcttttaccaagactttatgtgatcattatccatcccttcccgctattgctga

SEQ ID NO: 92088 - DNA, 1140 bp, Homo sapiens
attatttttatagttacagacaagctaattctaaaatgtatatgcaatggcaaagaaactagactagcctaagcaattctggtataaaaggaagtcggaggactcatattttataattttaaactctttataaagctttggtgatcaaaacattgtggttttagcaaaggggtaggctcctacatcaataggacaaaatagaaagttcagaaatagacctatacaaatatgccaattagtttttgaccaaggttcaaggcaattcaatggagaaagaatagccttttcagcaagtggtgttaggacatccatatgcaataaaatggatatcaacataaacctcatgccttccacaaagattaaatcatgatggatcatagacctaaatgtaaaatgttaaatatttagaagaaagcataggaaaatatctttttaaatcgacattaagcaaatagytcttacatataacaccaactgcataattaatttttaaaaatagatgttaacctccggcaaaatttaaaaccctggttctgcaaaagatactattaagggaatgtaaagagaagctaaaggctggaataaatcaattgcaaatcacttggatcctgaactttaaaacccaacagtaagaaaacgatccagctttataaaaaaaatgggcaaaggtttgcacagatacttcatcataaaagatatacaaagaaaccagataaatgacaaacaaacacatgtacagatgtccaacgtcatttgtcattagggaaatgcaaattaaaacaatgatgtgatattactaagccactaatagaagggctaaaataaaaagtactacaaaactaaggactagtgaggaagcagagcaactggaactcacatataatgtgatgatggcaatggaaaagggcaaagtctctcttacaaagttaaacatacacttactatatgacccagcaattccacccctaggtatttaccctagagagattaaaacttatgttcacacaaagcctatacatgaatggttatagcagcacgattcttatgtgcccaaactagaaacccaaatgttcttcaatgagctgataaacagtgttacagaccatggaataatagcaagcaaaaataacaaactactga

SEQ ID NO: 92089 - DNA, 600 bp, Homo sapiens
tccatcccttggtcatgactctaatttcctgacaccatccttcctatcaggtatgataagatrttttaagatcatcttgtacatttattctccacacctggaatttgacattttccaaattgctggtccctttttagtagaagaaaaaacgtctggttttttctttaaaaacaattattttgagaggagagagttaatatctaaatttaacttttaaaatatttttgtcaaattaatcaatgcaagtgtatgaaaagtaaaattccggccaggcgcggtggctcacgcctgtaatcccagtactttgggaagccaaggcgggcggatcatgaggtcaagagatcgagaccatcctgtccaaaatggtgaaaccccgtctctactaaaaatacaaaaattagctggacccactggtagcgggggctgtagtcccagctgcttgggaggctgagacaggagagtctcttgaacctgggaggcaaagattgcagtgaggtgagatcgcgccactgcactccagcctgagcagcagagcaaggctctttctcaaaaaaaaaaaaaaaaaaagttaaaattcaaatggttctgaagagctgatca

SEQ ID NO: 92090 - DNA, 600 bp, Homo sapiens
tccatcccttggtcatgactctaatttcctgacaccatccttcctatcaggtatgataagatgttttaagatcatcttgtacatttattctccacacctggaatttgacattttccaaattgctggtccctttttagtagaagaaaaracgtctggttttttctttaaaaacaattattttgagaggagagagttaatatctaaatttaacttttaaaatatttttgtcaaattaatcaatgcaagtgtatgaaaagtaaaattccggccaggcgcggtggctcacgcctgtaatcccagtactttgggaagccaaggcgggcggatcatgaggtcaagagatcgagaccatcctgtccaaaatggtgaaaccccgtctctactaaaaatacaaaaattagctggacccactggtagcgggggctgtagtcccagctgcttgggaggctgagacaggagagtctcttgaacctgggaggcaaagattgcagtgaggtgagatcgcgccactgcactccagcctgagcagcagagcaaggctctttctcaaaaaaaaaaaaaaaaaaagttaaaattcaaatggttctgaagagctgatca

SEQ ID NO: 92091 - DNA, 550 bp, Homo sapiens
gtcatgattatgaggcctccccagccgtatggaactataagtccattaaacctctttttcttcccagcctcaggtatgtctttataagcagcatgaaaaggaactaatacacccaggctggtcttgaactcttggcctcaggcaatcctcccaccttgcccttccaaagcactgggattacaggtgtgagccactgtgcctgacttttttttttttttttttttaacacatcaggaattattattgttatgaattatttttacttgaaattttataattgtggtgatcattgaacaacatttgagtaagatttaaaaatctcagtttattagttttccgttgctgtcataacaagttaccacaaatttatcagcttaaataacaamaaattattatgttacaattctgtaggtcaaaagtctgccctaggactcagtgagctcaaatcaagccattgaccgggctacattcctttctgtaggctctgggtagggtctgtttctttgctgttgacacttcttagaggttgctcatattccttggctcatag

SEQ ID NO: 92092 - DNA, 704 bp, Homo sapiens
aattttccattcatatgaaaggaataatctttggtcaggaaggaatgattctctaggccttatcataatgttcccaagtgtaggttaacagaatggctataattgaaggagtatttagcttttgatgacataaggaggtgtagcttgctattactactgttatttgctgattgattctatattatatgtgattttctgttcattaagttttgtcccratactcttccaatcatcttgtaacaagtcaaggaattagacaagcatgcctgacccagagctcatatactctcaagaatgctgggtaggttggtgggggccgcaggtggggataggatattgtgttagtgcattttagaaaaagcgatattacgtgaaaccaactgccaagggaactcatggaaggatgtactgacacagatgttccattgtataggcctacacagcactctgtctactccatgatcagggacagggtttaacgcaagattaaacagaaatgattgtaaacaactagcacctggcagagtggatatgctcagtaaacattccttgactgttgagtggaggaatcagtggcattctatgactctttaaacagcttttcagtgccatgtaggcccagcttgaaagaattattttcatgtttttttcctgtgatcttcgagagtcagtacaacatagtaaaggaaaaggttcaaattcca

SEQ ID NO: 92093 - DNA, 2120 bp, Homo sapiens
tgctcagatacttgttagcttcctggagtacttctaccaccaacagcattggtgtatattctatactactgtagtgttaacctgttataatagggtctcactgcagcagcataaactactttgttctccacacttctttttaaagtttctttcaatgaattaattttaaagagatgatgttattttacatgatgtggttggggactcaggtcatttagttgcatgattaatactttatcaggagcctgcatgccatcaggcaacatacccacacactgaatgtttcaatttgacaaaaaggaaacagctttaacagtgattattgtgtgtgaaaattttcaggggcgggagactgttattattgatcaaaatgagcatcattctgctgtctttgttattttgttgtggagactcctaggtatttgcatttgattatagtcattgcacagctgttcttctttctcatacttgctgtctggtacaaaataccatagacaatcaatcagagcctcaaagcaccctatttctagattccttcagcctggaagcccagtgacaataagccaagatgtatctctggatctaattaatgtgtggatccaattattgtgctatatgggcttggttttcctaagtcaagcctgtggatctatattgtacctagctgagttttagtacactgcaatcaaattggccagtcaaacggaatggacaaattgtatttaacaaaaaccaatgaaagcaagggaatgcaattttcctttttcttggaaagccactggcttatgtaactactatattctagtgaatgttgtaagttttcattatgaagacattggatttattttaaatccattttaaaaaaatcaatgcatctattccacctgagggttattttacgctgaaaacaatagcattatttttctaatattgaaataagtgcctccactgctaaaataaatgatttatttcaatacaagagaattgacgtatgtctaaagtagtttcatttcttatgatttattttatttgccttttatcattttatctctttctttatgaatgaagttaaagttggatttttattttttattctgcttagctcttgtaatttggccaatttctgcctcaaaccagtctttgccggcttgtgtacatctgtactgaaaacattagccctaagtgaggctaagatggaaasccgcagggctgcctacgctctctgtaataagcagattagaacatgaccatgtgttcaggccctaaaggtaatgagggagagagggactactgaatatcaggcagagaatttacttgagtgcatctaagtcttttaaattagagaatgagcagtaagttttcttcttttaacatcatatgtgattaatgttaataatgtggaagttgggggagatgtgggagcacagtttaaggggatttatctcaatcttgacataaagacaaggcctaatttaggcatccctgtagaaggaagtgaagtttaaaatgaggtgtgaagtgaacttgagaacaggagggggaccatttagttatacttctttaaagtctccatttttctggcaaaaatgaaaagtatattttcacccttttttctatgcccatggaataagaaaatatacatgaatatgctaacttgtacaaaaagaaacaggaaggataaaacataaaataatgtgactgattacctacaggggatgtgtgggaataaggtggtaaggatggggagaagagaacagagtagaaatatggctggggttcgaagtcacttctctatcctttttgcagggttctgactttggaaacatgatagtgtttcacatagccaaaactaaataaataacataataaataaaataaacaagagtgggggagaaaacccaaaatcgaacacaaacagaaataaacaaacctgtctttattgcaaataaataacacataatcactctgaatagaaaaagaaacaaaacaaacccaagtaattttaaacacagtgttttaagtatatatattcaggtaaaaggtaaaaagaagtatatacaaatattaaccctagttaagtaggtttgcttcttcacagtgctataattagcaattctgaa

SEQ ID NO: 92094 - DNA, 1679 bp, Homo sapiens
ttgaatctaattatgagaaacctaaattgaagcacattctataaaaaaagaactgtatttaaaaaaatgccaatatcatgaaaacaaagtaaggctaagaaactgtttcaaattaaagaaggctaaaagagacatgaaaactaaatgcaatatgtgtgattggactgaattctatacagcagggtgaaaatgctgtaagtggacatcaatgagtcaattgacaaaagtagaatatggactgtagattaaagtgttttatcaatattaaatttcctgaatgtgataaccacactgtggttatgtaagagtttcctgttcttaggcgagaacacactaaatagttaaggggtaatggggcatagtctcaagtagttcggaaagaaagatatatatatatatttttatatatatatatatgagacagagaatgaaaataacaaacatggcaaaatattaaatattgatgaggggtgaagctgagtaaagggcagttggaagttttctatattatccttgcaactttctcaaaagtttgcaattatgtcaaaattaaaagtttgaaatcaactgatgcttatattcatcccaatttttaatgataaatagaatttctttttaaacttttctgcccatgaaaataagttattgagaaattctttttactcaaatgcattcgtcttcttggcagcgaaaagaaggatgatatgagatatgtggagcaaccaacttagaaaccaccctttaaagctaacgggaaaattcctactcagtagaaggatggaaaacacagcattgtgctactgcacacacacacacaatctatttttatatcatttttgttaaccttgtttccctcagtgaaagtctccatgccaccacttggctgagctctattaacattttccttgtatgtccctgtagaacagcaggcagagccatggactgggagccaagaagacctgggcttaagttcaaactctgtcatctactagttacgtaggtgtaagactctaacttcagcttccctatctacacaatggggacaatgatagatttgggagcacaaactgtctgtaccttcctgcaagcccatcagcagttgccttggtcatgaggggttttgtgaggttggtagtaagtgttggtcttggtcatgtacttgtctttctgtttactctgatcatcctttaggatggagcttgtctgcagaagacatatattcctaataggaatttgacaagctgcttccaaaagtagtaactgttagacaatgacgtgcattgaattcactgtcttgtgcatattagggctattttgctttgtgtgtttgaaatcttccaagtaattgttgtattggcccagggagtgacaacacaagaaacacatctaattttccctccagattttttttatgtaccattgaggcctatctttttcatttactgacaaatacatttttttcttcctgttaggtttgctgagccggtcttccgatgagagagtgggaactaaacygtattctgccttcagccgcaaagcttttgtcagttagactgtgactgctgagacttattcccgaggatgtagcgagatagggcgacagcttccagattgctgactagctattttgggacttgtaaacttgtggcacaactgacttgtaaatcaatgcttattta

SEQ ID NO: 92095 - DNA, 1921 bp, Homo sapiens
tgcatctattacctcacagttctctaggtcagaagtcagcatagtgtttcttgctgggtttcttgctcagagtctgcctaggctgaaatcaccatgtcagcaggggctgtgttctcaggtggatcttagtcttcctgcaaactcattcaggttgtaagaagaatagggttccttggccaggggtcactcttagctcctagggcctgccctcaggtgatagccatgtgtcccaatcacaacatggcagcttggttgttcaaggccaacaggagcatctctctccagtttacaacgacagcaatatctgtaacagaagataatcacagagtgactatcccatcacttttgtcatattgtgcaccctaatcaaggaaataactatcccatcatattcacagtttctacccacaccgaagggaggggattatggatcttgaaggctatcttaggccattctgcctgccacaagaatatagcagataaagctcaaaataagcctgataaaatgcacccacataaaacacatgactatatagcagcctcagaaatgagagtcataacagtaatactacgccaagggagaatgtggtcagaaaatgtctgagtatattttgttggtttgaaaatgataattttcagggtatcttaagaaaaaaaatgagatttcaggtttttaaacacaaaataatataacaacataaatatcagaatttagttacttaaaattaagtaactatgtcaaaaagccaaaatactagcaatcaacattacaaaaactagctcctggacttgggaaaataaatcaacataaatctttataaatgattctcctatgaaaagggctacctaaacattaagtaagcttattcattctgtaaatatgtaggcttttataattcccatgaaaactctgacctattcttcagtcagctcacattcttgtaaaattggtaatggaccatttcttcttctttttttgtagtcttccacatttcattaaatctgttctctcattctcctcactttggtttttaatgaagtcagtccttcccctctttcagttaatttttctaaatagaatttcactgatgttgaaacacacactgcctgctgttacctacaggcaaaatccttgccatccatggaaaatgaatgaatttaatatttcaaacaaataaacataaacaatttaacttgtgacacattctgactttggattattaattcattggctctgatgcatccctgataggctgagtttagggacttaatcctgttgcccagtgtaaaatcaaggctctaaggaggaagcataagagctgccaaagatggttcctttatttcctttccttcaaattatgtctactgatcatgaggccccaaaacatgcactattcttcttacattttatttcacttaaamtttttattaagttttcaaacataaaacacagttgtggcaatgatattatgaacccaatgtttacactgcatcacccaactttaacaactattaatatgtgacaagcttattttatgtatacttttatttactactccttcaattatgttaaggcaaataatataatatcatttcataccatagagatatttcagcatatatctttaaaaatgagattcttttaagaagacataaaaatataatcacacctaggccgggcatcgtggctcacgcctgtaatcccaacactttgggaggttgaggctggtggttcacgtgaggtcaggagttcccgaccagcctagtcaacatggtgaaaccccatctccactaaaaatacaaaaaaaattagccaggcttggtggcacacgcctgtaatctcagctactcaggaggctgaggcaggagaatcgtttgaaaccagtaggcggaggtcgcagtgagctgagattgcgccatt

SEQ ID NO: 92096 - DNA, 1921 bp, Homo sapiens
tgcatctattacctcacagttctctaggtcagaagtcagcatagtgtttcttgctgggtttcttgctcagagtctgcctaggctgaaatcaccatgtcagcaggggctgtgttctcaggtggatcttagtcttcctgcaaactcattcaggttgtaagaagaatagggttccttggccaggggtcactcttagctcctagggcctgccctcaggtgatagccatgtgtcccaatcacaacatggcagcttggttgttcaaggccaacaggagcatctctctccagtttacaacgacagcaatatctgtaacagaagataatcacagagtgactatcccatcacttttgtcatattgtgcaccctaatcaaggaaataactatcccatcatattcacagtttctacccacaccgaagggaggggattatggatcttgaaggctatcttaggccattctgcctgccacaagaatatagcagataaagctcaaaataagcctgataaaatgcacccacataaaacacatgactatatagcagcctcagaaatgagagtcataacagtaatactacgccaagggagaatgtggtcagaaaatgtctgagtatattttgttggtttgaaaatgataattttcagggtatcttaagaaaaaaaatgagatttcaggtttttaaacacaaaataatataacaacataaatatcagaatttagttacttaaaattaagtaactatgtcaaaaagccaaaatactagcaatcaacattacaaaaactagctcctggacttgggaaaataaatcaacataaatctttataaatgattctcctatgaaaagggctacctaaacattaagtaagcttattcattctgtaaatatgtaggcttttataattcccatgaaaactctgacctattcttcagtcagctcacattcttgtaaaattggtaatggaccatttcttcttctttttttgtagtcttccacatttcattaaatctgttctctcattctcctcactttggtttttaatgaagtcagtccttcccctctttcagttaatttttctaaatagaatttcactgatgttgaaacacacactgcctgctgttacctacaggcaaaatccttgccatccatggaaaatgaatgaatttaatatttcaaacaaataaacataaacaatttaacttgtgacacattctgactttggattattaattcattggctctgatgcatccctgataggctgagtttagggacttaatcctgttgcccagtgtaaaatcaaggctctaaggaggaagcataagagctgccaaagatggttcctttatttcctttccttcaaattatgtctactgatcatgaggccccaaaacatgcactattcttcttacattttatttcacttaaaatttttattaagttttcaaacataaaacacagttgtggcaatgatattatgaacccaatgtttacactgcatcacccaactttaacaactattaatatgtgacaagcttattttatgtatacttttatttactactccttcaattatgttaaggcaaataatataatatcatttcataccatagagatatttcagcatatatctttaaaaatgagattcttttaagaagacataaaaatataatcacacctaggccgggcatcgtggctcacgcctgtaatcccaacactttgggaggttgaggmtggtggttcacgtgaggtcaggagttcccgaccagcctagtcaacatggtgaaaccccatctccactaaaaatacaaaaaaaattagccaggcttggtggcacacgcctgtaatctcagctactcaggaggctgaggcaggagaatcgtttgaaaccagtaggcggaggtcgcagtgagctgagattgcgccatt

SEQ ID NO: 92097 - DNA, 1943 bp, Homo sapiens
tgcattcacagatgctacttcctgtctgccctgactattccctccagagccccaggtgcccgctgcccaaacttatgattcaatgaaatgactkctctctctctacttttgtcttgcctttctcactgccatctttgccccaggtgagacacttctgtttcatgccacctaagtacccttttattcctatactacaatgagtatcatcacatataagagctatttatacatggctggctgtccccccagactccaagctccttagaaccagaagttcttatcgtgttctcttgggcctcacatagaacctgatatatagttggctctttataaaccttggttatcataatttcagaaacaatgttttcatctaaagggggcttagaaaagtgaattgacatagaatttttagagcaattcttatatttaaatattatttcatcagatatgtagtcaaatgacaatacttcacagattcatagtgacttatattaaaggtttacaattttttttatcaacttcaacaaattaaataaaattcagcagttcctttgttacataggtgattataggttcagaggtgatgtacccgaggtggaggtaatttactgacaattaggcagtacttccacaaataaaaagaacacaactctacagacttgactaaaagtgcatatccagagtctttggattatgcccataatacaatagctaaaacctgtatgatatccaaaaataatttaccagtaaaatttggtatatacaaatatgaagactgaagaaagaacatctaagacaacagcaaatggtccaattatgggcattaacaagacaaagacttaaaggtcatatttaccaagtagtttaggaactttgccacaaaattttaattaacactagcgagaatttacagttaaccctagggcagtatgtggacattttttccatatgcaagtctatgcatttgagattattttatttttccatgccataggatgtaaagccatataattactccacaggggaaatgtgctttgatgtcactctaaatagttggttctttggcttttataaaaaaaaaaaaaaaaaagttaaaataggctacatctctaaataagggttattttctttcaaaatatagaatagcaaagccatgaagagaaataaagtgatgctctgaactgcagtaaactgaacaatgactagaatatctatgaaatattaggtgtccaaagaaaaataaacaaataaaaaacagcctcacgtatattttttaagaatacagcaaattgaaaagatagatttttttaatgaaagactgttttgcatgtgtttagccattttatattttttattcagccaaaatggtaatgataaaggcaaaaactattcacctggttgtcaaatacatgaaatgaaagatatctcacatattctatatttgatgataaaagaatggatggaacattggtgctcacaataaaagttgaaaataacctggccagcagattatggcatatgaaaaaactagaatatttattttgctagtaaaagactgacaaacagagatgtaaagacctaactaaagcatgagaaactgaaagatcctatgaaggccgtggaaaataatgcagccataagaaaagaaaatttaatccagtaagaacataaggtttatataggactaatctactgtagatttaaacaaactctcaccaacatgaaagtgacatcaattgaaaactagtttcattttactttgaaacagagcttacaaatcctcgatcctataaatttcaatttggattaaaatcgttttgtacacagagttcattacactgaaccagatataatcattatatagataatatttatgaagaaacacttgttgttttattactttcttaagctgatgacattcaatatgctctgagattccagac

SEQ ID NO: 92098 - DNA, 1311 bp, Homo sapiens
tgcctatttctattttaatattttttaaactttagtcaaacacagacccagtaatatattaactgtcaacattttataatgtaaagtaataattttagcataacttttgtcataaaatatggattccaagaatatacaaaaatattaaattatagtagagtttatgttatcatcaaggttatatacaaaggttatattatgatcaaagctactgcttataatgtagaacattaaaaacttaaagagaacttgctaaatttaaacatagatagaccaaaatcaggtcatttaaatataactattataatattatcaaattaagtctatgttaaattttttgatgaagaaactcctcagcatttatttttaatgaagactcctttgaaggaaaacattcaacaacagatatgaagaggtaatacaaaatatgagtgttaagttccagaatagatggtgtattaagccatgcatgcatttctataaaggaatacctgagactgggtaawacttaagaaaagaggtttaactgtctcatggttctgcaggctctccaggaagcacagcaccagcaactgcttctggggaggcttcaagaatctttttctcatggcagaaggccaactgggagcaggcacattacatggggaaagcaggaaaaagagagacagtgccggaggcgggcggtgtgccacactttacaacaaccagattttgtgagaactcactatcagccataagagatccacacccaagaccccaccaggccccacctccaacattgggaattacacctcaatatgatttggaggggacatccaacctatatcagatgtgtattagagaccatctacttcaacaatgtccatgtatctaggttggccagataaggccttgaaagacaatgattaggagtttttcctgaagttcctctcctgcagtttccaaacactcctggtgcctgcaatgttgaaggcaggtcactggcactgacttgaagtctctgagtgaaatcctttggctaagaaaaacaccgcatgcatttcactaggtatgtagcttattaaaaccagtgtgtgaaatgcatcagtgagaggacaatatgacatttcttggccccagctacactcagctgttctaaaaggggtctgctctttaattaccactgatgaggcaaagcaatgaagtgagttactgcttaatcattagaagtgcatagttgcctatgggttagtttgaaaacactcaaatcatatataagaagaaagaaaaaaatctaaagtaataggaaaatttcccttgaagagaagaggt

SEQ ID NO: 92099 - DNA, 528 bp, Homo sapiens
agggaatttcttacttggtctgagaagataaagcacacatagtaatattattcaacctagactcatccatctatagaaatagaacactaagtaaccagacagttgtgaaaaactgtaaaayagagacactacattaaacagaatactgaacaccatgggaaagacagttaacagaaccaatgggaaaataaagaaagaaatataattaactctcttgagagatttgggtgtcagtcatacctaacaggcaaatatgaaagggggaagcattcacagttcttggaaattaacagtatgattgtaaaaataaaagcctcacagatagactgaatagcaaaactgacccagattaaagaccaaaaggtgaataggaaaactgaaagaagtgatcctctaagaccacagtgccagaggactaaaagctgaaaacgtcgtgaatttacgtgaggggttggtggggaaaggtccagaagtttgcagatctgtctaataattttccttgaaggagataaccaagcaaattacagc

SEQ ID NO: 92100 - DNA, 528 bp, Homo sapiens
agggaatttcttacttggtctgagaagataaagcacacatagtaatattattcaacctagactcatccatctatagaaatagaacactaagtaaccagacagttgtgaaaaactgtaaaacaragacactacattaaacagaatactgaacaccatgggaaagacagttaacagaaccaatgggaaaataaagaaagaaatataattaactctcttgagagatttgggtgtcagtcatacctaacaggcaaatatgaaagggggaagcattcacagttcttggaaattaacagtatgattgtaaaaataaaagcctcacagatagactgaatagcaaaactgacccagattaaagaccaaaaggtgaataggaaaactgaaagaagtgatcctctaagaccacagtgccagaggactaaaagctgaaaacgtcgtgaatttacgtgaggggttggtggggaaaggtccagaagtttgcagatctgtctaataattttccttgaaggagataaccaagcaaattacagc

SEQ ID NO: 92101 - DNA, 528 bp, Homo sapiens
agggaatttcttacttggtctgagaagataaagcacacatagtaatattattcaacctagactcatccatctatagaaatagaacactaagtaaccagacagttgtgaaaaactgtaaaacagagacactacattaaacagaatactgaacaccatgggaaagacagttaacagaaccaatgggaaaataaagaaagaaatataattaactctcttgagagatttgggtgtcagtcatacctaacaggcaaatatgaaagggggaagcattcacagttcttggaaattaacagtatgattgtaaaaataaaagcctcacagatagactgaatagcaaaactgacccagattaaagaccaaaargtgaataggaaaactgaaagaagtgatcctctaagaccacagtgccagaggactaaaagctgaaaacgtcgtgaatttacgtgaggggttggtggggaaaggtccagaagtttgcagatctgtctaataattttccttgaaggagataaccaagcaaattacagc

SEQ ID NO: 92102 - DNA, 660 bp, Homo sapiens
aaaattagtcaggtatggtggcaggcacctgtattcccagctaattgggaggctgaggcaggagaatcgcctgagcccaggaggcagaagttgcagtgccaagatcacaccatcgcatttcggcctgggtgacaagagcgagactgcatctaaaaaawaaaaccaaaaacacccaaaacaaagcaaaaaagactcaagtagaggggaaaaataaaaaataccagtagaaaacacacaaccaaaagatctatatgacaatgaaactgtaaccacaacacatataaaaagactggatttatttaaaaaactagaagctcagattgtgtgaaaaaaaacacaattcagccatatagtgtttataataggcataactaaagccaagtagcatggaataataaaaataaagataagatatatattgatttaacaagaagaaggtgaggagaaattaacgttaagtagagagtttatttgggccaggcttgaggatggaaacccaggagcatagactccagttgccctgaatatacacttcatttagcagcatttacaagttgatttgtaaaggcaaaaacagggatagggagtaagttgatacaaagttgtttgccaagaattctccattggtttgcagaaataacgtggattagtgattggcta

SEQ ID NO: 92103 - DNA, 660 bp, Homo sapiens
aaaattagtcaggtatggtggcaggcacctgtattcccagctaattgggaggctgaggcaggagaatcgcctgagcccaggaggcagaagttgcagtgccaagatcacaccatcgcatttcggcctgggtgacaagagcgagactgcatctaaaaaaaaaaamcaaaaacacccaaaacaaagcaaaaaagactcaagtagaggggaaaaataaaaaataccagtagaaaacacacaaccaaaagatctatatgacaatgaaactgtaaccacaacacatataaaaagactggatttatttaaaaaactagaagctcagattgtgtgaaaaaaaacacaattcagccatatagtgtttataataggcataactaaagccaagtagcatggaataataaaaataaagataagatatatattgatttaacaagaagaaggtgaggagaaattaacgttaagtagagagtttatttgggccaggcttgaggatggaaacccaggagcatagactccagttgccctgaatatacacttcatttagcagcatttacaagttgatttgtaaaggcaaaaacagggatagggagtaagttgatacaaagttgtttgccaagaattctccattggtttgcagaaataacgtggattagtgattggcta

SEQ ID NO: 92104 - DNA, 585 bp, Homo sapiens
actaacaatattagtttaaaacctagggtagccagaggatactgaggaaagcaaaggaatgctgcctcttctccttggaagaacagaacctggaaagctaccagggacgctggcacacagcccacagaaaactgcccacccggctccgcagcggtcatcactacggggccattattcaggcttctgctccgcgataaagtaaaaatgctcccctcaaatgcaaaaccagccagtccacgcggctttaattactcaagcaaggcctgtgcgactaaaaagcaaacagctgttttgaagttggtgacaactcagaaacgcacttcaagtcaaatattcacttccaaagaggtaaataaggtacattacaaacaggcaaacyttttcccaaagggaggtggtgccaggcctggcttcctaaagttgccggttttatttcctcgtaaccaggaaaaattccaccatcgcatcgatcccgctttaataggtatgcgggtgtgctgtgcaatctaactaaacgcaaagcagagaatgcagaacgcaaaacacctagccgaggagagactggcaaaataaaccaccggggga

SEQ ID NO: 92105 - DNA, 742 bp, Homo sapiens
tgcatgtgttcatgtctctagtttacatgttgtttgctccaaaccartggtctcacatatatccattagtgtactaccaatgaataaagttttatcatcaatgtagaattttgtaaattggcatttttcattttttcagatatgttcttaacatataaaatcatatttttaattatctatgttatctaaaatagaacactgaaatgagaaaaactttactatacattatgtatggttgttatcaccatactgtggatatccatgtctacagaaacaatgacacaaatgaattcatctaaccctctttaaaaatatatagttttccattttaataccactaactgtggtacaggatttagtttacagtgtttgtaggtctggggaggtattaggactccacactcagataatcaaacagactattcaatttagatgggactttgtataccatctctagattatatacagcccttgctctaaaacatattaggacagaatgacatgcttatttctattcctagaccagagtttcatttttaaatgcagaaaagaagagggaattcagagtttaaaaatttgagaggtagagggtaagatctaaaccaaagtactcgaataccttaggcagcagatcagtcaataaggcttcttgggtgcacttgtttatttcagagaaaatagaacaggtagtatatatagttaattttgaccatatgtgtaatcataaaggaaataatttact

SEQ ID NO: 92106 - DNA, 1922 bp, Homo sapiens
gaatgcaacattattatagagctagttttctatggctcaagcatagtgaaataaatatggatgctgaaatacatatggactgcttgacatcaataaaaatagaagactcacagaataagtagaggctgttatactgtacaattgtctgaaataaaatgggtgcaattaacataatatgacacaggaacagaatgataactggagagttttgttctataaggatctccggcaatggatttttaggaaatgaaatacatgatcagtctactaaggtactgcttgacgtatattggcaaacatatatatacaaagcagaccgagggagagaccaggttatgtagagaaatgccattgcaaaatcgtctcagaggtataccatgaatcttccctgaaatccctcctcaggaagctctgctttcaattactgaaataaaaattcactgggaagaggaatatacccagatatcctaggagttattatatcctggctctgaactgatagtaatccctggtgatatgaaattctatcgtggtcaaccagaaaaagtgggtatttctgtgcatcactttataaacggtatatactttattctgtcttacattgggtgccttgagacattggataaatcctttgaatatttatcttgttcaagtgtgtataggagaaataaataaatatagtaacacacaatttctctacaagggtttcctaacatgtacagcaaagaatgatatgaaaggaaaaaccaagcacagctcatggaaccattcacctcaagatttattaagagagtaaacacagaacagtagcaaatccatggagaaattgtagacattagtgataacaggaaatattttaaaaatgcatgtttggtgatttctccacattctcccttgaaatcacccatctgactgaggcaaagacagatgggtcattgataatgacaaattatcaaaaccttaatcagatgatgattgcaaattaagtgccctgtaattttagttcctttgctgaaacaaatcaagacaatttcagcagctgttatgcagctatttaccaaattaaatgatcagggtgaaactttgtgagattagggagctctcagtttaatgaatatcctgaagattgtgcaatattgagaaacatagaagtttcaaccaagcagatagagacattactgtactcaactaaggattcacaacttgtgggcaattctagttctacagtgaaggctatttaagatgcrgataatcactattgaaaaacagccctcaagtagaacaagctgatccactagtaaatttactgtaggaaaaaaagcacaacaaaaatgaaaatgaacaacaaaaaatccatcacattctaaagcaaatcaacaaaatccagacatgcagcagtataacaaaaaaaaagtgaaatgtgaaccagaaaaaagattaaaacaataatcgaaacaaactcagagatgacagagatgctaaaatttgcatacgagggattaaaaaattgtgatcgtcaatatttaaaaatatattttgatcaaccaaatcttcacaaaaaaatttattaacaaactttcactcctccaagaaatattaaaggactattttcagaggaaggaacatgatacagaaggaaagctggttgtgtataaagaaggaagagcactaaaaattgtaaatatatgagtaaacacaaaagagattttaccataaatccttacttttcaaaaatataattatctgcttaaagcacaaatactaacaatggattgtggggctcattccatatgcagaaacaaaatgtatgacaaaaattatacaaagaagaagcaggattagcaggagtatgaggggtttacattatcacattgcatgtgaagtggtacaatattattcttggtagacaggatgagtctagc

SEQ ID NO: 92107 - DNA, 1922 bp, Homo sapiens
gaatgcaacattattatagagctagttttctatggctcaagcatagtgaaataaatatggatgctgaaatacatatggactgcttgacatcaataaaaatagaagactcacagaataagtagaggctgttatactgtacaattgtctgaaataaaatgggtgcaattaacataatatgacacaggaacagaatgataactggagagttttgttctataaggatctccggcaatggatttttaggaaatgaaatacatgatcagtctactaaggtactgcttgacgtatattggcaaacatatatatacaaagcagaccgagggagagaccaggttatgtagagaaatgccattgcaaaatcgtctcagaggtataccatgaatcttccctgaaatccctcctcaggaagctctgctttcaattactgaaataaaaattcactgggaagaggaatatacccagatatcctaggagttattatatcctggctctgaactgatagtaatccctggtgatatgaaattctatcgtggtcaaccagaaaaagtgggtatttctgtgcatcactttataaacggtatatactttattctgtcttacattgggtgccttgagacattggataaatcctttgaatatttatcttgttcaagtgtgtataggagaaataaataaatatagtaacacacaatttctctacaagggtttcctaacatgtacagcaaagaatgatatgaaaggaaaaaccaagcacagctcatggaaccattcacctcaagatttattaagagagtaaacacagaacagtagcaaatccatggagaaattgtagacattagtgataacaggaaatattttaaaaatgcatgtttggtgatttctccacattctcccttgaaatcacccatctgactgaggcaaagacagatgggtcattgataatgacaaattatcaaaaccttaatcagatgatgattgcaaattaagtgccctgtaattttagttcctttgctgaaacaaatcaagacaatttcagcagctgttatgcagctatttaccaaattaaatgatcagggtgaaactttgtgagattagggagctctcagtttaatgaatatcctgaagattgtgcaatattgagaaacatagaagtttcaaccaagcagatagagacattactgtactcaactaaggattcacaacttgtgggcaattctagttctacagtgaaggctatttaagatgcagataatyactattgaaaaacagccctcaagtagaacaagctgatccactagtaaatttactgtaggaaaaaaagcacaacaaaaatgaaaatgaacaacaaaaaatccatcacattctaaagcaaatcaacaaaatccagacatgcagcagtataacaaaaaaaaagtgaaatgtgaaccagaaaaaagattaaaacaataatcgaaacaaactcagagatgacagagatgctaaaatttgcatacgagggattaaaaaattgtgatcgtcaatatttaaaaatatattttgatcaaccaaatcttcacaaaaaaatttattaacaaactttcactcctccaagaaatattaaaggactattttcagaggaaggaacatgatacagaaggaaagctggttgtgtataaagaaggaagagcactaaaaattgtaaatatatgagtaaacacaaaagagattttaccataaatccttacttttcaaaaatataattatctgcttaaagcacaaatactaacaatggattgtggggctcattccatatgcagaaacaaaatgtatgacaaaaattatacaaagaagaagcaggattagcaggagtatgaggggtttacattatcacattgcatgtgaagtggtacaatattattcttggtagacaggatgagtctagc

SEQ ID NO: 92108 - DNA, 1922 bp, Homo sapiens
gaatgcaacattattatagagctagttttctatggctcaagcatagtgaaataaatatggatgctgaaatacatatggactgcttgacatcaataaaaatagaagactcacagaataagtagaggctgttatactgtacaattgtctgaaataaaatgggtgcaattaacataatatgacacaggaacagaatgataactggagagttttgttctataaggatctccggcaatggatttttaggaaatgaaatacatgatcagtctactaaggtactgcttgacgtatattggcaaacatatatatacaaagcagaccgagggagagaccaggttatgtagagaaatgccattgcaaaatcgtctcagaggtataccatgaatcttccctgaaatccctcctcaggaagctctgctttcaattactgaaataaaaattcactgggaagaggaatatacccagatatcctaggagttattatatcctggctctgaactgatagtaatccctggtgatatgaaattctatcgtggtcaaccagaaaaagtgggtatttctgtgcatcactttataaacggtatatactttattctgtcttacattgggtgccttgagacattggataaatcctttgaatatttatcttgttcaagtgtgtataggagaaataaataaatatagtaacacacaatttctctacaagggtttcctaacatgtacagcaaagaatgatatgaaaggaaaaaccaagcacagctcatggaaccattcacctcaagatttattaagagagtaaacacagaacagtagcaaatccatggagaaattgtagacattagtgataacaggaaatattttaaaaatgcatgtttggtgatttctccacattctcccttgaaatcacccatctgactgaggcaaagacagatgggtcattgataatgacaaattatcaaaaccttaatcagatgatgattgcaaattaagtgccctgtaattttagttcctttgctgaaacaaatcaagacaatttcagcagctgttatgcagctatttaccaaattaaatgatcagggtgaaactttgtgagattagggagctctcagtttaatgaatatcctgaagattgtgcaatattgagaaacatagaagtttcaaccaagcagatagagacattactgtactcaactaaggattcacaacttgtgggcaattctagttctacagtgaaggctatttaagatgcagataatcactattgaaaaacagccctcaagtagaacaagctgatccactagtaaatttactgtaggaaaaaaagcacaacaaaaatgaaaatgaacaacaaaaaatccatcacattctaaagcaaatcaacaaaatccagacatgcagcagtataacaaaaaaaaagtgaaatgtgaaccagaaaaaagrttaaaacaataatcgaaacaaactcagagatgacagagatgctaaaatttgcatacgagggattaaaaaattgtgatcgtcaatatttaaaaatatattttgatcaaccaaatcttcacaaaaaaatttattaacaaactttcactcctccaagaaatattaaaggactattttcagaggaaggaacatgatacagaaggaaagctggttgtgtataaagaaggaagagcactaaaaattgtaaatatatgagtaaacacaaaagagattttaccataaatccttacttttcaaaaatataattatctgcttaaagcacaaatactaacaatggattgtggggctcattccatatgcagaaacaaaatgtatgacaaaaattatacaaagaagaagcaggattagcaggagtatgaggggtttacattatcacattgcatgtgaagtggtacaatattattcttggtagacaggatgagtctagc

SEQ ID NO: 92109 - DNA, 1922 bp, Homo sapiens
gaatgcaacattattatagagctagttttctatggctcaagcatagtgaaataaatatggatgctgaaatacatatggactgcttgacatcaataaaaatagaagactcacagaataagtagaggctgttatactgtacaattgtctgaaataaaatgggtgcaattaacataatatgacacaggaacagaatgataactggagagttttgttctataaggatctccggcaatggatttttaggaaatgaaatacatgatcagtctactaaggtactgcttgacgtatattggcaaacatatatatacaaagcagaccgagggagagaccaggttatgtagagaaatgccattgcaaaatcgtctcagaggtataccatgaatcttccctgaaatccctcctcaggaagctctgctttcaattactgaaataaaaattcactgggaagaggaatatacccagatatcctaggagttattatatcctggctctgaactgatagtaatccctggtgatatgaaattctatcgtggtcaaccagaaaaagtgggtatttctgtgcatcactttataaacggtatatactttattctgtcttacattgggtgccttgagacattggataaatcctttgaatatttatcttgttcaagtgtgtataggagaaataaataaatatagtaacacacaatttctctacaagggtttcctaacatgtacagcaaagaatgatatgaaaggaaaaaccaagcacagctcatggaaccattcacctcaagatttattaagagagtaaacacagaacagtagcaaatccatggagaaattgtagacattagtgataacaggaaatattttaaaaatgcatgtttggtgatttctccacattctcccttgaaatcacccatctgactgaggcaaagacagatgggtcattgataatgacaaattatcaaaaccttaatcagatgatgattgcaaattaagtgccctgtaattttagttcctttgctgaaacaaatcaagacaatttcagcagctgttatgcagctatttaccaaattaaatgatcagggtgaaactttgtgagattagggagctctcagtttaatgaatatcctgaagattgtgcaatattgagaaacatagaagtttcaaccaagcagatagagacattactgtactcaactaaggattcacaacttgtgggcaattctagttctacagtgaaggctatttaagatgcagataatcactattgaaaaacagccctcaagtagaacaagctgatccactagtaaatttactgtaggaaaaaaagcacaacaaaaatgaaaatgaacaacaaaaaatccatcacattctaaagcaaatcaacaaaatccagacatgcagcagtataacaaaaaaaaagtgaaatgtgaaccagaaaaaagattaaaacaataatcgaaacaaactcagagatgacagagatgctaaaatttgcrtacgagggattaaaaaattgtgatcgtcaatatttaaaaatatattttgatcaaccaaatcttcacaaaaaaatttattaacaaactttcactcctccaagaaatattaaaggactattttcagaggaaggaacatgatacagaaggaaagctggttgtgtataaagaaggaagagcactaaaaattgtaaatatatgagtaaacacaaaagagattttaccataaatccttacttttcaaaaatataattatctgcttaaagcacaaatactaacaatggattgtggggctcattccatatgcagaaacaaaatgtatgacaaaaattatacaaagaagaagcaggattagcaggagtatgaggggtttacattatcacattgcatgtgaagtggtacaatattattcttggtagacaggatgagtctagc

SEQ ID NO: 92110 - DNA, 761 bp, Homo sapiens
ggaaaccaattaaattgaaatgcaaatataaaagtatgtaaaaaataaatttgtactgaagaaatataagtgctccttgattaatgaaacattgataagtgtaaaacaccatttaagattggcaagagcagtaagtaatatggaaatataagtaatttctattagtgacaaactcacaggtaatgctgacactactgtggtttgttacctaagttcataattgaggaaaagtgcacgttacacttaaaggttagggaaaatggaattttttccatctacatgtacaaacccttgatttctattcacagattctttgggggtgtctacggacatraggttaaggaaatctgcttcagaatgggcaaggagggatttggctgaaacagccaaatatttcaagataaaatttttcaatataaaagtgaaatgatccaatactgctgtgatacagcaatattcataaaataagaataaatgtgtcactattcttcatgatttttagatatctcttttaggatctgatattgaatttgtaaagaaatatttacctacagttgagcaattctgattgttttagtttctttataaggttggattcaagaaaaattagttttggtggtttttattaaacaccatatctgacacaattctaattaaaaatgttcttgctattatttatgtattcatttatctacatacacacatagaaaagtatctagaatgatgttcaccaatagctaggcatgattaatattgagtaa

SEQ ID NO: 92111 - DNA, 1165 bp, Homo sapiens
agctataaccttacaacataacttaacccaaatacattgaaaaccccttggatttagacctacagggaggtggtttttctttctgtaccatagcacgcatagttgaagcaaacatactccttcaaacataatactcttacataatagaaagtgttctctgttttctggatgaaaaggcatgaggtcttttgtattagcaaactgaaaytgttaactataaaaagtcaaaaatcaaaggtgctctcacttatttataaggaccttgaatggctcagattcatcaggaaaaaaaaacattcctcagagagtctgatctcaagctgatgtttctttattgaatttgattctaaaccatcatttttgttgaatcctctgtgctttcagaatgctgaaatgtaaaatatttttaacttatgaaagagataatttatttttattttctcctatacatttttaagtagcaccttaaaaaatagacaaatccatccagggtcaaaagaactcaactcaattctctatcactgtgaaaatagacttagttcttcattacaaaagcactacaataactacaaaaattatacctcctggagtatatatttacatatccatgcaaaaggggaatagattaaaagatgtttatgaatgtctaaagccttaagtcagtttaacgtagtattataaatcaggtttgtgggtgatattttgtctgcttctagacttgtgagcaagttattaagttttaggttacttatatttaaaattcaaaaaggaaatgattgtgattgcattcaaagaaagagaggacattttgaagcttcttttttttactaatatcaaaacctaatatcacatttgtaaaacacgttgatggcttacaaccaagtaaaatacctcaataccccacttttcaagatcagtaatattggcctaagagtatcactctataggaattataaaaagttgtatttatgccctgagattataccctataatgtgcaaatattataggatagacaagtggatataaggtttctttctaggtttccttatatactccaaatggtaaaactagatggaagattaaaattctaaatgttgttaattttagaaccttcaatgtcagagttactttgtatgaatgagtttagctaattttccacactat

SEQ ID NO: 92112 - DNA, 1165 bp, Homo sapiens
agctataaccttacaacataacttaacccaaatacattgaaaaccccttggatttagacctacagggaggtggtttttctttctgtaccatagcacgcatagttgaagcaaacatactccttcaaacataatactcttacataatagaaagtgttctctgttttctggatgaaaaggcatgaggtcttttgtattagcaaactgaaactgttaactataaaaagtcaaaaatcaaaggtgctctcacttatttataaggaccttgaatggctsagattcatcaggaaaaaaaaacattcctcagagagtctgatctcaagctgatgtttctttattgaatttgattctaaaccatcatttttgttgaatcctctgtgctttcagaatgctgaaatgtaaaatatttttaacttatgaaagagataatttatttttattttctcctatacatttttaagtagcaccttaaaaaatagacaaatccatccagggtcaaaagaactcaactcaattctctatcactgtgaaaatagacttagttcttcattacaaaagcactacaataactacaaaaattatacctcctggagtatatatttacatatccatgcaaaaggggaatagattaaaagatgtttatgaatgtctaaagccttaagtcagtttaacgtagtattataaatcaggtttgtgggtgatattttgtctgcttctagacttgtgagcaagttattaagttttaggttacttatatttaaaattcaaaaaggaaatgattgtgattgcattcaaagaaagagaggacattttgaagcttcttttttttactaatatcaaaacctaatatcacatttgtaaaacacgttgatggcttacaaccaagtaaaatacctcaataccccacttttcaagatcagtaatattggcctaagagtatcactctataggaattataaaaagttgtatttatgccctgagattataccctataatgtgcaaatattataggatagacaagtggatataaggtttctttctaggtttccttatatactccaaatggtaaaactagatggaagattaaaattctaaatgttgttaattttagaaccttcaatgtcagagttactttgtatgaatgagtttagctaattttccacactat

SEQ ID NO: 92113 - DNA, 1165 bp, Homo sapiens
agctataaccttacaacataacttaacccaaatacattgaaaaccccttggatttagacctacagggaggtggtttttctttctgtaccatagcacgcatagttgaagcaaacatactccttcaaacataatactcttacataatagaaagtgttctctgttttctggatgaaaaggcatgaggtcttttgtattagcaaactgaaactgttaactataaaaagtcaaaaatcaaaggtgctctcacttatttataaggaccttgaatggctcagattcatcaggaaaaaaaaacattcctcagagagtctgatctcaagctgatgtttctttattgaatttgattctaaaccatcatttttgttgaawcctctgtgctttcagaatgctgaaatgtaaaatatttttaacttatgaaagagataatttatttttattttctcctatacatttttaagtagcaccttaaaaaatagacaaatccatccagggtcaaaagaactcaactcaattctctatcactgtgaaaatagacttagttcttcattacaaaagcactacaataactacaaaaattatacctcctggagtatatatttacatatccatgcaaaaggggaatagattaaaagatgtttatgaatgtctaaagccttaagtcagtttaacgtagtattataaatcaggtttgtgggtgatattttgtctgcttctagacttgtgagcaagttattaagttttaggttacttatatttaaaattcaaaaaggaaatgattgtgattgcattcaaagaaagagaggacattttgaagcttcttttttttactaatatcaaaacctaatatcacatttgtaaaacacgttgatggcttacaaccaagtaaaatacctcaataccccacttttcaagatcagtaatattggcctaagagtatcactctataggaattataaaaagttgtatttatgccctgagattataccctataatgtgcaaatattataggatagacaagtggatataaggtttctttctaggtttccttatatactccaaatggtaaaactagatggaagattaaaattctaaatgttgttaattttagaaccttcaatgtcagagttactttgtatgaatgagtttagctaattttccacactat

SEQ ID NO: 92114 - DNA, 732 bp, Homo sapiens
ggatcctcccagctcagcctcctgagcagctaggactatcaacatggccatgatgtccagctaaaatttttatattatttatttatttatttatttatttaaaggacaagacagtggataacatttttaaatttaaaatcaactatttttttttttttttgtacaaacaggttttcactaagttgcccaggctggtgttgaactcctgggctcaagtgatcctcccacctgggccttccaaagggctgagattacaagtgtgagccattctacccagtctgaacttttcatttagcttaccttttctttttttttttttttttttttgagacagagtctcgctgtcaccaaggctggagtacagtggcacaatcttggctcactggaggctctgccccccggggttcacgccattctcctgcctcagcctccygcgtagctgggactacaggggcccgccacctcgcccggctaattttttgtatttttaatagagacagggtttcaccgtgttagccagggtggtctccatctcctgacctcatgatccgcctgccttggcctcccaaagtgctgggattacaggcgtgagccaccgtgcccggccaaagcaactacttcatctccccgtcggggaatcagaatcctggagcttaaatgagaaattcctagatgctccattcctgatgttcttctgtaaaatgaagttggccttaagtgctttaattgctt

SEQ ID NO: 92115 - DNA, 732 bp, Homo sapiens
ggatcctcccagctcagcctcctgagcagctaggactatcaacatggccatgatgtccagctaaaatttttatattatttatttatttatttatttatttaaaggacaagacagtggataacatttttaaatttaaaatcaactatttttttttttttttgtacaaacaggttttcactaagttgcccaggctggtgttgaactcctgggctcaagtgatcctcccacctgggccttccaaagggctgagattacaagtgtgagccattctacccagtctgaacttttcatttagcttaccttttctttttttttttttttttttttgagacagagtctcgctgtcaccaaggctggagtacagtggcacaatcttggctcactggaggctctgccccccggggttcacgccattctcctgcctcagcctcccgcgtagctgggactacaggggcccgccacctcgcccggctaattttttgtatttttaatagagacagggtttcaccgtgttagccagggtggtctccatctyctgacctcatgatccgcctgccttggcctcccaaagtgctgggattacaggcgtgagccaccgtgcccggccaaagcaactacttcatctccccgtcggggaatcagaatcctggagcttaaatgagaaattcctagatgctccattcctgatgttcttctgtaaaatgaagttggccttaagtgctttaattgctt

SEQ ID NO: 92116 - DNA, 767 bp, Homo sapiens
ggttgacttgtagactgactctaaaggacaaggacttgctacttcattggtatcagaagcaggaatttctatgaaaatgaatagacctgaattcttttatcttacaatcctggaattgttaggaatcttaaaggtcacttagtgatcttatttagtgggacaccttagatatccaaaggacaagcaatgacatcaagattagcaactcacataattgtggtgagccacccagggcaggccttccctgaggcttccagcctgaagtctccagcactgcragcggagagatcagaaagtcaggagtaggcctacgctgggagagaagcagggggctgcgcacaggaaaatgaagggagatcagatggtatatggagagcaaagagggagtggaagaggaatgtgggtgagaacaatcttccagtgcactcaaacacaaaggaattcacttacttactccccaaacacctgcgaattatctccttagaacctgatctgatgctaaccacaggtcttgccctcaaggagctctcaatctagtgggatagacaaatacccatgacaatagagagtgataagtctaacaatagaggcagactccaggagtaaggtaagaatatgtgcaaacacaccagccccaagggtttgtggagcccttagaatttatttacagtattggatataacggcaacattaaaatatgcaagctagccaggcacaggtggctcatgcctgtaatcccagcagtttggggtgctgagccagaagga

SEQ ID NO: 92117 - DNA, 2242 bp, Homo sapiens
ttgttagctaaaaatatatgtgcacagaaattaaagaaaaagaaataagaaaaatttggattaaaaggtaaaataccaaaaatatgtacagttattatgtgccaatttttaaaaatagagaaaataaattaggaaatattgaaaactatatattttaacaaataataagaatcaagattaaaaggcaagagaattaaaataggagtaacattattaaatattccattttacttcaaatggtttctcaatcatgctttcatttctcaggagaaacatgatttttatctgctaaacatagagactcaaaaccagaaagattttctctgatattctgattcagtgagtccccagaatcttaatttttttaactcccaagttgaatataatagtcaaatatgagaacttctgatctcagtcattttattatacatgcagataatgctactgaagattaataggatgaaagagattttttagtgattatataattcaacctccctttttaaaaaaatgaaagttgcagtttagatcaaataagagacaattgggcagacatggtggctcacacctctaatcccagcactttgggaggccaaagtgggaggatcacctgaggtcaggagttcaagaccaggctggccaacatggtgaaaccctatcyctactaaaaatacaaaaattacccgggtgtggtggcacacgcctgtagtcccagctacttgggagacaggcaggagaattgtcggtgcgatggcaccactgcattcaccaccttggcgagagagtgaaactctgcctcaaaaaataaaataaaataaaataagggacaattattttaaggatacgtgtggcagtaatgtagactaagctgacaggcgggagaaaacaggatggctcagttgactagcctggacacaaggcggctgagtccatgcatcttttcctctgtagtacatcagcttctctttgtttctcctctagtttctgcttactcatgttttccacttcctcattaacttgctcacagccctttgtcttgaaacaggtttctgtacatcctttctgcatctactctcttataatgtagttctccctgtattttccaagactaacaatctaattggcatagctaattcttgttgggtgatacccctttttggcaagacttcctaagcttattacccagcctacagaatggctgcccttaatggtgagcaggagtcacacagttccaaatacagctgccgaggactgtttattaagggctatggctaggcaggttttgctcagagagtgggcagagattgtggcagacactatgctgtgtctattataatctataggaagaaagcagattgaatacatacacattaatgggaaatagggtcagatgaaaaccacaagatacagctgaatacttaaagcctgtcagcactctctgatctgcctttctgatcctactctgctccaggcagtggcactattccttctgaccctgaccttctgcatttctagctttagcttggtaacctgattgtgattttctggaataccggctataatcaatcagtacatgagtaacaataagatttccccagtacctccagataaggttatgcagtgatgataaaattaagaagattcaatattagttgggtagttcttccttccttatttttgcttatctggattttctattttattctacaataaaattctttttaaataataataagggaaatttttttcaaaagaggtacaagctcagctatgtcctaatgaaaactgagaggtaatactacaaacaagtcaaatcaaagactgtaagctaatgcagaattagtaaggtgaaccgactagataacctggggcaaatcattaaatgttctcaatgtgttcttatctataaaattaagtgggaggttataatgaaatgagttctggactccttttattctagcatgctatgattctcttcaggcatcataatttttagttattcttttgaatattttcaattttccataagaatacttttttatattttctctgaacttgttgataaggaatttaccacgctaatatttgaagtaagagctaatcattttataatctcatggttttatacctaaaatgaaaacatttctaaatccagatcctttggctgaaagtatttgctataggtattttcccctgatagtaaattcagtgatggatgggtggatggatgagcgtttccata

SEQ ID NO: 92118 - DNA, 1251 bp, Homo sapiens
tgcatgggacttttgtgtacactgcttctcagttaatcctagcaacagctccccgggcaggacgataatccacctttttttagtatttaggaaacagactcagcaaagccaagtaggtttgctgaaattcatataactactaagaagctagatttctcttgtcattaagggctcactgtaattcattctcattactttgatcgactagtcctcacaactgcttctgaaaaaaaaaacatttttttcctgttttaaaaaggtttacttgctcattgtgcagaaaaaatttaaaaatagaaaataaatttaaaagttcctgccattgagatataaccaccattaagttgtatatccttgcaatttttttctgtactatacatattgtttttcagtgttgggatcagattgaagattttttttagaaacttgctttttccacctatcattatgataaatctgtattaatataactttcttcagtggttttcccttttagaaggacttcagtgagatgagaatcccactctaccacttactggctgtgtgctttagggcaaaacatatagcctctctgggcctcaggctgctcatctcagaacttttgagggttggacataattacattagagaagctgagtgcctttcacttttctctgcaccccagccacagtcactgcaagcctgagtcccttccttacccaagcagcatcccagagcctgccagcctcttccaaggctaggaacattctgctgtttccatctctgctccatgtgctacccctttggctaagggggaaatatgtttttaaatctcaaatagtcaggctcattttctgcttcacacagtccttgttctctcttgaggaacttggaacatgctcctgagctacactggaaaatatcgaagtgcccttctccataattagccagcatccctgccatctggaccctctcatacctcacagggatttccttgtccacatggaactgagactgatccaagagtccagctcctgctgactgaactctgccatctgttccgmagcttgccttacctgctcctgtccaaccaggcacccctctgtgggcctgtgctttagtcctttttcactctagaccctggtactactgaggtggcttgcgtggtcctaaatttgctagtctcttattttgataaaggctgcaagtagcaaatatccttatccttgaaaataagggcatctaggcccctggcttctttttatgtttatt

SEQ ID NO: 92119 - DNA, 655 bp, Homo sapiens
cagaggccaagcctactgtgtaacagctgacaatgccatcaatttctgtggtgtttatggcatgttccagcacatcacacataaggtatcatgtgactagctgaatgtgattttaagagagtgatctccaaacttttcatttgccttaaggatgacgcctctgtgcgaaaacactttaaactctcttttagaatttccttcaaaatctacagcattttttcctgaaaaacccttcacttttaggtcaaagttttattcgcccaactgggtacctaactcccactggtctcagtctccctaagggaaccttcctctacccccacaatcttagctggctcccacaacactctctcaaggcctcatcaactctcccaagtgcaaaaagcaccacaccacctcaatggtttctcaggcttmaaatgtttacttaataaaccagtggattctgcaggccagtgctgcctaacgcagcacccacgagccacttgtcacgtctgagcacttgaaatgtggatagtattacagagaaaatgttttaatttaactgaattaaatggctctggcctgactggcaagaaggttaagctgattacttgaaaaatgaactggtggccgggggcggtggctcacgcctgtaatcccagcactttgggag

SEQ ID NO: 92120 - DNA, 694 bp, Homo sapiens
caattattgaagcaattgcatttaaggttacaacatgaatttcatgggaactccctgttcgatataaatggaaacatgttccttggaataaaatatctttatgagtgaagtttaatatattttgaatcaggcccaaagagatcttttgctgtgagtgaagaataaagtaaaaattccattaataaaattttatggctgtataggtggagaaaaatcttttccacataaaaatattttcatgtttttctcaaattaaaaaaatgkaaagttattgatagtcacttaaaactaagcctaattattagaatatagatagccaaatatttctggagacaatagggcaaaaatattttagagttttaaaatgtctgtaactttaaccaagaaattatgcttttagaagtctactcaggaaatacaacttgaaatgctggatacattttaaaaatcattttgatgacattggagaggtataagccagtcaaaaattgagagttcaagattgtcaagatgacaaaagaaccaggagaggagcctgaaaattggtgctacctttcctatccaggtcaacaaaattgagaaactgagggctgcttttggcagttccatgggaccgaggggacaaaaattagatattagaatttgtgaatgtgtcagggacctggtaaacaaccaggttttcagttgggatccc

SEQ ID NO: 92121 - DNA, 1170 bp, Homo sapiens
agcagcattttttctcactcactgttaagctttcaggtttctctattctgccactgctctccctttgtctgcccctcttctctccacctacctccttccccaaccctcaacacatacctagtcttactttctgcttccagtgggccattgaatgagaaaatgaattattagaattgtgtgtaagagtaaataggattctgagaagtcggaatcagattcacaaagtgtttgacaaacattcaaatttctcatcagaagtcactcggagctgagatgcttcctatcttttatgcagcaatattccgaatagttactttactaaatgagtcatttctctgaaatcaaatctgtagttggatccaggttttctatttgctgaatgaaaaaccttgggtaagccacctaactaccctctgagcctcagttttctcatttgcaaaatgaagtttcctaaaactacttcttcctctagaccataagcctactaaaggttagggccatgttttatatatttttgcatatctattgcctaatgtagtatttggattataaaagatgttcaatactgtaaaaaagtcagtaaatgaatgagaatctcagaaaaaatgtaagcatttttaataagtagcaaaactacatgcaaatgaagtaaacagtaaacaatgtcaagcaacaaatggtactccgagctctatttttagagagggaatacaattgattctgtgaggcatttrctataaggtaaaagaatgaggtcatgtgggaaaaggctagagtgctacctgaaggtacatattgagccagcacactcctgagtatatttcccatttctccaaataccgtgtgtggtaagctgaaccatggccccccaagatgccttcatcctaatctctggtgcctgtgaatattatcttatatggcaaaagagactttgcaggtgtgattaaattaaatatcttgagataaagatgttatgctggattatccaagtgggcccagtgtaatcatagggattcttttaagagggaggcaggagatgagggagaccgaaggtgatatgataacagatgaagaaagatagggagaaagggatttgaagatactatgcagctggctttgaagacacaggaacatggccatgaacccaaggatgtaaatggcctctagaag

SEQ ID NO: 92122 - DNA, 1586 bp, Homo sapiens
atttgtcattgtttcccctactgccaattccattcatataaacaagattgcatattttgaataggtatatttcaaacacaaaagtgcttttattaactgaaagttaaagtcagactgttggaaatttatcatttatgagtaggattttgtatcggattcttatttatgtatgtcttaccttactcagtatccatgtatatgtaagaaaaatccatctttagacatttatcaaatcataccaatgctgatgtatgatgggaaccactgtagttctttataagaatgaataaactaataccccctttactcagataatgattgtgttataagctagcctgtgttctcacaaacatgatgtatatatttcatttataatatctttccttacctcttccctttcctcccagctcattgcttaccttctgactcagctctgaaaaactagctccacatttttaacgctgccaagagctcccttctctgtggattcatctaagacaacagatattaacactaggattgtgatggcagtggagtcagtaccaactgacccaagtattcctagcctgtggaatctttagactcacttaattcattcaacatatacttattaagtgcctactgtgtcatgaacttcagggatatgaaattctgcaagatagtctctgcttttcagtaccaggagccccagatattatacttaatgtttcaaatagtggattctgggttgcttgaaagtcagtaggcagcctttttgtcattaaatttcctttattgctctgatgcattttattttatagtgactctgactacttcagattgttcacaatattttaaaacttacgttattaagattgctcaattctgctgttcaaaaactgttagtaaaatgataaggttaccttatggctttgaattttaggtgctttggtatccatgatacatacgtgtatatatagtcatgcaccatgccacgacgttgcagtcaactacagaccacatgtatgatagtgctctcatgagattataatgccatatttttatggtcctttttctatgtttagaaatatttagatatacaaataattaccattgtgttacagttgcctacagtattcaatacagtcacatgttgtacagatttatagcctaaaagcaataggctataccatatagcctaggtgtgtagtaggctataccactgtttaagtccactctatgatgttcacraaacaacaaagccatctaatgacatatttctcagaatgtatccccattgctaagcaactcctgattgtgtgtgtatatatatacgtgtgtgtgtgtatatgtgttccaaaatcaattttataattaatattggtcctaagttcagaattcatttcaactgtttatgttaagaattacattttgctagatcatatggtagctttatttttactttttaattttactttctcataatggctatactaagttaaattcctgccaactgtgtgtaaccgttctcctttctctgtatccttaccagtgtttgttctttttgtctctttgataataaccattctaactgggataagttgata

SEQ ID NO: 92123 - DNA, 1586 bp, Homo sapiens
atttgtcattgtttcccctactgccaattccattcatataaacaagattgcatattttgaataggtatatttcaaacacaaaagtgcttttattaactgaaagttaaagtcagactgttggaaatttatcatttatgagtaggattttgtatcggattcttatttatgtatgtcttaccttactcagtatccatgtatatgtaagaaaaatccatctttagacatttatcaaatcataccaatgctgatgtatgatgggaaccactgtagttctttataagaatgaataaactaataccccctttactcagataatgattgtgttataagctagcctgtgttctcacaaacatgatgtatatatttcatttataatatctttccttacctcttccctttcctcccagctcattgcttaccttctgactcagctctgaaaaactagctccacatttttaacgctgccaagagctcccttctctgtggattcatctaagacaacagatattaacactaggattgtgatggcagtggagtcagtaccaactgacccaagtattcctagcctgtggaatctttagactcacttaattcattcaacatatacttattaagtgcctactgtgtcatgaacttcagggatatgaaattctgcaagatagtctctgcttttcagtaccaggagccccagatattatacttaatgtttcaaatagtggattctgggttgcttgaaagtcagtaggcagcctttttgtcattaaatttcctttattgctctgatgcattttattttatagtgactctgactacttcagattgttcacaatattttaaaacttacgttattaagattgctcaattctgctgttcaaaaactgttagtaaaatgataaggttaccttatggctttgaattttaggtgctttggtatccatgatacatacgtgtatatatagtcatgcaccatgccacgacgttgcagtcaactacagaccacatgtatgatagtgctctcatgagattataatgccatatttttatggtcctttttctatgtttagaaatatttagatatacaaataattaccattgtgttacagttgcctacagtattcaatacagtcacatgttgtacagatttatagcctaaaagcaataggctataccatatagcctaggtgtgtagtaggctataccactgtttaagtccactctatgatgttcacgaaacaacaaagccatctaatgacatatttctcagaatgtatccccattgctaagcaactcctgattgtgtgtgtatatatatacgtgtgtgtgtgtatatgtgttccaaaatcaattttataattaatattggtcctaagttcagaattcatttcaactgtttatgttaagaattacattttgctagatcatatggtagctttatttttactttttaaytttactttctcataatggctatactaagttaaattcctgccaactgtgtgtaaccgttctcctttctctgtatccttaccagtgtttgttctttttgtctctttgataataaccattctaactgggataagttgata

SEQ ID NO: 92124 - DNA, 577 bp, Homo sapiens
aggtccactctgcgccttgcgctactacgaaccgcgcgatcacagggcctaaacaaggtcccgccctgccagggagtggcaccgagaacttagtgcagccaaggtaaaggttctctcccgcggcgttgccctgattaggaaaccrgagagaccccggggcagctcgctgggcagaggccgcaagcacttccgggaaagcggtcccgttcacgccctctcgggcgcgctctcaggctccgcttccggttccaaaggtctggaaactgctaagggtccggcgttcaccggccgtgagttgcccaccctgggaggtgcatggctttgccatgttttgccttttctcaccccgcttcggacaggtgggactcgaagacggcgactcgccgccttgccctgggtcgcgatgcccccaccccgctcccacccctctcctttcccgcagcctgagcaagacgccttcggcaacgccccgcatccgggctccttggcctcgaagagcattatggccgtagatctgggtgctgaggactgagccacccccagactgcgacatgggcggcggtgcctccttccccaa

SEQ ID NO: 92125 - DNA, 577 bp, Homo sapiens
aggtccactctgcgccttgcgctactacgaaccgcgcgatcacagggcctaaacaaggtcccgccctgccagggagtggcaccgagaacttagtgcagccaaggtaaaggttctctcccgcggcgttgccctgattaggaaaccagagagaccccggggcagctcgctgggcagaggccgcaagcacttccgggaaagcggtcccgttcacgccctctcgggcgcgctctcaggctccgcttccggttccaaaggtctggaaactgctaagggtccggcgttcaccggccgtgagttgcccaccctgggaggtgcatggctttgccatgttktgccttttctcaccccgcttcggacaggtgggactcgaagacggcgactcgccgccttgccctgggtcgcgatgcccccaccccgctcccacccctctcctttcccgcagcctgagcaagacgccttcggcaacgccccgcatccgggctccttggcctcgaagagcattatggccgtagatctgggtgctgaggactgagccacccccagactgcgacatgggcggcggtgcctccttccccaa

SEQ ID NO: 92126 - DNA, 1983 bp, Homo sapiens
ttacaaatgagtaaacagagcctcagtgtagctaagtaaccactattttaggtttcttagccaatgggtgtgtctgactcctaagcccatggagggcattctgaggtggttcagacagaccccggcttacccttgaacttctgcctgctggctgcatagggaggggctggggggagtttgagcatctcaggccatagagcccctgcctcactgtctccatctctgggtggaaagatggtgttttccctgagaaactaaggctcagagaggttgaatggctctcccaaggtcacacagctggtcagctgcagagttgagaacacaggagtcctggtgctcaggccagcatctctttttttctttgagttgtttctaggtttcctagctcttgcctcagaccttaaagagagagggtctgatggggatgggcactggagacggagcatcccagcatttcacatctgagctggctttcctctgccccaggctgcagctcccactgggaggtggaggaccttggcacccacaagccgcctgtgctgaggccacgaggtcagcccaaccagtgcgtgggccacagggaggccagcatccacgcttcctgctgccatgccccaggtctggaatgcaaagtcaaggagcatggaatcccggcccctcaggagcaggtgaagaggcccgtgaggccgggtgggtggggtgctgcgtgtctctcctgcacagcttttctgtgtcagtttgtgccaccaccataccgccatgcatcagggtggcggtttgccaggtagatgctgtgggcagcttccgccattgtgtggacagcatgtatatgtgtctctgtgtggctgggtctgtttttgcttttgtccagatcagtaaggtttgctacctgggtaccccactccacttggagtagartgtgcataaatatggcataaagaaatgcaatatgcatgcatttattgattgatctatttttttctgagatggggtcttgctgtgttgcccaggctggtctcaaattcctgggctcaagcaatcctctggtctcagcctccccaagtgttgggattataggcatgagccgctgcacctggcctctctgatctatttaacaaacctgctgggagggtctcagggtcaggagcagcactgggctctgaggacacagagctcactcagccgtgacccagagggggtgcctgagctgcatgctgaaggttgttagcatgaccagcaaggcaagaaaaggccctgccgagattagcaaggcatgtgccaagccctggaatgtgacagccgggccttctagaaacctgagtgtataactctccttaaaagccagtaggagctcctcaaaaggcagccctaaggagtccactcttaaatgaactcagagtcagttttaaaatgcaagtctgtgttgattctggtctggatggtgcattcctcgagagcaaaagacagtcttggtcttggatccacttgccctgggtacactgagggctgctaggttccaggtgctcttcctggcactggggagggatacaggcccaagagacatgctgttctccctcctggagcatctattttagtggaggaagacagaaaacaaaccattaatatagagtactgaaaagatgcgatggagaaaactatagcaaggaagggaatggggtgggagagaggtcaggagaggtctcgctgacaaggtggacgaaacaggccatgaggcagagaacatgttccaggcaaagcaaaggcccccaggtggggatgtgcagggagtaccaggaaaccagagaggtgggaatagttatgagatggggggtgcctcagaggggacagggccaagtcaggtgagacctgagggtcacagtcagcagtgagctggggccatgcaggggtctggcctcagaggagtgtggtctggcctggatctgaacctctcactgtggcctagctgctgagctgagaagagat

SEQ ID NO: 92127 - DNA, 1983 bp, Homo sapiens
ttacaaatgagtaaacagagcctcagtgtagctaagtaaccactattttaggtttcttagccaatgggtgtgtctgactcctaagcccatggagggcattctgaggtggttcagacagaccccggcttacccttgaacttctgcctgctggctgcatagggaggggctggggggagtttgagcatctcaggccatagagcccctgcctcactgtctccatctctgggtggaaagatggtgttttccctgagaaactaaggctcagagaggttgaatggctctcccaaggtcacacagctggtcagctgcagagttgagaacacaggagtcctggtgctcaggccagcatctctttttttctttgagttgtttctaggtttcctagctcttgcctcagaccttaaagagagagggtctgatggggatgggcactggagacggagcatcccagcatttcacatctgagctggctttcctctgccccaggctgcagctcccactgggaggtggaggaccttggcacccacaagccgcctgtgctgaggccacgaggtcagcccaaccagtgcgtgggccacagggaggccagcatccacgcttcctgctgccatgccccaggtctggaatgcaaagtcaaggagcatggaatcccggcccctcaggagcaggtgaagaggcccgtgaggccgggtgggtggggtgctgcgtgtctctcctgcacagcttttctgtgtcagtttgtgccaccaccataccgccatgcatcagggtggcggtttgccaggtagatgctgtgggcagcttccgccattgtgtggacagcatgtatatgtgtctctgtgtggctgggtctgtttttgcttttgtccagatcagtaaggtttgctacctgggtaccccactccacttggagtagaatgtgcataaatatggcataaagaaatgcaatatgcatgcatttattgattgatctatttttttctgagatggggtcttgctgtgttgcccaggctggtctcaaattcctgggctcaagcaatcctctggtctcagcctccccaagtgttgggattataggcatgagccrctgcacctggcctctctgatctatttaacaaacctgctgggagggtctcagggtcaggagcagcactgggctctgaggacacagagctcactcagccgtgacccagagggggtgcctgagctgcatgctgaaggttgttagcatgaccagcaaggcaagaaaaggccctgccgagattagcaaggcatgtgccaagccctggaatgtgacagccgggccttctagaaacctgagtgtataactctccttaaaagccagtaggagctcctcaaaaggcagccctaaggagtccactcttaaatgaactcagagtcagttttaaaatgcaagtctgtgttgattctggtctggatggtgcattcctcgagagcaaaagacagtcttggtcttggatccacttgccctgggtacactgagggctgctaggttccaggtgctcttcctggcactggggagggatacaggcccaagagacatgctgttctccctcctggagcatctattttagtggaggaagacagaaaacaaaccattaatatagagtactgaaaagatgcgatggagaaaactatagcaaggaagggaatggggtgggagagaggtcaggagaggtctcgctgacaaggtggacgaaacaggccatgaggcagagaacatgttccaggcaaagcaaaggcccccaggtggggatgtgcagggagtaccaggaaaccagagaggtgggaatagttatgagatggggggtgcctcagaggggacagggccaagtcaggtgagacctgagggtcacagtcagcagtgagctggggccatgcaggggtctggcctcagaggagtgtggtctggcctggatctgaacctctcactgtggcctagctgctgagctgagaagagat

SEQ ID NO: 92128 - DNA, 1983 bp, Homo sapiens
ttacaaatgagtaaacagagcctcagtgtagctaagtaaccactattttaggtttcttagccaatgggtgtgtctgactcctaagcccatggagggcattctgaggtggttcagacagaccccggcttacccttgaacttctgcctgctggctgcatagggaggggctggggggagtttgagcatctcaggccatagagcccctgcctcactgtctccatctctgggtggaaagatggtgttttccctgagaaactaaggctcagagaggttgaatggctctcccaaggtcacacagctggtcagctgcagagttgagaacacaggagtcctggtgctcaggccagcatctctttttttctttgagttgtttctaggtttcctagctcttgcctcagaccttaaagagagagggtctgatggggatgggcactggagacggagcatcccagcatttcacatctgagctggctttcctctgccccaggctgcagctcccactgggaggtggaggaccttggcacccacaagccgcctgtgctgaggccacgaggtcagcccaaccagtgcgtgggccacagggaggccagcatccacgcttcctgctgccatgccccaggtctggaatgcaaagtcaaggagcatggaatcccggcccctcaggagcaggtgaagaggcccgtgaggccgggtgggtggggtgctgcgtgtctctcctgcacagcttttctgtgtcagtttgtgccaccaccataccgccatgcatcagggtggcggtttgccaggtagatgctgtgggcagcttccgccattgtgtggacagcatgtatatgtgtctctgtgtggctgggtctgtttttgcttttgtccagatcagtaaggtttgctacctgggtaccccactccacttggagtagaatgtgcataaatatggcataaagaaatgcaatatgcatgcatttattgattgatctatttttttctgagatggggtcttgctgtgttgcccaggctggtctcaaattcctgggctcaagcaatcctctggtctcagcctccccaagtgttgggattataggcatgagccgctgcacctggcctctctgatctatttaacaaacctgctgggagggtctcagggtcaggagcagcactgggctctgaggacacagagctcactcagccgtgacccagagggggtgcctgagctgcatgctgaaggttgttagcatgaccagcaaggcaagaaaaggccctgccgagattagcaaggcatgtgccaagccctggaatgtgacagccgggccttctagaaacctgagtgtataactctccttaaaagccagtaggagctcctyaaaaggcagccctaaggagtccactcttaaatgaactcagagtcagttttaaaatgcaagtctgtgttgattctggtctggatggtgcattcctcgagagcaaaagacagtcttggtcttggatccacttgccctgggtacactgagggctgctaggttccaggtgctcttcctggcactggggagggatacaggcccaagagacatgctgttctccctcctggagcatctattttagtggaggaagacagaaaacaaaccattaatatagagtactgaaaagatgcgatggagaaaactatagcaaggaagggaatggggtgggagagaggtcaggagaggtctcgctgacaaggtggacgaaacaggccatgaggcagagaacatgttccaggcaaagcaaaggcccccaggtggggatgtgcagggagtaccaggaaaccagagaggtgggaatagttatgagatggggggtgcctcagaggggacagggccaagtcaggtgagacctgagggtcacagtcagcagtgagctggggccatgcaggggtctggcctcagaggagtgtggtctggcctggatctgaacctctcactgtggcctagctgctgagctgagaagagat

SEQ ID NO: 92129 - DNA, 556 bp, Homo sapiens
attgcatgggttcacttacatgcagattttttgaacaaaatgaggactgaaaatacaatattcctgggatgcaaaatctgcatcccagattgaaggttgacttttcatatacgtgagctctgcagggctgcctacaggatttgagtatagacagattctggtatacccagaatcctggaaccaatcccccagtataccaaggaatgactgtaatcttcaactcagaaatctcattctctaggtattgatctttcagaaatagttgcacgtacatgaagacatatttataaggaacactctctataayagcaaaaacatagaaataatccaatgcccattagtaagtgtctgcatcatggtataccatttgcagaaatatatcacttgcagtcattaaaaacactgatagtactaacctggaaagatgaccatgatattatgttaaatgaaagtatacaaccaggtatagcttgataatttaggtttaggagaaaaagagagagagagaaagaacatgcatagatttatataaattcagggaaaagccagaaaggca

SEQ ID NO: 92130 - DNA, 528 bp, Homo sapiens
catattgatgttgtgattgcccagtggcttttctacctttacggaaaaaaaaaaaactatctcagagatccacttataatrttgatattaagtactgtttgctaccttttaagggtcatgaaatacgactctcagaacttcaggttttctttccattttaaattcaccagtaccacctctggactgtttctcttccattttgttttcattataaaaacactgtgtccattttttttttattcagttggtctagggtaaggctgtgtttataattttaaaaagctatcatagttgattctgatgaacttcaaatggtgcatcagaatcagctatgatagcttttaaaatgagcacaaattaaagattaacatgtttttaatctttgtgttaatcttgactgaatgaggcccttaacttttacagctccattaaatagtcatgcattattgatttgggattctcatattggggcttgagtagacacacattgaacagataaaagtgatgctttggcagatatgttgtgtt

SEQ ID NO: 92131 - DNA, 974 bp, Homo sapiens
tgcatataacacaactttctcagattgaatccaattgattttctataacaatgtcaagcattcaatacatcacaggagcagtgagactgtaataaataattctttcagaaagaaagtgatccttctgtccttaaacacataggtaaatattggttgtttttgctctatatatagaaactagagtgttctgagtcttcagttttagaatgtcctttatttctaaccgtttcttaagaaatataatttcccctgatgacctttttttcagcattgcctttgagacaatggttagaattaagtttgagttaaggcccatggagtcacatttaaaaaaggaaacgaaaatatttcaattccagatgatcgttaaagagttcatcctatagaactgactgccactttacttcaccaaaggtaggaaatgtacagygtaccatgtaggcctgtgagtcaactttgatgtacttacgagtatagcagaagagtagcatttcagaataccatttttcctgaaaaaaaaaaaaaaagtgaacaagtttcacacctacacctccgaatataattattctgaatttctatgtgttttaactattactgttacttggcagcaaatctgtacaggtctgtagcaattgcaacctcagctcttgcctccacagaggaaagacttgaactgagggggctataaggtagaagcggagatcaaggcaagttttagagcggggtgaaagtttgttagaaagccttagagctagaatgaaagaaagtaaagtacactggggagaggccaagtgggtgacttgagagatcaagtctgtggtttgaccttttgacttggagtttcatatgacggcatgcttcctgggtcttacgttacctctctcttgattcttcccttgggatgggctgtctgtatgtgcagcggcctgctagcacttgggagaggagcaggcacagtgggtctactggagttg

SEQ ID NO: 92132 - DNA, 761 bp, Homo sapiens
aaggagcctctgaaatgaggaagtcgggttggaagccaggagggcaccttggccctagcttcttggttcactgctcagataactgaagggtaaacagagcacttgctccctggacagtgtgtttgtgataagcctagaggccaaatgtcctggggcctcgaattgggccccagaggagcaagggaacatctgttccccacggggcttctcatctgaggccacaggagcccctggcaggaccacggaagccctggcatctgggaggcttggggcccagtatgcccccttctcctgccttgcgagggtccttgcaacttcccaaagagaattcggctgcgcctgtttctctggaaggatgagaatggaataaatgacagctgaggctagagcttcatgaagctagatgttcatgtgtgtgcacacgtgtgtgcatgcacacgtgtctgtgtgaatgtgtgtgcatgtctatatgtgtgcacatgtgtctgtgtgtattcatttgtgtgcatgtgtttttgtgtactatgttcacacatgtgcgtgccagtgtgtgggcatatgtgtgtacatgtgtctgtgtgcatatctatgtgtacacaagtgcccatgtgtgtgtccgtgcatgtgggcctgtgcgtgtgacttttgtttcttttccctccatctttgttccagcaccaatgctcagtgtcatgctccrggtcaccagggcgaggggtggaaatgccggtcagccaggaactctatcgtgtgctctctgg

SEQ ID NO: 92133 - DNA, 761 bp, Homo sapiens
aaggagcctctgaaatgaggaagtcgggttggaagccaggagggcaccttggccctagcttcttggttcactgctcagataactgaagggtaaacagagcacttgctccctggacagtgtgtttgtgataagcctagaggccaaatgtcctggggcctcgaattgggccccagaggagcaagggaacatctgttccccacggggcttctcatctgaggccacaggagcccctggcaggaccacggaagccctggcatctgggaggcttggggcccagtatgcccccttctcctgccttgcgagggtccttgcaacttcccaaagagaattcggctgcgcctgtttctctggaaggatgagaatggaataaatgacagctgaggctagagcttcatgaagctagatgttcatgtgtgtgcacacgtgtgtgcatgcacacgtgtctgtgtgaatgtgtgtgcatgtctatatgtgtgcacatgtgtctgtgtgtattcatttgtgtgcatgtgtttttgtgtactatgttcacacatgtgcgtgccagtgtgtgggcatatgtgtgtacatgtgtctgtgtgcatatctatgtgtacacaagtgcccatgtgtgtgtccgtgcatgtgggcctgtgcgtgtgacttttgtttcttttccctccatctttgttccagcaccaatgctcagtgtcatgctccaggtcaccagggcgaggggtggaaatgcyggtcagccaggaactctatcgtgtgctctctgg

SEQ ID NO: 92134 - DNA, 1571 bp, Homo sapiens
tgggatccgggtcctggttctcaccctggttgttggtgaggtgccctcgggtggggttctgtctttggggcctgtgccctctcgatgacacgaggacatacccctccctgtccactctgaggacgggatgagatggcgcagggtgagagcccaggctcatcacatgggcatgtgctgtgagatctcatctggtggccccacgtgggtttgcatgggcttcccaccagctgggggcagggactttgccctctttatgtctgctgcacaccccccatgcacagagtatttgctttttagtgttggggagcggagcatccggcacggacacagaatagggcccagtggctggtttggctccaacagggaggacagtcagtttcccagagctgcccaaaccaagccccacagaatgggggcctgaagcaacagccgtggacgctttcacagctctgaggccagaagtccaagatccaggcgagggcaggccgggttccttccaagactctgggggagaatctgtccctggtctctctccagctcccgctgctgccggccctctttggccatccttggcaaaccttggcactcttcggccctcctatgtgacccttggccctccttggccatccttggtgacctttgtccctcttaggtgacccttggctgggaggcgcatcaccctgacctctgtctccattttcccttggccttctcccctgcgtgattttctccaagtgccccctttttaagaggccgtcagtgccgctggattggggcccactctacccagtgtggcctctgcttaatccctccttaaagaccttatctcctaagagagtcccattctgaggtaccgggggctgggacttccacctgggaatgctgagggacatgattcaactcaggggttcacggggctgcaggaccaggactcctgacagaactggatccttcctgatggcggagggcaggagctggttctgcaggrggcccagggaacgttcccgccaccccagggactggctgcctatgtccaccttgccctgttctcattttcgtcagtgacgcaggggctctcaggaccaggccagctggacccggggaccttgcctcagcaggacgggtcttccgagggcctgagtctgagtccgtctgaggccggctgtgcccgtatgttctgaggtgtggagagcctccctcgtccccacccctagggctgtgagaagcagggcactgtgggccttgccataggcgagggggaggcccggccacatctctttctcttagagacagccttctgtcctggtgggtctcctgcagtgcggccgggctgcaccctagctcggggtcctggtgggtctcctgcagcgcggccgggctgcaccctagctcggggtcctggtgggtctcctgcagtgcggccgggctgcaccctagctcggggtcctggtgggtctcctgcagtgcggccgggctgcaccctagctcggggtaggggggccttgctgtcctccaggtggttcagcctccgcacacgctcctggtcctgggcccaccccggcaaggatgcc

SEQ ID NO: 92135 - DNA, 731 bp, Homo sapiens
agtgaggtctcctgcagccactacagggggatctgcttttggtgactgtaaaagtgagggaagaggaagaaagaagagattttgaaacccagccgtaaaaatacaactaaaaaagaaaggacatgcacgggccgcgtgcagcccccgatggaagcacaactgtgcctcccttgcacgctccagcttcacacagaaggcaggatggagcctggggagatgatggaagcacacggcagacyagggagtcagcagccctgaggcaggaatctcggtcccagcaggagtcccgggcagccctgctcgcatccaggctgtgactccaggctccactgggcagcctcccagagagacccccgggccggctgtcaggacgaagaccaaggagcagcccctctccccactcccagttcaattttcatgcttctccaacccaaatcccgcaaagcctatatgcttaactttttttttaagaaataagactgccattaactcaatctcaccttcccgcttcactcaaagacctctaggccaggagaagctaggggccaagttacctccaagaaacatatttggtgcaccaaaggctctacgttccctacctcagggctttgaaacacattctgaacgatttcaggtcatctgaggcaaggacttaaacggaagaggcttccaatgtcatctggtttgattaccctatcactccaggcaacccatgagaagcctgcttcctc

SEQ ID NO: 92136 - DNA, 755 bp, Homo sapiens
catctgactcggcggccctgtgatctggccgggcgggaggtgaggagaggtctctgcgtgcagaggtgggggccgactcggggaggcgggcccgggcgcagctgcctggaaactgggaattcacggaggacccggagcgcgcctagcycacaccgtccgcgccagcaggatcgcccttcctcaactccctgtctcgcccagcagccggccgggcgctggggctttggagtcaggtacagcagaggtccacacgaatgaggggtcttggacaagttgttctcttctctgagtgtctgtgccctgcactgtgagacgtgaatgacacctctgccttgaaatgggtcagtgaggagggtggaacgaaggcgcagtagtgccaggaagtgcttgctgggaatctgtggtctcaaggctgcaaaagtgtgaacatgcgggttcctcacacagccccaggaagcatggaacttccccctttttacagagagaaccctaaagcgcagggagggctactaacctgcttctgaggggcaggccaccttggctgtctctagcaccacacaccgggcctgtgtgggtggtcagcagatacaaagccctcctcacgtttgagatcctccagaggtatcccctcgtcccctccagcctggaacgtcccttccaggggttaaagaaaacaattgagtgttcatctcccacgaacactgccccatggaaggccctggattcctggaatcctgatctcaaagaagtggcac

SEQ ID NO: 92137 - DNA, 1160 bp, Homo sapiens
gcctcttctctgtggaaggagcttaacttgamccttggtcgtctctcatgggacgatgctataggaagaactaagcgcaggtctcgttgctggaagtttgaacgtttggcagcaggtgcaggtagaggcccctggcaagtgacagctgatgcttttggactcatgagcagtctccctccctccctgtggccatgactactccatcacaccgtttttgtagcagctcccaagtggacaatgacagaggctggttgaattcaaccgcttggttacttagtgtctcttccaaaatagatgctctctgtggtgttaaagcttgttacaaagatctccgaaggcagtgcccacccttccaggcccacccacctacctgttttccttgtatcttacactccaatctttcttcttgctggctccgatcaactggtcaaacattcaccgctgaccgttagtgggcatctattatctctactggctttgagtctttccatagaaactggatgcacaacatctttgccctttgtgaagactcctcccactgttgcatttcaagattttctgtgagtaggggcacggtgcagtgacagcctgtattcagcttgcaccaatgaccaaactacgtaatcccttaaccacactcaggcgtttttctcctgtgtctgccaggtttcatgggttctccatgcagctgcaggtgtgggctgagcaaagcaaggtgccccagtggtgggcagcatggatgagtgagaagcagatggcacccctgctgttgcggttatgttcctatcaatacatggcactggattcaccattctccccttatgctggactcctgctgggtccatctggccttgcaacatgatgggtctgacagagtcagcttggagagggcaacactcactgcgtggccacctgaggactcacagtcaggtgctctgaccagccaaggcccactagagcaccaggagctgtcttctgagaggtgcataattctccaccgcacatggcatgggcttcctccagaatgtatggctctgtactgcagttcccttactggagcttatcagaaatggccctggccaagttttactttgatgtaactggggttagggcctgggggcaggaggaacattaggagcaggtcctgatggaagcatgca

SEQ ID NO: 92138 - DNA, 647 bp, Homo sapiens
atgcaaatgtatatatgtatacggaagaactgatttccacatttctgcattactattcataattcaaattgatttatatattcaatgtattgctatcactgtcagatttcatgtatcatttgtgtgtcttattcaatgaattgagtttgcattgtatggcctatgctttaaagtaatttaaatggcatggaattatataaacattggggctggtaaacttttcaagtatttttaattagcgttkgaaaaatttaattttataattcttgttttattcatttttctcattcataatggaaattggaaaatttctatttgtggctgggtgtggtggctcatgcctgtaatcccagcactttgggagtctaaggtgggtggattgcttgagcccagaagtttgagaccagcctgggcaacatggtgaaaacccatatctgcaaacaatccaaaaacctagctggcgaggcggaggctgcagtgagctgtgattgcaccactgcactcccacctaggcaacagagtgaggtcctatcaaaaaaaaagaaagaaagaaagagagaaaggaaaagaaagaagaaagaaagaaaagaaagaaagaaagagagaaaggaaaagaaagaagaaagaaagaaaagaaagaaagaaag

SEQ ID NO: 92139 - DNA, 559 bp, Homo sapiens
ctctctctctctcatcctctgttcatgtttaagagtaaagtatgaggagttctttgagaactctgcgtatgtccatagtgctcctcaccttggagcaggccttcattttaagatgcttgacttggagctggtgtcattttggaggcccccagataccagaatgtcactggagtcacactctctcaacagatggccttccaggctcctttctaaaggcggatgcctgaccactgactgttgcaagtcaagagtagragaaatgtgtctaggagtacgtattgtatctgtccccctccccacttcatgtgttcagttccatgtctttctttcactttcacgtgtactaggcacgtttttagtctcagacttctctgtggttttactaggagagctgtctcacttctcagttgtgtcccacactgcatttttctccatcccagttcaatagttaccactcttccatggacatgtggccttcaagagtttatagaaactttttataccctgatggttctttatcaacctcttgtttgtcgtagtgacctatttttttatactt

SEQ ID NO: 92140 - DNA, 617 bp, Homo sapiens
agaatgtattttattttaaatgggacatagaggcaacatgccaagaattaaagtacaaccataaagttttagttttacactttgaatatcaacaaagcagtaattcctaaaatcatgaaaacatgataaagtatctatacagaaaaaaatgaacatttaagtcatttcatgctttcttaatatcatatagtgaaaacagatgtgcctataatttcagcctacagatagcatacttcataaggtcattattcatttaaaatagtacaaatgtttacaaagaacatttcacttaaatttcacagctgcttataaaatggtacttgcaagactgacctatataaagaaataagagtctcatcaaaagagatggtaaattataaatatataatatatcacaatgttaaaatcctcagtgcaaatcaataaagataatgatctttggagaggaaagtatttagctttacatatttactgtgaatttacatattaataagaaacacatttaaaccttgtcctgccacagaattattctgtggggggcggggggggsggggaaatgtactttttgaatatgtgtacaccaaaaccaaaaagttaacttttactttttcctttat

SEQ ID NO: 92141 - DNA, 741 bp, Homo sapiens
atcctgacactttctcctttatctttcaccagtgattctcaaatctggctgagcctctaaaaatacagattcctgagggcctatcattagagattattattcagtagatgggcaaaggataccagggaattatggattttcgaagctgtcaaagtctgggattatactctatgtgcaagctatcaagctagccagttactgtttcacagattctggcagaagacataagactcctgggtcagagacaacagactgctactattattcacagtacagcaagtagcatgagcatcatgttcagtgtccattccccttgccctcaactcccagcagggcaatgtggaggggctcaggtaaatggagcacatgcagtaggcttgcatcacagctaaggaatattgaacttgaggaattcactaattttgtagtaagcagtaggcaagtctgtaaggaaagttttgtcccagagggagatgttaccttattcatcaaggccacttgctatgaacacaacccaatcagaatgtacaaggatgcccaggacccatggcagattgcctttcccaacaatagcttcatggatggttctgatatgaagttaggctgaggaattctraagtagtgttgcttgtatctcagcagagctagccaccagggcttaggaaagtttcagtaaccaccttcacagtgtactaaaaaaattcccttctcctatccaacaatataagttaggaaagctga

SEQ ID NO: 92142 - DNA, 813 bp, Homo sapiens
cttgagtccaggagtttgaggccgcagtgagctatgtgtgatcacagcagtgtactccagcctgagtcacaaagccagatttcatctctaaaagaaattttaaaaatacacacacacacacatgaagacaacttatgcgaaatagtggatgaacaacagaagagaaaaaaggaaatgggttaatatatattcatatatatcatatatatttaacacagtatgaaaaagtatgggcaactgttaatgaatgtatagttatagttttaaatttctttgctctactatctgtttcctattccctttgtcttttgctaacatctcaactgaccaggcttctcggtgaagtaagtcaagctaacattccgtggtagtcctgcatgtaaaatgttgctatgatcatccaggaacttttactagtgattagaaagtagtagcatgtccccagatgagctcctgtattgcagatatactctcctttacccacttttctgtagcaaaactattttttcttgatatttagtataaaaataacttcagccaacataacaatatactttttttctccttttggttgagtggtgtgaaaaacccaaaatggccagatggtagtctcaacttccagtttattagragtaaatgtgtgtcttcctgtggaagcatttcttccttggtaactaggactgttaactagtaatggaaactagtactggaaactagcaatgaggatggtgtgacagagaccgatagcaggctaccaaaaccttttcaccccttcctggcttccagatgttcttactcttagaagcagccctg

SEQ ID NO: 92143 - DNA, 735 bp, Homo sapiens
ctctttgaaggatttgttactttattttcccatttgtagacacatggccagttcattgaaatggtacacaatttttactcattttctctaaaccawacctgatatttgtaatcctctgcttaaatacctcattttcgaggcactgctttttcataaaatccacaaagtttattacgatctgacaacaatcgaactgcacaacattatttttttccattccaccccatgtgtgtcatcttccagtccacctgtacttcccactctaacctaaacatataacttcatgattgtgaacataaaatgactttatgtacttcttgcatttctcctcctagaaaattcttgttcaatcttagacacagctccaatataacgtccactgtgaaacattctctgactccccatacagaggttatagcttctatcaggaccccacagaccaatgttcctactgctagtatagtattttctattcatgtgtattggtttatacgtttatctgtcttccaattctttgaccttctgaggtcataaactgtgccttagtcatctggaacagaaaaatacctgatgtggagaaaatatttgcagcttatataccgtacttggtgtctatagcaatcataagtaaaagcataaaaagaagcaacaaaaaaggacataaaaccatagaaaagtaaactaattatttgaacttttaaatcgtactaaagaaatatcaacaagtatgggaaa

SEQ ID NO: 92144 - DNA, 1205 bp, Homo sapiens
ctctcttgggtatataactaaggcagaattgctaggttatagtacacatatattcaacttctgtagacaacgtccaactgtttccaaagtggttgtatcggttatactcccaccatcagtacatgagtgttccagaagatactgtcttttaatttttaattttagccattctggtagtgtttactgataattgacattagtttaatacgcatttcactgtttacttataaggttgatcatcttcttatgtttgttggccattttctgaagtaactggcataggagtgggactattttcttacactgaagggaatgttcactaatgactgagtaagtttccatctttattggctcctgaatgccatgactgtgtttctcaccttttttccccacatgaaacctaacagaatttgctgatatagcatttatattcagttacagaaaaataaaatgtataccctgataggaattcagcagaacattagaaatgatccctagcacactgtctagggacaatggcacaagagaattaattaaacagagttcactactcagaaaaaaaaaaaaaaaaaacatgaaaaaagttttatcctgcatttggtctttaggattaacatctttttcatgtacattctaacaatttcaaattattttattatcttaaaaagtataaacagaaagtagagcaggattaagtaaactattgcaatactgaagcaaggggaaaactaaaatattaagacgccttaaccgagcaaatgctcaaaagtcagtacagtataaatggtgtctactgactttataaattgttgaggaattctcttgtcattgctcattaggctttaactgggtgcacattagtcaggtaccaatcagtgactactcaaataatcattagttactgctaattgagtgtattatagactgtcttttcaggttgatctaaataagcaggccaacagctgtacaaccagckgcaaattcatactgcttcattaagtgaggttctgagagtttgaaagatcttaaaatgggcttgtgcaagaaatctggcaccaatttatgaacaacaattgaaacaccccaaatccactgatactgagaatacatttcctagagatgctgaaatctgagtgtagatttaaatgaatttcagtttgttttagatctctaataaggagaaatatagtctttgtatatatgca

SEQ ID NO: 92145 - DNA, 722 bp, Homo sapiens
gctgattatgaccccactagactagttttatgatccactaatgagctgtgatccaaagtttgaaaaacattagtctaaagcacttcctttaatttcttaatttgttttatagtggcaagatttcactttgtttcatcttgccagatcctgagactggaaataagatttatttaggtatgtttcttataaaattctaaaagaattttgctaagctatggaatcagaagctattcccaaagtttattcctttacaagaactagcattgtatatagccctctatggttttcagagtgtttctatgtgtgatatgttgttgaattctctgtacccttgtgaagttgatattttacatgcagatcctggagctcatctcttgtaatttaacatattattttcagattaactgtgctcagctaaatgaactatgggatctgaccataagagataaaatgtgtttcattaaaaactgtacctgtaaaggtgaggagaaactggcactctcctatattgttgtcctcaactggttaaggagagtttggcaatatctatcaaatttaaaaatgcagagccaggmatggtggcacttgcctatagtcccagctacttgggaggctgaagcaggaggatcacttgaggtcagaagttccaagctctaatgcaaaatgattttgcctgtgaatagctattgtactccagcctgggcaatatagcaagaccttac

SEQ ID NO: 92146 - DNA, 1125 bp, Homo sapiens
aaatagctctgggagagctgcagagtacaatgaaaaacttgcagcaacccaaaggaccacacaaaccaagatagccatattaaaaaatacagaaagtatcctacctactccaccccatcccccagtccaagcacagctttgcaccaagaggcatctcctggacacaacccacaacctccacctgtgggagaaaagkagagcaggaggaccccagcatcctttgccaccaatgcaaacattgaccacttttaccactgaggacccctgcagtttccaccagtgatgatctcaactgacagagctttccagggtccatgctgctgtgtccccctggagaagaagctgctgtgtccccagtggccaagattaccaactcaccgtctcacaattgcatgtatgctctagaccccagagccaaggctgctacatgtatgatggacacttctgacactggcaccaccactgccatgggcacacctgtaccccagatcatagagccatggctgttctgtgtgcaaccaagcatcaaataccagcaccactaccaacatgagcacacctgcactgtggatctggcacaaaaagggatcccatcagctgtgaagttcccccaagcaggaataagagaacaggaaaatgccagcagcctttgctgttgcatttgggtggggtagtcaataataatttaccctatacatgtctttatatttagagtacccaagcaactttttctgctgctgtgtacacccacagccttggctgctgagggcctccagagccattggccatgctgatctcagctgatggagctttatagagagtatgctgctgtacccaccatggagttggagctgatgctgtggcttcccagagctagaaccaccacacccaactcagacagcatcttcatgcccacttataaatggtctttccctattgaaatgagtccatacagtctggaagaggtggctattacttcaaacatgcagacatcactacaaggctaaagaaacataaaaaaatcaaggaaatattacaccgccaaaggaacacaataatttttcagtaattaaccccaaagaaatagagatctatgaactacctaaagaataattcaaaataatt

SEQ ID NO: 92147 - DNA, 1125 bp, Homo sapiens
aaatagctctgggagagctgcagagtacaatgaaaaacttgcagcaacccaaaggaccacacaaaccaagatagccatattaaaaaatacagaaagtatcctacctactccaccccatcccccagtccaagcacagctttgcaccaagaggcatctcctggacacaacccacaacctccacctgtgggagaaaagtagagcaggaggaccccagcatcctttgccaccaatgcaaacattgaccacttttaccactgaggacccctgcagtttccaccagtgatgatctcaactgacagagctttccagggtccatgctgctgtgtccccctggagaagaagctgctgtgtccccagtggccaagattaccaactcaccgtctcacaattgcatgtatgctctagaccccagagccaaggctgctacatgtatgatggacacttctgacactggcaccaccactgccatgggcacacctgtaccccagatcayagagccatggctgttctgtgtgcaaccaagcatcaaataccagcaccactaccaacatgagcacacctgcactgtggatctggcacaaaaagggatcccatcagctgtgaagttcccccaagcaggaataagagaacaggaaaatgccagcagcctttgctgttgcatttgggtggggtagtcaataataatttaccctatacatgtctttatatttagagtacccaagcaactttttctgctgctgtgtacacccacagccttggctgctgagggcctccagagccattggccatgctgatctcagctgatggagctttatagagagtatgctgctgtacccaccatggagttggagctgatgctgtggcttcccagagctagaaccaccacacccaactcagacagcatcttcatgcccacttataaatggtctttccctattgaaatgagtccatacagtctggaagaggtggctattacttcaaacatgcagacatcactacaaggctaaagaaacataaaaaaatcaaggaaatattacaccgccaaaggaacacaataatttttcagtaattaaccccaaagaaatagagatctatgaactacctaaagaataattcaaaataatt

SEQ ID NO: 92148 - DNA, 574 bp, Homo sapiens
gcggcaggcccaacagttgccaatcaccctcccctgccacactgatgtcccagccaacacggccaccggcgaccctgagacacgagagctgatcaggagccactggcctgcatcccaggtgtgaaggataggagccagcatggcccaggcagtgttggggacacccatggccccctggggaccccactatcactcaccaaggccaggctggtgggtcagagatggaggtcacctgggagacagtcagggcccaagcctggccacatgggcagaaagcccgagaagcgtcgggtgtcaggtgccccagattctgcagattctccctttggacgtttccacccaaacatgccgcgtggaagctgcctccatccaggcagcgggccttggcggtgctccaggaacctgctcttccatagcaaacaggcctgaaaacccaggccrgaactcctttttgaaaacaagtgggaaaaaataaacaaactgaaaagaattctgctgagacagcgagcaaagcactgggacgtgccggccacccccgaaaggcacgggaagggagccgggaccccagtgtgca

SEQ ID NO: 92149 - DNA, 606 bp, Homo sapiens
tgagaatgccatggaatctgcatttttaaagagtatcccaaggtgattcttatgcaaagtaaagtttgagagccactgctgtaaaggctggggaatcaaaggtctctcaggaaaatctttgcctctggcacactgagcttctagatgtagaacttatgccaagctgtgttgttaccaagggctgcagcaggtgcagaagcctgggggtacaggacggtcaccaaaaggacacaacttttgcaaggcccacatcagaaagagttgcaaactctgtaaaaaacaatttaacaagtagattcgagctcaccttagagcagagagytgtagctgcagaataacggggtgcactgggattctacaagtctttgtcaaagaagtgatgtcttgatagccccaaacaaaccctgccatttttacctcttccacctcatgaaagattcagcctcaagcagttgcttctgtatcacttatccaaagtgggcattgggtacaatgtgaatggacagtttgattttggtttgtatgaagtaaaggagcagaaccaactacccatcttttaaattatcttgcagctatgctgtctgccttaaaatgcttaacttctcc

SEQ ID NO: 92150 - DNA, 907 bp, Homo sapiens
  misc_feature (1)...(907): n = A,T,C or G
aannnnnnnnnnnnnnnnnnnnnnnnnnnnnnnnnnnnnnnnnnnnnnnnnnnnnnnnnnnnnnnnnnnnnnnnnnnnnnnnnnnnnnnnnnnnnnnnnnnnaaaacaatttttaagcatcatnnctggcatgtgcacgcacctacaatattgatttctcctctatatctgcagtaattaggcatttttccttcttaaatttcatcttttacacttctgctttgatatataaagcaggataaataaataatatttattttatattaatttattttttttaaatatttaaattattttgggtaataataaaattatagaataygtaaacagaaataaatctttatttacaaataaacccattcaattaaaactcaaatgcttcgtctctctagatagatgaactaggtactgtagctattattgtaatctcctgcataaatttgactgtttagcaagttaatgttattcctgcatgccgcagttttgtccacaatgtctatgatacagtatcctcagggaggtactcacttcggcaaaatggggaataaaattaacaatacagttagctagcagcctattccccaaataatttacatttttatacccctatacacatgaacacatcatatccacctaccacatattttcaaattcaaacttaattctacatatttaaattaaataatgaatgcttcagtaatctttgtaagtttaaatattgttaacacattaaaatttgaatatagaaatggaaaatatcagctgtcaggcagaaccagtagctggcattgttgatgtatttattatgcggtcacctcaaattgaatacaagaaaataaatctcaaaatgacagactcatatttaccattagtgcaatgtggaaggcagaaagtgttaagatactaa

SEQ ID NO: 92151 - DNA, 907 bp, Homo sapiens
  misc_feature (1)...(907): n = A,T,C or G
aannnnnnnnnnnnnnnnnnnnnnnnnnnnnnnnnnnnnnnnnnnnnnnnnnnnnnnnnnnnnnnnnnnnnnnnnnnnnnnnnnnnnnnnnnnnnnnnnnnnaaaacaatttttaagcatcatnnctggcatgtgcacgcacctacaatattgatttctcctctatatctgcagtaattaggcatttttccttcttaaatttcatcttttacacttctgctttgatatataaagcaggataaataaataatatttattttatattaatttattttttttaaatatttaaattattttgggtaataataaaattatagaatatgtaaacagaaataaatctttatttacaaataaacccattcaattaaaactcaaatgcttcgtctctctagatagatgaactaggtactgtagctattrttgtaatctcctgcataaatttgactgtttagcaagttaatgttattcctgcatgccgcagttttgtccacaatgtctatgatacagtatcctcagggaggtactcacttcggcaaaatggggaataaaattaacaatacagttagctagcagcctattccccaaataatttacatttttatacccctatacacatgaacacatcatatccacctaccacatattttcaaattcaaacttaattctacatatttaaattaaataatgaatgcttcagtaatctttgtaagtttaaatattgttaacacattaaaatttgaatatagaaatggaaaatatcagctgtcaggcagaaccagtagctggcattgttgatgtatttattatgcggtcacctcaaattgaatacaagaaaataaatctcaaaatgacagactcatatttaccattagtgcaatgtggaaggcagaaagtgttaagatactaa

SEQ ID NO: 92152 - DNA, 907 bp, Homo sapiens
  misc_feature (1)...(907): n = A,T,C or G
aannnnnnnnnnnnnnnnnnnnnnnnnnnnnnnnnnnnnnnnnnnnnnnnnnnnnnnnnnnnnnnnnnnnnnnnnnnnnnnnnnnnnnnnnnnnnnnnnnnnaaaacaatttttaagcatcatnnctggcatgtgcacgcacctacaatattgatttctcctctatatctgcagtaattaggcatttttccttcttaaatttcatcttttacacttctgctttgatatataaagcaggataaataaataatatttattttatattaatttattttttttaaatatttaaattattttgggtaataataaaattatagaatatgtaaacagaaataaatctttatttacaaataaacccattcaattaaaactcaaatgcttcgtctctctagatagatgaactaggtactgtagctattattgtaatctcctgcataaatttgactgtttagcaagttaatgttattcctgcatgccgcagttttgtccacaatgtctatgatacagtatcctcagggaggtactcacttcggcaaaatggggaataaaattaacaatacagttagctagcagcctattccccaaataatttacatttttatacccctatacacatgaacacatcatatccacctaccacatattttcaaattcaaacttaattctacatatttaaattaaataatgaatgcttcagtaatctttgtaagtttaaatattgttaacacattaaaatttgaatatagaaatggaaaatatcagctgtcaggcagaaccagtagctggcattgttgatgtatttattatgcggtcacctcaaattgaatacaagaaaataaatctcaaaatgacagactcatatttaccatkagtgcaatgtggaaggcagaaagtgttaagatactaa

SEQ ID NO: 92153 - DNA, 907 bp, Homo sapiens
  misc_feature (1)...(907): n = A,T,C or G
aannnnnnnnnnnnnnnnnnnnnnnnnnnnnnnnnnnnnnnnnnnnnnnnnnnnnnnnnnnnnnnnnnnnnnnnnnnnnnnnnnnnnnnnnnnnnnnnnnnnaaaacaatttttaagcatcatnnctggcatgtgcacgcacctacaatattgatttctcctctatatctgcagtaattaggcatttttccttcttaaatttcatcttttacacttctgctttgatatataaagcaggataaataaataatatttattttatattaatttattttttttaaatatttaaattattttgggtaataataaaattatagaatatgtaaacagaaataaatctttatttacaaataaacccattcaattaaaactcaaatgcttcgtctctctagatagatgaactaggtactgtagctattattgtaatctcctgcataaatttgactgtttagcaagttaatgttattcctgcatgccgcagttttgtccacaatgtctatgatacagtatcctcagggaggtactcacttcggcaaaatggggaataaaattaacaatacagttagctagcagcctattccccaaataatttacatttttatacccctatacacatgaacacatcatatccacctaccacatattttcaaattcaaacttaattctacatatttaaattaaataatgaatgcttcagtaatctttgtaagtttaaatattgttaacacattaaaatttgaatatagaaatggaaaatatcagctgtcaggcagaaccagtagctggcattgttgatgtatttattatgcggtcacctcaaattgaatacaagaaaataaatctcaaaatgacagactcatatttaccattwgtgcaatgtggaaggcagaaagtgttaagatactaa

SEQ ID NO: 92154 - DNA, 529 bp, Homo sapiens
aattgatccgggacttttcttattttgggtgagtctagataaacaggccaaatatagcaccatcgggaaaagacaaggaatgcagtgactaggccgggcgcggtggctcatgcctgtaatccsagcactttgggaggccagggcgggcggatcacgagatcaagagatcgagaccatcctggctaacgtggtgaaaccccgtctctactaaaaatacaagaaattagccaggtgtggtggtgggtggctgtagtctcagctgcttgggaggctgaagcaggagaatggcatgaaccgggaggcagagcttgcagtgagccgagatcacgccagtgcactccagcctgggtgacagagtgagactcccatctcaaaaaaaaaaaaaaaaaaaaaaagaactaattctcagttgctgcagacaccagagtgggaaaatcaagaagtacctccatggagtggcccccagacacatccaggagaggtgtcctgcagggccccgcagggctcctcaatattctagattaaaaaa

SEQ ID NO: 92155 - DNA, 680 bp, Homo sapiens
attctttatgcatttaaaaatatgtcaagaggctggacacggaggctcaggtctgtaatcccagcttctggggagactgaggcaagaggatcgcttgagcctaggagctcgaggttgcagagctatgatttcgccaccgcactccagcctgggagacagtgagactttgtctctaaaaaaaacagcaacaaaaaccatgctgagaataggtccacaagctctgccaaagggattaattgggaccataaaggtaaagaamcctgctaggggccagggtggtggctcatgcctgtaatctcagcacgttcggaggctgaggcaggcgaatcacttgaggtcaggagttcgagaccaccatcaggagatgatggtgaacctcatctctactaaaaatacaaaaaattagccagacgtggtgaagcacctgtagtcccacctaatcgggagattgaggcaggagaatcacttgaacccaggaggcggacattgcagtgagccaagatcgtgccactgcactccagcctgggcaaaaaaaacaaaacaaaacgctggtagggaaggtgcaaggagttaagggcagaggaagaattccacttggtggtgaggtgactctgctagtgtccttgccctacctcctcttccaggatcccgtgcatctcaggaacaaggcagccaggagg

SEQ ID NO: 92156 - DNA, 680 bp, Homo sapiens
attctttatgcatttaaaaatatgtcaagaggctggacacggaggctcaggtctgtaatcccagcttctggggagactgaggcaagaggatcgcttgagcctaggagctcgaggttgcagagctatgatttcgccaccgcactccagcctgggagacagtgagactttgtctctaaaaaaaacagcaacaaaaaccatgctgagaataggtccacaagctctgccaaagggattaattgggaccataaaggtaaagaaacctgctaggggccagggtggtggctcatgcctgtaatctcagcacgttcggaggctgaggcaggcgaatcacttgaggtcaggagttcgagaccaccaycaggagatgatggtgaacctcatctctactaaaaatacaaaaaattagccagacgtggtgaagcacctgtagtcccacctaatcgggagattgaggcaggagaatcacttgaacccaggaggcggacattgcagtgagccaagatcgtgccactgcactccagcctgggcaaaaaaaacaaaacaaaacgctggtagggaaggtgcaaggagttaagggcagaggaagaattccacttggtggtgaggtgactctgctagtgtccttgccctacctcctcttccaggatcccgtgcatctcaggaacaaggcagccaggagg

SEQ ID NO: 92157 - DNA, 680 bp, Homo sapiens
attctttatgcatttaaaaatatgtcaagaggctggacacggaggctcaggtctgtaatcccagcttctggggagactgaggcaagaggatcgcttgagcctaggagctcgaggttgcagagctatgatttcgccaccgcactccagcctgggagacagtgagactttgtctctaaaaaaaacagcaacaaaaaccatgctgagaataggtccacaagctctgccaaagggattaattgggaccataaaggtaaagaaacctgctaggggccagggtggtggctcatgcctgtaatctcagcacgttcggaggctgaggcaggcgaatcacttgaggtcaggagttcgagaccaccatcaggagatgatggtgaacctcatctctactaaaaatacaaaaaattagccagacgtggtgaagcacctgtagtcccacctaatcgggagattgaggcaggagaatcacttgaacccaggaggcggacattgcagtgagccaagatcgtgccackgcactccagcctgggcaaaaaaaacaaaacaaaacgctggtagggaaggtgcaaggagttaagggcagaggaagaattccacttggtggtgaggtgactctgctagtgtccttgccctacctcctcttccaggatcccgtgcatctcaggaacaaggcagccaggagg

SEQ ID NO: 92158 - DNA, 738 bp, Homo sapiens
tccgtgacaagatgactcctttcccacaaagaagaaaccgtttccttattttttcagttacttttccaaagacaacttgcatcgggcgcaagagagcagagttatgcagaaatccaaccgtaaccagctcagagcgaggactcattctctctccttccaccagatgttttttaggtgtcctcagctggaatgcccagtttgaaactaattaggccagcagtaaactccttgtataataaaatcgcaggccgtaatggtgaataagtgaggttcccagccgcttatgacagatgcctttctgggcagagagagaagagagcctgtggctgtcaggagaaaatgaagggagtggaggtgccttctttagacacatgcctttcctaagtatccacgcacatgatcgcagagcggaggagtggaagttgcgactggggtagagttttgtctttgctgggcaggcctccttcatacaaagatgcttgggggagaatcaattataagtattaggcagtgtcttcaggtcttaggtgtatgctgtgtgtgtgtgtgcaaaggcttggggagaaggattggtgtcacgtgcggggcagtgtaaaaaacttaactgcttcccacctgggcacaaratgaaaagaaagactgcctggcctgacataaattccttgggagagaggagaacctgctcccccagagacttttgataaagggagaattcgcctaatgatgtggttcccctta

SEQ ID NO: 92159 - DNA, 1310 bp, Homo sapiens
tgagtcgcaggtcaaatgaccgacacagggccagactgagtgaaaatgaaatctacgcttttgcttctctgcaaagtatgccttatccatgtgcaatacaagctttggctcaaaacatttctgctatcatttcctttggaggaagatgctgaatttgsatggttttaaatgcacagaacacagttattttctgaacctgccctgacgttttttgccactgtcgtttgaaatggggaaacaaaatcatattaaatattcaggaacacaaatacaaacctctgtgagccatgacccttaaccggttgggtatggttctgtaaaggaaaatgacggtttatttaagggctaatttgatttattccttcgatactaacactacgcatttcaggtcctaaaaagagtcaataaatttaccggcagtggagaggccctaaaacattacggtaggcgcagcccaagtcaagtttaccggaaggtgctggatcgctatgggtgggtgttgtttcgggttagattttaaacatttggagagcaaagaataatttggaacaggtggtgccgagagtcaggtagctggaatgatttatctttgcctctttgaacgttaagggaggccactggttgcctgaatctggaaccagcaggctgcgggtcagtgggggctgagagactcgtctttgggacaaactttggcaggatccaggggcttcgtcagcgctgtcatcgcctttggatgatagtagtcagaacacagttgtgcctgctcgtgcatttttgaaaagtctgcctctgccttcagatatatgcagaaatctaaaacaggaacttagacgcgccgcaatgccaatttaaacatctttaaaaatgaacaaagtatgtaatagaggttagaaactcttttgtcatttggtatcaatagtgttgtgtcagtaacatgaaaatgtgtgtaatttcaatggcattgcactttcttcttcttttttccttttgagtatctagtaaagttacattttttaaaagtctgtgttcccagatgtaatagatacgaacgtatctacttgcagtcattcagaggagaattgtcaactctctgctaatgtaactaaaggaaaaatgataaaatcaacatatttttccccaaagaatgaggaactggagggtttgactactgtatatggcaacttacttttgtctcgcgtcagctaaatctgtcagttcccctttcttttctattcatctcccaagaatggcctttcataactgaaatacacgtgtattagccaaaagacattttaattttgtaaagaaaa

SEQ ID NO: 92160 - DNA, 840 bp, Homo sapiens
gcatgttgcaccctggatttcccagtacacgtggtaacctttcagagcccttattccctgaagaaatttcctccttagtcttttccttcccagacttttgggtctgtctgctgcttgccccatcttctgtcccttgtcccaggcagacatgtagagtatgttttgaaatacttttgatagatgtcacctaaaaagtcgtcgctctagcctcagggcagggaggtagtggcaaacaaaggtcagtctctgtgccagtccctcagggaaacaytagattgatcaaaaccaaaatgtattgagaatgagatccatattgtcccccatctcagcaccagcaaaccatgccaggtatacaagctgctgttcccacagccactatcgagctggaaagtgggagatgttaggcgagcaagcgaaaatgccacaatattttcttatcaaaatttagcagtgtctgttttcattaaacactttcctggttgctgtaagattttgattagactccagagttccaaaaaaaaatgattcttttagttttgcttaatgcttgcttcaatgaacaaaccaatttttggagtttcctactccaccatttttatgacatcaccactacaactctttcttgcacaagttaaggtatacttattctcttcccaaaagggtgaaatacaggatcctattagtcaccatatccctttctggaaaggctaatttcttttctagatcagtaaaaagcccacagaggtatttaatatctgaagactaaatttaaaaattaagtattaccaacactgcttatacaaaatagtgcgaaaaggggaagtgaatgataaaacacac

SEQ ID NO: 92161 - DNA, 840 bp, Homo sapiens
gcatgttgcaccctggatttcccagtacacgtggtaacctttcagagcccttattccctgaagaaatttcctccttagtcttttccttcccagacttttgggtctgtctgctgcttgccccatcttctgtcccttgtcccaggcagacatgtagagtatgttttgaaatacttttgatagatgtcacctaaaaagtcgtcgctctagcctcagggcagggaggtagtggcaaacaaaggtcagtctctgtgccagtccctcagggaaacattagattgatcaaaaccaaaatgtattgagaatgagatccatattgtcccccatctcagcaccagcaaaccatgccaggtatacaagctgctgttcccacagccactatcgagctggaaagtgggagatgttaggcgagcaagcgaaaatgccacaatattttcttaycaaaatttagcagtgtctgttttcattaaacactttcctggttgctgtaagattttgattagactccagagttccaaaaaaaaatgattcttttagttttgcttaatgcttgcttcaatgaacaaaccaatttttggagtttcctactccaccatttttatgacatcaccactacaactctttcttgcacaagttaaggtatacttattctcttcccaaaagggtgaaatacaggatcctattagtcaccatatccctttctggaaaggctaatttcttttctagatcagtaaaaagcccacagaggtatttaatatctgaagactaaatttaaaaattaagtattaccaacactgcttatacaaaatagtgcgaaaaggggaagtgaatgataaaacacac

SEQ ID NO: 92162 - DNA, 1361 bp, Homo sapiens
gcataggaaacaaaccaaaatctggaagacctggccccctaccaaatacactctaggacttgtggatcgttttctccccactttctaaattttaacctaatctctcccacatcccaaatcctgttttttaatgcaatcycccaaaacagcacaacatcccataccctaataaagagtagacaattccatcaggaattgtttacagggatcctaaccagcttcaagtctcagatgggtggttaggccggatggctaagaataagacacttatcttcagtttccagccttttccacatagtgatactattagaaaatacactatagggcactcctaggcaagctgaggagactgctgctcagtgattcagctgccatgccccaccctgcccagctgcccaagggctaagggatccatttcagcacacccctaacccatttgctgggatcctcttgggaatttctgccctaaagacagctccaagtaagaggaagagcacagatctcaagaaagcaactcagacctgggtttgaaaaccagttttgccactgacactctatgtgatcttcagcaagttgcctaatttctctgagcctcaactctaaaaagaggatgccaatatccactttgaaaagctgtgaggatgaaatatcagaaggcaggtatttaacaaagattagttctcttccttcccagtcctgaaaatctactatcaagctgtttacatgatgccaatcaactggcttgactggtttcctcactaaggtggttggagtaacctggacagggccgtgtcagctcagacaaggactgtcacttgcattgagcaagactggagccgttccagggtgctgtggataggacaaccctcaccctgggagcacactccccattcccagtcctgtcaatgttccttttgtaaaacacagaaactttcttcaaatctgacagctgccacctgcacaaataattcagggatgtaattttgtaactcaatacaaaccttgaaagctgaaaagtttgaagtccaaactaatccctttgaccttctgcctaaacactcactaatcactttttaatttgtagttgatttcctctctctgtgctgtccttacaggctacattttcattttagaagtatccagggagtaaatggcattacaaaatacccaactgaagtacaacgcaaacttcttttcccagagatctaaggcttctccatggcccactgagttttccaaatggcaatgggtggcaagaaaatgagggagaaaattcctcctttgaaggggagactcctcactgggagaattatgagctacagaagttaataagatgtggtctctgcccccctaaaaatgca

SEQ ID NO: 92163 - DNA, 1015 bp, Homo sapiens
tatatgaatttatataaaaaagagactaacagagcttagaaagacaataactgttcctcccttcttacctgggaatcgtctgtygctctcctgtaaccccatacaccacaatcaatgtacaaaaaccaggaggtgataaatattacttaattaaaaggaaaacaaaatcaatttcaggaaaactatcacgcaaagattcataactgtatttaaaagcaattaatcggtaaagatagctgtccaatgaaaggtaaactcccactggtgttatttgacaccagattgtcttggctttcaaacaagagtagacttctgctttttcaccaagaatttaacgttctaaaaaggtatgtgaaacaagttaaactacttgcatatttccacttacataacactgacatagcacatcagcttttattttttccagatactagatgaagtttcttatatattcctgtgagagaataaacagaaaactgtctctcttcttaatatattagtgccctgtaatccagaccatatgatcaataaactatataaaaattaaattatactgacggtcttaggcaaaaagtggaaacaattttttttaggactgtggtgtgcggaatattaaaatcacatgttgtgctattaatttttcttttggaagccaaatagagttctcctgcataaatatctcacctaaatatttctcttacaaagaatttttcctgttaaaggtgtttgagagacatttaattagtgatattgtaattggcctgtgctcaggggaaacattgatcaataagtcactttgaaaatgttgccatggttttaatggcaaagcacccctgaaaacaagtagctatgtgcctctataacagaatacatggtcctgacgccttattgctttttggagataaacaaaatcattttgttcaaacataagaccaacagtgaataaatataataaacaggttagaatattagctttggggggacgggggatagtggggaaatgaagaactgaaac

SEQ ID NO: 92164 - DNA, 649 bp, Homo sapiens
cctgcaggattttcttcctcctatctttcttccaatacaattgaatattgattacgatgttttccatgtatgtatctattcaagtcaattttgttaacctattccctataggaaggataaaaacattttatrgaatgttgcatgcagcattcattctaatttccttcatgtgattgattgcaaatattcctttgcttatataacatgtttcatgataaagtgaaatgtgaacacttacagatagatcactttccaaaagctactatgagcaactatatgccaataaattgaaaaatctagaataaatgggcaaattcctagatacataaaatgtaccaatatcaaacgaataagaaatctaagacctgaaaagaccaataacaagtaacaagatagaagctgtaataaaaagtctcccagtaaagaaaaggccaggatgtgaggacttcactgctgaattctaccaaacatttaaagaagaactaacaaaaaacctactcaaactattctgaaaaatagaggaggaaaaaatacttccaatctccttctacaaggtcaatattatcctgataccaaaaccagacaaagacaaatgaatacaagaaaattaaaaaaaatatctctgatgaatattgatgcaaaaatcttc

SEQ ID NO: 92165 - DNA, 566 bp, Homo sapiens
tgtatatatatttttatattattttaataatatttatgtagtatataaatacrtatagtcacatttttccaaagtataatttgcaaagattctgtcatgtttataaaccagccttttattcttgttgacaataattcctataataagactgcaagtatcacattttttagagtatattatagaagaaagcccaaatgattttaagatacatgtaaaatcttaccttctaaaatgtctgtactattgtctttctcaggaagatcgagtataagacttgcacattctagtcctgattctatttcctcaaagaataatgagtgcttcaattcagttttctcacatcttaaaatcatttatctgtcacctgctgcagagggcacatggtctcatgcaagaaaataattacggctgtggaaacattcgtcggacaatgtgaaagatcttttgctattcatctgcattgttccaaaacagtagcagaacaaatttaaataagttagagctgcaattatttattgttatcttttggattattttttacctgggtaacgctgaagattaaacat

SEQ ID NO: 92166 - DNA, 1272 bp, Homo sapiens
gcatatttatgataatgatttagttgtattgtaaataaggccaatgttatattaaaatgtaaatatggtcaatgttatatgaaatgtaaatatgtaaacatgataatatgtaaatatgtacatgtaatatgtaaatatttgtaatatgttagatgcgttttcaagataaaatcataatcacatctttttaaaattattctactataaaattgaggtgaatgttttaastgaactttaaaatagtttttttttaagttctttttaaataagaacaaactatgttttacatagtggtgatttcccacaggttcttcaggaagtctcataaaatgtcatttttgtgttactgataatgactgtgattttaatttgcaaatgtgtaaaatgattggtaaacactaaacagctataccccttgattgtattaatattttcattctcaacacatcaaaattaccactaattttatggtcatagtcgcattgaacctatcttttttagaagctgcaaaaataaccaaaatatgttatccacattacacattacccagcaaatactgatttttccatgaaaaatattaactttttaaaaatctgaaacaactcactttttacaatatttttgagtttgtattaaacagacaagaaaaatatgaaaaataagttgacttaatagcttgtgagtaaaccttaaattatttaagaacctgttaaatattatgttacaagttatagaaggaaaatgtaattaacaatgaatctctgtgcttggcaagattacattctccttgtattaggatttgtgcatgtgtgatacagcaggttgttaaattgctcagctatcatgatagcatctgccatttgttcagatgaggtagcttgctagaaactacatgaatctgcctgaaaaagagcctactaatatttgttttccaaacttctgctatcttgaagatgtaatccttattaataagtatttattttaaaatatagaggtcttcataaaatttgctaggtatttctcaaagtacactataaattcttgattatgttttatatcttactttgttttgctccatattcttcatatagttggaaaagtgtttctacttgtaaaattaatgaaaggtttatgagattattgagataattccaaatgggaggggatagctcttttgccccagtgtgattttacattattagttaaaaatttagtggggcagaaattcttcagagagttaaatttgtttttaattttattaactggctttgt

SEQ ID NO: 92167 - DNA, 726 bp, Homo sapiens
tacctttttgtgatctccatgttttattcacgtttatgaaagttaattcttattactgctttcatttattaatccaagctttaaatatcctgtacatttccctgttttattaactttaagacaagatttgcagtttagaaataaaaattgtctaggaccaaaatgtgtgtgagttgaaaaaagatagaagagagttataaaaaaatctttatctttaaagttcttgattcacattatggtggttttttttaatttatttwatttatttttttttgagatggagtttctctctgtcacccaggctggagagcagtggcacaatctcggctcactgcaagctctgcctcccgggttcacgccattctcctgcctcaacctccaagttgctgggactacaagcaacttgtagttgcctgccaccacgcccggctaattttctgtatttttagtagagagggggtttcaccatgctagccaggatggtctcgatctcctgaccttaggtgatccgcccgcctcagcctcccaaagtgctgggattacaggcatgagccaccgcacccggcctatggtgcttattacagtagaaaataatgcgtttgttttcccatctattttatccattagaatacaagtctcataagagcaagtaaagttttcatttttaaaccctagctcagagaatggtcatgaatgtttagcagattaaaaaaaactagtacaaga

SEQ ID NO: 92168 - DNA, 2632 bp, Homo sapiens
tgaattttttttcttgttaggatagaatgctgacttctatgttcctgacatgccagataagaaactgtaggccttactagtattttttaatctaatcatattttccagagaagactcttccarcctccagcatagagactaaaagcctgtatcccaatattttgggagctgactgacaaaaatggactgaaggatcctggaatacagtattcacttttcacttaactgccctgctttctcatcaagaggagttgcatcttcctgtccagagagccctttgaattgccatttccagataatgtatcagtgtttgccatgatatatgggtagagatagttaactttctgaattcagcaagactgttctctcttttaaacagatattaaaccaggttttcttactttagtcactatatctttacttccgtttctatagattcttgatgcccccaacacttgattggtaatttttcagtgtgaatcaggttgattattgattttgccctccaacacttgcttagcactcagttttctcagttctttctcagacgtctgctttttagcttctaacgctttgtttctattgtctcctttcctattctccccaagtcctctgggtttatatcttaaaagtccctttattgtaattttaatggggtttaggaaagtagtgaaagttgatgttcatttttaatcatttgtctttacttggaaggtaatttcaaattatgtcaaaataatttaaccattataatcaatattttaaatgtcatgtaggaatattccaggaataattatatattaagaactggtagaagctaagatgattaagaagagtgatgaatataattttatatggacatgatataccttgttttaaagattatctacatttgtattgcccagcagagatgtttttgttaatttaatgttgccattatcaggacaaatgtatcatcattcagatatctccttaaacattatctactgaaataaatctttcattcattcatcaaacatgtattgatttcctactataagccaagtattgtttaaggattaggggatagaaataaagagtatatcacatctaaaatatattaaagacttctaaatgtacaactataatataatgaactaagtgaaaagtaagatttttcttcatttccccaggtggtagattcctgctgttactaaattcttaatcgtcattatacatttcacctcctgtgcacactgctcctttatttccttatattgcctgttagacaccaccctgattagattccttcactcccaagttaatattttttaaagtctttccactggatatactttactgaagattatctgatacccaagagagggattaacatgccatgcaacacagcagagcatacaactcaaatttatgttagatatcctttttgttaaatacccctttgccatttcaaacaatgttaccttctcactgattggttcacctcatcagtccctggacttcaattttactgcaggactcttccttctgtttctttttagttcttcaaaaattatctgggtctcttatgtagaacaattcaattttcttcaataaattctgggcccatgtttgtgtattagccagagtaggctgatatcattggtttaataaaataaatatttaatatttatagtttgctgtgggttcatagagaggcttcgtttcgtgtagtcattcagggtgcctgaacaaaggtaaaaaaatacttgaagggtagcccaggaaattactggactgagcctgaaagtatcatttatcagatcctcttacatttcactgtccagaactcattcatatgtccccacttaactgcaagagaggtgaaatgaaatactctttgatgaatgtatagaattctttctgccacacttaaaaaaatactaggttgatttgcaaaataaaagcctgatctgaattatactttattttactggaattttagtaaactttttttcttgtacatgagtttttcatcttacgtaggccttcctgtctgagatgataatcccaacccttaaaggagaagaggctcctattaattatggttttttgtttcattttctgtttattttagtgacatgtactgccctgtttattacatctatacttagtcaagttcgtacaatgtgcatatataatttactatttaaaaatttttactaataatacttgaggaattttcttctcatgggttgatcttatctactgtactctaacgtgatactagatgcttttaattctgattttaaccactaggatcaatgttaggtcaatgtctctggagcttgttgactgcagcagaaaatctgtccctacattttgtgaaaccccacttttcttcattgttcccttaggattccctactcatcgtttccagcttgtcagctactttctttatttttatttcatattggttttcaagttattccctttagctaccttgacttatcactgtttttttttaaactttgattgctcctcatgtttctataatcagctggatggttgttttttactgcttatacatttagtcccttaaagtgaaaaaagttaatgagtacttcagttccttccatttgctccgcattcc

SEQ ID NO: 92169 - DNA, 612 bp, Homo sapiens
tgtggttatttaattaatgtcttttcctgctgccaaattataagaggcacaaggctagaaaccatgagtattttttccaccacattatctctaacaccttgtatggtatctgtcacacagtagttgctcagtacatatttcaatagttgattacaaaaaaatgaactccctttttttcctgctttactttcaccttttatttctcttttcttttttttctctctgctctctttctttcttcctcaattctttcttcttttatcttactttctgaagactcttttaccrctgaatttgagattccatatggaagtgaacatttcctaatgactaaaggatgatgatagaaaggagttggtggcgtttaatagcatgctgccgttctatctgaaatcaaagatccccttcataagagagcatgactgttacatcttccttaaaatgaaaacctacatcaaacactgcagcaggggtacttttccatttcatttcttttgttctgcttgtggctttgctgaatccatctatcattaacatttataatttagcattgtcttctggcacagtgtgatgcgatctgtattgctgacagatgtgtctcagtcttggtct

SEQ ID NO: 92170 - DNA, 690 bp, Homo sapiens
gcacacacatatggatgagtgtgctaactaaatgtattagctaaataggagtactcataaataacatacacatattatcaaaagtacatggttatattaaataagtatatgacatcctgaaacatacacacacacacctgacacacaaacatttctgcatgctgtattaaaatattatctatagtggttaaggacattgtattcatagaaccagtctcctaattattgattatatatagctatagcttgcagatttaaaaacagctgtggagtagaaaagtgtaggttttagttctgataacttagaataggcaagcaccccttttgtcttaaaaattaattgcaaatattgatggtgatgggaagaattcggagggagtattcatcttggtgtgttggttataggactggaatagtgttgtaaattctgctccartaaaatacctacctattccatatcaatttcaaaattaatcaaagaaaaggagctgacagagctcatttcaccatgctccaccaaactgacataagatcaaagtttgcaagtcctgcaaaccaccagaagctgaagaatccaatctccacttcggtttacactctgagaaataaactctaaaagcaccaaaaagccccttcctcatcatctgcaagtttttaaacactgggtctagttaaatctatcctcattca

SEQ ID NO: 92171 - DNA, 539 bp, Homo sapiens
atgcaaatgaagctgtattggactccaagcacactcagaatttagatagcaggtatagttgatttcctgtaactatggtgtagggatttttcctcaacccccaaaagttcatagttggaacagacccttattacagaagacagattaacaagagaaaaacaaacaagtggctgggcatggyggctcacacctgtaatcccagcattttgggaggccaaggtgggtggatcacgaggtcaggagatcgagaccatcctggctaacatggtgaaaccccgtctctactaaaatacaaaaaattagctgggcgtggtggcaggcacctgtagtcccagctactcgggaggctgaggcaggagaatggtgtgaacctgggaggcggaacttgcagtgagccaagatcatgccactgcactccagcctgggtgacagagcgagactccgtctcgaaaacaaacaaacaagtacattaacacatatatttcatatacacatgggagacactcagagaatgagtagttctaaaaaggtggctttga

SEQ ID NO: 92172 - DNA, 539 bp, Homo sapiens
atgcaaatgaagctgtattggactccaagcacactcagaatttagatagcaggtatagttgatttcctgtaactatggtgtagggatttttcctcaacccccaaaagttcatagttggaacagacccttattacagaagacagattaacaagagaaaaacaaacaagtggctgggcatggcggctcacacctgtaatcccagcattttgggaggccaaggtgggtgkatcacgaggtcaggagatcgagaccatcctggctaacatggtgaaaccccgtctctactaaaatacaaaaaattagctgggcgtggtggcaggcacctgtagtcccagctactcgggaggctgaggcaggagaatggtgtgaacctgggaggcggaacttgcagtgagccaagatcatgccactgcactccagcctgggtgacagagcgagactccgtctcgaaaacaaacaaacaagtacattaacacatatatttcatatacacatgggagacactcagagaatgagtagttctaaaaaggtggctttga

SEQ ID NO: 92173 - DNA, 539 bp, Homo sapiens
atgcaaatgaagctgtattggactccaagcacactcagaatttagatagcaggtatagttgatttcctgtaactatggtgtagggatttttcctcaacccccaaaagttcatagttggaacagacccttattacagaagacagattaacaagagaaaaacaaacaagtggctgggcatggcggctcacacctgtaatcccagcattttgggaggccaaggtgggtggatcacgaggtcaggagatygagaccatcctggctaacatggtgaaaccccgtctctactaaaatacaaaaaattagctgggcgtggtggcaggcacctgtagtcccagctactcgggaggctgaggcaggagaatggtgtgaacctgggaggcggaacttgcagtgagccaagatcatgccactgcactccagcctgggtgacagagcgagactccgtctcgaaaacaaacaaacaagtacattaacacatatatttcatatacacatgggagacactcagagaatgagtagttctaaaaaggtggctttga

SEQ ID NO: 92174 - DNA, 2215 bp, Homo sapiens
  misc_feature (1)...(2215): n = A,T,C or G
ttgtcttacagctggtatccttgctcattgttttttttaggagttctgggtaaaataactaaatttgaagaataattaaatactattaatcaattttaggttttaaaagcacctcttcagagtgagtttacacctgacaattgaaactggtaatcttgaaaatgctctcaggtgtatgcattacaaataaaattcttaggagcagtgttgtgtgccttgtagtcccagctacttgggaggctgaggtgggaggatcaattgagctcaggaattcaaggccagctcgggcaacatagtgagaggcccgtctcttaaaatctcagccaaatagaagcttctttaacaattaatttatgtaaaatacttatttccttctgtcccttgatgtgtgctagattgtgtttacatttaattgatcttcggttagaaagccaccctatgtattaaaaaacagccattaattttgctacacattcagttgaatttgacagtaatatcagagcaatctattcactcaattacctgaccgaggctttcaaaatacattgttgaatgtatttggtttaagaggcacatgtcaagttaatgaacacagtaagtttccctacttctatttgtcgttgcctccatttctgatttagtatttaacaagtaacaactactttttgtttcgtgactaaaccttgcagtataaattaagatgtaattagctgggtgcggggcatgactgtagttccagctactagggagcctgaggcaggaggatccgttgagcccagtgagtataagtccagcctgggcaacatagtgagactcatcttgatttattattattatttttaatgtaattgattattcaaaaggattcattttaaagtttcaatattttagtagcctttttcaaaagagctttaggtccacagcaagattatgtggaaggtacagagatttcccgtctaccccgtgccacatgcctacagcttctcctgctatcaaartgttttaccagaatgatacacttataacaattgctgaagctacattgacacgtgcttatcaaccaaagtctatcgtttacctttagatttgctctgggtgtacattctgagggttttgacaaatctatgacatgaacctatgattatagcatcatacagagtattttcacctccttaaaaatctgtgctctgcttctctatcccttccacctaacccttggcaaccactgatccttctatcgtctccatagtttagttttttccagaatgtcatatagttggaatcatacagtatacagcctcttcagattggcttctagtcacctggcaatgtgcatttaaatttcctctatgtcttttcatgggttgatagctcatttctttttagcactgaataatattttggttgtaccacagttcacccattcatatactaaaggacatcttagttgcttccaggttttagcaattatgaatcaagctgctataaacattcatgtgtaggtttttgtgtagacataagtttgcacctccttggggtaaaatgcaaagagtgatattgctgtatcagatggtaagagtatgtttaattttatcagaaactgccagactgtcttgcaaaatggttacacctgtttgtattcccttcagcaatacgttgaagttcttgttgcatcgcatcttggccagcatttgtttttgtcagtgtttcggattgtcaccattctagtaggttttgtagtgctgtctcattttaatttgcagttccgtcaatgtaatttgcaattctatcaatggcatacgatgtaaagtttcattttaacaatcatatatctgaagaatattttcccagatattcatgggtgaagatatttaggaatgcatgtattgaggggagaaaacttgggtatatatatataaagagattgncttatattttttaaactacccctcactaactagcagcgaataacatataattggaattgttgtttttaattgcctgaatttcaaatgttaagttttccaagcattcactattgattaggttggaaagtttacatgctattgagttgtatcaatagaaacgtatatttttttccttttcattttaaaacgtttaaaaatttttttggagtgaggtctcattctgtcacccaggctggagtgcagtgacgcaatcataggtcaccatacctctaattcctgacctcaag

SEQ ID NO: 92175 - DNA, 2215 bp, Homo sapiens
  misc_feature (1)...(2215): n = A,T,C or G
ttgtcttacagctggtatccttgctcattgttttttttaggagttctgggtaaaataactaaatttgaagaataattaaatactattaatcaattttaggttttaaaagcacctcttcagagtgagtttacacctgacaattgaaactggtaatcttgaaaatgctctcaggtgtatgcattacaaataaaattcttaggagcagtgttgtgtgccttgtagtcccagctacttgggaggctgaggtgggaggatcaattgagctcaggaattcaaggccagctcgggcaacatagtgagaggcccgtctcttaaaatctcagccaaatagaagcttctttaacaattaatttatgtaaaatacttatttccttctgtcccttgatgtgtgctagattgtgtttacatttaattgatcttcggttagaaagccaccctatgtattaaaaaacagccattaattttgctacacattcagttgaatttgacagtaatatcagagcaatctattcactcaattacctgaccgaggctttcaaaatacattgttgaatgtatttggtttaagaggcacatgtcaagttaatgaacacagtaagtttccctacttctatttgtcgttgcctccatttctgatttagtatttaacaagtaacaactactttttgtttcgtgactaaaccttgcagtataaattaagatgtaattagctgggtgcggggcatgactgtagttccagctactagggagcctgaggcaggaggatccgttgagcccagtgagtataagtccagcctgggcaacatagtgagactcatcttgatttattattattatttttaatgtaattgattattcaaaaggattcattttaaagtttcaatattttagtagcctttttcaaaagagctttaggtccacagcaagattatgtggaaggtacagagatttcccgtctaccccgtgccacatgcctacagcttctcctgctatcaaagtgttttaccagaatgatacacttataacaattgctgaagctacattgacacgtgcttatcaaccaaagtctatmgtttacctttagatttgctctgggtgtacattctgagggttttgacaaatctatgacatgaacctatgattatagcatcatacagagtattttcacctccttaaaaatctgtgctctgcttctctatcccttccacctaacccttggcaaccactgatccttctatcgtctccatagtttagttttttccagaatgtcatatagttggaatcatacagtatacagcctcttcagattggcttctagtcacctggcaatgtgcatttaaatttcctctatgtcttttcatgggttgatagctcatttctttttagcactgaataatattttggttgtaccacagttcacccattcatatactaaaggacatcttagttgcttccaggttttagcaattatgaatcaagctgctataaacattcatgtgtaggtttttgtgtagacataagtttgcacctccttggggtaaaatgcaaagagtgatattgctgtatcagatggtaagagtatgtttaattttatcagaaactgccagactgtcttgcaaaatggttacacctgtttgtattcccttcagcaatacgttgaagttcttgttgcatcgcatcttggccagcatttgtttttgtcagtgtttcggattgtcaccattctagtaggttttgtagtgctgtctcattttaatttgcagttccgtcaatgtaatttgcaattctatcaatggcatacgatgtaaagtttcattttaacaatcatatatctgaagaatattttcccagatattcatgggtgaagatatttaggaatgcatgtattgaggggagaaaacttgggtatatatatataaagagattgncttatattttttaaactacccctcactaactagcagcgaataacatataattggaattgttgtttttaattgcctgaatttcaaatgttaagttttccaagcattcactattgattaggttggaaagtttacatgctattgagttgtatcaatagaaacgtatatttttttccttttcattttaaaacgtttaaaaatttttttggagtgaggtctcattctgtcacccaggctggagtgcagtgacgcaatcataggtcaccatacctctaattcctgacctcaag

SEQ ID NO: 92176 - DNA, 2215 bp, Homo sapiens
  misc_feature (1)...(2215): n = A,T,C or G
ttgtcttacagctggtatccttgctcattgttttttttaggagttctgggtaaaataactaaatttgaagaataattaaatactattaatcaattttaggttttaaaagcacctcttcagagtgagtttacacctgacaattgaaactggtaatcttgaaaatgctctcaggtgtatgcattacaaataaaattcttaggagcagtgttgtgtgccttgtagtcccagctacttgggaggctgaggtgggaggatcaattgagctcaggaattcaaggccagctcgggcaacatagtgagaggcccgtctcttaaaatctcagccaaatagaagcttctttaacaattaatttatgtaaaatacttatttccttctgtcccttgatgtgtgctagattgtgtttacatttaattgatcttcggttagaaagccaccctatgtattaaaaaacagccattaattttgctacacattcagttgaatttgacagtaatatcagagcaatctattcactcaattacctgaccgaggctttcaaaatacattgttgaatgtatttggtttaagaggcacatgtcaagttaatgaacacagtaagtttccctacttctatttgtcgttgcctccatttctgatttagtatttaacaagtaacaactactttttgtttcgtgactaaaccttgcagtataaattaagatgtaattagctgggtgcggggcatgactgtagttccagctactagggagcctgaggcaggaggatccgttgagcccagtgagtataagtccagcctgggcaacatagtgagactcatcttgatttattattattatttttaatgtaattgattattcaaaaggattcattttaaagtttcaatattttagtagcctttttcaaaagagctttaggtccacagcaagattatgtggaaggtacagagatttcccgtctaccccgtgccacatgcctacagcttctcctgctatcaaagtgttttaccagaatgatacacttataacaattgctgaagctacattgacacgtgcttatcaaccaaagtctatcgtttacctttagatttgctctgggtgtacattctgagggttttgacaaatctatgacatgaacctatgattatagyatcatacagagtattttcacctccttaaaaatctgtgctctgcttctctatcccttccacctaacccttggcaaccactgatccttctatcgtctccatagtttagttttttccagaatgtcatatagttggaatcatacagtatacagcctcttcagattggcttctagtcacctggcaatgtgcatttaaatttcctctatgtcttttcatgggttgatagctcatttctttttagcactgaataatattttggttgtaccacagttcacccattcatatactaaaggacatcttagttgcttccaggttttagcaattatgaatcaagctgctataaacattcatgtgtaggtttttgtgtagacataagtttgcacctccttggggtaaaatgcaaagagtgatattgctgtatcagatggtaagagtatgtttaattttatcagaaactgccagactgtcttgcaaaatggttacacctgtttgtattcccttcagcaatacgttgaagttcttgttgcatcgcatcttggccagcatttgtttttgtcagtgtttcggattgtcaccattctagtaggttttgtagtgctgtctcattttaatttgcagttccgtcaatgtaatttgcaattctatcaatggcatacgatgtaaagtttcattttaacaatcatatatctgaagaatattttcccagatattcatgggtgaagatatttaggaatgcatgtattgaggggagaaaacttgggtatatatatataaagagattgncttatattttttaaactacccctcactaactagcagcgaataacatataattggaattgttgtttttaattgcctgaatttcaaatgttaagttttccaagcattcactattgattaggttggaaagtttacatgctattgagttgtatcaatagaaacgtatatttttttccttttcattttaaaacgtttaaaaatttttttggagtgaggtctcattctgtcacccaggctggagtgcagtgacgcaatcataggtcaccatacctctaattcctgacctcaag

SEQ ID NO: 92177 - DNA, 486 bp, Homo sapiens
ttgccctaaacattatttactactgtgctgaaataatccacaatttcccatttccattttctctaaggagaagtgtatagaagcatctgtaccccattgtgtgatgaggtaatcactgtggttcaccctgtggatgttaataaatttgtgtgccttttctactattaatctgctttttgtcaattgattttcagcaaaccttcagggkgaaggggacattttcccttggcccctacacctgcatgttgtttgcgcttcatttctccattatcgttcattttaataggagaaacagagaatggggcctgagttttgtccttctctttgatctgcttgtgcatttctcccttcagttatttttggtctttgtctaacattctgacctctcagactttgtttaaaggcagccttctgcgttgatctcactgggagctgcagactgaaactggcagagacaacaaaacaagaaaatttcaggccaatatc

SEQ ID NO: 92178 - DNA, 1674 bp, Homo sapiens
tttgttaaaacaagcacacaaagcaccgtcatttcattgcacaaagatcactactattcacgtttcttttgggtttgtttgtttgtttgtctgtttgtttttggggactgagtttcacttttgtcgcccaggctggagcacaatggtgcgatctcggctcactgcaacctccacctcctggttcaagagattctcctgcctcagcctcctgagtagttgggattacaggcgcctgccatcacgcccggctaatttttgattttcagtagagatggggtttcgccatgttggccagcctggcctcgtactcctgacttcagttgatcctcctgcctcgcctcccaaagtgttgggattacaggcgtgagccaccacacctggcctattcacatttcttatatgcccttccaggagcattttaaaacataaaatgaggtggcaaatgcaatctttttaaacttgccctttccccgatagtaggacctgacagtaataagcatgtgttattctcagtagaataatattgtacaactgagtcaggacctgaaccttgacttataccagttagtgttcaagttgataaagcttcggcttctgtggtatttaaaatgaaagagatttaaaactggaaaataggcatttataaaagtattgggtgagtgcaaaagtgagtgctagaatgggcctcccggaataactttcagaaaatcaccactgaactggctcaccagtggagttgctacctctacctcaatcaggaaggtgggaaatttagaaaacactggaacttcaggaatgcacctcactagcagcaatctagggaccaggaagctgatatcactacagtgaagtcacaccatatctgtcagatatatttcttttaaaaaaaaraaaaggaggttgccacccagtctctatccctataaagctgataactaaaatctacttcagaatacagcctattgccagggttgtgctgccaactaaaatggtagaagtattccaaaacctagtcttttacattatttctgctttccaaatctcccataaatgcatctaattggcagaaactaaagcctagctgcaaggaagcctggagatgtagcttttaggtttattattctgaagtagaggaaattgcactagaagggccctggaatgatgcagaggaagcaaatccacagtgtcctccacagatattttttcttcaaagtaaatgcatctgtactcattcaaccacactctcttgatccaccgatgatcaaaggtatagcttagacttaagatgcagcctgcataaagtcttagggcaatgtaaagttaattggcccacaaattgatcaaaattttaactttggaatcattaatgacactaaacatatttgcatactttaatattaacaacctagtttttaaatccatagatttaggcttgcagaattgaatgaagatcaattcacttaacaatattatctaggatatatttgaggaatcaggaaaatgactatcttcccagaagactagagagatggatcaatattatacctgttttcaaaaatgtgagaaggctggattccagaaatttgccactagaaagtttgatttctatccttgcaagaaataatggaatttaagtacagcttggttccatgagaagagggatgctgttaggcc

SEQ ID NO: 92179 - DNA, 2035 bp, Homo sapiens
attataatctataaagccatatttaagaaatgggaaaatttgagtctagagacagcaatcctattctagtcgtctctttctagatgaggacactgcggttctgaaatttctgacgagtattgctgagagcacagaatatgagcgttccaggaggttgtagggatgtaaggagatcttgctaacagacagctcagcgctgggccttgtgcacgtgagtgcttggccgagaasccaggatgaagagagaaaggccagggaggtgaacccccagaggaaggaggagagtgggtgggatggggctctggtgcccctagaggagaggacaacctatccaccagtgtccttggagaaagcacagagccacctggccctgggggagctgtgatggagctggctccctctgcagcggttttcctggtgacctggcagatggctgacactttccaggagtgggaaaaccccttaggaacccaagcggctggattctgaaacccccaaaatacaaggcaaaggggagcacttcattaaatgacttgcccatcatgcagggccgggaggtgaccgctccagagggaggagctgatgaaacacctcctgtaagggtctgggtacacaggggaggtgaaaataggaagggaggatcccccagcagcctcaggggtaaggtccgggatggaacctccctttgtgtgggaggatggagcaaaaataaacgggaagaacctggcgttctgcagaggaggaggcggggaaccggctgcagtctctgagtctgagtcatatccagttttcacagagtgaaatgtaattaggtggtgggtgcctaattaaacagcgactgggcgtccctggctaggtgtcagggagtaactgatggagtggaggcagcatgagattcccgggcaagctaaaggcctgcacttctctttctctgggacctggaatgttggagatgcctcaatgcatccagctcctcaaagcagtggctcttggccagaaagggggtaatttctgtccccaggagacacttggcaatgtctggagacatttttggtttcatcacaacttggtgtgctgttgatatctggtgggtggaggccaaggatgctgctcaatattcgccgacgcacgtgacagcccccacgctacaaagactgagccaggacaaaatgtcagcagcgcctaatccaagaaaccttttcttttcttttcttttttttttttttgagagagggtctcgctgttttccaggctggagtgcaatggcgtgatgtcgcctcacagcaacctttgcctcctgggtccaagggattctcctgcctcagcatcccgagtagctgggactacaagcgtgcaccatgatgcccggctaatttttgtatttttagtagagatgaggtttcatcatgttggccaggctggtctcgaactcctgacctcaagtgatccacctgcctcggcctcccaaagttctgggactacagatgtgagccaccatacgtcgctgagaaaccctatcttatttaaataaacctgcctatggtccaaccctccagcatctcacccctcaggtctttggagccatattgtgagagccaggaaggcccctggagaccaagtgtagttcaggaaacaagatttcctaaaccttgtgaccttgacccccacctctaacgctgccctccatgcgggggggctccacttctgtaacactcctggcctctctccatgctctcccgtacctcctccgagggggacaatatacagcagaggtcaccaaacctttcctgtaaaagccagatagtcagtattttaggctttgtgggccagagggtcaaagggtctctgtgacaactgctaaaccctattgttagaaagaaaaaaaagaagtcacagacaagacataaacaagtgggcgggtatgttccaataaaactttatttactaaaacaaatggagggcctggttaggtccattggctgtggtttgctgacccctagcatgtgcctagtggatttgaagggccgaagtgggc

SEQ ID NO: 92180 - DNA, 2035 bp, Homo sapiens
attataatctataaagccatatttaagaaatgggaaaatttgagtctagagacagcaatcctattctagtcgtctctttctagatgaggacactgcggttctgaaatttctgacgagtattgctgagagcacagaatatgagcgttccaggaggttgtagggatgtaaggagatcttgctaacagacagctcagcgctgggccttgtgcacgtgagtgcttggccgagaagccaggatgaagagagaaaggccagggaggtgaacccccagaggaaggaggagagtgggtgggatggggctctggtgcccctagaggagaggacaacctatccaccagtgtccttggagaaagcacagagccacctggccctgggggagctgtgatggagctggctccctctgcagcggttttcctggtgacctggcagatggctgacactttccaggagtgggaaaaccccttaggaacccaagcggctggattctgaaacccccaaaatacaaggcaaaggggagcacttcattaaatgacttgcccatcatgcagggccgggaggtgaccgctccagagggaggagctgatgaaacacctcctgtaagggtctgggtacacaggggaggtgaaaataggaagggaggatcccccagcagcctcaggggtaaggtccgggatggaacctccctttgtgtgggaggatggagcaaaaataaacgggaagaacctggcgttctgcagaggaggaggcggggaaccggctgcagtctctgagtctgagtcatatccagttttcacagagtgaaatgtaattaggtggtgggtgcctaattaaacagcgactgggcgtccctggctaggtgtcagggagtaactgatggagtggaggcagcatgagattcccgggcaagctaaaggcctgcrcttctctttctctgggacctggaatgttggagatgcctcaatgcatccagctcctcaaagcagtggctcttggccagaaagggggtaatttctgtccccaggagacacttggcaatgtctggagacatttttggtttcatcacaacttggtgtgctgttgatatctggtgggtggaggccaaggatgctgctcaatattcgccgacgcacgtgacagcccccacgctacaaagactgagccaggacaaaatgtcagcagcgcctaatccaagaaaccttttcttttcttttcttttttttttttttgagagagggtctcgctgttttccaggctggagtgcaatggcgtgatgtcgcctcacagcaacctttgcctcctgggtccaagggattctcctgcctcagcatcccgagtagctgggactacaagcgtgcaccatgatgcccggctaatttttgtatttttagtagagatgaggtttcatcatgttggccaggctggtctcgaactcctgacctcaagtgatccacctgcctcggcctcccaaagttctgggactacagatgtgagccaccatacgtcgctgagaaaccctatcttatttaaataaacctgcctatggtccaaccctccagcatctcacccctcaggtctttggagccatattgtgagagccaggaaggcccctggagaccaagtgtagttcaggaaacaagatttcctaaaccttgtgaccttgacccccacctctaacgctgccctccatgcgggggggctccacttctgtaacactcctggcctctctccatgctctcccgtacctcctccgagggggacaatatacagcagaggtcaccaaacctttcctgtaaaagccagatagtcagtattttaggctttgtgggccagagggtcaaagggtctctgtgacaactgctaaaccctattgttagaaagaaaaaaaagaagtcacagacaagacataaacaagtgggcgggtatgttccaataaaactttatttactaaaacaaatggagggcctggttaggtccattggctgtggtttgctgacccctagcatgtgcctagtggatttgaagggccgaagtgggc

SEQ ID NO: 92181 - DNA, 1000 bp, Homo sapiens
gctgcgaaactccctcccaggtggagagcttctggccacccttacaacctagttccacccacaaaggcaccagtggctgccagctgacttcccggtagatgaagtactcgagtgagatatgcggacccccccagcactcaattcctcccctgtgtgccattcatgccaggcccccttttaaaaagcaactcctttctgctcctaaaagcaaagcagtacccttaaggcaggaagactgtacttcttcccctaagctagctttggaataaaaaatcactttctktataccagatctcgctcttattacctgcgtttttgttacacccctacagagccccgacactttctactcgtggcaaacaatactgtcagtgatgtaaaagattccttttgaaacaactgaagtccagagtgaaacaatctagggtaaaatgttaacagaatcagtgtacctgggcatggtacacctcatgatggtggcactcgaaattgctgaatttggggtcccactgccctagggaaggtatgcatgcctgtatccattcggcaagtgttgattaaacacctacggtatgcagggagcttcccaggcactggaatcacaggagtgaacaagaccaccaggatcccttctgccctcgtgcagttgatgttctagtggggaatgatgacaaatgcgatgaagaaaataaaggagaatgataggacagagtggccccacgcagtgctgtgagaggcctcgctgggctgaagagcaagagtcagaggggataggaggaaaactgttccaggcagagggaattggcaggtacaaagtccctgaagccagtacaaacgtgggggcatcgcagaacccaagggggacagtgagggagggaggaaatgacatcacggggaagaggggacagatcccatagggtcctggagactgtcatgaggagtggcagggttcgtaccgctcctggaacattgcatgccagattttgccttttgtgcattt

SEQ ID NO: 92182 - DNA, 682 bp, Homo sapiens
cgagatgactggcacccaccattctcttcccagcatccctggagcttccaggcagccggtactcgggatggggtgagaagcaaggcaccgggaagggcccgcatacagccgcagcagcagcaacaaccgcgcagccttcggggaatgcctcctgggggtcagaagcctgagggctcctgtccttggtgatccagcttccttccaaagggccccgaggttctcgagactcaaggacccggacgggagcccctcccagcctttgcgattgtggcggccacagyttcccctgtggaggtggtcctcacaggggtagatgggcctgagacgtgcacagaatccgctcccaggagggcaaaggccagcgggaccccagatgccgcccttctgttgtcctctcacaacaggaacatcgtggctcgaaatctggccctgggtgtaaaccactccagcaggctcggggtgtagactgatctcagccgcccacccttgctgcacggacacccccagccccgcagatgccctgcaacagacggaaacgtcctaacaattccaaatgtctcacgtctctgggagtgcccacaacgaacatccattccctgcatgcctttggccaaccctaatggctacaggtgcccggtccagctatgtcaatgaggacacactggggtcacctcctctcctt

SEQ ID NO: 92183 - DNA, 532 bp, Homo sapiens
ccagtctgggcccacgggctgtggtttagtgcatggactttgaagccagatggcctgggttcgaattctgctttatcacttactaggctatgtggcccggttacattacttagcctctctgggcctcagttttctcatctgacagttgggaatagwcacagtatatacctcacagactatgatgagaaatgcatgggttaatttgtgtaaaatgattcaaacagtatctggtacatggtatgtctaaatgagtgttagtcattattcctcaagaaccatatgcctacattttctttgtgaaaattaaaatagtacaaaggacagtgaagtctcatttgattagattactccttaccacccccccacccccataaccttggctcttctgtcccctactgggaataacctttccagtgttttgttaggtacattatagtatcactttatgcatctttttatattattaatcacatcatactgtacatattcatttatctatctgacaaatacagcagtgaacaaaacaaatgag

SEQ ID NO: 92184 - DNA, 713 bp, Homo sapiens
ttgacatatttcctcagagcaaaactcttctgcccttacaacactatttctcacccacgtgcaccagttccttggttccaaagcaagagagtgctcagggttcctgtgaggggtgggtattgggtgtgaaggcatacagggaggctggcaaaggcagttcctgaaactgatggtccttggaaactatatacgtttctcatgttgccattttcacattaaaatcctaaaagtagaaagaaattcactcaggtttcttataattatgagttttcataatcaaaattatgatataagttaacttagtgtgtaggtacttttaaaataaaaggaaaagtgacctgtatgttatcattatgttgttattatgaaacagagtttgtatagttcttagaagaatgcaaaacactttcctacacttgaactcattcaagtctaccaatgagatagcaaakacaaggatgataatgatggtgaggacaatgcttatcttagaaaaagatactgagatccagagaagttcacaattggtaaatgtcagagtcataactgttgtgacttttaagaccattcttccccacttcacaccattgccttataccaacactttatagaataattcctattgtggagttctgtgggcaggctaagcttcttgtctacttaaatagtaacagtaaagctgaatcagttgcactggaagcctggatgtaata

SEQ ID NO: 92185 - DNA, 713 bp, Homo sapiens
ttgacatatttcctcagagcaaaactcttctgcccttacaacactatttctcacccacgtgcaccagttccttggttccaaagcaagagagtgctcagggttcctgtgaggggtgggtattgggtgtgaaggcatacagggaggctggcaaaggcagttcctgaaactgatggtccttggaaactatatacgtttctcatgttgccattttcacattaaaatcctaaaagtagaaagaaattcactcaggtttcttataattatgagttttcataatcaaaattatgatataagttaacttagtgtgtaggtacttttaaaataaaaggaaaagtgacctgtatgttatcattatgttgttattatgaaacagagtttgtatagttcttagaagaatgcaaaacactttcctacacttgaactcattcaagtctaccaatgagatagcaaatacaaggatgataatgatggtgaggacaatgcttatcttagaaaaagatactgagatccagagaagttcacaattggtaaatgtcagagtcataactgttgtgacttttaagaccattcttccccacttcacaccattgccttataccaacaytttatagaataattcctattgtggagttctgtgggcaggctaagcttcttgtctacttaaatagtaacagtaaagctgaatcagttgcactggaagcctggatgtaata

SEQ ID NO: 92186 - DNA, 666 bp, Homo sapiens
agaacaaggcaccaaaatgatcaaaggaatgacttgtgcattaagatcaaaagacctggcagtgcaggtcaagmattggtggagaggggatacctggtacttgataagagtctacaaatatttaaaaggtgttaacagggaggaaggcaagcccaattttgcctgcttggaggtgacataatgtgaaacagtaaaggtaacaccaaagaatgaacaatgtagccagaagatcaggatctatttccagcaaagaactactgaggtttctgcaaaattacacaatgtgaagcattagatccactgtacccctagcagaaagtaaccttgaacaatttctatttgcagatcgctgtgtcttacgtctttcttgcctctattagcccatcattcagtacttaacaactcacctccttctacccgttacccaaattctttaacatctttaggggtcccatcaatgacagtatgcctactttttggaagaatatgatttatgtagcaaagctaagatagaaatttgcaaacagaagccgggcgtggtggcttacacctgtaatcccagcacttcgggaggctgaggcgggcagatcatgaggtcaggagatcgagaccatcctggctaagacagtgaaaccccgtctctactaaaaaatacaaaaaattagc

SEQ ID NO: 92187 - DNA, 616 bp, Homo sapiens
ctatttggtccccagcactgagctagatagaagtgatacaaagatgaataggacatggctcctgccttcaaagagctcagggtctaatgtgcaaagtggcaacacaaaccaatttatagggctgtcctgtaggtgtgatggtgtagcaaggttaagtgtatgatagagcattcaaaaaacagaggaaagaggcaccttaccctggtgaggttasggaaagcttccagatcagtctttttttttcggttgttaagcatccttctgtcctacttctctccatatatatacaaatacataataaatattcctatagagtttttaatgggtttatatcatacatattgtcatgcaacttgcctttttaaaagactcaaaaaaatacacatccttcctacgtaaccagttcattttttaaaatagctacacagtatgtatttctgcaatttaactgttctcggcttttagacaattaggttgtttctaatttttattaattgctaacgtaatctggaagacagcctctcctctcattttggtcccagtggggctatctgcctgtcccccagggaacatggggatgggtcattgaggtcgtccatttagccgctggggtctg

SEQ ID NO: 92188 - DNA, 616 bp, Homo sapiens
ctatttggtccccagcactgagctagatagaagtgatacaaagatgaataggacatggctcctgccttcaaagagctcagggtctaatgtgcaaagtggcaacacaaaccaatttatagggctgtcctgtaggtgtgatggtgtagcaaggttaagtgtatgatagagcattcaaaaaacagaggaaagaggcaccttaccctggtgaggttagggaaagcttccagatcagyctttttttttcggttgttaagcatccttctgtcctacttctctccatatatatacaaatacataataaatattcctatagagtttttaatgggtttatatcatacatattgtcatgcaacttgcctttttaaaagactcaaaaaaatacacatccttcctacgtaaccagttcattttttaaaatagctacacagtatgtatttctgcaatttaactgttctcggcttttagacaattaggttgtttctaatttttattaattgctaacgtaatctggaagacagcctctcctctcattttggtcccagtggggctatctgcctgtcccccagggaacatggggatgggtcattgaggtcgtccatttagccgctggggtctg

SEQ ID NO: 92189 - DNA, 616 bp, Homo sapiens
ctatttggtccccagcactgagctagatagaagtgatacaaagatgaataggacatggctcctgccttcaaagagctcagggtctaatgtgcaaagtggcaacacaaaccaatttatagggctgtcctgtaggtgtgatggtgtagcaaggttaagtgtatgatagagcattcaaaaaacagaggaaagaggcaccttaccctggtgaggttagggaaagcttccagatcagtctttttttttcggttgttaagcatccttctktcctacttctctccatatatatacaaatacataataaatattcctatagagtttttaatgggtttatatcatacatattgtcatgcaacttgcctttttaaaagactcaaaaaaatacacatccttcctacgtaaccagttcattttttaaaatagctacacagtatgtatttctgcaatttaactgttctcggcttttagacaattaggttgtttctaatttttattaattgctaacgtaatctggaagacagcctctcctctcattttggtcccagtggggctatctgcctgtcccccagggaacatggggatgggtcattgaggtcgtccatttagccgctggggtctg

SEQ ID NO: 92190 - DNA, 616 bp, Homo sapiens
ctatttggtccccagcactgagctagatagaagtgatacaaagatgaataggacatggctcctgccttcaaagagctcagggtctaatgtgcaaagtggcaacacaaaccaatttatagggctgtcctgtaggtgtgatggtgtagcaaggttaagtgtatgatagagcattcaaaaaacagaggaaagaggcaccttaccctggtgaggttagggaaagcttccagatcagtctttttttttcggttgttaagcatccttctgtcctacttctctccatatatatacaaatayataataaatattcctatagagtttttaatgggtttatatcatacatattgtcatgcaacttgcctttttaaaagactcaaaaaaatacacatccttcctacgtaaccagttcattttttaaaatagctacacagtatgtatttctgcaatttaactgttctcggcttttagacaattaggttgtttctaatttttattaattgctaacgtaatctggaagacagcctctcctctcattttggtcccagtggggctatctgcctgtcccccagggaacatggggatgggtcattgaggtcgtccatttagccgctggggtctg

SEQ ID NO: 92191 - DNA, 616 bp, Homo sapiens
ctatttggtccccagcactgagctagatagaagtgatacaaagatgaataggacatggctcctgccttcaaagagctcagggtctaatgtgcaaagtggcaacacaaaccaatttatagggctgtcctgtaggtgtgatggtgtagcaaggttaagtgtatgatagagcattcaaaaaacagaggaaagaggcaccttaccctggtgaggttagggaaagcttccagatcagtctttttttttcggttgttaagcatccttctgtcctacttctctccatatatatacaaatacataataaatattcctatagagtttttaatgggtttatatcatacatattgtcatgcaacttgcctttttaaaagactcaaaaaaatacacatccttcctacgtaaccagttcattttttaaaatagctacacagtatgtatttctgcaatttaactgttctcggcttttagacaattaggttgtttctaatttttattaattgctaacgtaatctggaagacagcctctcctctcattttggtcccagtggggctatctgcctgtcccccagggaacatggggatgggtcattgaggtcgtccmtttagccgctggggtctg

SEQ ID NO: 92192 - DNA, 673 bp, Homo sapiens
cccacctgcacccctcagatggcagggcctggacgtccccatccccaccctgacccggtcagtaacagccacaggccagcagcccccagcaaccgctccctccctgaactgccggggacaggaggtaccatagtctcttctaggcgagagctgctggagccttctttattcttgtgctagaagcccagggtggggagaggagcctgagaacagcccagtgtgggcatccaccttcctgcccactttggaggtctgaatcacctccggccactctcccaatccccaggagccaagaggcttcctggagcaagccgcacctgatctccaccatgggtaggagttcaaggccaggycaacggggactccacagaggggcctgtgggttagcagcagctgccagtgtccagatggcctcaggggtgggggttggacaatctggaggtcagcagggaattcagcatgaggagacagcccttagggttctggcccagcagccccaggtgctggctctgcactgagtcatgaagtttgtgggccaggggcgttggcctctctctagctggaagtgacttccatcactgctgtcattagcctcccctgcatcaacctgtccctggggtgggagcacagtgggcacagggaccgtcaagcctcagttttccctgctgtaaaa

SEQ ID NO: 92193 - DNA, 640 bp, Homo sapiens
attctgaagaaaaaggagggcatgccagcaatttttgttgctgcaatggaaatatgggctacactgatctgtccctaccaaaaccaagcaaagcaggtcctgtgacctccttgaacaaagggtgaactcacgtctcattaaagtaactggaagccctcatgcttgaccctggcctcactgtaatgtcacacaagaaacttaacaggatctgtggggagggaacaggtgactgtttctcttcaaactgccatgtgatcctactggaagactgggctgagagtcacttagctaaacattgcctctcaagcttcaatgtgcacataaatttggtattctaggcctcactgtaagtaacaaaattctgcaggtttgaaaagggtccattaatcagctttttatagccaagtctcccattaatgctcatgctcctcctagacccgttatagtaccactcagctagagaaagcagacacagcacgcagagtcccttaycccaacacccttatcacaacacaaatacttttcatccgaagacaagaccagcaatcaacatcctgaaacgtggcattatctgcaagccctttaaaggttacagaggctggagatggtggcaatgtctgagtaagtctgcatttgaaaa

SEQ ID NO: 92194 - DNA, 1117 bp, Homo sapiens
ttaaatttttaaaaaccaaactcctgtccaggcgcagtggctcacgcctgtaatcccagcactttgggaagccgaggcaggcggatcacctgaggtcgggcgttcgagaccaacctgaccaacatggagaaaccccatctctactaacaacacaaaattggctggtcatggtggtgcatgcctgtaatcccagctgcttgggaggctgaagcaggagaatcgcttgaacctgggaggcagaggttgcagtgagctgagatggcaccattgcactccagcctgggcaacaagagtgaaactccatctcaaaaacaaaacaaaacaaaacaaaacaaaactccttttgttgctttacaccttctctcacatggtatgatatactgataacacctacrctttttttggaagtgttttcatatacttcctttggaccaataaaaatgaaccttctgagatgtggaggatatgggctattaccccaattttaaaggaaaaaaaaagttcagtcagaagttgaatgtccccatgaggagtaacagaggtcattcctgattaatctaatttaatctttataattcaaggatcctcccagccaaaacaatctcaggtatccgattttatgcaattcattttgtgagtaacatcacagaaggattgagtaggatactggtttaaccatgggcataacattttttttttcagtattgaagagtaaagctaaagtttgttcactaagatgtttaattcaagccccagtaacagagatacacaactgccaaagtcagctcttaggggtgttgtaccaggaggtggtgtaaacagatctggacccagagaattagaaagaaaaggcagaatgaagttcacaacagcagctgctacatttaaaaatgttagagctgttttacaattattttcacttccctagctttctgagcctgtaagtctctcttccctatttcaacattcatcctaaagagttttaaattagtatgtgaaaccaaaaggtcagagtgttttagtctgatacaaatcatccctaactaaaatgattccagtatgtgcttccatttcattaaaactgttctgtgaaaatttggatatcctcaggaatgca

SEQ ID NO: 92195 - DNA, 1117 bp, Homo sapiens
ttaaatttttaaaaaccaaactcctgtccaggcgcagtggctcacgcctgtaatcccagcactttgggaagccgaggcaggcggatcacctgaggtcgggcgttcgagaccaacctgaccaacatggagaaaccccatctctactaacaacacaaaattggctggtcatggtggtgcatgcctgtaatcccagctgcttgggaggctgaagcaggagaatcgcttgaacctgggaggcagaggttgcagtgagctgagatggcaccattgcactccagcctgggcaacaagagtgaaactccatctcaaaaacaaaacaaaacaaaacaaaacaaaactccttttgttgctttacaccttctctcacatggtatgatatactgataacacctacactttttttggaagtgttttcatatacttcctttggaccaataaaaatgaaccttctgagatgtggaggatatgggctattaccccaattttaaaggaaaaaaaaagttcagtcagaagttgaatgtccccatraggagtaacagaggtcattcctgattaatctaatttaatctttataattcaaggatcctcccagccaaaacaatctcaggtatccgattttatgcaattcattttgtgagtaacatcacagaaggattgagtaggatactggtttaaccatgggcataacattttttttttcagtattgaagagtaaagctaaagtttgttcactaagatgtttaattcaagccccagtaacagagatacacaactgccaaagtcagctcttaggggtgttgtaccaggaggtggtgtaaacagatctggacccagagaattagaaagaaaaggcagaatgaagttcacaacagcagctgctacatttaaaaatgttagagctgttttacaattattttcacttccctagctttctgagcctgtaagtctctcttccctatttcaacattcatcctaaagagttttaaattagtatgtgaaaccaaaaggtcagagtgttttagtctgatacaaatcatccctaactaaaatgattccagtatgtgcttccatttcattaaaactgttctgtgaaaatttggatatcctcaggaatgca

SEQ ID NO: 92196 - DNA, 1070 bp, Homo sapiens
ttttatagtgatttaataattccatttaattaaataatctttactgattgaagatgatacagtgctccggaaacattacactagcattatgttttgtactgcatctatcttggctgattgtgatcctgatgacaacgttgtgacttaggatttttatgtattcccactttgcctatgaactagtctaaacatctagagtaaacgcaagcttgattcctttggacaatcctatatagggcgatttttttttttttgagacagtctggctctgtcgcccaggctggagtgcaatggcatgatcttggctcattgcaacctctgcttcctcggttcaagcaattcccctgcctcattcagcccccgagtagctaggatcacaggtgtgtgccaccacacccagctaattttgtatttttagtagagacagggtttcaccatgttggccaggctggtcttgaactcctgacytcaagtgatcctcccaccttagcttcccaagctgctgggattacaggggtgttccaccacgcccggtctacagggtgattttgaagatcaaatgtaactggtaaagtacacatatgagggattcgatcctaatttgtaatcgtagagtttgaggtgagagagatagagaaagagaaagagagagaaagagagagagagagattggctttctacagatcaggaggtcattgtcagggaggtgagcttctcagattctgtttaagatccattagttcttgctgaggaatgactcgctctgcttttagaggtaaaattgtggcagctactgaaaatgtttcccatatatagaaatcaactggactttgttagcgtacattgagttctctgtgttccagttgctttctattggttattcatgtccactgggtaccatctgtctcatacaggacagagaactgatatatgaagtgctgaattgatttgcttcaactaccttgtaaacgatggagctgggatctgaacccaggtttggctgacccagttactaaacttttatcaccaaatcatgctgcatcatttacctatatgaccaggagagacat

SEQ ID NO: 92197 - DNA, 1070 bp, Homo sapiens
ttttatagtgatttaataattccatttaattaaataatctttactgattgaagatgatacagtgctccggaaacattacactagcattatgttttgtactgcatctatcttggctgattgtgatcctgatgacaacgttgtgacttaggatttttatgtattcccactttgcctatgaactagtctaaacatctagagtaaacgcaagcttgattcctttggacaatcctatatagggcgatttttttttttttgagacagtctggctctgtcgcccaggctggagtgcaatggcatgatcttggctcattgcaacctctgcttcctcggttcaagcaattcccctgcctcattcagcccccgagtagctaggatcacaggtgtgtgccaccacacccagctaattttgtatttttagtagagacagggtttcaccatgttggccaggctggtcttgaactcctgacctcaagtgatcctcccaccttagcttcccaagctgctgggattacaggggtgwtccaccacgcccggtctacagggtgattttgaagatcaaatgtaactggtaaagtacacatatgagggattcgatcctaatttgtaatcgtagagtttgaggtgagagagatagagaaagagaaagagagagaaagagagagagagagattggctttctacagatcaggaggtcattgtcagggaggtgagcttctcagattctgtttaagatccattagttcttgctgaggaatgactcgctctgcttttagaggtaaaattgtggcagctactgaaaatgtttcccatatatagaaatcaactggactttgttagcgtacattgagttctctgtgttccagttgctttctattggttattcatgtccactgggtaccatctgtctcatacaggacagagaactgatatatgaagtgctgaattgatttgcttcaactaccttgtaaacgatggagctgggatctgaacccaggtttggctgacccagttactaaacttttatcaccaaatcatgctgcatcatttacctatatgaccaggagagacat

SEQ ID NO: 92198 - DNA, 945 bp, Homo sapiens
acaattgaaaatttacaagaaaattaaaggagtgtaaggaaagttaatctttaaaatgatattcatctaagttatacttactgaattatatgtaatcaaaacaaattactttgtcttcaaatgaatgataactacaaaagcatattagagttttgcgttaaatttgtgtaagtccaaaccaggatggggtaaaaaaggtcttacataaatagaacattatatatgaagcaaaaactacattttgagcatcagttcattgaatatggcacaactcccaaattcttcttatgatatccacctttgtgtacatatatattaaaaatttaggccrggcatggtggctcatgcttgtaatcccaacactttgggaggccaaggcaggcagatcacctgaggtcgggagtttgagaccagcctgcccaacatggaaaaaccccgtctctactaaaaatacaaaaatcagccgggcatggaggcacatgcccgtagtcccagctacttgggaggctgaggcgggagaattgctcgaaaccaggaggcagagactgcggtgagctaagatcataccattgcactccagcctgggcaacaagagtgaaactgcatctcagaaaaatgaataaataaataaataaaaaataaaaatttagcaacaatcaatttttattgaggtagaatttgcatgcttaaagacaagaacctggaccagatattgtggaggtgtttttttcctcttaaatctagtgtgctttgatttcttgcaatatgattacattatttaaaaaggcaacacaagtttagatttcttcaaatggaaataaattgaggtaatacttgttgtggttgctattgctttattgctgtagctttattaaataaattttaaaaaagcttaagtttgaaggcttcaaatgcaggatcctgagctatgaactgaatgtagaa

SEQ ID NO: 92199 - DNA, 945 bp, Homo sapiens
acaattgaaaatttacaagaaaattaaaggagtgtaaggaaagttaatctttaaaatgatattcatctaagttatacttactgaattatatgtaatcaaaacaaattactttgtcttcaaatgaatgataactacaaaagcatattagagttttgcgttaaatttgtgtaagtccaaaccaggatggggtaaaaaaggtcttacataaatagaacattatatatgaagcaaaaactacattttgagcatcagttcattgaatatggcacaactcccaaattcttcttatgatatccacctttgtgtacatatatattaaaaatttaggccgggcatggtggctcatgcttgtaatcccaacactttgggaggccaaggcaggcagatcacctgaggtcgggagtttgagaccagcctgcccaacatggaaaaaccccgtctctactaaaaatacaaaaatcagccgggcatggwggcacatgcccgtagtcccagctacttgggaggctgaggcgggagaattgctcgaaaccaggaggcagagactgcggtgagctaagatcataccattgcactccagcctgggcaacaagagtgaaactgcatctcagaaaaatgaataaataaataaataaaaaataaaaatttagcaacaatcaatttttattgaggtagaatttgcatgcttaaagacaagaacctggaccagatattgtggaggtgtttttttcctcttaaatctagtgtgctttgatttcttgcaatatgattacattatttaaaaaggcaacacaagtttagatttcttcaaatggaaataaattgaggtaatacttgttgtggttgctattgctttattgctgtagctttattaaataaattttaaaaaagcttaagtttgaaggcttcaaatgcaggatcctgagctatgaactgaatgtagaa

SEQ ID NO: 92200 - DNA, 639 bp, Homo sapiens
cctctcagtgcctcaagaactgctgcagctcccgcaaaccctctgcctgcaacaagggtgcctgcgaagtgatggagacactgacagtgcaggaagaggcaaacccagggacagaggggtgcaggactcgggccctggcacacaaggaggtagctggtggtcgargcaaagaccacaatcacagggaaaaaaggcttgttcctacacacagaaaattaaactgtccaggcagtaataagaaacatagggtcttcctcctgttcttggtgtgaggatggtctttcccaacacagagccctgaggggcagcctgggcgggcatctgggcccccagagtttgggtccttgggggctgtccagaggccaggggcaggccaacattcctgggtgcactgagtgagcagcagtgatgactcttgaggcctggggcgtgggaactgccactgagggaccttcccagcagcccatagaaggccctggaggaaaacaacccacttacaacgcaccaaggagaatgcccaaaagcccaggataaacccagtgagagagcagaacttgcacagtcagagctcaggcccggcattcaactatttctggttgctcaggtgttgaccaaggccttcagcagctgggcctcctg

SEQ ID NO: 92201 - DNA, 639 bp, Homo sapiens
cctctcagtgcctcaagaactgctgcagctcccgcaaaccctctgcctgcaacaagggtgcctgcgaagtgatggagacactgacagtgcaggaagaggcaaacccagggacagaggggtgcaggactcgggccctggcacacaaggaggtagctggtggtcgaagcaaagaccacaatcacagggaaaaaaggcttgttcctacacacagaaaattaaactgtccaggcagtaataagaaacayagggtcttcctcctgttcttggtgtgaggatggtctttcccaacacagagccctgaggggcagcctgggcgggcatctgggcccccagagtttgggtccttgggggctgtccagaggccaggggcaggccaacattcctgggtgcactgagtgagcagcagtgatgactcttgaggcctggggcgtgggaactgccactgagggaccttcccagcagcccatagaaggccctggaggaaaacaacccacttacaacgcaccaaggagaatgcccaaaagcccaggataaacccagtgagagagcagaacttgcacagtcagagctcaggcccggcattcaactatttctggttgctcaggtgttgaccaaggccttcagcagctgggcctcctg

SEQ ID NO: 92202 - DNA, 1495 bp, Homo sapiens
  misc_feature (1)...(1495): n = A,T,C or G
caggtaagaggcacagaggaaactgggagaggcagcgaaagcacttcacgcctcagatcaccaaagaatgctcccaccagcaccggtgggggttccntagcagacaactgcgttttagcaacccaatggggggggggagaggggggggggggggggnnnnnnnnnnnnnnnnnnnnnnnnnnnnnnnnnnnnnnnnnnnnnnnnnnnnnnnnnnnnnnnnnnnnnnnnnnnnnnnnnnnnnnnnnnnnnnnnnnnntccccacccctctrccatgaaacagctggaagttactgcccatttctagctatttctgagtaacccgccccttaattagcatgtcattaaaagtgaattataaaaatgactacaagccacacctaggctgctactctgggagcacaacccacagagggctccctgccctgcaggagcggacgcagggctgtaacaccgccaatgtctccatagagctgctttattccaccacaggcttgcttttggattccttcctgagcgacgccaagaacctgcccttcctcagtgtgactcttgcctaaaatctatccctggttttctcttttcctaagcatgccctgacttgttctttcatctcctctgaacttgcaattgctcctcagtgactctattctgcagatccagaaaactcaaccttaatcttcccagagccctgttgtctccaatattggaatatctagccttgctttctcagacgcctagattacaggcctctctcttgaacacctattggtaaggtatccggggatcctttaaatacacgatgattggcagggtttacataggggaaatcagtgtctgacaattcgccttccaggatatggattgtcattccctctctttgtgggccccagtctcctatacataaaagtagagattgtaatagtcatttgacttgcagatacctcaccccgaacccacctactataatgtaaaagccaagaatgcaaaccctttcctcaccccgtgaaggtaaagtcctcagagccaaggagagaaggctcagggatggtacctaggtgtttccaacactaaccatgcattgtagtttttagtgttcaagtttaagcttcttatgttaaagttaccccagctttaattatattgtaacaagatttatttttgtaattccatttttggattcttgatttcttggtaaagaaatacagttatttttgtataccaatcttatatagtgttacattccaaaatttgttcatgagtcctaacactttttagtaaatttcttatgattttctaaatgcaagatcatgtcatctgtacataaagataactgtacttcttcctttccaatctagatgccgtttatttatttacattgccaagttgtcccagctaccactgttatcaagtaaaagggtctcactacccaaagctctagaagccagtaacatgacactaagtttttgagaaaagaaaaactttaaagtcaaacca

SEQ ID NO: 92203 - DNA, 552 bp, Homo sapiens
agaccgagtgagcctcgcaaagccgttgggcgcgcgcctgcaccgcagttgctgcctggctcccggaagcccttccctggtggcgcgcgccggcaggtggggctgcagctctgggctggcgccgatgagctcgcaggtcctcttgggatcgcccgggcggccccaggatcgcaggagcgccgccagcctggcctgagaaggagggcctgtctggccttgcagcccgccccgctcctcctcggaagggagatagggtgctggcaagggcactccgctgccacctgggtggcttcgcagatggcctggcttcacgctgaggctctggccctggagtctgtgtggctagtgtcaggtagctgtagaggcatggaggcagagtcaggggctgctctttcacccaccagccctcactgctgccagtgccccacgcacagtttgcagctgcagatctggcactggcgtgggacggcggagcttcccttggatggcctcagggtcrcagagcgcacagcccacctggcctcaagttccgctcttcttgggcatctctct

SEQ ID NO: 92204 - DNA, 552 bp, Homo sapiens
agaccgagtgagcctcgcaaagccgttgggcgcgcgcctgcaccgcagttgctgcctggctcccggaagcccttccctggtggcgcgcgccggcaggtggggctgcagctctgggctggcgccgatgagctcgcaggtcctcttgggatcgcccgggcggccccaggatcgcaggagcgccgccagcctggcctgagaaggagggcctgtctggccttgcagcccgccccgctcctcctcggaagggagatagggtgctggcaagggcactccgctgccacctgggtggcttcgcagatggcctggcttcacgctgaggctctggccctggagtctgtgtggctagtgtcaggtagctgtagaggcatggaggcagagtcaggggctgctctttcacccaccagccctcactgctgccagtgccccacgcacagtttgcagctgcagatctggcactggcgtgggacggcggagcttcccttggatggcctcagggtcgcagagcgcacarcccacctggcctcaagttccgctcttcttgggcatctctct

SEQ ID NO: 92205 - DNA, 1087 bp, Homo sapiens
taataccatgctgagtgatgctggaaaagtgagtcttcagtaatgccctcatgaaatacagtctcactacactgaagtattttctttttaaccctttctttcttttctgctgtgaatatgtgccttctaagaggtgaacaacggaaaaaactgaaaaagatacttcatctaattcagtaactagtttttgtatcttctaaaaatttttatctccagaaagctctaattttcattcctttacaagctttatttctctctcctttccaacaccagactttgctctgtttgttttctatatcttttttagagatgcctacaatagaaaaaatctatgacatattcaatacatctgaaaagtttacattgccatagataagaatgaattatctgtttataaagaaaaaacaataaaaatatgaaccaagaaagcacagaaggtagtaaccacatttagatgtttatcatggaatcatctttataatccatctgttacaattccacacagcaaattacaagtaattgtgaagtttcccctcattttataggtttggtcttataaggcatacaacacaaattttaattacttttctttttggtatttggatcttaatttggtcaagtggccactgggtagatgatggagcctcttgagacatacagtcttcttctagctttgttgatgtgaatattactgtgyatttttcattcacttattattttacaaggcatgcttcattaaaaatatatcagcatctcattgacaaatcacaaaatttaaaaggcaccagaaaaaaacaatttatttaaaacattcctgtgtaaaagtagtcaccactcttactattcttcaaatatttttattatatttaaaaacaagcctagttttatctcgagtgtctgaccttgatgatattgtacattttaaacttagaaaaattgaactctattggaaatttcctacagatcagcttttctagatgccaagcgccttgtttcagccatggtgatgacagcaaattgggttctcagggattctggcctctggcatcatctcagttatttataattgaagttgggtctgatgaga

SEQ ID NO: 92206 - DNA, 1087 bp, Homo sapiens
taataccatgctgagtgatgctggaaaagtgagtcttcagtaatgccctcatgaaatacagtctcactacactgaagtattttctttttaaccctttctttcttttctgctgtgaatatgtgccttctaagaggtgaacaacggaaaaaactgaaaaagatacttcatctaattcagtaactagtttttgtatcttctaaaaatttttatctccagaaagctctaattttcattcctttacaagctttatttctctctcctttccaacaccagactttgctctgtttgttttctatatcttttttagagatgcctacaatagaaaaaatctatgacatattcaatacatctgaaaagtttacattgccatagataagaatgaattatctgtttataaagaaaaaacaataaaaatatgaaccaagaaagcacagaaggtagtaaccacatttagatgtttatcatggaatcatctttataatccatctgttacaattccacacagcaaattacaagtaattgtgaagtttcccctcattttataggtttggtcttataaggcatacaacacaaattttaattacttttctttttggtatttggatcttaatttggtcaagtggccactgggtagatgatggagcctcttgagacatacagtcttcttctagctttgttgatgtgaatattactgtgtatttttcattcacttattattttacaaggcatgcttcattaaaaatatatcagcatctcattgacaaatcacaaaatttaaaaggcaccagaaaaaaacaatttatttaaaacattcctgtgtaaaagtagtcaccactcttactattcttcaaatatttttattatatttaaaaacaagcctagttttatctcgagtgtctgaccttgatgatattgtacattttaaacttagaaaaattgaactctattggaaatttcctacagatcagcttttctagatgccaagcgccttgtttcagccatggtgatgacagcaaattgggttctcagggattctggcctctggcatcatctcagttrtttataattgaagttgggtctgatgaga

SEQ ID NO: 92207 - DNA, 662 bp, Homo sapiens
tgcatttgtagcacacctgggtcagaggtatcctccaggggaaggatcagacctgcttgaaaacatgtcgttggaattgggaggcttctagtagctataacataagcactgatgtttactgttccctgccctccactttgatcactctgggaaacgtttttttttaaaaaatcaattgtattcaaacataatttacataaaataaatattcctattttaaagtgcacagtttgctgagttttgccagatgtaaccatccagttgaataaaattgattaaactgatctttcaaataataaattaaccttgcaatcttgctagaaatttaatttgttcagtttattatccattctatgtactgctacattcaattggttattaagttttaaggacttttgagtctatgtttatgaggaataaacatcaaagttgtataatgcctttgtctcgatttggaatcagggcaatactgggttcataaaataagataggaattgtccctttagattctttttttttttttttttttttttttttgagacggagattcactcttgttgccaggctggagtgcaatggcacaatttcggctctccgcaaccwctgcctcccagattcaagctattctcctgcctctggcttccgaggagctgggattacag

SEQ ID NO: 92208 - DNA, 662 bp, Homo sapiens
tgcatttgtagcacacctgggtcagaggtatcctccaggggaaggatcagacctgcttgaaaacatgtcgttggaattgggaggcttctagtagctataacataagcactgatgtttactgttccctgccctccactttgatcactctgggaaacgtttttttttaaaaaatcaattgtattcaaacataatttacataaaataaatattcctattttaaagtgcacagtttgctgagttttgccagatgtaaccatccagttgaataaaattgattaaactgatctttcaaataataaattaaccttgcaatcttgctagaaatttaatttgttcagtttattatccattctatgtactgctacattcaattggttattaagttttaaggacttttgagtctatgtttatgaggaataaacatcaaagttgtataatgcctttgtctcgatttggaatcagggcaatactgggttcataaaataagataggaattgtccctttagattctttttttttttttttttttttttttttgagacggagattcactcttgttgccaggctggagtgcaatggcacaatttcggctctccgcaacctctgcctcccagattcaagctattctcctgmctctggcttccgaggagctgggattacag

SEQ ID NO: 92209 - DNA, 961 bp, Homo sapiens
tctaagtgacaggaacccttggccactgttgattgccccgaggtggggacagggatggtggggctggggctgcctggccctttaaragggcaattctgcccgccgccctgaatgccccctcccctagccactggagaagagatcccgtttcttggcaacaggaagctcttggtttactgtgtcacccaagcgactgggagccacgtcctgctctgggactgagcctttggagccgaccgatgactgcactgggctgaccgcaacaagctgaccacacacactcctcactcccctggccctggtgggcggcagacaccatggtgcagacggatgtgctcctaccagagccggcaccgcagacagtgtcgccctgcgagctgccctgcaaagagtatgacatggcccgcaacacgggcgtctacacgtcctccggcctggccaccgccagctggaggtgtggttccagaactgctatgctcgctaccaccaggccttcgccgactgcaaccagtcagagcgggagctgcaggggcacgagagccagcagctggccgcagagacccaggcgctggcacagtcgacacagcaagactccacgtgcagggtgggcgagcgactgcaggacacgcacagctggaagtcggagctgcagcgcgaggtgaaggtgctggctgcggagaccgacctgctgctggcccagaagcaacggctggagtgcgccctggatgccatggaggtgcccttctccattgccactgacaacctgcagtgcagccagtgccaccagcacgccaaccttgtgcatgaccatgtggagacggagctgctgaaggtgccagcagccttgggtggccaggacttgtgggcacagagaggaggagcccccggcagttcatgtggacaagccacgtggctgctgcaagcacacgggagaccagccctctatgcgtgagacacctga

SEQ ID NO: 92210 - DNA, 641 bp, Homo sapiens
tacctttttgttagggtttaaactactattactgttgaattacggtactattcttattaaaagctatatagacattaaagtgattgctgaatacctgggattctaaatctctgaaagaaaactaagtgtaacatattgttcaaatgttctacatctgaaagatatattttctttaaaaaagacctattaatttcacacgttttaactcattttaggattataataatcctaaatgtctagtgacattttgaggaccaggattaaaattatttttatatactaaatgtccayagcatttcatgtgcttgttttaaattttttaatgcttcttgctagttagagagcaaaatcaaaattgtaccacagcgtgcaagactgtactctttccatgcattggtgatgtcctttttagaccacagtaccttacacatattttaattacagtatttatcagatgcatgaaattatttttttatatcggtctttacactaatctgcaagatagtcaggggctgacaatgtcatctatttcagttatggacctagcacaattctggatacattttgacatgcaaatattttattagtaaaaattaaaattttataaatatagtttatgcaatatatgtgtatattttaca

SEQ ID NO: 92211 - DNA, 819 bp, Homo sapiens
caaataactttaaataaaaaaagtatcagctattctaagttaaataaaaggcccaacttgaattgagcatatactcactgagacaagttaattactgaatattcccttttgatccatttttattgtttctggtggaagagattcacatgtgctctcatgaaatacatagttagataaaatgaataaggtctagtatttgatagcacaacagagtgacaacagttaataatttattgtatattttaattaaaagtataatggaatgtttgtaaaacaaagaaatgctaaatgcttgaggtgatgaataccctatttatcctgatgtgattattatgcattgtatgcttgcatcaaaatagcttgtgtaccctacaaatatataaatacctactatgtacccataaaaattaaaaattaaaagtacatgacaaaatgtgttccattacaagtggattttaatattgtgcatattttatatggatacacaaaaacaagtttataaaactacatttaaaataatatgtattacatgataatatattttaaactatagataatatataactgatttgataaagtaactcaatagagtttatcattgggagtgcattttataaaatataactagatattatagcactaaggctatttttatttcttttctttggattaattgaaaacatgtattgtagacttatraatgtcagaatttgtatgtatttggctttatcagactttctggaggattattaggtagagtacatactgagagaaggaacatctttgaaatatctttgaaatgagttagttgagggatcc

SEQ ID NO: 92212 - DNA, 1804 bp, Homo sapiens
gttggaattcatgcatagattagtgtacaaaaaatgagaatggatggtttacaactgcattgaatgatacagatacatattgttgagagaaagaagacagtcaaccaaacacaaaagagtacatactaaataattcagtctaatgttcaaaaaaacaaacagacttaattcatggtrtgaaaaatcaggattgtggttacccttagggagttagtgactagaaaagaacatgaaagaggcatctggggtactggtaatgatctagttctatattcgggtcctggttacacagatgtgttaactaccaaaattcattcagttgtgcacttataatatgtgcatttttctgtatttatttcatatttcaataaaaagtttactaaaaaaatttcctcatgtgttttagaaattttaagccaagaaaattaagagagccctcttttgcaagcactcacagattgatataccaactttcaaactcataagaagcatgtgttgaaaagtcgttgactctttagctgaacctcacaaaaagaactcatttgattctgaagatgtcacacaccctgagtttgtgaaaagagaaggtttggctttcaggatcccagagcatatattttccaaaatctcacactttccctcttggtcatgatcattcaccaaaacacacacacacacacacacacacacacacgcacacacacacgtgtgtgtgtatgtatgtgtgtgtgtgcataacatacatatacatacatatatgtatatatatataattatacaatatataatttaagcaattactgtcttgtgtgctgtattccaagcttttcctacattattaataaaaaattgtcctccatcttctagaaattttcagtctacctgaatgtttatcatatgtataattgaacatttccctaaagcataaagactcaatcaatgggcttctactgctcactgagataatcacctttaaaaagacaaatgttttttctgctagatctctttatcttcactgtgggttcctcttattttatttctacatcaatgttcatatttaacttattattttatcttatttttaaatttcttttatgttgagccttgatgaaagccataggttctctcatataattgtatgtgtatgtatgtatatgtacataatatatacatatatgtatatgtatgtgtatgtacataatatatacgtatatgtatgtgtatgtacataatatatacgtatatgtatgtgtatgtacataatatatacgtatatgtatgtgtatgtacataatatatacgtatatgtatgtgtatgtacataatatatacgtatatgtatgtgtatgtgtattacataatatatacatatatgtatatattatgtatatgtacataatatatacatatatgtatatgcatgtatatgtatgttatacacacactaattcccctacatctcacctgtataagccatttttttagttgctataaaggaatatctgaggatggataatttacttttttaaaaaaagaggtttaattggctcacagttctgcaggctctgcaggaggcatggtgctggcacctgtttggcttctggcggcagtttcaggaagcttaaaatcatggtggtgggaaaaaagtcctggtggaaggtgaaggggggctgatgtatcctgtggtgagaatgggtacaagagagtaggagaagggagagatcccggacttctaaggaaacacatcttgtgtgaactgagcaagaactcacttatcaccaaggggatggtgctataccatgag

SEQ ID NO: 92213 - DNA, 501 bp, Homo sapiens
tgaagagtttcagagaaaaatggrtgtgatttactttttaatagttacaggctatttgtaattcattatggcaaaaagtatacagctccatttatgatgatgaaataaatttctcttttaaaataaacttatttaagattgtttatcaattctagtagccttttggcagtctttcatagtgttctaagaatagaatcatattgtcagcgaagaaagatagtgttacctcctattttgctattgagtgtcttttatttctttctcttgcttgattgttctagccaggacttccagtactatgatgaataggagtagtaagaaggggcatctttgtctttttccagtttgataaacgattctagcgaggtttcagggcacaaaattaatgtacaataatcaatagtatttctagaatgcacatttatgcacataatgtccaggctgagagtcaaatcaaaaacacgattccgtttacaatagccacaaagaaaatgaaatacc

SEQ ID NO: 92214 - DNA, 661 bp, Homo sapiens
cattcattgaatattttgtgtaaggtttaggttatcagataatgaggaggcgcaagatttagtctttttccccctctggatatttagatgggtttcagtaaatttatttttttacttcttgtatttattcaatgcatatttatttggtgcttactatgtatatcattatattgaatggaattatctctttccacccccagggcctggcacatgatagatgttcagtaagtgcttgtcgaacatgctcttgaattgattaagaaggaaaattgcttgtgaaaataaggccttcttggaaatgttttttttttattgcttttcatcctaccaagatgttacttatcagtgggtgggctgccttctgatgacatttgatggtctagtcatataagtactctggatctatgatgaaaatgcaatgaatttctattgaccaacctatttaactccctaaatgtttaacatcctccggtgttccttggtgtggcagaatttcgtggaaatagaatctgaggaagttttgccaattggtagtatggatgkggttggggatggatgggaatgagtacagtacaatgtcatgctccctctgaggttggaggcagttctgtaggtggagcatgactcagaaatgggcattcacttgagacagcggagatag

SEQ ID NO: 92215 - DNA, 1463 bp, Homo sapiens
cctagtaaaagcaatgagcatgtcccaaagggcagtgctttgcaccatctcctgtycctaagtgcagggctaaaggccacctcccaggaggccttggaatggccagctggacatttgtgtaggcagtgagcttgttggtcagcttgagtggaggagaagagagctggaaaagaaggatggcaggagagagggcatggctgtggggcagctggcttgctgagtctagtgtggccaggatctgtcacccccaggttgagtggaaactgtagaacatggcagagcccaggctgttttgctatactctcagccagagggctgttggccggggcagaggtccttaccccaagaggctggaggatagaaggccaggagtagactcttggaagagttagaaagctgaggccagtgcagctctctttcctgggggaggaagcccaatgttacttcaaggagccgacatggctggacattggagcccatgaagaggctcccagggccggtgcgaaccccagctgcaggggccaccccagattgtctatcgcagcacctgcccagacacttacctcgcctttactcttctccattatgcaaccagtgaaatatcagaaagcagatgaagaacaatgcaaatcatgtcaacttttaacttctttcacctcctccttctagatctaaagtcgagtcataggaatattgagtttggacagattgtttaagttctaatgtgacaccaagtttctcatgtaagtaaattttagtatctgtaaaatgcatacattaagataatcttatctggggatttaaaaagtaagtttgttttacaactcaatgcaaaataataccagtcttctgtaggaaatgtaggaagcacagataagtttttaaaaagctaaatctgaacagaaatcccacactgagaagtaatggtgattagactttctagtagttgctttcccatcattgtatgtatgtgtgtgctggcatgcacacatgtgtgtgtgtgcctgcacggacatgggatcatattgcatatgcttcattgtaacccactttttaatcacaacattatattataaacactttccatggaattcttacgcagcatcacgtattggatgtgcggcatttttctgttggacatctcagatagggaagcccacctggaaagtcctcattgtttctctaatacagtggctattggagcttagcttgtggaaggaggtttactttggaggcctcaaatcatgacgtctttctacacctgaaatcacagtttctcccagccatccaatgagttctggactggtggagttggaggggcagcaggaacagggcgaaagtgggaagtggggctgtgaaatcaaggcaagcctgatgatgtggtttggatgtgtgtcccctccaaatctgatgttgaaatgcaatccccactgctggaggtgggacctgctgggaggcccttg

SEQ ID NO: 92216 - DNA, 1463 bp, Homo sapiens
cctagtaaaagcaatgagcatgtcccaaagggcagtgctttgcaccatctcctgttcctaagtgcagggctaaaggccacctcccaggaggccttggaatggccagctggacatttgtgtaggcagtgagcttgttggtcagcttgagtggaggagaagagagctggaaaagaaggatggcaggagagagggcatggctgtggggcagctggcttgctgagtctagtgtggccaggatctgtcacccccaggttgagtggaaactgtagaacatggcagagcccaggctgttttgctatactctcagccagagggctgttggccggggcagaggtccttaccccaagaggctggaggatagaaggccaggagtagactcttggaagagttagaaagctgaggccagtgcagctctctttcctgggggaggaagcccaatgttacttcaaggagccgacatggctggacattggagcccatgaagaggctcccagggccggtgcgaaccccagctgcaggggccaccccagattgtctatcgcagcacctgcccagacacttacctcgcctttactcttctccattatgcaaccagtgaaatatcagaaagcagatgaagaacaatgcaaatcatgtcaacttttaacttctttcacctcctccttctagatctaaagtcgagtcataggaatattgagtttggacagattgtttaagttctaatgtgacaccaagtttctcatgtaagtaaattttagtatctgtaaaatgcatacattaagataatcttatctggggatttaaaaagtaagtttgttttacaactcaatgcaaaataataccagtcttctgtaggaaatgtaggaagcacagataagtttttaaaaagctaaatctgaacagaaatcccacactgagaagtaatggtgattagactttctagtagttgctttcccatcattgtatgtatgtgtgtgctggcatgmacacatgtgtgtgtgtgcctgcacggacatgggatcatattgcatatgcttcattgtaacccactttttaatcacaacattatattataaacactttccatggaattcttacgcagcatcacgtattggatgtgcggcatttttctgttggacatctcagatagggaagcccacctggaaagtcctcattgtttctctaatacagtggctattggagcttagcttgtggaaggaggtttactttggaggcctcaaatcatgacgtctttctacacctgaaatcacagtttctcccagccatccaatgagttctggactggtggagttggaggggcagcaggaacagggcgaaagtgggaagtggggctgtgaaatcaaggcaagcctgatgatgtggtttggatgtgtgtcccctccaaatctgatgttgaaatgcaatccccactgctggaggtgggacctgctgggaggcccttg

SEQ ID NO: 92217 - DNA, 1463 bp, Homo sapiens
cctagtaaaagcaatgagcatgtcccaaagggcagtgctttgcaccatctcctgttcctaagtgcagggctaaaggccacctcccaggaggccttggaatggccagctggacatttgtgtaggcagtgagcttgttggtcagcttgagtggaggagaagagagctggaaaagaaggatggcaggagagagggcatggctgtggggcagctggcttgctgagtctagtgtggccaggatctgtcacccccaggttgagtggaaactgtagaacatggcagagcccaggctgttttgctatactctcagccagagggctgttggccggggcagaggtccttaccccaagaggctggaggatagaaggccaggagtagactcttggaagagttagaaagctgaggccagtgcagctctctttcctgggggaggaagcccaatgttacttcaaggagccgacatggctggacattggagcccatgaagaggctcccagggccggtgcgaaccccagctgcaggggccaccccagattgtctatcgcagcacctgcccagacacttacctcgcctttactcttctccattatgcaaccagtgaaatatcagaaagcagatgaagaacaatgcaaatcatgtcaacttttaacttctttcacctcctccttctagatctaaagtcgagtcataggaatattgagtttggacagattgtttaagttctaatgtgacaccaagtttctcatgtaagtaaattttagtatctgtaaaatgcatacattaagataatcttatctggggatttaaaaagtaagtttgttttacaactcaatgcaaaataataccagtcttctgtaggaaatgtaggaagcacagataagtttttaaaaagctaaatctgaacagaaatcccacactgagaagtaatggtgattagactttctagtagttgctttcccatcattgtatgtatgtgtgtgctggcatgcacacatgtgtgtgtgtgcctgcacggacatgggatcatattgcatatgcttcattgtaacccactttttaatcacaacattatattataaacactttccatggaattcttacgcagcatcacgtattggatgtgsggcatttttctgttggacatctcagatagggaagcccacctggaaagtcctcattgtttctctaatacagtggctattggagcttagcttgtggaaggaggtttactttggaggcctcaaatcatgacgtctttctacacctgaaatcacagtttctcccagccatccaatgagttctggactggtggagttggaggggcagcaggaacagggcgaaagtgggaagtggggctgtgaaatcaaggcaagcctgatgatgtggtttggatgtgtgtcccctccaaatctgatgttgaaatgcaatccccactgctggaggtgggacctgctgggaggcccttg

SEQ ID NO: 92218 - DNA, 1463 bp, Homo sapiens
cctagtaaaagcaatgagcatgtcccaaagggcagtgctttgcaccatctcctgttcctaagtgcagggctaaaggccacctcccaggaggccttggaatggccagctggacatttgtgtaggcagtgagcttgttggtcagcttgagtggaggagaagagagctggaaaagaaggatggcaggagagagggcatggctgtggggcagctggcttgctgagtctagtgtggccaggatctgtcacccccaggttgagtggaaactgtagaacatggcagagcccaggctgttttgctatactctcagccagagggctgttggccggggcagaggtccttaccccaagaggctggaggatagaaggccaggagtagactcttggaagagttagaaagctgaggccagtgcagctctctttcctgggggaggaagcccaatgttacttcaaggagccgacatggctggacattggagcccatgaagaggctcccagggccggtgcgaaccccagctgcaggggccaccccagattgtctatcgcagcacctgcccagacacttacctcgcctttactcttctccattatgcaaccagtgaaatatcagaaagcagatgaagaacaatgcaaatcatgtcaacttttaacttctttcacctcctccttctagatctaaagtcgagtcataggaatattgagtttggacagattgtttaagttctaatgtgacaccaagtttctcatgtaagtaaattttagtatctgtaaaatgcatacattaagataatcttatctggggatttaaaaagtaagtttgttttacaactcaatgcaaaataataccagtcttctgtaggaaatgtaggaagcacagataagtttttaaaaagctaaatctgaacagaaatcccacactgagaagtaatggtgattagactttctagtagttgctttcccatcattgtatgtatgtgtgtgctggcatgcacacatgtgtgtgtgtgcctgcacggacatgggatcatattgcatatgcttcattgtaacccactttttaatcacaacattatattataaacactttccatggaattcttacgcagcatcacgtattggatgtgcggyatttttctgttggacatctcagatagggaagcccacctggaaagtcctcattgtttctctaatacagtggctattggagcttagcttgtggaaggaggtttactttggaggcctcaaatcatgacgtctttctacacctgaaatcacagtttctcccagccatccaatgagttctggactggtggagttggaggggcagcaggaacagggcgaaagtgggaagtggggctgtgaaatcaaggcaagcctgatgatgtggtttggatgtgtgtcccctccaaatctgatgttgaaatgcaatccccactgctggaggtgggacctgctgggaggcccttg

SEQ ID NO: 92219 - DNA, 1494 bp, Homo sapiens
tgccaaggggtcatcaccacccacttaccaccgaaaaccggggccttgttgccctctgagcagcaaaggatccaagagcagaatcccacaaaactctgctaccaagaccccttcaaactctagctgtcttagtttggggggcccccaaagcagatcccaaggcaaagatttgagcacagtgatttatttgggaggtggatggggcaaataaagatacattattgagccagctagcaccacaggagactgtagggttggtctgggctgggtccaagtgggctgctttagaatccagatgacggagctgggggaaagaagcacattccccatttcttcaagaaactcagcctacctgcaggaatgcagggagcacctcagaggctttagaccgtggtggggaaccccacgcaggctgcacctaaggcagggacacgcagttcacatctgccacagctgtgatgaggggcctccactggatatctggccatggcacacagcggccaccaccaaaagggcaggaggagggagacatgagatctgaagtcagcttgagtgaggagcctgagatgctgaagaaatcgggagaacgtggcgggtagtgggcaatgccttagtttgagttacccccagaagcaatccctgggaaaggacacaagcacatgttgcttccttgggaggtaaaggaaaacatcattaggggagtagtgaaatgagacaggaaaggggatgtggccggtacagggtgtgttatcacagcagccatggctgtgggtaacaggagcctaatgccacagggagctggaagccagcagaacacacataccttgtgggtgggagaagcttcagtgtttccrtgcaggattcaaagattgcttctctcattaattctcctcctggactgccttgcctgagggcagaatgaccttctgtggctacagagaaaggcttcaggcaaagagatgcagctctgggccccagagtccgctggagcacactgaagctggagcacactgaagtggaagatggggctgcagacagagactgggcagcctctgctccagggaggcccgagagccagagagcagattccataagaagaataactcccattcctcatgcatgagaccctctgctaaatgcttcctgtgcaccacctccagaaatcctcccaagccaggacaccagcagtattacaggtggaatatcccttatccgacatgcttgggtccacaagtgttttggattttttcagattttggaatatttgcgtatatataatgagatatcttggggatgggactgaagtccaaacatgaaattcatttatgtttcatatacaccttatatgcagcacatagcccaaaagtgattttgtgtaatattttaaatactttagtgcatgaaacatagttgtgactataacctgtcacatgaaaccaggttggaattttccactggtggtgtcatgttgatgctcaaaaagttttggatttt

SEQ ID NO: 92220 - DNA, 1507 bp, Homo sapiens
tccaggcttttgtaaaagttaatccattggaaggctgacagtatggcaggaacagttttgattagagmtcctatttaaacttcaagtgcaaagaaaggttttagctgtcataaggtgaaacatactgggataaaacagggcaccctccaccgtaggtttggaaaatgggttcacgctattttcagccagacccaaatgaatcagccagcttccccaactattcccattccactgctgagcatgcaacacttgccatttgtaatctaaacatcatttggtagatgagaacaaaacaccaatcagaactgagagagagaccagaaatatggtcactggctcagtgggacacacaagatggagcctggaccgcatgactcagggaggttacctctggggagaagagaatttcagaagaggctaaaatggcagaggggcttcctcttcaggacagaccccaaggctgaacgtgagtgaaatgatgcttcagggactgtgcggtttgcacagtggacaaagaccttgactcacagaaggtgacgaatccagttttgcccactctttgtggtcaataagtgtggattctgtaaactatcctgttaaggaaggctgacacttttttccccccaaacagaatgaggagcaatcgtttaaattcataaatcataaagcacagtagaaagcccagagatcttagagctggcagacctgaatttgaatcctggctgtgtggtcttttgttcagtactggacttcaatttctccatttgccaaagagatgttagttggaattatatctttcccactaagaatggggaaaggggggcttgccttccatatctttccatgaagcactgtttttcatctgtctcatctttgactacgtttattgtcattattatgtatttcagtgctgatattgttgcatgtgtatttgtcccttgaggtagtctacatgcttctttagagaaaggcccacatcttaggactccctattctgcactgtgctggatacatacatagtaggtgaggagacatttggtgttagggaaaagacctttattttcctcaaatgcaactactcaatattgacctaaaattactggtaactactaatatggaccctggcacggcagactcttgcgttgtccacaggcattgctgagaaagcatgaatttgggccccctgcacaaaagttaaccacgtggcaagactcctcagctcaccagattgtctttttaattagttgaagttgtaggctttaagtcattacaagatgatgcaagtaagttatagcacggtaatttaaatgtaggcacaactgtgatgtttgaattacaaaaagtatgattgctttatagcaggtgctgcagtttcccagcggatgggagtggcctagcttgaggctgcctggctgctgttgataagagccagccatacccagatagcagggagagaaggcctctctccagacaagatgtagaccacgccactgtgccgacagaagct

SEQ ID NO: 92221 - DNA, 1507 bp, Homo sapiens
tccaggcttttgtaaaagttaatccattggaaggctgacagtatggcaggaacagttttgattagagctcctatttaaacttcaagtgcaaagaaaggttttagctgtcataaggtgaaacatactgggataaaacagggcaccctccaccgtaggtttggaaaatgggttcacgctattttcagccagacccaaatgaatcagccagcttccccaactattcccattccactgctgagcatgcaacacttgccatttgtaatctaaacatcatttggtagatgagaacaaaacaccaatcagaactgagagagagaccagaaatatggtcactggctcagtgggacacacaagatggagcctggaccgcatgactcagggaggttacctctggggagaagagaatttcagaagaggctaaaatggcagaggggcttcctcttcaggacagaccccaaggctgaacgtgagtgaaatgatgcttcagggactgtgcggtttgcacagtggacaaagaccttgactcacagaaggtgacgaatccagttttgcccactctttgtggtcaataagtgtggattctgtaaactatcctgttaaggaaggctgacacttttttccccccaaacagaatgaggagcaatcgtttaaattcataaatcataaagcacagtagaaagcccagagatcttagagctggcagacctgaatttgaatcctggctgtgtggtcttttgttcagtactggacttcaatttctccatttgccaaagagatgttagttggaattatatctttcccactaagaatggggaaaggggggcttgccttccatatctttccatgaagcactgtttttcatctgtctcatctttgactacgtttattgtcattattatgtatttcagtgctgatattgttgcatgtgtatttgtcccttgaggtagtctacatgcttctttagagaaaggcccacatcttaggactccctattctgcactgtgctggatacatacatagtaggtgaggagacatttggtgttagggaaaagacctttattttcctcaaatgcaactactcaatattgacctaaaattactggtaactactaatatggaccctggcacggcagactcttgcrttgtccacaggcattgctgagaaagcatgaatttgggccccctgcacaaaagttaaccacgtggcaagactcctcagctcaccagattgtctttttaattagttgaagttgtaggctttaagtcattacaagatgatgcaagtaagttatagcacggtaatttaaatgtaggcacaactgtgatgtttgaattacaaaaagtatgattgctttatagcaggtgctgcagtttcccagcggatgggagtggcctagcttgaggctgcctggctgctgttgataagagccagccatacccagatagcagggagagaaggcctctctccagacaagatgtagaccacgccactgtgccgacagaagct

SEQ ID NO: 92222 - DNA, 385 bp, Homo sapiens
gaattctaggcaagattttgrtgaccaggtagtataattgacctaggtgaaagcaagaatttagccaacagctggatcaaaaagttaaagaatggtctgctacaaaatgagagataattaagcaaggacatctgtcaaagtcctactcaagaggactcaaacccatgtcctgaccaatcaccaaccatatctaagaagaatcccttagcccacattggaaatggggcaaggtactccagcagcgcagctggaaaacaagtagcgaggttctgaagtcagaggcaatgtgggtttaattaaggcagaaaacataaaccactgtcctatcccactaagaaggacaggatttcttaaaataaaatctagacttggttttcattttgcc

SEQ ID NO: 92223 - DNA, 715 bp, Homo sapiens
tataggcggcaaaactgaaagcacactgtaacacatrcccactggagcttcggctgtaaacattcagccctagacactgcctggagttggagccccacagcctgcccctctgtatgctcccctaaaggtttgagcagtggggcgctgaagaagtgagccacacccccatcgcatgccctgcaagggggacaagggaattttcccatttcagaagtagtaatagaattaaatgaaatctacagagaggtcctaaattttattttagccctagcttcagtattctactacacccaagtctttttactagaaatgctaacaactggtaaaaaaaaaaaacaaaaaacaaaaaacaaaaacaacaacaacaacaaaaaactaattgaatcttttttgtaattctcctcaattctcctcaaactctggttaagcttgataagcagtgggaatagtctacatttgtgtaaagataatatgggactttgctagtacacgcaatagataatcctctaaaaagggttgtatacaatagacggggactagcagaaaataataaatagttttaaagattgataggttgatagatgaaggtggattgattagtaaacaaataagatcactagttggactgtctataaaatggagccttccgttagtagaaacttgtgatcataaatatgaaagtattttttactttgttttattttattttgctttc

SEQ ID NO: 92224 - DNA, 715 bp, Homo sapiens
tataggcggcaaaactgaaagcacactgtaacacatgcccactggagcttcggctgtaaacattcagccctagacactgcctggagttggagccccacagcctgcccctctgtatgctcccctaaaggtttgagcagtggggcgctgaagaagtgagccacacccccatcgcatgccctgcaagggggacaagggaattttcccatttcagaagtagtaatagaattaaatgaaatctacagagaggtcctaaattttattttagccctagcttcagtattctrctacacccaagtctttttactagaaatgctaacaactggtaaaaaaaaaaaacaaaaaacaaaaaacaaaaacaacaacaacaacaaaaaactaattgaatcttttttgtaattctcctcaattctcctcaaactctggttaagcttgataagcagtgggaatagtctacatttgtgtaaagataatatgggactttgctagtacacgcaatagataatcctctaaaaagggttgtatacaatagacggggactagcagaaaataataaatagttttaaagattgataggttgatagatgaaggtggattgattagtaaacaaataagatcactagttggactgtctataaaatggagccttccgttagtagaaacttgtgatcataaatatgaaagtattttttactttgttttattttattttgctttc

SEQ ID NO: 92225 - DNA, 715 bp, Homo sapiens
tataggcggcaaaactgaaagcacactgtaacacatgcccactggagcttcggctgtaaacattcagccctagacactgcctggagttggagccccacagcctgcccctctgtatgctcccctaaaggtttgagcagtggggcgctgaagaagtgagccacacccccatcgcatgccctgcaagggggacaagggaattttcccatttcagaagtagtaatagaattaaatgaaatctacagagaggtcctaaattttattttagccctagcttcagtattctactacacccaagtctttttactagaaatgctaacaactggtaaaaaaaaaaaacaaaaaacaaaaaacaamaacaacaacaacaacaaaaaactaattgaatcttttttgtaattctcctcaattctcctcaaactctggttaagcttgataagcagtgggaatagtctacatttgtgtaaagataatatgggactttgctagtacacgcaatagataatcctctaaaaagggttgtatacaatagacggggactagcagaaaataataaatagttttaaagattgataggttgatagatgaaggtggattgattagtaaacaaataagatcactagttggactgtctataaaatggagccttccgttagtagaaacttgtgatcataaatatgaaagtattttttactttgttttattttattttgctttc

SEQ ID NO: 92226 - DNA, 715 bp, Homo sapiens
tataggcggcaaaactgaaagcacactgtaacacatgcccactggagcttcggctgtaaacattcagccctagacactgcctggagttggagccccacagcctgcccctctgtatgctcccctaaaggtttgagcagtggggcgctgaagaagtgagccacacccccatcgcatgccctgcaagggggacaagggaattttcccatttcagaagtagtaatagaattaaatgaaatctacagagaggtcctaaattttattttagccctagcttcagtattctactacacccaagtctttttactagaaatgctaacaactggtaaaaaaaaaaaacaaaaaacaaaaaacaaaaacaacaacaacaacaaaaaactaattgaatcttttttgtaattctcctcaattctcctcaaactctggttaagcttgataagcagtgggaatagtctacatttgtgtaaagataatatgggactttrctagtacacgcaatagataatcctctaaaaagggttgtatacaatagacggggactagcagaaaataataaatagttttaaagattgataggttgatagatgaaggtggattgattagtaaacaaataagatcactagttggactgtctataaaatggagccttccgttagtagaaacttgtgatcataaatatgaaagtattttttactttgttttattttattttgctttc

SEQ ID NO: 92227 - DNA, 778 bp, Homo sapiens
tgtgatgttgttgccacagggttctatctttgtcctctaaaccctgcagagctagtagccagattccatctgcaccctctactcattggtatggcaatgaccttgggaattgcatcccctcaattcacagccaaagtaggagggcttgcaggatggttcctgttgacaggggctgctttatgagaagtctcgccagctccatccctgcctaacttctcagtctgttttttttttttttaatkagctggtaattcttttttttttctttctttctttctttttttttttgaggcagagtcttgctctgtagcccaggctggagtgcagtggtgcgatgtcggctcactgcaagctccgcctcctgggttcacgccattctcctgcctcagcctcctgagtagctgggactacgggcacctgccaccaggcctggctaattttttgtatttttagtagagacggggtttcaccacgttagccaggatggtctccatctcctgacctcgtgatccacccgcctcagcctcccaaagtgctgggattacaggcgtgagtcacagtgcctggccattagctgctaattcttataatagatataaacaattagcaactgcatgccctcgtggcatgtggaggagaatgaggaaccagggccctgcctctctctgctctcagcaacatggcagaacaggatgtggaaaataagcttttggattatgaagaagagccctaggcgtctccagggagcactctggttccccgtaagaaagatgtcaag

SEQ ID NO: 92228 - DNA, 555 bp, Homo sapiens
ctggtggggcagcaaagatgataaaactttttctaatcttgcttctttattgtttgacatctaccagtacattgtgagaaacatcrtagtggtaggtaaaatggttttgtacaaaagtaagtttttttccttattgtagatcagcatctctaagaagtatgattatttatacatactatataccagaattaactgcctgaatattttatctttgggattttgttggtatcccgggagccctagcccttattttctctggatgagttagctccaggaggccaggagatgctattcccagcaccagggcttggtgtggggggatggctgtctgggagttcagtatagggccccaaatcattcctgtcagtcacttgacagcaagagggagacaacttcactcctggttgccttgaaggtatcctagtctgccctaaaggcaaaacctattctgacaccagacaggttgacctagggcagccatcctcacctctgaagtgctgccaaaaaccatggtgcactcaggagagcttcacactgcacctccacctcttctta

SEQ ID NO: 92229 - DNA, 729 bp, Homo sapiens
tcccggcagctgagcagcctgggctgtcctctcactgccgcagccaaactccacgttgttgttctgcaaatcggtggcctgccggcatgcaggtgcctgttactgtattcctctcgacatccagccacccgtgtgttcctctgcctatctgctcctctcgacgtccagcagcttgtgtgtctgcctgctagggtctcaggcagttttataggcccaggatgggggcgtggcaggccagggcggtcttgggaaatgaaacaaaaatgcctgtcctcacctaggtccatgagggtggagccctagccagggaccatggccttcctctacccagcacgtcccctgttccctgtcatttaaaggcaccccgcccttcccttcccagcacttcccttccatatcggaagcatggtgcaatggtctcatatagaagagaaaagwgcttaactgtggctgaaaccagtatctttgctgcatagcatttgttttaaggtttttctttctcagccaagtttgtgcatttcagggccgtgcataatgttgccaacaaagctttctggatgattgctagtgaattcagagtttcacattgccaagtccaatttatccatctcaaacgctccaccaaagttaccttatcctcaagaaagctatgtctatgcttggaagactagctgactacaaaatagaactctgcattctgcaaagcatgctcaatgcctattgcacttg

SEQ ID NO: 92230 - DNA, 612 bp, Homo sapiens
caacgtatcacactttcatccttctggaactttcttgtgccaagaagaaccctttaagcacagttgttaacagtgacccaggcagcctcttctgaacagcccacggctgtcacacacccattgctacaatttctacagacttgaagctaacacttcaagctaacacacagtgttttttaagatcttgtgttagtaataaaaaagtcataaataattcctgtgtgaagctctctagttttcatcagtatttttgacttaatacaaaggcattttagaagtgagtcctattactgtctgtgaaacaatgcaaggctgtggtaggtctatttgagacaagattttacagctatgtcataaaacatatctgagtaaaaacacatggtctcttgatcattaagatttttccaattgaatgagccaagcttcacaatayagcagaatttagtttctgctttgatacctgtaatgaataaccaagtaatcccagaagaccatgaattttaacaaaagattagcagttccctaaaacctagtatgtgttcactgaagtacacaaataaacctctttttctgatttagtccaaaataaaatatgcccaggaatgagtgctt

SEQ ID NO: 92231 - DNA, 664 bp, Homo sapiens
ggagaggagaacagtcaccatatcttattcatgtcagcacctggggcatctgatatgctatagccacaatagttagtgcctattcaaatgaatagagaaatgaatttttaaaagtgggtgggagtataggggccaggcagacttctcggaatgactgtggagcagggaaatgccacatgctgtgtgtatctgtggaagatatttaggtaactgcttggagactgacctttgaagttttttagtatctgttgccaaatgttgattaaaggaatgactctagatgttgtaaacgttgggcatctgaatcattctggagcactacacacacacccacacacacacacacatatacacatacatatayacatatacatatatatacacatatatacatatacatatatatatatttttttctcaggtacacggcattacttatgaagatttaaataaaaagttggccagttccacaaggcagaacctgggttagggaatgagggagaatataaatttggctagctgggaagacagccatgagcatggatacaaaaccatgacttatttagaaaataggctgtgaattttagtgaaacagacctaaagtttgctgctaatgagtttttattgggtttgctaggtattaagcctagctattaagcccagc

SEQ ID NO: 92232 - DNA, 702 bp, Homo sapiens
tttttcaagctcaatacagtaaatatcccgctatttcctcctcattgtaggactggaaagtgggtgatctctttcctccctatcataagaatcaaggcagacactctaataacaaagacatgttaacaagagaagagcataagaaatttgatttttgaaatttgatatttgattgtagttttaggtaacatggaacctttgaagactcaaagatacaggggaaattattcatttttatgcctaggttcaatgaagaatggacagttgtgtagagacacgattgggcaagtggtatgatctaatgcttatagactgaagggggaaattgggcaaagtctctgttcagactcatcttggactctctgtggagattccatctatggagtaggactcctctggaaggaggktctcaacttctttatggccagctattacatacaaaggtggtgggtaggggaggaggggaagtgagtaatatttttaggccttatggcctaaaatatttcccaccttggggaaaagggattctaatttctatggcttgccttgagggagaataaggggcaagggacaagagggcaggaggtcagagagagacttttgtttctgaggcctttgttttggggtatcattttctgagccccaacaccatctagaatactgaatctaaaactaatatattcaggggatcaatgtacctat

SEQ ID NO: 92233 - DNA, 887 bp, Homo sapiens
tttctctcattctgtaggttgtctgtttcctctgttgatagtttcttttgctgtgtagctctttagtgtaattagattccatataataaatatttttatttgtaaagttttaaataggaaaagttattcactttcttttgttgttattgtttgataggttggttcttttgagacaggatctcactctgctgcccaggctggagtgcagtagccagatcatagcccactgcagcctcgacatcctgggctcaggtgattctcccacctcagcctctggtgtagttgagattacaggcatgtgctcccacacccatctatttttttttgttgtttaattttttgtagagaccaggtttcaccatgttgcccaggctggtcttgaattcctgagctcaactgatccacccaccttggcctccaaaagcactgggattactggactgagccactgcatctggccactttcatttgttcacatatcacatcatgttggagatgaaaagtaaagactttcatacggttgtagaattctgtttaggaagatcctccctttaaattggtcctcatgggtacatatgaaactgatcatattatagtgttacactaaattttaagctttaagcttttgtctacagaataactaaaaataagattcatgaaaaaatggtaaaacactatatgactgaattatttcagcattattaattatgtaaaaagtacttatgaggaacactaaaataattaaaataattgtctaaaacagtcctaagaacattatttcatctaggaaaatcatttattrctattacaagttagaaaatgatctcatttttattatataaattacagagtgattatatttaatgaaagtgaataaagagaaacat

SEQ ID NO: 92234 - DNA, 1051 bp, Homo sapiens
tttagggaggaatttttatgaataacaagggacagaatatatgaaaacactaagatacaatatctgtcaaaaggtacatccacacttattaagggtcataaaatgcagtatgttttaatctctatggaggaaaggaacactgtaatgccttctgtaattattttactgcaggtaaacaataatttcttagttctcttggttggctatagcagaataccattaactaggtagcttataaacaagggaaatttatttctgacagttgcagaggctgggaagtccaaaaccatggcaccagcagatttggtgtctagtaagggcctgtcccgtggttgatagatgaagtctcctagctgtatccttacatggtgaaaggagccaggcagttctctggatccycccttataagggcactaatctcattgaggagtgctgtgctcttatgaccaattcagtttccacaggccccatctccaacttcatcacattggtaactagatttgaacatgcagattttggggagacacattcagatcagagcaatttcaatgtgtgtgtggtcaataattattgatatagtttcctacctaatttaaattatttaaaattttccaattgtagaattttaatactcttatttttgtaagttggattcctgttcttaaaatgtcattcagtgacttccagtggttcctaaaatcagtttaaaatggaagttctagccagaaccataatcaaaatattaaaaacttaaaataaatatttggagaaaataatttataaaacaatgttctactcacacccaaaagaagcccagtcttttattttgtgttctctttgctggctccaagaaaataaaactggcctcaattttaaaaatgtttttataactaggtgttatttaaattttatttaattgtcaaaatttattgtttatttagttccaaaatagtagtacaaatataaaaatcatgatgaggagctacacagacgtataatcaatgtcttcagttttaaatatattgaatcttaaataataaagatgtgatgc

SEQ ID NO: 92235 - DNA, 743 bp, Homo sapiens
tccctctgtcctcttagccaaggaggggagaagctctctccctccctcaccatgggggaggtcaccagtgggtggatttcatgacccacatacctcccagggctggcatgcggggtccagcagtcccagccacaactatgtcatcccgcttcctttcctctcacggtgaaggaggcggaagagaggttgttgctcccaccttttggatggggaaactgaggcttagagagcagaagcagyttgcccagggcctggcagcaccagtcccgcctacgacccaccgccctttcccccgctccactcttacctcctcccccaggtttctgggtctgggtttatctctttatctgggtctgcacccacagctgccccattagatcaaacagggcttggcttccaggaacgccgggtgccttggcattgctggcctggctggcagctgctggctggtgagccccagctgaggctgtctcctctccccaggcactccccaggcctttagagaggacattctcccactctcttttatggaaagccatggaatcttctgtgtggatgcagcctgggcagtcagagaggggcctggccctcacgtggccgcagctgacccctccccgccgcagctctccagtctcctctgcgacgtgacagccctggcttctctgctgtggggaggagagtatttttagttttgaacccaccacgtgaagcgagacaagttatcaatagcagcagcaaagggc

SEQ ID NO: 92236 - DNA, 743 bp, Homo sapiens
tccctctgtcctcttagccaaggaggggagaagctctctccctccctcaccatgggggaggtcaccagtgggtggatttcatgacccacatacctcccagggctggcatgcggggtccagcagtcccagccacaactatgtcatcccgcttcctttcctctcacggtgaaggaggcggaagagaggttgttgctcccaccttttggatggggaaactgaggcttagagagcagaagcagcttgcccagggcctggcagcaccagtcccgcctacracccaccgccctttcccccgctccactcttacctcctcccccaggtttctgggtctgggtttatctctttatctgggtctgcacccacagctgccccattagatcaaacagggcttggcttccaggaacgccgggtgccttggcattgctggcctggctggcagctgctggctggtgagccccagctgaggctgtctcctctccccaggcactccccaggcctttagagaggacattctcccactctcttttatggaaagccatggaatcttctgtgtggatgcagcctgggcagtcagagaggggcctggccctcacgtggccgcagctgacccctccccgccgcagctctccagtctcctctgcgacgtgacagccctggcttctctgctgtggggaggagagtatttttagttttgaacccaccacgtgaagcgagacaagttatcaatagcagcagcaaagggc

SEQ ID NO: 92237 - DNA, 1263 bp, Homo sapiens
ttttcttatatataattttattttggggatcatataaatttcttactactcaataaagtaacaaaatataaaatacagagcaaatacagttataaaatggacagatgctgtatttaaaaattatttttgctctggtgtgtaatctccaagccaaatttatcattacaaaatgcttagttttatttcaagattcagtatttttattgtataattcttcattttcaaaattgtctaaatcctgaggtacagactatatttataatatgcagtctatagtggctcaatttaagatatctggaagtgttttacttactagtctcattattaaagactactcctatcatgttgactaaaagtaacattggtcatttttcactgaaactctcctttcaagcacacaaacacrccacagtataacaaaatatgtttcacagctctattaaaagcattctgtaaaataagttgcttatcaattttagggcattgacttttgaaaattttgatgtttaacttttgattctaaaaatatgcacaaaaatttactatgatattattttccccttgcctatctgcataaatgtgcatggttcttattttttcctttgaatggatagaagaagcataaattctatcatatttacaaacctcaagacagtattaaacatgataaacaatattgctgcatttgaaaatggccttgttgaggccaaaaaggaggtagatataattaagagcttctttcttggtcactgcttaatataaagctttatttttccaactctgtgtttaatatggggatagaaataaagtgagataaactaatattaatgaagcccttaagtaaataatggaggtgaaaagttcgacaagcaataagaaacctgatattgaggaaaaaggaatatatgaaaatgcatgttcatctacatgttatcttggatagatggagtctatcattcataatactgagagctctagttcaggtttcacatgaattttaccttcaatgatagcaaaaaaactctgttccataatcttgaatattttgaagtacgtacatacacatagacacacattttaaagtcagataggcaaacaattctgtgacaatcaattaatatttatgttagtatctcttaagctcaacattctgctctcatagttgaatgcagtggggtatcaatgatatgaaatatcatctcttttcctggtaataaatggatgtcatattaataagttcatttgtattaaaactgtatgtat

SEQ ID NO: 92238 - DNA, 1263 bp, Homo sapiens
ttttcttatatataattttattttggggatcatataaatttcttactactcaataaagtaacaaaatataaaatacagagcaaatacagttataaaatggacagatgctgtatttaaaaattatttttgctctggtgtgtaatctccaagccaaatttatcattacaaaatgcttagttttatttcaagattcagtatttttattgtataattcttcattttcaaaattgtctaaatcctgaggtacagactatatttataatatgcagtctatagtggctcaatttaagatatctggaagtgttttacttactagtctcattattaaagactactcctatcatgttgactaaaagtaacattggtcatttttcactgaaactctcctttcaagcacacaaacacgccacagtataacaaaatatgtttcacagctctattaaaagcattctgtaaaataagttgcttatcaattttagggcattgacttttgaaaattttgatrtttaacttttgattctaaaaatatgcacaaaaatttactatgatattattttccccttgcctatctgcataaatgtgcatggttcttattttttcctttgaatggatagaagaagcataaattctatcatatttacaaacctcaagacagtattaaacatgataaacaatattgctgcatttgaaaatggccttgttgaggccaaaaaggaggtagatataattaagagcttctttcttggtcactgcttaatataaagctttatttttccaactctgtgtttaatatggggatagaaataaagtgagataaactaatattaatgaagcccttaagtaaataatggaggtgaaaagttcgacaagcaataagaaacctgatattgaggaaaaaggaatatatgaaaatgcatgttcatctacatgttatcttggatagatggagtctatcattcataatactgagagctctagttcaggtttcacatgaattttaccttcaatgatagcaaaaaaactctgttccataatcttgaatattttgaagtacgtacatacacatagacacacattttaaagtcagataggcaaacaattctgtgacaatcaattaatatttatgttagtatctcttaagctcaacattctgctctcatagttgaatgcagtggggtatcaatgatatgaaatatcatctcttttcctggtaataaatggatgtcatattaataagttcatttgtattaaaactgtatgtat

SEQ ID NO: 92239 - DNA, 1246 bp, Homo sapiens
atctgcccgcctcggcctcccaaagtgctggggtcacaggtgtgagccactgcactgaacaagtaatggatcttactagaagagtacatcatttaatgagttaaaatcaagattcaaaactatttcacctgtttttataaaatatataagaaataatacaaatattttcttcattttgtactcaaagaagtgactgaggacgaagtggattattttataggtattccaaatcaaattcagtttgagttaaatctgtaagaattactacatctgagtaatttttacataattggaacattttgacataactattttaagacattattttcaatttatatgtatgtctaaacatgtaataacctgttattatggtgagtaaactaagtactctttgaggaaatataattatctagtgtgaatgtgagcctgtgtatgtatgtgtgtgagtggtagtgaagggaatgatgtccactgaagaggaaataacttctctctggaaaagtatatggagagaaaaaattgtacttttactcctttgataacatactcattgtatgtttcattattcaaacactgacactaacatcagctctgctacatgtttttaagtctttaatgcattacttccttccactttcccatcttgcttattttattttttcctcaaacctgtaacctaggccgtcttactaatattgtttttgttttattattttattttttaagtttttaatttattttaattaattcattgtttagttttctgcaatatcattctgactttgttaatgttgctatttccaggtcaatcaaaaaagctgactgaagctcaccgacctggaactcttctgcttacttcttcatttatttrccttctccacccttctctgttaaaagagactgacctgttggagctaccagaaagtcaaagggagagagaacagtgactagagaactattattcccacagttctctctgttgctttatcttttcctggctgttgacgccaccactcaaggtggttctctccattgaattctttccttccaggttctggtaactacaattgcacatccctgttcaggctaacagaacgtgttattattggctctagtgtactgtgatatatcttttagagaattttaatttcaaagtagtccctttattaacactttcttaaattatactaattttagttcacagtgggaaccaatctgatacatttatcatagaaattgatctaat

SEQ ID NO: 92240 - DNA, 556 bp, Homo sapiens
catttattaccatgtttaatattagatatatgtgggatttttatctaaaagtttgatgatgtttttatgacaagaaatatgccataggaacttaactctttttaatatcaattagcctatggtaaaactggttttgttaaatgttgtttttgcttaaagtcagttttcaagaacctattgatgatgtaaagtgaggatttactgtctataacatcagctgtctatctgaaagggaagaatgtgaatacacacattttcttatttattaataaaagattaaactaaaaagttaatataaaaatcactgttacctgtaggaggaagaaagaaccaggattgggaaatagagatagaaatgaaccccctccgctgggcgcggtggctcatgcctgtaatcccatcactctgggaggccgaggcgagtggatcacctgaggtcagcctggccaacatgaggaaaccscgtctctactaaaaatacaaaaattagccaggcatggtggcgggcacctgtaatcccagctactcaggaggctgaggcaagagaatcacttga

SEQ ID NO: 92241 - DNA, 556 bp, Homo sapiens
catttattaccatgtttaatattagatatatgtgggatttttatctaaaagtttgatgatgtttttatgacaagaaatatgccataggaacttaactctttttaatatcaattagcctatggtaaaactggttttgttaaatgttgtttttgcttaaagtcagttttcaagaacctattgatgatgtaaagtgaggatttactgtctataacatcagctgtctatctgaaagggaagaatgtgaatacacacattttcttatttattaataaaagattaaactaaaaagttaatataaaaatcactgttacctgtaggaggaagaaagaaccaggattgggaaatagagatagaaatgaaccccctccgctgggcgcggtggctcatgcctgtaatcccatcactctgggaggccgaggcgagtggatcacctgaggtcagcctggccaacatgaggaaaccccgtctctactaaaaatacaaaaattagccaggyatggtggcgggcacctgtaatcccagctactcaggaggctgaggcaagagaatcacttga

SEQ ID NO: 92242 - DNA, 813 bp, Homo sapiens
tgcataaacttasctgatgtctcaatctcctggagtctgaaactccttcaatttggaggaattcagtttcaaaaggtatttacctggctctaactgacagaatctaatcaagttaatttttggattcaatttaatcctggacctagtccagtaacaattgctcaaatcaagttggagacttcaaatcacaaatttgtggagctcaaatctgttagcaaactcattcatgacctccagttgatgtgagagatcaatgggcaaaatgggccctagagggtaccttcatttgctcacttggtgctcctggaggtcagtagaggtcttcagatcccactttttaatgccaaactgttaaaagaaaaactttagacacattaaattttgcataatttatttgagcgaataacgatccataaattaggaaacgcagcgaaccaggagagctagttcaaccagcaaaatgggcaggtgatattcacatagaaagaaaagatgtaacttataccaacaatttgattggttacagttcagcatttgccttatttgggtgtagtctgatcagttggaagcctgtgactagctgaagtttggctgatgtgattggccaacactcatctgctttttataagaacattgtcttaagttgtagtttatttacatactaagtcaggttgtcattcactatgtaggaattcgaagtacagaggcagttttaggccaagttgttttatttaatttgacaatatcaaatatttagcagtcttttcatccatcaatgaataatgcaatataaaatttttatattcagactat

SEQ ID NO: 92243 - DNA, 1136 bp, Homo sapiens
tgcattagaaaaataatattgtatagttgctggaatagaaaccagaggaattaactgtgataaaaaatcatttatgtcaattgttcccaactcatctttatggatcaattactgaatcaataataggcttgtaaaaaggaaatggtatatatttactgtactgagtaaaaaagaaagacggtagagacattctatgctgtcctaatttatcaataggtaatatgcccacaagaataaaatattctacctcaagctggatgtgatacaagaagtgtgagatattcttacccaatgattttgactacagttgggttccctattatatgagtgttgtttaaaaagagagagcttaaggtaaggtaggatttcacccgtcaagcaaacaatgaatcatggcaaagtagcctaccggtgaatttgcttcttattgactttatagtctacttacccacaagcatcatcataagtaggggtctctgttcatctttggatgaggaacacttaccttcttccccaagttgtgtatcggaattctgcttttaactctcattagcttatatgttagtagttaatagatgactaattatcattagatcaaatactctaattttctttgaaagatagcatggcagcgacttgttagtagtaaggtcaccccccaaaaaagaatacaaattcctgtttacagtcataaaacaattctcagaatttttttatagtatttgacatttttaggtgtttttaattgtgaggaatgaggcttgtcagctcagcatgccatgatgctgaaaaattcagtacgtttaaataatttttctatgactttagggcccacctccaggaagaatgctggctgtttagtactcatttcttaccaacattcacattgtgtactagtctrtagtgactaacctgtcctataccctcctccttgaaagatttatagtttggaaaattttcacttcaatagttcaaagcttttaactgtcctcaaactctgacagtttaaagtcaacagagacacacagttgaaatctgtagacccagggttcacttctttaatgtgttatcatagtgttccatctgtataggtttccccacaaatttcccacttaaaaaagaaacaacaaactcct

SEQ ID NO: 92244 - DNA, 1190 bp, Homo sapiens
tccatgccaaattttatttgcccgcataagctcctctacagttaacaatccaaaatatgcctcctgtaggttccataatgaactaactactcaatggaatctgagagtttccatttcaaatgcaaaatcccaaagacatccatgtactttgtgtttttcttgaaagcctattgtctccttccttctgatgttctattatgacagcctatgttaaagtaatttttcaaaagatgcattagctcagagcacattttcactgtatgccaaggggaagccagtgctggtgcttgtccatgggtggcttctgcttatagaattatggaattcttaaccaaaagagcgaccagtgtgacttcttctagaggaggcctgaaatagtaacaggaaagagttttgactcttttacttattgctgtgggtctctaggagatcacttaaactctctgaatctcagtctccacctccgtgaaatgagaaggtgatgaaaatatggtgataagctgatcaaatatgcatcacttctgggcatgtggtagtagttcaacaacaatagctattaggagggtcatcattcagtgaaacatagttactttggagacagaaaaagttacaccaaggcaatgacttacttgtaagcaattcattcattcattcgttcagttattcagtgttcaagtaagcatgtgtagatcgcttatttcaggaggttacaaggtttgtgtgagtagggactctggcttgaacatatttgatcagagtgaaaaggcattaaaaaacataaatgtttcatttagcaacataccttttttcaaggtcaggatccccaaatctttagaagctacttacttgaagayggggacttcttaatgagtttacttcttgtctcaaaaccagaatcttaagataataacaaaatatcagaagcaacatgaatgtccaccagcaaaaaagaatgaaaaaataaattatggttggtaatacagtataataatacagagcagttaaaagtgaatgaactaagaccaggcatggtggctcatgcctgtaatcccagcactttgggaggccgaagtgagtggattacttgaggtcaggagtttgagatcagcctggccaacatggtgaaaccccgtctctagtaaatagaaaaaaaaattaaccaggtatggtggaacgtgcctgtaatccca

SEQ ID NO: 92245 - DNA, 911 bp, Homo sapiens
atataaacaagattaaaatagagaaatcaaaatttaccataccctggagcactagtaaataagcaaacatcacttattcatgcagaaaatgcagttgttaaatccaggcagcttacacaagtactgagtaacacccacctcctgtaacctagaggccaccacacagaattcatcatggccaagaaactccaggtaggctgtaagggtagataaatggtatgaagttcgaaggatagagaacatgactctagtgtttatgggattaagagaccttgcagattacgtgtaagatctctagaagctatagaagcctcaaagaacaatcttgaacacggagcctgtgcttgagtggaagccattgaaggaaaagcaaaacagtggctagagggaaattcttggactacataacatccaagtcatgaaggttgagaagccacaagtaarttagaaaataccatcctagataccaagaaaatataccaaaatcattacaaataagaagcatcaatatcttttcttacatacatatactgggatttatcaggctaaactgaaacatataagaaggcattttgcgaagatatattttctccaaagagataaaatcatcttaatgttatttttaatttgctttatattattttaagtgctgctgtctaatttcatgcagttttcttaaattcactggagaaaaataagtcaagacaggtatctccaatctgatggatgaagaaactgagttttatagttaaattgtttcctgcaatgtcaaggaatcagtaaatggttgagccaggactaacacatccactgttgaagtcctctaattttgaaaccgtttaactttctttttctgtcttgattgtatttaggctaattgtggagattcttctttcatatcaaatttatat

SEQ ID NO: 92246 - DNA, 911 bp, Homo sapiens
atataaacaagattaaaatagagaaatcaaaatttaccataccctggagcactagtaaataagcaaacatcacttattcatgcagaaaatgcagttgttaaatccaggcagcttacacaagtactgagtaacacccacctcctgtaacctagaggccaccacacagaattcatcatggccaagaaactccaggtaggctgtaagggtagataaatggtatgaagttcgaaggatagagaacatgactctagtgtttatgggattaagagaccttgcagattacgtgtaagatctctagaagctatagaagcctcaaagaacaatcttgaacacggagcctgtgcttgagtggaagccattgaaggaaaagcaaaacagtggctagagggaaattcttggactacataacatccaagtcatgaaggttgagaagccacaagtaagttagaaaataccatcctagataccaagaaaatataccaaaatcattacaaataagaagcatcaatatcttttcttacatacatatactgggatttatcaggctaaactgaaacatataagaaggcattttgcgaagatatmttttctccaaagagataaaatcatcttaatgttatttttaatttgctttatattattttaagtgctgctgtctaatttcatgcagttttcttaaattcactggagaaaaataagtcaagacaggtatctccaatctgatggatgaagaaactgagttttatagttaaattgtttcctgcaatgtcaaggaatcagtaaatggttgagccaggactaacacatccactgttgaagtcctctaattttgaaaccgtttaactttctttttctgtcttgattgtatttaggctaattgtggagattcttctttcatatcaaatttatat

SEQ ID NO: 92247 - DNA, 763 bp, Homo sapiens
aaaaatgttttctgaaagagctctaaaaaactgctaataatccgagtgacaatgaccagatgagtacaatattacttttcattttacaactttctgtacttcttgaattttttgtcatgcaagggaataaatctttaaggcatgttatcaaagttatctaggtggtgggagtatgagacattggtatgttcgttacagttttaagcatgaagaaacactagcaaatgttatttttgcaaggtgcaattatgagaatacagtcctaacaaaagcaacaagggggctaaatttcaaaatttaattgtttctttaaaataacttataaattgtaaattgtaagctcttctagtctaatagaaatgacactcatgcaagaactctttcaatttgatatgtgaaataggctggctctgggatccagttgagtttgggtatagaaagttgtttcagggccgggygcggtggctcacacctggaatcccagcactttgggaggccgaggcgggtggatcacgaggtcaggagattgagaccatcctagctaacatggtgaaaccccgtctctactaaaaatacaaaaaattagtagggcatggtggcgggcgcctgtagtctcagctgctcgggaggctgaggcaagagaatggcgtgaacctgggaggcagagcttgcagtgagccgagatcacgccactgcactccagcctgggtgacagagtgagactctgtctcaaaaaaaaagaaggaaagttgtttcaaagtgt

SEQ ID NO: 92248 - DNA, 814 bp, Homo sapiens
ggatccaggagatcttggtgcccagcatgctgagctcctgagagggggggcagcagcacctctctccccatctcctcctccctatagactcacccccattcacctagtggccttgtgtggctgtgactctggcctttggctcctctcctgggtcgacttgcctcctgctttcttttctaactgcatggtattctccatgtccacaactcagattccttcaaaacagaggctctgattggctctgttcatcgttttgtgcaggcatcgatcactggctggcctatacattggtggttgtcaaatcagatgccagctgggcacggtgactcatgcttgtaatcacagctacttgggagactgagtggggaggatcgcctgaacccaggagttggaggctacagtgagctatgattgcaccactgcactccagcctaggcaacagagagagactgaaatcagacgccayccctggtctaatcagctgtggcaggtgcaatgcacaatggcagaggggcgtcacttcaggaggcaccacgggagggacgttcctcttggggagtgctttgtaattgatcgacatgaccaacatgtctgaaacagaaataaaggaaagaacacagggtaggaggattctgtgcagtggacacgatcttcaaacgggggtgtgaacatttcctgctagctctgagatttgtaatccagaccccgatggttttcagaaaataaattggcagctgtactcttctaaaattggtcaggaggtattaggttggtttttctttctttacttttaaaattggccttttcccacttt

SEQ ID NO: 92249 - DNA, 733 bp, Homo sapiens
tttaaaatgttgcgcacctgcctttgggagtggcatattccataggcacagaaaattctgttgctgttgacctggcctggtgggctcacacctgcaatcccagcacgttgggaggccaaggcaggaggatcacttgagcccaggagtttgagaccagcctgggaaacacagggagactatacaaaattttacaaaaaataaaaagttaaaaaaaaaaactagccaggtgtggtggtgtgcacctatggtcccagctactcagaaggctgacatgggaggctcacttcagctcaggaggtggaggttacactgagccatgattgcaccactgcactccagcctgggtgacagagtgagaccctgtctcccccctccaaaaaaaatttattactgctgtgttaggtaaaggacagtgccgaaatccwcaactaccgtgcaacttcagccccttctttatctgcatggcctttaccatagatctattcccgaaggaggagtttgtcctgagtaaaaaggttttaattgatgtagtatgcaagtctataaaaagttgatgatagaataagatatggcacttgggaaagttgcttcattattgcatctttgaaggcccaaatgaaagcgtgtttagataaaaaaaaaaaatacctcccagggagttaaaaatgcactggccccaagtatatctctttcccatcgctcatgcatgttcacacaaagaggaagccactaa

SEQ ID NO: 92250 - DNA, 733 bp, Homo sapiens
tgtggtggaatctcacagtcaactttgacctgtgcacatccacttttttttttgagataggatcttgctctgtcacccagctgggagtgcagtggtgccatcacagctcatttcagcctcgacctcccaggctcaagcaatcttcctgccccagcctcccaagtagctgggactacaggtgcataccaccacacccggctaatgttttgatttctgcagagctaaagtcttactatgttgtccaggctggtctcaaactctgggctcaagagatcctcctgccttgggctcccaaactgctgggattacaggcatgagccactgcacccggccaacacattcacttttttgggacatggcagggacttaatgttttagaaaacatttagctacccctttgacaatgctgcttgacactatttgacagtgtgacttaccacatcctaataacttccatgaaaatcatcacaaagcaaattttaaatttttattaaaaatcacagtttttaaaaatgtccagtgacacaatgtagctcttctgaaatgaatggaaaacacaacacactgctaaccagtggagggagctctctgcagggckgggagacctgacaatgcagctgtagcctctgcaagtgaaaatccaggccgacttgcagtcattggactgatgtccaagtgcaatcaccatacagcagctacaggcagggctggctgatagggagtatgggagaag

SEQ ID NO: 92251 - DNA, 612 bp, Homo sapiens
tcttgctgacacttagctctccctgttgcactaacacttggggttggagaagatgctccggggcccaggccaggctcctctcctgagccacggcagcagcaggggcagggaagcatatacccacagtttgcctgctgcctttgtggctgccccctgggtggtttctagatacagaatgagattatttccctgtcactcacaattgtggtagagtgatactcccagggtggggaggggaggtctcggaatcccaggtggcatctgcagcatttggaatagccctcatctttcagaggctctggcaatgtcagctgtatctgaaggcaaacctgattccgcaaagcatcaaatccatggccaggatttgtgatgtcctcctgatcacaaaccacatcgattctcagctgtgtgggctctgtgtgcacagttcagtaccagggarctggagatggcggcttggggtcaccgtgctatgcacgcacaagcaggctgctgagcctggcaaaactgtactcctaattttcagtggcaatgcattttccttccttgctgagctgccctgaacatcacctaagaataatgccaggtgtactttaaaagcataacagcacc

SEQ ID NO: 92252 - DNA, 1357 bp, Homo sapiens
cccctcttgggctaggggcagcaaattttttctgtaaagggccagaaagtggtattttaggcttttgtgggcctcataccgtatctgtgtcctttgtttatttatttatttatccaaaacaacacctttaacagcatacaaaccattctcttcagggactacacagaaacaggctgagagccagagttggtctgtgggtttgcagatccctggtctacagtaaagaatattgaaatagggtattatggcaatcaccaactctccgtgaaatagcactggggccctggagttgggtagggtacagaagtaccttagaacgctgtcaagaaaaatcaatgaaatcatgcatgggaaattggaacgtattgctggcatttttgacgtagtttcctaaacacagtgcctagaaaatatacaatgaggaatatttaattagggatgaatgctatgatctaccaggggaatcaatacaaatagtaaagattcttgggaaggacattctcaataattagagatgcttaacactatggtgagtgctcagcctttgaaatggtgacagaacgccacacacataaaatgccctttcaggagaaggtgaatgaatggctgtttataagtgatggggcctgggaccttggagcattaagctggcatagaggactccaggtgcctttgcattccagaaggccacattccctactcacctccctgatgtgctttggggctttgagtgtagaaaggttaaatactctttcgaatcaatatcgttaaaagaaagaagcctgtggttaatgatgacaaatggcaatgagccacaaaatcaaaagacaatgtaaatgttgtgactaacattttttaatatgatcatatccagcattcaaaaaaggagtattttttttttccaattacagcactagaaagcaaatcacatttggaagtagtaastttaagtgctttaaaggggctaaggctctgtagtctcagtttttgaaaagacaggattttgagttgagtcctttcctcaacattgactgcatgtgtggccccagctgggcttgggtgaggacattggaacacgccctgattatgcccctcacccacacatgttcaaggtagctggtgctctggggcggtggggtggtggcagagtcggttggctttctccctgtttctgaacctactacagtttataggatgctctgcgaagatgatgcacgaagtactgttacggttatttccttcatcatcagccagtgtagctgtgatgcaaaattaagacaagcaatctgtgctcactgcgattcagggaaagcagtgatgagcattattttagtgctcattagtgcctaaggaactt

SEQ ID NO: 92253 - DNA, 1357 bp, Homo sapiens
cccctcttgggctaggggcagcaaattttttctgtaaagggccagaaagtggtattttaggcttttgtgggcctcataccgtatctgtgtcctttgtttatttatttatttatccaaaacaacacctttaacagcatacaaaccattctcttcagggactacacagaaacaggctgagagccagagttggtctgtgggtttgcagatccctggtctacagtaaagaatattgaaatagggtattatggcaatcaccaactctccgtgaaatagcactggggccctggagttgggtagggtacagaagtaccttagaacgctgtcaagaaaaatcaatgaaatcatgcatgggaaattggaacgtattgctggcatttttgacgtagtttcctaaacacagtgcctagaaaatatacaatgaggaatatttaattagggatgaatgctatgatctaccaggggaatcaatacaaatagtaaagattcttgggaaggacattctcaataattagagatgcttaacactatggtgagtgctcagcctttgaaatggtgacagaacgccacacacataaaatgccctttcaggagaaggtgaatgaatggctgtttataagtgatggggcctgggaccttggagcattaagctggcatagaggactccaggtgcctttgcattccagaaggccacattccctactcacctccctgatgtgctttggggctttgagtgtagaaaggttaaatactctttcgaatcaatatcgttaaaagaaagaagcctgtggttaatgatgacaaatggcaatgagccacaaaatcaaaagacaatgtaaatgttgtgactaacattttttaatatgatcatatccagcattcaaaaaaggagtattttttttttccaattacagcactagaaagcaaatcacatttggaagtagtaagtttaagtgctttaaaggggctaaggctctgtagtctcagtttttgaaaagacaggattttgagttgagtcctttcctcaacattgactgcatgtgtggccccagctgggcttgggtgaggacattggaacacgccctgattatgcccctcacccacacatgttcaaggtagctggtgctctggggcggtggkgtggtggcagagtcggttggctttctccctgtttctgaacctactacagtttataggatgctctgcgaagatgatgcacgaagtactgttacggttatttccttcatcatcagccagtgtagctgtgatgcaaaattaagacaagcaatctgtgctcactgcgattcagggaaagcagtgatgagcattattttagtgctcattagtgcctaaggaactt

SEQ ID NO: 92254 - DNA, 564 bp, Homo sapiens
cactgtgttctttctttcctataatctctttatggtcaaatgcagaatatttcagtctgcaatttcccatttaattcttgtcctcgtttgattatcatattggactccatttcagcagcaactgagctgacactcgatcctctattaccaatgactgtgtagaaccatctgcttgaatgattttcaccatatgtgttttaaaaaagacaatgttttatacatgcttgctgtaggtaatatttgacaatcataaaagaagagcaaaatcagagtcagctgtaaaattgraaggaaaaattaaaatcctatacatatatttgaaatcccaagagttaatatcggtgtattttctataatttctaagtcaattcaagtacaatttgaagatattagtttccaaactgaaaagaaaaaattcatcacagatcatgatctgtggttaacattttaaataatttagattaacattttaaaaattgatcaagtcaattatgatttgagataattttttattttcagtttactgagaggattgttaaataatttccttggccatacagaatt

SEQ ID NO: 92255 - DNA, 697 bp, Homo sapiens
ggtttaaatgctaaattgctatatggctttcaaagaagaatagatcttgaaaacctggctgtctggggctatcctattggagcataattaatgtatccagtctgaagttgacaggtacacaatgtataagaagataattcctttaaaattctgctgttttactcctggcaactcattttgagcttttccaatgagtcactgaaggagacttccttccgtccacatctgcctccagtgactaagtcagctgaaaataaacaggtaaaaatacgtcatctgaatcaactttaggactttgtgaatagcagaaaatttggagaaatgttattcacagataaagtctttctttgcagttaattttttctctaaagtacttcgaaaaaatatattccttcactgattcaatgttatgtttattattattttaggccatatttttcaattctcttttttaaaaagaactaaaattcattttcactaacattaatatttcccttttaatctaattcctctttcattttgtcatttaaaaacactgacaccaatctattttcccccaaatgtgaatgcacctagaatcataatgcaaagatatcttktgaaataataaaatttcttgggtttttatggttttaggtctaaaatttaagtctttaatccatctagaattaatttttgtataaggtgtaaggaaggg

SEQ ID NO: 92256 - DNA, 1175 bp, Homo sapiens
gaacttgtttttcttagttgawaagccccactcaacctttctttatttttcaatacacttagaaacccaagcattggtcattaactgaaataaagaagggctttaaaaggcttacaatgttattcatccctacgcatctccatatcttgtgttgaattcattcttgcctacatttaattctggaccttgtatttagcttgcaaaccttcatatttaaaaatgatgtgactgttaatgatgtctacctaaaagctgtttctgaggagcctaaaacaaatataagcaataactacttttagctccaagtgaatggataatctacaataatcaatatacaactttctgtctggcttttctgatatgctctcaatgaaaggactttagaatgagttggcctcaccacaggtctaggagaccagatagaagtctaatgtgactttagaaaaataagtgacaaacttcctgttcttttgattatacatagaaatatgagtgcataaatcagtagcagttggccttttgtatccatgggttaagcatccatggattcaaccaaccatatactgaaaatatttggaaaaatattctgtctgtactgaacatagatagactttttttccttaccattactccctatacaatgcaggataacaactgtttacatagcatttacgttgtgttaggtattatgtggaatctagagatgaacaaagaaagtggtttcttgagataaaatcattcctggtgaagaggctgtgaacattgctgaaatgacaacaaatgatttagaatattccataaacttaggagagatgtggtttgaaaggattcaaagttttgaaacaaattctgctatgggaaaaatactagcaaacatcatcgcatgctacagagaaatctttcatgaaaggaagcatcaattgatgtggcaaactttatcattgtctgcttttaataaattgttacagcaaccccaattagcatcaaccaccactctgatcagtaggcagctatcaacattgaggcaagaccctctatcatcaaaaagattacaactcgctgaaggctcagatgattgttagcaatttttaacaataaattatttttaaaattaagatacatacacattttattagacaaaatggtatcgcacacttaattgactatagtataat

SEQ ID NO: 92257 - DNA, 1010 bp, Homo sapiens
ttagtgataagtcttgtaaaatcccaatattctgaattgctatcctggctaccaccccaatatttaaactatgttaacgatggagacatacatgtcagcagtcagattttaatataaaattaacggctgactatctcaaagtcctaaattactattaattgtaaacaaacactagctctaagtatatcctttagagcagaaggttgtaagtcactgtatcaaagtcttaaatcagcagccacctaactagctaatgctttcaagctgtgccaggagagaaaggacaggatgatcttctcttactaaagagagatggatgaacagctgcaagctttgctgttgttttaaaacatccgggaaccagctactgagaataataaataaaatgtaagcagggtcagacttatttattacatatcctttcaaaatatccttttgtttaaaaaaagctaattaaaagtattgcccatattccctatagagagtacatttaaaacaatgcagagtagcaaaaccccttatgttccaaacataaggtgtgcctgtttttaagtcttggaataatttgccaacttccaatttaattatgactgagcttcaagtcaactgctgagtgttctagagatacggtttctgtagattccagctggtagcaagtggaaagactccaaataccttaaaaatatgccacggagtagaagggaggagagtagttaaaaaacaaggaagagaaagaacrttgttctttctggcttgaccactaaaaatataattagatgtatcacttactctgtttacttacagtctctctgcgtgtaagatttcttccaaaacctgccctatctttctggaaagccaaactaaaatccactctttgtacagtacaagaaaaacagaggactttaaattcatttaaataaagacatctagacatcttgagatattctaattttatcactaggaccccattcagttggaaaagacatagcatcatagttttccactctaaa

SEQ ID NO: 92258 - DNA, 816 bp, Homo sapiens
aagcatatttaaaacatgtaaatgtaatgtgttgctagtgtatttcatttcatgtttccatgcagttctaacaattttccaaattcaaattgactaggtgtagggaagtccttggtcgttgatatgataccttttttctgatatcattaagctgcagaaatttaatacctctgagttccaaacacatcgctagtcaatcagtgttcaggaaagacaatgtgtttatctgctggaaagaaatgcttacggactcaactgaaagggaaaaaatgcttttaaataatagtaaaacatgcgttttgcttttttaaaaaagtaaagcaaagaatctaatactaaaaaagctatgttgcaataacaatcaagagtgtrttgtgcatgatttttcatttatggatagcaagagacattaatatacttgcctatggcttgtgcattactattcccagctatgcagaaatggaacgtgatttacagcaacacattctttgttgctgttccaatatacctattgtcttccctgcattctgactggctggctggctgggaaaggggatggtgctggaccgcactcaatcattatggttgtctacaaatagagtaggtgtatgtgaactgagatttttcagctttgtatacccagcaagccaatcagagcacagaaagaacaatagctgaaggttttactgctctttaagtttccccactgattcccattgcgactgattatatcacagaagttatataaaaatcacattaaataccaactaaatcaagacttttcatgccttttttttcaaagcaatgaaattcagg

SEQ ID NO: 92259 - DNA, 1249 bp, Homo sapiens
atgcattttccttgtggtgaatttaagggttaagccatcccaacatgcctcactcccaatttataaaatggaaaatcttccataaatcaaaagttacaaacagactttgtaatgtcataactcttgcgacggctctcaccttgattgattcctatacatacattctggctgattaccgtaatgtgctcttgtgggacaattggcaccggatggggagaaagaagcaggcagggaagtaaataacaaatggacctggctcctcctcatcgagagtgatttcactccaatgttccatcatatcaactgggaaagagagtcgtagggtttaggcaatcaattacagatatgtgtagaggcagacacaatcatttcactgactgtcaccagtctcgagcagtgacaccgaaaagtgatccgtcactcgattttctctgacaccctgagaaagatggcagacacttgtagactaacaggccctggattggttagcttataaaattgaaaaatcgctgtgtttcaaacttatccaaacctttaaatacctctgttgctaagatttcatatctttctggcaaacatttagaaagattaccaataggctaatgacatcatgccagagtggaaggtaccgtctcttatcactgcaattgatggcgtcactgtatccaacaggagggttggaagggtgatggagtaagaaggaaacagctactttccttcaacatggggatgtggcagacaccacattggatgtgttccacctgctaggacaattggtgggaggacccccagagggttgatgaccccctgcctctctcccacccacatttccagagccctcagcccaccaagtttgcagccactggaggcctggacttagtcctctcccattcagcatgatttccctgagttgcccagcctttgccaggtgggattctacattgtctacrctgcagtgacggcagccttctttccatgagagtcagtccatgacaagtaaaaatgtttacggcctttgtctttcttttcatttaaaatgaaaatagtttcattaagacccatgggttcaaaagaaaaaaagggctgaacccagtggttcatgtctataatcccagcactttgagaggccgaggcaggaggaccacttgagcccaggagttcgagaccagcctaggcaacatagcaagaccctatctctacaaaaaataaaaaagaagaagaaaagaaaagaaaaaaattagccaggcat

SEQ ID NO: 92260 - DNA, 666 bp, Homo sapiens
tccacctcctccaggaagccttctctgtctaccccactctcaataatatccttgttccccgaaataaatatcaatcctggaccaaacgtctcacactagcagccctcagatgtactttttaggcctgtatcatgttttctaaacttttaatttgactcccagcattgaaaagcaagagatttcacctaaaaatgtgaacacacaccctctcttacaaatgtggaaagcctggcatcccctggccctcgttccttctggtgagcccagccctgcgcctggcacacagcctgggtgcaccagccacagccttcttggagcactggcttcagaggcacgcaggcccgatttgcccttcctggccatgggacatggcaaaaaatgcttcttgtgcagcctcaatttccccatttggaaccagggcttaaaacaaaacctccttcatggggttgttgggaagaagaaatgaactaataggtrgagcgggcttagcacgggccaggcattcagaagcctggattaatgatatttcgttttcttgttttcctttttgttttcttgctttggtatctctcatttcctcatggtcctatccttccccactcagtctgtctgttcgtccatccatctgccattctacaaatgcctactgtgttccgggcacatgga

SEQ ID NO: 92261 - DNA, 549 bp, Homo sapiens
tgaggtataggggtttgcaggcctaacgggacacgctgtcactgtgataggaacagcattagcaataataacagctgtccttccggactggttcccaagggctaggccctaggtgaataataagccttttctcgatcctttctgcagcccgagaggaaagccccatgctatccccatttcatagatgggaaaactgaggcttgaggacactttgcggcctccaagggctgttctcttcattcctccagcagagtggatatgagacggtgcagggtctggaatgtctgggyagaaggaagagctggagcaaaggcctggaggctggagagcgctgtcggggggcaagtggggcagtgtcccactgcggggtttcatctcagctctgccatgtcttggctacgtgacctctgacaccctactgggcctctttgatcccagactcacctgtagaatgggtgtgtgagaagaaaaccttctggagcggggtgttgaggagagaacagtgcctgacacatcataataataatgctgaatagatgttattttcat

SEQ ID NO: 92262 - DNA, 666 bp, Homo sapiens
  misc_feature (1)...(666): n = A,T,C or G
gatccttttgagagaagtggggggttgtgggtggataacatcaagagcctggagatggaccattatcatgggatggctcaggccaagtttagtacagtgagcagctaatatggaagggaaattcagggggtgcagaacaggaggtgagaaattctgaggtcagggtttcagatagctgatgaactgagagccagaaataagggggtcttatttttcttttttgcctgcttaagaactgcatccaatagctgtaaatacaatggtytatgctttccagtctgcctgagtcttcacaagggaatagaaagtttaccatcagaagatgccaaacacaaccaacttgcagctgtgcccagctatggcacaccaactgcagcaggcacccaaatctaccattgtcacttgatcagtgtgaattacctttcacttgagtgctttcaacgctggcagaagcaggttttgaacaaaaatgcattccactctctctgtgtacagatctgcctccctcccccacaaaagacaaaaactcgggaacacctgagtcagcttcagtagctggaaatgtnnnnnnnnnnnnnnnnnnnnnnnnnnnnnnnnnnnnnnnnnnnnnnnnnnnnnnnnnnnnnnnnnnnnnnnnnnnnnnnnnnnnnnnnnnnnnnnnnnnnt

SEQ ID NO: 92263 - DNA, 666 bp, Homo sapiens
  misc_feature (1)...(666): n = A,T,C or G
gatccttttgagagaagtggggggttgtgggtggataacatcaagagcctggagatggaccattatcatgggatggctcaggccaagtttagtacagtgagcagctaatatggaagggaaattcagggggtgcagaacaggaggtgagaaattctgaggtcagggtttcagatagctgatgaactgagagccagaaataagggggtcttatttttcttttttgcctgcttaagaactgcatccaatagctgtaaatacaatggtctatgctttccagtctgcctgagtcttcacaagggaatagaaagtttaccatcagaagatgccaaacacaaccaacttgcagctgtgcccagctatggcacaccaactgcagcaggcacccaaatctaccattgtcacttgatcagtgtgaattacctttcacttgagtgctttcaacgctggcagaagcaggttttgaacaaaawtgcattccactctctctgtgtacagatctgcctccctcccccacaaaagacaaaaactcgggaacacctgagtcagcttcagtagctggaaatgtnnnnnnnnnnnnnnnnnnnnnnnnnnnnnnnnnnnnnnnnnnnnnnnnnnnnnnnnnnnnnnnnnnnnnnnnnnnnnnnnnnnnnnnnnnnnnnnnnnnnt

SEQ ID NO: 92264 - DNA, 837 bp, Homo sapiens
tttcttgtgggtaatttgaaattcgtggcttttttttcaggtgatgctaaatatgtgggtcatgtgtggtttatttattccctcttattgatcctccagtttgtagggagatttgattcatgtggccataattgtccttaataraaaacactcctatggtttaacaaatttactgtgttttgtgtttcttctgtgtcttccccacttacttttcaaagttgtgagtacttactagatgtgcaacaaatgaattaatatacaaattataataaattgcttttttaaagtggtttttgccttgtcttattgctttggctcaaagttattgtggctttagtaaacgttctagtcttagaaccaataatttctcaggataaccactcttaattggaaaaccaattacaacttgagtctggtgaacagaaggatctccttcctttacctttgtcttggatctttgtattattgacttggaaaaatgttaattgatgtgttgcagtactgcagcaataattacctttaaatggaaatagctgttttatacttagtgcacaagaacagtgcaagggtgcaagactctaatacacagataaactctagacattggtggaacatttggtagatgaaaaagcttgtttaggattcagtataaacaggaaaggcaaagacaacagtaggatgccactgtttaacaaaaggaaattaagtttccctttttctgaattactggagagagtttagcaacatatgtgccttgggtgaagagttgatgaataaaagatctgagacagtttgtgacttccaaaatggcaagtaataaagatgttgcaaatagga

SEQ ID NO: 92265 - DNA, 448 bp, Homo sapiens
cttctattaaaacttatttgctgataaattcattggtrtattggtatatcctgaatatcagttaaatgcttgacactgcaaagtagttaatatgtgtttacatttctattaaatatagaaggaggaatgagttctacagaattttattcatccatggccaggacttgggaggaaagtaaagtggtagatagtcaatttgtggggagtgccaactttaataatgtaatattttaataattacataaaatacctaccagtggcctttaactggccaatgtcatgagtatcccaaccatcatagtgaggtaggtaacatagagcacaggctttggagtcagatgaacaggggttcagatcttgaccctgtcatttcttagctctgtgacttaacatctctgagcctcaatttcttcatctataagataggaatgaggtagaagtacatctc

SEQ ID NO: 92266 - DNA, 732 bp, Homo sapiens
tgcatgtttaatccttgactttttacgatgagattgctgtattagctgaagttttagtcactcttctgcatccatagtcttaaacattgtattttcacaatgtttaatcttttccacatctctgttagtatgagcttagagaatttaagtaaacttaattgtattggggtctgtggatagttttaaaaactaaaaataagcaggttttaaatatgccactttggggattggcaagatggccaaataggaacagctctggtctgcagctcccagcaagaccaacggagaaggcgggtgatatttctgcacttccaactgaggtacccagttcatctcattgggactggttagacagtgggtgcagtccacggagggcaagcagaagcagggtggggtgcccctcacccaggaagtgcaaggggctgggaactccatcccctagccacaggaagctgtgaggggctgtgtcacgagggatggtgctatctggcccagatactatgcttttcccatggtcttcacaaccctcagaccaggagattctckcaggtgcctacatcaccagggccctgggttccaagcacaaaactgggcagctgtttgggcagacactgatctagatgcaggagttagttttcataccccagtggcacctggaaccccagcgagacagaactgttcactcctctggaaagggggctgaagccaggcagccaagtggtcttgctcagc

SEQ ID NO: 92267 - DNA, 1147 bp, Homo sapiens
tctaatgtggaggttaaatatttgttttatttaaatgagatgttccggcttttgaaaaatctactacatttaactaaaataccatgtggtgcgaagtccattatgcttattttaccacagatacgcagactcagccaacgtgtttgtagggggaaaaccgtcatcaactcacaggatctttgttagcaggatacaattattatttatcaagttgattaagccacagattacttttttatactaagtagtttttaaaatgtgatgaaattggaatctgtttaatgtctttattatcacagagtcacacactaaatgttcaataaatacttgttttgaattgctctctttacttttcttaaaaaaacacttggacactggtagatgctactcagatgtgatctcattccatcttcatcaacaccactagaaaatcattataaacctaacattctgtgtgatgaaactcagacttgaaaaattaagttgttcattttttacttccaggattgtcttatttagggagccatgaccttcttggaattacaagtggaacacagaaattgagatattttacaagtatttcagctattttatcttttggacttgcaaaaacaaggaaggagattattgtatgacacaggctcaacatcttctttccttgaaattggatcagactttctgaggtctcctctttattaatagtatactgcttataatcgcttgttaattgtataccctcaattactccatcatactcatggaagaggggattaagagccaatggcaaaaaggaattggagggaaaggaatgtgcattgcagccacgtccctagatcttgcatacattttggcagtaagaccccctattgcatagctgtgcttgatttatggtcaatttgcattgtttatctttgcttttttttttactacaaagattcccatcagttcacatgccttttcattttttaatcatattctagttccttcccatttaatgctctatatactttttcctttaaccactaaaaattaatcaacccccataaattagacccaacacagctactaagtagttgctccaggactcaattttcaagtttaattcccttctcaaggcaraggttctctggagatattagtcctttgg

SEQ ID NO: 92268 - DNA, 538 bp, Homo sapiens
ggctaatatgccttgaaacatttggaggaggagctcaggataggtaaaaggtatattatgtctatatttaatgcaattatgaatgtgataattattattttctcattttcctctccattatttgttccttaattctccttacctgtcttattttggttaatcaaaatattttgcttttccattgcatttcctctacttgtttcttccccaaattgctttgtatttttttaaacattttttctctaggattgtagtacagatatccacattagcaaaatctatcttggcattaatattatatcacttactgattaatataggaattttacacctccttctttctttcgtactcttgttatcatgtttttctacttatatatttaaattcattatttctatagattatgtattagattcgtcatattttttwaaaaaaaaaaaatcccaactgctaatttctacatctgattcatctgaaggtctatttttacagactgattttactttttgtatatcttctcattaaaaaaattaaatt

SEQ ID NO: 92269 - DNA, 951 bp, Homo sapiens
aggatcagatgatactgtgaatagatctggctctgaatcctaacttacttctgtgattgcagcaaagttacttcatctgtagatttcatttctaaggtagctattttcccaggaatattgtaagtctcaaaaatattaattccttatcccatcccattgttaagggcaactgaagaagattgagtttaacattttgaagcaatttgaacactgcagaggagacagaacctctcagagttaatatagctccccaggttgctaaagcaactgagaggcttaggtactgtaagaatacgattcgttcagttctataaataacactgtatccttgcacttggcatatcttcttttttgggaacagggaggggaaggaaagaatgtcaagacaaatttacttttccaaataatttttaatgaataaaggtgatggtactrgtatgtcttctcttattttcattaagtcctctttgagaaacaagttaaaggaatagaaatttgtgggttctttagaagaataagtcacacacacataaaaatgacagcaagaggtttttttaaaaaaaaaaccataattatttttctatttcagatatatcttagagatgggtccttaggttgattgaagccagcaagcgtgtcatatgacccctcttttactcaaaacattttgttttccaagctatagatagtggtactttctagctctctcaatttgttttttttgtgttatctgtgtagtcaaccattgaaaaacagtttttaaagtattgcctatatgtgtatcttatttactactaggagaaaattctacttgtgaaatgttggatattgaagcttataaaccagatttggatttgtgataaagtttatattcccaaagttttgatgtctcctagtccatgattctgtatatatatgtatatataatatatatacacacaccccaatata

SEQ ID NO: 92270 - DNA, 951 bp, Homo sapiens
aggatcagatgatactgtgaatagatctggctctgaatcctaacttacttctgtgattgcagcaaagttacttcatctgtagatttcatttctaaggtagctattttcccaggaatattgtaagtctcaaaaatattaattccttatcccatcccattgttaagggcaactgaagaagattgagtttaacattttgaagcaatttgaacactgcagaggagacagaacctctcagagttaatatagctccccaggttgctaaagcaactgagaggcttaggtactgtaagaatacgattcgttcagttctataaataacactgtatccttgcacttggcatatcttcttttttgggaacagggaggggaaggaaagaatgtcaagacaaatttacttttccaaataatttttaatgaataaaggtgatggtactggtatgtcttctcttattttcattaagtcctctttgagaaacaagttaaaggaatagaaatttgtgggttctttagaagaataagtcacacacacataaaaatgacagcaagaggtttttttwaaaaaaaaaccataattatttttctatttcagatatatcttagagatgggtccttaggttgattgaagccagcaagcgtgtcatatgacccctcttttactcaaaacattttgttttccaagctatagatagtggtactttctagctctctcaatttgttttttttgtgttatctgtgtagtcaaccattgaaaaacagtttttaaagtattgcctatatgtgtatcttatttactactaggagaaaattctacttgtgaaatgttggatattgaagcttataaaccagatttggatttgtgataaagtttatattcccaaagttttgatgtctcctagtccatgattctgtatatatatgtatatataatatatatacacacaccccaatata

SEQ ID NO: 92271 - DNA, 951 bp, Homo sapiens
aggatcagatgatactgtgaatagatctggctctgaatcctaacttacttctgtgattgcagcaaagttacttcatctgtagatttcatttctaaggtagctattttcccaggaatattgtaagtctcaaaaatattaattccttatcccatcccattgttaagggcaactgaagaagattgagtttaacattttgaagcaatttgaacactgcagaggagacagaacctctcagagttaatatagctccccaggttgctaaagcaactgagaggcttaggtactgtaagaatacgattcgttcagttctataaataacactgtatccttgcacttggcatatcttcttttttgggaacagggaggggaaggaaagaatgtcaagacaaatttacttttccaaataatttttaatgaataaaggtgatggtactggtatgtcttctcttattttcattaagtcctctttgagaaacaagttaaaggaatagaaatttgtgggttctttagaagaataagtcacacacacataaaaatgacagcaagaggtttttttaaaaaaaaaaccataattatttttctatttcagatatatcttagagatgggtccttaggttgattgaagccagcaagcgtgtcatatgacccctcttttactcaaaacattttgttttccaagctatagatagtggtactttctagytctctcaatttgttttttttgtgttatctgtgtagtcaaccattgaaaaacagtttttaaagtattgcctatatgtgtatcttatttactactaggagaaaattctacttgtgaaatgttggatattgaagcttataaaccagatttggatttgtgataaagtttatattcccaaagttttgatgtctcctagtccatgattctgtatatatatgtatatataatatatatacacacaccccaatata

SEQ ID NO: 92272 - DNA, 1041 bp, Homo sapiens
taacacatacttttctaatttctctttaatgtttaattctgctttaaaaaatcttgtggctataaccaacacaactcaaatgctaactcatactgtatataacataataaattctgttcatattgactcaagatggtcttctttgagaaataagaaaccagatgcagtgagttttactaggaaacatcaagataattagacgttgtctatactctaagatacctttgatttcaaaagaagactatgaaaataaatacaatacttggcagcatacaaatgtcctaaagaactgagtgaatacatacaagtctttaggagaggaaagaatttcaaacagcagcagacatcaggaaatattttatgtaatggtaaattttgggctgtaccaaaatgatgctctgattttgacaaggagaaaaagcatgagatgtgcaagagagacaaaggtaycatgtctgaaaaatatggagtatatttaaaggacagggaccggagccctatttaattggtacatgtaaggtagcgtgggagttaagtacaaaaaagtaagaaaaaatgatcagagaaagcacctggaatgagagacccaatttctccttttaattgctaaattatagctgtggagtttaaaaaaattgttggaaaatttgaatgaaggtttttgctgcgtctttcctcctggcattgaaagacaggaaggttggttttaaccagaaccaagaaggtgaacgccagtaatttttaactgagagggaaaatggaagccaacctttttgacacattcaggtctccctgagagctgagcaatcagagaaactgacacatatatgaacggtgcaccttaatcttggagttcagtatctttctcttcccctgagccagggaaaaacatatacaaaagtggatatctgtgaatagaaaagagtctgtctttaaacctgagtttagaatctcttgtgtatttccagaatttagaacaggaggtaactcaagaagaatctgaaattacatgtatataatattgtgtaacattattatgca

SEQ ID NO: 92273 - DNA, 1041 bp, Homo sapiens
taacacatacttttctaatttctctttaatgtttaattctgctttaaaaaatcttgtggctataaccaacacaactcaaatgctaactcatactgtatataacataataaattctgttcatattgactcaagatggtcttctttgagaaataagaaaccagatgcagtgagttttactaggaaacatcaagataattagacgttgtctatactctaagatacctttgatttcaaaagaagactatgaaaataaatacaatacttggcagcatacaaatgtcctaaagaactgagtgaatacatacaagtctttaggagaggaaagaatttcaaacagcagcagacatcaggaaatattttatgtaatggtaaattttgggctgtaccaaaatgatgctctgattttgacaaggagaaaaagcatgagatgtgcaagagagacaaaggtatcatgtctgaaaaatatggagtatrtttaaaggacagggaccggagccctatttaattggtacatgtaaggtagcgtgggagttaagtacaaaaaagtaagaaaaaatgatcagagaaagcacctggaatgagagacccaatttctccttttaattgctaaattatagctgtggagtttaaaaaaattgttggaaaatttgaatgaaggtttttgctgcgtctttcctcctggcattgaaagacaggaaggttggttttaaccagaaccaagaaggtgaacgccagtaatttttaactgagagggaaaatggaagccaacctttttgacacattcaggtctccctgagagctgagcaatcagagaaactgacacatatatgaacggtgcaccttaatcttggagttcagtatctttctcttcccctgagccagggaaaaacatatacaaaagtggatatctgtgaatagaaaagagtctgtctttaaacctgagtttagaatctcttgtgtatttccagaatttagaacaggaggtaactcaagaagaatctgaaattacatgtatataatattgtgtaacattattatgca

SEQ ID NO: 92274 - DNA, 1041 bp, Homo sapiens
taacacatacttttctaatttctctttaatgtttaattctgctttaaaaaatcttgtggctataaccaacacaactcaaatgctaactcatactgtatataacataataaattctgttcatattgactcaagatggtcttctttgagaaataagaaaccagatgcagtgagttttactaggaaacatcaagataattagacgttgtctatactctaagatacctttgatttcaaaagaagactatgaaaataaatacaatacttggcagcatacaaatgtcctaaagaactgagtgaatacatacaagtctttaggagaggaaagaatttcaaacagcagcagacatcaggaaatattttatgtaatggtaaattttgggctgtaccaaaatgatgctctgattttgacaaggagaaaaagcatgagatgtgcaagagagacaaaggtatcatgtctgaaaaatatggagtatatttaaaggacagggaccggagccctatttaattggtacatgtaaggtagcgtgggagttaagtasaaaaaagtaagaaaaaatgatcagagaaagcacctggaatgagagacccaatttctccttttaattgctaaattatagctgtggagtttaaaaaaattgttggaaaatttgaatgaaggtttttgctgcgtctttcctcctggcattgaaagacaggaaggttggttttaaccagaaccaagaaggtgaacgccagtaatttttaactgagagggaaaatggaagccaacctttttgacacattcaggtctccctgagagctgagcaatcagagaaactgacacatatatgaacggtgcaccttaatcttggagttcagtatctttctcttcccctgagccagggaaaaacatatacaaaagtggatatctgtgaatagaaaagagtctgtctttaaacctgagtttagaatctcttgtgtatttccagaatttagaacaggaggtaactcaagaagaatctgaaattacatgtatataatattgtgtaacattattatgca

SEQ ID NO: 92275 - DNA, 1041 bp, Homo sapiens
taacacatacttttctaatttctctttaatgtttaattctgctttaaaaaatcttgtggctataaccaacacaactcaaatgctaactcatactgtatataacataataaattctgttcatattgactcaagatggtcttctttgagaaataagaaaccagatgcagtgagttttactaggaaacatcaagataattagacgttgtctatactctaagatacctttgatttcaaaagaagactatgaaaataaatacaatacttggcagcatacaaatgtcctaaagaactgagtgaatacatacaagtctttaggagaggaaagaatttcaaacagcagcagacatcaggaaatattttatgtaatggtaaattttgggctgtaccaaaatgatgctctgattttgacaaggagaaaaagcatgagatgtgcaagagagacaaaggtatcatgtctgaaaaatatggagtatatttaaaggacagggaccggagccctatttaattggtacatgtaaggtagcgtgggagttaagtacaaaaaagtaagaaaaaatgatcagagaaagcacctggaatgagagasccaatttctccttttaattgctaaattatagctgtggagtttaaaaaaattgttggaaaatttgaatgaaggtttttgctgcgtctttcctcctggcattgaaagacaggaaggttggttttaaccagaaccaagaaggtgaacgccagtaatttttaactgagagggaaaatggaagccaacctttttgacacattcaggtctccctgagagctgagcaatcagagaaactgacacatatatgaacggtgcaccttaatcttggagttcagtatctttctcttcccctgagccagggaaaaacatatacaaaagtggatatctgtgaatagaaaagagtctgtctttaaacctgagtttagaatctcttgtgtatttccagaatttagaacaggaggtaactcaagaagaatctgaaattacatgtatataatattgtgtaacattattatgca

SEQ ID NO: 92276 - DNA, 1041 bp, Homo sapiens
taacacatacttttctaatttctctttaatgtttaattctgctttaaaaaatcttgtggctataaccaacacaactcaaatgctaactcatactgtatataacataataaattctgttcatattgactcaagatggtcttctttgagaaataagaaaccagatgcagtgagttttactaggaaacatcaagataattagacgttgtctatactctaagatacctttgatttcaaaagaagactatgaaaataaatacaatacttggcagcatacaaatgtcctaaagaactgagtgaatacatacaagtctttaggagaggaaagaatttcaaacagcagcagacatcaggaaatattttatgtaatggtaaattttgggctgtaccaaaatgatgctctgattttgacaaggagaaaaagcatgagatgtgcaagagagacaaaggtatcatgtctgaaaaatatggagtatatttaaaggacagggaccggagccctatttaattggtacatgtaaggtagcgtgggagttaagtacaaaaaagtaagaaaaaatgatcagagaaagcacctggaatgagagacccaatttctccttttaattgctaaattatagctgtggagtttaaaaaaattgttggaaaatttgaatgaaggtttttgctgcgtctttcctcctggcattgaaagacaggaaggttggttttaaccagaaccaagaargtgaacgccagtaatttttaactgagagggaaaatggaagccaacctttttgacacattcaggtctccctgagagctgagcaatcagagaaactgacacatatatgaacggtgcaccttaatcttggagttcagtatctttctcttcccctgagccagggaaaaacatatacaaaagtggatatctgtgaatagaaaagagtctgtctttaaacctgagtttagaatctcttgtgtatttccagaatttagaacaggaggtaactcaagaagaatctgaaattacatgtatataatattgtgtaacattattatgca

SEQ ID NO: 92277 - DNA, 545 bp, Homo sapiens
agcttgcagtgagccgagatcgcgccactgcactccagcctgagtgacagagcgagactccgtctcagaaacaacaacaacaacagcaaaaagcaacaacaaaaaacaaaacaaaacaaaaaaactcacactttatgaataattttacaaaaatttgtaggggtcaactcagttgacaggaatccaatgtaggtaagtgtttctgacatgtaggttgtgtttttttaaattrtttacaatagcattatgcagaaagcagaagaaagtaaatcatagtcttctttgcattaatatatacatttgaagtcataacaagattatctccccctgcctgtttaactttctagtctatatgcttatagactttaaaagaaaatttaaatctgattaattgaagtatacatttgtctacagagagtatagcatcagtgcctgcatggactgggatatagtctggatatttgtccttgctcaaatatcgtgttgaattataatccccaatgctggagatggagcctggtgagagttatttggatcatgggggc

SEQ ID NO: 92278 - DNA, 545 bp, Homo sapiens
agcttgcagtgagccgagatcgcgccactgcactccagcctgagtgacagagcgagactccgtctcagaaacaacaacaacaacagcaaaaagcaacaacaaaaaacaaaacaaaacaaaaaaactcacactttatgaataattttacaaaaatttgtaggggtcaactcagttgacaggaatccaatgtaggtaagtgtttctgacatgtaggttgtgtttttttaaattgtttacaatagcattatgcagaaagcagaagaaagtaaatcatagtcttctttgcattaatatatacatttgaagtcataacaagattatctccccctgcctgtttaactttctagtctatatgcttatagactttaaaagaaaatttaaatctgattaattgaagtatacatttgtctacagagagtatagcatcagtgcctgcatggactgggatatagtctggatatttgtccttgctcaaatmtcgtgttgaattataatccccaatgctggagatggagcctggtgagagttatttggatcatgggggc

SEQ ID NO: 92279 - DNA, 775 bp, Homo sapiens
ggctggtactaagaattcacaaayagaaaatcatgttctattgctttctgtattagagaagagttattttgcccctcctatttttattttacttccttaaagtctacaccaattatgggaaagagcttatctgtgtatgtgctataaaattcaagtgttcaatgcaaaattcagccacactccatttttgtttactccttcaacctttcttcatcacatctctaaaattagaataaaggtgagaggactttaaaaataaaactaaaaaatatatctaaactaactgtgaattataaatcagcctttatatgttgtttttattgctttctgtattcatcttcattttaagtgatgatatcgtaatattcactaagatacaagattttcttaagttgtgtatgtttttccctagtcttgaaagtctactctaggtttacctgaccgctaaggctgccactttaccattgtgcttatgggatctactcttttattaataaaaataatacaaataaaaatagtcaataggcattaagcacttaccctcttgacaggcattgcattactttgggtctccaagatgggattagacatgcacaagttttactgagaacaactaaatagctgtgagggataaaaagaaggaaagcaaagaaaagagaaagaacctttagagagtgatgcagattgggtaggaagagtctcaacctgtaggacagttctaagaaagttgcaaccaggatgaggggaggcctcaagccaagttgctccttaaaag

SEQ ID NO: 92280 - DNA, 775 bp, Homo sapiens
ggctggtactaagaattcacaaatagaaaatcatgttctattgctttctgtattagagaagagttattttgcccctcctatttttattttacttccttaaagtctacaccaattatgggaaagagcttatctgtgtatgtgctataaaattcaagtgttcaatgcaaaattcagccacactccatttttgtttactccttyaacctttcttcatcacatctctaaaattagaataaaggtgagaggactttaaaaataaaactaaaaaatatatctaaactaactgtgaattataaatcagcctttatatgttgtttttattgctttctgtattcatcttcattttaagtgatgatatcgtaatattcactaagatacaagattttcttaagttgtgtatgtttttccctagtcttgaaagtctactctaggtttacctgaccgctaaggctgccactttaccattgtgcttatgggatctactcttttattaataaaaataatacaaataaaaatagtcaataggcattaagcacttaccctcttgacaggcattgcattactttgggtctccaagatgggattagacatgcacaagttttactgagaacaactaaatagctgtgagggataaaaagaaggaaagcaaagaaaagagaaagaacctttagagagtgatgcagattgggtaggaagagtctcaacctgtaggacagttctaagaaagttgcaaccaggatgaggggaggcctcaagccaagttgctccttaaaag

SEQ ID NO: 92281 - DNA, 746 bp, Homo sapiens
aagagtatatacacatctaaggatgtttcacctacggtgaaaggacttccagaaatgattatgtccattgacacctcaagagtagcatttgagcagaaccattgattttaaccctctctcagggaaggctttggaaaaagaaaagtaaataacctgtaaaagttttagctagttcaataagataaacttgggatgttgaagcaatcaatgttatgtgaagtttccaagttgttttaggggttatactaaatgaagcagaggtcctatttcatggttctatttctgaacacacctaccctgatacatttcctgtatatagaaatgtgaagaatgtcaggatgaggtggggtaaatggtgagtacagaaacgaccttggtgagaaagtaaacttgctcaggtagaaagggtctgattgaagatgaaaacagagagaattaacatgtatygatcacatttcaccggaaggccccatgttgcagactgttgcctatattttcagtagctactcttcttttcccaacccctttgtaacttttgaatgccttccacttttgtttgcgggactggctctgtgtttggagggagggaactgtgtctggccaatgaagtggtgactttcccactaccccatccatcactggggtggagtaactgacaaaacacagtgacacagcccctaccccagcaggagctaggcgtatcatctgcccaggcacctgatcttcgctttccagggctgagaaaa

SEQ ID NO: 92282 - DNA, 534 bp, Homo sapiens
gggccaggcatgggtgcataagaacatctgcagtgctagctctgtgtgcaggaaaggtactcaggcaccagggctttcccagacagcaggaggagtgaagcatcmtcacatcagtgcatctactgcagagggagcactggcctgcgtcagagcccatggtgcccttcctctgtgccactctgtgtccctgtccaggcctcatggctttctgagcctcttttctatgcgagaggaggaatctctattttgactgcattcatagccatgaatgaatccaaggagaaggggcagagctaacactggtttgggctccaaatctcagaatcttttgaccacagttcccagcatcatcccatcacagatgatttagcatctgccaaaagctttgtaaactgtcccttttggagaatttcttggacaggggagagtgaccacttcataggccacggctatattcttgctaccccaaaggctgcccctgcccagtccttagctgtgggatgataaatatacccgagtggctttgcttctgtc

SEQ ID NO: 92283 - DNA, 534 bp, Homo sapiens
gggccaggcatgggtgcataagaacatctgcagtgctagctctgtgtgcaggaaaggtactcaggcaccagggctttcccagacagcaggaggagtgaagcatcatcacatcagtgcatctactgyagagggagcactggcctgcgtcagagcccatggtgcccttcctctgtgccactctgtgtccctgtccaggcctcatggctttctgagcctcttttctatgcgagaggaggaatctctattttgactgcattcatagccatgaatgaatccaaggagaaggggcagagctaacactggtttgggctccaaatctcagaatcttttgaccacagttcccagcatcatcccatcacagatgatttagcatctgccaaaagctttgtaaactgtcccttttggagaatttcttggacaggggagagtgaccacttcataggccacggctatattcttgctaccccaaaggctgcccctgcccagtccttagctgtgggatgataaatatacccgagtggctttgcttctgtc

SEQ ID NO: 92284 - DNA, 1006 bp, Homo sapiens
agcaagatgactatttaaatagtctagaacttaattatgtctgtatgactgctgttattattttcaggctaactgtccaccagggtytgctcttggggcctacaggctgcccttaggcccttgccatgtgctaccctctgttcacaacagggtaattacttcatccttcatgcaagcatgggaatttctttctgaggcttcttcttcttttaaaggactcacctaattcatccttaataaataatgaattatgctcattcattttttattcatactgcaaaccatttaaatttatcaatttgctaagttctgtggtagatacagaagaaatgactcacttaattaggccagacccacccaggatcatcttcatttgttgaaacttaaagtcaactgataagtttgtaatgagctcataaaaagaaaacgctgcatgccaaatccaattctgatgtagtgcttgacataatggatattcttaggtcagggatattcttaggataggctctcgaaagacatttccttgttgttgttgttgttggatttttttccaacttttattttaagttcagcggtacatgtgcagaatgtgcaggtttgttacataggtaaatctgtgccacggtggtttgctgcatagatcatcccatcaccattaagcccagcatccattcgctattcttcctgatgctctccctcctcccaccccagtgtgtgttgttcccctccacccatgtgtccatgtgttctcaacattcggctcccatttataagtgaaaacatgcagtatttcgttttctgttcctgttttagtttgttgaggacaacagatgctggcaaggttgcagagaaagaggaatgttttgcactgttgctcaaggtataaattcaaccattgtggaagacagtgtggtgattcctcaagacctagaggcagaaataccacttgacccagcaaccccattactgagtatataccgaaaggaatataaatcattttattata

SEQ ID NO: 92285 - DNA, 1006 bp, Homo sapiens
agcaagatgactatttaaatagtctagaacttaattatgtctgtatgactgctgttattattttcaggctaactgtccaccagggtttgctcttggggcctacaggctgcccttaggcccttgccatgtgytaccctctgttcacaacagggtaattacttcatccttcatgcaagcatgggaatttctttctgaggcttcttcttcttttaaaggactcacctaattcatccttaataaataatgaattatgctcattcattttttattcatactgcaaaccatttaaatttatcaatttgctaagttctgtggtagatacagaagaaatgactcacttaattaggccagacccacccaggatcatcttcatttgttgaaacttaaagtcaactgataagtttgtaatgagctcataaaaagaaaacgctgcatgccaaatccaattctgatgtagtgcttgacataatggatattcttaggtcagggatattcttaggataggctctcgaaagacatttccttgttgttgttgttgttggatttttttccaacttttattttaagttcagcggtacatgtgcagaatgtgcaggtttgttacataggtaaatctgtgccacggtggtttgctgcatagatcatcccatcaccattaagcccagcatccattcgctattcttcctgatgctctccctcctcccaccccagtgtgtgttgttcccctccacccatgtgtccatgtgttctcaacattcggctcccatttataagtgaaaacatgcagtatttcgttttctgttcctgttttagtttgttgaggacaacagatgctggcaaggttgcagagaaagaggaatgttttgcactgttgctcaaggtataaattcaaccattgtggaagacagtgtggtgattcctcaagacctagaggcagaaataccacttgacccagcaaccccattactgagtatataccgaaaggaatataaatcattttattata

SEQ ID NO: 92286 - DNA, 728 bp, Homo sapiens
atgtctgaatgaaatggtgcagccttaagtcctctcagaaaattgcctgatatacattgatccctcaaaaagtggtagttattatttattagacaatgaggttgaagctacaattgaagggacagaatgccctttgccaataggttccatgattctgatgcagtatagatcatttttctatccaagattatatgggatctaaaaattggcaaaaagaagaatggagtcagacctgaaagaaaaggcaagaaaccaaataagactgtggatattaaccaacccaaagaaaagaagaaaaagtaatagagctggaatacagtcaggagtctgggaaccatggagataaagaataatagtgaacaggaatggagaaatagataaaggtctgaggaaattgtcaggcacttgtgattgtaggcaagtttcctcacctataaatggataaatttgattaataaaacactgctcctgggaatgacaataaaattaaataaggaaccatccacatgaacatttgccacaatggcagacagagagtagacctggtcraggtcagctattattatattataatgatggtgttgggtaggtcacagacaccttctgcacagttaacattcagccatacctgacacaggccttaaggcaatagaaattacaaaagagtaaatgtggatttgaagacactaaaagaagcactggaatgaaaaactggaagtatagagaga

SEQ ID NO: 92287 - DNA, 752 bp, Homo sapiens
cctttggagttggctgtggctatgcatctaaattttgaccaatggagtgtaagcagcattgagcttatactcacctctcttcttccttcctgctgcctggaatacagacttgatggctggagctccaagcagccatcttgggccaagaaacgcyatgtagagaggcagagagacaggagcgtgagtctcctatgattatgtgcaactaccatccacagaactttctactttcagagctctttatgcaagttagaaataaacttccaacttatctaagctattgttattttttggttttctgatacatgcacacaaatgtaatcccaaacaatagagaaattccacacaagtattatctaattagattttttttaagtttatgagtgcacagcataatcagggaaactaaatacttcaggttggctccttagaaagggctaatgaatatcccaagtggaaaataagagataaacaggaaccttacctaatgataaaagaataatgtccacaggaagatttttttaatcttaaatttgtatgcacttaatatgacagcttcaaattatgtaaagcaaaagcaaccaaactgaaaagaaagagaaacaaatccacaatcaaagttggagattttggctgggtgcggtggctcacgactgtaatcccaacactttgggaggccaagatgtgtggatcacttgaggtcagaagtttgagaccagcctggccaacagagtgaaacccaatctctacta

SEQ ID NO: 92288 - DNA, 813 bp, Homo sapiens
ccaagccagccccaagccagaatttatgcaccacctcttaactctagaatcctgtcctgaccccaggatgactgcctcccacactcagcagccaagtggaagctgtggctcactctcctgtgtggtctctggccgcactggtttccccttattgctgctgtgtctgcctctgtttctggctggagttttttccttagtgcatccctaggaacctctcatatgctgctcaccttgcccacagagaggctgatgctcccttctctcccgctttctccagctctgcattgcacctggcaactcccccagacactgtagagtaggaatggggagaatccagttgtagaaygcagatccctgaacatcctgcagaggacctgagcttggctgtttgcatggcacaggggcatgccggcagccctgtgtccacacactgcgacagagcaacgtctgacatccatcaaagcagaactaacacttactgagcatatctgtgtatcagagatctcaaacagtgttttccttttgacagatctatgggcaagtaccctaggtagccccacttaacagatgatgaactgacgctcagagaggtaaatgccttggcccaagattgttcactttactagcagaagatatttaactcgatgctaggactgcctgatgcttaaacaccattttctaatgccttccactggcaggaagtaggactagagtcctgcaactagaattgacagaggttactttaaatgtcctccttctttagcctccctcttttttttttctttttctaaacagagatgtagcctcgggaca

SEQ ID NO: 92289 - DNA, 618 bp, Homo sapiens
gtggtgtctctgagggatccagggccaggttaagcgttcaggsgacacagggagaagggcctgagaggctcccactcagaaagctcattgcttaaaccagcctagtgcttcccatggccagtagatccaggcttgcatgtggcaattctgggaattcttatgcctaggagtctgcttaaaaacaaaaattcatgaatctatccaacatccttgttttctagacagggaaattgatgttcagggagacttccatggccaggaggcacagccaggaagcaacagatggggcagccaagcaagggtggacagagtcttggtaccacgagtcccagagctggtgccctcccacagccccgaccactccaggtcctggccaatggttggtcagctggagagggggcaaaggaggcagcctgcagtggagaacatcctcttccttggacacagctgggatgagacccctcctttgccctttaccaaacacaaagcctttgggcgatgacttcctggtgatcaggggaggtccctgcccacttcccatgtggggattcaatgagacgacagatgggaaatgcaaggtataagcttaacaaaaaccaaagtctgcaaaaaagatcc

SEQ ID NO: 92290 - DNA, 1407 bp, Homo sapiens
atctaggactgcttcaaacaacaaggagggcaggagcatgtggggccagatggaatgagaggagaggtggctgccaaagctgggggtattgggggatggtgctgttacactgttcccttccatatttctttgaaagtttctgtaagtaaaaggtggttttgtttgcttttcaaagtcctttcaggttgtttaatgaagggacaagccaggcggtgctgtggagcgatgatgccaatggtggcgttgaaggatggataaggagcctggaaacaaggaaggcctgagtggcagggtcttagagacctaaagaggctcttacagactggaaccctggtcctggccctgaatgggctacctcaagcccatgtgcctctcagagcttcagtgtccacagccattaacccaggagaaagaccttccccttccacagtgatgtgaggctcctctgagaagcacccaggaagctgcttgacacccgctgtaagcagggtggctattgggcactgcacatacattaggagcaacaatgaggcacaagctccacgctgaactgcgcatggcccacccactctcggccaggcctggccgggtctgtgagtggacacatagtgactctggctgccagtgaccaaggggctgtggagggaatgctcgatgccagggagctggggaggagcacagcagagcccttgtgatgccccacccaacagcacagtgacaagagagtcatcctgcccttgacctttagctaaagaaacaaggggcctcagaactggagaaaatcaggaactgtttacaaggccagacgcacggtccagggtagggcagacagacaggagattgcctcgaggaccacgggaaagcacagagagaggtcgggcctccagggaactgcagcctctgttctcagcactctgagatgagggaaggaatctaaaggtatggcagtaagaccacagcctactgctgccactgctcctgttgtcgtgtgccagaggccgaacacgccgcatactgaaaagatgacagcagttagagtgaccaaccatcctggtttgcccaggactaaggaatttcctgacacacrggacttcaatgctccaattggcaaaccaggaggggtgggtcaccctaactgctgttgttactagagcagcacaattctcatagaacctgagggctcaaaaaaattctctaggtcaaatgctttgctttgcacataagataactgtgatccaaagaggtcatgacctgcaaaatcactcagtttgtggcaaggctgggacagaaagccaggggcccattttctggtccgggattattgatttctgctggatggtgctgcctcctggcaccctctcctgatgctctctacctgtgaagtagggcttaagaaacaatagcgga

SEQ ID NO: 92291 - DNA, 1407 bp, Homo sapiens
atctaggactgcttcaaacaacaaggagggcaggagcatgtggggccagatggaatgagaggagaggtggctgccaaagctgggggtattgggggatggtgctgttacactgttcccttccatatttctttgaaagtttctgtaagtaaaaggtggttttgtttgcttttcaaagtcctttcaggttgtttaatgaagggacaagccaggcggtgctgtggagcgatgatgccaatggtggcgttgaaggatggataaggagcctggaaacaaggaaggcctgagtggcagggtcttagagacctaaagaggctcttacagactggaaccctggtcctggccctgaatgggctacctcaagcccatgtgcctctcagagcttcagtgtccacagccattaacccaggagaaagaccttccccttccacagtgatgtgaggctcctctgagaagcacccaggaagctgcttgacacccgctgtaagcagggtggctattgggcactgcacatacattaggagcaacaatgaggcacaagctccacgctgaactgcgcatggcccacccactctcggccaggcctggccgggtctgtgagtggacacatagtgactctggctgccagtgaccaaggggctgtggagggaatgctcgatgccagggagctggggaggagcacagcagagcccttgtgatgccccacccaacagcacagtgacaagagagtcatcctgcccttgacctttagctaaagaaacaaggggcctcagaactggagaaaatcaggaactgtttacaaggccagacgcacggtccagggtagggcagacagacaggagattgcctcgaggaccacgggaaagcacagagagaggtcgggcctccagggaactgcagcctctgttctcagcactctgagatgagggaaggaatctaaaggtatggcagtaagaccacagcctactgctgccactgctcctgttgtcgtgtgccagaggccgaacacgccgcatactgaaaagatgacagcagttagagtgaccaaccatcctggtttgcccaggactaaggaatttcctgacacacaggacttcartgctccaattggcaaaccaggaggggtgggtcaccctaactgctgttgttactagagcagcacaattctcatagaacctgagggctcaaaaaaattctctaggtcaaatgctttgctttgcacataagataactgtgatccaaagaggtcatgacctgcaaaatcactcagtttgtggcaaggctgggacagaaagccaggggcccattttctggtccgggattattgatttctgctggatggtgctgcctcctggcaccctctcctgatgctctctacctgtgaagtagggcttaagaaacaatagcgga

SEQ ID NO: 92292 - DNA, 696 bp, Homo sapiens
accatgtcatctggaggctgcctgagacatggtttctgttcgtaagtccctattaaatgtttccttctgatcactgtgtttgtcagcctctttctttggcctctcagctccctgggcctttggaggtaggtttgcatagacctgctcaccgcagaagagtgcttaatatatwttttttttttttttgagacggggtctcactctgttgcccaggctgaagtgcagtggtgccatctcagctcacggcagcctccgcctcctgaggtcaagcaattctccctcctcagcctcctaagtagctgggattacaggggtgcgccaccacgcccagctaatttttgcatttttagtatagatggggtttcaccatgttgaccaggctggtatcgaactcctgacctcaggtaatccacccgcctcggcctgccaaagtgctgggattacaggcatgagccactgcacccggccttaatacatttttgttgaatggatgaagtgcttctccataagggatgtttgggttcaattttctggctcccacaaacccaccttctgagtctcagaccctctccttgtccatacctgtccatgcggagataggcggtgtggtgttacgatagatacatactggtttgcatctgcagatccccgttcctaactcccacagtcctgtgataatgttggggcacttgaggc

SEQ ID NO: 92293 - DNA, 547 bp, Homo sapiens
tgcagcttatggacacaccataagctgggggcacccatggaagtgctttagcttgtaatctccatcaacatctcccacaagacacctccycaaacttgatctggtttggggagtcactgctgtctggaggaaaacatctctaatttagccctcgagattacacatattaagttcaactaagtacgaactcaaggtatattaaatacaatttccaaacacaccagccatcatgagtgagaatcagcagaaactatgaatgacagacttaggccatctcaggtttttggagtgatcagatacagattattttattaattaattaattaattaattatttttgagatggagtctctgttgcccaggctggagtgcagtggcatgatcttggctcactgaaacctctgcgattctcctgcctcagcctcccaagtagctgggattacaggcgtgcaacaccatgcccggctaatttttgtatttttagttgagatggggttttgccatgttagccaggctggtctcgaacccctgacctcagatgatccac

SEQ ID NO: 92294 - DNA, 1600 bp, Homo sapiens
ggctaattactattttcttcctattagattctaattatatacagtattttcattataaagcgtaatgtttcccagagaaccatgtcaattatacaggcgatattaccggaggtctggtttacctcattaagcccaagcgatgaagccatgcatctgattaaacccacaatttgcagggtggactttaactatatgtgggtaccagtgagtctcacctaaaacttgctggatgtgggagagagctagaaagcctaggagaagctcctcaaaggatgtggcagcccatttggatgtgttggattttctgcaggaagaacaagtgttgatttatattgtctatttttaagcaccccatgatttctagtttggctgaggcatgaatttgatgctatcatgaaagagtaggtcttacccttgcttcaaatgattctggtagaacacccagcatttccacctccatgcctcaatatactgaccatctgatatctttctgaacttctggtttacacacccaacaaccatttgatatttcatgagatgtctaatagacaccttatccttaatatacctaaaatagaattcttaatttctgctctccctgagccccaaatccattcatgcttatattactcccatctcggtaaatgccataaccttgtctacccagatgctcaagtgaaatgccaggagctcatactgatgtccttctttcctttatctctcacatcgaatccacaaagtctcctgtgaaccctaggtcccaaatatatcctggatccatccagttcttcccacctgcactgctatacccctagtctaggccaaygtcacccctgctatatagtgacttggtctccttgtttcatttcctttcacatgtatgtatcccttctcctaatgccatcaaggtagtttacgaaaaaggaaaaaaaaaatccataaagaccatgttactctcctgcttaaaagccatacagatgttgttttggaattaaaagcaaacttcttactgtatcagtaagacactccatgattatacttttgcctacttattcaacaagtattattcaaggtctaatataatatgtgccagacactgttctggaataaacagttcttgtttgtatgaaaataaaataataaaatagacacaatcaccctcatgagcactgctttttcctatcatcttgatagtacttaatatttcatgtttgtttttatccagctggcttgtctaaacggcctgggtccatgtctgtcccccatactccagccccagcccctgtacctagaagcttctcaggaaatgtgggctcttctgttatgatttgacacttgagtaggaattgaaaaacaaacttgattaaaaaaacacacttttattggattctaaaggaattaataaaatccttcctttggggattaataaaacaggattttttaatattagctttatttttttctacttcataaaagcattttaatcaacattctgagctttaaaggatggattcaagctctgttctctatttggggtgtgggcaggggtttaatttatagataagttccatttttgatatttgctcctctctctgaaaag

SEQ ID NO: 92295 - DNA, 702 bp, Homo sapiens
ataaagaaggcagagaaaaagagggtcaggggcatgtttcaggttgatcatgcagctcactggtccagctgaattgcatacctaccagagagatggtgatacaaaagtgggyatgataacatttatccttcacccatcgttaatagtccccagggaaaacctcgggccagatgctcagcagaggaagtgtccttgaattttgaaaaggaggaagagaccaatggccatgataacaaagttccacgtaaggtctcacgtttcacaaaatctttacaatactcaagatgatctctctggggaaggtgaaaggaattataattacatctgtgaagaaggcttgagaagggaaaaaaaatcctgccatatggtgtgtggaaaatgttttggaactgaataaaaaatatggcgggtgtttttctcctcccatttttgtttatacatctacgttatgcaggctgactggggaacacggataagtttttctttcagaatagaaatgcactgggtaatttaattttatgaccgttaataatatgggtctctcccggcaagcaaagacatttacaaacttataatcagattttgtgatttaggtgtaaaccaatcatccacaagaggctgggagatatttccatcccgctttcccattgcagtgggatttcatgaaatgcaaaaaggagatatagtaaaaggttcaggatc

SEQ ID NO: 92296 - DNA, 702 bp, Homo sapiens
ataaagaaggcagagaaaaagagggtcaggggcatgtttcaggttgatcatgcagctcactggtccagctgaattgcatacctaccagagagatggtgatacaaaagtgggtatgataacatttatccttcacccatcgttaatagtccccagggaaaacctcgggccagatgctcagcagaggaagtgtccttgaattttgaaaaggaggaagagaccaatggccatgataacaaagttccacgtaaggtctcacgtttcacaaaatctttacaatactcaagatgatctctctggggaaggtgaaaggaattataattacatctgtgaagaaggcttgagaagggaaaaaaaatcctgccatatggtgtgtggaaaatgttttggaactgaataaaaaatatggcgggtgtttttctcctcccatttttgtttatacatctacgttatgcaggctgactggggaacacggataagtttttctttcagaatagaaatgcactgggtaatttaattttatgaccrttaataatatgggtctctcccggcaagcaaagacatttacaaacttataatcagattttgtgatttaggtgtaaaccaatcatccacaagaggctgggagatatttccatcccgctttcccattgcagtgggatttcatgaaatgcaaaaaggagatatagtaaaaggttcaggatc

SEQ ID NO: 92297 - DNA, 572 bp, Homo sapiens
tcaacagcccacaatatcagtataattattctcattacaattaaattcatgtcttggatctttgaggctgtttgtgagtagctgaaacaatgaatagtaattcacaaatgtcaagggtctattctaatttacctgtctgtctcccaaaatagactatgaagacttgaactttttttttgtttgatttgttttttgagatggagtctcactctgtcgtccaggctcgagtgcagtggtgcaatctctgctcactgcaacctctgcctaccaggttcaagcagttctcctgyctcagcctccccagtaggtgggattacaagcatgagcaaccacgcccagctaatttttgtatttttggtagagagggggtttcaccatgttagtcaggctggtctcgaactcctaagtgatctgcctgccttggcctcccaaagtgctgggatttataggtgtgagccaccgcgcccggccaattttgaacttatgaaccatatcttattcatcattatattctcaacaatacctagcacgattcctgacgcatagtaggggctcaaaattatttttccaat

SEQ ID NO: 92298 - DNA, 585 bp, Homo sapiens
gtccgtttggttttggcctcactaggaggtccatcagtttatgtcacttacttgaaatttttgacctgtgaacttagaagttggaagattctttgagcatgaggttaatttaacaccatgaatttgtctttcagtcttcaattatacttcctttttgatcactctcttgcttacactttagtactgaactgattatgggttctacctaataatattgcatctgcagcctctggtgtgtcaagtttatagtcctatgccaaaatagatgttttcactgcctcctgctattgactcatatggaacaaataaagctgctttttagagaacatttttctctcatgtaatgaacaggttcaagattagcttgagtctacttggtaaagggagtcactcaagcctacagcaagccacaygtgtcaatgccaacaagtcctgatttccctacaactgagtctgtctctcagtcaagccttcttaggaaaagctttgcctgaaaagtaagctaaggcaggcagctgcccaagattttcttgcccaacagactcttaaacccctaaagcccagtgccaagtctctgtgtaataa

SEQ ID NO: 92299 - DNA, 1085 bp, Homo sapiens
taatagtaatcagcttcacaagatacaaagaaaaactaaaagctgagaaaatgcagcagtttctaacattgtaatgagagagtcggtattttagaaccttaagatgttatacatcataagagacacctaaggtcagctgaagtcaaaccactgycttgcatccatagataattaaaatgaccccatgtttcaagacgtaagtcaaggattttcaggagtacagtaatatttaatggctaaccttcaggaaattttctctgcaacctgggaaaggtactgaaaagaagcttatggaccaagaagagaatttaatgggctcttaacccctttcaattgaggtacaagatgtgggattaagaaatggagcaactatctaagtctcttcattctattttttcactccgttcagaaagagtccagctagcaaagcagtcacttgaaattgtatgtgcatcttcattcttttgagtactgaactttcacgtttatgagagtcttatataggtatcttagacaatctaaaatctcgattttctacctgtaaattagtgtattatagtgatatcaaaaagagtgatttttaatgtgataacggtatcagaatatcacattgaaataaaacactcctgttggactgagagtattataaaactaaaatgctaactttaacttgtaaaagggttcattttctgaccttgaatatgtttaattgttacaaatatgtgttatcctaattaaacatgtctcaataattatatgaagaagctgcaaagcttttaagactcttactaatccagcaacctctggttgcttgtttctaatttgttcattttaatataccaattatgtgaattagagcaaataaacatattgtgaaaaatctctcttctgagactctgaccctcaaatgttttgaatcagatagaacaatccttgttctagctcaattatttagcttctagagtagattaaaggattaaaaagctaatttatttaattgtaaatgagtaacttatcttgaggtttcacaattttcattgtgaattttcaagtgctaaatattgttttgatcaaatacaaagagg

SEQ ID NO: 92300 - DNA, 1085 bp, Homo sapiens
taatagtaatcagcttcacaagatacaaagaaaaactaaaagctgagaaaatgcagcagtttctaacattgtaatgagagagtcggtattttagaaccttaagatgttatacatcataagagacacctaaggtcagctgaagtcaaaccactgtcttkcatccatagataattaaaatgaccccatgtttcaagacgtaagtcaaggattttcaggagtacagtaatatttaatggctaaccttcaggaaattttctctgcaacctgggaaaggtactgaaaagaagcttatggaccaagaagagaatttaatgggctcttaacccctttcaattgaggtacaagatgtgggattaagaaatggagcaactatctaagtctcttcattctattttttcactccgttcagaaagagtccagctagcaaagcagtcacttgaaattgtatgtgcatcttcattcttttgagtactgaactttcacgtttatgagagtcttatataggtatcttagacaatctaaaatctcgattttctacctgtaaattagtgtattatagtgatatcaaaaagagtgatttttaatgtgataacggtatcagaatatcacattgaaataaaacactcctgttggactgagagtattataaaactaaaatgctaactttaacttgtaaaagggttcattttctgaccttgaatatgtttaattgttacaaatatgtgttatcctaattaaacatgtctcaataattatatgaagaagctgcaaagcttttaagactcttactaatccagcaacctctggttgcttgtttctaatttgttcattttaatataccaattatgtgaattagagcaaataaacatattgtgaaaaatctctcttctgagactctgaccctcaaatgttttgaatcagatagaacaatccttgttctagctcaattatttagcttctagagtagattaaaggattaaaaagctaatttatttaattgtaaatgagtaacttatcttgaggtttcacaattttcattgtgaattttcaagtgctaaatattgttttgatcaaatacaaagagg

SEQ ID NO: 92301 - DNA, 1085 bp, Homo sapiens
taatagtaatcagcttcacaagatacaaagaaaaactaaaagctgagaaaatgcagcagtttctaacattgtaatgagagagtcggtattttagaaccttaagatgttatacatcataagagacacctaaggtcagctgaagtcaaaccactgtcttgcatccatagataattaaaatgaccccatgtttcaagacgtaagtcaaggattttcaggagtacagtaatatttaatggctaaccttcaggaaattttctctgcaacctgggaaaggtactgaaaagaagcttatggaccaagaagagaatttaatgggctcttaacccctttcaattgaggtacaagatgtgggattargaaatggagcaactatctaagtctcttcattctattttttcactccgttcagaaagagtccagctagcaaagcagtcacttgaaattgtatgtgcatcttcattcttttgagtactgaactttcacgtttatgagagtcttatataggtatcttagacaatctaaaatctcgattttctacctgtaaattagtgtattatagtgatatcaaaaagagtgatttttaatgtgataacggtatcagaatatcacattgaaataaaacactcctgttggactgagagtattataaaactaaaatgctaactttaacttgtaaaagggttcattttctgaccttgaatatgtttaattgttacaaatatgtgttatcctaattaaacatgtctcaataattatatgaagaagctgcaaagcttttaagactcttactaatccagcaacctctggttgcttgtttctaatttgttcattttaatataccaattatgtgaattagagcaaataaacatattgtgaaaaatctctcttctgagactctgaccctcaaatgttttgaatcagatagaacaatccttgttctagctcaattatttagcttctagagtagattaaaggattaaaaagctaatttatttaattgtaaatgagtaacttatcttgaggtttcacaattttcattgtgaattttcaagtgctaaatattgttttgatcaaatacaaagagg

SEQ ID NO: 92302 - DNA, 1085 bp, Homo sapiens
taatagtaatcagcttcacaagatacaaagaaaaactaaaagctgagaaaatgcagcagtttctaacattgtaatgagagagtcggtattttagaaccttaagatgttatacatcataagagacacctaaggtcagctgaagtcaaaccactgtcttgcatccatagataattaaaatgaccccatgtttcaagacgtaagtcaaggattttcaggagtacagtaatatttaatggctaaccttcaggaaattttctctgcaacctgggaaaggtactgaaaagaagcttatggaccaagaagagaatttaatgggctcttaacccctttcaattgaggtacaagatgtgggattaagaaatggagcaactatctaagtctcttcattctattttttcactccgttcagaaagagtccagctagcaaagcagtcacttgaaattgtatgtgcatcttcattcttttgagtactgaactttcacgtttatgagagtcttatataggtatcttagacaatctaaaatctcgattttctacctgtaaattagtgtattatagtgatatcaaaaagagtgatttttaatgtgataacggtatcagaatatcacattgaaataaaacactcctgttggactgagagtattataaaactaaaatgctaactttaacttgtaaaagggttcattttctgaccttgaatatgtttaattgttacaaatatgtgttatcctaattaaacatgtctcaataattatatgaagaagctgcaaagcttttaagactcttactaatccagcamcctctggttgcttgtttctaatttgttcattttaatataccaattatgtgaattagagcaaataaacatattgtgaaaaatctctcttctgagactctgaccctcaaatgttttgaatcagatagaacaatccttgttctagctcaattatttagcttctagagtagattaaaggattaaaaagctaatttatttaattgtaaatgagtaacttatcttgaggtttcacaattttcattgtgaattttcaagtgctaaatattgttttgatcaaatacaaagagg

SEQ ID NO: 92303 - DNA, 1085 bp, Homo sapiens
taatagtaatcagcttcacaagatacaaagaaaaactaaaagctgagaaaatgcagcagtttctaacattgtaatgagagagtcggtattttagaaccttaagatgttatacatcataagagacacctaaggtcagctgaagtcaaaccactgtcttgcatccatagataattaaaatgaccccatgtttcaagacgtaagtcaaggattttcaggagtacagtaatatttaatggctaaccttcaggaaattttctctgcaacctgggaaaggtactgaaaagaagcttatggaccaagaagagaatttaatgggctcttaacccctttcaattgaggtacaagatgtgggattaagaaatggagcaactatctaagtctcttcattctattttttcactccgttcagaaagagtccagctagcaaagcagtcacttgaaattgtatgtgcatcttcattcttttgagtactgaactttcacgtttatgagagtcttatataggtatcttagacaatctaaaatctcgattttctacctgtaaattagtgtattatagtgatatcaaaaagagtgatttttaatgtgataacggtatcagaatatcacattgaaataaaacactcctgttggactgagagtattataaaactaaaatgctaactttaacttgtaaaagggttcattttctgaccttgaatatgtttaattgttacaaatatgtgttatcctaattaaacatgtctcaataattatatgaagaagctgcaaagcttttaagactcttactaatccagcaacctctggttgcttgtttctaatttgttcattttaatataccaattatgtgaattagagcaaataaacatattgtgaaaaatctctcttctgagactctgaccctcaaatgttttgaatcagatagaacaatccttgttctagctcaattatttagcttctagagtagattaaaggattaaaaagctaatttatttaattgtaaatgagtaacwtatcttgaggtttcacaattttcattgtgaattttcaagtgctaaatattgttttgatcaaatacaaagagg

SEQ ID NO: 92304 - DNA, 1085 bp, Homo sapiens
taatagtaatcagcttcacaagatacaaagaaaaactaaaagctgagaaaatgcagcagtttctaacattgtaatgagagagtcggtattttagaaccttaagatgttatacatcataagagacacctaaggtcagctgaagtcaaaccactgtcttgcatccatagataattaaaatgaccccatgtttcaagacgtaagtcaaggattttcaggagtacagtaatatttaatggctaaccttcaggaaattttctctgcaacctgggaaaggtactgaaaagaagcttatggaccaagaagagaatttaatgggctcttaacccctttcaattgaggtacaagatgtgggattaagaaatggagcaactatctaagtctcttcattctattttttcactccgttcagaaagagtccagctagcaaagcagtcacttgaaattgtatgtgcatcttcattcttttgagtactgaactttcacgtttatgagagtcttatataggtatcttagacaatctaaaatctcgattttctacctgtaaattagtgtattatagtgatatcaaaaagagtgatttttaatgtgataacggtatcagaatatcacattgaaataaaacactcctgttggactgagagtattataaaactaaaatgctaactttaacttgtaaaagggttcattttctgaccttgaatatgtttaattgttacaaatatgtgttatcctaattaaacatgtctcaataattatatgaagaagctgcaaagcttttaagactcttactaatccagcaacctctggttgcttgtttctaatttgttcattttaatataccaattatgtgaattagagcaaataaacatattgtgaaaaatctctcttctgagactctgaccctcaaatgttttgaatcagatagaacaatccttgttctagctcaattatttagcttctagagtagattaaaggattaaaaagctaatttatttaattgtaaatgagtaacttatcttgaggtttcacaattttcattgtgaattttcaagygctaaatattgttttgatcaaatacaaagagg

SEQ ID NO: 92305 - DNA, 740 bp, Homo sapiens
cggatccagtcagatgatggatcagctgttcggcttttacctgctgttcacccaagtttacctacttagaaagagaagactaccagcaacctagagaaagaatagaaagtccagccaccttccaggctttgagtctcagattatgggagtgtggattttcctctggttgtccatggtcactagaggtcaatgatcaagtcatccaacccagacatcgttatttagagctggaaaacagaaaacaagggagcactacatcctgttgggtcacatcctgttcacgatgacaggaagcagggcagcagaccaagacgggtagaaaaacatgacgcttacaaggcatttgcacgctagatgtgcacgtgtgttttggtatacagtttttaaagacactgtgaatcaatgcccatattacgcttttggaaattctcaagtttcttgtcaaataaaattggctaaaagccaagtctttattatctgactgtgctgggcctaaaaccatgccaatttaagaaagagaaaaatatcctatttgccatctgaaaactgatcacaaaggcactgagtgtttcccgcaggaatagaaatgcaatgttgggaaatctcagttacactcctagtgagtatgaggttgtgagtcttgcctggaaaygggaaggttgttgcctttctcaaagggaagggatggattatcccagccgtgggcaccccatagtacattgcctgagaggcatcaggct

SEQ ID NO: 92306 - DNA, 752 bp, Homo sapiens
tatcatgaatattttaaattttcacctaaatttacgtattagagattaaaaaaaaaaaagaaaatgggctgggtgtggtggctcacgcctgtaatcccaacactttgggaggccaaggcaggcagattacctgaggtcaggagttcgagaccagcctggccaaaatggtgaaaccccttctctactaaaaatacaaaaaaattagccgggtgtaatggtgcgtacctgtaatcccagctactcgrgaggctgagacaggagaatctcttgaacccaggaggcagaggttgcagtgagctgagatcacgccactgcactctagcctaggaggcagagtgaggctccgtctcaaaaaaaaaaaaaaatagaaaataacaattagacctactgttggtgctgatggatgaagcagcagaatgatgacagtaagcagtggctttcctgcctggctttgcctttggggccttcaacatttagtatttcagcttggcctctaaaaaaatgggagcttacgaatagctaccttacaaatatattaggtggaaaaatcactggtgtgtgattttggggccaccaagatgcaaatatgtagtatcaaatgcatcaatacggacaaagggttccaatatctgggcaggccaccaggcagaactgcctccttcagttgtttatgtcattcacttctttcttttcttttttccctcagttttcagccattccttcctcaaaatcctgctcaagtctaagagcaa

SEQ ID NO: 92307 - DNA, 1280 bp, Homo sapiens
tttttagaactctactcaatgccccttgaaatattaagttttccactctggctattgggaaaaggaactatttcttactttgttgagccttgacccctgttccaccttactattttaggtgcttctttcccctgcctctgttagtttcctcacacacatgcactgagggggaccctctgcagatcttgagttctctttgtacatctcattcctgtgtcatactgtcctgtgaattctagccgacttaacttccttgaattctaagcttcatcttctgaactcaaggagacagctaggcttccaccctctgaaaacttttcccaggcagtaagttgaggcaattgtaggtctcacctcatctgtttcccatctcttgaggattactgtccttcattgcctgatgtttaatggcttgagtgtcattgtttcatacgtcttgtctaaagttgtttcaggtcagaagaactgctgttccatcttgattagaaatggactacatactatttcgaggtcacattcgtattcattattgaattgacatgcacaaataaatactctcaatacttattctaagagaaggaagactggttttgctcatgactatcttttccctggcctccaagctccaagactcatctgttataacattgttagatggtttaaaattttgaattctaggtgaagctgttacaatgtttgtttgccacaaaccagggaagcctcagaggagtaaagagcagttcaaataaaagtgaattttctctccctttacagtttgcttgctgaagtatgacaggtgtaccatattgtaatgggagtaaatatcagattatgttttctgtggatttcttgtaaccaggtcaacccagcactgtagataaggcccatgcccttcaagaagtagaaatattttcttttaaaatatagtgttggcaatagcaaagacatgaaatcaacccgaatgctcgttgacgacagactggataaagaaaatgtggtacatatacaccgtggaatactatgcagctataaaaaggaatgagagtatgtcctttgcagggaaacggatggagctggaagttggtatccttaacaaactaacgcaggaacagaaaaccaaacaccrcgtgttcttgcttataagtcggagccgaatgatgagaacacatggacacatggggtgggggaacaacatacaattgggcctgtcagtggagcagagggagggaacgcatcaggaagaaccgctaatgggtgctgaacttaatacctaggggatg

SEQ ID NO: 92308 - DNA, 1280 bp, Homo sapiens
tttttagaactctactcaatgccccttgaaatattaagttttccactctggctattgggaaaaggaactatttcttactttgttgagccttgacccctgttccaccttactattttaggtgcttctttcccctgcctctgttagtttcctcacacacatgcactgagggggaccctctgcagatcttgagttctctttgtacatctcattcctgtgtcatactgtcctgtgaattctagccgacttaacttccttgaattctaagcttcatcttctgaactcaaggagacagctaggcttccaccctctgaaaacttttcccaggcagtaagttgaggcaattgtaggtctcacctcatctgtttcccatctcttgaggattactgtccttcattgcctgatgtttaatggcttgagtgtcattgtttcatacgtcttgtctaaagttgtttcaggtcagaagaactgctgttccatcttgattagaaatggactacatactatttcgaggtcacattcgtattcattattgaattgacatgcacaaataaatactctcaatacttattctaagagaaggaagactggttttgctcatgactatcttttccctggcctccaagctccaagactcatctgttataacattgttagatggtttaaaattttgaattctaggtgaagctgttacaatgtttgtttgccacaaaccagggaagcctcagaggagtaaagagcagttcaaataaaagtgaattttctctccctttacagtttgcttgctgaagtatgacaggtgtaccatattgtaatgggagtaaatatcagattatgttttctgtggatttcttgtaaccaggtcaacccagcactgtagataaggcccatgcccttcaagaagtagaaatattttcttttaaaatatagtgttggcaatagcaaagacatgaaatcaacccgaatgctcgttgacgacagactggataaagaaaatgtggtacatatacaccgtggaatactatgcagctataaaaaggaatgagagtatgtcctttgcagggaaacggatggagctggaagttggtatccttaacaaactaacgcaggaacagaaaaccaaacaccgcgtgttcttgcttataagtcggagccgaatgatgagaacacatggacacatggggtgggggaacaacatacaattgggcctgtcagtggagcagagggagggaacrcatcaggaagaaccgctaatgggtgctgaacttaatacctaggggatg

SEQ ID NO: 92309 - DNA, 597 bp, Homo sapiens
accgagcaaggcggctagtaagtttagtcattgaggaaaggggtcagagagttcacagagccagtaaggagcctatgggacatctgatcccacctcctaagcaattctggaatcttgtcttcagcatccactgcccctgtgttttcagactccaggagctcattgttttgtgagtggcttatagtactctagccagctctctgaaccggatgctggttctgccattrgaaacaacacagaatatgactaataaagaacttcactagggggctgggtacagtggctcatgcctgtaatctcagcactttgggaggccaaggtgggaggattgcttgagcccaaaagttccagacaaacctggacaagatagcaagaccccatctctaaaaaataaataattaattaaaaaaaatttttttaattagccagatgtggtggcttgcatctgtagtccaagctactcaggagactgaagtgggagatcacttgtgcccgggagttcaaggctacagtgagccatgattgtatcactgcactctagcctgggtgacagagcgagaccctgtctctgaaacaaaacaaaacaaactcacctat

SEQ ID NO: 92310 - DNA, 779 bp, Homo sapiens
ttttactgtgtctctagttttgctttttcagaatgttgtagagttggtagcatacattatgtagtctttccaggctagctgctgctgctttttttttttttttttttttttttkgagacggagtttttgctcttgttgcccaggctggagtgcaatggtgcaatcttggctcactgcaacctccttctcccaggttcaagtgattcttctgcctcagtttcccaagtagctgtgattacaggcatgcgccaccacacctggctaattttttgtatttgtagtagagacggggtttcaccatgttggtcaggctggtctcgaactcctgacctcaggtcatccacctgcctcggcctcccaaagtgctaggattacagatgtgagccaccgtgcctcacccagactggcttctttcactgagcagtaggcatttaagtttcctgcatgtcttcttgtgactttttagctcaccgataatactctctttgaatataattttttttttcttcttaaaggttactgggcactctgcttccttcctttcagtgtcttggtgttttagaagtgaaatccttcactcctgagcttgtcaaggtagcaggtcatgtttcggtgtttggatgtcatcagtggggttcaccaggctttcagaagtttgcccgtcctgcccttctttttttttttttttcaaagcatttggttcctttgcaaagaaagaaatgaaaacattttaactttatattcagaatttaagtggcattgctcaatttcacttatta

SEQ ID NO: 92311 - DNA, 731 bp, Homo sapiens
tctgaaataatagcttcatggaataaagcttacccttattcaatttggtgtactctgaaatrttctattctactctatttaactttttaaaatgctgtttgagaccattatattgattttatgttccacacttcaaacatcactgcttagggttttacttattttgcttttctgaatggcaaccatcttgagacaagatggttttaaatgcacttaatttagtcctgttttcttttctgggatattccgtatctctaaatacaaatatgaaaaggagtttattagctacaatggaaggatattgagaaaaatcaatatatgattgccccacaatttaaggaaactttaccatcttttacattcctggcccattcaaattctttcattcctctctgttcctttcatatttttaccaaagactgacttccagttgttattaggcataacaggcttattaaacggaagagcggagactaacatttaataagcaccaattatgtacaaggtaccttgcatacattatttcttcccaataactactcatggtatttttttattcatactgttattgcatatattatttattcccaataactacttatggtattttttatttcagacttttaagcttataagaaaacagggatttagagagataaaataacttactcagggtcaaaaagttcaaaaagctggtttgtggtagagctggcccccaaactgaggcctga

SEQ ID NO: 92312 - DNA, 620 bp, Homo sapiens
atgtgtcttttttccttccagtctctaattgctagagatgtgcatgtctcctttctgcttccctcctctrtgttcaaatacagcttaggggatagatgttctggccatgaaaagagacaggtgggaggctgtgggcttccctcctgtctatgtcttcctttcttgggcatcattaacttattacaaaccagtggaaacttgccaatttgctgcacagctgatgacttgctattgtatctcagctttcttctgcggagagctagataacgaatcagatcaattgtttttgagcccagaggcatggacaagagggtgtatgtctgtatgtctgtgtgtatgtgctggaggagtgaataaatggagttgggagtggcaccttcctaacctcatacatgttgaggcaaggtgaatttcttcaggcttctgctaaggagaagacatttcaaattaagattttcatcttcctctacaactactaaaccacagttactgcaaaacagaataaaaataacctcaagttttaaattcacaggataatggacttgaagcattgtcagtggtctgacctgccttttagttcacgtttatcaaatgctttaatctcttctgggttttttgtt

SEQ ID NO: 92313 - DNA, 2503 bp, Homo sapiens
ggtgcagctatagcaatacacatgttaaacattaatattagaagtggtgctagtactatagcccttcatttaattgaaggcagctaacttctactcccttagagtcttgtagttcctcatgataccattacaatcttccatgtcagactagcttctcatatctggacctactctgctctgttaataatatgcttaatgtaacactcatctstcaacacactcctaggtatggtctgagcaatgaagagtaaagctgtgctcttcttggttctagactttagtggtcaccttactgttaactcatattgatctctctgatgcccagataattgaatgaaaagttaggagagaaggaaaaatgtccagttgaatgtgtttataaaatctacattattggtgtggactgcaaaaaagtctgcttggaaacctacctctaattcaggtccaatgtctggagctttaaatccataggtgacagataaaggataaggaagaggaggaggatactcagagaagagagatagcacttgatagtctgtaacccttatcagaacagtgcctggagtgtgagcttccttctgaggttatcagagtctcctgtgttgcacagagaggggcttggttttgaggttctatcacagcctctctgtctctgtctctgtctctctctctctgtctctttctttttatcacatttctctacctcattgtgcacattagcaatataagagcattcttcaagacccgtccacccgtacatgcaggctccctgtgcaaatggctccctaggatggatctctattatttcaccaaaaaacatcagagaaggaatttgttctgctctgctgaagacatgatttcctgtcctctctactgccttagctcagttttttggctgctgtttgggaaggggatagagaagaaaggagttatctataatatttagctgagccagttttaaccagggccaaaacaaggaaaagaagaagacaattcaggattatctaccatgggatagaaacaatttctgggatgcatatgggaccccatatctatacagcagcctccatacatgcttgggacagtccagcactccacagtttgatctcttctctgttccctccacactcttcttttgctcctcttcctgtatttcagagtggttaagatcatggaagtcagacaagctatgggctctctccataatgtcactcacttcctaggcttgtggtgagtggcatatgaggtaatggtgcctggtgtagagtaaacactaaacacacaatgagtgaatgatattacagttttcttatttaaatccttattatatatatctttatccccattaagtaaacaaaggacaactgagaggctcagaacatcaatgtcattgtactcaagggtaagcagatgctaacaggcagaaccaggatttggaccttgatgtatataataataaaataatttttcacatgttttaaccatttgttttatctcatccttttgtatgtatactgtttaattaaggatgtgttaagcagaatttgtaactagggtttactagtaaaaatgaagtgataatattgcaaacttttataatgacctagcttaccaaatgctttaagatacatgtcacagtagttttaatttcctgaggctgagagaggcttggtgaagtgtccaaagtcacacagcaactaacatggaacttgagtgccattcttctgcttccagatctgctgagtttccaattcaggatcctctgctacaccccaaatgttactctctagcttcctgcttgtgtttttgttgatggtgacggcatgtaatcatgaataatgaagccagcctgctcttactgtcatgtagaaatgggaaatggaaattataagccattaaatggaaaatcccaagcctcatagtaacgccaacttagcctcaatccattattgtctatatatttagccagtctatttttaagagtttaatattgagaaataggacatatttataatgtggctgcattaattttgctctaacatccctgccattcgttatagttgacttacatatgtttaattttataaccaccctattgcactgggaagatttgccttagtttcaaagaagatgggtggaaaatctgacagttgaagtagtgagaatttatacagattccacattctgctctctcctcatccccattcccagccatattatgggtaagtaatatactcttgtcacaatgcatatttttatacccttcattgagtgcctggtcatacatgcctggaaacatgtgttcattcattcggcaagcatagctcaactctaaaaactgtgaatggatgtgttaacagtctctaatgccactgacgagggatacctctagtttcaggtgattgtcaattcttggatcatcctcacaattatcactaatgtggtctaaaggaaaggtggctgtgaggaggaccatttatttcaccctcttctgtatggaagt

SEQ ID NO: 92314 - DNA, 1972 bp, Homo sapiens
tggtaagctcttgataaataagaatacaatgacaacacacgatgctagtgttactaccctgtagagtactggctgaatgtaagaggctgtatttctactggctctagcccttattctttaatttaaatattcatctttggagactcagagaggtaattacattaagaggcaagcaaagcaaagagactgtaattgggactgtaactcccacccttctccattcctccctacccacctctcctcagccctcttctccaaggtcagtttgtttaaattcggacttggacttcaccaggaattggtttcacattcttcttactcactgtatcaaatgagtatgagcagccatattctttcctctcatctctgcgacatgcctgtctgtgcttttggaggctgatgtcaccacagcagttaactcacatgcctggcacgtagcgtacacccgaacaatatttgttgaattgcatcgaatttataggaattaaggagacaggattttggatacattttcatctctgtggtgcatgaccttggattagccacgcccccttctccaggtctcagtttctcacttgtgaaaacagggatttctcaggcttcttccagcttagctatagcatagtgggcagagatctgaactgggagtcagtaaaccagggttgggggcccagatatgccactaactcatggtaaaaaagttgctttccctctctgtgcctcagttttctcatttgtgttatgggacgatttctacatacccacctcccactccacattcctgaatttcatttaaggccttttgagggttcaaggtcacagcctttaaacagtatttgccataacaggaaaaaagatatgattccttctatcatcttgatgtggccacattttactggaggcttctggaatcttgctggataaaatctcccataacaactcacagcaataatgatcattaatattgtatataatcattaaaataagtagcatcatattactttcaacttaaatggtatcttttagctgagagtctgctgatgctttagcatgacaagtgaaggaaaggaggcactgctgttggagttgctcacttaaatcttccttacatgcattttaaacctaaaggaagagatgggagaagttatttgatatagcattagattttgttttagaagctattgcttcacagaggttgaggctgtagcgagccaccgttgcaccactgcattccagcatgggtgacatagcgagaccctgccaccatgaaaaaaaaaaaaaaaaaagctgcatgtggcatctgtgccaggttctgttactttccagctgtatgattgtggtcaaagtgacacaacctctctgtgtctcagtctactcacctgtgaaggcttctctgcacatttcacagggttcttacaaagatcacctaagatagtaggtgcaaaaatgtgttgtcaactgttaagctctctacaaacacaagacattgccattatggtaataaaaatcaaatggcacatgaatatttcagaagcaaggactaggacagatgtgtaaagtattcccttctaatggggttttataaatacatgctccctcttcttattactaacttcttaataatctctttgcaaagcttgtcttcaaacaccctttgtctcccccatcatttcttcttaacatctcctctctcacacagctatttacttttgaactctgggtggcatttggggagacagttggttagaaaaatatacrcatacatattttgtacagagacataaacaaaatgtatccagggcacctcaattctgagccaagatattaaaaaatatatatcttctttgtgatctgttgcagctgctcatattagcaatacttagtctgaaattaggtttaacaactctatccctatatgtagccacaaatatgttcacatgtggcattaatgtggaaagaaaacaaatgaaat

SEQ ID NO: 92315 - DNA, 1972 bp, Homo sapiens
tggtaagctcttgataaataagaatacaatgacaacacacgatgctagtgttactaccctgtagagtactggctgaatgtaagaggctgtatttctactggctctagcccttattctttaatttaaatattcatctttggagactcagagaggtaattacattaagaggcaagcaaagcaaagagactgtaattgggactgtaactcccacccttctccattcctccctacccacctctcctcagccctcttctccaaggtcagtttgtttaaattcggacttggacttcaccaggaattggtttcacattcttcttactcactgtatcaaatgagtatgagcagccatattctttcctctcatctctgcgacatgcctgtctgtgcttttggaggctgatgtcaccacagcagttaactcacatgcctggcacgtagcgtacacccgaacaatatttgttgaattgcatcgaatttataggaattaaggagacaggattttggatacattttcatctctgtggtgcatgaccttggattagccacgcccccttctccaggtctcagtttctcacttgtgaaaacagggatttctcaggcttcttccagcttagctatagcatagtgggcagagatctgaactgggagtcagtaaaccagggttgggggcccagatatgccactaactcatggtaaaaaagttgctttccctctctgtgcctcagttttctcatttgtgttatgggacgatttctacatacccacctcccactccacattcctgaatttcatttaaggccttttgagggttcaaggtcacagcctttaaacagtatttgccataacaggaaaaaagatatgattccttctatcatcttgatgtggccacattttactggaggcttctggaatcttgctggataaaatctcccataacaactcacagcaataatgatcattaatattgtatataatcattaaaataagtagcatcatattactttcaacttaaatggtatcttttagctgagagtctgctgatgctttagcatgacaagtgaaggaaaggaggcactgctgttggagttgctcacttaaatcttccttacatgcattttaaacctaaaggaagagatgggagaagttatttgatatagcattagattttgttttagaagctattgcttcacagaggttgaggctgtagcgagccaccgttgcaccactgcattccagcatgggtgacatagcgagaccctgccaccatgaaaaaaaaaaaaaaaaaagctgcatgtggcatctgtgccaggttctgttactttccagctgtatgattgtggtcaaagtgacacaacctctctgtgtctcagtctactcacctgtgaaggcttctctgcacatttcacagggttcttacaaagatcacctaagatagtaggtgcaaaaatgtgttgtcaactgttaagctctctacaaacacaagacattgccattatggtaataaaaatcaaatggcacatgaatatttcagaagcaaggactaggacagatgtgtaaagtattcccttctaatggggttttataaatacatgctccctcttcttattactaacttcttaataatctctttgcaaagcttgtcttcaaacaccctttgtctcccccatcatttcttcttaacatctcctctctcacacagctatttacttttgaactctgggtggcatttggggagacagttggttagaaaaatatacacatacatattttgtacagagacataaacaaaatgtatccagggcacctcaattctgagccaagatattaaaaaatatatatcttctttgtgatctgttgcagctgctcatattagcaatacttagtctgaaattagktttaacaactctatccctatatgtagccacaaatatgttcacatgtggcattaatgtggaaagaaaacaaatgaaat

SEQ ID NO: 92316 - DNA, 599 bp, Homo sapiens
atcgcctttggtctcccatttgattcctgacagccatctccctcccttcgatggcgggctgtcaggtgctgagctggctggcattgcacaggaagaggagtacagagaacaatttaaacaatatttcagggaccatcatgggctggaggagggagtttttatagttagctggctttctttctgcattcaaggaaccctcatttgccaagactgcttgacgtttctgtgggtttgggtagaagtagtccagaagggatctttaagaaaaaaaaaaaaaaaagccaatgtctattttctttgaggtttgaaggaagggagagaatagagacagataggagctttttaagcccataacaatttctgaatacataattttctcttctctaatgtctcgttaaatagggccaaatgcagatgtagatcaaagctaggyttctgtattttactgcattttactgtgcttgcaagtaaagggaatccaaactcccagtttctctgtccgtgagagaaactagaatctctccagaaagcctgtataaactaccagaaccttctggaggaaggagtccactcccacaaaccacaaacagctgaacatt

SEQ ID NO: 92317 - DNA, 599 bp, Homo sapiens
atcgcctttggtctcccatttgattcctgacagccatctccctcccttcgatggcgggctgtcaggtgctgagctggctggcattgcacaggaagaggagtacagagaacaatttaaacaatatttcagggaccatcatgggctggaggagggagtttttatagttagctggctttctttctgcattcaaggaaccctcatttgccaagactgcttgacgtttctgtgggtttgggtagaagtagtccagaagggatctttaagaaaaaaaaaaaaaaaagccaatgtctattttctttgaggtttgaaggaagggagagaatagagacagataggagctttttaagcccataacaatttctgaatacataattttctcttctctaatgtctcgttaaatagggccaaatgcagatgtagatcaaagctaggtttctgtattttacygcattttactgtgcttgcaagtaaagggaatccaaactcccagtttctctgtccgtgagagaaactagaatctctccagaaagcctgtataaactaccagaaccttctggaggaaggagtccactcccacaaaccacaaacagctgaacatt

SEQ ID NO: 92318 - DNA, 735 bp, Homo sapiens
tcagcctgagcaacaaagcaagaccctgtctcaaaaaaaaaaaaaaatgctgaaaacagtgactgtagtcatctctggggaaaaggattctgaatgactttcactttctcctttgtgtctttccatattttccactgtggtatttctaataggaaaaaaagaagtatgtctattttttacttgtttaatcttaaagcttttaattggatgtcccagaagagaaagatgtctacatttggatttttctgtcttattaaccactatattcccagaacctaaaacagtgactggaatacaaagggcatccatatgtacctatcgaataaagcagccggcatgtgtatccagaacattccaacattccacaaggggagaaataattggcattttttgcctcagtttctttcacaaagcaatagactcattcattaaacctcatcatccccttcccacctgttggcctaaggcccctgggctgcatcctcatggcccstgtaagtgggcagagacattgctgggtataccccactggtgtttcatcaccatggagcctgctggtctggggagaaatacagaggctgcaacctgctctcctacctgagagtcctgggacatgcccctcaaattacgacaaccacccaccagcccctgaagtgagttggaacagaacgccacccagcttgtcacaggtagtataggatttggagatagagcagtgttggattcacaaaaaca

SEQ ID NO: 92319 - DNA, 846 bp, Homo sapiens
tttaaagagatagtgatgaagttaatatgagttagctaggtcgggcccaatccactagcactggtatccttacaagaagggaaatgtggacacagacaccaggatgcgtgtgtagaggaaagatcatgtgaggacatggctagaaggcagccatcggcaagccaaggagaggtttcaggagaaacccaaccagccgatacctgggtctccagctgctctccagcgtcagaaccgtgagaaaagtttctgtggtgaagccactcagtctggcattttgttcgggcactaatgcagtagctttgtataatgcaaacactttgagtctgaatatcaattcccccgcatactaactatgcccccaggttctctgggggcagatttttaaaaataaaccttttaaaattttagaatagtttttttttttttttttttttttgagacggagtcttgctctgtcaccaggctggagtgccgtggcgcgatctcggctcactgcaacctctgcctcccaggttcaagcgattctcctgcctcagcctctcgagtagctgggactacaggtgcrtgccaccacgccaggctaagtttttgtattttagtagagacggggtttcaccatgttcaccaagctggtctactctcctggcctcgtgatctgcccacctcggcctcccaaagtgctgggattacaggtgtgagccactgcacccggcctagaatagttttatgcttacagaaaaggtgcaaagatagtagagttcccatagccccattcccagtatcccctactattaacgtttgatgttaatatggtactattaaaatagtattgtcacaattaacaag
